United States Patent Application Publication US 2018/0305689 A1 - sequence listing, part 150

SEQ ID NO: 2124978 - RNA, 19 nt, Artificial Sequence
  Description of Artificial Sequence: Synthetic oligonucleotide
  Sense strand starting at position 3089 of SEQ ID NO: 1882487
aauuguuuggcacagaggu

SEQ ID NO: 2124979 - RNA, 19 nt, Artificial Sequence
  Description of Artificial Sequence: Synthetic oligonucleotide
  Antisense strand to SEQ ID NO: 2124978
accucugugccaaacaauu

SEQ ID NO: 2124980 - RNA, 19 nt, Artificial Sequence
  Description of Artificial Sequence: Synthetic oligonucleotide
  Sense strand starting at position 3125 of SEQ ID NO: 1882487
gagguucggagauaguuga

SEQ ID NO: 2124981 - RNA, 19 nt, Artificial Sequence
  Description of Artificial Sequence: Synthetic oligonucleotide
  Antisense strand to SEQ ID NO: 2124980
ucaacuaucuccgaaccuc

SEQ ID NO: 2124982 - RNA, 19 nt, Artificial Sequence
  Description of Artificial Sequence: Synthetic oligonucleotide
  Sense strand starting at position 3286 of SEQ ID NO: 1882487
ugagacacuucuuauuuga

SEQ ID NO: 2124983 - RNA, 19 nt, Artificial Sequence
  Description of Artificial Sequence: Synthetic oligonucleotide
  Antisense strand to SEQ ID NO: 2124982
ucaaauaagaagugucuca

SEQ ID NO: 2124984 - RNA, 19 nt, Artificial Sequence
  Description of Artificial Sequence: Synthetic oligonucleotide
  Sense strand starting at position 3293 of SEQ ID NO: 1882487
cuucuuauuugacaaggga

SEQ ID NO: 2124985 - RNA, 19 nt, Artificial Sequence
  Description of Artificial Sequence: Synthetic oligonucleotide
  Antisense strand to SEQ ID NO: 2124984
ucccuugucaaauaagaag

SEQ ID NO: 2124986 - RNA, 19 nt, Artificial Sequence
  Description of Artificial Sequence: Synthetic oligonucleotide
  Sense strand starting at position 3467 of SEQ ID NO: 1882487
aacuguuuggaagguuuga

SEQ ID NO: 2124987 - RNA, 19 nt, Artificial Sequence
  Description of Artificial Sequence: Synthetic oligonucleotide
  Antisense strand to SEQ ID NO: 2124986
ucaaaccuuccaaacaguu

SEQ ID NO: 2124988 - RNA, 19 nt, Artificial Sequence
  Description of Artificial Sequence: Synthetic oligonucleotide
  Sense strand starting at position 3849 of SEQ ID NO: 1882487
ugcuaaccaucccugagau

SEQ ID NO: 2124989 - RNA, 19 nt, Artificial Sequence
  Description of Artificial Sequence: Synthetic oligonucleotide
  Antisense strand to SEQ ID NO: 2124988
aucucagggaugguuagca

SEQ ID NO: 2124990 - RNA, 19 nt, Artificial Sequence
  Description of Artificial Sequence: Synthetic oligonucleotide
  Sense strand starting at position 3878 of SEQ ID NO: 1882487
gucagucuuagcgucucau

SEQ ID NO: 2124991 - RNA, 19 nt, Artificial Sequence
  Description of Artificial Sequence: Synthetic oligonucleotide
  Antisense strand to SEQ ID NO: 2124990
augagacgcuaagacugac

SEQ ID NO: 2124992 - RNA, 19 nt, Artificial Sequence
  Description of Artificial Sequence: Synthetic oligonucleotide
  Sense strand starting at position 3889 of SEQ ID NO: 1882487
cgucucauccuggaacaga

SEQ ID NO: 2124993 - RNA, 19 nt, Artificial Sequence
  Description of Artificial Sequence: Synthetic oligonucleotide
  Antisense strand to SEQ ID NO: 2124992
ucuguuccaggaugagacg

SEQ ID NO: 2124994 - RNA, 19 nt, Artificial Sequence
  Description of Artificial Sequence: Synthetic oligonucleotide
  Sense strand starting at position 3924 of SEQ ID NO: 1882487
cuuaguguucaugugugca

SEQ ID NO: 2124995 - RNA, 19 nt, Artificial Sequence
  Description of Artificial Sequence: Synthetic oligonucleotide
  Antisense strand to SEQ ID NO: 2124994
ugcacacaugaacacuaag

SEQ ID NO: 2124996 - RNA, 19 nt, Artificial Sequence
  Description of Artificial Sequence: Synthetic oligonucleotide
  Sense strand starting at position 56 of SEQ ID NO: 1882488
cacguuguggaagacuaaa

SEQ ID NO: 2124997 - RNA, 19 nt, Artificial Sequence
  Description of Artificial Sequence: Synthetic oligonucleotide
  Antisense strand to SEQ ID NO: 2124996
uuuagucuuccacaacgug

SEQ ID NO: 2124998 - RNA, 19 nt, Artificial Sequence
  Description of Artificial Sequence: Synthetic oligonucleotide
  Sense strand starting at position 229 of SEQ ID NO: 1882488
guugcauugaagcaugaca

SEQ ID NO: 2124999 - RNA, 19 nt, Artificial Sequence
  Description of Artificial Sequence: Synthetic oligonucleotide
  Antisense strand to SEQ ID NO: 2124998
ugucaugcuucaaugcaac

SEQ ID NO: 2125000 - RNA, 19 nt, Artificial Sequence
  Description of Artificial Sequence: Synthetic oligonucleotide
  Sense strand starting at position 231 of SEQ ID NO: 1882488
ugcauugaagcaugacaga

SEQ ID NO: 2125001 - RNA, 19 nt, Artificial Sequence
  Description of Artificial Sequence: Synthetic oligonucleotide
  Antisense strand to SEQ ID NO: 2125000
ucugucaugcuucaaugca

SEQ ID NO: 2125002 - RNA, 19 nt, Artificial Sequence
  Description of Artificial Sequence: Synthetic oligonucleotide
  Sense strand starting at position 342 of SEQ ID NO: 1882488
ugguuuaugcuucaggagu

SEQ ID NO: 2125003 - RNA, 19 nt, Artificial Sequence
  Description of Artificial Sequence: Synthetic oligonucleotide
  Antisense strand to SEQ ID NO: 2125002
acuccugaagcauaaacca

SEQ ID NO: 2125004 - RNA, 19 nt, Artificial Sequence
  Description of Artificial Sequence: Synthetic oligonucleotide
  Sense strand starting at position 388 of SEQ ID NO: 1882488
guuugaguucuuuaacuaa

SEQ ID NO: 2125005 - RNA, 19 nt, Artificial Sequence
  Description of Artificial Sequence: Synthetic oligonucleotide
  Antisense strand to SEQ ID NO: 2125004
uuaguuaaagaacucaaac

SEQ ID NO: 2125006 - RNA, 19 nt, Artificial Sequence
  Description of Artificial Sequence: Synthetic oligonucleotide
  Sense strand starting at position 483 of SEQ ID NO: 1882488
uagguuaacuaguuuaaag

SEQ ID NO: 2125007 - RNA, 19 nt, Artificial Sequence
  Description of Artificial Sequence: Synthetic oligonucleotide
  Antisense strand to SEQ ID NO: 2125006
cuuuaaacuaguuaaccua

SEQ ID NO: 2125008 - RNA, 19 nt, Artificial Sequence
  Description of Artificial Sequence: Synthetic oligonucleotide
  Sense strand starting at position 493 of SEQ ID NO: 1882488
aguuuaaagagucaaggca

SEQ ID NO: 2125009 - RNA, 19 nt, Artificial Sequence
  Description of Artificial Sequence: Synthetic oligonucleotide
  Antisense strand to SEQ ID NO: 2125008
ugccuugacucuuuaaacu

SEQ ID NO: 2125010 - RNA, 19 nt, Artificial Sequence
  Description of Artificial Sequence: Synthetic oligonucleotide
  Sense strand starting at position 535 of SEQ ID NO: 1882488
aaaggaagccuguguccaa

SEQ ID NO: 2125011 - RNA, 19 nt, Artificial Sequence
  Description of Artificial Sequence: Synthetic oligonucleotide
  Antisense strand to SEQ ID NO: 2125010
uuggacacaggcuuccuuu

SEQ ID NO: 2125012 - RNA, 19 nt, Artificial Sequence
  Description of Artificial Sequence: Synthetic oligonucleotide
  Sense strand starting at position 539 of SEQ ID NO: 1882488
gaagccuguguccaagagu

SEQ ID NO: 2125013 - RNA, 19 nt, Artificial Sequence
  Description of Artificial Sequence: Synthetic oligonucleotide
  Antisense strand to SEQ ID NO: 2125012
acucuuggacacaggcuuc

SEQ ID NO: 2125014 - RNA, 19 nt, Artificial Sequence
  Description of Artificial Sequence: Synthetic oligonucleotide
  Sense strand starting at position 645 of SEQ ID NO: 1882488
uccucuucuccagagagcu

SEQ ID NO: 2125015 - RNA, 19 nt, Artificial Sequence
  Description of Artificial Sequence: Synthetic oligonucleotide
  Antisense strand to SEQ ID NO: 2125014
agcucucuggagaagagga

SEQ ID NO: 2125016 - RNA, 19 nt, Artificial Sequence
  Description of Artificial Sequence: Synthetic oligonucleotide
  Sense strand starting at position 1336 of SEQ ID NO: 1882488
aaugaauuaccaugugggu

SEQ ID NO: 2125017 - RNA, 19 nt, Artificial Sequence
  Description of Artificial Sequence: Synthetic oligonucleotide
  Antisense strand to SEQ ID NO: 2125016
acccacaugguaauucauu

SEQ ID NO: 2125018 - RNA, 19 nt, Artificial Sequence
  Description of Artificial Sequence: Synthetic oligonucleotide
  Sense strand starting at position 1408 of SEQ ID NO: 1882488
gucuguuaacaugaagcua

SEQ ID NO: 2125019 - RNA, 19 nt, Artificial Sequence
  Description of Artificial Sequence: Synthetic oligonucleotide
  Antisense strand to SEQ ID NO: 2125018
uagcuucauguuaacagac

SEQ ID NO: 2125020 - RNA, 19 nt, Artificial Sequence
  Description of Artificial Sequence: Synthetic oligonucleotide
  Sense strand starting at position 1612 of SEQ ID NO: 1882488
cucuucuuuggccaugaaa

SEQ ID NO: 2125021 - RNA, 19 nt, Artificial Sequence
  Description of Artificial Sequence: Synthetic oligonucleotide
  Antisense strand to SEQ ID NO: 2125020
uuucauggccaaagaagag

SEQ ID NO: 2125022 - RNA, 19 nt, Artificial Sequence
  Description of Artificial Sequence: Synthetic oligonucleotide
  Sense strand starting at position 1657 of SEQ ID NO: 1882488
auguguagaaggugacaaa

SEQ ID NO: 2125023 - RNA, 19 nt, Artificial Sequence
  Description of Artificial Sequence: Synthetic oligonucleotide
  Antisense strand to SEQ ID NO: 2125022
uuugucaccuucuacacau

SEQ ID NO: 2125024 - RNA, 19 nt, Artificial Sequence
  Description of Artificial Sequence: Synthetic oligonucleotide
  Sense strand starting at position 1771 of SEQ ID NO: 1882488
ccauuuauuucugauguca

SEQ ID NO: 2125025 - RNA, 19 nt, Artificial Sequence
  Description of Artificial Sequence: Synthetic oligonucleotide
  Antisense strand to SEQ ID NO: 2125024
ugacaucagaaauaaaugg

SEQ ID NO: 2125026 - RNA, 19 nt, Artificial Sequence
  Description of Artificial Sequence: Synthetic oligonucleotide
  Sense strand starting at position 1773 of SEQ ID NO: 1882488
auuuauuucugaugucaga

SEQ ID NO: 2125027 - RNA, 19 nt, Artificial Sequence
  Description of Artificial Sequence: Synthetic oligonucleotide
  Antisense strand to SEQ ID NO: 2125026
ucugacaucagaaauaaau

SEQ ID NO: 2125028 - RNA, 19 nt, Artificial Sequence
  Description of Artificial Sequence: Synthetic oligonucleotide
  Sense strand starting at position 1799 of SEQ ID NO: 1882488
gaaauaucacaaggugucu

SEQ ID NO: 2125029 - RNA, 19 nt, Artificial Sequence
  Description of Artificial Sequence: Synthetic oligonucleotide
  Antisense strand to SEQ ID NO: 2125028
agacaccuugugauauuuc

SEQ ID NO: 2125030 - RNA, 19 nt, Artificial Sequence
  Description of Artificial Sequence: Synthetic oligonucleotide
  Sense strand starting at position 2111 of SEQ ID NO: 1882488
cauggauccggaggauugu

SEQ ID NO: 2125031 - RNA, 19 nt, Artificial Sequence
  Description of Artificial Sequence: Synthetic oligonucleotide
  Antisense strand to SEQ ID NO: 2125030
acaauccuccggauccaug

SEQ ID NO: 2125032 - RNA, 19 nt, Artificial Sequence
  Description of Artificial Sequence: Synthetic oligonucleotide
  Sense strand starting at position 2227 of SEQ ID NO: 1882488
ucaguaucaccuggaccuu

SEQ ID NO: 2125033 - RNA, 19 nt, Artificial Sequence
  Description of Artificial Sequence: Synthetic oligonucleotide
  Antisense strand to SEQ ID NO: 2125032
aagguccaggugauacuga

SEQ ID NO: 2125034 - RNA, 19 nt, Artificial Sequence
  Description of Artificial Sequence: Synthetic oligonucleotide
  Sense strand starting at position 2360 of SEQ ID NO: 1882488
ggagcacuggcuuagggaa

SEQ ID NO: 2125035 - RNA, 19 nt, Artificial Sequence
  Description of Artificial Sequence: Synthetic oligonucleotide
  Antisense strand to SEQ ID NO: 2125034
uucccuaagccagugcucc

SEQ ID NO: 2125036 - RNA, 19 nt, Artificial Sequence
  Description of Artificial Sequence: Synthetic oligonucleotide
  Sense strand starting at position 2686 of SEQ ID NO: 1882488
gacuuuacauggcucagau

SEQ ID NO: 2125037 - RNA, 19 nt, Artificial Sequence
  Description of Artificial Sequence: Synthetic oligonucleotide
  Antisense strand to SEQ ID NO: 2125036
aucugagccauguaaaguc

SEQ ID NO: 2125038 - RNA, 19 nt, Artificial Sequence
  Description of Artificial Sequence: Synthetic oligonucleotide
  Sense strand starting at position 2747 of SEQ ID NO: 1882488
ggaguaugggaaggcaaau

SEQ ID NO: 2125039 - RNA, 19 nt, Artificial Sequence
  Description of Artificial Sequence: Synthetic oligonucleotide
  Antisense strand to SEQ ID NO: 2125038
auuugccuucccauacucc

SEQ ID NO: 2125040 - RNA, 19 nt, Artificial Sequence
  Description of Artificial Sequence: Synthetic oligonucleotide
  Sense strand starting at position 2971 of SEQ ID NO: 1882488
aaauuugaaugugaaaggu

SEQ ID NO: 2125041 - RNA, 19 nt, Artificial Sequence
  Description of Artificial Sequence: Synthetic oligonucleotide
  Antisense strand to SEQ ID NO: 2125040
accuuucacauucaaauuu

SEQ ID NO: 2125042 - RNA, 19 nt, Artificial Sequence
  Description of Artificial Sequence: Synthetic oligonucleotide
  Sense strand starting at position 2975 of SEQ ID NO: 1882488
uugaaugugaaagguauaa

SEQ ID NO: 2125043 - RNA, 19 nt, Artificial Sequence
  Description of Artificial Sequence: Synthetic oligonucleotide
  Antisense strand to SEQ ID NO: 2125042
uuauaccuuucacauucaa

SEQ ID NO: 2125044 - RNA, 19 nt, Artificial Sequence
  Description of Artificial Sequence: Synthetic oligonucleotide
  Sense strand starting at position 3093 of SEQ ID NO: 1882488
ucauaagagcaaugucuua

SEQ ID NO: 2125045 - RNA, 19 nt, Artificial Sequence
  Description of Artificial Sequence: Synthetic oligonucleotide
  Antisense strand to SEQ ID NO: 2125044
uaagacauugcucuuauga

SEQ ID NO: 2125046 - RNA, 19 nt, Artificial Sequence
  Description of Artificial Sequence: Synthetic oligonucleotide
  Sense strand starting at position 3244 of SEQ ID NO: 1882488
uagagcacuuguuugacau

SEQ ID NO: 2125047 - RNA, 19 nt, Artificial Sequence
  Description of Artificial Sequence: Synthetic oligonucleotide
  Antisense strand to SEQ ID NO: 2125046
augucaaacaagugcucua

SEQ ID NO: 2125048 - RNA, 19 nt, Artificial Sequence
  Description of Artificial Sequence: Synthetic oligonucleotide
  Sense strand starting at position 3245 of SEQ ID NO: 1882488
agagcacuuguuugacaug

SEQ ID NO: 2125049 - RNA, 19 nt, Artificial Sequence
  Description of Artificial Sequence: Synthetic oligonucleotide
  Antisense strand to SEQ ID NO: 2125048
caugucaaacaagugcucu

SEQ ID NO: 2125050 - RNA, 19 nt, Artificial Sequence
  Description of Artificial Sequence: Synthetic oligonucleotide
  Sense strand starting at position 3257 of SEQ ID NO: 1882488
ugacauguuuaauugggca

SEQ ID NO: 2125051 - RNA, 19 nt, Artificial Sequence
  Description of Artificial Sequence: Synthetic oligonucleotide
  Antisense strand to SEQ ID NO: 2125050
ugcccaauuaaacauguca

SEQ ID NO: 2125052 - RNA, 19 nt, Artificial Sequence
  Description of Artificial Sequence: Synthetic oligonucleotide
  Sense strand starting at position 3259 of SEQ ID NO: 1882488
acauguuuaauugggcaga

SEQ ID NO: 2125053 - RNA, 19 nt, Artificial Sequence
  Description of Artificial Sequence: Synthetic oligonucleotide
  Antisense strand to SEQ ID NO: 2125052
ucugcccaauuaaacaugu

SEQ ID NO: 2125054 - RNA, 19 nt, Artificial Sequence
  Description of Artificial Sequence: Synthetic oligonucleotide
  Sense strand starting at position 3261 of SEQ ID NO: 1882488
auguuuaauugggcagaga

SEQ ID NO: 2125055 - RNA, 19 nt, Artificial Sequence
  Description of Artificial Sequence: Synthetic oligonucleotide
  Antisense strand to SEQ ID NO: 2125054
ucucugcccaauuaaacau

SEQ ID NO: 2125056 - RNA, 19 nt, Artificial Sequence
  Description of Artificial Sequence: Synthetic oligonucleotide
  Sense strand starting at position 3262 of SEQ ID NO: 1882488
uguuuaauugggcagagac

SEQ ID NO: 2125057 - RNA, 19 nt, Artificial Sequence
  Description of Artificial Sequence: Synthetic oligonucleotide
  Antisense strand to SEQ ID NO: 2125056
gucucugcccaauuaaaca

SEQ ID NO: 2125058 - RNA, 19 nt, Artificial Sequence
  Description of Artificial Sequence: Synthetic oligonucleotide
  Sense strand starting at position 3339 of SEQ ID NO: 1882488
auguuagucccugaaauca

SEQ ID NO: 2125059 - RNA, 19 nt, Artificial Sequence
  Description of Artificial Sequence: Synthetic oligonucleotide
  Antisense strand to SEQ ID NO: 2125058
ugauuucagggacuaacau

SEQ ID NO: 2125060 - RNA, 19 nt, Artificial Sequence
  Description of Artificial Sequence: Synthetic oligonucleotide
  Sense strand starting at position 3347 of SEQ ID NO: 1882488
cccugaaaucaauagcguu

SEQ ID NO: 2125061 - RNA, 19 nt, Artificial Sequence
  Description of Artificial Sequence: Synthetic oligonucleotide
  Antisense strand to SEQ ID NO: 2125060
aacgcuauugauuucaggg

SEQ ID NO: 2125062 - RNA, 19 nt, Artificial Sequence
  Description of Artificial Sequence: Synthetic oligonucleotide
  Sense strand starting at position 3401 of SEQ ID NO: 1882488
gcugcuuccagagggaaua

SEQ ID NO: 2125063 - RNA, 19 nt, Artificial Sequence
  Description of Artificial Sequence: Synthetic oligonucleotide
  Antisense strand to SEQ ID NO: 2125062
uauucccucuggaagcagc

SEQ ID NO: 2125064 - RNA, 19 nt, Artificial Sequence
  Description of Artificial Sequence: Synthetic oligonucleotide
  Sense strand starting at position 3543 of SEQ ID NO: 1882488
auguucuuugguuaaaggu

SEQ ID NO: 2125065 - RNA, 19 nt, Artificial Sequence
  Description of Artificial Sequence: Synthetic oligonucleotide
  Antisense strand to SEQ ID NO: 2125064
accuuuaaccaaagaacau

SEQ ID NO: 2125066 - RNA, 19 nt, Artificial Sequence
  Description of Artificial Sequence: Synthetic oligonucleotide
  Sense strand starting at position 3552 of SEQ ID NO: 1882488
gguuaaagguacuuggaga

SEQ ID NO: 2125067 - RNA, 19 nt, Artificial Sequence
  Description of Artificial Sequence: Synthetic oligonucleotide
  Antisense strand to SEQ ID NO: 2125066
ucuccaaguaccuuuaacc

SEQ ID NO: 2125068 - RNA, 19 nt, Artificial Sequence
  Description of Artificial Sequence: Synthetic oligonucleotide
  Sense strand starting at position 3621 of SEQ ID NO: 1882488
cgggcuucuccgaguugac

SEQ ID NO: 2125069 - RNA, 19 nt, Artificial Sequence
  Description of Artificial Sequence: Synthetic oligonucleotide
  Antisense strand to SEQ ID NO: 2125068
gucaacucggagaagcccg

SEQ ID NO: 2125070 - RNA, 19 nt, Artificial Sequence
  Description of Artificial Sequence: Synthetic oligonucleotide
  Sense strand starting at position 3664 of SEQ ID NO: 1882488
acaugucagaggugauauu

SEQ ID NO: 2125071 - RNA, 19 nt, Artificial Sequence
  Description of Artificial Sequence: Synthetic oligonucleotide
  Antisense strand to SEQ ID NO: 2125070
aauaucaccucugacaugu

SEQ ID NO: 2125072 - RNA, 19 nt, Artificial Sequence
  Description of Artificial Sequence: Synthetic oligonucleotide
  Sense strand starting at position 3684 of SEQ ID NO: 1882488
cagagaagccgugaggaua

SEQ ID NO: 2125073 - RNA, 19 nt, Artificial Sequence
  Description of Artificial Sequence: Synthetic oligonucleotide
  Antisense strand to SEQ ID NO: 2125072
uauccucacggcuucucug

SEQ ID NO: 2125074 - RNA, 19 nt, Artificial Sequence
  Description of Artificial Sequence: Synthetic oligonucleotide
  Sense strand starting at position 3898 of SEQ ID NO: 1882488
ggccacuguaaguauuaga

SEQ ID NO: 2125075 - RNA, 19 nt, Artificial Sequence
  Description of Artificial Sequence: Synthetic oligonucleotide
  Antisense strand to SEQ ID NO: 2125074
ucuaauacuuacaguggcc

SEQ ID NO: 2125076 - RNA, 19 nt, Artificial Sequence
  Description of Artificial Sequence: Synthetic oligonucleotide
  Sense strand starting at position 62 of SEQ ID NO: 1882489
ucuacucuuugggugaaua

SEQ ID NO: 2125077 - RNA, 19 nt, Artificial Sequence
  Description of Artificial Sequence: Synthetic oligonucleotide
  Antisense strand to SEQ ID NO: 2125076
uauucacccaaagaguaga

SEQ ID NO: 2125078 - RNA, 19 nt, Artificial Sequence
  Description of Artificial Sequence: Synthetic oligonucleotide
  Sense strand starting at position 63 of SEQ ID NO: 1882489
cuacucuuugggugaauau

SEQ ID NO: 2125079 - RNA, 19 nt, Artificial Sequence
  Description of Artificial Sequence: Synthetic oligonucleotide
  Antisense strand to SEQ ID NO: 2125078
auauucacccaaagaguag

SEQ ID NO: 2125080 - RNA, 19 nt, Artificial Sequence
  Description of Artificial Sequence: Synthetic oligonucleotide
  Sense strand starting at position 64 of SEQ ID NO: 1882489
uacucuuugggugaauauu

SEQ ID NO: 2125081 - RNA, 19 nt, Artificial Sequence
  Description of Artificial Sequence: Synthetic oligonucleotide
  Antisense strand to SEQ ID NO: 2125080
aauauucacccaaagagua

SEQ ID NO: 2125082 - RNA, 19 nt, Artificial Sequence
  Description of Artificial Sequence: Synthetic oligonucleotide
  Sense strand starting at position 73 of SEQ ID NO: 1882489
ggugaauauuugcuuacgu

SEQ ID NO: 2125083 - RNA, 19 nt, Artificial Sequence
  Description of Artificial Sequence: Synthetic oligonucleotide
  Antisense strand to SEQ ID NO: 2125082
acguaagcaaauauucacc

SEQ ID NO: 2125084 - RNA, 19 nt, Artificial Sequence
  Description of Artificial Sequence: Synthetic oligonucleotide
  Sense strand starting at position 74 of SEQ ID NO: 1882489
gugaauauuugcuuacgua

SEQ ID NO: 2125085 - RNA, 19 nt, Artificial Sequence
  Description of Artificial Sequence: Synthetic oligonucleotide
  Antisense strand to SEQ ID NO: 2125084
uacguaagcaaauauucac

SEQ ID NO: 2125086 - RNA, 19 nt, Artificial Sequence
  Description of Artificial Sequence: Synthetic oligonucleotide
  Sense strand starting at position 211 of SEQ ID NO: 1882489
ugcguauuccuccaggaau

SEQ ID NO: 2125087 - RNA, 19 nt, Artificial Sequence
  Description of Artificial Sequence: Synthetic oligonucleotide
  Antisense strand to SEQ ID NO: 2125086
auuccuggaggaauacgca

SEQ ID NO: 2125088 - RNA, 19 nt, Artificial Sequence
  Description of Artificial Sequence: Synthetic oligonucleotide
  Sense strand starting at position 273 of SEQ ID NO: 1882489
cucugagucacagacguuu

SEQ ID NO: 2125089 - RNA, 19 nt, Artificial Sequence
  Description of Artificial Sequence: Synthetic oligonucleotide
  Antisense strand to SEQ ID NO: 2125088
aaacgucugugacucagag

SEQ ID NO: 2125090 - RNA, 19 nt, Artificial Sequence
  Description of Artificial Sequence: Synthetic oligonucleotide
  Sense strand starting at position 623 of SEQ ID NO: 1882489
gggcucaaagcucauguua

SEQ ID NO: 2125091 - RNA, 19 nt, Artificial Sequence
  Description of Artificial Sequence: Synthetic oligonucleotide
  Antisense strand to SEQ ID NO: 2125090
uaacaugagcuuugagccc

SEQ ID NO: 2125092 - RNA, 19 nt, Artificial Sequence
  Description of Artificial Sequence: Synthetic oligonucleotide
  Sense strand starting at position 698 of SEQ ID NO: 1882489
cuuccucuugcaggaaaga

SEQ ID NO: 2125093 - RNA, 19 nt, Artificial Sequence
  Description of Artificial Sequence: Synthetic oligonucleotide
  Antisense strand to SEQ ID NO: 2125092
ucuuuccugcaagaggaag

SEQ ID NO: 2125094 - RNA, 19 nt, Artificial Sequence
  Description of Artificial Sequence: Synthetic oligonucleotide
  Sense strand starting at position 1807 of SEQ ID NO: 1882489
aucugauuccaauguuuga

SEQ ID NO: 2125095 - RNA, 19 nt, Artificial Sequence
  Description of Artificial Sequence: Synthetic oligonucleotide
  Antisense strand to SEQ ID NO: 2125094
ucaaacauuggaaucagau

SEQ ID NO: 2125096 - RNA, 19 nt, Artificial Sequence
  Description of Artificial Sequence: Synthetic oligonucleotide
  Sense strand starting at position 1811 of SEQ ID NO: 1882489
gauuccaauguuugaaugu

SEQ ID NO: 2125097 - RNA, 19 nt, Artificial Sequence
  Description of Artificial Sequence: Synthetic oligonucleotide
  Antisense strand to SEQ ID NO: 2125096
acauucaaacauuggaauc

SEQ ID NO: 2125098 - RNA, 19 nt, Artificial Sequence
  Description of Artificial Sequence: Synthetic oligonucleotide
  Sense strand starting at position 1999 of SEQ ID NO: 1882489
gcuggaauuaaauguguau

SEQ ID NO: 2125099 - RNA, 19 nt, Artificial Sequence
  Description of Artificial Sequence: Synthetic oligonucleotide
  Antisense strand to SEQ ID NO: 2125098
auacacauuuaauuccagc

SEQ ID NO: 2125100 - RNA, 19 nt, Artificial Sequence
  Description of Artificial Sequence: Synthetic oligonucleotide
  Sense strand starting at position 2135 of SEQ ID NO: 1882489
ccugaaaucuugucucagc

SEQ ID NO: 2125101 - RNA, 19 nt, Artificial Sequence
  Description of Artificial Sequence: Synthetic oligonucleotide
  Antisense strand to SEQ ID NO: 2125100
gcugagacaagauuucagg

SEQ ID NO: 2125102 - RNA, 19 nt, Artificial Sequence
  Description of Artificial Sequence: Synthetic oligonucleotide
  Sense strand starting at position 2136 of SEQ ID NO: 1882489
cugaaaucuugucucagcu

SEQ ID NO: 2125103 - RNA, 19 nt, Artificial Sequence
  Description of Artificial Sequence: Synthetic oligonucleotide
  Antisense strand to SEQ ID NO: 2125102
agcugagacaagauuucag

SEQ ID NO: 2125104 - RNA, 19 nt, Artificial Sequence
  Description of Artificial Sequence: Synthetic oligonucleotide
  Sense strand starting at position 2176 of SEQ ID NO: 1882489
uagucaugugaagggugaa

SEQ ID NO: 2125105 - RNA, 19 nt, Artificial Sequence
  Description of Artificial Sequence: Synthetic oligonucleotide
  Antisense strand to SEQ ID NO: 2125104
uucacccuucacaugacua

SEQ ID NO: 2125106 - RNA, 19 nt, Artificial Sequence
  Description of Artificial Sequence: Synthetic oligonucleotide
  Sense strand starting at position 2177 of SEQ ID NO: 1882489
agucaugugaagggugaaa

SEQ ID NO: 2125107 - RNA, 19 nt, Artificial Sequence
  Description of Artificial Sequence: Synthetic oligonucleotide
  Antisense strand to SEQ ID NO: 2125106
uuucacccuucacaugacu

SEQ ID NO: 2125108 - RNA, 19 nt, Artificial Sequence
  Description of Artificial Sequence: Synthetic oligonucleotide
  Sense strand starting at position 2179 of SEQ ID NO: 1882489
ucaugugaagggugaaacu

SEQ ID NO: 2125109 - RNA, 19 nt, Artificial Sequence
  Description of Artificial Sequence: Synthetic oligonucleotide
  Antisense strand to SEQ ID NO: 2125108
aguuucacccuucacauga

SEQ ID NO: 2125110 - RNA, 19 nt, Artificial Sequence
  Description of Artificial Sequence: Synthetic oligonucleotide
  Sense strand starting at position 2197 of SEQ ID NO: 1882489
ucaucuucccaguggucau

SEQ ID NO: 2125111 - RNA, 19 nt, Artificial Sequence
  Description of Artificial Sequence: Synthetic oligonucleotide
  Antisense strand to SEQ ID NO: 2125110
augaccacugggaagauga

SEQ ID NO: 2125112 - RNA, 19 nt, Artificial Sequence
  Description of Artificial Sequence: Synthetic oligonucleotide
  Sense strand starting at position 2200 of SEQ ID NO: 1882489
ucuucccaguggucauaau

SEQ ID NO: 2125113 - RNA, 19 nt, Artificial Sequence
  Description of Artificial Sequence: Synthetic oligonucleotide
  Antisense strand to SEQ ID NO: 2125112
auuaugaccacugggaaga

SEQ ID NO: 2125114 - RNA, 19 nt, Artificial Sequence
  Description of Artificial Sequence: Synthetic oligonucleotide
  Sense strand starting at position 2228 of SEQ ID NO: 1882489
ucauauuguccaggucuuu

SEQ ID NO: 2125115 - RNA, 19 nt, Artificial Sequence
  Description of Artificial Sequence: Synthetic oligonucleotide
  Antisense strand to SEQ ID NO: 2125114
aaagaccuggacaauauga

SEQ ID NO: 2125116 - RNA, 19 nt, Artificial Sequence
  Description of Artificial Sequence: Synthetic oligonucleotide
  Sense strand starting at position 2311 of SEQ ID NO: 1882489
gcuuaaauguggccaggua

SEQ ID NO: 2125117 - RNA, 19 nt, Artificial Sequence
  Description of Artificial Sequence: Synthetic oligonucleotide
  Antisense strand to SEQ ID NO: 2125116
uaccuggccacauuuaagc

SEQ ID NO: 2125118 - RNA, 19 nt, Artificial Sequence
  Description of Artificial Sequence: Synthetic oligonucleotide
  Sense strand starting at position 2312 of SEQ ID NO: 1882489
cuuaaauguggccagguaa

SEQ ID NO: 2125119 - RNA, 19 nt, Artificial Sequence
  Description of Artificial Sequence: Synthetic oligonucleotide
  Antisense strand to SEQ ID NO: 2125118
uuaccuggccacauuuaag

SEQ ID NO: 2125120 - RNA, 19 nt, Artificial Sequence
  Description of Artificial Sequence: Synthetic oligonucleotide
  Sense strand starting at position 2420 of SEQ ID NO: 1882489
cgucgaaauccugacucua

SEQ ID NO: 2125121 - RNA, 19 nt, Artificial Sequence
  Description of Artificial Sequence: Synthetic oligonucleotide
  Antisense strand to SEQ ID NO: 2125120
uagagucaggauuucgacg

SEQ ID NO: 2125122 - RNA, 19 nt, Artificial Sequence
  Description of Artificial Sequence: Synthetic oligonucleotide
  Sense strand starting at position 2422 of SEQ ID NO: 1882489
ucgaaauccugacucuacu

SEQ ID NO: 2125123 - RNA, 19 nt, Artificial Sequence
  Description of Artificial Sequence: Synthetic oligonucleotide
  Antisense strand to SEQ ID NO: 2125122
aguagagucaggauuucga

SEQ ID NO: 2125124 - RNA, 19 nt, Artificial Sequence
  Description of Artificial Sequence: Synthetic oligonucleotide
  Sense strand starting at position 2649 of SEQ ID NO: 1882489
agaaaugguaacuguguga

SEQ ID NO: 2125125 - RNA, 19 nt, Artificial Sequence
  Description of Artificial Sequence: Synthetic oligonucleotide
  Antisense strand to SEQ ID NO: 2125124
ucacacaguuaccauuucu

SEQ ID NO: 2125126 - RNA, 19 nt, Artificial Sequence
  Description of Artificial Sequence: Synthetic oligonucleotide
  Sense strand starting at position 2686 of SEQ ID NO: 1882489
uugaauuagcuugauuaug

SEQ ID NO: 2125127 - RNA, 19 nt, Artificial Sequence
  Description of Artificial Sequence: Synthetic oligonucleotide
  Antisense strand to SEQ ID NO: 2125126
cauaaucaagcuaauucaa

SEQ ID NO: 2125128 - RNA, 19 nt, Artificial Sequence
  Description of Artificial Sequence: Synthetic oligonucleotide
  Sense strand starting at position 2688 of SEQ ID NO: 1882489
gaauuagcuugauuauggu

SEQ ID NO: 2125129 - RNA, 19 nt, Artificial Sequence
  Description of Artificial Sequence: Synthetic oligonucleotide
  Antisense strand to SEQ ID NO: 2125128
accauaaucaagcuaauuc

SEQ ID NO: 2125130 - RNA, 19 nt, Artificial Sequence
  Description of Artificial Sequence: Synthetic oligonucleotide
  Sense strand starting at position 3025 of SEQ ID NO: 1882489
guuacuagguacuugugua

SEQ ID NO: 2125131 - RNA, 19 nt, Artificial Sequence
  Description of Artificial Sequence: Synthetic oligonucleotide
  Antisense strand to SEQ ID NO: 2125130
uacacaaguaccuaguaac

SEQ ID NO: 2125132 - RNA, 19 nt, Artificial Sequence
  Description of Artificial Sequence: Synthetic oligonucleotide
  Sense strand starting at position 3026 of SEQ ID NO: 1882489
uuacuagguacuuguguau

SEQ ID NO: 2125133 - RNA, 19 nt, Artificial Sequence
  Description of Artificial Sequence: Synthetic oligonucleotide
  Antisense strand to SEQ ID NO: 2125132
auacacaaguaccuaguaa

SEQ ID NO: 2125134 - RNA, 19 nt, Artificial Sequence
  Description of Artificial Sequence: Synthetic oligonucleotide
  Sense strand starting at position 3033 of SEQ ID NO: 1882489
guacuuguguauuucuaga

SEQ ID NO: 2125135 - RNA, 19 nt, Artificial Sequence
  Description of Artificial Sequence: Synthetic oligonucleotide
  Antisense strand to SEQ ID NO: 2125134
ucuagaaauacacaaguac

SEQ ID NO: 2125136 - RNA, 19 nt, Artificial Sequence
  Description of Artificial Sequence: Synthetic oligonucleotide
  Sense strand starting at position 3107 of SEQ ID NO: 1882489
guuagcauacuaugaaaga

SEQ ID NO: 2125137 - RNA, 19 nt, Artificial Sequence
  Description of Artificial Sequence: Synthetic oligonucleotide
  Antisense strand to SEQ ID NO: 2125136
ucuuucauaguaugcuaac

SEQ ID NO: 2125138 - RNA, 19 nt, Artificial Sequence
  Description of Artificial Sequence: Synthetic oligonucleotide
  Sense strand starting at position 3287 of SEQ ID NO: 1882489
cgcaccaucuggcuaauuu

SEQ ID NO: 2125139 - RNA, 19 nt, Artificial Sequence
  Description of Artificial Sequence: Synthetic oligonucleotide
  Antisense strand to SEQ ID NO: 2125138
aaauuagccagauggugcg

SEQ ID NO: 2125140 - RNA, 19 nt, Artificial Sequence
  Description of Artificial Sequence: Synthetic oligonucleotide
  Sense strand starting at position 3428 of SEQ ID NO: 1882489
gucugaucuccucacucuu

SEQ ID NO: 2125141 - RNA, 19 nt, Artificial Sequence
  Description of Artificial Sequence: Synthetic oligonucleotide
  Antisense strand to SEQ ID NO: 2125140
aagagugaggagaucagac

SEQ ID NO: 2125142 - RNA, 19 nt, Artificial Sequence
  Description of Artificial Sequence: Synthetic oligonucleotide
  Sense strand starting at position 3479 of SEQ ID NO: 1882489
acucauugcuguccagcaa

SEQ ID NO: 2125143 - RNA, 19 nt, Artificial Sequence
  Description of Artificial Sequence: Synthetic oligonucleotide
  Antisense strand to SEQ ID NO: 2125142
uugcuggacagcaaugagu

SEQ ID NO: 2125144 - RNA, 19 nt, Artificial Sequence
  Description of Artificial Sequence: Synthetic oligonucleotide
  Sense strand starting at position 3480 of SEQ ID NO: 1882489
cucauugcuguccagcaaa

SEQ ID NO: 2125145 - RNA, 19 nt, Artificial Sequence
  Description of Artificial Sequence: Synthetic oligonucleotide
  Antisense strand to SEQ ID NO: 2125144
uuugcuggacagcaaugag

SEQ ID NO: 2125146 - RNA, 19 nt, Artificial Sequence
  Description of Artificial Sequence: Synthetic oligonucleotide
  Sense strand starting at position 3576 of SEQ ID NO: 1882489
acuagaauguaacauuugu

SEQ ID NO: 2125147 - RNA, 19 nt, Artificial Sequence
  Description of Artificial Sequence: Synthetic oligonucleotide
  Antisense strand to SEQ ID NO: 2125146
acaaauguuacauucuagu

SEQ ID NO: 2125148 - RNA, 19 nt, Artificial Sequence
  Description of Artificial Sequence: Synthetic oligonucleotide
  Sense strand starting at position 3583 of SEQ ID NO: 1882489
uguaacauuugucagaucu

SEQ ID NO: 2125149 - RNA, 19 nt, Artificial Sequence
  Description of Artificial Sequence: Synthetic oligonucleotide
  Antisense strand to SEQ ID NO: 2125148
agaucugacaaauguuaca

SEQ ID NO: 2125150 - RNA, 19 nt, Artificial Sequence
  Description of Artificial Sequence: Synthetic oligonucleotide
  Sense strand starting at position 3621 of SEQ ID NO: 1882489
ggauguggacgugaugacu

SEQ ID NO: 2125151 - RNA, 19 nt, Artificial Sequence
  Description of Artificial Sequence: Synthetic oligonucleotide
  Antisense strand to SEQ ID NO: 2125150
agucaucacguccacaucc

SEQ ID NO: 2125152 - RNA, 19 nt, Artificial Sequence
  Description of Artificial Sequence: Synthetic oligonucleotide
  Sense strand starting at position 3629 of SEQ ID NO: 1882489
acgugaugacuggagcuua

SEQ ID NO: 2125153 - RNA, 19 nt, Artificial Sequence
  Description of Artificial Sequence: Synthetic oligonucleotide
  Antisense strand to SEQ ID NO: 2125152
uaagcuccagucaucacgu

SEQ ID NO: 2125154 - RNA, 19 nt, Artificial Sequence
  Description of Artificial Sequence: Synthetic oligonucleotide
  Sense strand starting at position 3949 of SEQ ID NO: 1882489
uaaguaaagccauggauca

SEQ ID NO: 2125155 - RNA, 19 nt, Artificial Sequence
  Description of Artificial Sequence: Synthetic oligonucleotide
  Antisense strand to SEQ ID NO: 2125154
ugauccauggcuuuacuua

SEQ ID NO: 2125156 - RNA, 19 nt, Artificial Sequence
  Description of Artificial Sequence: Synthetic oligonucleotide
  Sense strand starting at position 45 of SEQ ID NO: 1882490
auaugaaaugucuguaaga

SEQ ID NO: 2125157 - RNA, 19 nt, Artificial Sequence
  Description of Artificial Sequence: Synthetic oligonucleotide
  Antisense strand to SEQ ID NO: 2125156
ucuuacagacauuucauau

SEQ ID NO: 2125158 - RNA, 19 nt, Artificial Sequence
  Description of Artificial Sequence: Synthetic oligonucleotide
  Sense strand starting at position 46 of SEQ ID NO: 1882490
uaugaaaugucuguaagac

SEQ ID NO: 2125159 - RNA, 19 nt, Artificial Sequence
  Description of Artificial Sequence: Synthetic oligonucleotide
  Antisense strand to SEQ ID NO: 2125158
gucuuacagacauuucaua

SEQ ID NO: 2125160 - RNA, 19 nt, Artificial Sequence
  Description of Artificial Sequence: Synthetic oligonucleotide
  Sense strand starting at position 58 of SEQ ID NO: 1882490
guaagacccuguucuagga

SEQ ID NO: 2125161 - RNA, 19 nt, Artificial Sequence
  Description of Artificial Sequence: Synthetic oligonucleotide
  Antisense strand to SEQ ID NO: 2125160
uccuagaacagggucuuac

SEQ ID NO: 2125162 - RNA, 19 nt, Artificial Sequence
  Description of Artificial Sequence: Synthetic oligonucleotide
  Sense strand starting at position 204 of SEQ ID NO: 1882490
agaagauggcagugucuga

SEQ ID NO: 2125163 - RNA, 19 nt, Artificial Sequence
  Description of Artificial Sequence: Synthetic oligonucleotide
  Antisense strand to SEQ ID NO: 2125162
ucagacacugccaucuucu

SEQ ID NO: 2125164 - RNA, 19 nt, Artificial Sequence
  Description of Artificial Sequence: Synthetic oligonucleotide
  Sense strand starting at position 411 of SEQ ID NO: 1882490
gggcuucucacagggcaaa

SEQ ID NO: 2125165 - RNA, 19 nt, Artificial Sequence
  Description of Artificial Sequence: Synthetic oligonucleotide
  Antisense strand to SEQ ID NO: 2125164
uuugcccugugagaagccc

SEQ ID NO: 2125166 - RNA, 19 nt, Artificial Sequence
  Description of Artificial Sequence: Synthetic oligonucleotide
  Sense strand starting at position 498 of SEQ ID NO: 1882490
gcuaaagugaaggguacau

SEQ ID NO: 2125167 - RNA, 19 nt, Artificial Sequence
  Description of Artificial Sequence: Synthetic oligonucleotide
  Antisense strand to SEQ ID NO: 2125166
auguacccuucacuuuagc

SEQ ID NO: 2125168 - RNA, 19 nt, Artificial Sequence
  Description of Artificial Sequence: Synthetic oligonucleotide
  Sense strand starting at position 583 of SEQ ID NO: 1882490
aaaguaaaguacgugaaca

SEQ ID NO: 2125169 - RNA, 19 nt, Artificial Sequence
  Description of Artificial Sequence: Synthetic oligonucleotide
  Antisense strand to SEQ ID NO: 2125168
uguucacguacuuuacuuu

SEQ ID NO: 2125170 - RNA, 19 nt, Artificial Sequence
  Description of Artificial Sequence: Synthetic oligonucleotide
  Sense strand starting at position 585 of SEQ ID NO: 1882490
aguaaaguacgugaacauu

SEQ ID NO: 2125171 - RNA, 19 nt, Artificial Sequence
  Description of Artificial Sequence: Synthetic oligonucleotide
  Antisense strand to SEQ ID NO: 2125170
aauguucacguacuuuacu

SEQ ID NO: 2125172 - RNA, 19 nt, Artificial Sequence
  Description of Artificial Sequence: Synthetic oligonucleotide
  Sense strand starting at position 588 of SEQ ID NO: 1882490
aaaguacgugaacauuauu

SEQ ID NO: 2125173 - RNA, 19 nt, Artificial Sequence
  Description of Artificial Sequence: Synthetic oligonucleotide
  Antisense strand to SEQ ID NO: 2125172
aauaauguucacguacuuu

SEQ ID NO: 2125174 - RNA, 19 nt, Artificial Sequence
  Description of Artificial Sequence: Synthetic oligonucleotide
  Sense strand starting at position 591 of SEQ ID NO: 1882490
guacgugaacauuauucca

SEQ ID NO: 2125175 - RNA, 19 nt, Artificial Sequence
  Description of Artificial Sequence: Synthetic oligonucleotide
  Antisense strand to SEQ ID NO: 2125174
uggaauaauguucacguac

SEQ ID NO: 2125176 - RNA, 19 nt, Artificial Sequence
  Description of Artificial Sequence: Synthetic oligonucleotide
  Sense strand starting at position 593 of SEQ ID NO: 1882490
acgugaacauuauuccaaa

SEQ ID NO: 2125177 - RNA, 19 nt, Artificial Sequence
  Description of Artificial Sequence: Synthetic oligonucleotide
  Antisense strand to SEQ ID NO: 2125176
uuuggaauaauguucacgu

SEQ ID NO: 2125178 - RNA, 19 nt, Artificial Sequence
  Description of Artificial Sequence: Synthetic oligonucleotide
  Sense strand starting at position 594 of SEQ ID NO: 1882490
cgugaacauuauuccaaag

SEQ ID NO: 2125179 - RNA, 19 nt, Artificial Sequence
  Description of Artificial Sequence: Synthetic oligonucleotide
  Antisense strand to SEQ ID NO: 2125178
cuuuggaauaauguucacg

SEQ ID NO: 2125180 - RNA, 19 nt, Artificial Sequence
  Description of Artificial Sequence: Synthetic oligonucleotide
  Sense strand starting at position 654 of SEQ ID NO: 1882490
gcagacuagcuuuaagaaa

SEQ ID NO: 2125181 - RNA, 19 nt, Artificial Sequence
  Description of Artificial Sequence: Synthetic oligonucleotide
  Antisense strand to SEQ ID NO: 2125180
uuucuuaaagcuagucugc

SEQ ID NO: 2125182 - RNA, 19 nt, Artificial Sequence
  Description of Artificial Sequence: Synthetic oligonucleotide
  Sense strand starting at position 886 of SEQ ID NO: 1882490
uggaacucuucccugguua

SEQ ID NO: 2125183 - RNA, 19 nt, Artificial Sequence
  Description of Artificial Sequence: Synthetic oligonucleotide
  Antisense strand to SEQ ID NO: 2125182
uaaccagggaagaguucca

SEQ ID NO: 2125184 - RNA, 19 nt, Artificial Sequence
  Description of Artificial Sequence: Synthetic oligonucleotide
  Sense strand starting at position 1034 of SEQ ID NO: 1882490
ccuccaguguauuuauagu

SEQ ID NO: 2125185 - RNA, 19 nt, Artificial Sequence
  Description of Artificial Sequence: Synthetic oligonucleotide
  Antisense strand to SEQ ID NO: 2125184
acuauaaauacacuggagg

SEQ ID NO: 2125186 - RNA, 19 nt, Artificial Sequence
  Description of Artificial Sequence: Synthetic oligonucleotide
  Sense strand starting at position 1065 of SEQ ID NO: 1882490
ccugucucuccuuacuaga

SEQ ID NO: 2125187 - RNA, 19 nt, Artificial Sequence
  Description of Artificial Sequence: Synthetic oligonucleotide
  Antisense strand to SEQ ID NO: 2125186
ucuaguaaggagagacagg

SEQ ID NO: 2125188 - RNA, 19 nt, Artificial Sequence
  Description of Artificial Sequence: Synthetic oligonucleotide
  Sense strand starting at position 1084 of SEQ ID NO: 1882490
auguaagcucuaugaugga

SEQ ID NO: 2125189 - RNA, 19 nt, Artificial Sequence
  Description of Artificial Sequence: Synthetic oligonucleotide
  Antisense strand to SEQ ID NO: 2125188
uccaucauagagcuuacau

SEQ ID NO: 2125190 - RNA, 19 nt, Artificial Sequence
  Description of Artificial Sequence: Synthetic oligonucleotide
  Sense strand starting at position 1120 of SEQ ID NO: 1882490
ugacauugagauuguuacu

SEQ ID NO: 2125191 - RNA, 19 nt, Artificial Sequence
  Description of Artificial Sequence: Synthetic oligonucleotide
  Antisense strand to SEQ ID NO: 2125190
aguaacaaucucaauguca

SEQ ID NO: 2125192 - RNA, 19 nt, Artificial Sequence
  Description of Artificial Sequence: Synthetic oligonucleotide
  Sense strand starting at position 1125 of SEQ ID NO: 1882490
uugagauuguuacuacuga

SEQ ID NO: 2125193 - RNA, 19 nt, Artificial Sequence
  Description of Artificial Sequence: Synthetic oligonucleotide
  Antisense strand to SEQ ID NO: 2125192
ucaguaguaacaaucucaa

SEQ ID NO: 2125194 - RNA, 19 nt, Artificial Sequence
  Description of Artificial Sequence: Synthetic oligonucleotide
  Sense strand starting at position 1158 of SEQ ID NO: 1882490
aaaucuaauggacgagcua

SEQ ID NO: 2125195 - RNA, 19 nt, Artificial Sequence
  Description of Artificial Sequence: Synthetic oligonucleotide
  Antisense strand to SEQ ID NO: 2125194
uagcucguccauuagauuu

SEQ ID NO: 2125196 - RNA, 19 nt, Artificial Sequence
  Description of Artificial Sequence: Synthetic oligonucleotide
  Sense strand starting at position 1167 of SEQ ID NO: 1882490
ggacgagcuaaguaaucua

SEQ ID NO: 2125197 - RNA, 19 nt, Artificial Sequence
  Description of Artificial Sequence: Synthetic oligonucleotide
  Antisense strand to SEQ ID NO: 2125196
uagauuacuuagcucgucc

SEQ ID NO: 2125198 - RNA, 19 nt, Artificial Sequence
  Description of Artificial Sequence: Synthetic oligonucleotide
  Sense strand starting at position 1680 of SEQ ID NO: 1882490
ggaagaacaaugugguauc

SEQ ID NO: 2125199 - RNA, 19 nt, Artificial Sequence
  Description of Artificial Sequence: Synthetic oligonucleotide
  Antisense strand to SEQ ID NO: 2125198
gauaccacauuguucuucc

SEQ ID NO: 2125200 - RNA, 19 nt, Artificial Sequence
  Description of Artificial Sequence: Synthetic oligonucleotide
  Sense strand starting at position 1724 of SEQ ID NO: 1882490
guaucucaugcacaguaaa

SEQ ID NO: 2125201 - RNA, 19 nt, Artificial Sequence
  Description of Artificial Sequence: Synthetic oligonucleotide
  Antisense strand to SEQ ID NO: 2125200
uuuacugugcaugagauac

SEQ ID NO: 2125202 - RNA, 19 nt, Artificial Sequence
  Description of Artificial Sequence: Synthetic oligonucleotide
  Sense strand starting at position 1760 of SEQ ID NO: 1882490
gcaguaacauuugucuuua

SEQ ID NO: 2125203 - RNA, 19 nt, Artificial Sequence
  Description of Artificial Sequence: Synthetic oligonucleotide
  Antisense strand to SEQ ID NO: 2125202
uaaagacaaauguuacugc

SEQ ID NO: 2125204 - RNA, 19 nt, Artificial Sequence
  Description of Artificial Sequence: Synthetic oligonucleotide
  Sense strand starting at position 1977 of SEQ ID NO: 1882490
agagguaguagcugaaauu

SEQ ID NO: 2125205 - RNA, 19 nt, Artificial Sequence
  Description of Artificial Sequence: Synthetic oligonucleotide
  Antisense strand to SEQ ID NO: 2125204
aauuucagcuacuaccucu

SEQ ID NO: 2125206 - RNA, 19 nt, Artificial Sequence
  Description of Artificial Sequence: Synthetic oligonucleotide
  Sense strand starting at position 1978 of SEQ ID NO: 1882490
gagguaguagcugaaauua

SEQ ID NO: 2125207 - RNA, 19 nt, Artificial Sequence
  Description of Artificial Sequence: Synthetic oligonucleotide
  Antisense strand to SEQ ID NO: 2125206
uaauuucagcuacuaccuc

SEQ ID NO: 2125208 - RNA, 19 nt, Artificial Sequence
  Description of Artificial Sequence: Synthetic oligonucleotide
  Sense strand starting at position 2412 of SEQ ID NO: 1882490
cuuaaauaguguuccaaca

SEQ ID NO: 2125209 - RNA, 19 nt, Artificial Sequence
  Description of Artificial Sequence: Synthetic oligonucleotide
  Antisense strand to SEQ ID NO: 2125208
uguuggaacacuauuuaag

SEQ ID NO: 2125210 - RNA, 19 nt, Artificial Sequence
  Description of Artificial Sequence: Synthetic oligonucleotide
  Sense strand starting at position 2477 of SEQ ID NO: 1882490
uuuagaaugucacuaguaa

SEQ ID NO: 2125211 - RNA, 19 nt, Artificial Sequence
  Description of Artificial Sequence: Synthetic oligonucleotide
  Antisense strand to SEQ ID NO: 2125210
uuacuagugacauucuaaa

SEQ ID NO: 2125212 - RNA, 19 nt, Artificial Sequence
  Description of Artificial Sequence: Synthetic oligonucleotide
  Sense strand starting at position 2700 of SEQ ID NO: 1882490
cuauguuugccagaauggu

SEQ ID NO: 2125213 - RNA, 19 nt, Artificial Sequence
  Description of Artificial Sequence: Synthetic oligonucleotide
  Antisense strand to SEQ ID NO: 2125212
accauucuggcaaacauag

SEQ ID NO: 2125214 - RNA, 19 nt, Artificial Sequence
  Description of Artificial Sequence: Synthetic oligonucleotide
  Sense strand starting at position 2885 of SEQ ID NO: 1882490
acacuaugggucuguagag

SEQ ID NO: 2125215 - RNA, 19 nt, Artificial Sequence
  Description of Artificial Sequence: Synthetic oligonucleotide
  Antisense strand to SEQ ID NO: 2125214
cucuacagacccauagugu

SEQ ID NO: 2125216 - RNA, 19 nt, Artificial Sequence
  Description of Artificial Sequence: Synthetic oligonucleotide
  Sense strand starting at position 2894 of SEQ ID NO: 1882490
gucuguagaggucauagua

SEQ ID NO: 2125217 - RNA, 19 nt, Artificial Sequence
  Description of Artificial Sequence: Synthetic oligonucleotide
  Antisense strand to SEQ ID NO: 2125216
uacuaugaccucuacagac

SEQ ID NO: 2125218 - RNA, 19 nt, Artificial Sequence
  Description of Artificial Sequence: Synthetic oligonucleotide
  Sense strand starting at position 2972 of SEQ ID NO: 1882490
caacuuaugguuuggguua

SEQ ID NO: 2125219 - RNA, 19 nt, Artificial Sequence
  Description of Artificial Sequence: Synthetic oligonucleotide
  Antisense strand to SEQ ID NO: 2125218
uaacccaaaccauaaguug

SEQ ID NO: 2125220 - RNA, 19 nt, Artificial Sequence
  Description of Artificial Sequence: Synthetic oligonucleotide
  Sense strand starting at position 2998 of SEQ ID NO: 1882490
caacuuuaugauggugaga

SEQ ID NO: 2125221 - RNA, 19 nt, Artificial Sequence
  Description of Artificial Sequence: Synthetic oligonucleotide
  Antisense strand to SEQ ID NO: 2125220
ucucaccaucauaaaguug

SEQ ID NO: 2125222 - RNA, 19 nt, Artificial Sequence
  Description of Artificial Sequence: Synthetic oligonucleotide
  Sense strand starting at position 3011 of SEQ ID NO: 1882490
gugagaaggcgauacacau

SEQ ID NO: 2125223 - RNA, 19 nt, Artificial Sequence
  Description of Artificial Sequence: Synthetic oligonucleotide
  Antisense strand to SEQ ID NO: 2125222
auguguaucgccuucucac

SEQ ID NO: 2125224 - RNA, 19 nt, Artificial Sequence
  Description of Artificial Sequence: Synthetic oligonucleotide
  Sense strand starting at position 3194 of SEQ ID NO: 1882490
ggcuaugauguucaguaag

SEQ ID NO: 2125225 - RNA, 19 nt, Artificial Sequence
  Description of Artificial Sequence: Synthetic oligonucleotide
  Antisense strand to SEQ ID NO: 2125224
cuuacugaacaucauagcc

SEQ ID NO: 2125226 - RNA, 19 nt, Artificial Sequence
  Description of Artificial Sequence: Synthetic oligonucleotide
  Sense strand starting at position 3391 of SEQ ID NO: 1882490
aauuaaaguguguacaguu

SEQ ID NO: 2125227 - RNA, 19 nt, Artificial Sequence
  Description of Artificial Sequence: Synthetic oligonucleotide
  Antisense strand to SEQ ID NO: 2125226
aacuguacacacuuuaauu

SEQ ID NO: 2125228 - RNA, 19 nt, Artificial Sequence
  Description of Artificial Sequence: Synthetic oligonucleotide
  Sense strand starting at position 3399 of SEQ ID NO: 1882490
uguguacaguuaucagaaa

SEQ ID NO: 2125229 - RNA, 19 nt, Artificial Sequence
  Description of Artificial Sequence: Synthetic oligonucleotide
  Antisense strand to SEQ ID NO: 2125228
uuucugauaacuguacaca

SEQ ID NO: 2125230 - RNA, 19 nt, Artificial Sequence
  Description of Artificial Sequence: Synthetic oligonucleotide
  Sense strand starting at position 3490 of SEQ ID NO: 1882490
cugaaaguuuaugugcaaa

SEQ ID NO: 2125231 - RNA, 19 nt, Artificial Sequence
  Description of Artificial Sequence: Synthetic oligonucleotide
  Antisense strand to SEQ ID NO: 2125230
uuugcacauaaacuuucag

SEQ ID NO: 2125232 - RNA, 19 nt, Artificial Sequence
  Description of Artificial Sequence: Synthetic oligonucleotide
  Sense strand starting at position 3492 of SEQ ID NO: 1882490
gaaaguuuaugugcaaaua

SEQ ID NO: 2125233 - RNA, 19 nt, Artificial Sequence
  Description of Artificial Sequence: Synthetic oligonucleotide
  Antisense strand to SEQ ID NO: 2125232
uauuugcacauaaacuuuc

SEQ ID NO: 2125234 - RNA, 19 nt, Artificial Sequence
  Description of Artificial Sequence: Synthetic oligonucleotide
  Sense strand starting at position 3545 of SEQ ID NO: 1882490
accuguagauauucucaca

SEQ ID NO: 2125235 - RNA, 19 nt, Artificial Sequence
  Description of Artificial Sequence: Synthetic oligonucleotide
  Antisense strand to SEQ ID NO: 2125234
ugugagaauaucuacaggu

SEQ ID NO: 2125236 - RNA, 19 nt, Artificial Sequence
  Description of Artificial Sequence: Synthetic oligonucleotide
  Sense strand starting at position 64 of SEQ ID NO: 1882491
augagucuuuaguuugaau

SEQ ID NO: 2125237 - RNA, 19 nt, Artificial Sequence
  Description of Artificial Sequence: Synthetic oligonucleotide
  Antisense strand to SEQ ID NO: 2125236
auucaaacuaaagacucau

SEQ ID NO: 2125238 - RNA, 19 nt, Artificial Sequence
  Description of Artificial Sequence: Synthetic oligonucleotide
  Sense strand starting at position 66 of SEQ ID NO: 1882491
gagucuuuaguuugaaucu

SEQ ID NO: 2125239 - RNA, 19 nt, Artificial Sequence
  Description of Artificial Sequence: Synthetic oligonucleotide
  Antisense strand to SEQ ID NO: 2125238
agauucaaacuaaagacuc

SEQ ID NO: 2125240 - RNA, 19 nt, Artificial Sequence
  Description of Artificial Sequence: Synthetic oligonucleotide
  Sense strand starting at position 75 of SEQ ID NO: 1882491
guuugaaucucacugaggu

SEQ ID NO: 2125241 - RNA, 19 nt, Artificial Sequence
  Description of Artificial Sequence: Synthetic oligonucleotide
  Antisense strand to SEQ ID NO: 2125240
accucagugagauucaaac

SEQ ID NO: 2125242 - RNA, 19 nt, Artificial Sequence
  Description of Artificial Sequence: Synthetic oligonucleotide
  Sense strand starting at position 76 of SEQ ID NO: 1882491
uuugaaucucacugagguc

SEQ ID NO: 2125243 - RNA, 19 nt, Artificial Sequence
  Description of Artificial Sequence: Synthetic oligonucleotide
  Antisense strand to SEQ ID NO: 2125242
gaccucagugagauucaaa

SEQ ID NO: 2125244 - RNA, 19 nt, Artificial Sequence
  Description of Artificial Sequence: Synthetic oligonucleotide
  Sense strand starting at position 88 of SEQ ID NO: 1882491
ugaggucgguaguuacaaa

SEQ ID NO: 2125245 - RNA, 19 nt, Artificial Sequence
  Description of Artificial Sequence: Synthetic oligonucleotide
  Antisense strand to SEQ ID NO: 2125244
uuuguaacuaccgaccuca

SEQ ID NO: 2125246 - RNA, 19 nt, Artificial Sequence
  Description of Artificial Sequence: Synthetic oligonucleotide
  Sense strand starting at position 142 of SEQ ID NO: 1882491
ucuuauuuguaagauggga

SEQ ID NO: 2125247 - RNA, 19 nt, Artificial Sequence
  Description of Artificial Sequence: Synthetic oligonucleotide
  Antisense strand to SEQ ID NO: 2125246
ucccaucuuacaaauaaga

SEQ ID NO: 2125248 - RNA, 19 nt, Artificial Sequence
  Description of Artificial Sequence: Synthetic oligonucleotide
  Sense strand starting at position 202 of SEQ ID NO: 1882491
cuaugaaguguauaugcca

SEQ ID NO: 2125249 - RNA, 19 nt, Artificial Sequence
  Description of Artificial Sequence: Synthetic oligonucleotide
  Antisense strand to SEQ ID NO: 2125248
uggcauauacacuucauag

SEQ ID NO: 2125250 - RNA, 19 nt, Artificial Sequence
  Description of Artificial Sequence: Synthetic oligonucleotide
  Sense strand starting at position 411 of SEQ ID NO: 1882491
gcagauauauugcuuuaga

SEQ ID NO: 2125251 - RNA, 19 nt, Artificial Sequence
  Description of Artificial Sequence: Synthetic oligonucleotide
  Antisense strand to SEQ ID NO: 2125250
ucuaaagcaauauaucugc

SEQ ID NO: 2125252 - RNA, 19 nt, Artificial Sequence
  Description of Artificial Sequence: Synthetic oligonucleotide
  Sense strand starting at position 815 of SEQ ID NO: 1882491
accacaguuucuuugguua

SEQ ID NO: 2125253 - RNA, 19 nt, Artificial Sequence
  Description of Artificial Sequence: Synthetic oligonucleotide
  Antisense strand to SEQ ID NO: 2125252
uaaccaaagaaacuguggu

SEQ ID NO: 2125254 - RNA, 19 nt, Artificial Sequence
  Description of Artificial Sequence: Synthetic oligonucleotide
  Sense strand starting at position 877 of SEQ ID NO: 1882491
gcauuagaguguuuaauuu

SEQ ID NO: 2125255 - RNA, 19 nt, Artificial Sequence
  Description of Artificial Sequence: Synthetic oligonucleotide
  Antisense strand to SEQ ID NO: 2125254
aaauuaaacacucuaaugc

SEQ ID NO: 2125256 - RNA, 19 nt, Artificial Sequence
  Description of Artificial Sequence: Synthetic oligonucleotide
  Sense strand starting at position 928 of SEQ ID NO: 1882491
auauuaugcuuucuggaua

SEQ ID NO: 2125257 - RNA, 19 nt, Artificial Sequence
  Description of Artificial Sequence: Synthetic oligonucleotide
  Antisense strand to SEQ ID NO: 2125256
uauccagaaagcauaauau

SEQ ID NO: 2125258 - RNA, 19 nt, Artificial Sequence
  Description of Artificial Sequence: Synthetic oligonucleotide
  Sense strand starting at position 931 of SEQ ID NO: 1882491
uuaugcuuucuggauauca

SEQ ID NO: 2125259 - RNA, 19 nt, Artificial Sequence
  Description of Artificial Sequence: Synthetic oligonucleotide
  Antisense strand to SEQ ID NO: 2125258
ugauauccagaaagcauaa

SEQ ID NO: 2125260 - RNA, 19 nt, Artificial Sequence
  Description of Artificial Sequence: Synthetic oligonucleotide
  Sense strand starting at position 933 of SEQ ID NO: 1882491
augcuuucuggauaucacu

SEQ ID NO: 2125261 - RNA, 19 nt, Artificial Sequence
  Description of Artificial Sequence: Synthetic oligonucleotide
  Antisense strand to SEQ ID NO: 2125260
agugauauccagaaagcau

SEQ ID NO: 2125262 - RNA, 19 nt, Artificial Sequence
  Description of Artificial Sequence: Synthetic oligonucleotide
  Sense strand starting at position 939 of SEQ ID NO: 1882491
ucuggauaucacuaagcac

SEQ ID NO: 2125263 - RNA, 19 nt, Artificial Sequence
  Description of Artificial Sequence: Synthetic oligonucleotide
  Antisense strand to SEQ ID NO: 2125262
gugcuuagugauauccaga

SEQ ID NO: 2125264 - RNA, 19 nt, Artificial Sequence
  Description of Artificial Sequence: Synthetic oligonucleotide
  Sense strand starting at position 1174 of SEQ ID NO: 1882491
aucucuuccuugguaaaga

SEQ ID NO: 2125265 - RNA, 19 nt, Artificial Sequence
  Description of Artificial Sequence: Synthetic oligonucleotide
  Antisense strand to SEQ ID NO: 2125264
ucuuuaccaaggaagagau

SEQ ID NO: 2125266 - RNA, 19 nt, Artificial Sequence
  Description of Artificial Sequence: Synthetic oligonucleotide
  Sense strand starting at position 1800 of SEQ ID NO: 1882491
ugaaauaugcaauguaaca

SEQ ID NO: 2125267 - RNA, 19 nt, Artificial Sequence
  Description of Artificial Sequence: Synthetic oligonucleotide
  Antisense strand to SEQ ID NO: 2125266
uguuacauugcauauuuca

SEQ ID NO: 2125268 - RNA, 19 nt, Artificial Sequence
  Description of Artificial Sequence: Synthetic oligonucleotide
  Sense strand starting at position 1824 of SEQ ID NO: 1882491
aagguaaacuaugagaaag

SEQ ID NO: 2125269 - RNA, 19 nt, Artificial Sequence
  Description of Artificial Sequence: Synthetic oligonucleotide
  Antisense strand to SEQ ID NO: 2125268
cuuucucauaguuuaccuu

SEQ ID NO: 2125270 - RNA, 19 nt, Artificial Sequence
  Description of Artificial Sequence: Synthetic oligonucleotide
  Sense strand starting at position 2062 of SEQ ID NO: 1882491
aagugagucuaacugccau

SEQ ID NO: 2125271 - RNA, 19 nt, Artificial Sequence
  Description of Artificial Sequence: Synthetic oligonucleotide
  Antisense strand to SEQ ID NO: 2125270
auggcaguuagacucacuu

SEQ ID NO: 2125272 - RNA, 19 nt, Artificial Sequence
  Description of Artificial Sequence: Synthetic oligonucleotide
  Sense strand starting at position 2293 of SEQ ID NO: 1882491
uggucugcugaacaagaua

SEQ ID NO: 2125273 - RNA, 19 nt, Artificial Sequence
  Description of Artificial Sequence: Synthetic oligonucleotide
  Antisense strand to SEQ ID NO: 2125272
uaucuuguucagcagacca

SEQ ID NO: 2125274 - RNA, 19 nt, Artificial Sequence
  Description of Artificial Sequence: Synthetic oligonucleotide
  Sense strand starting at position 2375 of SEQ ID NO: 1882491
uucuuaagagcuggucuaa

SEQ ID NO: 2125275 - RNA, 19 nt, Artificial Sequence
  Description of Artificial Sequence: Synthetic oligonucleotide
  Antisense strand to SEQ ID NO: 2125274
uuagaccagcucuuaagaa

SEQ ID NO: 2125276 - RNA, 19 nt, Artificial Sequence
  Description of Artificial Sequence: Synthetic oligonucleotide
  Sense strand starting at position 2503 of SEQ ID NO: 1882491
acaaauacugagugucauu

SEQ ID NO: 2125277 - RNA, 19 nt, Artificial Sequence
  Description of Artificial Sequence: Synthetic oligonucleotide
  Antisense strand to SEQ ID NO: 2125276
aaugacacucaguauuugu

SEQ ID NO: 2125278 - RNA, 19 nt, Artificial Sequence
  Description of Artificial Sequence: Synthetic oligonucleotide
  Sense strand starting at position 2556 of SEQ ID NO: 1882491
augucuaccucauuugcua

SEQ ID NO: 2125279 - RNA, 19 nt, Artificial Sequence
  Description of Artificial Sequence: Synthetic oligonucleotide
  Antisense strand to SEQ ID NO: 2125278
uagcaaaugagguagacau

SEQ ID NO: 2125280 - RNA, 19 nt, Artificial Sequence
  Description of Artificial Sequence: Synthetic oligonucleotide
  Sense strand starting at position 2575 of SEQ ID NO: 1882491
uaauguaaguucuuagaug

SEQ ID NO: 2125281 - RNA, 19 nt, Artificial Sequence
  Description of Artificial Sequence: Synthetic oligonucleotide
  Antisense strand to SEQ ID NO: 2125280
caucuaagaacuuacauua

SEQ ID NO: 2125282 - RNA, 19 nt, Artificial Sequence
  Description of Artificial Sequence: Synthetic oligonucleotide
  Sense strand starting at position 2829 of SEQ ID NO: 1882491
aucaaugucucaucuguaa

SEQ ID NO: 2125283 - RNA, 19 nt, Artificial Sequence
  Description of Artificial Sequence: Synthetic oligonucleotide
  Antisense strand to SEQ ID NO: 2125282
uuacagaugagacauugau

SEQ ID NO: 2125284 - RNA, 19 nt, Artificial Sequence
  Description of Artificial Sequence: Synthetic oligonucleotide
  Sense strand starting at position 2833 of SEQ ID NO: 1882491
augucucaucuguaacaac

SEQ ID NO: 2125285 - RNA, 19 nt, Artificial Sequence
  Description of Artificial Sequence: Synthetic oligonucleotide
  Antisense strand to SEQ ID NO: 2125284
guuguuacagaugagacau

SEQ ID NO: 2125286 - RNA, 19 nt, Artificial Sequence
  Description of Artificial Sequence: Synthetic oligonucleotide
  Sense strand starting at position 2897 of SEQ ID NO: 1882491
auuaguuugauccaggguu

SEQ ID NO: 2125287 - RNA, 19 nt, Artificial Sequence
  Description of Artificial Sequence: Synthetic oligonucleotide
  Antisense strand to SEQ ID NO: 2125286
aacccuggaucaaacuaau

SEQ ID NO: 2125288 - RNA, 19 nt, Artificial Sequence
  Description of Artificial Sequence: Synthetic oligonucleotide
  Sense strand starting at position 2899 of SEQ ID NO: 1882491
uaguuugauccaggguuau

SEQ ID NO: 2125289 - RNA, 19 nt, Artificial Sequence
  Description of Artificial Sequence: Synthetic oligonucleotide
  Antisense strand to SEQ ID NO: 2125288
auaacccuggaucaaacua

SEQ ID NO: 2125290 - RNA, 19 nt, Artificial Sequence
  Description of Artificial Sequence: Synthetic oligonucleotide
  Sense strand starting at position 2912 of SEQ ID NO: 1882491
gguuauuuauaacagguaa

SEQ ID NO: 2125291 - RNA, 19 nt, Artificial Sequence
  Description of Artificial Sequence: Synthetic oligonucleotide
  Antisense strand to SEQ ID NO: 2125290
uuaccuguuauaaauaacc

SEQ ID NO: 2125292 - RNA, 19 nt, Artificial Sequence
  Description of Artificial Sequence: Synthetic oligonucleotide
  Sense strand starting at position 2924 of SEQ ID NO: 1882491
cagguaacaugagugguuu

SEQ ID NO: 2125293 - RNA, 19 nt, Artificial Sequence
  Description of Artificial Sequence: Synthetic oligonucleotide
  Antisense strand to SEQ ID NO: 2125292
aaaccacucauguuaccug

SEQ ID NO: 2125294 - RNA, 19 nt, Artificial Sequence
  Description of Artificial Sequence: Synthetic oligonucleotide
  Sense strand starting at position 2955 of SEQ ID NO: 1882491
cuauaucuuuccuugaguu

SEQ ID NO: 2125295 - RNA, 19 nt, Artificial Sequence
  Description of Artificial Sequence: Synthetic oligonucleotide
  Antisense strand to SEQ ID NO: 2125294
aacucaaggaaagauauag

SEQ ID NO: 2125296 - RNA, 19 nt, Artificial Sequence
  Description of Artificial Sequence: Synthetic oligonucleotide
  Sense strand starting at position 2969 of SEQ ID NO: 1882491
gaguuacucugaguuaagu

SEQ ID NO: 2125297 - RNA, 19 nt, Artificial Sequence
  Description of Artificial Sequence: Synthetic oligonucleotide
  Antisense strand to SEQ ID NO: 2125296
acuuaacucagaguaacuc

SEQ ID NO: 2125298 - RNA, 19 nt, Artificial Sequence
  Description of Artificial Sequence: Synthetic oligonucleotide
  Sense strand starting at position 2971 of SEQ ID NO: 1882491
guuacucugaguuaaguca

SEQ ID NO: 2125299 - RNA, 19 nt, Artificial Sequence
  Description of Artificial Sequence: Synthetic oligonucleotide
  Antisense strand to SEQ ID NO: 2125298
ugacuuaacucagaguaac

SEQ ID NO: 2125300 - RNA, 19 nt, Artificial Sequence
  Description of Artificial Sequence: Synthetic oligonucleotide
  Sense strand starting at position 2986 of SEQ ID NO: 1882491
gucacacuaccugaaguua

SEQ ID NO: 2125301 - RNA, 19 nt, Artificial Sequence
  Description of Artificial Sequence: Synthetic oligonucleotide
  Antisense strand to SEQ ID NO: 2125300
uaacuucagguagugugac

SEQ ID NO: 2125302 - RNA, 19 nt, Artificial Sequence
  Description of Artificial Sequence: Synthetic oligonucleotide
  Sense strand starting at position 3149 of SEQ ID NO: 1882491
gcaacagaauagcuuuaua

SEQ ID NO: 2125303 - RNA, 19 nt, Artificial Sequence
  Description of Artificial Sequence: Synthetic oligonucleotide
  Antisense strand to SEQ ID NO: 2125302
uauaaagcuauucuguugc

SEQ ID NO: 2125304 - RNA, 19 nt, Artificial Sequence
  Description of Artificial Sequence: Synthetic oligonucleotide
  Sense strand starting at position 3290 of SEQ ID NO: 1882491
uguugucaucuuuaaagac

SEQ ID NO: 2125305 - RNA, 19 nt, Artificial Sequence
  Description of Artificial Sequence: Synthetic oligonucleotide
  Antisense strand to SEQ ID NO: 2125304
gucuuuaaagaugacaaca

SEQ ID NO: 2125306 - RNA, 19 nt, Artificial Sequence
  Description of Artificial Sequence: Synthetic oligonucleotide
  Sense strand starting at position 3416 of SEQ ID NO: 1882491
guugcauuggauuaaaugu

SEQ ID NO: 2125307 - RNA, 19 nt, Artificial Sequence
  Description of Artificial Sequence: Synthetic oligonucleotide
  Antisense strand to SEQ ID NO: 2125306
acauuuaauccaaugcaac

SEQ ID NO: 2125308 - RNA, 19 nt, Artificial Sequence
  Description of Artificial Sequence: Synthetic oligonucleotide
  Sense strand starting at position 3601 of SEQ ID NO: 1882491
acaauuagagcaugaaucu

SEQ ID NO: 2125309 - RNA, 19 nt, Artificial Sequence
  Description of Artificial Sequence: Synthetic oligonucleotide
  Antisense strand to SEQ ID NO: 2125308
agauucaugcucuaauugu

SEQ ID NO: 2125310 - RNA, 19 nt, Artificial Sequence
  Description of Artificial Sequence: Synthetic oligonucleotide
  Sense strand starting at position 3630 of SEQ ID NO: 1882491
gcagcaccuuaaguaauuu

SEQ ID NO: 2125311 - RNA, 19 nt, Artificial Sequence
  Description of Artificial Sequence: Synthetic oligonucleotide
  Antisense strand to SEQ ID NO: 2125310
aaauuacuuaaggugcugc

SEQ ID NO: 2125312 - RNA, 19 nt, Artificial Sequence
  Description of Artificial Sequence: Synthetic oligonucleotide
  Sense strand starting at position 3824 of SEQ ID NO: 1882491
auagaagacugacauuugu

SEQ ID NO: 2125313 - RNA, 19 nt, Artificial Sequence
  Description of Artificial Sequence: Synthetic oligonucleotide
  Antisense strand to SEQ ID NO: 2125312
acaaaugucagucuucuau

SEQ ID NO: 2125314 - RNA, 19 nt, Artificial Sequence
  Description of Artificial Sequence: Synthetic oligonucleotide
  Sense strand starting at position 3830 of SEQ ID NO: 1882491
gacugacauuuguagguaa

SEQ ID NO: 2125315 - RNA, 19 nt, Artificial Sequence
  Description of Artificial Sequence: Synthetic oligonucleotide
  Antisense strand to SEQ ID NO: 2125314
uuaccuacaaaugucaguc

SEQ ID NO: 2125316 - RNA, 19 nt, Artificial Sequence
  Description of Artificial Sequence: Synthetic oligonucleotide
  Sense strand starting at position 34 of SEQ ID NO: 1882492
gucgacauuucuguagacu

SEQ ID NO: 2125317 - RNA, 19 nt, Artificial Sequence
  Description of Artificial Sequence: Synthetic oligonucleotide
  Antisense strand to SEQ ID NO: 2125316
agucuacagaaaugucgac

SEQ ID NO: 2125318 - RNA, 19 nt, Artificial Sequence
  Description of Artificial Sequence: Synthetic oligonucleotide
  Sense strand starting at position 149 of SEQ ID NO: 1882492
auagaacucuuggauauuu

SEQ ID NO: 2125319 - RNA, 19 nt, Artificial Sequence
  Description of Artificial Sequence: Synthetic oligonucleotide
  Antisense strand to SEQ ID NO: 2125318
aaauauccaagaguucuau

SEQ ID NO: 2125320 - RNA, 19 nt, Artificial Sequence
  Description of Artificial Sequence: Synthetic oligonucleotide
  Sense strand starting at position 382 of SEQ ID NO: 1882492
guaacauaagugcagauaa

SEQ ID NO: 2125321 - RNA, 19 nt, Artificial Sequence
  Description of Artificial Sequence: Synthetic oligonucleotide
  Antisense strand to SEQ ID NO: 2125320
uuaucugcacuuauguuac

SEQ ID NO: 2125322 - RNA, 19 nt, Artificial Sequence
  Description of Artificial Sequence: Synthetic oligonucleotide
  Sense strand starting at position 400 of SEQ ID NO: 1882492
aagggaaguugcuuaauau

SEQ ID NO: 2125323 - RNA, 19 nt, Artificial Sequence
  Description of Artificial Sequence: Synthetic oligonucleotide
  Antisense strand to SEQ ID NO: 2125322
auauuaagcaacuucccuu

SEQ ID NO: 2125324 - RNA, 19 nt, Artificial Sequence
  Description of Artificial Sequence: Synthetic oligonucleotide
  Sense strand starting at position 538 of SEQ ID NO: 1882492
gucugaaacggugauauac

SEQ ID NO: 2125325 - RNA, 19 nt, Artificial Sequence
  Description of Artificial Sequence: Synthetic oligonucleotide
  Antisense strand to SEQ ID NO: 2125324
guauaucaccguuucagac

SEQ ID NO: 2125326 - RNA, 19 nt, Artificial Sequence
  Description of Artificial Sequence: Synthetic oligonucleotide
  Sense strand starting at position 626 of SEQ ID NO: 1882492
guagauuccucauccugag

SEQ ID NO: 2125327 - RNA, 19 nt, Artificial Sequence
  Description of Artificial Sequence: Synthetic oligonucleotide
  Antisense strand to SEQ ID NO: 2125326
cucaggaugaggaaucuac

SEQ ID NO: 2125328 - RNA, 19 nt, Artificial Sequence
  Description of Artificial Sequence: Synthetic oligonucleotide
  Sense strand starting at position 676 of SEQ ID NO: 1882492
guguauccaguuuagaaac

SEQ ID NO: 2125329 - RNA, 19 nt, Artificial Sequence
  Description of Artificial Sequence: Synthetic oligonucleotide
  Antisense strand to SEQ ID NO: 2125328
guuucuaaacuggauacac

SEQ ID NO: 2125330 - RNA, 19 nt, Artificial Sequence
  Description of Artificial Sequence: Synthetic oligonucleotide
  Sense strand starting at position 727 of SEQ ID NO: 1882492
cuguauuuguggucauuau

SEQ ID NO: 2125331 - RNA, 19 nt, Artificial Sequence
  Description of Artificial Sequence: Synthetic oligonucleotide
  Antisense strand to SEQ ID NO: 2125330
auaaugaccacaaauacag

SEQ ID NO: 2125332 - RNA, 19 nt, Artificial Sequence
  Description of Artificial Sequence: Synthetic oligonucleotide
  Sense strand starting at position 1095 of SEQ ID NO: 1882492
uaaguaauggaauaugugu

SEQ ID NO: 2125333 - RNA, 19 nt, Artificial Sequence
  Description of Artificial Sequence: Synthetic oligonucleotide
  Antisense strand to SEQ ID NO: 2125332
acacauauuccauuacuua

SEQ ID NO: 2125334 - RNA, 19 nt, Artificial Sequence
  Description of Artificial Sequence: Synthetic oligonucleotide
  Sense strand starting at position 1100 of SEQ ID NO: 1882492
aauggaauauguguguaaa

SEQ ID NO: 2125335 - RNA, 19 nt, Artificial Sequence
  Description of Artificial Sequence: Synthetic oligonucleotide
  Antisense strand to SEQ ID NO: 2125334
uuuacacacauauuccauu

SEQ ID NO: 2125336 - RNA, 19 nt, Artificial Sequence
  Description of Artificial Sequence: Synthetic oligonucleotide
  Sense strand starting at position 1103 of SEQ ID NO: 1882492
ggaauauguguguaaacca

SEQ ID NO: 2125337 - RNA, 19 nt, Artificial Sequence
  Description of Artificial Sequence: Synthetic oligonucleotide
  Antisense strand to SEQ ID NO: 2125336
ugguuuacacacauauucc

SEQ ID NO: 2125338 - RNA, 19 nt, Artificial Sequence
  Description of Artificial Sequence: Synthetic oligonucleotide
  Sense strand starting at position 1142 of SEQ ID NO: 1882492
acucuuuaggguugauuaa

SEQ ID NO: 2125339 - RNA, 19 nt, Artificial Sequence
  Description of Artificial Sequence: Synthetic oligonucleotide
  Antisense strand to SEQ ID NO: 2125338
uuaaucaacccuaaagagu

SEQ ID NO: 2125340 - RNA, 19 nt, Artificial Sequence
  Description of Artificial Sequence: Synthetic oligonucleotide
  Sense strand starting at position 1143 of SEQ ID NO: 1882492
cucuuuaggguugauuaau

SEQ ID NO: 2125341 - RNA, 19 nt, Artificial Sequence
  Description of Artificial Sequence: Synthetic oligonucleotide
  Antisense strand to SEQ ID NO: 2125340
auuaaucaacccuaaagag

SEQ ID NO: 2125342 - RNA, 19 nt, Artificial Sequence
  Description of Artificial Sequence: Synthetic oligonucleotide
  Sense strand starting at position 1279 of SEQ ID NO: 1882492
uuugguuaggaguaaucua

SEQ ID NO: 2125343 - RNA, 19 nt, Artificial Sequence
  Description of Artificial Sequence: Synthetic oligonucleotide
  Antisense strand to SEQ ID NO: 2125342
uagauuacuccuaaccaaa

SEQ ID NO: 2125344 - RNA, 19 nt, Artificial Sequence
  Description of Artificial Sequence: Synthetic oligonucleotide
  Sense strand starting at position 1391 of SEQ ID NO: 1882492
gugugacaucuccaaggau

SEQ ID NO: 2125345 - RNA, 19 nt, Artificial Sequence
  Description of Artificial Sequence: Synthetic oligonucleotide
  Antisense strand to SEQ ID NO: 2125344
auccuuggagaugucacac

SEQ ID NO: 2125346 - RNA, 19 nt, Artificial Sequence
  Description of Artificial Sequence: Synthetic oligonucleotide
  Sense strand starting at position 1634 of SEQ ID NO: 1882492
gaauaucaaguuuggauau

SEQ ID NO: 2125347 - RNA, 19 nt, Artificial Sequence
  Description of Artificial Sequence: Synthetic oligonucleotide
  Antisense strand to SEQ ID NO: 2125346
auauccaaacuugauauuc

SEQ ID NO: 2125348 - RNA, 19 nt, Artificial Sequence
  Description of Artificial Sequence: Synthetic oligonucleotide
  Sense strand starting at position 2324 of SEQ ID NO: 1882492
ggcuuacugaugcagaauc

SEQ ID NO: 2125349 - RNA, 19 nt, Artificial Sequence
  Description of Artificial Sequence: Synthetic oligonucleotide
  Antisense strand to SEQ ID NO: 2125348
gauucugcaucaguaagcc

SEQ ID NO: 2125350 - RNA, 19 nt, Artificial Sequence
  Description of Artificial Sequence: Synthetic oligonucleotide
  Sense strand starting at position 2388 of SEQ ID NO: 1882492
ggaccugacacaugcugaa

SEQ ID NO: 2125351 - RNA, 19 nt, Artificial Sequence
  Description of Artificial Sequence: Synthetic oligonucleotide
  Antisense strand to SEQ ID NO: 2125350
uucagcaugugucaggucc

SEQ ID NO: 2125352 - RNA, 19 nt, Artificial Sequence
  Description of Artificial Sequence: Synthetic oligonucleotide
  Sense strand starting at position 2420 of SEQ ID NO: 1882492
guaguaagagcgucuguuu

SEQ ID NO: 2125353 - RNA, 19 nt, Artificial Sequence
  Description of Artificial Sequence: Synthetic oligonucleotide
  Antisense strand to SEQ ID NO: 2125352
aaacagacgcucuuacuac

SEQ ID NO: 2125354 - RNA, 19 nt, Artificial Sequence
  Description of Artificial Sequence: Synthetic oligonucleotide
  Sense strand starting at position 2459 of SEQ ID NO: 1882492
gaaguucucaaguagguag

SEQ ID NO: 2125355 - RNA, 19 nt, Artificial Sequence
  Description of Artificial Sequence: Synthetic oligonucleotide
  Antisense strand to SEQ ID NO: 2125354
cuaccuacuugagaacuuc

SEQ ID NO: 2125356 - RNA, 19 nt, Artificial Sequence
  Description of Artificial Sequence: Synthetic oligonucleotide
  Sense strand starting at position 2477 of SEQ ID NO: 1882492
guguaaagucaugaaucua

SEQ ID NO: 2125357 - RNA, 19 nt, Artificial Sequence
  Description of Artificial Sequence: Synthetic oligonucleotide
  Antisense strand to SEQ ID NO: 2125356
uagauucaugacuuuacac

SEQ ID NO: 2125358 - RNA, 19 nt, Artificial Sequence
  Description of Artificial Sequence: Synthetic oligonucleotide
  Sense strand starting at position 2595 of SEQ ID NO: 1882492
gaaauaagccuaggugaau

SEQ ID NO: 2125359 - RNA, 19 nt, Artificial Sequence
  Description of Artificial Sequence: Synthetic oligonucleotide
  Antisense strand to SEQ ID NO: 2125358
auucaccuaggcuuauuuc

SEQ ID NO: 2125360 - RNA, 19 nt, Artificial Sequence
  Description of Artificial Sequence: Synthetic oligonucleotide
  Sense strand starting at position 2733 of SEQ ID NO: 1882492
gacucaacuuugcugagga

SEQ ID NO: 2125361 - RNA, 19 nt, Artificial Sequence
  Description of Artificial Sequence: Synthetic oligonucleotide
  Antisense strand to SEQ ID NO: 2125360
uccucagcaaaguugaguc

SEQ ID NO: 2125362 - RNA, 19 nt, Artificial Sequence
  Description of Artificial Sequence: Synthetic oligonucleotide
  Sense strand starting at position 2735 of SEQ ID NO: 1882492
cucaacuuugcugaggauu

SEQ ID NO: 2125363 - RNA, 19 nt, Artificial Sequence
  Description of Artificial Sequence: Synthetic oligonucleotide
  Antisense strand to SEQ ID NO: 2125362
aauccucagcaaaguugag

SEQ ID NO: 2125364 - RNA, 19 nt, Artificial Sequence
  Description of Artificial Sequence: Synthetic oligonucleotide
  Sense strand starting at position 2810 of SEQ ID NO: 1882492
aaaugaugagugugaauua

SEQ ID NO: 2125365 - RNA, 19 nt, Artificial Sequence
  Description of Artificial Sequence: Synthetic oligonucleotide
  Antisense strand to SEQ ID NO: 2125364
uaauucacacucaucauuu

SEQ ID NO: 2125366 - RNA, 19 nt, Artificial Sequence
  Description of Artificial Sequence: Synthetic oligonucleotide
  Sense strand starting at position 2862 of SEQ ID NO: 1882492
uuggguuauuuggcucuca

SEQ ID NO: 2125367 - RNA, 19 nt, Artificial Sequence
  Description of Artificial Sequence: Synthetic oligonucleotide
  Antisense strand to SEQ ID NO: 2125366
ugagagccaaauaacccaa

SEQ ID NO: 2125368 - RNA, 19 nt, Artificial Sequence
  Description of Artificial Sequence: Synthetic oligonucleotide
  Sense strand starting at position 3130 of SEQ ID NO: 1882492
auuaguuuaagcgaggauu

SEQ ID NO: 2125369 - RNA, 19 nt, Artificial Sequence
  Description of Artificial Sequence: Synthetic oligonucleotide
  Antisense strand to SEQ ID NO: 2125368
aauccucgcuuaaacuaau

SEQ ID NO: 2125370 - RNA, 19 nt, Artificial Sequence
  Description of Artificial Sequence: Synthetic oligonucleotide
  Sense strand starting at position 3133 of SEQ ID NO: 1882492
aguuuaagcgaggauucac

SEQ ID NO: 2125371 - RNA, 19 nt, Artificial Sequence
  Description of Artificial Sequence: Synthetic oligonucleotide
  Antisense strand to SEQ ID NO: 2125370
gugaauccucgcuuaaacu

SEQ ID NO: 2125372 - RNA, 19 nt, Artificial Sequence
  Description of Artificial Sequence: Synthetic oligonucleotide
  Sense strand starting at position 3192 of SEQ ID NO: 1882492
gguuuauagcuggacugau

SEQ ID NO: 2125373 - RNA, 19 nt, Artificial Sequence
  Description of Artificial Sequence: Synthetic oligonucleotide
  Antisense strand to SEQ ID NO: 2125372
aucaguccagcuauaaacc

SEQ ID NO: 2125374 - RNA, 19 nt, Artificial Sequence
  Description of Artificial Sequence: Synthetic oligonucleotide
  Sense strand starting at position 3205 of SEQ ID NO: 1882492
acugauaucguuuaaaucu

SEQ ID NO: 2125375 - RNA, 19 nt, Artificial Sequence
  Description of Artificial Sequence: Synthetic oligonucleotide
  Antisense strand to SEQ ID NO: 2125374
agauuuaaacgauaucagu

SEQ ID NO: 2125376 - RNA, 19 nt, Artificial Sequence
  Description of Artificial Sequence: Synthetic oligonucleotide
  Sense strand starting at position 3213 of SEQ ID NO: 1882492
cguuuaaaucuggaacucu

SEQ ID NO: 2125377 - RNA, 19 nt, Artificial Sequence
  Description of Artificial Sequence: Synthetic oligonucleotide
  Antisense strand to SEQ ID NO: 2125376
agaguuccagauuuaaacg

SEQ ID NO: 2125378 - RNA, 19 nt, Artificial Sequence
  Description of Artificial Sequence: Synthetic oligonucleotide
  Sense strand starting at position 3405 of SEQ ID NO: 1882492
gagguuguuccagaucuua

SEQ ID NO: 2125379 - RNA, 19 nt, Artificial Sequence
  Description of Artificial Sequence: Synthetic oligonucleotide
  Antisense strand to SEQ ID NO: 2125378
uaagaucuggaacaaccuc

SEQ ID NO: 2125380 - RNA, 19 nt, Artificial Sequence
  Description of Artificial Sequence: Synthetic oligonucleotide
  Sense strand starting at position 3429 of SEQ ID NO: 1882492
ucacuaugcccagagguaa

SEQ ID NO: 2125381 - RNA, 19 nt, Artificial Sequence
  Description of Artificial Sequence: Synthetic oligonucleotide
  Antisense strand to SEQ ID NO: 2125380
uuaccucugggcauaguga

SEQ ID NO: 2125382 - RNA, 19 nt, Artificial Sequence
  Description of Artificial Sequence: Synthetic oligonucleotide
  Sense strand starting at position 3470 of SEQ ID NO: 1882492
agggaaugauccuccagcu

SEQ ID NO: 2125383 - RNA, 19 nt, Artificial Sequence
  Description of Artificial Sequence: Synthetic oligonucleotide
  Antisense strand to SEQ ID NO: 2125382
agcuggaggaucauucccu

SEQ ID NO: 2125384 - RNA, 19 nt, Artificial Sequence
  Description of Artificial Sequence: Synthetic oligonucleotide
  Sense strand starting at position 3541 of SEQ ID NO: 1882492
aagacugagugccuagauu

SEQ ID NO: 2125385 - RNA, 19 nt, Artificial Sequence
  Description of Artificial Sequence: Synthetic oligonucleotide
  Antisense strand to SEQ ID NO: 2125384
aaucuaggcacucagucuu

SEQ ID NO: 2125386 - RNA, 19 nt, Artificial Sequence
  Description of Artificial Sequence: Synthetic oligonucleotide
  Sense strand starting at position 3616 of SEQ ID NO: 1882492
cuuggugagcuauagauua

SEQ ID NO: 2125387 - RNA, 19 nt, Artificial Sequence
  Description of Artificial Sequence: Synthetic oligonucleotide
  Antisense strand to SEQ ID NO: 2125386
uaaucuauagcucaccaag

SEQ ID NO: 2125388 - RNA, 19 nt, Artificial Sequence
  Description of Artificial Sequence: Synthetic oligonucleotide
  Sense strand starting at position 3618 of SEQ ID NO: 1882492
uggugagcuauagauuaua

SEQ ID NO: 2125389 - RNA, 19 nt, Artificial Sequence
  Description of Artificial Sequence: Synthetic oligonucleotide
  Antisense strand to SEQ ID NO: 2125388
uauaaucuauagcucacca

SEQ ID NO: 2125390 - RNA, 19 nt, Artificial Sequence
  Description of Artificial Sequence: Synthetic oligonucleotide
  Sense strand starting at position 3826 of SEQ ID NO: 1882492
aguguuucucaucaugaca

SEQ ID NO: 2125391 - RNA, 19 nt, Artificial Sequence
  Description of Artificial Sequence: Synthetic oligonucleotide
  Antisense strand to SEQ ID NO: 2125390
ugucaugaugagaaacacu

SEQ ID NO: 2125392 - RNA, 19 nt, Artificial Sequence
  Description of Artificial Sequence: Synthetic oligonucleotide
  Sense strand starting at position 3877 of SEQ ID NO: 1882492
ugcuuccugccugugagua

SEQ ID NO: 2125393 - RNA, 19 nt, Artificial Sequence
  Description of Artificial Sequence: Synthetic oligonucleotide
  Antisense strand to SEQ ID NO: 2125392
uacucacaggcaggaagca

SEQ ID NO: 2125394 - RNA, 19 nt, Artificial Sequence
  Description of Artificial Sequence: Synthetic oligonucleotide
  Sense strand starting at position 3939 of SEQ ID NO: 1882492
cgccucucaccugaagaua

SEQ ID NO: 2125395 - RNA, 19 nt, Artificial Sequence
  Description of Artificial Sequence: Synthetic oligonucleotide
  Antisense strand to SEQ ID NO: 2125394
uaucuucaggugagaggcg

SEQ ID NO: 2125396 - RNA, 19 nt, Artificial Sequence
  Description of Artificial Sequence: Synthetic oligonucleotide
  Sense strand starting at position 291 of SEQ ID NO: 1882493
aucuuugaccauuggaguu

SEQ ID NO: 2125397 - RNA, 19 nt, Artificial Sequence
  Description of Artificial Sequence: Synthetic oligonucleotide
  Antisense strand to SEQ ID NO: 2125396
aacuccaauggucaaagau

SEQ ID NO: 2125398 - RNA, 19 nt, Artificial Sequence
  Description of Artificial Sequence: Synthetic oligonucleotide
  Sense strand starting at position 293 of SEQ ID NO: 1882493
cuuugaccauuggaguuua

SEQ ID NO: 2125399 - RNA, 19 nt, Artificial Sequence
  Description of Artificial Sequence: Synthetic oligonucleotide
  Antisense strand to SEQ ID NO: 2125398
uaaacuccaauggucaaag

SEQ ID NO: 2125400 - RNA, 19 nt, Artificial Sequence
  Description of Artificial Sequence: Synthetic oligonucleotide
  Sense strand starting at position 367 of SEQ ID NO: 1882493
ucaauuacauguggaauuu

SEQ ID NO: 2125401 - RNA, 19 nt, Artificial Sequence
  Description of Artificial Sequence: Synthetic oligonucleotide
  Antisense strand to SEQ ID NO: 2125400
aaauuccacauguaauuga

SEQ ID NO: 2125402 - RNA, 19 nt, Artificial Sequence
  Description of Artificial Sequence: Synthetic oligonucleotide
  Sense strand starting at position 468 of SEQ ID NO: 1882493
ccuugaauauugguaucuu

SEQ ID NO: 2125403 - RNA, 19 nt, Artificial Sequence
  Description of Artificial Sequence: Synthetic oligonucleotide
  Antisense strand to SEQ ID NO: 2125402
aagauaccaauauucaagg

SEQ ID NO: 2125404 - RNA, 19 nt, Artificial Sequence
  Description of Artificial Sequence: Synthetic oligonucleotide
  Sense strand starting at position 472 of SEQ ID NO: 1882493
gaauauugguaucuuuguu

SEQ ID NO: 2125405 - RNA, 19 nt, Artificial Sequence
  Description of Artificial Sequence: Synthetic oligonucleotide
  Antisense strand to SEQ ID NO: 2125404
aacaaagauaccaauauuc

SEQ ID NO: 2125406 - RNA, 19 nt, Artificial Sequence
  Description of Artificial Sequence: Synthetic oligonucleotide
  Sense strand starting at position 477 of SEQ ID NO: 1882493
uugguaucuuuguuuaggu

SEQ ID NO: 2125407 - RNA, 19 nt, Artificial Sequence
  Description of Artificial Sequence: Synthetic oligonucleotide
  Antisense strand to SEQ ID NO: 2125406
accuaaacaaagauaccaa

SEQ ID NO: 2125408 - RNA, 19 nt, Artificial Sequence
  Description of Artificial Sequence: Synthetic oligonucleotide
  Sense strand starting at position 478 of SEQ ID NO: 1882493
ugguaucuuuguuuagguu

SEQ ID NO: 2125409 - RNA, 19 nt, Artificial Sequence
  Description of Artificial Sequence: Synthetic oligonucleotide
  Antisense strand to SEQ ID NO: 2125408
aaccuaaacaaagauacca

SEQ ID NO: 2125410 - RNA, 19 nt, Artificial Sequence
  Description of Artificial Sequence: Synthetic oligonucleotide
  Sense strand starting at position 479 of SEQ ID NO: 1882493
gguaucuuuguuuagguuu

SEQ ID NO: 2125411 - RNA, 19 nt, Artificial Sequence
  Description of Artificial Sequence: Synthetic oligonucleotide
  Antisense strand to SEQ ID NO: 2125410
aaaccuaaacaaagauacc

SEQ ID NO: 2125412 - RNA, 19 nt, Artificial Sequence
  Description of Artificial Sequence: Synthetic oligonucleotide
  Sense strand starting at position 487 of SEQ ID NO: 1882493
uguuuagguuucucuguua

SEQ ID NO: 2125413 - RNA, 19 nt, Artificial Sequence
  Description of Artificial Sequence: Synthetic oligonucleotide
  Antisense strand to SEQ ID NO: 2125412
uaacagagaaaccuaaaca

SEQ ID NO: 2125414 - RNA, 19 nt, Artificial Sequence
  Description of Artificial Sequence: Synthetic oligonucleotide
  Sense strand starting at position 490 of SEQ ID NO: 1882493
uuagguuucucuguuauua

SEQ ID NO: 2125415 - RNA, 19 nt, Artificial Sequence
  Description of Artificial Sequence: Synthetic oligonucleotide
  Antisense strand to SEQ ID NO: 2125414
uaauaacagagaaaccuaa

SEQ ID NO: 2125416 - RNA, 19 nt, Artificial Sequence
  Description of Artificial Sequence: Synthetic oligonucleotide
  Sense strand starting at position 643 of SEQ ID NO: 1882493
uuuggauccucugugcauu

SEQ ID NO: 2125417 - RNA, 19 nt, Artificial Sequence
  Description of Artificial Sequence: Synthetic oligonucleotide
  Antisense strand to SEQ ID NO: 2125416
aaugcacagaggauccaaa

SEQ ID NO: 2125418 - RNA, 19 nt, Artificial Sequence
  Description of Artificial Sequence: Synthetic oligonucleotide
  Sense strand starting at position 716 of SEQ ID NO: 1882493
gcuauuagauacucugaug

SEQ ID NO: 2125419 - RNA, 19 nt, Artificial Sequence
  Description of Artificial Sequence: Synthetic oligonucleotide
  Antisense strand to SEQ ID NO: 2125418
caucagaguaucuaauagc

SEQ ID NO: 2125420 - RNA, 19 nt, Artificial Sequence
  Description of Artificial Sequence: Synthetic oligonucleotide
  Sense strand starting at position 719 of SEQ ID NO: 1882493
auuagauacucugaugauu

SEQ ID NO: 2125421 - RNA, 19 nt, Artificial Sequence
  Description of Artificial Sequence: Synthetic oligonucleotide
  Antisense strand to SEQ ID NO: 2125420
aaucaucagaguaucuaau

SEQ ID NO: 2125422 - RNA, 19 nt, Artificial Sequence
  Description of Artificial Sequence: Synthetic oligonucleotide
  Sense strand starting at position 741 of SEQ ID NO: 1882493
ucaguaugucuauggcauu

SEQ ID NO: 2125423 - RNA, 19 nt, Artificial Sequence
  Description of Artificial Sequence: Synthetic oligonucleotide
  Antisense strand to SEQ ID NO: 2125422
aaugccauagacauacuga

SEQ ID NO: 2125424 - RNA, 19 nt, Artificial Sequence
  Description of Artificial Sequence: Synthetic oligonucleotide
  Sense strand starting at position 822 of SEQ ID NO: 1882493
cugauaagauucugaauug

SEQ ID NO: 2125425 - RNA, 19 nt, Artificial Sequence
  Description of Artificial Sequence: Synthetic oligonucleotide
  Antisense strand to SEQ ID NO: 2125424
caauucagaaucuuaucag

SEQ ID NO: 2125426 - RNA, 19 nt, Artificial Sequence
  Description of Artificial Sequence: Synthetic oligonucleotide
  Sense strand starting at position 842 of SEQ ID NO: 1882493
uucucuguguuacccaaau

SEQ ID NO: 2125427 - RNA, 19 nt, Artificial Sequence
  Description of Artificial Sequence: Synthetic oligonucleotide
  Antisense strand to SEQ ID NO: 2125426
auuuggguaacacagagaa

SEQ ID NO: 2125428 - RNA, 19 nt, Artificial Sequence
  Description of Artificial Sequence: Synthetic oligonucleotide
  Sense strand starting at position 920 of SEQ ID NO: 1882493
gcuguuucuccaggauuuc

SEQ ID NO: 2125429 - RNA, 19 nt, Artificial Sequence
  Description of Artificial Sequence: Synthetic oligonucleotide
  Antisense strand to SEQ ID NO: 2125428
gaaauccuggagaaacagc

SEQ ID NO: 2125430 - RNA, 19 nt, Artificial Sequence
  Description of Artificial Sequence: Synthetic oligonucleotide
  Sense strand starting at position 981 of SEQ ID NO: 1882493
ccuggaugaucucuaugcu

SEQ ID NO: 2125431 - RNA, 19 nt, Artificial Sequence
  Description of Artificial Sequence: Synthetic oligonucleotide
  Antisense strand to SEQ ID NO: 2125430
agcauagagaucauccagg

SEQ ID NO: 2125432 - RNA, 19 nt, Artificial Sequence
  Description of Artificial Sequence: Synthetic oligonucleotide
  Sense strand starting at position 982 of SEQ ID NO: 1882493
cuggaugaucucuaugcuu

SEQ ID NO: 2125433 - RNA, 19 nt, Artificial Sequence
  Description of Artificial Sequence: Synthetic oligonucleotide
  Antisense strand to SEQ ID NO: 2125432
aagcauagagaucauccag

SEQ ID NO: 2125434 - RNA, 19 nt, Artificial Sequence
  Description of Artificial Sequence: Synthetic oligonucleotide
  Sense strand starting at position 984 of SEQ ID NO: 1882493
ggaugaucucuaugcuugu

SEQ ID NO: 2125435 - RNA, 19 nt, Artificial Sequence
  Description of Artificial Sequence: Synthetic oligonucleotide
  Antisense strand to SEQ ID NO: 2125434
acaagcauagagaucaucc

SEQ ID NO: 2125436 - RNA, 19 nt, Artificial Sequence
  Description of Artificial Sequence: Synthetic oligonucleotide
  Sense strand starting at position 988 of SEQ ID NO: 1882493
gaucucuaugcuuguggau

SEQ ID NO: 2125437 - RNA, 19 nt, Artificial Sequence
  Description of Artificial Sequence: Synthetic oligonucleotide
  Antisense strand to SEQ ID NO: 2125436
auccacaagcauagagauc

SEQ ID NO: 2125438 - RNA, 19 nt, Artificial Sequence
  Description of Artificial Sequence: Synthetic oligonucleotide
  Sense strand starting at position 994 of SEQ ID NO: 1882493
uaugcuuguggauguuuau

SEQ ID NO: 2125439 - RNA, 19 nt, Artificial Sequence
  Description of Artificial Sequence: Synthetic oligonucleotide
  Antisense strand to SEQ ID NO: 2125438
auaaacauccacaagcaua

SEQ ID NO: 2125440 - RNA, 19 nt, Artificial Sequence
  Description of Artificial Sequence: Synthetic oligonucleotide
  Sense strand starting at position 1000 of SEQ ID NO: 1882493
uguggauguuuauugguga

SEQ ID NO: 2125441 - RNA, 19 nt, Artificial Sequence
  Description of Artificial Sequence: Synthetic oligonucleotide
  Antisense strand to SEQ ID NO: 2125440
ucaccaauaaacauccaca

SEQ ID NO: 2125442 - RNA, 19 nt, Artificial Sequence
  Description of Artificial Sequence: Synthetic oligonucleotide
  Sense strand starting at position 1078 of SEQ ID NO: 1882493
uauccuucuugggaaaggu

SEQ ID NO: 2125443 - RNA, 19 nt, Artificial Sequence
  Description of Artificial Sequence: Synthetic oligonucleotide
  Antisense strand to SEQ ID NO: 2125442
accuuucccaagaaggaua

SEQ ID NO: 2125444 - RNA, 19 nt, Artificial Sequence
  Description of Artificial Sequence: Synthetic oligonucleotide
  Sense strand starting at position 1087 of SEQ ID NO: 1882493
ugggaaagguuuccaagca

SEQ ID NO: 2125445 - RNA, 19 nt, Artificial Sequence
  Description of Artificial Sequence: Synthetic oligonucleotide
  Antisense strand to SEQ ID NO: 2125444
ugcuuggaaaccuuuccca

SEQ ID NO: 2125446 - RNA, 19 nt, Artificial Sequence
  Description of Artificial Sequence: Synthetic oligonucleotide
  Sense strand starting at position 1088 of SEQ ID NO: 1882493
gggaaagguuuccaagcau

SEQ ID NO: 2125447 - RNA, 19 nt, Artificial Sequence
  Description of Artificial Sequence: Synthetic oligonucleotide
  Antisense strand to SEQ ID NO: 2125446
augcuuggaaaccuuuccc

SEQ ID NO: 2125448 - RNA, 19 nt, Artificial Sequence
  Description of Artificial Sequence: Synthetic oligonucleotide
  Sense strand starting at position 1110 of SEQ ID NO: 1882493
aagaguguuggguguuguu

SEQ ID NO: 2125449 - RNA, 19 nt, Artificial Sequence
  Description of Artificial Sequence: Synthetic oligonucleotide
  Antisense strand to SEQ ID NO: 2125448
aacaacacccaacacucuu

SEQ ID NO: 2125450 - RNA, 19 nt, Artificial Sequence
  Description of Artificial Sequence: Synthetic oligonucleotide
  Sense strand starting at position 1119 of SEQ ID NO: 1882493
ggguguuguuaucuaaguu

SEQ ID NO: 2125451 - RNA, 19 nt, Artificial Sequence
  Description of Artificial Sequence: Synthetic oligonucleotide
  Antisense strand to SEQ ID NO: 2125450
aacuuagauaacaacaccc

SEQ ID NO: 2125452 - RNA, 19 nt, Artificial Sequence
  Description of Artificial Sequence: Synthetic oligonucleotide
  Sense strand starting at position 1120 of SEQ ID NO: 1882493
gguguuguuaucuaaguuu

SEQ ID NO: 2125453 - RNA, 19 nt, Artificial Sequence
  Description of Artificial Sequence: Synthetic oligonucleotide
  Antisense strand to SEQ ID NO: 2125452
aaacuuagauaacaacacc

SEQ ID NO: 2125454 - RNA, 19 nt, Artificial Sequence
  Description of Artificial Sequence: Synthetic oligonucleotide
  Sense strand starting at position 1211 of SEQ ID NO: 1882493
cuugguagucuugguuaaa

SEQ ID NO: 2125455 - RNA, 19 nt, Artificial Sequence
  Description of Artificial Sequence: Synthetic oligonucleotide
  Antisense strand to SEQ ID NO: 2125454
uuuaaccaagacuaccaag

SEQ ID NO: 2125456 - RNA, 19 nt, Artificial Sequence
  Description of Artificial Sequence: Synthetic oligonucleotide
  Sense strand starting at position 1382 of SEQ ID NO: 1882493
gcugcaaugggucagaucu

SEQ ID NO: 2125457 - RNA, 19 nt, Artificial Sequence
  Description of Artificial Sequence: Synthetic oligonucleotide
  Antisense strand to SEQ ID NO: 2125456
agaucugacccauugcagc

SEQ ID NO: 2125458 - RNA, 19 nt, Artificial Sequence
  Description of Artificial Sequence: Synthetic oligonucleotide
  Sense strand starting at position 1450 of SEQ ID NO: 1882493
cuaguuaccaucugugugu

SEQ ID NO: 2125459 - RNA, 19 nt, Artificial Sequence
  Description of Artificial Sequence: Synthetic oligonucleotide
  Antisense strand to SEQ ID NO: 2125458
acacacagaugguaacuag

SEQ ID NO: 2125460 - RNA, 19 nt, Artificial Sequence
  Description of Artificial Sequence: Synthetic oligonucleotide
  Sense strand starting at position 1451 of SEQ ID NO: 1882493
uaguuaccaucugugugua

SEQ ID NO: 2125461 - RNA, 19 nt, Artificial Sequence
  Description of Artificial Sequence: Synthetic oligonucleotide
  Antisense strand to SEQ ID NO: 2125460
uacacacagaugguaacua

SEQ ID NO: 2125462 - RNA, 19 nt, Artificial Sequence
  Description of Artificial Sequence: Synthetic oligonucleotide
  Sense strand starting at position 1456 of SEQ ID NO: 1882493
accaucuguguguacucaa

SEQ ID NO: 2125463 - RNA, 19 nt, Artificial Sequence
  Description of Artificial Sequence: Synthetic oligonucleotide
  Antisense strand to SEQ ID NO: 2125462
uugaguacacacagauggu

SEQ ID NO: 2125464 - RNA, 19 nt, Artificial Sequence
  Description of Artificial Sequence: Synthetic oligonucleotide
  Sense strand starting at position 1463 of SEQ ID NO: 1882493
guguguacucaaggcccua

SEQ ID NO: 2125465 - RNA, 19 nt, Artificial Sequence
  Description of Artificial Sequence: Synthetic oligonucleotide
  Antisense strand to SEQ ID NO: 2125464
uagggccuugaguacacac

SEQ ID NO: 2125466 - RNA, 19 nt, Artificial Sequence
  Description of Artificial Sequence: Synthetic oligonucleotide
  Sense strand starting at position 2077 of SEQ ID NO: 1882493
agcagagacuucuauuuag

SEQ ID NO: 2125467 - RNA, 19 nt, Artificial Sequence
  Description of Artificial Sequence: Synthetic oligonucleotide
  Antisense strand to SEQ ID NO: 2125466
cuaaauagaagucucugcu

SEQ ID NO: 2125468 - RNA, 19 nt, Artificial Sequence
  Description of Artificial Sequence: Synthetic oligonucleotide
  Sense strand starting at position 2189 of SEQ ID NO: 1882493
acagaccugugcuaaggaa

SEQ ID NO: 2125469 - RNA, 19 nt, Artificial Sequence
  Description of Artificial Sequence: Synthetic oligonucleotide
  Antisense strand to SEQ ID NO: 2125468
uuccuuagcacaggucugu

SEQ ID NO: 2125470 - RNA, 19 nt, Artificial Sequence
  Description of Artificial Sequence: Synthetic oligonucleotide
  Sense strand starting at position 2549 of SEQ ID NO: 1882493
cacuuugaugcugguaauu

SEQ ID NO: 2125471 - RNA, 19 nt, Artificial Sequence
  Description of Artificial Sequence: Synthetic oligonucleotide
  Antisense strand to SEQ ID NO: 2125470
aauuaccagcaucaaagug

SEQ ID NO: 2125472 - RNA, 19 nt, Artificial Sequence
  Description of Artificial Sequence: Synthetic oligonucleotide
  Sense strand starting at position 2989 of SEQ ID NO: 1882493
uuggaaguuugguuuaaua

SEQ ID NO: 2125473 - RNA, 19 nt, Artificial Sequence
  Description of Artificial Sequence: Synthetic oligonucleotide
  Antisense strand to SEQ ID NO: 2125472
uauuaaaccaaacuuccaa

SEQ ID NO: 2125474 - RNA, 19 nt, Artificial Sequence
  Description of Artificial Sequence: Synthetic oligonucleotide
  Sense strand starting at position 2991 of SEQ ID NO: 1882493
ggaaguuugguuuaauauu

SEQ ID NO: 2125475 - RNA, 19 nt, Artificial Sequence
  Description of Artificial Sequence: Synthetic oligonucleotide
  Antisense strand to SEQ ID NO: 2125474
aauauuaaaccaaacuucc

SEQ ID NO: 2125476 - RNA, 19 nt, Artificial Sequence
  Description of Artificial Sequence: Synthetic oligonucleotide
  Sense strand starting at position 34 of SEQ ID NO: 1882494
cugcacguguaauccaaua

SEQ ID NO: 2125477 - RNA, 19 nt, Artificial Sequence
  Description of Artificial Sequence: Synthetic oligonucleotide
  Antisense strand to SEQ ID NO: 2125476
uauuggauuacacgugcag

SEQ ID NO: 2125478 - RNA, 19 nt, Artificial Sequence
  Description of Artificial Sequence: Synthetic oligonucleotide
  Sense strand starting at position 39 of SEQ ID NO: 1882494
cguguaauccaauaacuaa

SEQ ID NO: 2125479 - RNA, 19 nt, Artificial Sequence
  Description of Artificial Sequence: Synthetic oligonucleotide
  Antisense strand to SEQ ID NO: 2125478
uuaguuauuggauuacacg

SEQ ID NO: 2125480 - RNA, 19 nt, Artificial Sequence
  Description of Artificial Sequence: Synthetic oligonucleotide
  Sense strand starting at position 77 of SEQ ID NO: 1882494
gugauugcucccgagggca

SEQ ID NO: 2125481 - RNA, 19 nt, Artificial Sequence
  Description of Artificial Sequence: Synthetic oligonucleotide
  Antisense strand to SEQ ID NO: 2125480
ugcccucgggagcaaucac

SEQ ID NO: 2125482 - RNA, 19 nt, Artificial Sequence
  Description of Artificial Sequence: Synthetic oligonucleotide
  Sense strand starting at position 110 of SEQ ID NO: 1882494
ccugacucuuacuuaggga

SEQ ID NO: 2125483 - RNA, 19 nt, Artificial Sequence
  Description of Artificial Sequence: Synthetic oligonucleotide
  Antisense strand to SEQ ID NO: 2125482
ucccuaaguaagagucagg

SEQ ID NO: 2125484 - RNA, 19 nt, Artificial Sequence
  Description of Artificial Sequence: Synthetic oligonucleotide
  Sense strand starting at position 147 of SEQ ID NO: 1882494
ggagaaguguucucggaca

SEQ ID NO: 2125485 - RNA, 19 nt, Artificial Sequence
  Description of Artificial Sequence: Synthetic oligonucleotide
  Antisense strand to SEQ ID NO: 2125484
uguccgagaacacuucucc

SEQ ID NO: 2125486 - RNA, 19 nt, Artificial Sequence
  Description of Artificial Sequence: Synthetic oligonucleotide
  Sense strand starting at position 152 of SEQ ID NO: 1882494
aguguucucggacaggagu

SEQ ID NO: 2125487 - RNA, 19 nt, Artificial Sequence
  Description of Artificial Sequence: Synthetic oligonucleotide
  Antisense strand to SEQ ID NO: 2125486
acuccuguccgagaacacu

SEQ ID NO: 2125488 - RNA, 19 nt, Artificial Sequence
  Description of Artificial Sequence: Synthetic oligonucleotide
  Sense strand starting at position 153 of SEQ ID NO: 1882494
guguucucggacaggaguu

SEQ ID NO: 2125489 - RNA, 19 nt, Artificial Sequence
  Description of Artificial Sequence: Synthetic oligonucleotide
  Antisense strand to SEQ ID NO: 2125488
aacuccuguccgagaacac

SEQ ID NO: 2125490 - RNA, 19 nt, Artificial Sequence
  Description of Artificial Sequence: Synthetic oligonucleotide
  Sense strand starting at position 154 of SEQ ID NO: 1882494
uguucucggacaggaguua

SEQ ID NO: 2125491 - RNA, 19 nt, Artificial Sequence
  Description of Artificial Sequence: Synthetic oligonucleotide
  Antisense strand to SEQ ID NO: 2125490
uaacuccuguccgagaaca

SEQ ID NO: 2125492 - RNA, 19 nt, Artificial Sequence
  Description of Artificial Sequence: Synthetic oligonucleotide
  Sense strand starting at position 201 of SEQ ID NO: 1882494
caauguuaagacggaggau

SEQ ID NO: 2125493 - RNA, 19 nt, Artificial Sequence
  Description of Artificial Sequence: Synthetic oligonucleotide
  Antisense strand to SEQ ID NO: 2125492
auccuccgucuuaacauug

SEQ ID NO: 2125494 - RNA, 19 nt, Artificial Sequence
  Description of Artificial Sequence: Synthetic oligonucleotide
  Sense strand starting at position 268 of SEQ ID NO: 1882494
agccaucucgcuuaucuca

SEQ ID NO: 2125495 - RNA, 19 nt, Artificial Sequence
  Description of Artificial Sequence: Synthetic oligonucleotide
  Antisense strand to SEQ ID NO: 2125494
ugagauaagcgagauggcu

SEQ ID NO: 2125496 - RNA, 19 nt, Artificial Sequence
  Description of Artificial Sequence: Synthetic oligonucleotide
  Sense strand starting at position 410 of SEQ ID NO: 1882494
cccuaagucccaugagauc

SEQ ID NO: 2125497 - RNA, 19 nt, Artificial Sequence
  Description of Artificial Sequence: Synthetic oligonucleotide
  Antisense strand to SEQ ID NO: 2125496
gaucucaugggacuuaggg

SEQ ID NO: 2125498 - RNA, 19 nt, Artificial Sequence
  Description of Artificial Sequence: Synthetic oligonucleotide
  Sense strand starting at position 433 of SEQ ID NO: 1882494
uuuccagagucuuugaaac

SEQ ID NO: 2125499 - RNA, 19 nt, Artificial Sequence
  Description of Artificial Sequence: Synthetic oligonucleotide
  Antisense strand to SEQ ID NO: 2125498
guuucaaagacucuggaaa

SEQ ID NO: 2125500 - RNA, 19 nt, Artificial Sequence
  Description of Artificial Sequence: Synthetic oligonucleotide
  Sense strand starting at position 446 of SEQ ID NO: 1882494
ugaaacuuggccuagguuu

SEQ ID NO: 2125501 - RNA, 19 nt, Artificial Sequence
  Description of Artificial Sequence: Synthetic oligonucleotide
  Antisense strand to SEQ ID NO: 2125500
aaaccuaggccaaguuuca

SEQ ID NO: 2125502 - RNA, 19 nt, Artificial Sequence
  Description of Artificial Sequence: Synthetic oligonucleotide
  Sense strand starting at position 457 of SEQ ID NO: 1882494
cuagguuucucaguguaaa

SEQ ID NO: 2125503 - RNA, 19 nt, Artificial Sequence
  Description of Artificial Sequence: Synthetic oligonucleotide
  Antisense strand to SEQ ID NO: 2125502
uuuacacugagaaaccuag

SEQ ID NO: 2125504 - RNA, 19 nt, Artificial Sequence
  Description of Artificial Sequence: Synthetic oligonucleotide
  Sense strand starting at position 458 of SEQ ID NO: 1882494
uagguuucucaguguaaau

SEQ ID NO: 2125505 - RNA, 19 nt, Artificial Sequence
  Description of Artificial Sequence: Synthetic oligonucleotide
  Antisense strand to SEQ ID NO: 2125504
auuuacacugagaaaccua

SEQ ID NO: 2125506 - RNA, 19 nt, Artificial Sequence
  Description of Artificial Sequence: Synthetic oligonucleotide
  Sense strand starting at position 849 of SEQ ID NO: 1882494
agucagagguggucgaguu

SEQ ID NO: 2125507 - RNA, 19 nt, Artificial Sequence
  Description of Artificial Sequence: Synthetic oligonucleotide
  Antisense strand to SEQ ID NO: 2125506
aacucgaccaccucugacu

SEQ ID NO: 2125508 - RNA, 19 nt, Artificial Sequence
  Description of Artificial Sequence: Synthetic oligonucleotide
  Sense strand starting at position 850 of SEQ ID NO: 1882494
gucagagguggucgaguuu

SEQ ID NO: 2125509 - RNA, 19 nt, Artificial Sequence
  Description of Artificial Sequence: Synthetic oligonucleotide
  Antisense strand to SEQ ID NO: 2125508
aaacucgaccaccucugac

SEQ ID NO: 2125510 - RNA, 19 nt, Artificial Sequence
  Description of Artificial Sequence: Synthetic oligonucleotide
  Sense strand starting at position 906 of SEQ ID NO: 1882494
gugagucugugaucccuca

SEQ ID NO: 2125511 - RNA, 19 nt, Artificial Sequence
  Description of Artificial Sequence: Synthetic oligonucleotide
  Antisense strand to SEQ ID NO: 2125510
ugagggaucacagacucac

SEQ ID NO: 2125512 - RNA, 19 nt, Artificial Sequence
  Description of Artificial Sequence: Synthetic oligonucleotide
  Sense strand starting at position 2853 of SEQ ID NO: 1882494
caucuuauucgugggagca

SEQ ID NO: 2125513 - RNA, 19 nt, Artificial Sequence
  Description of Artificial Sequence: Synthetic oligonucleotide
  Antisense strand to SEQ ID NO: 2125512
ugcucccacgaauaagaug

SEQ ID NO: 2125514 - RNA, 19 nt, Artificial Sequence
  Description of Artificial Sequence: Synthetic oligonucleotide
  Sense strand starting at position 2854 of SEQ ID NO: 1882494
aucuuauucgugggagcag

SEQ ID NO: 2125515 - RNA, 19 nt, Artificial Sequence
  Description of Artificial Sequence: Synthetic oligonucleotide
  Antisense strand to SEQ ID NO: 2125514
cugcucccacgaauaagau

SEQ ID NO: 2125516 - RNA, 19 nt, Artificial Sequence
  Description of Artificial Sequence: Synthetic oligonucleotide
  Sense strand starting at position 3069 of SEQ ID NO: 1882494
ucaggaagcugugucuagu

SEQ ID NO: 2125517 - RNA, 19 nt, Artificial Sequence
  Description of Artificial Sequence: Synthetic oligonucleotide
  Antisense strand to SEQ ID NO: 2125516
acuagacacagcuuccuga

SEQ ID NO: 2125518 - RNA, 19 nt, Artificial Sequence
  Description of Artificial Sequence: Synthetic oligonucleotide
  Sense strand starting at position 3126 of SEQ ID NO: 1882494
uacuucugucccgaaguaa

SEQ ID NO: 2125519 - RNA, 19 nt, Artificial Sequence
  Description of Artificial Sequence: Synthetic oligonucleotide
  Antisense strand to SEQ ID NO: 2125518
uuacuucgggacagaagua

SEQ ID NO: 2125520 - RNA, 19 nt, Artificial Sequence
  Description of Artificial Sequence: Synthetic oligonucleotide
  Sense strand starting at position 3134 of SEQ ID NO: 1882494
ucccgaaguaaaugucaga

SEQ ID NO: 2125521 - RNA, 19 nt, Artificial Sequence
  Description of Artificial Sequence: Synthetic oligonucleotide
  Antisense strand to SEQ ID NO: 2125520
ucugacauuuacuucggga

SEQ ID NO: 2125522 - RNA, 19 nt, Artificial Sequence
  Description of Artificial Sequence: Synthetic oligonucleotide
  Sense strand starting at position 3139 of SEQ ID NO: 1882494
aaguaaaugucagaaucag

SEQ ID NO: 2125523 - RNA, 19 nt, Artificial Sequence
  Description of Artificial Sequence: Synthetic oligonucleotide
  Antisense strand to SEQ ID NO: 2125522
cugauucugacauuuacuu

SEQ ID NO: 2125524 - RNA, 19 nt, Artificial Sequence
  Description of Artificial Sequence: Synthetic oligonucleotide
  Sense strand starting at position 3155 of SEQ ID NO: 1882494
cagauauguucuguauguu

SEQ ID NO: 2125525 - RNA, 19 nt, Artificial Sequence
  Description of Artificial Sequence: Synthetic oligonucleotide
  Antisense strand to SEQ ID NO: 2125524
aacauacagaacauaucug

SEQ ID NO: 2125526 - RNA, 19 nt, Artificial Sequence
  Description of Artificial Sequence: Synthetic oligonucleotide
  Sense strand starting at position 3156 of SEQ ID NO: 1882494
agauauguucuguauguug

SEQ ID NO: 2125527 - RNA, 19 nt, Artificial Sequence
  Description of Artificial Sequence: Synthetic oligonucleotide
  Antisense strand to SEQ ID NO: 2125526
caacauacagaacauaucu

SEQ ID NO: 2125528 - RNA, 19 nt, Artificial Sequence
  Description of Artificial Sequence: Synthetic oligonucleotide
  Sense strand starting at position 3177 of SEQ ID NO: 1882494
gugucugcagcgagauguu

SEQ ID NO: 2125529 - RNA, 19 nt, Artificial Sequence
  Description of Artificial Sequence: Synthetic oligonucleotide
  Antisense strand to SEQ ID NO: 2125528
aacaucucgcugcagacac

SEQ ID NO: 2125530 - RNA, 19 nt, Artificial Sequence
  Description of Artificial Sequence: Synthetic oligonucleotide
  Sense strand starting at position 3190 of SEQ ID NO: 1882494
gauguuugcagcugggcaa

SEQ ID NO: 2125531 - RNA, 19 nt, Artificial Sequence
  Description of Artificial Sequence: Synthetic oligonucleotide
  Antisense strand to SEQ ID NO: 2125530
uugcccagcugcaaacauc

SEQ ID NO: 2125532 - RNA, 19 nt, Artificial Sequence
  Description of Artificial Sequence: Synthetic oligonucleotide
  Sense strand starting at position 3239 of SEQ ID NO: 1882494
gcuggaucccaggaucuuu

SEQ ID NO: 2125533 - RNA, 19 nt, Artificial Sequence
  Description of Artificial Sequence: Synthetic oligonucleotide
  Antisense strand to SEQ ID NO: 2125532
aaagauccugggauccagc

SEQ ID NO: 2125534 - RNA, 19 nt, Artificial Sequence
  Description of Artificial Sequence: Synthetic oligonucleotide
  Sense strand starting at position 3439 of SEQ ID NO: 1882494
uaguguggcugguuuacau

SEQ ID NO: 2125535 - RNA, 19 nt, Artificial Sequence
  Description of Artificial Sequence: Synthetic oligonucleotide
  Antisense strand to SEQ ID NO: 2125534
auguaaaccagccacacua

SEQ ID NO: 2125536 - RNA, 19 nt, Artificial Sequence
  Description of Artificial Sequence: Synthetic oligonucleotide
  Sense strand starting at position 3449 of SEQ ID NO: 1882494
gguuuacauuguucugguu

SEQ ID NO: 2125537 - RNA, 19 nt, Artificial Sequence
  Description of Artificial Sequence: Synthetic oligonucleotide
  Antisense strand to SEQ ID NO: 2125536
aaccagaacaauguaaacc

SEQ ID NO: 2125538 - RNA, 19 nt, Artificial Sequence
  Description of Artificial Sequence: Synthetic oligonucleotide
  Sense strand starting at position 3455 of SEQ ID NO: 1882494
cauuguucugguugcagau

SEQ ID NO: 2125539 - RNA, 19 nt, Artificial Sequence
  Description of Artificial Sequence: Synthetic oligonucleotide
  Antisense strand to SEQ ID NO: 2125538
aucugcaaccagaacaaug

SEQ ID NO: 2125540 - RNA, 19 nt, Artificial Sequence
  Description of Artificial Sequence: Synthetic oligonucleotide
  Sense strand starting at position 3462 of SEQ ID NO: 1882494
cugguugcagauuaugaaa

SEQ ID NO: 2125541 - RNA, 19 nt, Artificial Sequence
  Description of Artificial Sequence: Synthetic oligonucleotide
  Antisense strand to SEQ ID NO: 2125540
uuucauaaucugcaaccag

SEQ ID NO: 2125542 - RNA, 19 nt, Artificial Sequence
  Description of Artificial Sequence: Synthetic oligonucleotide
  Sense strand starting at position 3712 of SEQ ID NO: 1882494
gagggugaugcaugcuuua

SEQ ID NO: 2125543 - RNA, 19 nt, Artificial Sequence
  Description of Artificial Sequence: Synthetic oligonucleotide
  Antisense strand to SEQ ID NO: 2125542
uaaagcaugcaucacccuc

SEQ ID NO: 2125544 - RNA, 19 nt, Artificial Sequence
  Description of Artificial Sequence: Synthetic oligonucleotide
  Sense strand starting at position 3717 of SEQ ID NO: 1882494
ugaugcaugcuuuaugugu

SEQ ID NO: 2125545 - RNA, 19 nt, Artificial Sequence
  Description of Artificial Sequence: Synthetic oligonucleotide
  Antisense strand to SEQ ID NO: 2125544
acacauaaagcaugcauca

SEQ ID NO: 2125546 - RNA, 19 nt, Artificial Sequence
  Description of Artificial Sequence: Synthetic oligonucleotide
  Sense strand starting at position 3724 of SEQ ID NO: 1882494
ugcuuuauguguuccugag

SEQ ID NO: 2125547 - RNA, 19 nt, Artificial Sequence
  Description of Artificial Sequence: Synthetic oligonucleotide
  Antisense strand to SEQ ID NO: 2125546
cucaggaacacauaaagca

SEQ ID NO: 2125548 - RNA, 19 nt, Artificial Sequence
  Description of Artificial Sequence: Synthetic oligonucleotide
  Sense strand starting at position 3725 of SEQ ID NO: 1882494
gcuuuauguguuccugagc

SEQ ID NO: 2125549 - RNA, 19 nt, Artificial Sequence
  Description of Artificial Sequence: Synthetic oligonucleotide
  Antisense strand to SEQ ID NO: 2125548
gcucaggaacacauaaagc

SEQ ID NO: 2125550 - RNA, 19 nt, Artificial Sequence
  Description of Artificial Sequence: Synthetic oligonucleotide
  Sense strand starting at position 3804 of SEQ ID NO: 1882494
uucccuggacggugaaauu

SEQ ID NO: 2125551 - RNA, 19 nt, Artificial Sequence
  Description of Artificial Sequence: Synthetic oligonucleotide
  Antisense strand to SEQ ID NO: 2125550
aauuucaccguccagggaa

SEQ ID NO: 2125552 - RNA, 19 nt, Artificial Sequence
  Description of Artificial Sequence: Synthetic oligonucleotide
  Sense strand starting at position 3814 of SEQ ID NO: 1882494
ggugaaauuucccaaauag

SEQ ID NO: 2125553 - RNA, 19 nt, Artificial Sequence
  Description of Artificial Sequence: Synthetic oligonucleotide
  Antisense strand to SEQ ID NO: 2125552
cuauuugggaaauuucacc

SEQ ID NO: 2125554 - RNA, 19 nt, Artificial Sequence
  Description of Artificial Sequence: Synthetic oligonucleotide
  Sense strand starting at position 3844 of SEQ ID NO: 1882494
gugggucucagagguuaac

SEQ ID NO: 2125555 - RNA, 19 nt, Artificial Sequence
  Description of Artificial Sequence: Synthetic oligonucleotide
  Antisense strand to SEQ ID NO: 2125554
guuaaccucugagacccac

SEQ ID NO: 2125556 - RNA, 19 nt, Artificial Sequence
  Description of Artificial Sequence: Synthetic oligonucleotide
  Sense strand starting at position 458 of SEQ ID NO: 1882495
ggucauguccacugaagaa

SEQ ID NO: 2125557 - RNA, 19 nt, Artificial Sequence
  Description of Artificial Sequence: Synthetic oligonucleotide
  Antisense strand to SEQ ID NO: 2125556
uucuucaguggacaugacc

SEQ ID NO: 2125558 - RNA, 19 nt, Artificial Sequence
  Description of Artificial Sequence: Synthetic oligonucleotide
  Sense strand starting at position 517 of SEQ ID NO: 1882495
acugguaucccagagagug

SEQ ID NO: 2125559 - RNA, 19 nt, Artificial Sequence
  Description of Artificial Sequence: Synthetic oligonucleotide
  Antisense strand to SEQ ID NO: 2125558
cacucucugggauaccagu

SEQ ID NO: 2125560 - RNA, 19 nt, Artificial Sequence
  Description of Artificial Sequence: Synthetic oligonucleotide
  Sense strand starting at position 565 of SEQ ID NO: 1882495
gcaugagaccucugaauua

SEQ ID NO: 2125561 - RNA, 19 nt, Artificial Sequence
  Description of Artificial Sequence: Synthetic oligonucleotide
  Antisense strand to SEQ ID NO: 2125560
uaauucagaggucucaugc

SEQ ID NO: 2125562 - RNA, 19 nt, Artificial Sequence
  Description of Artificial Sequence: Synthetic oligonucleotide
  Sense strand starting at position 651 of SEQ ID NO: 1882495
ccaugaugagccugggagu

SEQ ID NO: 2125563 - RNA, 19 nt, Artificial Sequence
  Description of Artificial Sequence: Synthetic oligonucleotide
  Antisense strand to SEQ ID NO: 2125562
acucccaggcucaucaugg

SEQ ID NO: 2125564 - RNA, 19 nt, Artificial Sequence
  Description of Artificial Sequence: Synthetic oligonucleotide
  Sense strand starting at position 662 of SEQ ID NO: 1882495
cugggagugcuucagguau

SEQ ID NO: 2125565 - RNA, 19 nt, Artificial Sequence
  Description of Artificial Sequence: Synthetic oligonucleotide
  Antisense strand to SEQ ID NO: 2125564
auaccugaagcacucccag

SEQ ID NO: 2125566 - RNA, 19 nt, Artificial Sequence
  Description of Artificial Sequence: Synthetic oligonucleotide
  Sense strand starting at position 720 of SEQ ID NO: 1882495
ggaugaguccauugaaucc

SEQ ID NO: 2125567 - RNA, 19 nt, Artificial Sequence
  Description of Artificial Sequence: Synthetic oligonucleotide
  Antisense strand to SEQ ID NO: 2125566
ggauucaauggacucaucc

SEQ ID NO: 2125568 - RNA, 19 nt, Artificial Sequence
  Description of Artificial Sequence: Synthetic oligonucleotide
  Sense strand starting at position 776 of SEQ ID NO: 1882495
ggaugaguccacuggccaa

SEQ ID NO: 2125569 - RNA, 19 nt, Artificial Sequence
  Description of Artificial Sequence: Synthetic oligonucleotide
  Antisense strand to SEQ ID NO: 2125568
uuggccaguggacucaucc

SEQ ID NO: 2125570 - RNA, 19 nt, Artificial Sequence
  Description of Artificial Sequence: Synthetic oligonucleotide
  Sense strand starting at position 870 of SEQ ID NO: 1882495
ggcugagucacuggagaug

SEQ ID NO: 2125571 - RNA, 19 nt, Artificial Sequence
  Description of Artificial Sequence: Synthetic oligonucleotide
  Antisense strand to SEQ ID NO: 2125570
caucuccagugacucagcc

SEQ ID NO: 2125572 - RNA, 19 nt, Artificial Sequence
  Description of Artificial Sequence: Synthetic oligonucleotide
  Sense strand starting at position 897 of SEQ ID NO: 1882495
gcaacugucccacagacaa

SEQ ID NO: 2125573 - RNA, 19 nt, Artificial Sequence
  Description of Artificial Sequence: Synthetic oligonucleotide
  Antisense strand to SEQ ID NO: 2125572
uugucugugggacaguugc

SEQ ID NO: 2125574 - RNA, 19 nt, Artificial Sequence
  Description of Artificial Sequence: Synthetic oligonucleotide
  Sense strand starting at position 1021 of SEQ ID NO: 1882495
aguugaagauuccaaagag

SEQ ID NO: 2125575 - RNA, 19 nt, Artificial Sequence
  Description of Artificial Sequence: Synthetic oligonucleotide
  Antisense strand to SEQ ID NO: 2125574
cucuuuggaaucuucaacu

SEQ ID NO: 2125576 - RNA, 19 nt, Artificial Sequence
  Description of Artificial Sequence: Synthetic oligonucleotide
  Sense strand starting at position 1202 of SEQ ID NO: 1882495
ccggccaucaguggagauu

SEQ ID NO: 2125577 - RNA, 19 nt, Artificial Sequence
  Description of Artificial Sequence: Synthetic oligonucleotide
  Antisense strand to SEQ ID NO: 2125576
aaucuccacugauggccgg

SEQ ID NO: 2125578 - RNA, 19 nt, Artificial Sequence
  Description of Artificial Sequence: Synthetic oligonucleotide
  Sense strand starting at position 1393 of SEQ ID NO: 1882495
ccagcuuccgagugauacu

SEQ ID NO: 2125579 - RNA, 19 nt, Artificial Sequence
  Description of Artificial Sequence: Synthetic oligonucleotide
  Antisense strand to SEQ ID NO: 2125578
aguaucacucggaagcugg

SEQ ID NO: 2125580 - RNA, 19 nt, Artificial Sequence
  Description of Artificial Sequence: Synthetic oligonucleotide
  Sense strand starting at position 1627 of SEQ ID NO: 1882495
uccuguuaagauuaguaac

SEQ ID NO: 2125581 - RNA, 19 nt, Artificial Sequence
  Description of Artificial Sequence: Synthetic oligonucleotide
  Antisense strand to SEQ ID NO: 2125580
guuacuaaucuuaacagga

SEQ ID NO: 2125582 - RNA, 19 nt, Artificial Sequence
  Description of Artificial Sequence: Synthetic oligonucleotide
  Sense strand starting at position 1705 of SEQ ID NO: 1882495
aagacuuauuggcugaugu

SEQ ID NO: 2125583 - RNA, 19 nt, Artificial Sequence
  Description of Artificial Sequence: Synthetic oligonucleotide
  Antisense strand to SEQ ID NO: 2125582
acaucagccaauaagucuu

SEQ ID NO: 2125584 - RNA, 19 nt, Artificial Sequence
  Description of Artificial Sequence: Synthetic oligonucleotide
  Sense strand starting at position 1732 of SEQ ID NO: 1882495
acuagaugacuguguagac

SEQ ID NO: 2125585 - RNA, 19 nt, Artificial Sequence
  Description of Artificial Sequence: Synthetic oligonucleotide
  Antisense strand to SEQ ID NO: 2125584
gucuacacagucaucuagu

SEQ ID NO: 2125586 - RNA, 19 nt, Artificial Sequence
  Description of Artificial Sequence: Synthetic oligonucleotide
  Sense strand starting at position 1733 of SEQ ID NO: 1882495
cuagaugacuguguagaca

SEQ ID NO: 2125587 - RNA, 19 nt, Artificial Sequence
  Description of Artificial Sequence: Synthetic oligonucleotide
  Antisense strand to SEQ ID NO: 2125586
ugucuacacagucaucuag

SEQ ID NO: 2125588 - RNA, 19 nt, Artificial Sequence
  Description of Artificial Sequence: Synthetic oligonucleotide
  Sense strand starting at position 1751 of SEQ ID NO: 1882495
aucucauggcucugacacu

SEQ ID NO: 2125589 - RNA, 19 nt, Artificial Sequence
  Description of Artificial Sequence: Synthetic oligonucleotide
  Antisense strand to SEQ ID NO: 2125588
agugucagagccaugagau

SEQ ID NO: 2125590 - RNA, 19 nt, Artificial Sequence
  Description of Artificial Sequence: Synthetic oligonucleotide
  Sense strand starting at position 1867 of SEQ ID NO: 1882495
uccuucuugcaguagaagu

SEQ ID NO: 2125591 - RNA, 19 nt, Artificial Sequence
  Description of Artificial Sequence: Synthetic oligonucleotide
  Antisense strand to SEQ ID NO: 2125590
acuucuacugcaagaagga

SEQ ID NO: 2125592 - RNA, 19 nt, Artificial Sequence
  Description of Artificial Sequence: Synthetic oligonucleotide
  Sense strand starting at position 1877 of SEQ ID NO: 1882495
aguagaagucuugguagga

SEQ ID NO: 2125593 - RNA, 19 nt, Artificial Sequence
  Description of Artificial Sequence: Synthetic oligonucleotide
  Antisense strand to SEQ ID NO: 2125592
uccuaccaagacuucuacu

SEQ ID NO: 2125594 - RNA, 19 nt, Artificial Sequence
  Description of Artificial Sequence: Synthetic oligonucleotide
  Sense strand starting at position 1878 of SEQ ID NO: 1882495
guagaagucuugguaggag

SEQ ID NO: 2125595 - RNA, 19 nt, Artificial Sequence
  Description of Artificial Sequence: Synthetic oligonucleotide
  Antisense strand to SEQ ID NO: 2125594
cuccuaccaagacuucuac

SEQ ID NO: 2125596 - RNA, 19 nt, Artificial Sequence
  Description of Artificial Sequence: Synthetic oligonucleotide
  Sense strand starting at position 2106 of SEQ ID NO: 1882495
gugguuucucguucccuca

SEQ ID NO: 2125597 - RNA, 19 nt, Artificial Sequence
  Description of Artificial Sequence: Synthetic oligonucleotide
  Antisense strand to SEQ ID NO: 2125596
ugagggaacgagaaaccac

SEQ ID NO: 2125598 - RNA, 19 nt, Artificial Sequence
  Description of Artificial Sequence: Synthetic oligonucleotide
  Sense strand starting at position 2187 of SEQ ID NO: 1882495
gagucagaauaggugugau

SEQ ID NO: 2125599 - RNA, 19 nt, Artificial Sequence
  Description of Artificial Sequence: Synthetic oligonucleotide
  Antisense strand to SEQ ID NO: 2125598
aucacaccuauucugacuc

SEQ ID NO: 2125600 - RNA, 19 nt, Artificial Sequence
  Description of Artificial Sequence: Synthetic oligonucleotide
  Sense strand starting at position 2190 of SEQ ID NO: 1882495
ucagaauaggugugauguu

SEQ ID NO: 2125601 - RNA, 19 nt, Artificial Sequence
  Description of Artificial Sequence: Synthetic oligonucleotide
  Antisense strand to SEQ ID NO: 2125600
aacaucacaccuauucuga

SEQ ID NO: 2125602 - RNA, 19 nt, Artificial Sequence
  Description of Artificial Sequence: Synthetic oligonucleotide
  Sense strand starting at position 2235 of SEQ ID NO: 1882495
cccugcauaucaguuuauu

SEQ ID NO: 2125603 - RNA, 19 nt, Artificial Sequence
  Description of Artificial Sequence: Synthetic oligonucleotide
  Antisense strand to SEQ ID NO: 2125602
aauaaacugauaugcaggg

SEQ ID NO: 2125604 - RNA, 19 nt, Artificial Sequence
  Description of Artificial Sequence: Synthetic oligonucleotide
  Sense strand starting at position 2364 of SEQ ID NO: 1882495
gugcgcuuccggucgauga

SEQ ID NO: 2125605 - RNA, 19 nt, Artificial Sequence
  Description of Artificial Sequence: Synthetic oligonucleotide
  Antisense strand to SEQ ID NO: 2125604
ucaucgaccggaagcgcac

SEQ ID NO: 2125606 - RNA, 19 nt, Artificial Sequence
  Description of Artificial Sequence: Synthetic oligonucleotide
  Sense strand starting at position 2665 of SEQ ID NO: 1882495
ggcaguucuacccagggaa

SEQ ID NO: 2125607 - RNA, 19 nt, Artificial Sequence
  Description of Artificial Sequence: Synthetic oligonucleotide
  Antisense strand to SEQ ID NO: 2125606
uucccuggguagaacugcc

SEQ ID NO: 2125608 - RNA, 19 nt, Artificial Sequence
  Description of Artificial Sequence: Synthetic oligonucleotide
  Sense strand starting at position 2667 of SEQ ID NO: 1882495
caguucuacccagggaaug

SEQ ID NO: 2125609 - RNA, 19 nt, Artificial Sequence
  Description of Artificial Sequence: Synthetic oligonucleotide
  Antisense strand to SEQ ID NO: 2125608
cauucccuggguagaacug

SEQ ID NO: 2125610 - RNA, 19 nt, Artificial Sequence
  Description of Artificial Sequence: Synthetic oligonucleotide
  Sense strand starting at position 2668 of SEQ ID NO: 1882495
aguucuacccagggaauga

SEQ ID NO: 2125611 - RNA, 19 nt, Artificial Sequence
  Description of Artificial Sequence: Synthetic oligonucleotide
  Antisense strand to SEQ ID NO: 2125610
ucauucccuggguagaacu

SEQ ID NO: 2125612 - RNA, 19 nt, Artificial Sequence
  Description of Artificial Sequence: Synthetic oligonucleotide
  Sense strand starting at position 2735 of SEQ ID NO: 1882495
gaggaucucuaggagaaga

SEQ ID NO: 2125613 - RNA, 19 nt, Artificial Sequence
  Description of Artificial Sequence: Synthetic oligonucleotide
  Antisense strand to SEQ ID NO: 2125612
ucuucuccuagagauccuc

SEQ ID NO: 2125614 - RNA, 19 nt, Artificial Sequence
  Description of Artificial Sequence: Synthetic oligonucleotide
  Sense strand starting at position 2835 of SEQ ID NO: 1882495
gagcucuggugguuggaga

SEQ ID NO: 2125615 - RNA, 19 nt, Artificial Sequence
  Description of Artificial Sequence: Synthetic oligonucleotide
  Antisense strand to SEQ ID NO: 2125614
ucuccaaccaccagagcuc

SEQ ID NO: 2125616 - RNA, 19 nt, Artificial Sequence
  Description of Artificial Sequence: Synthetic oligonucleotide
  Sense strand starting at position 3242 of SEQ ID NO: 1882495
agaggauccagccauugua

SEQ ID NO: 2125617 - RNA, 19 nt, Artificial Sequence
  Description of Artificial Sequence: Synthetic oligonucleotide
  Antisense strand to SEQ ID NO: 2125616
uacaauggcuggauccucu

SEQ ID NO: 2125618 - RNA, 19 nt, Artificial Sequence
  Description of Artificial Sequence: Synthetic oligonucleotide
  Sense strand starting at position 3245 of SEQ ID NO: 1882495
ggauccagccauuguagaa

SEQ ID NO: 2125619 - RNA, 19 nt, Artificial Sequence
  Description of Artificial Sequence: Synthetic oligonucleotide
  Antisense strand to SEQ ID NO: 2125618
uucuacaauggcuggaucc

SEQ ID NO: 2125620 - RNA, 19 nt, Artificial Sequence
  Description of Artificial Sequence: Synthetic oligonucleotide
  Sense strand starting at position 3272 of SEQ ID NO: 1882495
ugaagaaguacuuggcacu

SEQ ID NO: 2125621 - RNA, 19 nt, Artificial Sequence
  Description of Artificial Sequence: Synthetic oligonucleotide
  Antisense strand to SEQ ID NO: 2125620
agugccaaguacuucuuca

SEQ ID NO: 2125622 - RNA, 19 nt, Artificial Sequence
  Description of Artificial Sequence: Synthetic oligonucleotide
  Sense strand starting at position 3419 of SEQ ID NO: 1882495
ccugguuucuggaggagag

SEQ ID NO: 2125623 - RNA, 19 nt, Artificial Sequence
  Description of Artificial Sequence: Synthetic oligonucleotide
  Antisense strand to SEQ ID NO: 2125622
cucuccuccagaaaccagg

SEQ ID NO: 2125624 - RNA, 19 nt, Artificial Sequence
  Description of Artificial Sequence: Synthetic oligonucleotide
  Sense strand starting at position 3536 of SEQ ID NO: 1882495
caggaaggcucucuaggau

SEQ ID NO: 2125625 - RNA, 19 nt, Artificial Sequence
  Description of Artificial Sequence: Synthetic oligonucleotide
  Antisense strand to SEQ ID NO: 2125624
auccuagagagccuuccug

SEQ ID NO: 2125626 - RNA, 19 nt, Artificial Sequence
  Description of Artificial Sequence: Synthetic oligonucleotide
  Sense strand starting at position 3714 of SEQ ID NO: 1882495
gggucuuauaauggucuau

SEQ ID NO: 2125627 - RNA, 19 nt, Artificial Sequence
  Description of Artificial Sequence: Synthetic oligonucleotide
  Antisense strand to SEQ ID NO: 2125626
auagaccauuauaagaccc

SEQ ID NO: 2125628 - RNA, 19 nt, Artificial Sequence
  Description of Artificial Sequence: Synthetic oligonucleotide
  Sense strand starting at position 3716 of SEQ ID NO: 1882495
gucuuauaauggucuauac

SEQ ID NO: 2125629 - RNA, 19 nt, Artificial Sequence
  Description of Artificial Sequence: Synthetic oligonucleotide
  Antisense strand to SEQ ID NO: 2125628
guauagaccauuauaagac

SEQ ID NO: 2125630 - RNA, 19 nt, Artificial Sequence
  Description of Artificial Sequence: Synthetic oligonucleotide
  Sense strand starting at position 3736 of SEQ ID NO: 1882495
ugugcuguccgagaaagua

SEQ ID NO: 2125631 - RNA, 19 nt, Artificial Sequence
  Description of Artificial Sequence: Synthetic oligonucleotide
  Antisense strand to SEQ ID NO: 2125630
uacuuucucggacagcaca

SEQ ID NO: 2125632 - RNA, 19 nt, Artificial Sequence
  Description of Artificial Sequence: Synthetic oligonucleotide
  Sense strand starting at position 3798 of SEQ ID NO: 1882495
cugagaugugcuggaaaug

SEQ ID NO: 2125633 - RNA, 19 nt, Artificial Sequence
  Description of Artificial Sequence: Synthetic oligonucleotide
  Antisense strand to SEQ ID NO: 2125632
cauuuccagcacaucucag

SEQ ID NO: 2125634 - RNA, 19 nt, Artificial Sequence
  Description of Artificial Sequence: Synthetic oligonucleotide
  Sense strand starting at position 3799 of SEQ ID NO: 1882495
ugagaugugcuggaaaugu

SEQ ID NO: 2125635 - RNA, 19 nt, Artificial Sequence
  Description of Artificial Sequence: Synthetic oligonucleotide
  Antisense strand to SEQ ID NO: 2125634
acauuuccagcacaucuca

SEQ ID NO: 2125636 - RNA, 19 nt, Artificial Sequence
  Description of Artificial Sequence: Synthetic oligonucleotide
  Sense strand starting at position 97 of SEQ ID NO: 1882496
aggugcaacuauucugaga

SEQ ID NO: 2125637 - RNA, 19 nt, Artificial Sequence
  Description of Artificial Sequence: Synthetic oligonucleotide
  Antisense strand to SEQ ID NO: 2125636
ucucagaauaguugcaccu

SEQ ID NO: 2125638 - RNA, 19 nt, Artificial Sequence
  Description of Artificial Sequence: Synthetic oligonucleotide
  Sense strand starting at position 100 of SEQ ID NO: 1882496
ugcaacuauucugagauuc

SEQ ID NO: 2125639 - RNA, 19 nt, Artificial Sequence
  Description of Artificial Sequence: Synthetic oligonucleotide
  Antisense strand to SEQ ID NO: 2125638
gaaucucagaauaguugca

SEQ ID NO: 2125640 - RNA, 19 nt, Artificial Sequence
  Description of Artificial Sequence: Synthetic oligonucleotide
  Sense strand starting at position 117 of SEQ ID NO: 1882496
ucagaugugaggugucauc

SEQ ID NO: 2125641 - RNA, 19 nt, Artificial Sequence
  Description of Artificial Sequence: Synthetic oligonucleotide
  Antisense strand to SEQ ID NO: 2125640
gaugacaccucacaucuga

SEQ ID NO: 2125642 - RNA, 19 nt, Artificial Sequence
  Description of Artificial Sequence: Synthetic oligonucleotide
  Sense strand starting at position 127 of SEQ ID NO: 1882496
ggugucaucuccucaugau

SEQ ID NO: 2125643 - RNA, 19 nt, Artificial Sequence
  Description of Artificial Sequence: Synthetic oligonucleotide
  Antisense strand to SEQ ID NO: 2125642
aucaugaggagaugacacc

SEQ ID NO: 2125644 - RNA, 19 nt, Artificial Sequence
  Description of Artificial Sequence: Synthetic oligonucleotide
  Sense strand starting at position 128 of SEQ ID NO: 1882496
gugucaucuccucaugauu

SEQ ID NO: 2125645 - RNA, 19 nt, Artificial Sequence
  Description of Artificial Sequence: Synthetic oligonucleotide
  Antisense strand to SEQ ID NO: 2125644
aaucaugaggagaugacac

SEQ ID NO: 2125646 - RNA, 19 nt, Artificial Sequence
  Description of Artificial Sequence: Synthetic oligonucleotide
  Sense strand starting at position 130 of SEQ ID NO: 1882496
gucaucuccucaugauuag

SEQ ID NO: 2125647 - RNA, 19 nt, Artificial Sequence
  Description of Artificial Sequence: Synthetic oligonucleotide
  Antisense strand to SEQ ID NO: 2125646
cuaaucaugaggagaugac

SEQ ID NO: 2125648 - RNA, 19 nt, Artificial Sequence
  Description of Artificial Sequence: Synthetic oligonucleotide
  Sense strand starting at position 207 of SEQ ID NO: 1882496
uaugauuggcucggucacu

SEQ ID NO: 2125649 - RNA, 19 nt, Artificial Sequence
  Description of Artificial Sequence: Synthetic oligonucleotide
  Antisense strand to SEQ ID NO: 2125648
agugaccgagccaaucaua

SEQ ID NO: 2125650 - RNA, 19 nt, Artificial Sequence
  Description of Artificial Sequence: Synthetic oligonucleotide
  Sense strand starting at position 219 of SEQ ID NO: 1882496
ggucacugcuucucugaca

SEQ ID NO: 2125651 - RNA, 19 nt, Artificial Sequence
  Description of Artificial Sequence: Synthetic oligonucleotide
  Antisense strand to SEQ ID NO: 2125650
ugucagagaagcagugacc

SEQ ID NO: 2125652 - RNA, 19 nt, Artificial Sequence
  Description of Artificial Sequence: Synthetic oligonucleotide
  Sense strand starting at position 220 of SEQ ID NO: 1882496
gucacugcuucucugacau

SEQ ID NO: 2125653 - RNA, 19 nt, Artificial Sequence
  Description of Artificial Sequence: Synthetic oligonucleotide
  Antisense strand to SEQ ID NO: 2125652
augucagagaagcagugac

SEQ ID NO: 2125654 - RNA, 19 nt, Artificial Sequence
  Description of Artificial Sequence: Synthetic oligonucleotide
  Sense strand starting at position 224 of SEQ ID NO: 1882496
cugcuucucugacaugagu

SEQ ID NO: 2125655 - RNA, 19 nt, Artificial Sequence
  Description of Artificial Sequence: Synthetic oligonucleotide
  Antisense strand to SEQ ID NO: 2125654
acucaugucagagaagcag

SEQ ID NO: 2125656 - RNA, 19 nt, Artificial Sequence
  Description of Artificial Sequence: Synthetic oligonucleotide
  Sense strand starting at position 275 of SEQ ID NO: 1882496
cagggugucuguccaacaa

SEQ ID NO: 2125657 - RNA, 19 nt, Artificial Sequence
  Description of Artificial Sequence: Synthetic oligonucleotide
  Antisense strand to SEQ ID NO: 2125656
uuguuggacagacacccug

SEQ ID NO: 2125658 - RNA, 19 nt, Artificial Sequence
  Description of Artificial Sequence: Synthetic oligonucleotide
  Sense strand starting at position 460 of SEQ ID NO: 1882496
gaggguaaaucauguaauu

SEQ ID NO: 2125659 - RNA, 19 nt, Artificial Sequence
  Description of Artificial Sequence: Synthetic oligonucleotide
  Antisense strand to SEQ ID NO: 2125658
aauuacaugauuuacccuc

SEQ ID NO: 2125660 - RNA, 19 nt, Artificial Sequence
  Description of Artificial Sequence: Synthetic oligonucleotide
  Sense strand starting at position 547 of SEQ ID NO: 1882496
cccucuuggugacaucuau

SEQ ID NO: 2125661 - RNA, 19 nt, Artificial Sequence
  Description of Artificial Sequence: Synthetic oligonucleotide
  Antisense strand to SEQ ID NO: 2125660
auagaugucaccaagaggg

SEQ ID NO: 2125662 - RNA, 19 nt, Artificial Sequence
  Description of Artificial Sequence: Synthetic oligonucleotide
  Sense strand starting at position 825 of SEQ ID NO: 1882496
gaguuaucuaagggccugu

SEQ ID NO: 2125663 - RNA, 19 nt, Artificial Sequence
  Description of Artificial Sequence: Synthetic oligonucleotide
  Antisense strand to SEQ ID NO: 2125662
acaggcccuuagauaacuc

SEQ ID NO: 2125664 - RNA, 19 nt, Artificial Sequence
  Description of Artificial Sequence: Synthetic oligonucleotide
  Sense strand starting at position 915 of SEQ ID NO: 1882496
ggccaauccugggaucaga

SEQ ID NO: 2125665 - RNA, 19 nt, Artificial Sequence
  Description of Artificial Sequence: Synthetic oligonucleotide
  Antisense strand to SEQ ID NO: 2125664
ucugaucccaggauuggcc

SEQ ID NO: 2125666 - RNA, 19 nt, Artificial Sequence
  Description of Artificial Sequence: Synthetic oligonucleotide
  Sense strand starting at position 1383 of SEQ ID NO: 1882496
gacccaggauugcaucaua

SEQ ID NO: 2125667 - RNA, 19 nt, Artificial Sequence
  Description of Artificial Sequence: Synthetic oligonucleotide
  Antisense strand to SEQ ID NO: 2125666
uaugaugcaauccuggguc

SEQ ID NO: 2125668 - RNA, 19 nt, Artificial Sequence
  Description of Artificial Sequence: Synthetic oligonucleotide
  Sense strand starting at position 1386 of SEQ ID NO: 1882496
ccaggauugcaucauacau

SEQ ID NO: 2125669 - RNA, 19 nt, Artificial Sequence
  Description of Artificial Sequence: Synthetic oligonucleotide
  Antisense strand to SEQ ID NO: 2125668
auguaugaugcaauccugg

SEQ ID NO: 2125670 - RNA, 19 nt, Artificial Sequence
  Description of Artificial Sequence: Synthetic oligonucleotide
  Sense strand starting at position 1388 of SEQ ID NO: 1882496
aggauugcaucauacauuu

SEQ ID NO: 2125671 - RNA, 19 nt, Artificial Sequence
  Description of Artificial Sequence: Synthetic oligonucleotide
  Antisense strand to SEQ ID NO: 2125670
aaauguaugaugcaauccu

SEQ ID NO: 2125672 - RNA, 19 nt, Artificial Sequence
  Description of Artificial Sequence: Synthetic oligonucleotide
  Sense strand starting at position 1564 of SEQ ID NO: 1882496
uuucccuugguugagagau

SEQ ID NO: 2125673 - RNA, 19 nt, Artificial Sequence
  Description of Artificial Sequence: Synthetic oligonucleotide
  Antisense strand to SEQ ID NO: 2125672
aucucucaaccaagggaaa

SEQ ID NO: 2125674 - RNA, 19 nt, Artificial Sequence
  Description of Artificial Sequence: Synthetic oligonucleotide
  Sense strand starting at position 1566 of SEQ ID NO: 1882496
ucccuugguugagagauga

SEQ ID NO: 2125675 - RNA, 19 nt, Artificial Sequence
  Description of Artificial Sequence: Synthetic oligonucleotide
  Antisense strand to SEQ ID NO: 2125674
ucaucucucaaccaaggga

SEQ ID NO: 2125676 - RNA, 19 nt, Artificial Sequence
  Description of Artificial Sequence: Synthetic oligonucleotide
  Sense strand starting at position 2072 of SEQ ID NO: 1882496
cucaguacuuucuggaaau

SEQ ID NO: 2125677 - RNA, 19 nt, Artificial Sequence
  Description of Artificial Sequence: Synthetic oligonucleotide
  Antisense strand to SEQ ID NO: 2125676
auuuccagaaaguacugag

SEQ ID NO: 2125678 - RNA, 19 nt, Artificial Sequence
  Description of Artificial Sequence: Synthetic oligonucleotide
  Sense strand starting at position 2167 of SEQ ID NO: 1882496
gacagcuuggagugggaau

SEQ ID NO: 2125679 - RNA, 19 nt, Artificial Sequence
  Description of Artificial Sequence: Synthetic oligonucleotide
  Antisense strand to SEQ ID NO: 2125678
auucccacuccaagcuguc

SEQ ID NO: 2125680 - RNA, 19 nt, Artificial Sequence
  Description of Artificial Sequence: Synthetic oligonucleotide
  Sense strand starting at position 2350 of SEQ ID NO: 1882496
agaaacuauuccuguagaa

SEQ ID NO: 2125681 - RNA, 19 nt, Artificial Sequence
  Description of Artificial Sequence: Synthetic oligonucleotide
  Antisense strand to SEQ ID NO: 2125680
uucuacaggaauaguuucu

SEQ ID NO: 2125682 - RNA, 19 nt, Artificial Sequence
  Description of Artificial Sequence: Synthetic oligonucleotide
  Sense strand starting at position 2550 of SEQ ID NO: 1882496
ggucgacaacuaugcugua

SEQ ID NO: 2125683 - RNA, 19 nt, Artificial Sequence
  Description of Artificial Sequence: Synthetic oligonucleotide
  Antisense strand to SEQ ID NO: 2125682
uacagcauaguugucgacc

SEQ ID NO: 2125684 - RNA, 19 nt, Artificial Sequence
  Description of Artificial Sequence: Synthetic oligonucleotide
  Sense strand starting at position 2555 of SEQ ID NO: 1882496
acaacuaugcuguaugaac

SEQ ID NO: 2125685 - RNA, 19 nt, Artificial Sequence
  Description of Artificial Sequence: Synthetic oligonucleotide
  Antisense strand to SEQ ID NO: 2125684
guucauacagcauaguugu

SEQ ID NO: 2125686 - RNA, 19 nt, Artificial Sequence
  Description of Artificial Sequence: Synthetic oligonucleotide
  Sense strand starting at position 2594 of SEQ ID NO: 1882496
uugugaagguacccacaau

SEQ ID NO: 2125687 - RNA, 19 nt, Artificial Sequence
  Description of Artificial Sequence: Synthetic oligonucleotide
  Antisense strand to SEQ ID NO: 2125686
auuguggguaccuucacaa

SEQ ID NO: 2125688 - RNA, 19 nt, Artificial Sequence
  Description of Artificial Sequence: Synthetic oligonucleotide
  Sense strand starting at position 2757 of SEQ ID NO: 1882496
gguggucugugcccuagau

SEQ ID NO: 2125689 - RNA, 19 nt, Artificial Sequence
  Description of Artificial Sequence: Synthetic oligonucleotide
  Antisense strand to SEQ ID NO: 2125688
aucuagggcacagaccacc

SEQ ID NO: 2125690 - RNA, 19 nt, Artificial Sequence
  Description of Artificial Sequence: Synthetic oligonucleotide
  Sense strand starting at position 2759 of SEQ ID NO: 1882496
uggucugugcccuagauaa

SEQ ID NO: 2125691 - RNA, 19 nt, Artificial Sequence
  Description of Artificial Sequence: Synthetic oligonucleotide
  Antisense strand to SEQ ID NO: 2125690
uuaucuagggcacagacca

SEQ ID NO: 2125692 - RNA, 19 nt, Artificial Sequence
  Description of Artificial Sequence: Synthetic oligonucleotide
  Sense strand starting at position 2871 of SEQ ID NO: 1882496
cagagcuuacuuugugacu

SEQ ID NO: 2125693 - RNA, 19 nt, Artificial Sequence
  Description of Artificial Sequence: Synthetic oligonucleotide
  Antisense strand to SEQ ID NO: 2125692
agucacaaaguaagcucug

SEQ ID NO: 2125694 - RNA, 19 nt, Artificial Sequence
  Description of Artificial Sequence: Synthetic oligonucleotide
  Sense strand starting at position 2902 of SEQ ID NO: 1882496
agcauuaucucaugagauc

SEQ ID NO: 2125695 - RNA, 19 nt, Artificial Sequence
  Description of Artificial Sequence: Synthetic oligonucleotide
  Antisense strand to SEQ ID NO: 2125694
gaucucaugagauaaugcu

SEQ ID NO: 2125696 - RNA, 19 nt, Artificial Sequence
  Description of Artificial Sequence: Synthetic oligonucleotide
  Sense strand starting at position 2903 of SEQ ID NO: 1882496
gcauuaucucaugagaucc

SEQ ID NO: 2125697 - RNA, 19 nt, Artificial Sequence
  Description of Artificial Sequence: Synthetic oligonucleotide
  Antisense strand to SEQ ID NO: 2125696
ggaucucaugagauaaugc

SEQ ID NO: 2125698 - RNA, 19 nt, Artificial Sequence
  Description of Artificial Sequence: Synthetic oligonucleotide
  Sense strand starting at position 2979 of SEQ ID NO: 1882496
gcccaaauagguuaaguga

SEQ ID NO: 2125699 - RNA, 19 nt, Artificial Sequence
  Description of Artificial Sequence: Synthetic oligonucleotide
  Antisense strand to SEQ ID NO: 2125698
ucacuuaaccuauuugggc

SEQ ID NO: 2125700 - RNA, 19 nt, Artificial Sequence
  Description of Artificial Sequence: Synthetic oligonucleotide
  Sense strand starting at position 2992 of SEQ ID NO: 1882496
aagugacuugucugaagug

SEQ ID NO: 2125701 - RNA, 19 nt, Artificial Sequence
  Description of Artificial Sequence: Synthetic oligonucleotide
  Antisense strand to SEQ ID NO: 2125700
cacuucagacaagucacuu

SEQ ID NO: 2125702 - RNA, 19 nt, Artificial Sequence
  Description of Artificial Sequence: Synthetic oligonucleotide
  Sense strand starting at position 2993 of SEQ ID NO: 1882496
agugacuugucugaaguga

SEQ ID NO: 2125703 - RNA, 19 nt, Artificial Sequence
  Description of Artificial Sequence: Synthetic oligonucleotide
  Antisense strand to SEQ ID NO: 2125702
ucacuucagacaagucacu

SEQ ID NO: 2125704 - RNA, 19 nt, Artificial Sequence
  Description of Artificial Sequence: Synthetic oligonucleotide
  Sense strand starting at position 2997 of SEQ ID NO: 1882496
acuugucugaagugauuga

SEQ ID NO: 2125705 - RNA, 19 nt, Artificial Sequence
  Description of Artificial Sequence: Synthetic oligonucleotide
  Antisense strand to SEQ ID NO: 2125704
ucaaucacuucagacaagu

SEQ ID NO: 2125706 - RNA, 19 nt, Artificial Sequence
  Description of Artificial Sequence: Synthetic oligonucleotide
  Sense strand starting at position 2998 of SEQ ID NO: 1882496
cuugucugaagugauugaa

SEQ ID NO: 2125707 - RNA, 19 nt, Artificial Sequence
  Description of Artificial Sequence: Synthetic oligonucleotide
  Antisense strand to SEQ ID NO: 2125706
uucaaucacuucagacaag

SEQ ID NO: 2125708 - RNA, 19 nt, Artificial Sequence
  Description of Artificial Sequence: Synthetic oligonucleotide
  Sense strand starting at position 3001 of SEQ ID NO: 1882496
gucugaagugauugaacca

SEQ ID NO: 2125709 - RNA, 19 nt, Artificial Sequence
  Description of Artificial Sequence: Synthetic oligonucleotide
  Antisense strand to SEQ ID NO: 2125708
ugguucaaucacuucagac

SEQ ID NO: 2125710 - RNA, 19 nt, Artificial Sequence
  Description of Artificial Sequence: Synthetic oligonucleotide
  Sense strand starting at position 3070 of SEQ ID NO: 1882496
gcucuuaacuuugagguca

SEQ ID NO: 2125711 - RNA, 19 nt, Artificial Sequence
  Description of Artificial Sequence: Synthetic oligonucleotide
  Antisense strand to SEQ ID NO: 2125710
ugaccucaaaguuaagagc

SEQ ID NO: 2125712 - RNA, 19 nt, Artificial Sequence
  Description of Artificial Sequence: Synthetic oligonucleotide
  Sense strand starting at position 3072 of SEQ ID NO: 1882496
ucuuaacuuugaggucacu

SEQ ID NO: 2125713 - RNA, 19 nt, Artificial Sequence
  Description of Artificial Sequence: Synthetic oligonucleotide
  Antisense strand to SEQ ID NO: 2125712
agugaccucaaaguuaaga

SEQ ID NO: 2125714 - RNA, 19 nt, Artificial Sequence
  Description of Artificial Sequence: Synthetic oligonucleotide
  Sense strand starting at position 3103 of SEQ ID NO: 1882496
gguagugugcaugggaaga

SEQ ID NO: 2125715 - RNA, 19 nt, Artificial Sequence
  Description of Artificial Sequence: Synthetic oligonucleotide
  Antisense strand to SEQ ID NO: 2125714
ucuucccaugcacacuacc

SEQ ID NO: 2125716 - RNA, 19 nt, Artificial Sequence
  Description of Artificial Sequence: Synthetic oligonucleotide
  Sense strand starting at position 255 of SEQ ID NO: 1882497
ccuggucacucccagcaau

SEQ ID NO: 2125717 - RNA, 19 nt, Artificial Sequence
  Description of Artificial Sequence: Synthetic oligonucleotide
  Antisense strand to SEQ ID NO: 2125716
auugcugggagugaccagg

SEQ ID NO: 2125718 - RNA, 19 nt, Artificial Sequence
  Description of Artificial Sequence: Synthetic oligonucleotide
  Sense strand starting at position 258 of SEQ ID NO: 1882497
ggucacucccagcaaucuu

SEQ ID NO: 2125719 - RNA, 19 nt, Artificial Sequence
  Description of Artificial Sequence: Synthetic oligonucleotide
  Antisense strand to SEQ ID NO: 2125718
aagauugcugggagugacc

SEQ ID NO: 2125720 - RNA, 19 nt, Artificial Sequence
  Description of Artificial Sequence: Synthetic oligonucleotide
  Sense strand starting at position 278 of SEQ ID NO: 1882497
cccagaaaucuugggccuu

SEQ ID NO: 2125721 - RNA, 19 nt, Artificial Sequence
  Description of Artificial Sequence: Synthetic oligonucleotide
  Antisense strand to SEQ ID NO: 2125720
aaggcccaagauuucuggg

SEQ ID NO: 2125722 - RNA, 19 nt, Artificial Sequence
  Description of Artificial Sequence: Synthetic oligonucleotide
  Sense strand starting at position 279 of SEQ ID NO: 1882497
ccagaaaucuugggccuuu

SEQ ID NO: 2125723 - RNA, 19 nt, Artificial Sequence
  Description of Artificial Sequence: Synthetic oligonucleotide
  Antisense strand to SEQ ID NO: 2125722
aaaggcccaagauuucugg

SEQ ID NO: 2125724 - RNA, 19 nt, Artificial Sequence
  Description of Artificial Sequence: Synthetic oligonucleotide
  Sense strand starting at position 380 of SEQ ID NO: 1882497
gcguaagucugaguccugu

SEQ ID NO: 2125725 - RNA, 19 nt, Artificial Sequence
  Description of Artificial Sequence: Synthetic oligonucleotide
  Antisense strand to SEQ ID NO: 2125724
acaggacucagacuuacgc

SEQ ID NO: 2125726 - RNA, 19 nt, Artificial Sequence
  Description of Artificial Sequence: Synthetic oligonucleotide
  Sense strand starting at position 384 of SEQ ID NO: 1882497
aagucugaguccugugauc

SEQ ID NO: 2125727 - RNA, 19 nt, Artificial Sequence
  Description of Artificial Sequence: Synthetic oligonucleotide
  Antisense strand to SEQ ID NO: 2125726
gaucacaggacucagacuu

SEQ ID NO: 2125728 - RNA, 19 nt, Artificial Sequence
  Description of Artificial Sequence: Synthetic oligonucleotide
  Sense strand starting at position 386 of SEQ ID NO: 1882497
gucugaguccugugaucac

SEQ ID NO: 2125729 - RNA, 19 nt, Artificial Sequence
  Description of Artificial Sequence: Synthetic oligonucleotide
  Antisense strand to SEQ ID NO: 2125728
gugaucacaggacucagac

SEQ ID NO: 2125730 - RNA, 19 nt, Artificial Sequence
  Description of Artificial Sequence: Synthetic oligonucleotide
  Sense strand starting at position 389 of SEQ ID NO: 1882497
ugaguccugugaucacaag

SEQ ID NO: 2125731 - RNA, 19 nt, Artificial Sequence
  Description of Artificial Sequence: Synthetic oligonucleotide
  Antisense strand to SEQ ID NO: 2125730
cuugugaucacaggacuca

SEQ ID NO: 2125732 - RNA, 19 nt, Artificial Sequence
  Description of Artificial Sequence: Synthetic oligonucleotide
  Sense strand starting at position 413 of SEQ ID NO: 1882497
aggagacauugucccguga

SEQ ID NO: 2125733 - RNA, 19 nt, Artificial Sequence
  Description of Artificial Sequence: Synthetic oligonucleotide
  Antisense strand to SEQ ID NO: 2125732
ucacgggacaaugucuccu

SEQ ID NO: 2125734 - RNA, 19 nt, Artificial Sequence
  Description of Artificial Sequence: Synthetic oligonucleotide
  Sense strand starting at position 415 of SEQ ID NO: 1882497
gagacauugucccgugaca

SEQ ID NO: 2125735 - RNA, 19 nt, Artificial Sequence
  Description of Artificial Sequence: Synthetic oligonucleotide
  Antisense strand to SEQ ID NO: 2125734
ugucacgggacaaugucuc

SEQ ID NO: 2125736 - RNA, 19 nt, Artificial Sequence
  Description of Artificial Sequence: Synthetic oligonucleotide
  Sense strand starting at position 417 of SEQ ID NO: 1882497
gacauugucccgugacaga

SEQ ID NO: 2125737 - RNA, 19 nt, Artificial Sequence
  Description of Artificial Sequence: Synthetic oligonucleotide
  Antisense strand to SEQ ID NO: 2125736
ucugucacgggacaauguc

SEQ ID NO: 2125738 - RNA, 19 nt, Artificial Sequence
  Description of Artificial Sequence: Synthetic oligonucleotide
  Sense strand starting at position 431 of SEQ ID NO: 1882497
acagacauguguccucuau

SEQ ID NO: 2125739 - RNA, 19 nt, Artificial Sequence
  Description of Artificial Sequence: Synthetic oligonucleotide
  Antisense strand to SEQ ID NO: 2125738
auagaggacacaugucugu

SEQ ID NO: 2125740 - RNA, 19 nt, Artificial Sequence
  Description of Artificial Sequence: Synthetic oligonucleotide
  Sense strand starting at position 433 of SEQ ID NO: 1882497
agacauguguccucuaugu

SEQ ID NO: 2125741 - RNA, 19 nt, Artificial Sequence
  Description of Artificial Sequence: Synthetic oligonucleotide
  Antisense strand to SEQ ID NO: 2125740
acauagaggacacaugucu

SEQ ID NO: 2125742 - RNA, 19 nt, Artificial Sequence
  Description of Artificial Sequence: Synthetic oligonucleotide
  Sense strand starting at position 763 of SEQ ID NO: 1882497
aagucagauuccuggaaac

SEQ ID NO: 2125743 - RNA, 19 nt, Artificial Sequence
  Description of Artificial Sequence: Synthetic oligonucleotide
  Antisense strand to SEQ ID NO: 2125742
guuuccaggaaucugacuu

SEQ ID NO: 2125744 - RNA, 19 nt, Artificial Sequence
  Description of Artificial Sequence: Synthetic oligonucleotide
  Sense strand starting at position 1026 of SEQ ID NO: 1882497
acugacucaucugagagga

SEQ ID NO: 2125745 - RNA, 19 nt, Artificial Sequence
  Description of Artificial Sequence: Synthetic oligonucleotide
  Antisense strand to SEQ ID NO: 2125744
uccucucagaugagucagu

SEQ ID NO: 2125746 - RNA, 19 nt, Artificial Sequence
  Description of Artificial Sequence: Synthetic oligonucleotide
  Sense strand starting at position 1028 of SEQ ID NO: 1882497
ugacucaucugagaggagu

SEQ ID NO: 2125747 - RNA, 19 nt, Artificial Sequence
  Description of Artificial Sequence: Synthetic oligonucleotide
  Antisense strand to SEQ ID NO: 2125746
acuccucucagaugaguca

SEQ ID NO: 2125748 - RNA, 19 nt, Artificial Sequence
  Description of Artificial Sequence: Synthetic oligonucleotide
  Sense strand starting at position 1057 of SEQ ID NO: 1882497
cuaguuaagucaggguaga

SEQ ID NO: 2125749 - RNA, 19 nt, Artificial Sequence
  Description of Artificial Sequence: Synthetic oligonucleotide
  Antisense strand to SEQ ID NO: 2125748
ucuacccugacuuaacuag

SEQ ID NO: 2125750 - RNA, 19 nt, Artificial Sequence
  Description of Artificial Sequence: Synthetic oligonucleotide
  Sense strand starting at position 1058 of SEQ ID NO: 1882497
uaguuaagucaggguagaa

SEQ ID NO: 2125751 - RNA, 19 nt, Artificial Sequence
  Description of Artificial Sequence: Synthetic oligonucleotide
  Antisense strand to SEQ ID NO: 2125750
uucuacccugacuuaacua

SEQ ID NO: 2125752 - RNA, 19 nt, Artificial Sequence
  Description of Artificial Sequence: Synthetic oligonucleotide
  Sense strand starting at position 1172 of SEQ ID NO: 1882497
ggguaugaccagugcucaa

SEQ ID NO: 2125753 - RNA, 19 nt, Artificial Sequence
  Description of Artificial Sequence: Synthetic oligonucleotide
  Antisense strand to SEQ ID NO: 2125752
uugagcacuggucauaccc

SEQ ID NO: 2125754 - RNA, 19 nt, Artificial Sequence
  Description of Artificial Sequence: Synthetic oligonucleotide
  Sense strand starting at position 1414 of SEQ ID NO: 1882497
uuuacucaccaguauguaa

SEQ ID NO: 2125755 - RNA, 19 nt, Artificial Sequence
  Description of Artificial Sequence: Synthetic oligonucleotide
  Antisense strand to SEQ ID NO: 2125754
uuacauacuggugaguaaa

SEQ ID NO: 2125756 - RNA, 19 nt, Artificial Sequence
  Description of Artificial Sequence: Synthetic oligonucleotide
  Sense strand starting at position 1541 of SEQ ID NO: 1882497
uggcaaagauuccuacaga

SEQ ID NO: 2125757 - RNA, 19 nt, Artificial Sequence
  Description of Artificial Sequence: Synthetic oligonucleotide
  Antisense strand to SEQ ID NO: 2125756
ucuguaggaaucuuugcca

SEQ ID NO: 2125758 - RNA, 19 nt, Artificial Sequence
  Description of Artificial Sequence: Synthetic oligonucleotide
  Sense strand starting at position 1542 of SEQ ID NO: 1882497
ggcaaagauuccuacagau

SEQ ID NO: 2125759 - RNA, 19 nt, Artificial Sequence
  Description of Artificial Sequence: Synthetic oligonucleotide
  Antisense strand to SEQ ID NO: 2125758
aucuguaggaaucuuugcc

SEQ ID NO: 2125760 - RNA, 19 nt, Artificial Sequence
  Description of Artificial Sequence: Synthetic oligonucleotide
  Sense strand starting at position 1581 of SEQ ID NO: 1882497
caugaauugggugggaauu

SEQ ID NO: 2125761 - RNA, 19 nt, Artificial Sequence
  Description of Artificial Sequence: Synthetic oligonucleotide
  Antisense strand to SEQ ID NO: 2125760
aauucccacccaauucaug

SEQ ID NO: 2125762 - RNA, 19 nt, Artificial Sequence
  Description of Artificial Sequence: Synthetic oligonucleotide
  Sense strand starting at position 1667 of SEQ ID NO: 1882497
ggagacuaauacugagaau

SEQ ID NO: 2125763 - RNA, 19 nt, Artificial Sequence
  Description of Artificial Sequence: Synthetic oligonucleotide
  Antisense strand to SEQ ID NO: 2125762
auucucaguauuagucucc

SEQ ID NO: 2125764 - RNA, 19 nt, Artificial Sequence
  Description of Artificial Sequence: Synthetic oligonucleotide
  Sense strand starting at position 1676 of SEQ ID NO: 1882497
uacugagaauucuggagua

SEQ ID NO: 2125765 - RNA, 19 nt, Artificial Sequence
  Description of Artificial Sequence: Synthetic oligonucleotide
  Antisense strand to SEQ ID NO: 2125764
uacuccagaauucucagua

SEQ ID NO: 2125766 - RNA, 19 nt, Artificial Sequence
  Description of Artificial Sequence: Synthetic oligonucleotide
  Sense strand starting at position 1755 of SEQ ID NO: 1882497
cgaguaagagugcagugaa

SEQ ID NO: 2125767 - RNA, 19 nt, Artificial Sequence
  Description of Artificial Sequence: Synthetic oligonucleotide
  Antisense strand to SEQ ID NO: 2125766
uucacugcacucuuacucg

SEQ ID NO: 2125768 - RNA, 19 nt, Artificial Sequence
  Description of Artificial Sequence: Synthetic oligonucleotide
  Sense strand starting at position 1758 of SEQ ID NO: 1882497
guaagagugcagugaagca

SEQ ID NO: 2125769 - RNA, 19 nt, Artificial Sequence
  Description of Artificial Sequence: Synthetic oligonucleotide
  Antisense strand to SEQ ID NO: 2125768
ugcuucacugcacucuuac

SEQ ID NO: 2125770 - RNA, 19 nt, Artificial Sequence
  Description of Artificial Sequence: Synthetic oligonucleotide
  Sense strand starting at position 2106 of SEQ ID NO: 1882497
uggagauauucccacccau

SEQ ID NO: 2125771 - RNA, 19 nt, Artificial Sequence
  Description of Artificial Sequence: Synthetic oligonucleotide
  Antisense strand to SEQ ID NO: 2125770
augggugggaauaucucca

SEQ ID NO: 2125772 - RNA, 19 nt, Artificial Sequence
  Description of Artificial Sequence: Synthetic oligonucleotide
  Sense strand starting at position 2422 of SEQ ID NO: 1882497
gagcauuagcuccaguauc

SEQ ID NO: 2125773 - RNA, 19 nt, Artificial Sequence
  Description of Artificial Sequence: Synthetic oligonucleotide
  Antisense strand to SEQ ID NO: 2125772
gauacuggagcuaaugcuc

SEQ ID NO: 2125774 - RNA, 19 nt, Artificial Sequence
  Description of Artificial Sequence: Synthetic oligonucleotide
  Sense strand starting at position 2466 of SEQ ID NO: 1882497
aguuauguuucccaacuuc

SEQ ID NO: 2125775 - RNA, 19 nt, Artificial Sequence
  Description of Artificial Sequence: Synthetic oligonucleotide
  Antisense strand to SEQ ID NO: 2125774
gaaguugggaaacauaacu

SEQ ID NO: 2125776 - RNA, 19 nt, Artificial Sequence
  Description of Artificial Sequence: Synthetic oligonucleotide
  Sense strand starting at position 2508 of SEQ ID NO: 1882497
uauuaaaguccagguguuu

SEQ ID NO: 2125777 - RNA, 19 nt, Artificial Sequence
  Description of Artificial Sequence: Synthetic oligonucleotide
  Antisense strand to SEQ ID NO: 2125776
aaacaccuggacuuuaaua

SEQ ID NO: 2125778 - RNA, 19 nt, Artificial Sequence
  Description of Artificial Sequence: Synthetic oligonucleotide
  Sense strand starting at position 2601 of SEQ ID NO: 1882497
guggguguucuugacucua

SEQ ID NO: 2125779 - RNA, 19 nt, Artificial Sequence
  Description of Artificial Sequence: Synthetic oligonucleotide
  Antisense strand to SEQ ID NO: 2125778
uagagucaagaacacccac

SEQ ID NO: 2125780 - RNA, 19 nt, Artificial Sequence
  Description of Artificial Sequence: Synthetic oligonucleotide
  Sense strand starting at position 2603 of SEQ ID NO: 1882497
ggguguucuugacucuaac

SEQ ID NO: 2125781 - RNA, 19 nt, Artificial Sequence
  Description of Artificial Sequence: Synthetic oligonucleotide
  Antisense strand to SEQ ID NO: 2125780
guuagagucaagaacaccc

SEQ ID NO: 2125782 - RNA, 19 nt, Artificial Sequence
  Description of Artificial Sequence: Synthetic oligonucleotide
  Sense strand starting at position 2645 of SEQ ID NO: 1882497
gccuuagccagacauggaa

SEQ ID NO: 2125783 - RNA, 19 nt, Artificial Sequence
  Description of Artificial Sequence: Synthetic oligonucleotide
  Antisense strand to SEQ ID NO: 2125782
uuccaugucuggcuaaggc

SEQ ID NO: 2125784 - RNA, 19 nt, Artificial Sequence
  Description of Artificial Sequence: Synthetic oligonucleotide
  Sense strand starting at position 2659 of SEQ ID NO: 1882497
uggaaauccuacugacauu

SEQ ID NO: 2125785 - RNA, 19 nt, Artificial Sequence
  Description of Artificial Sequence: Synthetic oligonucleotide
  Antisense strand to SEQ ID NO: 2125784
aaugucaguaggauuucca

SEQ ID NO: 2125786 - RNA, 19 nt, Artificial Sequence
  Description of Artificial Sequence: Synthetic oligonucleotide
  Sense strand starting at position 2776 of SEQ ID NO: 1882497
auuuguuuguuccuaccca

SEQ ID NO: 2125787 - RNA, 19 nt, Artificial Sequence
  Description of Artificial Sequence: Synthetic oligonucleotide
  Antisense strand to SEQ ID NO: 2125786
uggguaggaacaaacaaau

SEQ ID NO: 2125788 - RNA, 19 nt, Artificial Sequence
  Description of Artificial Sequence: Synthetic oligonucleotide
  Sense strand starting at position 13 of SEQ ID NO: 1882498
cauagauugcgaugagcca

SEQ ID NO: 2125789 - RNA, 19 nt, Artificial Sequence
  Description of Artificial Sequence: Synthetic oligonucleotide
  Antisense strand to SEQ ID NO: 2125788
uggcucaucgcaaucuaug

SEQ ID NO: 2125790 - RNA, 19 nt, Artificial Sequence
  Description of Artificial Sequence: Synthetic oligonucleotide
  Sense strand starting at position 222 of SEQ ID NO: 1882498
ugauaaagucagggaagca

SEQ ID NO: 2125791 - RNA, 19 nt, Artificial Sequence
  Description of Artificial Sequence: Synthetic oligonucleotide
  Antisense strand to SEQ ID NO: 2125790
ugcuucccugacuuuauca

SEQ ID NO: 2125792 - RNA, 19 nt, Artificial Sequence
  Description of Artificial Sequence: Synthetic oligonucleotide
  Sense strand starting at position 619 of SEQ ID NO: 1882498
aacugaaucagucggagga

SEQ ID NO: 2125793 - RNA, 19 nt, Artificial Sequence
  Description of Artificial Sequence: Synthetic oligonucleotide
  Antisense strand to SEQ ID NO: 2125792
uccuccgacugauucaguu

SEQ ID NO: 2125794 - RNA, 19 nt, Artificial Sequence
  Description of Artificial Sequence: Synthetic oligonucleotide
  Sense strand starting at position 620 of SEQ ID NO: 1882498
acugaaucagucggaggaa

SEQ ID NO: 2125795 - RNA, 19 nt, Artificial Sequence
  Description of Artificial Sequence: Synthetic oligonucleotide
  Antisense strand to SEQ ID NO: 2125794
uuccuccgacugauucagu

SEQ ID NO: 2125796 - RNA, 19 nt, Artificial Sequence
  Description of Artificial Sequence: Synthetic oligonucleotide
  Sense strand starting at position 1678 of SEQ ID NO: 1882498
gugugacucuuaccuguac

SEQ ID NO: 2125797 - RNA, 19 nt, Artificial Sequence
  Description of Artificial Sequence: Synthetic oligonucleotide
  Antisense strand to SEQ ID NO: 2125796
guacagguaagagucacac

SEQ ID NO: 2125798 - RNA, 19 nt, Artificial Sequence
  Description of Artificial Sequence: Synthetic oligonucleotide
  Sense strand starting at position 2181 of SEQ ID NO: 1882498
ggugguuuccaguauacaa

SEQ ID NO: 2125799 - RNA, 19 nt, Artificial Sequence
  Description of Artificial Sequence: Synthetic oligonucleotide
  Antisense strand to SEQ ID NO: 2125798
uuguauacuggaaaccacc

SEQ ID NO: 2125800 - RNA, 19 nt, Artificial Sequence
  Description of Artificial Sequence: Synthetic oligonucleotide
  Sense strand starting at position 2183 of SEQ ID NO: 1882498
ugguuuccaguauacaaga

SEQ ID NO: 2125801 - RNA, 19 nt, Artificial Sequence
  Description of Artificial Sequence: Synthetic oligonucleotide
  Antisense strand to SEQ ID NO: 2125800
ucuuguauacuggaaacca

SEQ ID NO: 2125802 - RNA, 19 nt, Artificial Sequence
  Description of Artificial Sequence: Synthetic oligonucleotide
  Sense strand starting at position 2247 of SEQ ID NO: 1882498
ugaguacgcaccugaugaa

SEQ ID NO: 2125803 - RNA, 19 nt, Artificial Sequence
  Description of Artificial Sequence: Synthetic oligonucleotide
  Antisense strand to SEQ ID NO: 2125802
uucaucaggugcguacuca

SEQ ID NO: 2125804 - RNA, 19 nt, Artificial Sequence
  Description of Artificial Sequence: Synthetic oligonucleotide
  Sense strand starting at position 2334 of SEQ ID NO: 1882498
gacccuagacuucgcagaa

SEQ ID NO: 2125805 - RNA, 19 nt, Artificial Sequence
  Description of Artificial Sequence: Synthetic oligonucleotide
  Antisense strand to SEQ ID NO: 2125804
uucugcgaagucuaggguc

SEQ ID NO: 2125806 - RNA, 19 nt, Artificial Sequence
  Description of Artificial Sequence: Synthetic oligonucleotide
  Sense strand starting at position 2335 of SEQ ID NO: 1882498
acccuagacuucgcagaau

SEQ ID NO: 2125807 - RNA, 19 nt, Artificial Sequence
  Description of Artificial Sequence: Synthetic oligonucleotide
  Antisense strand to SEQ ID NO: 2125806
auucugcgaagucuagggu

SEQ ID NO: 2125808 - RNA, 19 nt, Artificial Sequence
  Description of Artificial Sequence: Synthetic oligonucleotide
  Sense strand starting at position 2442 of SEQ ID NO: 1882498
cugcuugucugaucuucca

SEQ ID NO: 2125809 - RNA, 19 nt, Artificial Sequence
  Description of Artificial Sequence: Synthetic oligonucleotide
  Antisense strand to SEQ ID NO: 2125808
uggaagaucagacaagcag

SEQ ID NO: 2125810 - RNA, 19 nt, Artificial Sequence
  Description of Artificial Sequence: Synthetic oligonucleotide
  Sense strand starting at position 2762 of SEQ ID NO: 1882498
aucucaucugaaugugauc

SEQ ID NO: 2125811 - RNA, 19 nt, Artificial Sequence
  Description of Artificial Sequence: Synthetic oligonucleotide
  Antisense strand to SEQ ID NO: 2125810
gaucacauucagaugagau

SEQ ID NO: 2125812 - RNA, 19 nt, Artificial Sequence
  Description of Artificial Sequence: Synthetic oligonucleotide
  Sense strand starting at position 2767 of SEQ ID NO: 1882498
aucugaaugugauccauau

SEQ ID NO: 2125813 - RNA, 19 nt, Artificial Sequence
  Description of Artificial Sequence: Synthetic oligonucleotide
  Antisense strand to SEQ ID NO: 2125812
auauggaucacauucagau

SEQ ID NO: 2125814 - RNA, 19 nt, Artificial Sequence
  Description of Artificial Sequence: Synthetic oligonucleotide
  Sense strand starting at position 2986 of SEQ ID NO: 1882498
acagaucucgaccguuaua

SEQ ID NO: 2125815 - RNA, 19 nt, Artificial Sequence
  Description of Artificial Sequence: Synthetic oligonucleotide
  Antisense strand to SEQ ID NO: 2125814
uauaacggucgagaucugu

SEQ ID NO: 2125816 - RNA, 19 nt, Artificial Sequence
  Description of Artificial Sequence: Synthetic oligonucleotide
  Sense strand starting at position 3061 of SEQ ID NO: 1882498
gaacgugcccuccgauuau

SEQ ID NO: 2125817 - RNA, 19 nt, Artificial Sequence
  Description of Artificial Sequence: Synthetic oligonucleotide
  Antisense strand to SEQ ID NO: 2125816
auaaucggagggcacguuc

SEQ ID NO: 2125818 - RNA, 19 nt, Artificial Sequence
  Description of Artificial Sequence: Synthetic oligonucleotide
  Sense strand starting at position 3070 of SEQ ID NO: 1882498
cuccgauuaucuguaugac

SEQ ID NO: 2125819 - RNA, 19 nt, Artificial Sequence
  Description of Artificial Sequence: Synthetic oligonucleotide
  Antisense strand to SEQ ID NO: 2125818
gucauacagauaaucggag

SEQ ID NO: 2125820 - RNA, 19 nt, Artificial Sequence
  Description of Artificial Sequence: Synthetic oligonucleotide
  Sense strand starting at position 3071 of SEQ ID NO: 1882498
uccgauuaucuguaugacu

SEQ ID NO: 2125821 - RNA, 19 nt, Artificial Sequence
  Description of Artificial Sequence: Synthetic oligonucleotide
  Antisense strand to SEQ ID NO: 2125820
agucauacagauaaucgga

SEQ ID NO: 2125822 - RNA, 19 nt, Artificial Sequence
  Description of Artificial Sequence: Synthetic oligonucleotide
  Sense strand starting at position 3073 of SEQ ID NO: 1882498
cgauuaucuguaugacugu

SEQ ID NO: 2125823 - RNA, 19 nt, Artificial Sequence
  Description of Artificial Sequence: Synthetic oligonucleotide
  Antisense strand to SEQ ID NO: 2125822
acagucauacagauaaucg

SEQ ID NO: 2125824 - RNA, 19 nt, Artificial Sequence
  Description of Artificial Sequence: Synthetic oligonucleotide
  Sense strand starting at position 3079 of SEQ ID NO: 1882498
ucuguaugacuguaugauu

SEQ ID NO: 2125825 - RNA, 19 nt, Artificial Sequence
  Description of Artificial Sequence: Synthetic oligonucleotide
  Antisense strand to SEQ ID NO: 2125824
aaucauacagucauacaga

SEQ ID NO: 2125826 - RNA, 19 nt, Artificial Sequence
  Description of Artificial Sequence: Synthetic oligonucleotide
  Sense strand starting at position 3090 of SEQ ID NO: 1882498
guaugauuauucgcuccua

SEQ ID NO: 2125827 - RNA, 19 nt, Artificial Sequence
  Description of Artificial Sequence: Synthetic oligonucleotide
  Antisense strand to SEQ ID NO: 2125826
uaggagcgaauaaucauac

SEQ ID NO: 2125828 - RNA, 19 nt, Artificial Sequence
  Description of Artificial Sequence: Synthetic oligonucleotide
  Sense strand starting at position 3154 of SEQ ID NO: 1882498
cucgauucucaccaguaca

SEQ ID NO: 2125829 - RNA, 19 nt, Artificial Sequence
  Description of Artificial Sequence: Synthetic oligonucleotide
  Antisense strand to SEQ ID NO: 2125828
uguacuggugagaaucgag

SEQ ID NO: 2125830 - RNA, 19 nt, Artificial Sequence
  Description of Artificial Sequence: Synthetic oligonucleotide
  Sense strand starting at position 3538 of SEQ ID NO: 1882498
gcugauacggucuaaguca

SEQ ID NO: 2125831 - RNA, 19 nt, Artificial Sequence
  Description of Artificial Sequence: Synthetic oligonucleotide
  Antisense strand to SEQ ID NO: 2125830
ugacuuagaccguaucagc

SEQ ID NO: 2125832 - RNA, 19 nt, Artificial Sequence
  Description of Artificial Sequence: Synthetic oligonucleotide
  Sense strand starting at position 3546 of SEQ ID NO: 1882498
ggucuaagucaaugugcaa

SEQ ID NO: 2125833 - RNA, 19 nt, Artificial Sequence
  Description of Artificial Sequence: Synthetic oligonucleotide
  Antisense strand to SEQ ID NO: 2125832
uugcacauugacuuagacc

SEQ ID NO: 2125834 - RNA, 19 nt, Artificial Sequence
  Description of Artificial Sequence: Synthetic oligonucleotide
  Sense strand starting at position 3564 of SEQ ID NO: 1882498
augccaagggauugguaau

SEQ ID NO: 2125835 - RNA, 19 nt, Artificial Sequence
  Description of Artificial Sequence: Synthetic oligonucleotide
  Antisense strand to SEQ ID NO: 2125834
auuaccaaucccuuggcau

SEQ ID NO: 2125836 - RNA, 19 nt, Artificial Sequence
  Description of Artificial Sequence: Synthetic oligonucleotide
  Sense strand starting at position 3565 of SEQ ID NO: 1882498
ugccaagggauugguaaua

SEQ ID NO: 2125837 - RNA, 19 nt, Artificial Sequence
  Description of Artificial Sequence: Synthetic oligonucleotide
  Antisense strand to SEQ ID NO: 2125836
uauuaccaaucccuuggca

SEQ ID NO: 2125838 - RNA, 19 nt, Artificial Sequence
  Description of Artificial Sequence: Synthetic oligonucleotide
  Sense strand starting at position 3612 of SEQ ID NO: 1882498
gagggcuuuauucgucuga

SEQ ID NO: 2125839 - RNA, 19 nt, Artificial Sequence
  Description of Artificial Sequence: Synthetic oligonucleotide
  Antisense strand to SEQ ID NO: 2125838
ucagacgaauaaagcccuc

SEQ ID NO: 2125840 - RNA, 19 nt, Artificial Sequence
  Description of Artificial Sequence: Synthetic oligonucleotide
  Sense strand starting at position 3616 of SEQ ID NO: 1882498
gcuuuauucgucugaguag

SEQ ID NO: 2125841 - RNA, 19 nt, Artificial Sequence
  Description of Artificial Sequence: Synthetic oligonucleotide
  Antisense strand to SEQ ID NO: 2125840
cuacucagacgaauaaagc

SEQ ID NO: 2125842 - RNA, 19 nt, Artificial Sequence
  Description of Artificial Sequence: Synthetic oligonucleotide
  Sense strand starting at position 3619 of SEQ ID NO: 1882498
uuauucgucugaguaguug

SEQ ID NO: 2125843 - RNA, 19 nt, Artificial Sequence
  Description of Artificial Sequence: Synthetic oligonucleotide
  Antisense strand to SEQ ID NO: 2125842
caacuacucagacgaauaa

SEQ ID NO: 2125844 - RNA, 19 nt, Artificial Sequence
  Description of Artificial Sequence: Synthetic oligonucleotide
  Sense strand starting at position 3631 of SEQ ID NO: 1882498
guaguugucagucauaacc

SEQ ID NO: 2125845 - RNA, 19 nt, Artificial Sequence
  Description of Artificial Sequence: Synthetic oligonucleotide
  Antisense strand to SEQ ID NO: 2125844
gguuaugacugacaacuac

SEQ ID NO: 2125846 - RNA, 19 nt, Artificial Sequence
  Description of Artificial Sequence: Synthetic oligonucleotide
  Sense strand starting at position 3658 of SEQ ID NO: 1882498
aagcaauuugcucgggacu

SEQ ID NO: 2125847 - RNA, 19 nt, Artificial Sequence
  Description of Artificial Sequence: Synthetic oligonucleotide
  Antisense strand to SEQ ID NO: 2125846
agucccgagcaaauugcuu

SEQ ID NO: 2125848 - RNA, 19 nt, Artificial Sequence
  Description of Artificial Sequence: Synthetic oligonucleotide
  Sense strand starting at position 3659 of SEQ ID NO: 1882498
agcaauuugcucgggacua

SEQ ID NO: 2125849 - RNA, 19 nt, Artificial Sequence
  Description of Artificial Sequence: Synthetic oligonucleotide
  Antisense strand to SEQ ID NO: 2125848
uagucccgagcaaauugcu

SEQ ID NO: 2125850 - RNA, 19 nt, Artificial Sequence
  Description of Artificial Sequence: Synthetic oligonucleotide
  Sense strand starting at position 3727 of SEQ ID NO: 1882498
uuuagagaauguccggauu

SEQ ID NO: 2125851 - RNA, 19 nt, Artificial Sequence
  Description of Artificial Sequence: Synthetic oligonucleotide
  Antisense strand to SEQ ID NO: 2125850
aauccggacauucucuaaa

SEQ ID NO: 2125852 - RNA, 19 nt, Artificial Sequence
  Description of Artificial Sequence: Synthetic oligonucleotide
  Sense strand starting at position 3730 of SEQ ID NO: 1882498
agagaauguccggauugcu

SEQ ID NO: 2125853 - RNA, 19 nt, Artificial Sequence
  Description of Artificial Sequence: Synthetic oligonucleotide
  Antisense strand to SEQ ID NO: 2125852
agcaauccggacauucucu

SEQ ID NO: 2125854 - RNA, 19 nt, Artificial Sequence
  Description of Artificial Sequence: Synthetic oligonucleotide
  Sense strand starting at position 3733 of SEQ ID NO: 1882498
gaauguccggauugcuauu

SEQ ID NO: 2125855 - RNA, 19 nt, Artificial Sequence
  Description of Artificial Sequence: Synthetic oligonucleotide
  Antisense strand to SEQ ID NO: 2125854
aauagcaauccggacauuc

SEQ ID NO: 2125856 - RNA, 19 nt, Artificial Sequence
  Description of Artificial Sequence: Synthetic oligonucleotide
  Sense strand starting at position 3740 of SEQ ID NO: 1882498
cggauugcuauuggacuuu

SEQ ID NO: 2125857 - RNA, 19 nt, Artificial Sequence
  Description of Artificial Sequence: Synthetic oligonucleotide
  Antisense strand to SEQ ID NO: 2125856
aaaguccaauagcaauccg

SEQ ID NO: 2125858 - RNA, 19 nt, Artificial Sequence
  Description of Artificial Sequence: Synthetic oligonucleotide
  Sense strand starting at position 3761 of SEQ ID NO: 1882498
agcguauggcuccaaauca

SEQ ID NO: 2125859 - RNA, 19 nt, Artificial Sequence
  Description of Artificial Sequence: Synthetic oligonucleotide
  Antisense strand to SEQ ID NO: 2125858
ugauuuggagccauacgcu

SEQ ID NO: 2125860 - RNA, 19 nt, Artificial Sequence
  Description of Artificial Sequence: Synthetic oligonucleotide
  Sense strand starting at position 3855 of SEQ ID NO: 1882498
gggccaauccugugagggu

SEQ ID NO: 2125861 - RNA, 19 nt, Artificial Sequence
  Description of Artificial Sequence: Synthetic oligonucleotide
  Antisense strand to SEQ ID NO: 2125860
acccucacaggauuggccc

SEQ ID NO: 2125862 - RNA, 19 nt, Artificial Sequence
  Description of Artificial Sequence: Synthetic oligonucleotide
  Sense strand starting at position 3859 of SEQ ID NO: 1882498
caauccugugaggguuuaa

SEQ ID NO: 2125863 - RNA, 19 nt, Artificial Sequence
  Description of Artificial Sequence: Synthetic oligonucleotide
  Antisense strand to SEQ ID NO: 2125862
uuaaacccucacaggauug

SEQ ID NO: 2125864 - RNA, 19 nt, Artificial Sequence
  Description of Artificial Sequence: Synthetic oligonucleotide
  Sense strand starting at position 3916 of SEQ ID NO: 1882498
cauggugacugcucuacaa

SEQ ID NO: 2125865 - RNA, 19 nt, Artificial Sequence
  Description of Artificial Sequence: Synthetic oligonucleotide
  Antisense strand to SEQ ID NO: 2125864
uuguagagcagucaccaug

SEQ ID NO: 2125866 - RNA, 19 nt, Artificial Sequence
  Description of Artificial Sequence: Synthetic oligonucleotide
  Sense strand starting at position 3918 of SEQ ID NO: 1882498
uggugacugcucuacaauu

SEQ ID NO: 2125867 - RNA, 19 nt, Artificial Sequence
  Description of Artificial Sequence: Synthetic oligonucleotide
  Antisense strand to SEQ ID NO: 2125866
aauuguagagcagucacca

SEQ ID NO: 2125868 - RNA, 19 nt, Artificial Sequence
  Description of Artificial Sequence: Synthetic oligonucleotide
  Sense strand starting at position 89 of SEQ ID NO: 1882499
gcuccuuucccaggaucaa

SEQ ID NO: 2125869 - RNA, 19 nt, Artificial Sequence
  Description of Artificial Sequence: Synthetic oligonucleotide
  Antisense strand to SEQ ID NO: 2125868
uugauccugggaaaggagc

SEQ ID NO: 2125870 - RNA, 19 nt, Artificial Sequence
  Description of Artificial Sequence: Synthetic oligonucleotide
  Sense strand starting at position 119 of SEQ ID NO: 1882499
ggaagauugcacgggcacu

SEQ ID NO: 2125871 - RNA, 19 nt, Artificial Sequence
  Description of Artificial Sequence: Synthetic oligonucleotide
  Antisense strand to SEQ ID NO: 2125870
agugcccgugcaaucuucc

SEQ ID NO: 2125872 - RNA, 19 nt, Artificial Sequence
  Description of Artificial Sequence: Synthetic oligonucleotide
  Sense strand starting at position 221 of SEQ ID NO: 1882499
auaucacauugagacagaa

SEQ ID NO: 2125873 - RNA, 19 nt, Artificial Sequence
  Description of Artificial Sequence: Synthetic oligonucleotide
  Antisense strand to SEQ ID NO: 2125872
uucugucucaaugugauau

SEQ ID NO: 2125874 - RNA, 19 nt, Artificial Sequence
  Description of Artificial Sequence: Synthetic oligonucleotide
  Sense strand starting at position 278 of SEQ ID NO: 1882499
gccacugguuuaccagaca

SEQ ID NO: 2125875 - RNA, 19 nt, Artificial Sequence
  Description of Artificial Sequence: Synthetic oligonucleotide
  Antisense strand to SEQ ID NO: 2125874
ugucugguaaaccaguggc

SEQ ID NO: 2125876 - RNA, 19 nt, Artificial Sequence
  Description of Artificial Sequence: Synthetic oligonucleotide
  Sense strand starting at position 283 of SEQ ID NO: 1882499
ugguuuaccagacagcuga

SEQ ID NO: 2125877 - RNA, 19 nt, Artificial Sequence
  Description of Artificial Sequence: Synthetic oligonucleotide
  Antisense strand to SEQ ID NO: 2125876
ucagcugucugguaaacca

SEQ ID NO: 2125878 - RNA, 19 nt, Artificial Sequence
  Description of Artificial Sequence: Synthetic oligonucleotide
  Sense strand starting at position 317 of SEQ ID NO: 1882499
gggaacuggugucuuauaa

SEQ ID NO: 2125879 - RNA, 19 nt, Artificial Sequence
  Description of Artificial Sequence: Synthetic oligonucleotide
  Antisense strand to SEQ ID NO: 2125878
uuauaagacaccaguuccc

SEQ ID NO: 2125880 - RNA, 19 nt, Artificial Sequence
  Description of Artificial Sequence: Synthetic oligonucleotide
  Sense strand starting at position 324 of SEQ ID NO: 1882499
ggugucuuauaaccaaguu

SEQ ID NO: 2125881 - RNA, 19 nt, Artificial Sequence
  Description of Artificial Sequence: Synthetic oligonucleotide
  Antisense strand to SEQ ID NO: 2125880
aacuugguuauaagacacc

SEQ ID NO: 2125882 - RNA, 19 nt, Artificial Sequence
  Description of Artificial Sequence: Synthetic oligonucleotide
  Sense strand starting at position 340 of SEQ ID NO: 1882499
guuggauaccuguguauag

SEQ ID NO: 2125883 - RNA, 19 nt, Artificial Sequence
  Description of Artificial Sequence: Synthetic oligonucleotide
  Antisense strand to SEQ ID NO: 2125882
cuauacacagguauccaac

SEQ ID NO: 2125884 - RNA, 19 nt, Artificial Sequence
  Description of Artificial Sequence: Synthetic oligonucleotide
  Sense strand starting at position 413 of SEQ ID NO: 1882499
uucugauucuuggccauau

SEQ ID NO: 2125885 - RNA, 19 nt, Artificial Sequence
  Description of Artificial Sequence: Synthetic oligonucleotide
  Antisense strand to SEQ ID NO: 2125884
auauggccaagaaucagaa

SEQ ID NO: 2125886 - RNA, 19 nt, Artificial Sequence
  Description of Artificial Sequence: Synthetic oligonucleotide
  Sense strand starting at position 536 of SEQ ID NO: 1882499
gguuucuaucacugugaca

SEQ ID NO: 2125887 - RNA, 19 nt, Artificial Sequence
  Description of Artificial Sequence: Synthetic oligonucleotide
  Antisense strand to SEQ ID NO: 2125886
ugucacagugauagaaacc

SEQ ID NO: 2125888 - RNA, 19 nt, Artificial Sequence
  Description of Artificial Sequence: Synthetic oligonucleotide
  Sense strand starting at position 598 of SEQ ID NO: 1882499
cuguccuugcaguacauau

SEQ ID NO: 2125889 - RNA, 19 nt, Artificial Sequence
  Description of Artificial Sequence: Synthetic oligonucleotide
  Antisense strand to SEQ ID NO: 2125888
auauguacugcaaggacag

SEQ ID NO: 2125890 - RNA, 19 nt, Artificial Sequence
  Description of Artificial Sequence: Synthetic oligonucleotide
  Sense strand starting at position 715 of SEQ ID NO: 1882499
aagugagguauuggugaaa

SEQ ID NO: 2125891 - RNA, 19 nt, Artificial Sequence
  Description of Artificial Sequence: Synthetic oligonucleotide
  Antisense strand to SEQ ID NO: 2125890
uuucaccaauaccucacuu

SEQ ID NO: 2125892 - RNA, 19 nt, Artificial Sequence
  Description of Artificial Sequence: Synthetic oligonucleotide
  Sense strand starting at position 745 of SEQ ID NO: 1882499
agaacaguuucucuccagu

SEQ ID NO: 2125893 - RNA, 19 nt, Artificial Sequence
  Description of Artificial Sequence: Synthetic oligonucleotide
  Antisense strand to SEQ ID NO: 2125892
acuggagagaaacuguucu

SEQ ID NO: 2125894 - RNA, 19 nt, Artificial Sequence
  Description of Artificial Sequence: Synthetic oligonucleotide
  Sense strand starting at position 748 of SEQ ID NO: 1882499
acaguuucucuccaguaac

SEQ ID NO: 2125895 - RNA, 19 nt, Artificial Sequence
  Description of Artificial Sequence: Synthetic oligonucleotide
  Antisense strand to SEQ ID NO: 2125894
guuacuggagagaaacugu

SEQ ID NO: 2125896 - RNA, 19 nt, Artificial Sequence
  Description of Artificial Sequence: Synthetic oligonucleotide
  Sense strand starting at position 1017 of SEQ ID NO: 1882499
agguuagagaacuguguau

SEQ ID NO: 2125897 - RNA, 19 nt, Artificial Sequence
  Description of Artificial Sequence: Synthetic oligonucleotide
  Antisense strand to SEQ ID NO: 2125896
auacacaguucucuaaccu

SEQ ID NO: 2125898 - RNA, 19 nt, Artificial Sequence
  Description of Artificial Sequence: Synthetic oligonucleotide
  Sense strand starting at position 1019 of SEQ ID NO: 1882499
guuagagaacuguguauuc

SEQ ID NO: 2125899 - RNA, 19 nt, Artificial Sequence
  Description of Artificial Sequence: Synthetic oligonucleotide
  Antisense strand to SEQ ID NO: 2125898
gaauacacaguucucuaac

SEQ ID NO: 2125900 - RNA, 19 nt, Artificial Sequence
  Description of Artificial Sequence: Synthetic oligonucleotide
  Sense strand starting at position 1021 of SEQ ID NO: 1882499
uagagaacuguguauucuu

SEQ ID NO: 2125901 - RNA, 19 nt, Artificial Sequence
  Description of Artificial Sequence: Synthetic oligonucleotide
  Antisense strand to SEQ ID NO: 2125900
aagaauacacaguucucua

SEQ ID NO: 2125902 - RNA, 19 nt, Artificial Sequence
  Description of Artificial Sequence: Synthetic oligonucleotide
  Sense strand starting at position 1117 of SEQ ID NO: 1882499
gggagaguuaaggguugua

SEQ ID NO: 2125903 - RNA, 19 nt, Artificial Sequence
  Description of Artificial Sequence: Synthetic oligonucleotide
  Antisense strand to SEQ ID NO: 2125902
uacaacccuuaacucuccc

SEQ ID NO: 2125904 - RNA, 19 nt, Artificial Sequence
  Description of Artificial Sequence: Synthetic oligonucleotide
  Sense strand starting at position 1120 of SEQ ID NO: 1882499
agaguuaaggguuguauau

SEQ ID NO: 2125905 - RNA, 19 nt, Artificial Sequence
  Description of Artificial Sequence: Synthetic oligonucleotide
  Antisense strand to SEQ ID NO: 2125904
auauacaacccuuaacucu

SEQ ID NO: 2125906 - RNA, 19 nt, Artificial Sequence
  Description of Artificial Sequence: Synthetic oligonucleotide
  Sense strand starting at position 1130 of SEQ ID NO: 1882499
guuguauauacaggcaaga

SEQ ID NO: 2125907 - RNA, 19 nt, Artificial Sequence
  Description of Artificial Sequence: Synthetic oligonucleotide
  Antisense strand to SEQ ID NO: 2125906
ucuugccuguauauacaac

SEQ ID NO: 2125908 - RNA, 19 nt, Artificial Sequence
  Description of Artificial Sequence: Synthetic oligonucleotide
  Sense strand starting at position 1204 of SEQ ID NO: 1882499
agagauuccaagugcaaga

SEQ ID NO: 2125909 - RNA, 19 nt, Artificial Sequence
  Description of Artificial Sequence: Synthetic oligonucleotide
  Antisense strand to SEQ ID NO: 2125908
ucuugcacuuggaaucucu

SEQ ID NO: 2125910 - RNA, 19 nt, Artificial Sequence
  Description of Artificial Sequence: Synthetic oligonucleotide
  Sense strand starting at position 1288 of SEQ ID NO: 1882499
agaagugccuggucaggaa

SEQ ID NO: 2125911 - RNA, 19 nt, Artificial Sequence
  Description of Artificial Sequence: Synthetic oligonucleotide
  Antisense strand to SEQ ID NO: 2125910
uuccugaccaggcacuucu

SEQ ID NO: 2125912 - RNA, 19 nt, Artificial Sequence
  Description of Artificial Sequence: Synthetic oligonucleotide
  Sense strand starting at position 1304 of SEQ ID NO: 1882499
gaaacagagccagguguuu

SEQ ID NO: 2125913 - RNA, 19 nt, Artificial Sequence
  Description of Artificial Sequence: Synthetic oligonucleotide
  Antisense strand to SEQ ID NO: 2125912
aaacaccuggcucuguuuc

SEQ ID NO: 2125914 - RNA, 19 nt, Artificial Sequence
  Description of Artificial Sequence: Synthetic oligonucleotide
  Sense strand starting at position 1580 of SEQ ID NO: 1882499
cacuauggagagugcuaaa

SEQ ID NO: 2125915 - RNA, 19 nt, Artificial Sequence
  Description of Artificial Sequence: Synthetic oligonucleotide
  Antisense strand to SEQ ID NO: 2125914
uuuagcacucuccauagug

SEQ ID NO: 2125916 - RNA, 19 nt, Artificial Sequence
  Description of Artificial Sequence: Synthetic oligonucleotide
  Sense strand starting at position 1587 of SEQ ID NO: 1882499
gagagugcuaaacgcaaga

SEQ ID NO: 2125917 - RNA, 19 nt, Artificial Sequence
  Description of Artificial Sequence: Synthetic oligonucleotide
  Antisense strand to SEQ ID NO: 2125916
ucuugcguuuagcacucuc

SEQ ID NO: 2125918 - RNA, 19 nt, Artificial Sequence
  Description of Artificial Sequence: Synthetic oligonucleotide
  Sense strand starting at position 2129 of SEQ ID NO: 1882499
auccuagucagguggauau

SEQ ID NO: 2125919 - RNA, 19 nt, Artificial Sequence
  Description of Artificial Sequence: Synthetic oligonucleotide
  Antisense strand to SEQ ID NO: 2125918
auauccaccugacuaggau

SEQ ID NO: 2125920 - RNA, 19 nt, Artificial Sequence
  Description of Artificial Sequence: Synthetic oligonucleotide
  Sense strand starting at position 2142 of SEQ ID NO: 1882499
ggauauggaucugaggaag

SEQ ID NO: 2125921 - RNA, 19 nt, Artificial Sequence
  Description of Artificial Sequence: Synthetic oligonucleotide
  Antisense strand to SEQ ID NO: 2125920
cuuccucagauccauaucc

SEQ ID NO: 2125922 - RNA, 19 nt, Artificial Sequence
  Description of Artificial Sequence: Synthetic oligonucleotide
  Sense strand starting at position 2255 of SEQ ID NO: 1882499
aaaccuuaucucgguaaug

SEQ ID NO: 2125923 - RNA, 19 nt, Artificial Sequence
  Description of Artificial Sequence: Synthetic oligonucleotide
  Antisense strand to SEQ ID NO: 2125922
cauuaccgagauaagguuu

SEQ ID NO: 2125924 - RNA, 19 nt, Artificial Sequence
  Description of Artificial Sequence: Synthetic oligonucleotide
  Sense strand starting at position 2288 of SEQ ID NO: 1882499
gugcauugggcgagaccau

SEQ ID NO: 2125925 - RNA, 19 nt, Artificial Sequence
  Description of Artificial Sequence: Synthetic oligonucleotide
  Antisense strand to SEQ ID NO: 2125924
auggucucgcccaaugcac

SEQ ID NO: 2125926 - RNA, 19 nt, Artificial Sequence
  Description of Artificial Sequence: Synthetic oligonucleotide
  Sense strand starting at position 2289 of SEQ ID NO: 1882499
ugcauugggcgagaccaua

SEQ ID NO: 2125927 - RNA, 19 nt, Artificial Sequence
  Description of Artificial Sequence: Synthetic oligonucleotide
  Antisense strand to SEQ ID NO: 2125926
uauggucucgcccaaugca

SEQ ID NO: 2125928 - RNA, 19 nt, Artificial Sequence
  Description of Artificial Sequence: Synthetic oligonucleotide
  Sense strand starting at position 2640 of SEQ ID NO: 1882499
aguaauaaacccggaagua

SEQ ID NO: 2125929 - RNA, 19 nt, Artificial Sequence
  Description of Artificial Sequence: Synthetic oligonucleotide
  Antisense strand to SEQ ID NO: 2125928
uacuuccggguuuauuacu

SEQ ID NO: 2125930 - RNA, 19 nt, Artificial Sequence
  Description of Artificial Sequence: Synthetic oligonucleotide
  Sense strand starting at position 2677 of SEQ ID NO: 1882499
aagacugugccggaaguuu

SEQ ID NO: 2125931 - RNA, 19 nt, Artificial Sequence
  Description of Artificial Sequence: Synthetic oligonucleotide
  Antisense strand to SEQ ID NO: 2125930
aaacuuccggcacagucuu

SEQ ID NO: 2125932 - RNA, 19 nt, Artificial Sequence
  Description of Artificial Sequence: Synthetic oligonucleotide
  Sense strand starting at position 2692 of SEQ ID NO: 1882499
guuucuuucugacccuuga

SEQ ID NO: 2125933 - RNA, 19 nt, Artificial Sequence
  Description of Artificial Sequence: Synthetic oligonucleotide
  Antisense strand to SEQ ID NO: 2125932
ucaagggucagaaagaaac

SEQ ID NO: 2125934 - RNA, 19 nt, Artificial Sequence
  Description of Artificial Sequence: Synthetic oligonucleotide
  Sense strand starting at position 2758 of SEQ ID NO: 1882499
agacuagacuaggacauuu

SEQ ID NO: 2125935 - RNA, 19 nt, Artificial Sequence
  Description of Artificial Sequence: Synthetic oligonucleotide
  Antisense strand to SEQ ID NO: 2125934
aaauguccuagucuagucu

SEQ ID NO: 2125936 - RNA, 19 nt, Artificial Sequence
  Description of Artificial Sequence: Synthetic oligonucleotide
  Sense strand starting at position 3102 of SEQ ID NO: 1882499
ggaugucccgcccaagaaa

SEQ ID NO: 2125937 - RNA, 19 nt, Artificial Sequence
  Description of Artificial Sequence: Synthetic oligonucleotide
  Antisense strand to SEQ ID NO: 2125936
uuucuugggcgggacaucc

SEQ ID NO: 2125938 - RNA, 19 nt, Artificial Sequence
  Description of Artificial Sequence: Synthetic oligonucleotide
  Sense strand starting at position 3360 of SEQ ID NO: 1882499
agucucggaucucuaagaa

SEQ ID NO: 2125939 - RNA, 19 nt, Artificial Sequence
  Description of Artificial Sequence: Synthetic oligonucleotide
  Antisense strand to SEQ ID NO: 2125938
uucuuagagauccgagacu

SEQ ID NO: 2125940 - RNA, 19 nt, Artificial Sequence
  Description of Artificial Sequence: Synthetic oligonucleotide
  Sense strand starting at position 3379 of SEQ ID NO: 1882499
gccucaggucccgaagaaa

SEQ ID NO: 2125941 - RNA, 19 nt, Artificial Sequence
  Description of Artificial Sequence: Synthetic oligonucleotide
  Antisense strand to SEQ ID NO: 2125940
uuucuucgggaccugaggc

SEQ ID NO: 2125942 - RNA, 19 nt, Artificial Sequence
  Description of Artificial Sequence: Synthetic oligonucleotide
  Sense strand starting at position 3588 of SEQ ID NO: 1882499
guggaagugguccagaagu

SEQ ID NO: 2125943 - RNA, 19 nt, Artificial Sequence
  Description of Artificial Sequence: Synthetic oligonucleotide
  Antisense strand to SEQ ID NO: 2125942
acuucuggaccacuuccac

SEQ ID NO: 2125944 - RNA, 19 nt, Artificial Sequence
  Description of Artificial Sequence: Synthetic oligonucleotide
  Sense strand starting at position 3590 of SEQ ID NO: 1882499
ggaagugguccagaaguuc

SEQ ID NO: 2125945 - RNA, 19 nt, Artificial Sequence
  Description of Artificial Sequence: Synthetic oligonucleotide
  Antisense strand to SEQ ID NO: 2125944
gaacuucuggaccacuucc

SEQ ID NO: 2125946 - RNA, 19 nt, Artificial Sequence
  Description of Artificial Sequence: Synthetic oligonucleotide
  Sense strand starting at position 3889 of SEQ ID NO: 1882499
gugagugagcccuaaucug

SEQ ID NO: 2125947 - RNA, 19 nt, Artificial Sequence
  Description of Artificial Sequence: Synthetic oligonucleotide
  Antisense strand to SEQ ID NO: 2125946
cagauuagggcucacucac

SEQ ID NO: 2125948 - RNA, 19 nt, Artificial Sequence
  Description of Artificial Sequence: Synthetic oligonucleotide
  Sense strand starting at position 45 of SEQ ID NO: 1882500
aagguuaagucagcaagaa

SEQ ID NO: 2125949 - RNA, 19 nt, Artificial Sequence
  Description of Artificial Sequence: Synthetic oligonucleotide
  Antisense strand to SEQ ID NO: 2125948
uucuugcugacuuaaccuu

SEQ ID NO: 2125950 - RNA, 19 nt, Artificial Sequence
  Description of Artificial Sequence: Synthetic oligonucleotide
  Sense strand starting at position 46 of SEQ ID NO: 1882500
agguuaagucagcaagaac

SEQ ID NO: 2125951 - RNA, 19 nt, Artificial Sequence
  Description of Artificial Sequence: Synthetic oligonucleotide
  Antisense strand to SEQ ID NO: 2125950
guucuugcugacuuaaccu

SEQ ID NO: 2125952 - RNA, 19 nt, Artificial Sequence
  Description of Artificial Sequence: Synthetic oligonucleotide
  Sense strand starting at position 163 of SEQ ID NO: 1882500
cccugcagguuucuaagau

SEQ ID NO: 2125953 - RNA, 19 nt, Artificial Sequence
  Description of Artificial Sequence: Synthetic oligonucleotide
  Antisense strand to SEQ ID NO: 2125952
aucuuagaaaccugcaggg

SEQ ID NO: 2125954 - RNA, 19 nt, Artificial Sequence
  Description of Artificial Sequence: Synthetic oligonucleotide
  Sense strand starting at position 273 of SEQ ID NO: 1882500
acuuaucuugggugggaca

SEQ ID NO: 2125955 - RNA, 19 nt, Artificial Sequence
  Description of Artificial Sequence: Synthetic oligonucleotide
  Antisense strand to SEQ ID NO: 2125954
ugucccacccaagauaagu

SEQ ID NO: 2125956 - RNA, 19 nt, Artificial Sequence
  Description of Artificial Sequence: Synthetic oligonucleotide
  Sense strand starting at position 328 of SEQ ID NO: 1882500
ggugaagacuucccuugca

SEQ ID NO: 2125957 - RNA, 19 nt, Artificial Sequence
  Description of Artificial Sequence: Synthetic oligonucleotide
  Antisense strand to SEQ ID NO: 2125956
ugcaagggaagucuucacc

SEQ ID NO: 2125958 - RNA, 19 nt, Artificial Sequence
  Description of Artificial Sequence: Synthetic oligonucleotide
  Sense strand starting at position 357 of SEQ ID NO: 1882500
gagauuaaauggguaaugu

SEQ ID NO: 2125959 - RNA, 19 nt, Artificial Sequence
  Description of Artificial Sequence: Synthetic oligonucleotide
  Antisense strand to SEQ ID NO: 2125958
acauuacccauuuaaucuc

SEQ ID NO: 2125960 - RNA, 19 nt, Artificial Sequence
  Description of Artificial Sequence: Synthetic oligonucleotide
  Sense strand starting at position 365 of SEQ ID NO: 1882500
auggguaauguaugguuau

SEQ ID NO: 2125961 - RNA, 19 nt, Artificial Sequence
  Description of Artificial Sequence: Synthetic oligonucleotide
  Antisense strand to SEQ ID NO: 2125960
auaaccauacauuacccau

SEQ ID NO: 2125962 - RNA, 19 nt, Artificial Sequence
  Description of Artificial Sequence: Synthetic oligonucleotide
  Sense strand starting at position 368 of SEQ ID NO: 1882500
gguaauguaugguuaucua

SEQ ID NO: 2125963 - RNA, 19 nt, Artificial Sequence
  Description of Artificial Sequence: Synthetic oligonucleotide
  Antisense strand to SEQ ID NO: 2125962
uagauaaccauacauuacc

SEQ ID NO: 2125964 - RNA, 19 nt, Artificial Sequence
  Description of Artificial Sequence: Synthetic oligonucleotide
  Sense strand starting at position 371 of SEQ ID NO: 1882500
aauguaugguuaucuagca

SEQ ID NO: 2125965 - RNA, 19 nt, Artificial Sequence
  Description of Artificial Sequence: Synthetic oligonucleotide
  Antisense strand to SEQ ID NO: 2125964
ugcuagauaaccauacauu

SEQ ID NO: 2125966 - RNA, 19 nt, Artificial Sequence
  Description of Artificial Sequence: Synthetic oligonucleotide
  Sense strand starting at position 494 of SEQ ID NO: 1882500
gggaauuauagccggacuc

SEQ ID NO: 2125967 - RNA, 19 nt, Artificial Sequence
  Description of Artificial Sequence: Synthetic oligonucleotide
  Antisense strand to SEQ ID NO: 2125966
gaguccggcuauaauuccc

SEQ ID NO: 2125968 - RNA, 19 nt, Artificial Sequence
  Description of Artificial Sequence: Synthetic oligonucleotide
  Sense strand starting at position 496 of SEQ ID NO: 1882500
gaauuauagccggacucca

SEQ ID NO: 2125969 - RNA, 19 nt, Artificial Sequence
  Description of Artificial Sequence: Synthetic oligonucleotide
  Antisense strand to SEQ ID NO: 2125968
uggaguccggcuauaauuc

SEQ ID NO: 2125970 - RNA, 19 nt, Artificial Sequence
  Description of Artificial Sequence: Synthetic oligonucleotide
  Sense strand starting at position 511 of SEQ ID NO: 1882500
uccagagaucccugccauc

SEQ ID NO: 2125971 - RNA, 19 nt, Artificial Sequence
  Description of Artificial Sequence: Synthetic oligonucleotide
  Antisense strand to SEQ ID NO: 2125970
gauggcagggaucucugga

SEQ ID NO: 2125972 - RNA, 19 nt, Artificial Sequence
  Description of Artificial Sequence: Synthetic oligonucleotide
  Sense strand starting at position 544 of SEQ ID NO: 1882500
uuuaauaagccguagauag

SEQ ID NO: 2125973 - RNA, 19 nt, Artificial Sequence
  Description of Artificial Sequence: Synthetic oligonucleotide
  Antisense strand to SEQ ID NO: 2125972
cuaucuacggcuuauuaaa

SEQ ID NO: 2125974 - RNA, 19 nt, Artificial Sequence
  Description of Artificial Sequence: Synthetic oligonucleotide
  Sense strand starting at position 546 of SEQ ID NO: 1882500
uaauaagccguagauagaa

SEQ ID NO: 2125975 - RNA, 19 nt, Artificial Sequence
  Description of Artificial Sequence: Synthetic oligonucleotide
  Antisense strand to SEQ ID NO: 2125974
uucuaucuacggcuuauua

SEQ ID NO: 2125976 - RNA, 19 nt, Artificial Sequence
  Description of Artificial Sequence: Synthetic oligonucleotide
  Sense strand starting at position 548 of SEQ ID NO: 1882500
auaagccguagauagaaua

SEQ ID NO: 2125977 - RNA, 19 nt, Artificial Sequence
  Description of Artificial Sequence: Synthetic oligonucleotide
  Antisense strand to SEQ ID NO: 2125976
uauucuaucuacggcuuau

SEQ ID NO: 2125978 - RNA, 19 nt, Artificial Sequence
  Description of Artificial Sequence: Synthetic oligonucleotide
  Sense strand starting at position 586 of SEQ ID NO: 1882500
auauaagguguguggugaa

SEQ ID NO: 2125979 - RNA, 19 nt, Artificial Sequence
  Description of Artificial Sequence: Synthetic oligonucleotide
  Antisense strand to SEQ ID NO: 2125978
uucaccacacaccuuauau

SEQ ID NO: 2125980 - RNA, 19 nt, Artificial Sequence
  Description of Artificial Sequence: Synthetic oligonucleotide
  Sense strand starting at position 870 of SEQ ID NO: 1882500
gugaacaaccuguaucaug

SEQ ID NO: 2125981 - RNA, 19 nt, Artificial Sequence
  Description of Artificial Sequence: Synthetic oligonucleotide
  Antisense strand to SEQ ID NO: 2125980
caugauacagguuguucac

SEQ ID NO: 2125982 - RNA, 19 nt, Artificial Sequence
  Description of Artificial Sequence: Synthetic oligonucleotide
  Sense strand starting at position 982 of SEQ ID NO: 1882500
gacagcugccucuguaaga

SEQ ID NO: 2125983 - RNA, 19 nt, Artificial Sequence
  Description of Artificial Sequence: Synthetic oligonucleotide
  Antisense strand to SEQ ID NO: 2125982
ucuuacagaggcagcuguc

SEQ ID NO: 2125984 - RNA, 19 nt, Artificial Sequence
  Description of Artificial Sequence: Synthetic oligonucleotide
  Sense strand starting at position 1260 of SEQ ID NO: 1882500
cguuucucaccugggauga

SEQ ID NO: 2125985 - RNA, 19 nt, Artificial Sequence
  Description of Artificial Sequence: Synthetic oligonucleotide
  Antisense strand to SEQ ID NO: 2125984
ucaucccaggugagaaacg

SEQ ID NO: 2125986 - RNA, 19 nt, Artificial Sequence
  Description of Artificial Sequence: Synthetic oligonucleotide
  Sense strand starting at position 1428 of SEQ ID NO: 1882500
uccacaguggauuggaaau

SEQ ID NO: 2125987 - RNA, 19 nt, Artificial Sequence
  Description of Artificial Sequence: Synthetic oligonucleotide
  Antisense strand to SEQ ID NO: 2125986
auuuccaauccacugugga

SEQ ID NO: 2125988 - RNA, 19 nt, Artificial Sequence
  Description of Artificial Sequence: Synthetic oligonucleotide
  Sense strand starting at position 2281 of SEQ ID NO: 1882500
ggaggugagaucugacgua

SEQ ID NO: 2125989 - RNA, 19 nt, Artificial Sequence
  Description of Artificial Sequence: Synthetic oligonucleotide
  Antisense strand to SEQ ID NO: 2125988
uacgucagaucucaccucc

SEQ ID NO: 2125990 - RNA, 19 nt, Artificial Sequence
  Description of Artificial Sequence: Synthetic oligonucleotide
  Sense strand starting at position 2333 of SEQ ID NO: 1882500
ugcccuuucucuuuaagag

SEQ ID NO: 2125991 - RNA, 19 nt, Artificial Sequence
  Description of Artificial Sequence: Synthetic oligonucleotide
  Antisense strand to SEQ ID NO: 2125990
cucuuaaagagaaagggca

SEQ ID NO: 2125992 - RNA, 19 nt, Artificial Sequence
  Description of Artificial Sequence: Synthetic oligonucleotide
  Sense strand starting at position 2334 of SEQ ID NO: 1882500
gcccuuucucuuuaagaga

SEQ ID NO: 2125993 - RNA, 19 nt, Artificial Sequence
  Description of Artificial Sequence: Synthetic oligonucleotide
  Antisense strand to SEQ ID NO: 2125992
ucucuuaaagagaaagggc

SEQ ID NO: 2125994 - RNA, 19 nt, Artificial Sequence
  Description of Artificial Sequence: Synthetic oligonucleotide
  Sense strand starting at position 2408 of SEQ ID NO: 1882500
ggcagcuauggacauugau

SEQ ID NO: 2125995 - RNA, 19 nt, Artificial Sequence
  Description of Artificial Sequence: Synthetic oligonucleotide
  Antisense strand to SEQ ID NO: 2125994
aucaauguccauagcugcc

SEQ ID NO: 2125996 - RNA, 19 nt, Artificial Sequence
  Description of Artificial Sequence: Synthetic oligonucleotide
  Sense strand starting at position 2537 of SEQ ID NO: 1882500
uguucucacccaggguaaa

SEQ ID NO: 2125997 - RNA, 19 nt, Artificial Sequence
  Description of Artificial Sequence: Synthetic oligonucleotide
  Antisense strand to SEQ ID NO: 2125996
uuuacccugggugagaaca

SEQ ID NO: 2125998 - RNA, 19 nt, Artificial Sequence
  Description of Artificial Sequence: Synthetic oligonucleotide
  Sense strand starting at position 2538 of SEQ ID NO: 1882500
guucucacccaggguaaau

SEQ ID NO: 2125999 - RNA, 19 nt, Artificial Sequence
  Description of Artificial Sequence: Synthetic oligonucleotide
  Antisense strand to SEQ ID NO: 2125998
auuuacccugggugagaac

SEQ ID NO: 2126000 - RNA, 19 nt, Artificial Sequence
  Description of Artificial Sequence: Synthetic oligonucleotide
  Sense strand starting at position 2709 of SEQ ID NO: 1882500
gucagauggguagggaauu

SEQ ID NO: 2126001 - RNA, 19 nt, Artificial Sequence
  Description of Artificial Sequence: Synthetic oligonucleotide
  Antisense strand to SEQ ID NO: 2126000
aauucccuacccaucugac

SEQ ID NO: 2126002 - RNA, 19 nt, Artificial Sequence
  Description of Artificial Sequence: Synthetic oligonucleotide
  Sense strand starting at position 2770 of SEQ ID NO: 1882500
cauccuuuaggaugagguu

SEQ ID NO: 2126003 - RNA, 19 nt, Artificial Sequence
  Description of Artificial Sequence: Synthetic oligonucleotide
  Antisense strand to SEQ ID NO: 2126002
aaccucauccuaaaggaug

SEQ ID NO: 2126004 - RNA, 19 nt, Artificial Sequence
  Description of Artificial Sequence: Synthetic oligonucleotide
  Sense strand starting at position 2784 of SEQ ID NO: 1882500
agguuuagggcucauccua

SEQ ID NO: 2126005 - RNA, 19 nt, Artificial Sequence
  Description of Artificial Sequence: Synthetic oligonucleotide
  Antisense strand to SEQ ID NO: 2126004
uaggaugagcccuaaaccu

SEQ ID NO: 2126006 - RNA, 19 nt, Artificial Sequence
  Description of Artificial Sequence: Synthetic oligonucleotide
  Sense strand starting at position 2916 of SEQ ID NO: 1882500
caaccuguauuugggaaua

SEQ ID NO: 2126007 - RNA, 19 nt, Artificial Sequence
  Description of Artificial Sequence: Synthetic oligonucleotide
  Antisense strand to SEQ ID NO: 2126006
uauucccaaauacagguug

SEQ ID NO: 2126008 - RNA, 19 nt, Artificial Sequence
  Description of Artificial Sequence: Synthetic oligonucleotide
  Sense strand starting at position 2926 of SEQ ID NO: 1882500
uugggaauacccuguauua

SEQ ID NO: 2126009 - RNA, 19 nt, Artificial Sequence
  Description of Artificial Sequence: Synthetic oligonucleotide
  Antisense strand to SEQ ID NO: 2126008
uaauacaggguauucccaa

SEQ ID NO: 2126010 - RNA, 19 nt, Artificial Sequence
  Description of Artificial Sequence: Synthetic oligonucleotide
  Sense strand starting at position 3111 of SEQ ID NO: 1882500
cuguaagaucaagguaauu

SEQ ID NO: 2126011 - RNA, 19 nt, Artificial Sequence
  Description of Artificial Sequence: Synthetic oligonucleotide
  Antisense strand to SEQ ID NO: 2126010
aauuaccuugaucuuacag

SEQ ID NO: 2126012 - RNA, 19 nt, Artificial Sequence
  Description of Artificial Sequence: Synthetic oligonucleotide
  Sense strand starting at position 3132 of SEQ ID NO: 1882500
aagguaccugccugaacua

SEQ ID NO: 2126013 - RNA, 19 nt, Artificial Sequence
  Description of Artificial Sequence: Synthetic oligonucleotide
  Antisense strand to SEQ ID NO: 2126012
uaguucaggcagguaccuu

SEQ ID NO: 2126014 - RNA, 19 nt, Artificial Sequence
  Description of Artificial Sequence: Synthetic oligonucleotide
  Sense strand starting at position 3367 of SEQ ID NO: 1882500
gugggacucccaugucuaa

SEQ ID NO: 2126015 - RNA, 19 nt, Artificial Sequence
  Description of Artificial Sequence: Synthetic oligonucleotide
  Antisense strand to SEQ ID NO: 2126014
uuagacaugggagucccac

SEQ ID NO: 2126016 - RNA, 19 nt, Artificial Sequence
  Description of Artificial Sequence: Synthetic oligonucleotide
  Sense strand starting at position 3513 of SEQ ID NO: 1882500
acagcaggacuuugguaau

SEQ ID NO: 2126017 - RNA, 19 nt, Artificial Sequence
  Description of Artificial Sequence: Synthetic oligonucleotide
  Antisense strand to SEQ ID NO: 2126016
auuaccaaaguccugcugu

SEQ ID NO: 2126018 - RNA, 19 nt, Artificial Sequence
  Description of Artificial Sequence: Synthetic oligonucleotide
  Sense strand starting at position 3519 of SEQ ID NO: 1882500
ggacuuugguaauuauucu

SEQ ID NO: 2126019 - RNA, 19 nt, Artificial Sequence
  Description of Artificial Sequence: Synthetic oligonucleotide
  Antisense strand to SEQ ID NO: 2126018
agaauaauuaccaaagucc

SEQ ID NO: 2126020 - RNA, 19 nt, Artificial Sequence
  Description of Artificial Sequence: Synthetic oligonucleotide
  Sense strand starting at position 3587 of SEQ ID NO: 1882500
gauuuauccugcuccguca

SEQ ID NO: 2126021 - RNA, 19 nt, Artificial Sequence
  Description of Artificial Sequence: Synthetic oligonucleotide
  Antisense strand to SEQ ID NO: 2126020
ugacggagcaggauaaauc

SEQ ID NO: 2126022 - RNA, 19 nt, Artificial Sequence
  Description of Artificial Sequence: Synthetic oligonucleotide
  Sense strand starting at position 3625 of SEQ ID NO: 1882500
ugcaauuacaggcagugau

SEQ ID NO: 2126023 - RNA, 19 nt, Artificial Sequence
  Description of Artificial Sequence: Synthetic oligonucleotide
  Antisense strand to SEQ ID NO: 2126022
aucacugccuguaauugca

SEQ ID NO: 2126024 - RNA, 19 nt, Artificial Sequence
  Description of Artificial Sequence: Synthetic oligonucleotide
  Sense strand starting at position 3707 of SEQ ID NO: 1882500
gagugcugaccucauauaa

SEQ ID NO: 2126025 - RNA, 19 nt, Artificial Sequence
  Description of Artificial Sequence: Synthetic oligonucleotide
  Antisense strand to SEQ ID NO: 2126024
uuauaugaggucagcacuc

SEQ ID NO: 2126026 - RNA, 19 nt, Artificial Sequence
  Description of Artificial Sequence: Synthetic oligonucleotide
  Sense strand starting at position 3970 of SEQ ID NO: 1882500
ccuguuucugaacaucaga

SEQ ID NO: 2126027 - RNA, 19 nt, Artificial Sequence
  Description of Artificial Sequence: Synthetic oligonucleotide
  Antisense strand to SEQ ID NO: 2126026
ucugauguucagaaacagg

SEQ ID NO: 2126028 - RNA, 19 nt, Artificial Sequence
  Description of Artificial Sequence: Synthetic oligonucleotide
  Sense strand starting at position 84 of SEQ ID NO: 1882501
uucuaucuucuguagagac

SEQ ID NO: 2126029 - RNA, 19 nt, Artificial Sequence
  Description of Artificial Sequence: Synthetic oligonucleotide
  Antisense strand to SEQ ID NO: 2126028
gucucuacagaagauagaa

SEQ ID NO: 2126030 - RNA, 19 nt, Artificial Sequence
  Description of Artificial Sequence: Synthetic oligonucleotide
  Sense strand starting at position 110 of SEQ ID NO: 1882501
ugccaugucaugggugaca

SEQ ID NO: 2126031 - RNA, 19 nt, Artificial Sequence
  Description of Artificial Sequence: Synthetic oligonucleotide
  Antisense strand to SEQ ID NO: 2126030
ugucacccaugacauggca

SEQ ID NO: 2126032 - RNA, 19 nt, Artificial Sequence
  Description of Artificial Sequence: Synthetic oligonucleotide
  Sense strand starting at position 112 of SEQ ID NO: 1882501
ccaugucaugggugacaug

SEQ ID NO: 2126033 - RNA, 19 nt, Artificial Sequence
  Description of Artificial Sequence: Synthetic oligonucleotide
  Antisense strand to SEQ ID NO: 2126032
caugucacccaugacaugg

SEQ ID NO: 2126034 - RNA, 19 nt, Artificial Sequence
  Description of Artificial Sequence: Synthetic oligonucleotide
  Sense strand starting at position 124 of SEQ ID NO: 1882501
ugacauggcuuguuucgaa

SEQ ID NO: 2126035 - RNA, 19 nt, Artificial Sequence
  Description of Artificial Sequence: Synthetic oligonucleotide
  Antisense strand to SEQ ID NO: 2126034
uucgaaacaagccauguca

SEQ ID NO: 2126036 - RNA, 19 nt, Artificial Sequence
  Description of Artificial Sequence: Synthetic oligonucleotide
  Sense strand starting at position 530 of SEQ ID NO: 1882501
uggccauauuacguuuaau

SEQ ID NO: 2126037 - RNA, 19 nt, Artificial Sequence
  Description of Artificial Sequence: Synthetic oligonucleotide
  Antisense strand to SEQ ID NO: 2126036
auuaaacguaauauggcca

SEQ ID NO: 2126038 - RNA, 19 nt, Artificial Sequence
  Description of Artificial Sequence: Synthetic oligonucleotide
  Sense strand starting at position 1195 of SEQ ID NO: 1882501
uuuaaaugccuacauggua

SEQ ID NO: 2126039 - RNA, 19 nt, Artificial Sequence
  Description of Artificial Sequence: Synthetic oligonucleotide
  Antisense strand to SEQ ID NO: 2126038
uaccauguaggcauuuaaa

SEQ ID NO: 2126040 - RNA, 19 nt, Artificial Sequence
  Description of Artificial Sequence: Synthetic oligonucleotide
  Sense strand starting at position 1382 of SEQ ID NO: 1882501
gugguaacacugcgauuua

SEQ ID NO: 2126041 - RNA, 19 nt, Artificial Sequence
  Description of Artificial Sequence: Synthetic oligonucleotide
  Antisense strand to SEQ ID NO: 2126040
uaaaucgcaguguuaccac

SEQ ID NO: 2126042 - RNA, 19 nt, Artificial Sequence
  Description of Artificial Sequence: Synthetic oligonucleotide
  Sense strand starting at position 1393 of SEQ ID NO: 1882501
gcgauuuaaaccugggcau

SEQ ID NO: 2126043 - RNA, 19 nt, Artificial Sequence
  Description of Artificial Sequence: Synthetic oligonucleotide
  Antisense strand to SEQ ID NO: 2126042
augcccagguuuaaaucgc

SEQ ID NO: 2126044 - RNA, 19 nt, Artificial Sequence
  Description of Artificial Sequence: Synthetic oligonucleotide
  Sense strand starting at position 1405 of SEQ ID NO: 1882501
ugggcauccuggcuuuaga

SEQ ID NO: 2126045 - RNA, 19 nt, Artificial Sequence
  Description of Artificial Sequence: Synthetic oligonucleotide
  Antisense strand to SEQ ID NO: 2126044
ucuaaagccaggaugccca

SEQ ID NO: 2126046 - RNA, 19 nt, Artificial Sequence
  Description of Artificial Sequence: Synthetic oligonucleotide
  Sense strand starting at position 1549 of SEQ ID NO: 1882501
gacagagaaucuuugccag

SEQ ID NO: 2126047 - RNA, 19 nt, Artificial Sequence
  Description of Artificial Sequence: Synthetic oligonucleotide
  Antisense strand to SEQ ID NO: 2126046
cuggcaaagauucucuguc

SEQ ID NO: 2126048 - RNA, 19 nt, Artificial Sequence
  Description of Artificial Sequence: Synthetic oligonucleotide
  Sense strand starting at position 1551 of SEQ ID NO: 1882501
cagagaaucuuugccagug

SEQ ID NO: 2126049 - RNA, 19 nt, Artificial Sequence
  Description of Artificial Sequence: Synthetic oligonucleotide
  Antisense strand to SEQ ID NO: 2126048
cacuggcaaagauucucug

SEQ ID NO: 2126050 - RNA, 19 nt, Artificial Sequence
  Description of Artificial Sequence: Synthetic oligonucleotide
  Sense strand starting at position 1639 of SEQ ID NO: 1882501
acaccuaagccugagguua

SEQ ID NO: 2126051 - RNA, 19 nt, Artificial Sequence
  Description of Artificial Sequence: Synthetic oligonucleotide
  Antisense strand to SEQ ID NO: 2126050
uaaccucaggcuuaggugu

SEQ ID NO: 2126052 - RNA, 19 nt, Artificial Sequence
  Description of Artificial Sequence: Synthetic oligonucleotide
  Sense strand starting at position 1644 of SEQ ID NO: 1882501
uaagccugagguuacuaaa

SEQ ID NO: 2126053 - RNA, 19 nt, Artificial Sequence
  Description of Artificial Sequence: Synthetic oligonucleotide
  Antisense strand to SEQ ID NO: 2126052
uuuaguaaccucaggcuua

SEQ ID NO: 2126054 - RNA, 19 nt, Artificial Sequence
  Description of Artificial Sequence: Synthetic oligonucleotide
  Sense strand starting at position 1805 of SEQ ID NO: 1882501
ugcuguguccgagauggau

SEQ ID NO: 2126055 - RNA, 19 nt, Artificial Sequence
  Description of Artificial Sequence: Synthetic oligonucleotide
  Antisense strand to SEQ ID NO: 2126054
auccaucucggacacagca

SEQ ID NO: 2126056 - RNA, 19 nt, Artificial Sequence
  Description of Artificial Sequence: Synthetic oligonucleotide
  Sense strand starting at position 1807 of SEQ ID NO: 1882501
cuguguccgagauggauga

SEQ ID NO: 2126057 - RNA, 19 nt, Artificial Sequence
  Description of Artificial Sequence: Synthetic oligonucleotide
  Antisense strand to SEQ ID NO: 2126056
ucauccaucucggacacag

SEQ ID NO: 2126058 - RNA, 19 nt, Artificial Sequence
  Description of Artificial Sequence: Synthetic oligonucleotide
  Sense strand starting at position 1817 of SEQ ID NO: 1882501
gauggaugacggcauugua

SEQ ID NO: 2126059 - RNA, 19 nt, Artificial Sequence
  Description of Artificial Sequence: Synthetic oligonucleotide
  Antisense strand to SEQ ID NO: 2126058
uacaaugccgucauccauc

SEQ ID NO: 2126060 - RNA, 19 nt, Artificial Sequence
  Description of Artificial Sequence: Synthetic oligonucleotide
  Sense strand starting at position 1926 of SEQ ID NO: 1882501
cccuguuucugacugagag

SEQ ID NO: 2126061 - RNA, 19 nt, Artificial Sequence
  Description of Artificial Sequence: Synthetic oligonucleotide
  Antisense strand to SEQ ID NO: 2126060
cucucagucagaaacaggg

SEQ ID NO: 2126062 - RNA, 19 nt, Artificial Sequence
  Description of Artificial Sequence: Synthetic oligonucleotide
  Sense strand starting at position 1927 of SEQ ID NO: 1882501
ccuguuucugacugagaga

SEQ ID NO: 2126063 - RNA, 19 nt, Artificial Sequence
  Description of Artificial Sequence: Synthetic oligonucleotide
  Antisense strand to SEQ ID NO: 2126062
ucucucagucagaaacagg

SEQ ID NO: 2126064 - RNA, 19 nt, Artificial Sequence
  Description of Artificial Sequence: Synthetic oligonucleotide
  Sense strand starting at position 2137 of SEQ ID NO: 1882501
ggagcucaaugcccugauu

SEQ ID NO: 2126065 - RNA, 19 nt, Artificial Sequence
  Description of Artificial Sequence: Synthetic oligonucleotide
  Antisense strand to SEQ ID NO: 2126064
aaucagggcauugagcucc

SEQ ID NO: 2126066 - RNA, 19 nt, Artificial Sequence
  Description of Artificial Sequence: Synthetic oligonucleotide
  Sense strand starting at position 2152 of SEQ ID NO: 1882501
gauugucauagauguggag

SEQ ID NO: 2126067 - RNA, 19 nt, Artificial Sequence
  Description of Artificial Sequence: Synthetic oligonucleotide
  Antisense strand to SEQ ID NO: 2126066
cuccacaucuaugacaauc

SEQ ID NO: 2126068 - RNA, 19 nt, Artificial Sequence
  Description of Artificial Sequence: Synthetic oligonucleotide
  Sense strand starting at position 2191 of SEQ ID NO: 1882501
caagcagugccucagaaug

SEQ ID NO: 2126069 - RNA, 19 nt, Artificial Sequence
  Description of Artificial Sequence: Synthetic oligonucleotide
  Antisense strand to SEQ ID NO: 2126068
cauucugaggcacugcuug

SEQ ID NO: 2126070 - RNA, 19 nt, Artificial Sequence
  Description of Artificial Sequence: Synthetic oligonucleotide
  Sense strand starting at position 2197 of SEQ ID NO: 1882501
gugccucagaauggagaaa

SEQ ID NO: 2126071 - RNA, 19 nt, Artificial Sequence
  Description of Artificial Sequence: Synthetic oligonucleotide
  Antisense strand to SEQ ID NO: 2126070
uuucuccauucugaggcac

SEQ ID NO: 2126072 - RNA, 19 nt, Artificial Sequence
  Description of Artificial Sequence: Synthetic oligonucleotide
  Sense strand starting at position 2251 of SEQ ID NO: 1882501
gaggucacaggcuaucauu

SEQ ID NO: 2126073 - RNA, 19 nt, Artificial Sequence
  Description of Artificial Sequence: Synthetic oligonucleotide
  Antisense strand to SEQ ID NO: 2126072
aaugauagccugugaccuc

SEQ ID NO: 2126074 - RNA, 19 nt, Artificial Sequence
  Description of Artificial Sequence: Synthetic oligonucleotide
  Sense strand starting at position 2618 of SEQ ID NO: 1882501
ggcugaagugguuaaggaa

SEQ ID NO: 2126075 - RNA, 19 nt, Artificial Sequence
  Description of Artificial Sequence: Synthetic oligonucleotide
  Antisense strand to SEQ ID NO: 2126074
uuccuuaaccacuucagcc

SEQ ID NO: 2126076 - RNA, 19 nt, Artificial Sequence
  Description of Artificial Sequence: Synthetic oligonucleotide
  Sense strand starting at position 2676 of SEQ ID NO: 1882501
cuuccaguucgagaguagu

SEQ ID NO: 2126077 - RNA, 19 nt, Artificial Sequence
  Description of Artificial Sequence: Synthetic oligonucleotide
  Antisense strand to SEQ ID NO: 2126076
acuacucucgaacuggaag

SEQ ID NO: 2126078 - RNA, 19 nt, Artificial Sequence
  Description of Artificial Sequence: Synthetic oligonucleotide
  Sense strand starting at position 2679 of SEQ ID NO: 1882501
ccaguucgagaguaguuua

SEQ ID NO: 2126079 - RNA, 19 nt, Artificial Sequence
  Description of Artificial Sequence: Synthetic oligonucleotide
  Antisense strand to SEQ ID NO: 2126078
uaaacuacucucgaacugg

SEQ ID NO: 2126080 - RNA, 19 nt, Artificial Sequence
  Description of Artificial Sequence: Synthetic oligonucleotide
  Sense strand starting at position 2686 of SEQ ID NO: 1882501
gagaguaguuuagucugua

SEQ ID NO: 2126081 - RNA, 19 nt, Artificial Sequence
  Description of Artificial Sequence: Synthetic oligonucleotide
  Antisense strand to SEQ ID NO: 2126080
uacagacuaaacuacucuc

SEQ ID NO: 2126082 - RNA, 19 nt, Artificial Sequence
  Description of Artificial Sequence: Synthetic oligonucleotide
  Sense strand starting at position 2687 of SEQ ID NO: 1882501
agaguaguuuagucuguag

SEQ ID NO: 2126083 - RNA, 19 nt, Artificial Sequence
  Description of Artificial Sequence: Synthetic oligonucleotide
  Antisense strand to SEQ ID NO: 2126082
cuacagacuaaacuacucu

SEQ ID NO: 2126084 - RNA, 19 nt, Artificial Sequence
  Description of Artificial Sequence: Synthetic oligonucleotide
  Sense strand starting at position 2729 of SEQ ID NO: 1882501
gucaaagugcugggaaaga

SEQ ID NO: 2126085 - RNA, 19 nt, Artificial Sequence
  Description of Artificial Sequence: Synthetic oligonucleotide
  Antisense strand to SEQ ID NO: 2126084
ucuuucccagcacuuugac

SEQ ID NO: 2126086 - RNA, 19 nt, Artificial Sequence
  Description of Artificial Sequence: Synthetic oligonucleotide
  Sense strand starting at position 3162 of SEQ ID NO: 1882501
uuggcuuuagaauguggua

SEQ ID NO: 2126087 - RNA, 19 nt, Artificial Sequence
  Description of Artificial Sequence: Synthetic oligonucleotide
  Antisense strand to SEQ ID NO: 2126086
uaccacauucuaaagccaa

SEQ ID NO: 2126088 - RNA, 19 nt, Artificial Sequence
  Description of Artificial Sequence: Synthetic oligonucleotide
  Sense strand starting at position 3171 of SEQ ID NO: 1882501
gaaugugguagcuguaaca

SEQ ID NO: 2126089 - RNA, 19 nt, Artificial Sequence
  Description of Artificial Sequence: Synthetic oligonucleotide
  Antisense strand to SEQ ID NO: 2126088
uguuacagcuaccacauuc

SEQ ID NO: 2126090 - RNA, 19 nt, Artificial Sequence
  Description of Artificial Sequence: Synthetic oligonucleotide
  Sense strand starting at position 3333 of SEQ ID NO: 1882501
auuugucaaugcgacagaa

SEQ ID NO: 2126091 - RNA, 19 nt, Artificial Sequence
  Description of Artificial Sequence: Synthetic oligonucleotide
  Antisense strand to SEQ ID NO: 2126090
uucugucgcauugacaaau

SEQ ID NO: 2126092 - RNA, 19 nt, Artificial Sequence
  Description of Artificial Sequence: Synthetic oligonucleotide
  Sense strand starting at position 3335 of SEQ ID NO: 1882501
uugucaaugcgacagaacu

SEQ ID NO: 2126093 - RNA, 19 nt, Artificial Sequence
  Description of Artificial Sequence: Synthetic oligonucleotide
  Antisense strand to SEQ ID NO: 2126092
aguucugucgcauugacaa

SEQ ID NO: 2126094 - RNA, 19 nt, Artificial Sequence
  Description of Artificial Sequence: Synthetic oligonucleotide
  Sense strand starting at position 3557 of SEQ ID NO: 1882501
ggguuucuucgggaccuga

SEQ ID NO: 2126095 - RNA, 19 nt, Artificial Sequence
  Description of Artificial Sequence: Synthetic oligonucleotide
  Antisense strand to SEQ ID NO: 2126094
ucaggucccgaagaaaccc

SEQ ID NO: 2126096 - RNA, 19 nt, Artificial Sequence
  Description of Artificial Sequence: Synthetic oligonucleotide
  Sense strand starting at position 3570 of SEQ ID NO: 1882501
accugaggcuucuuagaga

SEQ ID NO: 2126097 - RNA, 19 nt, Artificial Sequence
  Description of Artificial Sequence: Synthetic oligonucleotide
  Antisense strand to SEQ ID NO: 2126096
ucucuaagaagccucaggu

SEQ ID NO: 2126098 - RNA, 19 nt, Artificial Sequence
  Description of Artificial Sequence: Synthetic oligonucleotide
  Sense strand starting at position 3575 of SEQ ID NO: 1882501
aggcuucuuagagauccga

SEQ ID NO: 2126099 - RNA, 19 nt, Artificial Sequence
  Description of Artificial Sequence: Synthetic oligonucleotide
  Antisense strand to SEQ ID NO: 2126098
ucggaucucuaagaagccu

SEQ ID NO: 2126100 - RNA, 19 nt, Artificial Sequence
  Description of Artificial Sequence: Synthetic oligonucleotide
  Sense strand starting at position 3579 of SEQ ID NO: 1882501
uucuuagagauccgagacu

SEQ ID NO: 2126101 - RNA, 19 nt, Artificial Sequence
  Description of Artificial Sequence: Synthetic oligonucleotide
  Antisense strand to SEQ ID NO: 2126100
agucucggaucucuaagaa

SEQ ID NO: 2126102 - RNA, 19 nt, Artificial Sequence
  Description of Artificial Sequence: Synthetic oligonucleotide
  Sense strand starting at position 3588 of SEQ ID NO: 1882501
auccgagacuucuuuaaga

SEQ ID NO: 2126103 - RNA, 19 nt, Artificial Sequence
  Description of Artificial Sequence: Synthetic oligonucleotide
  Antisense strand to SEQ ID NO: 2126102
ucuuaaagaagucucggau

SEQ ID NO: 2126104 - RNA, 19 nt, Artificial Sequence
  Description of Artificial Sequence: Synthetic oligonucleotide
  Sense strand starting at position 3631 of SEQ ID NO: 1882501
gacggagcucccgauucuu

SEQ ID NO: 2126105 - RNA, 19 nt, Artificial Sequence
  Description of Artificial Sequence: Synthetic oligonucleotide
  Antisense strand to SEQ ID NO: 2126104
aagaaucgggagcuccguc

SEQ ID NO: 2126106 - RNA, 19 nt, Artificial Sequence
  Description of Artificial Sequence: Synthetic oligonucleotide
  Sense strand starting at position 3811 of SEQ ID NO: 1882501
accuuucucuuggucugaa

SEQ ID NO: 2126107 - RNA, 19 nt, Artificial Sequence
  Description of Artificial Sequence: Synthetic oligonucleotide
  Antisense strand to SEQ ID NO: 2126106
uucagaccaagagaaaggu

SEQ ID NO: 2126108 - RNA, 19 nt, Artificial Sequence
  Description of Artificial Sequence: Synthetic oligonucleotide
  Sense strand starting at position 271 of SEQ ID NO: 1882502
ggaggugaauggcucugaa

SEQ ID NO: 2126109 - RNA, 19 nt, Artificial Sequence
  Description of Artificial Sequence: Synthetic oligonucleotide
  Antisense strand to SEQ ID NO: 2126108
uucagagccauucaccucc

SEQ ID NO: 2126110 - RNA, 19 nt, Artificial Sequence
  Description of Artificial Sequence: Synthetic oligonucleotide
  Sense strand starting at position 587 of SEQ ID NO: 1882502
ucucaaauuccaggaauug

SEQ ID NO: 2126111 - RNA, 19 nt, Artificial Sequence
  Description of Artificial Sequence: Synthetic oligonucleotide
  Antisense strand to SEQ ID NO: 2126110
caauuccuggaauuugaga

SEQ ID NO: 2126112 - RNA, 19 nt, Artificial Sequence
  Description of Artificial Sequence: Synthetic oligonucleotide
  Sense strand starting at position 702 of SEQ ID NO: 1882502
agcucagugcacguaaagu

SEQ ID NO: 2126113 - RNA, 19 nt, Artificial Sequence
  Description of Artificial Sequence: Synthetic oligonucleotide
  Antisense strand to SEQ ID NO: 2126112
acuuuacgugcacugagcu

SEQ ID NO: 2126114 - RNA, 19 nt, Artificial Sequence
  Description of Artificial Sequence: Synthetic oligonucleotide
  Sense strand starting at position 1000 of SEQ ID NO: 1882502
ugaacaaauucugguuagu

SEQ ID NO: 2126115 - RNA, 19 nt, Artificial Sequence
  Description of Artificial Sequence: Synthetic oligonucleotide
  Antisense strand to SEQ ID NO: 2126114
acuaaccagaauuuguuca

SEQ ID NO: 2126116 - RNA, 19 nt, Artificial Sequence
  Description of Artificial Sequence: Synthetic oligonucleotide
  Sense strand starting at position 1003 of SEQ ID NO: 1882502
acaaauucugguuagucau

SEQ ID NO: 2126117 - RNA, 19 nt, Artificial Sequence
  Description of Artificial Sequence: Synthetic oligonucleotide
  Antisense strand to SEQ ID NO: 2126116
augacuaaccagaauuugu

SEQ ID NO: 2126118 - RNA, 19 nt, Artificial Sequence
  Description of Artificial Sequence: Synthetic oligonucleotide
  Sense strand starting at position 1009 of SEQ ID NO: 1882502
ucugguuagucaugguaag

SEQ ID NO: 2126119 - RNA, 19 nt, Artificial Sequence
  Description of Artificial Sequence: Synthetic oligonucleotide
  Antisense strand to SEQ ID NO: 2126118
cuuaccaugacuaaccaga

SEQ ID NO: 2126120 - RNA, 19 nt, Artificial Sequence
  Description of Artificial Sequence: Synthetic oligonucleotide
  Sense strand starting at position 1057 of SEQ ID NO: 1882502
cgcgaaacaucccaaucaa

SEQ ID NO: 2126121 - RNA, 19 nt, Artificial Sequence
  Description of Artificial Sequence: Synthetic oligonucleotide
  Antisense strand to SEQ ID NO: 2126120
uugauugggauguuucgcg

SEQ ID NO: 2126122 - RNA, 19 nt, Artificial Sequence
  Description of Artificial Sequence: Synthetic oligonucleotide
  Sense strand starting at position 1203 of SEQ ID NO: 1882502
gucgcugccuggaguagaa

SEQ ID NO: 2126123 - RNA, 19 nt, Artificial Sequence
  Description of Artificial Sequence: Synthetic oligonucleotide
  Antisense strand to SEQ ID NO: 2126122
uucuacuccaggcagcgac

SEQ ID NO: 2126124 - RNA, 19 nt, Artificial Sequence
  Description of Artificial Sequence: Synthetic oligonucleotide
  Sense strand starting at position 1326 of SEQ ID NO: 1882502
gagaguagcucccuccuuu

SEQ ID NO: 2126125 - RNA, 19 nt, Artificial Sequence
  Description of Artificial Sequence: Synthetic oligonucleotide
  Antisense strand to SEQ ID NO: 2126124
aaaggagggagcuacucuc

SEQ ID NO: 2126126 - RNA, 19 nt, Artificial Sequence
  Description of Artificial Sequence: Synthetic oligonucleotide
  Sense strand starting at position 1407 of SEQ ID NO: 1882502
agaggaaccuccuagucuu

SEQ ID NO: 2126127 - RNA, 19 nt, Artificial Sequence
  Description of Artificial Sequence: Synthetic oligonucleotide
  Antisense strand to SEQ ID NO: 2126126
aagacuaggagguuccucu

SEQ ID NO: 2126128 - RNA, 19 nt, Artificial Sequence
  Description of Artificial Sequence: Synthetic oligonucleotide
  Sense strand starting at position 1688 of SEQ ID NO: 1882502
gcaugcugcuucccaguaa

SEQ ID NO: 2126129 - RNA, 19 nt, Artificial Sequence
  Description of Artificial Sequence: Synthetic oligonucleotide
  Antisense strand to SEQ ID NO: 2126128
uuacugggaagcagcaugc

SEQ ID NO: 2126130 - RNA, 19 nt, Artificial Sequence
  Description of Artificial Sequence: Synthetic oligonucleotide
  Sense strand starting at position 1692 of SEQ ID NO: 1882502
gcugcuucccaguaaugag

SEQ ID NO: 2126131 - RNA, 19 nt, Artificial Sequence
  Description of Artificial Sequence: Synthetic oligonucleotide
  Antisense strand to SEQ ID NO: 2126130
cucauuacugggaagcagc

SEQ ID NO: 2126132 - RNA, 19 nt, Artificial Sequence
  Description of Artificial Sequence: Synthetic oligonucleotide
  Sense strand starting at position 1897 of SEQ ID NO: 1882502
ggaagacggcucugggaaa

SEQ ID NO: 2126133 - RNA, 19 nt, Artificial Sequence
  Description of Artificial Sequence: Synthetic oligonucleotide
  Antisense strand to SEQ ID NO: 2126132
uuucccagagccgucuucc

SEQ ID NO: 2126134 - RNA, 19 nt, Artificial Sequence
  Description of Artificial Sequence: Synthetic oligonucleotide
  Sense strand starting at position 1952 of SEQ ID NO: 1882502
gcuccugcuuucccugaga

SEQ ID NO: 2126135 - RNA, 19 nt, Artificial Sequence
  Description of Artificial Sequence: Synthetic oligonucleotide
  Antisense strand to SEQ ID NO: 2126134
ucucagggaaagcaggagc

SEQ ID NO: 2126136 - RNA, 19 nt, Artificial Sequence
  Description of Artificial Sequence: Synthetic oligonucleotide
  Sense strand starting at position 1954 of SEQ ID NO: 1882502
uccugcuuucccugagaag

SEQ ID NO: 2126137 - RNA, 19 nt, Artificial Sequence
  Description of Artificial Sequence: Synthetic oligonucleotide
  Antisense strand to SEQ ID NO: 2126136
cuucucagggaaagcagga

SEQ ID NO: 2126138 - RNA, 19 nt, Artificial Sequence
  Description of Artificial Sequence: Synthetic oligonucleotide
  Sense strand starting at position 1955 of SEQ ID NO: 1882502
ccugcuuucccugagaaga

SEQ ID NO: 2126139 - RNA, 19 nt, Artificial Sequence
  Description of Artificial Sequence: Synthetic oligonucleotide
  Antisense strand to SEQ ID NO: 2126138
ucuucucagggaaagcagg

SEQ ID NO: 2126140 - RNA, 19 nt, Artificial Sequence
  Description of Artificial Sequence: Synthetic oligonucleotide
  Sense strand starting at position 1957 of SEQ ID NO: 1882502
ugcuuucccugagaagaga

SEQ ID NO: 2126141 - RNA, 19 nt, Artificial Sequence
  Description of Artificial Sequence: Synthetic oligonucleotide
  Antisense strand to SEQ ID NO: 2126140
ucucuucucagggaaagca

SEQ ID NO: 2126142 - RNA, 19 nt, Artificial Sequence
  Description of Artificial Sequence: Synthetic oligonucleotide
  Sense strand starting at position 2060 of SEQ ID NO: 1882502
ugcucuucuccagaaggca

SEQ ID NO: 2126143 - RNA, 19 nt, Artificial Sequence
  Description of Artificial Sequence: Synthetic oligonucleotide
  Antisense strand to SEQ ID NO: 2126142
ugccuucuggagaagagca

SEQ ID NO: 2126144 - RNA, 19 nt, Artificial Sequence
  Description of Artificial Sequence: Synthetic oligonucleotide
  Sense strand starting at position 2147 of SEQ ID NO: 1882502
ugaguuugguccucgccau

SEQ ID NO: 2126145 - RNA, 19 nt, Artificial Sequence
  Description of Artificial Sequence: Synthetic oligonucleotide
  Antisense strand to SEQ ID NO: 2126144
auggcgaggaccaaacuca

SEQ ID NO: 2126146 - RNA, 19 nt, Artificial Sequence
  Description of Artificial Sequence: Synthetic oligonucleotide
  Sense strand starting at position 2226 of SEQ ID NO: 1882502
uggccucauggucagagau

SEQ ID NO: 2126147 - RNA, 19 nt, Artificial Sequence
  Description of Artificial Sequence: Synthetic oligonucleotide
  Antisense strand to SEQ ID NO: 2126146
aucucugaccaugaggcca

SEQ ID NO: 2126148 - RNA, 19 nt, Artificial Sequence
  Description of Artificial Sequence: Synthetic oligonucleotide
  Sense strand starting at position 2341 of SEQ ID NO: 1882502
augugaccagccugagaau

SEQ ID NO: 2126149 - RNA, 19 nt, Artificial Sequence
  Description of Artificial Sequence: Synthetic oligonucleotide
  Antisense strand to SEQ ID NO: 2126148
auucucaggcuggucacau

SEQ ID NO: 2126150 - RNA, 19 nt, Artificial Sequence
  Description of Artificial Sequence: Synthetic oligonucleotide
  Sense strand starting at position 2472 of SEQ ID NO: 1882502
agggacuucugcuccugau

SEQ ID NO: 2126151 - RNA, 19 nt, Artificial Sequence
  Description of Artificial Sequence: Synthetic oligonucleotide
  Antisense strand to SEQ ID NO: 2126150
aucaggagcagaagucccu

SEQ ID NO: 2126152 - RNA, 19 nt, Artificial Sequence
  Description of Artificial Sequence: Synthetic oligonucleotide
  Sense strand starting at position 2484 of SEQ ID NO: 1882502
uccugaucugaguggaggu

SEQ ID NO: 2126153 - RNA, 19 nt, Artificial Sequence
  Description of Artificial Sequence: Synthetic oligonucleotide
  Antisense strand to SEQ ID NO: 2126152
accuccacucagaucagga

SEQ ID NO: 2126154 - RNA, 19 nt, Artificial Sequence
  Description of Artificial Sequence: Synthetic oligonucleotide
  Sense strand starting at position 2485 of SEQ ID NO: 1882502
ccugaucugaguggaggua

SEQ ID NO: 2126155 - RNA, 19 nt, Artificial Sequence
  Description of Artificial Sequence: Synthetic oligonucleotide
  Antisense strand to SEQ ID NO: 2126154
uaccuccacucagaucagg

SEQ ID NO: 2126156 - RNA, 19 nt, Artificial Sequence
  Description of Artificial Sequence: Synthetic oligonucleotide
  Sense strand starting at position 2500 of SEQ ID NO: 1882502
gguaaagugacucagaagu

SEQ ID NO: 2126157 - RNA, 19 nt, Artificial Sequence
  Description of Artificial Sequence: Synthetic oligonucleotide
  Antisense strand to SEQ ID NO: 2126156
acuucugagucacuuuacc

SEQ ID NO: 2126158 - RNA, 19 nt, Artificial Sequence
  Description of Artificial Sequence: Synthetic oligonucleotide
  Sense strand starting at position 2510 of SEQ ID NO: 1882502
cucagaagugcuggaauca

SEQ ID NO: 2126159 - RNA, 19 nt, Artificial Sequence
  Description of Artificial Sequence: Synthetic oligonucleotide
  Antisense strand to SEQ ID NO: 2126158
ugauuccagcacuucugag

SEQ ID NO: 2126160 - RNA, 19 nt, Artificial Sequence
  Description of Artificial Sequence: Synthetic oligonucleotide
  Sense strand starting at position 2622 of SEQ ID NO: 1882502
ugaucaguauucuagggac

SEQ ID NO: 2126161 - RNA, 19 nt, Artificial Sequence
  Description of Artificial Sequence: Synthetic oligonucleotide
  Antisense strand to SEQ ID NO: 2126160
gucccuagaauacugauca

SEQ ID NO: 2126162 - RNA, 19 nt, Artificial Sequence
  Description of Artificial Sequence: Synthetic oligonucleotide
  Sense strand starting at position 2625 of SEQ ID NO: 1882502
ucaguauucuagggacugu

SEQ ID NO: 2126163 - RNA, 19 nt, Artificial Sequence
  Description of Artificial Sequence: Synthetic oligonucleotide
  Antisense strand to SEQ ID NO: 2126162
acagucccuagaauacuga

SEQ ID NO: 2126164 - RNA, 19 nt, Artificial Sequence
  Description of Artificial Sequence: Synthetic oligonucleotide
  Sense strand starting at position 2651 of SEQ ID NO: 1882502
uccauuuccucagagacgu

SEQ ID NO: 2126165 - RNA, 19 nt, Artificial Sequence
  Description of Artificial Sequence: Synthetic oligonucleotide
  Antisense strand to SEQ ID NO: 2126164
acgucucugaggaaaugga

SEQ ID NO: 2126166 - RNA, 19 nt, Artificial Sequence
  Description of Artificial Sequence: Synthetic oligonucleotide
  Sense strand starting at position 2664 of SEQ ID NO: 1882502
agacgucauuccuuaauug

SEQ ID NO: 2126167 - RNA, 19 nt, Artificial Sequence
  Description of Artificial Sequence: Synthetic oligonucleotide
  Antisense strand to SEQ ID NO: 2126166
caauuaaggaaugacgucu

SEQ ID NO: 2126168 - RNA, 19 nt, Artificial Sequence
  Description of Artificial Sequence: Synthetic oligonucleotide
  Sense strand starting at position 2665 of SEQ ID NO: 1882502
gacgucauuccuuaauugu

SEQ ID NO: 2126169 - RNA, 19 nt, Artificial Sequence
  Description of Artificial Sequence: Synthetic oligonucleotide
  Antisense strand to SEQ ID NO: 2126168
acaauuaaggaaugacguc

SEQ ID NO: 2126170 - RNA, 19 nt, Artificial Sequence
  Description of Artificial Sequence: Synthetic oligonucleotide
  Sense strand starting at position 2668 of SEQ ID NO: 1882502
gucauuccuuaauugucua

SEQ ID NO: 2126171 - RNA, 19 nt, Artificial Sequence
  Description of Artificial Sequence: Synthetic oligonucleotide
  Antisense strand to SEQ ID NO: 2126170
uagacaauuaaggaaugac

SEQ ID NO: 2126172 - RNA, 19 nt, Artificial Sequence
  Description of Artificial Sequence: Synthetic oligonucleotide
  Sense strand starting at position 2672 of SEQ ID NO: 1882502
uuccuuaauugucuagaga

SEQ ID NO: 2126173 - RNA, 19 nt, Artificial Sequence
  Description of Artificial Sequence: Synthetic oligonucleotide
  Antisense strand to SEQ ID NO: 2126172
ucucuagacaauuaaggaa

SEQ ID NO: 2126174 - RNA, 19 nt, Artificial Sequence
  Description of Artificial Sequence: Synthetic oligonucleotide
  Sense strand starting at position 3429 of SEQ ID NO: 1882502
gugccugggccuuguagau

SEQ ID NO: 2126175 - RNA, 19 nt, Artificial Sequence
  Description of Artificial Sequence: Synthetic oligonucleotide
  Antisense strand to SEQ ID NO: 2126174
aucuacaaggcccaggcac

SEQ ID NO: 2126176 - RNA, 19 nt, Artificial Sequence
  Description of Artificial Sequence: Synthetic oligonucleotide
  Sense strand starting at position 3438 of SEQ ID NO: 1882502
ccuuguagaucuguguguu

SEQ ID NO: 2126177 - RNA, 19 nt, Artificial Sequence
  Description of Artificial Sequence: Synthetic oligonucleotide
  Antisense strand to SEQ ID NO: 2126176
aacacacagaucuacaagg

SEQ ID NO: 2126178 - RNA, 19 nt, Artificial Sequence
  Description of Artificial Sequence: Synthetic oligonucleotide
  Sense strand starting at position 3439 of SEQ ID NO: 1882502
cuuguagaucuguguguuc

SEQ ID NO: 2126179 - RNA, 19 nt, Artificial Sequence
  Description of Artificial Sequence: Synthetic oligonucleotide
  Antisense strand to SEQ ID NO: 2126178
gaacacacagaucuacaag

SEQ ID NO: 2126180 - RNA, 19 nt, Artificial Sequence
  Description of Artificial Sequence: Synthetic oligonucleotide
  Sense strand starting at position 3448 of SEQ ID NO: 1882502
cuguguguuccggucccaa

SEQ ID NO: 2126181 - RNA, 19 nt, Artificial Sequence
  Description of Artificial Sequence: Synthetic oligonucleotide
  Antisense strand to SEQ ID NO: 2126180
uugggaccggaacacacag

SEQ ID NO: 2126182 - RNA, 19 nt, Artificial Sequence
  Description of Artificial Sequence: Synthetic oligonucleotide
  Sense strand starting at position 3618 of SEQ ID NO: 1882502
agaaauaccucauggagug

SEQ ID NO: 2126183 - RNA, 19 nt, Artificial Sequence
  Description of Artificial Sequence: Synthetic oligonucleotide
  Antisense strand to SEQ ID NO: 2126182
cacuccaugagguauuucu

SEQ ID NO: 2126184 - RNA, 19 nt, Artificial Sequence
  Description of Artificial Sequence: Synthetic oligonucleotide
  Sense strand starting at position 3912 of SEQ ID NO: 1882502
cugauuggcuucucuagau

SEQ ID NO: 2126185 - RNA, 19 nt, Artificial Sequence
  Description of Artificial Sequence: Synthetic oligonucleotide
  Antisense strand to SEQ ID NO: 2126184
aucuagagaagccaaucag

SEQ ID NO: 2126186 - RNA, 19 nt, Artificial Sequence
  Description of Artificial Sequence: Synthetic oligonucleotide
  Sense strand starting at position 3967 of SEQ ID NO: 1882502
ucacgaguauccuggaaga

SEQ ID NO: 2126187 - RNA, 19 nt, Artificial Sequence
  Description of Artificial Sequence: Synthetic oligonucleotide
  Antisense strand to SEQ ID NO: 2126186
ucuuccaggauacucguga

SEQ ID NO: 2126188 - RNA, 19 nt, Artificial Sequence
  Description of Artificial Sequence: Synthetic oligonucleotide
  Sense strand starting at position 179 of SEQ ID NO: 1882503
gcagaaauuccuggaggcu

SEQ ID NO: 2126189 - RNA, 19 nt, Artificial Sequence
  Description of Artificial Sequence: Synthetic oligonucleotide
  Antisense strand to SEQ ID NO: 2126188
agccuccaggaauuucugc

SEQ ID NO: 2126190 - RNA, 19 nt, Artificial Sequence
  Description of Artificial Sequence: Synthetic oligonucleotide
  Sense strand starting at position 209 of SEQ ID NO: 1882503
cgauuacaucugugggcga

SEQ ID NO: 2126191 - RNA, 19 nt, Artificial Sequence
  Description of Artificial Sequence: Synthetic oligonucleotide
  Antisense strand to SEQ ID NO: 2126190
ucgcccacagauguaaucg

SEQ ID NO: 2126192 - RNA, 19 nt, Artificial Sequence
  Description of Artificial Sequence: Synthetic oligonucleotide
  Sense strand starting at position 211 of SEQ ID NO: 1882503
auuacaucugugggcgauu

SEQ ID NO: 2126193 - RNA, 19 nt, Artificial Sequence
  Description of Artificial Sequence: Synthetic oligonucleotide
  Antisense strand to SEQ ID NO: 2126192
aaucgcccacagauguaau

SEQ ID NO: 2126194 - RNA, 19 nt, Artificial Sequence
  Description of Artificial Sequence: Synthetic oligonucleotide
  Sense strand starting at position 212 of SEQ ID NO: 1882503
uuacaucugugggcgauua

SEQ ID NO: 2126195 - RNA, 19 nt, Artificial Sequence
  Description of Artificial Sequence: Synthetic oligonucleotide
  Antisense strand to SEQ ID NO: 2126194
uaaucgcccacagauguaa

SEQ ID NO: 2126196 - RNA, 19 nt, Artificial Sequence
  Description of Artificial Sequence: Synthetic oligonucleotide
  Sense strand starting at position 257 of SEQ ID NO: 1882503
uugcuuuaagcugaaguuu

SEQ ID NO: 2126197 - RNA, 19 nt, Artificial Sequence
  Description of Artificial Sequence: Synthetic oligonucleotide
  Antisense strand to SEQ ID NO: 2126196
aaacuucagcuuaaagcaa

SEQ ID NO: 2126198 - RNA, 19 nt, Artificial Sequence
  Description of Artificial Sequence: Synthetic oligonucleotide
  Sense strand starting at position 282 of SEQ ID NO: 1882503
uccuucugauugcaaagau

SEQ ID NO: 2126199 - RNA, 19 nt, Artificial Sequence
  Description of Artificial Sequence: Synthetic oligonucleotide
  Antisense strand to SEQ ID NO: 2126198
aucuuugcaaucagaagga

SEQ ID NO: 2126200 - RNA, 19 nt, Artificial Sequence
  Description of Artificial Sequence: Synthetic oligonucleotide
  Sense strand starting at position 366 of SEQ ID NO: 1882503
cuggaccugucuugagaac

SEQ ID NO: 2126201 - RNA, 19 nt, Artificial Sequence
  Description of Artificial Sequence: Synthetic oligonucleotide
  Antisense strand to SEQ ID NO: 2126200
guucucaagacagguccag

SEQ ID NO: 2126202 - RNA, 19 nt, Artificial Sequence
  Description of Artificial Sequence: Synthetic oligonucleotide
  Sense strand starting at position 395 of SEQ ID NO: 1882503
ugcucauccucauuagguu

SEQ ID NO: 2126203 - RNA, 19 nt, Artificial Sequence
  Description of Artificial Sequence: Synthetic oligonucleotide
  Antisense strand to SEQ ID NO: 2126202
aaccuaaugaggaugagca

SEQ ID NO: 2126204 - RNA, 19 nt, Artificial Sequence
  Description of Artificial Sequence: Synthetic oligonucleotide
  Sense strand starting at position 428 of SEQ ID NO: 1882503
ccaagaaagugcuguuaac

SEQ ID NO: 2126205 - RNA, 19 nt, Artificial Sequence
  Description of Artificial Sequence: Synthetic oligonucleotide
  Antisense strand to SEQ ID NO: 2126204
guuaacagcacuuucuugg

SEQ ID NO: 2126206 - RNA, 19 nt, Artificial Sequence
  Description of Artificial Sequence: Synthetic oligonucleotide
  Sense strand starting at position 993 of SEQ ID NO: 1882503
cccagaucacgccacuuau

SEQ ID NO: 2126207 - RNA, 19 nt, Artificial Sequence
  Description of Artificial Sequence: Synthetic oligonucleotide
  Antisense strand to SEQ ID NO: 2126206
auaaguggcgugaucuggg

SEQ ID NO: 2126208 - RNA, 19 nt, Artificial Sequence
  Description of Artificial Sequence: Synthetic oligonucleotide
  Sense strand starting at position 1119 of SEQ ID NO: 1882503
agcaguacugggugcuaga

SEQ ID NO: 2126209 - RNA, 19 nt, Artificial Sequence
  Description of Artificial Sequence: Synthetic oligonucleotide
  Antisense strand to SEQ ID NO: 2126208
ucuagcacccaguacugcu

SEQ ID NO: 2126210 - RNA, 19 nt, Artificial Sequence
  Description of Artificial Sequence: Synthetic oligonucleotide
  Sense strand starting at position 1461 of SEQ ID NO: 1882503
uggucuucuuaacacagaa

SEQ ID NO: 2126211 - RNA, 19 nt, Artificial Sequence
  Description of Artificial Sequence: Synthetic oligonucleotide
  Antisense strand to SEQ ID NO: 2126210
uucuguguuaagaagacca

SEQ ID NO: 2126212 - RNA, 19 nt, Artificial Sequence
  Description of Artificial Sequence: Synthetic oligonucleotide
  Sense strand starting at position 1511 of SEQ ID NO: 1882503
auggaccaauccugucaaa

SEQ ID NO: 2126213 - RNA, 19 nt, Artificial Sequence
  Description of Artificial Sequence: Synthetic oligonucleotide
  Antisense strand to SEQ ID NO: 2126212
uuugacaggauugguccau

SEQ ID NO: 2126214 - RNA, 19 nt, Artificial Sequence
  Description of Artificial Sequence: Synthetic oligonucleotide
  Sense strand starting at position 1673 of SEQ ID NO: 1882503
ccucacuugucagcugaca

SEQ ID NO: 2126215 - RNA, 19 nt, Artificial Sequence
  Description of Artificial Sequence: Synthetic oligonucleotide
  Antisense strand to SEQ ID NO: 2126214
ugucagcugacaagugagg

SEQ ID NO: 2126216 - RNA, 19 nt, Artificial Sequence
  Description of Artificial Sequence: Synthetic oligonucleotide
  Sense strand starting at position 1726 of SEQ ID NO: 1882503
gggaacugguaauagaauu

SEQ ID NO: 2126217 - RNA, 19 nt, Artificial Sequence
  Description of Artificial Sequence: Synthetic oligonucleotide
  Antisense strand to SEQ ID NO: 2126216
aauucuauuaccaguuccc

SEQ ID NO: 2126218 - RNA, 19 nt, Artificial Sequence
  Description of Artificial Sequence: Synthetic oligonucleotide
  Sense strand starting at position 2070 of SEQ ID NO: 1882503
ggugcucuuacuggcauau

SEQ ID NO: 2126219 - RNA, 19 nt, Artificial Sequence
  Description of Artificial Sequence: Synthetic oligonucleotide
  Antisense strand to SEQ ID NO: 2126218
auaugccaguaagagcacc

SEQ ID NO: 2126220 - RNA, 19 nt, Artificial Sequence
  Description of Artificial Sequence: Synthetic oligonucleotide
  Sense strand starting at position 2072 of SEQ ID NO: 1882503
ugcucuuacuggcauauuu

SEQ ID NO: 2126221 - RNA, 19 nt, Artificial Sequence
  Description of Artificial Sequence: Synthetic oligonucleotide
  Antisense strand to SEQ ID NO: 2126220
aaauaugccaguaagagca

SEQ ID NO: 2126222 - RNA, 19 nt, Artificial Sequence
  Description of Artificial Sequence: Synthetic oligonucleotide
  Sense strand starting at position 2080 of SEQ ID NO: 1882503
cuggcauauuuagagacuu

SEQ ID NO: 2126223 - RNA, 19 nt, Artificial Sequence
  Description of Artificial Sequence: Synthetic oligonucleotide
  Antisense strand to SEQ ID NO: 2126222
aagucucuaaauaugccag

SEQ ID NO: 2126224 - RNA, 19 nt, Artificial Sequence
  Description of Artificial Sequence: Synthetic oligonucleotide
  Sense strand starting at position 2088 of SEQ ID NO: 1882503
uuuagagacuuggauaaga

SEQ ID NO: 2126225 - RNA, 19 nt, Artificial Sequence
  Description of Artificial Sequence: Synthetic oligonucleotide
  Antisense strand to SEQ ID NO: 2126224
ucuuauccaagucucuaaa

SEQ ID NO: 2126226 - RNA, 19 nt, Artificial Sequence
  Description of Artificial Sequence: Synthetic oligonucleotide
  Sense strand starting at position 2317 of SEQ ID NO: 1882503
aucauacuucuuggcugau

SEQ ID NO: 2126227 - RNA, 19 nt, Artificial Sequence
  Description of Artificial Sequence: Synthetic oligonucleotide
  Antisense strand to SEQ ID NO: 2126226
aucagccaagaaguaugau

SEQ ID NO: 2126228 - RNA, 19 nt, Artificial Sequence
  Description of Artificial Sequence: Synthetic oligonucleotide
  Sense strand starting at position 2318 of SEQ ID NO: 1882503
ucauacuucuuggcugaua

SEQ ID NO: 2126229 - RNA, 19 nt, Artificial Sequence
  Description of Artificial Sequence: Synthetic oligonucleotide
  Antisense strand to SEQ ID NO: 2126228
uaucagccaagaaguauga

SEQ ID NO: 2126230 - RNA, 19 nt, Artificial Sequence
  Description of Artificial Sequence: Synthetic oligonucleotide
  Sense strand starting at position 2320 of SEQ ID NO: 1882503
auacuucuuggcugauaga

SEQ ID NO: 2126231 - RNA, 19 nt, Artificial Sequence
  Description of Artificial Sequence: Synthetic oligonucleotide
  Antisense strand to SEQ ID NO: 2126230
ucuaucagccaagaaguau

SEQ ID NO: 2126232 - RNA, 19 nt, Artificial Sequence
  Description of Artificial Sequence: Synthetic oligonucleotide
  Sense strand starting at position 2340 of SEQ ID NO: 1882503
agaggaagccauuggcauu

SEQ ID NO: 2126233 - RNA, 19 nt, Artificial Sequence
  Description of Artificial Sequence: Synthetic oligonucleotide
  Antisense strand to SEQ ID NO: 2126232
aaugccaauggcuuccucu

SEQ ID NO: 2126234 - RNA, 19 nt, Artificial Sequence
  Description of Artificial Sequence: Synthetic oligonucleotide
  Sense strand starting at position 2360 of SEQ ID NO: 1882503
cuuagaaccuggucaccaa

SEQ ID NO: 2126235 - RNA, 19 nt, Artificial Sequence
  Description of Artificial Sequence: Synthetic oligonucleotide
  Antisense strand to SEQ ID NO: 2126234
uuggugaccagguucuaag

SEQ ID NO: 2126236 - RNA, 19 nt, Artificial Sequence
  Description of Artificial Sequence: Synthetic oligonucleotide
  Sense strand starting at position 2413 of SEQ ID NO: 1882503
uugaaucaaucauguaagu

SEQ ID NO: 2126237 - RNA, 19 nt, Artificial Sequence
  Description of Artificial Sequence: Synthetic oligonucleotide
  Antisense strand to SEQ ID NO: 2126236
acuuacaugauugauucaa

SEQ ID NO: 2126238 - RNA, 19 nt, Artificial Sequence
  Description of Artificial Sequence: Synthetic oligonucleotide
  Sense strand starting at position 2422 of SEQ ID NO: 1882503
ucauguaagugaccuccaa

SEQ ID NO: 2126239 - RNA, 19 nt, Artificial Sequence
  Description of Artificial Sequence: Synthetic oligonucleotide
  Antisense strand to SEQ ID NO: 2126238
uuggaggucacuuacauga

SEQ ID NO: 2126240 - RNA, 19 nt, Artificial Sequence
  Description of Artificial Sequence: Synthetic oligonucleotide
  Sense strand starting at position 2482 of SEQ ID NO: 1882503
cccaaacgguuuccagaaa

SEQ ID NO: 2126241 - RNA, 19 nt, Artificial Sequence
  Description of Artificial Sequence: Synthetic oligonucleotide
  Antisense strand to SEQ ID NO: 2126240
uuucuggaaaccguuuggg

SEQ ID NO: 2126242 - RNA, 19 nt, Artificial Sequence
  Description of Artificial Sequence: Synthetic oligonucleotide
  Sense strand starting at position 2495 of SEQ ID NO: 1882503
cagaaaguccucuggaccu

SEQ ID NO: 2126243 - RNA, 19 nt, Artificial Sequence
  Description of Artificial Sequence: Synthetic oligonucleotide
  Antisense strand to SEQ ID NO: 2126242
agguccagaggacuuucug

SEQ ID NO: 2126244 - RNA, 19 nt, Artificial Sequence
  Description of Artificial Sequence: Synthetic oligonucleotide
  Sense strand starting at position 2552 of SEQ ID NO: 1882503
acccaugauccauggcaua

SEQ ID NO: 2126245 - RNA, 19 nt, Artificial Sequence
  Description of Artificial Sequence: Synthetic oligonucleotide
  Antisense strand to SEQ ID NO: 2126244
uaugccauggaucaugggu

SEQ ID NO: 2126246 - RNA, 19 nt, Artificial Sequence
  Description of Artificial Sequence: Synthetic oligonucleotide
  Sense strand starting at position 2564 of SEQ ID NO: 1882503
uggcauaaccgcuguacaa

SEQ ID NO: 2126247 - RNA, 19 nt, Artificial Sequence
  Description of Artificial Sequence: Synthetic oligonucleotide
  Antisense strand to SEQ ID NO: 2126246
uuguacagcgguuaugcca

SEQ ID NO: 2126248 - RNA, 19 nt, Artificial Sequence
  Description of Artificial Sequence: Synthetic oligonucleotide
  Sense strand starting at position 2584 of SEQ ID NO: 1882503
ggaugcucuggucaagacu

SEQ ID NO: 2126249 - RNA, 19 nt, Artificial Sequence
  Description of Artificial Sequence: Synthetic oligonucleotide
  Antisense strand to SEQ ID NO: 2126248
agucuugaccagagcaucc

SEQ ID NO: 2126250 - RNA, 19 nt, Artificial Sequence
  Description of Artificial Sequence: Synthetic oligonucleotide
  Sense strand starting at position 2610 of SEQ ID NO: 1882503
cucgaauucugccuauuuc

SEQ ID NO: 2126251 - RNA, 19 nt, Artificial Sequence
  Description of Artificial Sequence: Synthetic oligonucleotide
  Antisense strand to SEQ ID NO: 2126250
gaaauaggcagaauucgag

SEQ ID NO: 2126252 - RNA, 19 nt, Artificial Sequence
  Description of Artificial Sequence: Synthetic oligonucleotide
  Sense strand starting at position 2646 of SEQ ID NO: 1882503
acacgugacaacugggaau

SEQ ID NO: 2126253 - RNA, 19 nt, Artificial Sequence
  Description of Artificial Sequence: Synthetic oligonucleotide
  Antisense strand to SEQ ID NO: 2126252
auucccaguugucacgugu

SEQ ID NO: 2126254 - RNA, 19 nt, Artificial Sequence
  Description of Artificial Sequence: Synthetic oligonucleotide
  Sense strand starting at position 2659 of SEQ ID NO: 1882503
gggaaugucugcuuccuac

SEQ ID NO: 2126255 - RNA, 19 nt, Artificial Sequence
  Description of Artificial Sequence: Synthetic oligonucleotide
  Antisense strand to SEQ ID NO: 2126254
guaggaagcagacauuccc

SEQ ID NO: 2126256 - RNA, 19 nt, Artificial Sequence
  Description of Artificial Sequence: Synthetic oligonucleotide
  Sense strand starting at position 2689 of SEQ ID NO: 1882503
gucuaaugccacugccuaa

SEQ ID NO: 2126257 - RNA, 19 nt, Artificial Sequence
  Description of Artificial Sequence: Synthetic oligonucleotide
  Antisense strand to SEQ ID NO: 2126256
uuaggcaguggcauuagac

SEQ ID NO: 2126258 - RNA, 19 nt, Artificial Sequence
  Description of Artificial Sequence: Synthetic oligonucleotide
  Sense strand starting at position 2717 of SEQ ID NO: 1882503
cguaaagauuuccaaauca

SEQ ID NO: 2126259 - RNA, 19 nt, Artificial Sequence
  Description of Artificial Sequence: Synthetic oligonucleotide
  Antisense strand to SEQ ID NO: 2126258
ugauuuggaaaucuuuacg

SEQ ID NO: 2126260 - RNA, 19 nt, Artificial Sequence
  Description of Artificial Sequence: Synthetic oligonucleotide
  Sense strand starting at position 2789 of SEQ ID NO: 1882503
cuggaauccucauagcaau

SEQ ID NO: 2126261 - RNA, 19 nt, Artificial Sequence
  Description of Artificial Sequence: Synthetic oligonucleotide
  Antisense strand to SEQ ID NO: 2126260
auugcuaugaggauuccag

SEQ ID NO: 2126262 - RNA, 19 nt, Artificial Sequence
  Description of Artificial Sequence: Synthetic oligonucleotide
  Sense strand starting at position 3889 of SEQ ID NO: 1882503
gagggaggcucucagugau

SEQ ID NO: 2126263 - RNA, 19 nt, Artificial Sequence
  Description of Artificial Sequence: Synthetic oligonucleotide
  Antisense strand to SEQ ID NO: 2126262
aucacugagagccucccuc

SEQ ID NO: 2126264 - RNA, 19 nt, Artificial Sequence
  Description of Artificial Sequence: Synthetic oligonucleotide
  Sense strand starting at position 3893 of SEQ ID NO: 1882503
gaggcucucagugaucgga

SEQ ID NO: 2126265 - RNA, 19 nt, Artificial Sequence
  Description of Artificial Sequence: Synthetic oligonucleotide
  Antisense strand to SEQ ID NO: 2126264
uccgaucacugagagccuc

SEQ ID NO: 2126266 - RNA, 19 nt, Artificial Sequence
  Description of Artificial Sequence: Synthetic oligonucleotide
  Sense strand starting at position 3937 of SEQ ID NO: 1882503
ccgacccgccuugagaaau

SEQ ID NO: 2126267 - RNA, 19 nt, Artificial Sequence
  Description of Artificial Sequence: Synthetic oligonucleotide
  Antisense strand to SEQ ID NO: 2126266
auuucucaaggcgggucgg

SEQ ID NO: 2126268 - RNA, 19 nt, Artificial Sequence
  Description of Artificial Sequence: Synthetic oligonucleotide
  Sense strand starting at position 28 of SEQ ID NO: 1882504
uccucauggcguucuguau

SEQ ID NO: 2126269 - RNA, 19 nt, Artificial Sequence
  Description of Artificial Sequence: Synthetic oligonucleotide
  Antisense strand to SEQ ID NO: 2126268
auacagaacgccaugagga

SEQ ID NO: 2126270 - RNA, 19 nt, Artificial Sequence
  Description of Artificial Sequence: Synthetic oligonucleotide
  Sense strand starting at position 29 of SEQ ID NO: 1882504
ccucauggcguucuguauu

SEQ ID NO: 2126271 - RNA, 19 nt, Artificial Sequence
  Description of Artificial Sequence: Synthetic oligonucleotide
  Antisense strand to SEQ ID NO: 2126270
aauacagaacgccaugagg

SEQ ID NO: 2126272 - RNA, 19 nt, Artificial Sequence
  Description of Artificial Sequence: Synthetic oligonucleotide
  Sense strand starting at position 46 of SEQ ID NO: 1882504
uuauuucuguuggagagag

SEQ ID NO: 2126273 - RNA, 19 nt, Artificial Sequence
  Description of Artificial Sequence: Synthetic oligonucleotide
  Antisense strand to SEQ ID NO: 2126272
cucucuccaacagaaauaa

SEQ ID NO: 2126274 - RNA, 19 nt, Artificial Sequence
  Description of Artificial Sequence: Synthetic oligonucleotide
  Sense strand starting at position 313 of SEQ ID NO: 1882504
agacauuucucguuacguu

SEQ ID NO: 2126275 - RNA, 19 nt, Artificial Sequence
  Description of Artificial Sequence: Synthetic oligonucleotide
  Antisense strand to SEQ ID NO: 2126274
aacguaacgagaaaugucu

SEQ ID NO: 2126276 - RNA, 19 nt, Artificial Sequence
  Description of Artificial Sequence: Synthetic oligonucleotide
  Sense strand starting at position 314 of SEQ ID NO: 1882504
gacauuucucguuacguua

SEQ ID NO: 2126277 - RNA, 19 nt, Artificial Sequence
  Description of Artificial Sequence: Synthetic oligonucleotide
  Antisense strand to SEQ ID NO: 2126276
uaacguaacgagaaauguc

SEQ ID NO: 2126278 - RNA, 19 nt, Artificial Sequence
  Description of Artificial Sequence: Synthetic oligonucleotide
  Sense strand starting at position 672 of SEQ ID NO: 1882504
gccagaggccgggaaagau

SEQ ID NO: 2126279 - RNA, 19 nt, Artificial Sequence
  Description of Artificial Sequence: Synthetic oligonucleotide
  Antisense strand to SEQ ID NO: 2126278
aucuuucccggccucuggc

SEQ ID NO: 2126280 - RNA, 19 nt, Artificial Sequence
  Description of Artificial Sequence: Synthetic oligonucleotide
  Sense strand starting at position 696 of SEQ ID NO: 1882504
gcucaauuaggugaggucu

SEQ ID NO: 2126281 - RNA, 19 nt, Artificial Sequence
  Description of Artificial Sequence: Synthetic oligonucleotide
  Antisense strand to SEQ ID NO: 2126280
agaccucaccuaauugagc

SEQ ID NO: 2126282 - RNA, 19 nt, Artificial Sequence
  Description of Artificial Sequence: Synthetic oligonucleotide
  Sense strand starting at position 841 of SEQ ID NO: 1882504
acguguuauccagggaaug

SEQ ID NO: 2126283 - RNA, 19 nt, Artificial Sequence
  Description of Artificial Sequence: Synthetic oligonucleotide
  Antisense strand to SEQ ID NO: 2126282
cauucccuggauaacacgu

SEQ ID NO: 2126284 - RNA, 19 nt, Artificial Sequence
  Description of Artificial Sequence: Synthetic oligonucleotide
  Sense strand starting at position 842 of SEQ ID NO: 1882504
cguguuauccagggaaugg

SEQ ID NO: 2126285 - RNA, 19 nt, Artificial Sequence
  Description of Artificial Sequence: Synthetic oligonucleotide
  Antisense strand to SEQ ID NO: 2126284
ccauucccuggauaacacg

SEQ ID NO: 2126286 - RNA, 19 nt, Artificial Sequence
  Description of Artificial Sequence: Synthetic oligonucleotide
  Sense strand starting at position 852 of SEQ ID NO: 1882504
agggaauggcauuggaacu

SEQ ID NO: 2126287 - RNA, 19 nt, Artificial Sequence
  Description of Artificial Sequence: Synthetic oligonucleotide
  Antisense strand to SEQ ID NO: 2126286
aguuccaaugccauucccu

SEQ ID NO: 2126288 - RNA, 19 nt, Artificial Sequence
  Description of Artificial Sequence: Synthetic oligonucleotide
  Sense strand starting at position 915 of SEQ ID NO: 1882504
ugaagagcucuccauguug

SEQ ID NO: 2126289 - RNA, 19 nt, Artificial Sequence
  Description of Artificial Sequence: Synthetic oligonucleotide
  Antisense strand to SEQ ID NO: 2126288
caacauggagagcucuuca

SEQ ID NO: 2126290 - RNA, 19 nt, Artificial Sequence
  Description of Artificial Sequence: Synthetic oligonucleotide
  Sense strand starting at position 1542 of SEQ ID NO: 1882504
cuaagaaaugcugaucccu

SEQ ID NO: 2126291 - RNA, 19 nt, Artificial Sequence
  Description of Artificial Sequence: Synthetic oligonucleotide
  Antisense strand to SEQ ID NO: 2126290
agggaucagcauuucuuag

SEQ ID NO: 2126292 - RNA, 19 nt, Artificial Sequence
  Description of Artificial Sequence: Synthetic oligonucleotide
  Sense strand starting at position 1544 of SEQ ID NO: 1882504
aagaaaugcugaucccugu

SEQ ID NO: 2126293 - RNA, 19 nt, Artificial Sequence
  Description of Artificial Sequence: Synthetic oligonucleotide
  Antisense strand to SEQ ID NO: 2126292
acagggaucagcauuucuu

SEQ ID NO: 2126294 - RNA, 19 nt, Artificial Sequence
  Description of Artificial Sequence: Synthetic oligonucleotide
  Sense strand starting at position 1624 of SEQ ID NO: 1882504
uccaaauacuggucagaug

SEQ ID NO: 2126295 - RNA, 19 nt, Artificial Sequence
  Description of Artificial Sequence: Synthetic oligonucleotide
  Antisense strand to SEQ ID NO: 2126294
caucugaccaguauuugga

SEQ ID NO: 2126296 - RNA, 19 nt, Artificial Sequence
  Description of Artificial Sequence: Synthetic oligonucleotide
  Sense strand starting at position 1788 of SEQ ID NO: 1882504
uccuuuccgcccuaggaaa

SEQ ID NO: 2126297 - RNA, 19 nt, Artificial Sequence
  Description of Artificial Sequence: Synthetic oligonucleotide
  Antisense strand to SEQ ID NO: 2126296
uuuccuagggcggaaagga

SEQ ID NO: 2126298 - RNA, 19 nt, Artificial Sequence
  Description of Artificial Sequence: Synthetic oligonucleotide
  Sense strand starting at position 1803 of SEQ ID NO: 1882504
gaaagaaguucuguccucu

SEQ ID NO: 2126299 - RNA, 19 nt, Artificial Sequence
  Description of Artificial Sequence: Synthetic oligonucleotide
  Antisense strand to SEQ ID NO: 2126298
agaggacagaacuucuuuc

SEQ ID NO: 2126300 - RNA, 19 nt, Artificial Sequence
  Description of Artificial Sequence: Synthetic oligonucleotide
  Sense strand starting at position 2005 of SEQ ID NO: 1882504
cggagucucauggacuuaa

SEQ ID NO: 2126301 - RNA, 19 nt, Artificial Sequence
  Description of Artificial Sequence: Synthetic oligonucleotide
  Antisense strand to SEQ ID NO: 2126300
uuaaguccaugagacuccg

SEQ ID NO: 2126302 - RNA, 19 nt, Artificial Sequence
  Description of Artificial Sequence: Synthetic oligonucleotide
  Sense strand starting at position 2179 of SEQ ID NO: 1882504
ucacuaggucucugacuca

SEQ ID NO: 2126303 - RNA, 19 nt, Artificial Sequence
  Description of Artificial Sequence: Synthetic oligonucleotide
  Antisense strand to SEQ ID NO: 2126302
ugagucagagaccuaguga

SEQ ID NO: 2126304 - RNA, 19 nt, Artificial Sequence
  Description of Artificial Sequence: Synthetic oligonucleotide
  Sense strand starting at position 2216 of SEQ ID NO: 1882504
guuucccaggagugaagua

SEQ ID NO: 2126305 - RNA, 19 nt, Artificial Sequence
  Description of Artificial Sequence: Synthetic oligonucleotide
  Antisense strand to SEQ ID NO: 2126304
uacuucacuccugggaaac

SEQ ID NO: 2126306 - RNA, 19 nt, Artificial Sequence
  Description of Artificial Sequence: Synthetic oligonucleotide
  Sense strand starting at position 2269 of SEQ ID NO: 1882504
uggcucugaaaguguggaa

SEQ ID NO: 2126307 - RNA, 19 nt, Artificial Sequence
  Description of Artificial Sequence: Synthetic oligonucleotide
  Antisense strand to SEQ ID NO: 2126306
uuccacacuuucagagcca

SEQ ID NO: 2126308 - RNA, 19 nt, Artificial Sequence
  Description of Artificial Sequence: Synthetic oligonucleotide
  Sense strand starting at position 2380 of SEQ ID NO: 1882504
uggcuauugcaauaacaua

SEQ ID NO: 2126309 - RNA, 19 nt, Artificial Sequence
  Description of Artificial Sequence: Synthetic oligonucleotide
  Antisense strand to SEQ ID NO: 2126308
uauguuauugcaauagcca

SEQ ID NO: 2126310 - RNA, 19 nt, Artificial Sequence
  Description of Artificial Sequence: Synthetic oligonucleotide
  Sense strand starting at position 2454 of SEQ ID NO: 1882504
aggaauuaaugcucaggua

SEQ ID NO: 2126311 - RNA, 19 nt, Artificial Sequence
  Description of Artificial Sequence: Synthetic oligonucleotide
  Antisense strand to SEQ ID NO: 2126310
uaccugagcauuaauuccu

SEQ ID NO: 2126312 - RNA, 19 nt, Artificial Sequence
  Description of Artificial Sequence: Synthetic oligonucleotide
  Sense strand starting at position 2484 of SEQ ID NO: 1882504
aaaugauguguggguaauu

SEQ ID NO: 2126313 - RNA, 19 nt, Artificial Sequence
  Description of Artificial Sequence: Synthetic oligonucleotide
  Antisense strand to SEQ ID NO: 2126312
aauuacccacacaucauuu

SEQ ID NO: 2126314 - RNA, 19 nt, Artificial Sequence
  Description of Artificial Sequence: Synthetic oligonucleotide
  Sense strand starting at position 2773 of SEQ ID NO: 1882504
ucuugcaauguuugauaga

SEQ ID NO: 2126315 - RNA, 19 nt, Artificial Sequence
  Description of Artificial Sequence: Synthetic oligonucleotide
  Antisense strand to SEQ ID NO: 2126314
ucuaucaaacauugcaaga

SEQ ID NO: 2126316 - RNA, 19 nt, Artificial Sequence
  Description of Artificial Sequence: Synthetic oligonucleotide
  Sense strand starting at position 2794 of SEQ ID NO: 1882504
guagacauccgaggguaua

SEQ ID NO: 2126317 - RNA, 19 nt, Artificial Sequence
  Description of Artificial Sequence: Synthetic oligonucleotide
  Antisense strand to SEQ ID NO: 2126316
uauacccucggaugucuac

SEQ ID NO: 2126318 - RNA, 19 nt, Artificial Sequence
  Description of Artificial Sequence: Synthetic oligonucleotide
  Sense strand starting at position 2795 of SEQ ID NO: 1882504
uagacauccgaggguauaa

SEQ ID NO: 2126319 - RNA, 19 nt, Artificial Sequence
  Description of Artificial Sequence: Synthetic oligonucleotide
  Antisense strand to SEQ ID NO: 2126318
uuauacccucggaugucua

SEQ ID NO: 2126320 - RNA, 19 nt, Artificial Sequence
  Description of Artificial Sequence: Synthetic oligonucleotide
  Sense strand starting at position 2852 of SEQ ID NO: 1882504
cucagugagcucgaacuau

SEQ ID NO: 2126321 - RNA, 19 nt, Artificial Sequence
  Description of Artificial Sequence: Synthetic oligonucleotide
  Antisense strand to SEQ ID NO: 2126320
auaguucgagcucacugag

SEQ ID NO: 2126322 - RNA, 19 nt, Artificial Sequence
  Description of Artificial Sequence: Synthetic oligonucleotide
  Sense strand starting at position 2988 of SEQ ID NO: 1882504
accuacucugcccaggaau

SEQ ID NO: 2126323 - RNA, 19 nt, Artificial Sequence
  Description of Artificial Sequence: Synthetic oligonucleotide
  Antisense strand to SEQ ID NO: 2126322
auuccugggcagaguaggu

SEQ ID NO: 2126324 - RNA, 19 nt, Artificial Sequence
  Description of Artificial Sequence: Synthetic oligonucleotide
  Sense strand starting at position 3042 of SEQ ID NO: 1882504
aguugaaagcaauggugau

SEQ ID NO: 2126325 - RNA, 19 nt, Artificial Sequence
  Description of Artificial Sequence: Synthetic oligonucleotide
  Antisense strand to SEQ ID NO: 2126324
aucaccauugcuuucaacu

SEQ ID NO: 2126326 - RNA, 19 nt, Artificial Sequence
  Description of Artificial Sequence: Synthetic oligonucleotide
  Sense strand starting at position 3043 of SEQ ID NO: 1882504
guugaaagcaauggugauc

SEQ ID NO: 2126327 - RNA, 19 nt, Artificial Sequence
  Description of Artificial Sequence: Synthetic oligonucleotide
  Antisense strand to SEQ ID NO: 2126326
gaucaccauugcuuucaac

SEQ ID NO: 2126328 - RNA, 19 nt, Artificial Sequence
  Description of Artificial Sequence: Synthetic oligonucleotide
  Sense strand starting at position 3054 of SEQ ID NO: 1882504
uggugaucugcugaagaca

SEQ ID NO: 2126329 - RNA, 19 nt, Artificial Sequence
  Description of Artificial Sequence: Synthetic oligonucleotide
  Antisense strand to SEQ ID NO: 2126328
ugucuucagcagaucacca

SEQ ID NO: 2126330 - RNA, 19 nt, Artificial Sequence
  Description of Artificial Sequence: Synthetic oligonucleotide
  Sense strand starting at position 3153 of SEQ ID NO: 1882504
gggagaugcuuaagggaag

SEQ ID NO: 2126331 - RNA, 19 nt, Artificial Sequence
  Description of Artificial Sequence: Synthetic oligonucleotide
  Antisense strand to SEQ ID NO: 2126330
cuucccuuaagcaucuccc

SEQ ID NO: 2126332 - RNA, 19 nt, Artificial Sequence
  Description of Artificial Sequence: Synthetic oligonucleotide
  Sense strand starting at position 3190 of SEQ ID NO: 1882504
gggaguggucuagaaucuu

SEQ ID NO: 2126333 - RNA, 19 nt, Artificial Sequence
  Description of Artificial Sequence: Synthetic oligonucleotide
  Antisense strand to SEQ ID NO: 2126332
aagauucuagaccacuccc

SEQ ID NO: 2126334 - RNA, 19 nt, Artificial Sequence
  Description of Artificial Sequence: Synthetic oligonucleotide
  Sense strand starting at position 3196 of SEQ ID NO: 1882504
ggucuagaaucuucccauc

SEQ ID NO: 2126335 - RNA, 19 nt, Artificial Sequence
  Description of Artificial Sequence: Synthetic oligonucleotide
  Antisense strand to SEQ ID NO: 2126334
gaugggaagauucuagacc

SEQ ID NO: 2126336 - RNA, 19 nt, Artificial Sequence
  Description of Artificial Sequence: Synthetic oligonucleotide
  Sense strand starting at position 3676 of SEQ ID NO: 1882504
ugaauuauuuacugggaac

SEQ ID NO: 2126337 - RNA, 19 nt, Artificial Sequence
  Description of Artificial Sequence: Synthetic oligonucleotide
  Antisense strand to SEQ ID NO: 2126336
guucccaguaaauaauuca

SEQ ID NO: 2126338 - RNA, 19 nt, Artificial Sequence
  Description of Artificial Sequence: Synthetic oligonucleotide
  Sense strand starting at position 3679 of SEQ ID NO: 1882504
auuauuuacugggaacaga

SEQ ID NO: 2126339 - RNA, 19 nt, Artificial Sequence
  Description of Artificial Sequence: Synthetic oligonucleotide
  Antisense strand to SEQ ID NO: 2126338
ucuguucccaguaaauaau

SEQ ID NO: 2126340 - RNA, 19 nt, Artificial Sequence
  Description of Artificial Sequence: Synthetic oligonucleotide
  Sense strand starting at position 3720 of SEQ ID NO: 1882504
agcagagaucuuuggcuaa

SEQ ID NO: 2126341 - RNA, 19 nt, Artificial Sequence
  Description of Artificial Sequence: Synthetic oligonucleotide
  Antisense strand to SEQ ID NO: 2126340
uuagccaaagaucucugcu

SEQ ID NO: 2126342 - RNA, 19 nt, Artificial Sequence
  Description of Artificial Sequence: Synthetic oligonucleotide
  Sense strand starting at position 3754 of SEQ ID NO: 1882504
agguuuaagucuuuacuac

SEQ ID NO: 2126343 - RNA, 19 nt, Artificial Sequence
  Description of Artificial Sequence: Synthetic oligonucleotide
  Antisense strand to SEQ ID NO: 2126342
guaguaaagacuuaaaccu

SEQ ID NO: 2126344 - RNA, 19 nt, Artificial Sequence
  Description of Artificial Sequence: Synthetic oligonucleotide
  Sense strand starting at position 3755 of SEQ ID NO: 1882504
gguuuaagucuuuacuaca

SEQ ID NO: 2126345 - RNA, 19 nt, Artificial Sequence
  Description of Artificial Sequence: Synthetic oligonucleotide
  Antisense strand to SEQ ID NO: 2126344
uguaguaaagacuuaaacc

SEQ ID NO: 2126346 - RNA, 19 nt, Artificial Sequence
  Description of Artificial Sequence: Synthetic oligonucleotide
  Sense strand starting at position 3854 of SEQ ID NO: 1882504
gcuuguuuccugcucuuua

SEQ ID NO: 2126347 - RNA, 19 nt, Artificial Sequence
  Description of Artificial Sequence: Synthetic oligonucleotide
  Antisense strand to SEQ ID NO: 2126346
uaaagagcaggaaacaagc

SEQ ID NO: 2126348 - RNA, 19 nt, Artificial Sequence
  Description of Artificial Sequence: Synthetic oligonucleotide
  Sense strand starting at position 120 of SEQ ID NO: 1882505
agaaauagcuucucuagaa

SEQ ID NO: 2126349 - RNA, 19 nt, Artificial Sequence
  Description of Artificial Sequence: Synthetic oligonucleotide
  Antisense strand to SEQ ID NO: 2126348
uucuagagaagcuauuucu

SEQ ID NO: 2126350 - RNA, 19 nt, Artificial Sequence
  Description of Artificial Sequence: Synthetic oligonucleotide
  Sense strand starting at position 153 of SEQ ID NO: 1882505
cuuuaaggcugauuccaaa

SEQ ID NO: 2126351 - RNA, 19 nt, Artificial Sequence
  Description of Artificial Sequence: Synthetic oligonucleotide
  Antisense strand to SEQ ID NO: 2126350
uuuggaaucagccuuaaag

SEQ ID NO: 2126352 - RNA, 19 nt, Artificial Sequence
  Description of Artificial Sequence: Synthetic oligonucleotide
  Sense strand starting at position 168 of SEQ ID NO: 1882505
caaagauaguucucguaac

SEQ ID NO: 2126353 - RNA, 19 nt, Artificial Sequence
  Description of Artificial Sequence: Synthetic oligonucleotide
  Antisense strand to SEQ ID NO: 2126352
guuacgagaacuaucuuug

SEQ ID NO: 2126354 - RNA, 19 nt, Artificial Sequence
  Description of Artificial Sequence: Synthetic oligonucleotide
  Sense strand starting at position 221 of SEQ ID NO: 1882505
gucagaaugauacgacuga

SEQ ID NO: 2126355 - RNA, 19 nt, Artificial Sequence
  Description of Artificial Sequence: Synthetic oligonucleotide
  Antisense strand to SEQ ID NO: 2126354
ucagucguaucauucugac

SEQ ID NO: 2126356 - RNA, 19 nt, Artificial Sequence
  Description of Artificial Sequence: Synthetic oligonucleotide
  Sense strand starting at position 268 of SEQ ID NO: 1882505
acggauagacuucgacauc

SEQ ID NO: 2126357 - RNA, 19 nt, Artificial Sequence
  Description of Artificial Sequence: Synthetic oligonucleotide
  Antisense strand to SEQ ID NO: 2126356
gaugucgaagucuauccgu

SEQ ID NO: 2126358 - RNA, 19 nt, Artificial Sequence
  Description of Artificial Sequence: Synthetic oligonucleotide
  Sense strand starting at position 328 of SEQ ID NO: 1882505
cagggaaaucaaugccgaa

SEQ ID NO: 2126359 - RNA, 19 nt, Artificial Sequence
  Description of Artificial Sequence: Synthetic oligonucleotide
  Antisense strand to SEQ ID NO: 2126358
uucggcauugauuucccug

SEQ ID NO: 2126360 - RNA, 19 nt, Artificial Sequence
  Description of Artificial Sequence: Synthetic oligonucleotide
  Sense strand starting at position 490 of SEQ ID NO: 1882505
uagucaaucccagagguca

SEQ ID NO: 2126361 - RNA, 19 nt, Artificial Sequence
  Description of Artificial Sequence: Synthetic oligonucleotide
  Antisense strand to SEQ ID NO: 2126360
ugaccucugggauugacua

SEQ ID NO: 2126362 - RNA, 19 nt, Artificial Sequence
  Description of Artificial Sequence: Synthetic oligonucleotide
  Sense strand starting at position 492 of SEQ ID NO: 1882505
gucaaucccagaggucagu

SEQ ID NO: 2126363 - RNA, 19 nt, Artificial Sequence
  Description of Artificial Sequence: Synthetic oligonucleotide
  Antisense strand to SEQ ID NO: 2126362
acugaccucugggauugac

SEQ ID NO: 2126364 - RNA, 19 nt, Artificial Sequence
  Description of Artificial Sequence: Synthetic oligonucleotide
  Sense strand starting at position 498 of SEQ ID NO: 1882505
cccagaggucaguggagaa

SEQ ID NO: 2126365 - RNA, 19 nt, Artificial Sequence
  Description of Artificial Sequence: Synthetic oligonucleotide
  Antisense strand to SEQ ID NO: 2126364
uucuccacugaccucuggg

SEQ ID NO: 2126366 - RNA, 19 nt, Artificial Sequence
  Description of Artificial Sequence: Synthetic oligonucleotide
  Sense strand starting at position 543 of SEQ ID NO: 1882505
gcuucugugacaggagagu

SEQ ID NO: 2126367 - RNA, 19 nt, Artificial Sequence
  Description of Artificial Sequence: Synthetic oligonucleotide
  Antisense strand to SEQ ID NO: 2126366
acucuccugucacagaagc

SEQ ID NO: 2126368 - RNA, 19 nt, Artificial Sequence
  Description of Artificial Sequence: Synthetic oligonucleotide
  Sense strand starting at position 643 of SEQ ID NO: 1882505
cgaguuucuggaugacucu

SEQ ID NO: 2126369 - RNA, 19 nt, Artificial Sequence
  Description of Artificial Sequence: Synthetic oligonucleotide
  Antisense strand to SEQ ID NO: 2126368
agagucauccagaaacucg

SEQ ID NO: 2126370 - RNA, 19 nt, Artificial Sequence
  Description of Artificial Sequence: Synthetic oligonucleotide
  Sense strand starting at position 652 of SEQ ID NO: 1882505
ggaugacucucucauuuag

SEQ ID NO: 2126371 - RNA, 19 nt, Artificial Sequence
  Description of Artificial Sequence: Synthetic oligonucleotide
  Antisense strand to SEQ ID NO: 2126370
cuaaaugagagagucaucc

SEQ ID NO: 2126372 - RNA, 19 nt, Artificial Sequence
  Description of Artificial Sequence: Synthetic oligonucleotide
  Sense strand starting at position 728 of SEQ ID NO: 1882505
acuggucugaucuggagau

SEQ ID NO: 2126373 - RNA, 19 nt, Artificial Sequence
  Description of Artificial Sequence: Synthetic oligonucleotide
  Antisense strand to SEQ ID NO: 2126372
aucuccagaucagaccagu

SEQ ID NO: 2126374 - RNA, 19 nt, Artificial Sequence
  Description of Artificial Sequence: Synthetic oligonucleotide
  Sense strand starting at position 730 of SEQ ID NO: 1882505
uggucugaucuggagaucu

SEQ ID NO: 2126375 - RNA, 19 nt, Artificial Sequence
  Description of Artificial Sequence: Synthetic oligonucleotide
  Antisense strand to SEQ ID NO: 2126374
agaucuccagaucagacca

SEQ ID NO: 2126376 - RNA, 19 nt, Artificial Sequence
  Description of Artificial Sequence: Synthetic oligonucleotide
  Sense strand starting at position 741 of SEQ ID NO: 1882505
ggagaucuccacggucaga

SEQ ID NO: 2126377 - RNA, 19 nt, Artificial Sequence
  Description of Artificial Sequence: Synthetic oligonucleotide
  Antisense strand to SEQ ID NO: 2126376
ucugaccguggagaucucc

SEQ ID NO: 2126378 - RNA, 19 nt, Artificial Sequence
  Description of Artificial Sequence: Synthetic oligonucleotide
  Sense strand starting at position 752 of SEQ ID NO: 1882505
cggucagauucucucagga

SEQ ID NO: 2126379 - RNA, 19 nt, Artificial Sequence
  Description of Artificial Sequence: Synthetic oligonucleotide
  Antisense strand to SEQ ID NO: 2126378
uccugagagaaucugaccg

SEQ ID NO: 2126380 - RNA, 19 nt, Artificial Sequence
  Description of Artificial Sequence: Synthetic oligonucleotide
  Sense strand starting at position 867 of SEQ ID NO: 1882505
gaguaugucagcuagugca

SEQ ID NO: 2126381 - RNA, 19 nt, Artificial Sequence
  Description of Artificial Sequence: Synthetic oligonucleotide
  Antisense strand to SEQ ID NO: 2126380
ugcacuagcugacauacuc

SEQ ID NO: 2126382 - RNA, 19 nt, Artificial Sequence
  Description of Artificial Sequence: Synthetic oligonucleotide
  Sense strand starting at position 965 of SEQ ID NO: 1882505
gagugccugagugauucuu

SEQ ID NO: 2126383 - RNA, 19 nt, Artificial Sequence
  Description of Artificial Sequence: Synthetic oligonucleotide
  Antisense strand to SEQ ID NO: 2126382
aagaaucacucaggcacuc

SEQ ID NO: 2126384 - RNA, 19 nt, Artificial Sequence
  Description of Artificial Sequence: Synthetic oligonucleotide
  Sense strand starting at position 1005 of SEQ ID NO: 1882505
cccauaacgucuccagaga

SEQ ID NO: 2126385 - RNA, 19 nt, Artificial Sequence
  Description of Artificial Sequence: Synthetic oligonucleotide
  Antisense strand to SEQ ID NO: 2126384
ucucuggagacguuauggg

SEQ ID NO: 2126386 - RNA, 19 nt, Artificial Sequence
  Description of Artificial Sequence: Synthetic oligonucleotide
  Sense strand starting at position 1006 of SEQ ID NO: 1882505
ccauaacgucuccagagau

SEQ ID NO: 2126387 - RNA, 19 nt, Artificial Sequence
  Description of Artificial Sequence: Synthetic oligonucleotide
  Antisense strand to SEQ ID NO: 2126386
aucucuggagacguuaugg

SEQ ID NO: 2126388 - RNA, 19 nt, Artificial Sequence
  Description of Artificial Sequence: Synthetic oligonucleotide
  Sense strand starting at position 1211 of SEQ ID NO: 1882505
acugauacccacugucauu

SEQ ID NO: 2126389 - RNA, 19 nt, Artificial Sequence
  Description of Artificial Sequence: Synthetic oligonucleotide
  Antisense strand to SEQ ID NO: 2126388
aaugacaguggguaucagu

SEQ ID NO: 2126390 - RNA, 19 nt, Artificial Sequence
  Description of Artificial Sequence: Synthetic oligonucleotide
  Sense strand starting at position 1224 of SEQ ID NO: 1882505
gucauuuggauaugcugua

SEQ ID NO: 2126391 - RNA, 19 nt, Artificial Sequence
  Description of Artificial Sequence: Synthetic oligonucleotide
  Antisense strand to SEQ ID NO: 2126390
uacagcauauccaaaugac

SEQ ID NO: 2126392 - RNA, 19 nt, Artificial Sequence
  Description of Artificial Sequence: Synthetic oligonucleotide
  Sense strand starting at position 1229 of SEQ ID NO: 1882505
uuggauaugcuguauucca

SEQ ID NO: 2126393 - RNA, 19 nt, Artificial Sequence
  Description of Artificial Sequence: Synthetic oligonucleotide
  Antisense strand to SEQ ID NO: 2126392
uggaauacagcauauccaa

SEQ ID NO: 2126394 - RNA, 19 nt, Artificial Sequence
  Description of Artificial Sequence: Synthetic oligonucleotide
  Sense strand starting at position 1260 of SEQ ID NO: 1882505
aagggaccuugacuaaguu

SEQ ID NO: 2126395 - RNA, 19 nt, Artificial Sequence
  Description of Artificial Sequence: Synthetic oligonucleotide
  Antisense strand to SEQ ID NO: 2126394
aacuuagucaaggucccuu

SEQ ID NO: 2126396 - RNA, 19 nt, Artificial Sequence
  Description of Artificial Sequence: Synthetic oligonucleotide
  Sense strand starting at position 1657 of SEQ ID NO: 1882505
uguguucucugacuacaag

SEQ ID NO: 2126397 - RNA, 19 nt, Artificial Sequence
  Description of Artificial Sequence: Synthetic oligonucleotide
  Antisense strand to SEQ ID NO: 2126396
cuuguagucagagaacaca

SEQ ID NO: 2126398 - RNA, 19 nt, Artificial Sequence
  Description of Artificial Sequence: Synthetic oligonucleotide
  Sense strand starting at position 1658 of SEQ ID NO: 1882505
guguucucugacuacaaga

SEQ ID NO: 2126399 - RNA, 19 nt, Artificial Sequence
  Description of Artificial Sequence: Synthetic oligonucleotide
  Antisense strand to SEQ ID NO: 2126398
ucuuguagucagagaacac

SEQ ID NO: 2126400 - RNA, 19 nt, Artificial Sequence
  Description of Artificial Sequence: Synthetic oligonucleotide
  Sense strand starting at position 1724 of SEQ ID NO: 1882505
ugaaguacuuucccaacgu

SEQ ID NO: 2126401 - RNA, 19 nt, Artificial Sequence
  Description of Artificial Sequence: Synthetic oligonucleotide
  Antisense strand to SEQ ID NO: 2126400
acguugggaaaguacuuca

SEQ ID NO: 2126402 - RNA, 19 nt, Artificial Sequence
  Description of Artificial Sequence: Synthetic oligonucleotide
  Sense strand starting at position 1909 of SEQ ID NO: 1882505
gcauacaguccuggagacu

SEQ ID NO: 2126403 - RNA, 19 nt, Artificial Sequence
  Description of Artificial Sequence: Synthetic oligonucleotide
  Antisense strand to SEQ ID NO: 2126402
agucuccaggacuguaugc

SEQ ID NO: 2126404 - RNA, 19 nt, Artificial Sequence
  Description of Artificial Sequence: Synthetic oligonucleotide
  Sense strand starting at position 1991 of SEQ ID NO: 1882505
uacagucuuuaagcagaga

SEQ ID NO: 2126405 - RNA, 19 nt, Artificial Sequence
  Description of Artificial Sequence: Synthetic oligonucleotide
  Antisense strand to SEQ ID NO: 2126404
ucucugcuuaaagacugua

SEQ ID NO: 2126406 - RNA, 19 nt, Artificial Sequence
  Description of Artificial Sequence: Synthetic oligonucleotide
  Sense strand starting at position 2010 of SEQ ID NO: 1882505
gggcacagucauugggagu

SEQ ID NO: 2126407 - RNA, 19 nt, Artificial Sequence
  Description of Artificial Sequence: Synthetic oligonucleotide
  Antisense strand to SEQ ID NO: 2126406
acucccaaugacugugccc

SEQ ID NO: 2126408 - RNA, 19 nt, Artificial Sequence
  Description of Artificial Sequence: Synthetic oligonucleotide
  Sense strand starting at position 2093 of SEQ ID NO: 1882505
gggaggauguguuuggaag

SEQ ID NO: 2126409 - RNA, 19 nt, Artificial Sequence
  Description of Artificial Sequence: Synthetic oligonucleotide
  Antisense strand to SEQ ID NO: 2126408
cuuccaaacacauccuccc

SEQ ID NO: 2126410 - RNA, 19 nt, Artificial Sequence
  Description of Artificial Sequence: Synthetic oligonucleotide
  Sense strand starting at position 2292 of SEQ ID NO: 1882505
guacaaugaguuugccaau

SEQ ID NO: 2126411 - RNA, 19 nt, Artificial Sequence
  Description of Artificial Sequence: Synthetic oligonucleotide
  Antisense strand to SEQ ID NO: 2126410
auuggcaaacucauuguac

SEQ ID NO: 2126412 - RNA, 19 nt, Artificial Sequence
  Description of Artificial Sequence: Synthetic oligonucleotide
  Sense strand starting at position 2340 of SEQ ID NO: 1882505
uugagcagccugugacuaa

SEQ ID NO: 2126413 - RNA, 19 nt, Artificial Sequence
  Description of Artificial Sequence: Synthetic oligonucleotide
  Antisense strand to SEQ ID NO: 2126412
uuagucacaggcugcucaa

SEQ ID NO: 2126414 - RNA, 19 nt, Artificial Sequence
  Description of Artificial Sequence: Synthetic oligonucleotide
  Sense strand starting at position 2402 of SEQ ID NO: 1882505
uggguauacauaggguaua

SEQ ID NO: 2126415 - RNA, 19 nt, Artificial Sequence
  Description of Artificial Sequence: Synthetic oligonucleotide
  Antisense strand to SEQ ID NO: 2126414
uauacccuauguauaccca

SEQ ID NO: 2126416 - RNA, 19 nt, Artificial Sequence
  Description of Artificial Sequence: Synthetic oligonucleotide
  Sense strand starting at position 2507 of SEQ ID NO: 1882505
ucuacugugucaccaaguu

SEQ ID NO: 2126417 - RNA, 19 nt, Artificial Sequence
  Description of Artificial Sequence: Synthetic oligonucleotide
  Antisense strand to SEQ ID NO: 2126416
aacuuggugacacaguaga

SEQ ID NO: 2126418 - RNA, 19 nt, Artificial Sequence
  Description of Artificial Sequence: Synthetic oligonucleotide
  Sense strand starting at position 3088 of SEQ ID NO: 1882505
ccaaauugguaauuguaca

SEQ ID NO: 2126419 - RNA, 19 nt, Artificial Sequence
  Description of Artificial Sequence: Synthetic oligonucleotide
  Antisense strand to SEQ ID NO: 2126418
uguacaauuaccaauuugg

SEQ ID NO: 2126420 - RNA, 19 nt, Artificial Sequence
  Description of Artificial Sequence: Synthetic oligonucleotide
  Sense strand starting at position 3141 of SEQ ID NO: 1882505
acaggcuuccauggauaaa

SEQ ID NO: 2126421 - RNA, 19 nt, Artificial Sequence
  Description of Artificial Sequence: Synthetic oligonucleotide
  Antisense strand to SEQ ID NO: 2126420
uuuauccauggaagccugu

SEQ ID NO: 2126422 - RNA, 19 nt, Artificial Sequence
  Description of Artificial Sequence: Synthetic oligonucleotide
  Sense strand starting at position 3169 of SEQ ID NO: 1882505
cugggcuguccucagaguu

SEQ ID NO: 2126423 - RNA, 19 nt, Artificial Sequence
  Description of Artificial Sequence: Synthetic oligonucleotide
  Antisense strand to SEQ ID NO: 2126422
aacucugaggacagcccag

SEQ ID NO: 2126424 - RNA, 19 nt, Artificial Sequence
  Description of Artificial Sequence: Synthetic oligonucleotide
  Sense strand starting at position 3389 of SEQ ID NO: 1882505
ggcagaaauccauguggaa

SEQ ID NO: 2126425 - RNA, 19 nt, Artificial Sequence
  Description of Artificial Sequence: Synthetic oligonucleotide
  Antisense strand to SEQ ID NO: 2126424
uuccacauggauuucugcc

SEQ ID NO: 2126426 - RNA, 19 nt, Artificial Sequence
  Description of Artificial Sequence: Synthetic oligonucleotide
  Sense strand starting at position 3871 of SEQ ID NO: 1882505
gccgccuauuuguuagaga

SEQ ID NO: 2126427 - RNA, 19 nt, Artificial Sequence
  Description of Artificial Sequence: Synthetic oligonucleotide
  Antisense strand to SEQ ID NO: 2126426
ucucuaacaaauaggcggc

SEQ ID NO: 2126428 - RNA, 19 nt, Artificial Sequence
  Description of Artificial Sequence: Synthetic oligonucleotide
  Sense strand starting at position 34 of SEQ ID NO: 1882506
aguuacuucccauaugcca

SEQ ID NO: 2126429 - RNA, 19 nt, Artificial Sequence
  Description of Artificial Sequence: Synthetic oligonucleotide
  Antisense strand to SEQ ID NO: 2126428
uggcauaugggaaguaacu

SEQ ID NO: 2126430 - RNA, 19 nt, Artificial Sequence
  Description of Artificial Sequence: Synthetic oligonucleotide
  Sense strand starting at position 339 of SEQ ID NO: 1882506
ugguuuguagccuauuaac

SEQ ID NO: 2126431 - RNA, 19 nt, Artificial Sequence
  Description of Artificial Sequence: Synthetic oligonucleotide
  Antisense strand to SEQ ID NO: 2126430
guuaauaggcuacaaacca

SEQ ID NO: 2126432 - RNA, 19 nt, Artificial Sequence
  Description of Artificial Sequence: Synthetic oligonucleotide
  Sense strand starting at position 495 of SEQ ID NO: 1882506
uauaguaaucucugguggu

SEQ ID NO: 2126433 - RNA, 19 nt, Artificial Sequence
  Description of Artificial Sequence: Synthetic oligonucleotide
  Antisense strand to SEQ ID NO: 2126432
accaccagagauuacuaua

SEQ ID NO: 2126434 - RNA, 19 nt, Artificial Sequence
  Description of Artificial Sequence: Synthetic oligonucleotide
  Sense strand starting at position 496 of SEQ ID NO: 1882506
auaguaaucucugguggua

SEQ ID NO: 2126435 - RNA, 19 nt, Artificial Sequence
  Description of Artificial Sequence: Synthetic oligonucleotide
  Antisense strand to SEQ ID NO: 2126434
uaccaccagagauuacuau

SEQ ID NO: 2126436 - RNA, 19 nt, Artificial Sequence
  Description of Artificial Sequence: Synthetic oligonucleotide
  Sense strand starting at position 498 of SEQ ID NO: 1882506
aguaaucucuggugguauu

SEQ ID NO: 2126437 - RNA, 19 nt, Artificial Sequence
  Description of Artificial Sequence: Synthetic oligonucleotide
  Antisense strand to SEQ ID NO: 2126436
aauaccaccagagauuacu

SEQ ID NO: 2126438 - RNA, 19 nt, Artificial Sequence
  Description of Artificial Sequence: Synthetic oligonucleotide
  Sense strand starting at position 499 of SEQ ID NO: 1882506
guaaucucuggugguauuu

SEQ ID NO: 2126439 - RNA, 19 nt, Artificial Sequence
  Description of Artificial Sequence: Synthetic oligonucleotide
  Antisense strand to SEQ ID NO: 2126438
aaauaccaccagagauuac

SEQ ID NO: 2126440 - RNA, 19 nt, Artificial Sequence
  Description of Artificial Sequence: Synthetic oligonucleotide
  Sense strand starting at position 528 of SEQ ID NO: 1882506
ugggaucagugaugaucua

SEQ ID NO: 2126441 - RNA, 19 nt, Artificial Sequence
  Description of Artificial Sequence: Synthetic oligonucleotide
  Antisense strand to SEQ ID NO: 2126440
uagaucaucacugauccca

SEQ ID NO: 2126442 - RNA, 19 nt, Artificial Sequence
  Description of Artificial Sequence: Synthetic oligonucleotide
  Sense strand starting at position 1536 of SEQ ID NO: 1882506
ugaguagguugcggagaau

SEQ ID NO: 2126443 - RNA, 19 nt, Artificial Sequence
  Description of Artificial Sequence: Synthetic oligonucleotide
  Antisense strand to SEQ ID NO: 2126442
auucuccgcaaccuacuca

SEQ ID NO: 2126444 - RNA, 19 nt, Artificial Sequence
  Description of Artificial Sequence: Synthetic oligonucleotide
  Sense strand starting at position 1757 of SEQ ID NO: 1882506
gucuaauguuuagucuuua

SEQ ID NO: 2126445 - RNA, 19 nt, Artificial Sequence
  Description of Artificial Sequence: Synthetic oligonucleotide
  Antisense strand to SEQ ID NO: 2126444
uaaagacuaaacauuagac

SEQ ID NO: 2126446 - RNA, 19 nt, Artificial Sequence
  Description of Artificial Sequence: Synthetic oligonucleotide
  Sense strand starting at position 1940 of SEQ ID NO: 1882506
cgguguuauuucucccauc

SEQ ID NO: 2126447 - RNA, 19 nt, Artificial Sequence
  Description of Artificial Sequence: Synthetic oligonucleotide
  Antisense strand to SEQ ID NO: 2126446
gaugggagaaauaacaccg

SEQ ID NO: 2126448 - RNA, 19 nt, Artificial Sequence
  Description of Artificial Sequence: Synthetic oligonucleotide
  Sense strand starting at position 2344 of SEQ ID NO: 1882506
uguuccuacccgugagcau

SEQ ID NO: 2126449 - RNA, 19 nt, Artificial Sequence
  Description of Artificial Sequence: Synthetic oligonucleotide
  Antisense strand to SEQ ID NO: 2126448
augcucacggguaggaaca

SEQ ID NO: 2126450 - RNA, 19 nt, Artificial Sequence
  Description of Artificial Sequence: Synthetic oligonucleotide
  Sense strand starting at position 2391 of SEQ ID NO: 1882506
cuuuaauuccguuaagcag

SEQ ID NO: 2126451 - RNA, 19 nt, Artificial Sequence
  Description of Artificial Sequence: Synthetic oligonucleotide
  Antisense strand to SEQ ID NO: 2126450
cugcuuaacggaauuaaag

SEQ ID NO: 2126452 - RNA, 19 nt, Artificial Sequence
  Description of Artificial Sequence: Synthetic oligonucleotide
  Sense strand starting at position 2856 of SEQ ID NO: 1882506
ggguuugacacagauagcu

SEQ ID NO: 2126453 - RNA, 19 nt, Artificial Sequence
  Description of Artificial Sequence: Synthetic oligonucleotide
  Antisense strand to SEQ ID NO: 2126452
agcuaucugugucaaaccc

SEQ ID NO: 2126454 - RNA, 19 nt, Artificial Sequence
  Description of Artificial Sequence: Synthetic oligonucleotide
  Sense strand starting at position 3564 of SEQ ID NO: 1882506
ggugauaucuccuuuaucg

SEQ ID NO: 2126455 - RNA, 19 nt, Artificial Sequence
  Description of Artificial Sequence: Synthetic oligonucleotide
  Antisense strand to SEQ ID NO: 2126454
cgauaaaggagauaucacc

SEQ ID NO: 2126456 - RNA, 19 nt, Artificial Sequence
  Description of Artificial Sequence: Synthetic oligonucleotide
  Sense strand starting at position 130 of SEQ ID NO: 1882507
gaacacucauguuugguua

SEQ ID NO: 2126457 - RNA, 19 nt, Artificial Sequence
  Description of Artificial Sequence: Synthetic oligonucleotide
  Antisense strand to SEQ ID NO: 2126456
uaaccaaacaugaguguuc

SEQ ID NO: 2126458 - RNA, 19 nt, Artificial Sequence
  Description of Artificial Sequence: Synthetic oligonucleotide
  Sense strand starting at position 746 of SEQ ID NO: 1882507
ccagccugccaguaucaua

SEQ ID NO: 2126459 - RNA, 19 nt, Artificial Sequence
  Description of Artificial Sequence: Synthetic oligonucleotide
  Antisense strand to SEQ ID NO: 2126458
uaugauacuggcaggcugg

SEQ ID NO: 2126460 - RNA, 19 nt, Artificial Sequence
  Description of Artificial Sequence: Synthetic oligonucleotide
  Sense strand starting at position 907 of SEQ ID NO: 1882507
auaagucuugcagaugaau

SEQ ID NO: 2126461 - RNA, 19 nt, Artificial Sequence
  Description of Artificial Sequence: Synthetic oligonucleotide
  Antisense strand to SEQ ID NO: 2126460
auucaucugcaagacuuau

SEQ ID NO: 2126462 - RNA, 19 nt, Artificial Sequence
  Description of Artificial Sequence: Synthetic oligonucleotide
  Sense strand starting at position 943 of SEQ ID NO: 1882507
guaaauuaauaggaucacu

SEQ ID NO: 2126463 - RNA, 19 nt, Artificial Sequence
  Description of Artificial Sequence: Synthetic oligonucleotide
  Antisense strand to SEQ ID NO: 2126462
agugauccuauuaauuuac

SEQ ID NO: 2126464 - RNA, 19 nt, Artificial Sequence
  Description of Artificial Sequence: Synthetic oligonucleotide
  Sense strand starting at position 1269 of SEQ ID NO: 1882507
gggcucaaaugguugagau

SEQ ID NO: 2126465 - RNA, 19 nt, Artificial Sequence
  Description of Artificial Sequence: Synthetic oligonucleotide
  Antisense strand to SEQ ID NO: 2126464
aucucaaccauuugagccc

SEQ ID NO: 2126466 - RNA, 19 nt, Artificial Sequence
  Description of Artificial Sequence: Synthetic oligonucleotide
  Sense strand starting at position 1270 of SEQ ID NO: 1882507
ggcucaaaugguugagauu

SEQ ID NO: 2126467 - RNA, 19 nt, Artificial Sequence
  Description of Artificial Sequence: Synthetic oligonucleotide
  Antisense strand to SEQ ID NO: 2126466
aaucucaaccauuugagcc

SEQ ID NO: 2126468 - RNA, 19 nt, Artificial Sequence
  Description of Artificial Sequence: Synthetic oligonucleotide
  Sense strand starting at position 1271 of SEQ ID NO: 1882507
gcucaaaugguugagauuc

SEQ ID NO: 2126469 - RNA, 19 nt, Artificial Sequence
  Description of Artificial Sequence: Synthetic oligonucleotide
  Antisense strand to SEQ ID NO: 2126468
gaaucucaaccauuugagc

SEQ ID NO: 2126470 - RNA, 19 nt, Artificial Sequence
  Description of Artificial Sequence: Synthetic oligonucleotide
  Sense strand starting at position 1281 of SEQ ID NO: 1882507
uugagauucucauucuguu

SEQ ID NO: 2126471 - RNA, 19 nt, Artificial Sequence
  Description of Artificial Sequence: Synthetic oligonucleotide
  Antisense strand to SEQ ID NO: 2126470
aacagaaugagaaucucaa

SEQ ID NO: 2126472 - RNA, 19 nt, Artificial Sequence
  Description of Artificial Sequence: Synthetic oligonucleotide
  Sense strand starting at position 1363 of SEQ ID NO: 1882507
gucuguccuacugagaaag

SEQ ID NO: 2126473 - RNA, 19 nt, Artificial Sequence
  Description of Artificial Sequence: Synthetic oligonucleotide
  Antisense strand to SEQ ID NO: 2126472
cuuucucaguaggacagac

SEQ ID NO: 2126474 - RNA, 19 nt, Artificial Sequence
  Description of Artificial Sequence: Synthetic oligonucleotide
  Sense strand starting at position 1374 of SEQ ID NO: 1882507
ugagaaaguuuaucaacuc

SEQ ID NO: 2126475 - RNA, 19 nt, Artificial Sequence
  Description of Artificial Sequence: Synthetic oligonucleotide
  Antisense strand to SEQ ID NO: 2126474
gaguugauaaacuuucuca

SEQ ID NO: 2126476 - RNA, 19 nt, Artificial Sequence
  Description of Artificial Sequence: Synthetic oligonucleotide
  Sense strand starting at position 1413 of SEQ ID NO: 1882507
aaaugcugagaguguuacu

SEQ ID NO: 2126477 - RNA, 19 nt, Artificial Sequence
  Description of Artificial Sequence: Synthetic oligonucleotide
  Antisense strand to SEQ ID NO: 2126476
aguaacacucucagcauuu

SEQ ID NO: 2126478 - RNA, 19 nt, Artificial Sequence
  Description of Artificial Sequence: Synthetic oligonucleotide
  Sense strand starting at position 1482 of SEQ ID NO: 1882507
agccaagagccuuacauau

SEQ ID NO: 2126479 - RNA, 19 nt, Artificial Sequence
  Description of Artificial Sequence: Synthetic oligonucleotide
  Antisense strand to SEQ ID NO: 2126478
auauguaaggcucuuggcu

SEQ ID NO: 2126480 - RNA, 19 nt, Artificial Sequence
  Description of Artificial Sequence: Synthetic oligonucleotide
  Sense strand starting at position 1543 of SEQ ID NO: 1882507
ucaugaguuaauuguguua

SEQ ID NO: 2126481 - RNA, 19 nt, Artificial Sequence
  Description of Artificial Sequence: Synthetic oligonucleotide
  Antisense strand to SEQ ID NO: 2126480
uaacacaauuaacucauga

SEQ ID NO: 2126482 - RNA, 19 nt, Artificial Sequence
  Description of Artificial Sequence: Synthetic oligonucleotide
  Sense strand starting at position 1546 of SEQ ID NO: 1882507
ugaguuaauuguguuacca

SEQ ID NO: 2126483 - RNA, 19 nt, Artificial Sequence
  Description of Artificial Sequence: Synthetic oligonucleotide
  Antisense strand to SEQ ID NO: 2126482
ugguaacacaauuaacuca

SEQ ID NO: 2126484 - RNA, 19 nt, Artificial Sequence
  Description of Artificial Sequence: Synthetic oligonucleotide
  Sense strand starting at position 1586 of SEQ ID NO: 1882507
gugagcagucaauauaaua

SEQ ID NO: 2126485 - RNA, 19 nt, Artificial Sequence
  Description of Artificial Sequence: Synthetic oligonucleotide
  Antisense strand to SEQ ID NO: 2126484
uauuauauugacugcucac

SEQ ID NO: 2126486 - RNA, 19 nt, Artificial Sequence
  Description of Artificial Sequence: Synthetic oligonucleotide
  Sense strand starting at position 1688 of SEQ ID NO: 1882507
aagaacacuugaguguaau

SEQ ID NO: 2126487 - RNA, 19 nt, Artificial Sequence
  Description of Artificial Sequence: Synthetic oligonucleotide
  Antisense strand to SEQ ID NO: 2126486
auuacacucaaguguucuu

SEQ ID NO: 2126488 - RNA, 19 nt, Artificial Sequence
  Description of Artificial Sequence: Synthetic oligonucleotide
  Sense strand starting at position 1689 of SEQ ID NO: 1882507
agaacacuugaguguaaua

SEQ ID NO: 2126489 - RNA, 19 nt, Artificial Sequence
  Description of Artificial Sequence: Synthetic oligonucleotide
  Antisense strand to SEQ ID NO: 2126488
uauuacacucaaguguucu

SEQ ID NO: 2126490 - RNA, 19 nt, Artificial Sequence
  Description of Artificial Sequence: Synthetic oligonucleotide
  Sense strand starting at position 2024 of SEQ ID NO: 1882507
gugguauggccguacucaa

SEQ ID NO: 2126491 - RNA, 19 nt, Artificial Sequence
  Description of Artificial Sequence: Synthetic oligonucleotide
  Antisense strand to SEQ ID NO: 2126490
uugaguacggccauaccac

SEQ ID NO: 2126492 - RNA, 19 nt, Artificial Sequence
  Description of Artificial Sequence: Synthetic oligonucleotide
  Sense strand starting at position 2031 of SEQ ID NO: 1882507
ggccguacucaagagcuau

SEQ ID NO: 2126493 - RNA, 19 nt, Artificial Sequence
  Description of Artificial Sequence: Synthetic oligonucleotide
  Antisense strand to SEQ ID NO: 2126492
auagcucuugaguacggcc

SEQ ID NO: 2126494 - RNA, 19 nt, Artificial Sequence
  Description of Artificial Sequence: Synthetic oligonucleotide
  Sense strand starting at position 2075 of SEQ ID NO: 1882507
aaauaagaguacgagauua

SEQ ID NO: 2126495 - RNA, 19 nt, Artificial Sequence
  Description of Artificial Sequence: Synthetic oligonucleotide
  Antisense strand to SEQ ID NO: 2126494
uaaucucguacucuuauuu

SEQ ID NO: 2126496 - RNA, 19 nt, Artificial Sequence
  Description of Artificial Sequence: Synthetic oligonucleotide
  Sense strand starting at position 2200 of SEQ ID NO: 1882507
gcccgaguacuugaggguu

SEQ ID NO: 2126497 - RNA, 19 nt, Artificial Sequence
  Description of Artificial Sequence: Synthetic oligonucleotide
  Antisense strand to SEQ ID NO: 2126496
aacccucaaguacucgggc

SEQ ID NO: 2126498 - RNA, 19 nt, Artificial Sequence
  Description of Artificial Sequence: Synthetic oligonucleotide
  Sense strand starting at position 2203 of SEQ ID NO: 1882507
cgaguacuugaggguuauu

SEQ ID NO: 2126499 - RNA, 19 nt, Artificial Sequence
  Description of Artificial Sequence: Synthetic oligonucleotide
  Antisense strand to SEQ ID NO: 2126498
aauaacccucaaguacucg

SEQ ID NO: 2126500 - RNA, 19 nt, Artificial Sequence
  Description of Artificial Sequence: Synthetic oligonucleotide
  Sense strand starting at position 2214 of SEQ ID NO: 1882507
ggguuauucugaguuucuc

SEQ ID NO: 2126501 - RNA, 19 nt, Artificial Sequence
  Description of Artificial Sequence: Synthetic oligonucleotide
  Antisense strand to SEQ ID NO: 2126500
gagaaacucagaauaaccc

SEQ ID NO: 2126502 - RNA, 19 nt, Artificial Sequence
  Description of Artificial Sequence: Synthetic oligonucleotide
  Sense strand starting at position 2222 of SEQ ID NO: 1882507
cugaguuucucauauuucu

SEQ ID NO: 2126503 - RNA, 19 nt, Artificial Sequence
  Description of Artificial Sequence: Synthetic oligonucleotide
  Antisense strand to SEQ ID NO: 2126502
agaaauaugagaaacucag

SEQ ID NO: 2126504 - RNA, 19 nt, Artificial Sequence
  Description of Artificial Sequence: Synthetic oligonucleotide
  Sense strand starting at position 2230 of SEQ ID NO: 1882507
cucauauuucuguggucuu

SEQ ID NO: 2126505 - RNA, 19 nt, Artificial Sequence
  Description of Artificial Sequence: Synthetic oligonucleotide
  Antisense strand to SEQ ID NO: 2126504
aagaccacagaaauaugag

SEQ ID NO: 2126506 - RNA, 19 nt, Artificial Sequence
  Description of Artificial Sequence: Synthetic oligonucleotide
  Sense strand starting at position 2249 of SEQ ID NO: 1882507
gagcaaguugugggacuau

SEQ ID NO: 2126507 - RNA, 19 nt, Artificial Sequence
  Description of Artificial Sequence: Synthetic oligonucleotide
  Antisense strand to SEQ ID NO: 2126506
auagucccacaacuugcuc

SEQ ID NO: 2126508 - RNA, 19 nt, Artificial Sequence
  Description of Artificial Sequence: Synthetic oligonucleotide
  Sense strand starting at position 2259 of SEQ ID NO: 1882507
ugggacuaucuuugccuca

SEQ ID NO: 2126509 - RNA, 19 nt, Artificial Sequence
  Description of Artificial Sequence: Synthetic oligonucleotide
  Antisense strand to SEQ ID NO: 2126508
ugaggcaaagauaguccca

SEQ ID NO: 2126510 - RNA, 19 nt, Artificial Sequence
  Description of Artificial Sequence: Synthetic oligonucleotide
  Sense strand starting at position 2260 of SEQ ID NO: 1882507
gggacuaucuuugccucaa

SEQ ID NO: 2126511 - RNA, 19 nt, Artificial Sequence
  Description of Artificial Sequence: Synthetic oligonucleotide
  Antisense strand to SEQ ID NO: 2126510
uugaggcaaagauaguccc

SEQ ID NO: 2126512 - RNA, 19 nt, Artificial Sequence
  Description of Artificial Sequence: Synthetic oligonucleotide
  Sense strand starting at position 2261 of SEQ ID NO: 1882507
ggacuaucuuugccucaag

SEQ ID NO: 2126513 - RNA, 19 nt, Artificial Sequence
  Description of Artificial Sequence: Synthetic oligonucleotide
  Antisense strand to SEQ ID NO: 2126512
cuugaggcaaagauagucc

SEQ ID NO: 2126514 - RNA, 19 nt, Artificial Sequence
  Description of Artificial Sequence: Synthetic oligonucleotide
  Sense strand starting at position 2272 of SEQ ID NO: 1882507
gccucaagucuuuauauug

SEQ ID NO: 2126515 - RNA, 19 nt, Artificial Sequence
  Description of Artificial Sequence: Synthetic oligonucleotide
  Antisense strand to SEQ ID NO: 2126514
caauauaaagacuugaggc

SEQ ID NO: 2126516 - RNA, 19 nt, Artificial Sequence
  Description of Artificial Sequence: Synthetic oligonucleotide
  Sense strand starting at position 2614 of SEQ ID NO: 1882507
gccugauucgcagaucguu

SEQ ID NO: 2126517 - RNA, 19 nt, Artificial Sequence
  Description of Artificial Sequence: Synthetic oligonucleotide
  Antisense strand to SEQ ID NO: 2126516
aacgaucugcgaaucaggc

SEQ ID NO: 2126518 - RNA, 19 nt, Artificial Sequence
  Description of Artificial Sequence: Synthetic oligonucleotide
  Sense strand starting at position 2624 of SEQ ID NO: 1882507
cagaucguuccuugcuaaa

SEQ ID NO: 2126519 - RNA, 19 nt, Artificial Sequence
  Description of Artificial Sequence: Synthetic oligonucleotide
  Antisense strand to SEQ ID NO: 2126518
uuuagcaaggaacgaucug

SEQ ID NO: 2126520 - RNA, 19 nt, Artificial Sequence
  Description of Artificial Sequence: Synthetic oligonucleotide
  Sense strand starting at position 2626 of SEQ ID NO: 1882507
gaucguuccuugcuaaaua

SEQ ID NO: 2126521 - RNA, 19 nt, Artificial Sequence
  Description of Artificial Sequence: Synthetic oligonucleotide
  Antisense strand to SEQ ID NO: 2126520
uauuuagcaaggaacgauc

SEQ ID NO: 2126522 - RNA, 19 nt, Artificial Sequence
  Description of Artificial Sequence: Synthetic oligonucleotide
  Sense strand starting at position 2680 of SEQ ID NO: 1882507
uuuaauagauggcaucaga

SEQ ID NO: 2126523 - RNA, 19 nt, Artificial Sequence
  Description of Artificial Sequence: Synthetic oligonucleotide
  Antisense strand to SEQ ID NO: 2126522
ucugaugccaucuauuaaa

SEQ ID NO: 2126524 - RNA, 19 nt, Artificial Sequence
  Description of Artificial Sequence: Synthetic oligonucleotide
  Sense strand starting at position 2696 of SEQ ID NO: 1882507
agaagugggcuccaaagua

SEQ ID NO: 2126525 - RNA, 19 nt, Artificial Sequence
  Description of Artificial Sequence: Synthetic oligonucleotide
  Antisense strand to SEQ ID NO: 2126524
uacuuuggagcccacuucu

SEQ ID NO: 2126526 - RNA, 19 nt, Artificial Sequence
  Description of Artificial Sequence: Synthetic oligonucleotide
  Sense strand starting at position 2740 of SEQ ID NO: 1882507
cugagugacuaagcgagau

SEQ ID NO: 2126527 - RNA, 19 nt, Artificial Sequence
  Description of Artificial Sequence: Synthetic oligonucleotide
  Antisense strand to SEQ ID NO: 2126526
aucucgcuuagucacucag

SEQ ID NO: 2126528 - RNA, 19 nt, Artificial Sequence
  Description of Artificial Sequence: Synthetic oligonucleotide
  Sense strand starting at position 2989 of SEQ ID NO: 1882507
aaagcuaucccuuguagga

SEQ ID NO: 2126529 - RNA, 19 nt, Artificial Sequence
  Description of Artificial Sequence: Synthetic oligonucleotide
  Antisense strand to SEQ ID NO: 2126528
uccuacaagggauagcuuu

SEQ ID NO: 2126530 - RNA, 19 nt, Artificial Sequence
  Description of Artificial Sequence: Synthetic oligonucleotide
  Sense strand starting at position 3153 of SEQ ID NO: 1882507
gaagucagcuauccgagaa

SEQ ID NO: 2126531 - RNA, 19 nt, Artificial Sequence
  Description of Artificial Sequence: Synthetic oligonucleotide
  Antisense strand to SEQ ID NO: 2126530
uucucggauagcugacuuc

SEQ ID NO: 2126532 - RNA, 19 nt, Artificial Sequence
  Description of Artificial Sequence: Synthetic oligonucleotide
  Sense strand starting at position 3938 of SEQ ID NO: 1882507
ucuccaaugucuucgagca

SEQ ID NO: 2126533 - RNA, 19 nt, Artificial Sequence
  Description of Artificial Sequence: Synthetic oligonucleotide
  Antisense strand to SEQ ID NO: 2126532
ugcucgaagacauuggaga

SEQ ID NO: 2126534 - RNA, 19 nt, Artificial Sequence
  Description of Artificial Sequence: Synthetic oligonucleotide
  Sense strand starting at position 3939 of SEQ ID NO: 1882507
cuccaaugucuucgagcaa

SEQ ID NO: 2126535 - RNA, 19 nt, Artificial Sequence
  Description of Artificial Sequence: Synthetic oligonucleotide
  Antisense strand to SEQ ID NO: 2126534
uugcucgaagacauuggag

SEQ ID NO: 2126536 - RNA, 19 nt, Artificial Sequence
  Description of Artificial Sequence: Synthetic oligonucleotide
  Sense strand starting at position 185 of SEQ ID NO: 1882508
guccuagacucuucuuaug

SEQ ID NO: 2126537 - RNA, 19 nt, Artificial Sequence
  Description of Artificial Sequence: Synthetic oligonucleotide
  Antisense strand to SEQ ID NO: 2126536
cauaagaagagucuaggac

SEQ ID NO: 2126538 - RNA, 19 nt, Artificial Sequence
  Description of Artificial Sequence: Synthetic oligonucleotide
  Sense strand starting at position 202 of SEQ ID NO: 1882508
ugaagacacuagucauaug

SEQ ID NO: 2126539 - RNA, 19 nt, Artificial Sequence
  Description of Artificial Sequence: Synthetic oligonucleotide
  Antisense strand to SEQ ID NO: 2126538
cauaugacuagugucuuca

SEQ ID NO: 2126540 - RNA, 19 nt, Artificial Sequence
  Description of Artificial Sequence: Synthetic oligonucleotide
  Sense strand starting at position 255 of SEQ ID NO: 1882508
auaguuaccucuuuaaagg

SEQ ID NO: 2126541 - RNA, 19 nt, Artificial Sequence
  Description of Artificial Sequence: Synthetic oligonucleotide
  Antisense strand to SEQ ID NO: 2126540
ccuuuaaagagguaacuau

SEQ ID NO: 2126542 - RNA, 19 nt, Artificial Sequence
  Description of Artificial Sequence: Synthetic oligonucleotide
  Sense strand starting at position 310 of SEQ ID NO: 1882508
gggcuuaggcuuuaauaca

SEQ ID NO: 2126543 - RNA, 19 nt, Artificial Sequence
  Description of Artificial Sequence: Synthetic oligonucleotide
  Antisense strand to SEQ ID NO: 2126542
uguauuaaagccuaagccc

SEQ ID NO: 2126544 - RNA, 19 nt, Artificial Sequence
  Description of Artificial Sequence: Synthetic oligonucleotide
  Sense strand starting at position 414 of SEQ ID NO: 1882508
ggaacuauuccuuaguguu

SEQ ID NO: 2126545 - RNA, 19 nt, Artificial Sequence
  Description of Artificial Sequence: Synthetic oligonucleotide
  Antisense strand to SEQ ID NO: 2126544
aacacuaaggaauaguucc

SEQ ID NO: 2126546 - RNA, 19 nt, Artificial Sequence
  Description of Artificial Sequence: Synthetic oligonucleotide
  Sense strand starting at position 435 of SEQ ID NO: 1882508
cucucaugaccuggguauu

SEQ ID NO: 2126547 - RNA, 19 nt, Artificial Sequence
  Description of Artificial Sequence: Synthetic oligonucleotide
  Antisense strand to SEQ ID NO: 2126546
aauacccaggucaugagag

SEQ ID NO: 2126548 - RNA, 19 nt, Artificial Sequence
  Description of Artificial Sequence: Synthetic oligonucleotide
  Sense strand starting at position 460 of SEQ ID NO: 1882508
gcguauacaccuguuguuu

SEQ ID NO: 2126549 - RNA, 19 nt, Artificial Sequence
  Description of Artificial Sequence: Synthetic oligonucleotide
  Antisense strand to SEQ ID NO: 2126548
aaacaacagguguauacgc

SEQ ID NO: 2126550 - RNA, 19 nt, Artificial Sequence
  Description of Artificial Sequence: Synthetic oligonucleotide
  Sense strand starting at position 850 of SEQ ID NO: 1882508
ucuuauuugugacaaugag

SEQ ID NO: 2126551 - RNA, 19 nt, Artificial Sequence
  Description of Artificial Sequence: Synthetic oligonucleotide
  Antisense strand to SEQ ID NO: 2126550
cucauugucacaaauaaga

SEQ ID NO: 2126552 - RNA, 19 nt, Artificial Sequence
  Description of Artificial Sequence: Synthetic oligonucleotide
  Sense strand starting at position 1058 of SEQ ID NO: 1882508
ucuuucugucucuacgaua

SEQ ID NO: 2126553 - RNA, 19 nt, Artificial Sequence
  Description of Artificial Sequence: Synthetic oligonucleotide
  Antisense strand to SEQ ID NO: 2126552
uaucguagagacagaaaga

SEQ ID NO: 2126554 - RNA, 19 nt, Artificial Sequence
  Description of Artificial Sequence: Synthetic oligonucleotide
  Sense strand starting at position 1063 of SEQ ID NO: 1882508
cugucucuacgauaccuaa

SEQ ID NO: 2126555 - RNA, 19 nt, Artificial Sequence
  Description of Artificial Sequence: Synthetic oligonucleotide
  Antisense strand to SEQ ID NO: 2126554
uuagguaucguagagacag

SEQ ID NO: 2126556 - RNA, 19 nt, Artificial Sequence
  Description of Artificial Sequence: Synthetic oligonucleotide
  Sense strand starting at position 1330 of SEQ ID NO: 1882508
ugagcuaucaguugagaau

SEQ ID NO: 2126557 - RNA, 19 nt, Artificial Sequence
  Description of Artificial Sequence: Synthetic oligonucleotide
  Antisense strand to SEQ ID NO: 2126556
auucucaacugauagcuca

SEQ ID NO: 2126558 - RNA, 19 nt, Artificial Sequence
  Description of Artificial Sequence: Synthetic oligonucleotide
  Sense strand starting at position 1331 of SEQ ID NO: 1882508
gagcuaucaguugagaauu

SEQ ID NO: 2126559 - RNA, 19 nt, Artificial Sequence
  Description of Artificial Sequence: Synthetic oligonucleotide
  Antisense strand to SEQ ID NO: 2126558
aauucucaacugauagcuc

SEQ ID NO: 2126560 - RNA, 19 nt, Artificial Sequence
  Description of Artificial Sequence: Synthetic oligonucleotide
  Sense strand starting at position 1420 of SEQ ID NO: 1882508
uuuauauugccgcuuugua

SEQ ID NO: 2126561 - RNA, 19 nt, Artificial Sequence
  Description of Artificial Sequence: Synthetic oligonucleotide
  Antisense strand to SEQ ID NO: 2126560
uacaaagcggcaauauaaa

SEQ ID NO: 2126562 - RNA, 19 nt, Artificial Sequence
  Description of Artificial Sequence: Synthetic oligonucleotide
  Sense strand starting at position 1421 of SEQ ID NO: 1882508
uuauauugccgcuuuguau

SEQ ID NO: 2126563 - RNA, 19 nt, Artificial Sequence
  Description of Artificial Sequence: Synthetic oligonucleotide
  Antisense strand to SEQ ID NO: 2126562
auacaaagcggcaauauaa

SEQ ID NO: 2126564 - RNA, 19 nt, Artificial Sequence
  Description of Artificial Sequence: Synthetic oligonucleotide
  Sense strand starting at position 1422 of SEQ ID NO: 1882508
uauauugccgcuuuguauu

SEQ ID NO: 2126565 - RNA, 19 nt, Artificial Sequence
  Description of Artificial Sequence: Synthetic oligonucleotide
  Antisense strand to SEQ ID NO: 2126564
aauacaaagcggcaauaua

SEQ ID NO: 2126566 - RNA, 19 nt, Artificial Sequence
  Description of Artificial Sequence: Synthetic oligonucleotide
  Sense strand starting at position 1495 of SEQ ID NO: 1882508
ugaguaagaauauguguga

SEQ ID NO: 2126567 - RNA, 19 nt, Artificial Sequence
  Description of Artificial Sequence: Synthetic oligonucleotide
  Antisense strand to SEQ ID NO: 2126566
ucacacauauucuuacuca

SEQ ID NO: 2126568 - RNA, 19 nt, Artificial Sequence
  Description of Artificial Sequence: Synthetic oligonucleotide
  Sense strand starting at position 1496 of SEQ ID NO: 1882508
gaguaagaauaugugugaa

SEQ ID NO: 2126569 - RNA, 19 nt, Artificial Sequence
  Description of Artificial Sequence: Synthetic oligonucleotide
  Antisense strand to SEQ ID NO: 2126568
uucacacauauucuuacuc

SEQ ID NO: 2126570 - RNA, 19 nt, Artificial Sequence
  Description of Artificial Sequence: Synthetic oligonucleotide
  Sense strand starting at position 1498 of SEQ ID NO: 1882508
guaagaauaugugugaaag

SEQ ID NO: 2126571 - RNA, 19 nt, Artificial Sequence
  Description of Artificial Sequence: Synthetic oligonucleotide
  Antisense strand to SEQ ID NO: 2126570
cuuucacacauauucuuac

SEQ ID NO: 2126572 - RNA, 19 nt, Artificial Sequence
  Description of Artificial Sequence: Synthetic oligonucleotide
  Sense strand starting at position 1499 of SEQ ID NO: 1882508
uaagaauaugugugaaagu

SEQ ID NO: 2126573 - RNA, 19 nt, Artificial Sequence
  Description of Artificial Sequence: Synthetic oligonucleotide
  Antisense strand to SEQ ID NO: 2126572
acuuucacacauauucuua

SEQ ID NO: 2126574 - RNA, 19 nt, Artificial Sequence
  Description of Artificial Sequence: Synthetic oligonucleotide
  Sense strand starting at position 1558 of SEQ ID NO: 1882508
guccauguaucccuugaaa

SEQ ID NO: 2126575 - RNA, 19 nt, Artificial Sequence
  Description of Artificial Sequence: Synthetic oligonucleotide
  Antisense strand to SEQ ID NO: 2126574
uuucaagggauacauggac

SEQ ID NO: 2126576 - RNA, 19 nt, Artificial Sequence
  Description of Artificial Sequence: Synthetic oligonucleotide
  Sense strand starting at position 1637 of SEQ ID NO: 1882508
uuucuaagucacuaauugu

SEQ ID NO: 2126577 - RNA, 19 nt, Artificial Sequence
  Description of Artificial Sequence: Synthetic oligonucleotide
  Antisense strand to SEQ ID NO: 2126576
acaauuagugacuuagaaa

SEQ ID NO: 2126578 - RNA, 19 nt, Artificial Sequence
  Description of Artificial Sequence: Synthetic oligonucleotide
  Sense strand starting at position 1657 of SEQ ID NO: 1882508
guaucauaauaccuggauu

SEQ ID NO: 2126579 - RNA, 19 nt, Artificial Sequence
  Description of Artificial Sequence: Synthetic oligonucleotide
  Antisense strand to SEQ ID NO: 2126578
aauccagguauuaugauac

SEQ ID NO: 2126580 - RNA, 19 nt, Artificial Sequence
  Description of Artificial Sequence: Synthetic oligonucleotide
  Sense strand starting at position 1796 of SEQ ID NO: 1882508
cuaguauuaguugauauug

SEQ ID NO: 2126581 - RNA, 19 nt, Artificial Sequence
  Description of Artificial Sequence: Synthetic oligonucleotide
  Antisense strand to SEQ ID NO: 2126580
caauaucaacuaauacuag

SEQ ID NO: 2126582 - RNA, 19 nt, Artificial Sequence
  Description of Artificial Sequence: Synthetic oligonucleotide
  Sense strand starting at position 1895 of SEQ ID NO: 1882508
gcagcaguucugucgagua

SEQ ID NO: 2126583 - RNA, 19 nt, Artificial Sequence
  Description of Artificial Sequence: Synthetic oligonucleotide
  Antisense strand to SEQ ID NO: 2126582
uacucgacagaacugcugc

SEQ ID NO: 2126584 - RNA, 19 nt, Artificial Sequence
  Description of Artificial Sequence: Synthetic oligonucleotide
  Sense strand starting at position 1927 of SEQ ID NO: 1882508
gaccaaagcugguuaccuu

SEQ ID NO: 2126585 - RNA, 19 nt, Artificial Sequence
  Description of Artificial Sequence: Synthetic oligonucleotide
  Antisense strand to SEQ ID NO: 2126584
aagguaaccagcuuugguc

SEQ ID NO: 2126586 - RNA, 19 nt, Artificial Sequence
  Description of Artificial Sequence: Synthetic oligonucleotide
  Sense strand starting at position 2341 of SEQ ID NO: 1882508
gcugauuaccuuuaaggua

SEQ ID NO: 2126587 - RNA, 19 nt, Artificial Sequence
  Description of Artificial Sequence: Synthetic oligonucleotide
  Antisense strand to SEQ ID NO: 2126586
uaccuuaaagguaaucagc

SEQ ID NO: 2126588 - RNA, 19 nt, Artificial Sequence
  Description of Artificial Sequence: Synthetic oligonucleotide
  Sense strand starting at position 3034 of SEQ ID NO: 1882508
gauagcaucgcguuucuuu

SEQ ID NO: 2126589 - RNA, 19 nt, Artificial Sequence
  Description of Artificial Sequence: Synthetic oligonucleotide
  Antisense strand to SEQ ID NO: 2126588
aaagaaacgcgaugcuauc

SEQ ID NO: 2126590 - RNA, 19 nt, Artificial Sequence
  Description of Artificial Sequence: Synthetic oligonucleotide
  Sense strand starting at position 3035 of SEQ ID NO: 1882508
auagcaucgcguuucuuua

SEQ ID NO: 2126591 - RNA, 19 nt, Artificial Sequence
  Description of Artificial Sequence: Synthetic oligonucleotide
  Antisense strand to SEQ ID NO: 2126590
uaaagaaacgcgaugcuau

SEQ ID NO: 2126592 - RNA, 19 nt, Artificial Sequence
  Description of Artificial Sequence: Synthetic oligonucleotide
  Sense strand starting at position 3161 of SEQ ID NO: 1882508
gguuguucuugagcaauuu

SEQ ID NO: 2126593 - RNA, 19 nt, Artificial Sequence
  Description of Artificial Sequence: Synthetic oligonucleotide
  Antisense strand to SEQ ID NO: 2126592
aaauugcucaagaacaacc

SEQ ID NO: 2126594 - RNA, 19 nt, Artificial Sequence
  Description of Artificial Sequence: Synthetic oligonucleotide
  Sense strand starting at position 3241 of SEQ ID NO: 1882508
guauuaugcguugucccaa

SEQ ID NO: 2126595 - RNA, 19 nt, Artificial Sequence
  Description of Artificial Sequence: Synthetic oligonucleotide
  Antisense strand to SEQ ID NO: 2126594
uugggacaacgcauaauac

SEQ ID NO: 2126596 - RNA, 19 nt, Artificial Sequence
  Description of Artificial Sequence: Synthetic oligonucleotide
  Sense strand starting at position 3295 of SEQ ID NO: 1882508
auguucuacuuucuagaga

SEQ ID NO: 2126597 - RNA, 19 nt, Artificial Sequence
  Description of Artificial Sequence: Synthetic oligonucleotide
  Antisense strand to SEQ ID NO: 2126596
ucucuagaaaguagaacau

SEQ ID NO: 2126598 - RNA, 19 nt, Artificial Sequence
  Description of Artificial Sequence: Synthetic oligonucleotide
  Sense strand starting at position 3427 of SEQ ID NO: 1882508
cagaguauuucugcuguug

SEQ ID NO: 2126599 - RNA, 19 nt, Artificial Sequence
  Description of Artificial Sequence: Synthetic oligonucleotide
  Antisense strand to SEQ ID NO: 2126598
caacagcagaaauacucug

SEQ ID NO: 2126600 - RNA, 19 nt, Artificial Sequence
  Description of Artificial Sequence: Synthetic oligonucleotide
  Sense strand starting at position 3436 of SEQ ID NO: 1882508
ucugcuguugaacaaauua

SEQ ID NO: 2126601 - RNA, 19 nt, Artificial Sequence
  Description of Artificial Sequence: Synthetic oligonucleotide
  Antisense strand to SEQ ID NO: 2126600
uaauuuguucaacagcaga

SEQ ID NO: 2126602 - RNA, 19 nt, Artificial Sequence
  Description of Artificial Sequence: Synthetic oligonucleotide
  Sense strand starting at position 3541 of SEQ ID NO: 1882508
ggucuuguuugauuaagag

SEQ ID NO: 2126603 - RNA, 19 nt, Artificial Sequence
  Description of Artificial Sequence: Synthetic oligonucleotide
  Antisense strand to SEQ ID NO: 2126602
cucuuaaucaaacaagacc

SEQ ID NO: 2126604 - RNA, 19 nt, Artificial Sequence
  Description of Artificial Sequence: Synthetic oligonucleotide
  Sense strand starting at position 3553 of SEQ ID NO: 1882508
uuaagagccuaucuaagaa

SEQ ID NO: 2126605 - RNA, 19 nt, Artificial Sequence
  Description of Artificial Sequence: Synthetic oligonucleotide
  Antisense strand to SEQ ID NO: 2126604
uucuuagauaggcucuuaa

SEQ ID NO: 2126606 - RNA, 19 nt, Artificial Sequence
  Description of Artificial Sequence: Synthetic oligonucleotide
  Sense strand starting at position 3711 of SEQ ID NO: 1882508
gcuaacauacugggaagua

SEQ ID NO: 2126607 - RNA, 19 nt, Artificial Sequence
  Description of Artificial Sequence: Synthetic oligonucleotide
  Antisense strand to SEQ ID NO: 2126606
uacuucccaguauguuagc

SEQ ID NO: 2126608 - RNA, 19 nt, Artificial Sequence
  Description of Artificial Sequence: Synthetic oligonucleotide
  Sense strand starting at position 3831 of SEQ ID NO: 1882508
acaguaguaucaguuacau

SEQ ID NO: 2126609 - RNA, 19 nt, Artificial Sequence
  Description of Artificial Sequence: Synthetic oligonucleotide
  Antisense strand to SEQ ID NO: 2126608
auguaacugauacuacugu

SEQ ID NO: 2126610 - RNA, 19 nt, Artificial Sequence
  Description of Artificial Sequence: Synthetic oligonucleotide
  Sense strand starting at position 3879 of SEQ ID NO: 1882508
acagauuagcucuguacau

SEQ ID NO: 2126611 - RNA, 19 nt, Artificial Sequence
  Description of Artificial Sequence: Synthetic oligonucleotide
  Antisense strand to SEQ ID NO: 2126610
auguacagagcuaaucugu

SEQ ID NO: 2126612 - RNA, 19 nt, Artificial Sequence
  Description of Artificial Sequence: Synthetic oligonucleotide
  Sense strand starting at position 3955 of SEQ ID NO: 1882508
gaaauuaguugguuaggga

SEQ ID NO: 2126613 - RNA, 19 nt, Artificial Sequence
  Description of Artificial Sequence: Synthetic oligonucleotide
  Antisense strand to SEQ ID NO: 2126612
ucccuaaccaacuaauuuc

SEQ ID NO: 2126614 - RNA, 19 nt, Artificial Sequence
  Description of Artificial Sequence: Synthetic oligonucleotide
  Sense strand starting at position 3979 of SEQ ID NO: 1882508
ugaauaagugguugaaccu

SEQ ID NO: 2126615 - RNA, 19 nt, Artificial Sequence
  Description of Artificial Sequence: Synthetic oligonucleotide
  Antisense strand to SEQ ID NO: 2126614
agguucaaccacuuauuca

SEQ ID NO: 2126616 - RNA, 19 nt, Artificial Sequence
  Description of Artificial Sequence: Synthetic oligonucleotide
  Sense strand starting at position 58 of SEQ ID NO: 1882509
accucuaugccagaugucu

SEQ ID NO: 2126617 - RNA, 19 nt, Artificial Sequence
  Description of Artificial Sequence: Synthetic oligonucleotide
  Antisense strand to SEQ ID NO: 2126616
agacaucuggcauagaggu

SEQ ID NO: 2126618 - RNA, 19 nt, Artificial Sequence
  Description of Artificial Sequence: Synthetic oligonucleotide
  Sense strand starting at position 92 of SEQ ID NO: 1882509
agcuuaaugucuccaggga

SEQ ID NO: 2126619 - RNA, 19 nt, Artificial Sequence
  Description of Artificial Sequence: Synthetic oligonucleotide
  Antisense strand to SEQ ID NO: 2126618
ucccuggagacauuaagcu

SEQ ID NO: 2126620 - RNA, 19 nt, Artificial Sequence
  Description of Artificial Sequence: Synthetic oligonucleotide
  Sense strand starting at position 93 of SEQ ID NO: 1882509
gcuuaaugucuccagggau

SEQ ID NO: 2126621 - RNA, 19 nt, Artificial Sequence
  Description of Artificial Sequence: Synthetic oligonucleotide
  Antisense strand to SEQ ID NO: 2126620
aucccuggagacauuaagc

SEQ ID NO: 2126622 - RNA, 19 nt, Artificial Sequence
  Description of Artificial Sequence: Synthetic oligonucleotide
  Sense strand starting at position 130 of SEQ ID NO: 1882509
ggaagauagaggugcuuga

SEQ ID NO: 2126623 - RNA, 19 nt, Artificial Sequence
  Description of Artificial Sequence: Synthetic oligonucleotide
  Antisense strand to SEQ ID NO: 2126622
ucaagcaccucuaucuucc

SEQ ID NO: 2126624 - RNA, 19 nt, Artificial Sequence
  Description of Artificial Sequence: Synthetic oligonucleotide
  Sense strand starting at position 199 of SEQ ID NO: 1882509
gaugauggccauugaagag

SEQ ID NO: 2126625 - RNA, 19 nt, Artificial Sequence
  Description of Artificial Sequence: Synthetic oligonucleotide
  Antisense strand to SEQ ID NO: 2126624
cucuucaauggccaucauc

SEQ ID NO: 2126626 - RNA, 19 nt, Artificial Sequence
  Description of Artificial Sequence: Synthetic oligonucleotide
  Sense strand starting at position 214 of SEQ ID NO: 1882509
agagauaguuuauuacuca

SEQ ID NO: 2126627 - RNA, 19 nt, Artificial Sequence
  Description of Artificial Sequence: Synthetic oligonucleotide
  Antisense strand to SEQ ID NO: 2126626
ugaguaauaaacuaucucu

SEQ ID NO: 2126628 - RNA, 19 nt, Artificial Sequence
  Description of Artificial Sequence: Synthetic oligonucleotide
  Sense strand starting at position 317 of SEQ ID NO: 1882509
ggcagaaggcuuuauugug

SEQ ID NO: 2126629 - RNA, 19 nt, Artificial Sequence
  Description of Artificial Sequence: Synthetic oligonucleotide
  Antisense strand to SEQ ID NO: 2126628
cacaauaaagccuucugcc

SEQ ID NO: 2126630 - RNA, 19 nt, Artificial Sequence
  Description of Artificial Sequence: Synthetic oligonucleotide
  Sense strand starting at position 389 of SEQ ID NO: 1882509
ggcucugggccauagaauu

SEQ ID NO: 2126631 - RNA, 19 nt, Artificial Sequence
  Description of Artificial Sequence: Synthetic oligonucleotide
  Antisense strand to SEQ ID NO: 2126630
aauucuauggcccagagcc

SEQ ID NO: 2126632 - RNA, 19 nt, Artificial Sequence
  Description of Artificial Sequence: Synthetic oligonucleotide
  Sense strand starting at position 400 of SEQ ID NO: 1882509
auagaauugccuuaguugu

SEQ ID NO: 2126633 - RNA, 19 nt, Artificial Sequence
  Description of Artificial Sequence: Synthetic oligonucleotide
  Antisense strand to SEQ ID NO: 2126632
acaacuaaggcaauucuau

SEQ ID NO: 2126634 - RNA, 19 nt, Artificial Sequence
  Description of Artificial Sequence: Synthetic oligonucleotide
  Sense strand starting at position 517 of SEQ ID NO: 1882509
uuggcuugaaugugaaaga

SEQ ID NO: 2126635 - RNA, 19 nt, Artificial Sequence
  Description of Artificial Sequence: Synthetic oligonucleotide
  Antisense strand to SEQ ID NO: 2126634
ucuuucacauucaagccaa

SEQ ID NO: 2126636 - RNA, 19 nt, Artificial Sequence
  Description of Artificial Sequence: Synthetic oligonucleotide
  Sense strand starting at position 524 of SEQ ID NO: 1882509
gaaugugaaagauguguuu

SEQ ID NO: 2126637 - RNA, 19 nt, Artificial Sequence
  Description of Artificial Sequence: Synthetic oligonucleotide
  Antisense strand to SEQ ID NO: 2126636
aaacacaucuuucacauuc

SEQ ID NO: 2126638 - RNA, 19 nt, Artificial Sequence
  Description of Artificial Sequence: Synthetic oligonucleotide
  Sense strand starting at position 545 of SEQ ID NO: 1882509
aggugaauccuguacuguc

SEQ ID NO: 2126639 - RNA, 19 nt, Artificial Sequence
  Description of Artificial Sequence: Synthetic oligonucleotide
  Antisense strand to SEQ ID NO: 2126638
gacaguacaggauucaccu

SEQ ID NO: 2126640 - RNA, 19 nt, Artificial Sequence
  Description of Artificial Sequence: Synthetic oligonucleotide
  Sense strand starting at position 655 of SEQ ID NO: 1882509
uuggcuauuccagagagcu

SEQ ID NO: 2126641 - RNA, 19 nt, Artificial Sequence
  Description of Artificial Sequence: Synthetic oligonucleotide
  Antisense strand to SEQ ID NO: 2126640
agcucucuggaauagccaa

SEQ ID NO: 2126642 - RNA, 19 nt, Artificial Sequence
  Description of Artificial Sequence: Synthetic oligonucleotide
  Sense strand starting at position 657 of SEQ ID NO: 1882509
ggcuauuccagagagcuca

SEQ ID NO: 2126643 - RNA, 19 nt, Artificial Sequence
  Description of Artificial Sequence: Synthetic oligonucleotide
  Antisense strand to SEQ ID NO: 2126642
ugagcucucuggaauagcc

SEQ ID NO: 2126644 - RNA, 19 nt, Artificial Sequence
  Description of Artificial Sequence: Synthetic oligonucleotide
  Sense strand starting at position 673 of SEQ ID NO: 1882509
ucaugcaaagaugguauua

SEQ ID NO: 2126645 - RNA, 19 nt, Artificial Sequence
  Description of Artificial Sequence: Synthetic oligonucleotide
  Antisense strand to SEQ ID NO: 2126644
uaauaccaucuuugcauga

SEQ ID NO: 2126646 - RNA, 19 nt, Artificial Sequence
  Description of Artificial Sequence: Synthetic oligonucleotide
  Sense strand starting at position 797 of SEQ ID NO: 1882509
cacaguuagguauaagcaa

SEQ ID NO: 2126647 - RNA, 19 nt, Artificial Sequence
  Description of Artificial Sequence: Synthetic oligonucleotide
  Antisense strand to SEQ ID NO: 2126646
uugcuuauaccuaacugug

SEQ ID NO: 2126648 - RNA, 19 nt, Artificial Sequence
  Description of Artificial Sequence: Synthetic oligonucleotide
  Sense strand starting at position 962 of SEQ ID NO: 1882509
cccagagcaugucucauaa

SEQ ID NO: 2126649 - RNA, 19 nt, Artificial Sequence
  Description of Artificial Sequence: Synthetic oligonucleotide
  Antisense strand to SEQ ID NO: 2126648
uuaugagacaugcucuggg

SEQ ID NO: 2126650 - RNA, 19 nt, Artificial Sequence
  Description of Artificial Sequence: Synthetic oligonucleotide
  Sense strand starting at position 986 of SEQ ID NO: 1882509
aagucagauucuguugacu

SEQ ID NO: 2126651 - RNA, 19 nt, Artificial Sequence
  Description of Artificial Sequence: Synthetic oligonucleotide
  Antisense strand to SEQ ID NO: 2126650
agucaacagaaucugacuu

SEQ ID NO: 2126652 - RNA, 19 nt, Artificial Sequence
  Description of Artificial Sequence: Synthetic oligonucleotide
  Sense strand starting at position 1150 of SEQ ID NO: 1882509
gcacguuuccaggugccau

SEQ ID NO: 2126653 - RNA, 19 nt, Artificial Sequence
  Description of Artificial Sequence: Synthetic oligonucleotide
  Antisense strand to SEQ ID NO: 2126652
auggcaccuggaaacgugc

SEQ ID NO: 2126654 - RNA, 19 nt, Artificial Sequence
  Description of Artificial Sequence: Synthetic oligonucleotide
  Sense strand starting at position 1290 of SEQ ID NO: 1882509
uagggauucuaacucagua

SEQ ID NO: 2126655 - RNA, 19 nt, Artificial Sequence
  Description of Artificial Sequence: Synthetic oligonucleotide
  Antisense strand to SEQ ID NO: 2126654
uacugaguuagaaucccua

SEQ ID NO: 2126656 - RNA, 19 nt, Artificial Sequence
  Description of Artificial Sequence: Synthetic oligonucleotide
  Sense strand starting at position 1374 of SEQ ID NO: 1882509
ccgcccugagacugaauaa

SEQ ID NO: 2126657 - RNA, 19 nt, Artificial Sequence
  Description of Artificial Sequence: Synthetic oligonucleotide
  Antisense strand to SEQ ID NO: 2126656
uuauucagucucagggcgg

SEQ ID NO: 2126658 - RNA, 19 nt, Artificial Sequence
  Description of Artificial Sequence: Synthetic oligonucleotide
  Sense strand starting at position 1399 of SEQ ID NO: 1882509
ugaugaacauucucacugu

SEQ ID NO: 2126659 - RNA, 19 nt, Artificial Sequence
  Description of Artificial Sequence: Synthetic oligonucleotide
  Antisense strand to SEQ ID NO: 2126658
acagugagaauguucauca

SEQ ID NO: 2126660 - RNA, 19 nt, Artificial Sequence
  Description of Artificial Sequence: Synthetic oligonucleotide
  Sense strand starting at position 1434 of SEQ ID NO: 1882509
ggagaacuggccgaagagu

SEQ ID NO: 2126661 - RNA, 19 nt, Artificial Sequence
  Description of Artificial Sequence: Synthetic oligonucleotide
  Antisense strand to SEQ ID NO: 2126660
acucuucggccaguucucc

SEQ ID NO: 2126662 - RNA, 19 nt, Artificial Sequence
  Description of Artificial Sequence: Synthetic oligonucleotide
  Sense strand starting at position 1447 of SEQ ID NO: 1882509
aagaguuauuuggccagcu

SEQ ID NO: 2126663 - RNA, 19 nt, Artificial Sequence
  Description of Artificial Sequence: Synthetic oligonucleotide
  Antisense strand to SEQ ID NO: 2126662
agcuggccaaauaacucuu

SEQ ID NO: 2126664 - RNA, 19 nt, Artificial Sequence
  Description of Artificial Sequence: Synthetic oligonucleotide
  Sense strand starting at position 1448 of SEQ ID NO: 1882509
agaguuauuuggccagcuu

SEQ ID NO: 2126665 - RNA, 19 nt, Artificial Sequence
  Description of Artificial Sequence: Synthetic oligonucleotide
  Antisense strand to SEQ ID NO: 2126664
aagcuggccaaauaacucu

SEQ ID NO: 2126666 - RNA, 19 nt, Artificial Sequence
  Description of Artificial Sequence: Synthetic oligonucleotide
  Sense strand starting at position 2311 of SEQ ID NO: 1882509
gcuuuaguuccagaaguac

SEQ ID NO: 2126667 - RNA, 19 nt, Artificial Sequence
  Description of Artificial Sequence: Synthetic oligonucleotide
  Antisense strand to SEQ ID NO: 2126666
guacuucuggaacuaaagc

SEQ ID NO: 2126668 - RNA, 19 nt, Artificial Sequence
  Description of Artificial Sequence: Synthetic oligonucleotide
  Sense strand starting at position 2479 of SEQ ID NO: 1882509
agguuucucucauuuguca

SEQ ID NO: 2126669 - RNA, 19 nt, Artificial Sequence
  Description of Artificial Sequence: Synthetic oligonucleotide
  Antisense strand to SEQ ID NO: 2126668
ugacaaaugagagaaaccu

SEQ ID NO: 2126670 - RNA, 19 nt, Artificial Sequence
  Description of Artificial Sequence: Synthetic oligonucleotide
  Sense strand starting at position 2563 of SEQ ID NO: 1882509
cccugugaucuauaaaugc

SEQ ID NO: 2126671 - RNA, 19 nt, Artificial Sequence
  Description of Artificial Sequence: Synthetic oligonucleotide
  Antisense strand to SEQ ID NO: 2126670
gcauuuauagaucacaggg

SEQ ID NO: 2126672 - RNA, 19 nt, Artificial Sequence
  Description of Artificial Sequence: Synthetic oligonucleotide
  Sense strand starting at position 2609 of SEQ ID NO: 1882509
uguaaagagaguugaguga

SEQ ID NO: 2126673 - RNA, 19 nt, Artificial Sequence
  Description of Artificial Sequence: Synthetic oligonucleotide
  Antisense strand to SEQ ID NO: 2126672
ucacucaacucucuuuaca

SEQ ID NO: 2126674 - RNA, 19 nt, Artificial Sequence
  Description of Artificial Sequence: Synthetic oligonucleotide
  Sense strand starting at position 2665 of SEQ ID NO: 1882509
uucuguagccuggacaaau

SEQ ID NO: 2126675 - RNA, 19 nt, Artificial Sequence
  Description of Artificial Sequence: Synthetic oligonucleotide
  Antisense strand to SEQ ID NO: 2126674
auuuguccaggcuacagaa

SEQ ID NO: 2126676 - RNA, 19 nt, Artificial Sequence
  Description of Artificial Sequence: Synthetic oligonucleotide
  Sense strand starting at position 2746 of SEQ ID NO: 1882509
gcauuugugcaaggaaucu

SEQ ID NO: 2126677 - RNA, 19 nt, Artificial Sequence
  Description of Artificial Sequence: Synthetic oligonucleotide
  Antisense strand to SEQ ID NO: 2126676
agauuccuugcacaaaugc

SEQ ID NO: 2126678 - RNA, 19 nt, Artificial Sequence
  Description of Artificial Sequence: Synthetic oligonucleotide
  Sense strand starting at position 2803 of SEQ ID NO: 1882509
cagaacaauguggguuuaa

SEQ ID NO: 2126679 - RNA, 19 nt, Artificial Sequence
  Description of Artificial Sequence: Synthetic oligonucleotide
  Antisense strand to SEQ ID NO: 2126678
uuaaacccacauuguucug

SEQ ID NO: 2126680 - RNA, 19 nt, Artificial Sequence
  Description of Artificial Sequence: Synthetic oligonucleotide
  Sense strand starting at position 2804 of SEQ ID NO: 1882509
agaacaauguggguuuaau

SEQ ID NO: 2126681 - RNA, 19 nt, Artificial Sequence
  Description of Artificial Sequence: Synthetic oligonucleotide
  Antisense strand to SEQ ID NO: 2126680
auuaaacccacauuguucu

SEQ ID NO: 2126682 - RNA, 19 nt, Artificial Sequence
  Description of Artificial Sequence: Synthetic oligonucleotide
  Sense strand starting at position 2818 of SEQ ID NO: 1882509
uuaauuaagguuuagagca

SEQ ID NO: 2126683 - RNA, 19 nt, Artificial Sequence
  Description of Artificial Sequence: Synthetic oligonucleotide
  Antisense strand to SEQ ID NO: 2126682
ugcucuaaaccuuaauuaa

SEQ ID NO: 2126684 - RNA, 19 nt, Artificial Sequence
  Description of Artificial Sequence: Synthetic oligonucleotide
  Sense strand starting at position 2888 of SEQ ID NO: 1882509
gguaauagauuauugacca

SEQ ID NO: 2126685 - RNA, 19 nt, Artificial Sequence
  Description of Artificial Sequence: Synthetic oligonucleotide
  Antisense strand to SEQ ID NO: 2126684
uggucaauaaucuauuacc

SEQ ID NO: 2126686 - RNA, 19 nt, Artificial Sequence
  Description of Artificial Sequence: Synthetic oligonucleotide
  Sense strand starting at position 2975 of SEQ ID NO: 1882509
gacaguaggcgauaucucu

SEQ ID NO: 2126687 - RNA, 19 nt, Artificial Sequence
  Description of Artificial Sequence: Synthetic oligonucleotide
  Antisense strand to SEQ ID NO: 2126686
agagauaucgccuacuguc

SEQ ID NO: 2126688 - RNA, 19 nt, Artificial Sequence
  Description of Artificial Sequence: Synthetic oligonucleotide
  Sense strand starting at position 2983 of SEQ ID NO: 1882509
gcgauaucucugucagccu

SEQ ID NO: 2126689 - RNA, 19 nt, Artificial Sequence
  Description of Artificial Sequence: Synthetic oligonucleotide
  Antisense strand to SEQ ID NO: 2126688
aggcugacagagauaucgc

SEQ ID NO: 2126690 - RNA, 19 nt, Artificial Sequence
  Description of Artificial Sequence: Synthetic oligonucleotide
  Sense strand starting at position 3071 of SEQ ID NO: 1882509
accugauguucuguuaaag

SEQ ID NO: 2126691 - RNA, 19 nt, Artificial Sequence
  Description of Artificial Sequence: Synthetic oligonucleotide
  Antisense strand to SEQ ID NO: 2126690
cuuuaacagaacaucaggu

SEQ ID NO: 2126692 - RNA, 19 nt, Artificial Sequence
  Description of Artificial Sequence: Synthetic oligonucleotide
  Sense strand starting at position 3131 of SEQ ID NO: 1882509
gggugagauuaauuaaccu

SEQ ID NO: 2126693 - RNA, 19 nt, Artificial Sequence
  Description of Artificial Sequence: Synthetic oligonucleotide
  Antisense strand to SEQ ID NO: 2126692
agguuaauuaaucucaccc

SEQ ID NO: 2126694 - RNA, 19 nt, Artificial Sequence
  Description of Artificial Sequence: Synthetic oligonucleotide
  Sense strand starting at position 3454 of SEQ ID NO: 1882509
gggugaggcuuucuggaau

SEQ ID NO: 2126695 - RNA, 19 nt, Artificial Sequence
  Description of Artificial Sequence: Synthetic oligonucleotide
  Antisense strand to SEQ ID NO: 2126694
auuccagaaagccucaccc

SEQ ID NO: 2126696 - RNA, 19 nt, Artificial Sequence
  Description of Artificial Sequence: Synthetic oligonucleotide
  Sense strand starting at position 28 of SEQ ID NO: 1882510
ugaugaucucagggauggu

SEQ ID NO: 2126697 - RNA, 19 nt, Artificial Sequence
  Description of Artificial Sequence: Synthetic oligonucleotide
  Antisense strand to SEQ ID NO: 2126696
accaucccugagaucauca

SEQ ID NO: 2126698 - RNA, 19 nt, Artificial Sequence
  Description of Artificial Sequence: Synthetic oligonucleotide
  Sense strand starting at position 211 of SEQ ID NO: 1882510
ggcaucaagacuugagaca

SEQ ID NO: 2126699 - RNA, 19 nt, Artificial Sequence
  Description of Artificial Sequence: Synthetic oligonucleotide
  Antisense strand to SEQ ID NO: 2126698
ugucucaagucuugaugcc

SEQ ID NO: 2126700 - RNA, 19 nt, Artificial Sequence
  Description of Artificial Sequence: Synthetic oligonucleotide
  Sense strand starting at position 359 of SEQ ID NO: 1882510
gguaaagaaugugcuggaa

SEQ ID NO: 2126701 - RNA, 19 nt, Artificial Sequence
  Description of Artificial Sequence: Synthetic oligonucleotide
  Antisense strand to SEQ ID NO: 2126700
uuccagcacauucuuuacc

SEQ ID NO: 2126702 - RNA, 19 nt, Artificial Sequence
  Description of Artificial Sequence: Synthetic oligonucleotide
  Sense strand starting at position 362 of SEQ ID NO: 1882510
aaagaaugugcuggaaauu

SEQ ID NO: 2126703 - RNA, 19 nt, Artificial Sequence
  Description of Artificial Sequence: Synthetic oligonucleotide
  Antisense strand to SEQ ID NO: 2126702
aauuuccagcacauucuuu

SEQ ID NO: 2126704 - RNA, 19 nt, Artificial Sequence
  Description of Artificial Sequence: Synthetic oligonucleotide
  Sense strand starting at position 389 of SEQ ID NO: 1882510
auugaagucucacuggaga

SEQ ID NO: 2126705 - RNA, 19 nt, Artificial Sequence
  Description of Artificial Sequence: Synthetic oligonucleotide
  Antisense strand to SEQ ID NO: 2126704
ucuccagugagacuucaau

SEQ ID NO: 2126706 - RNA, 19 nt, Artificial Sequence
  Description of Artificial Sequence: Synthetic oligonucleotide
  Sense strand starting at position 788 of SEQ ID NO: 1882510
agaagaccucugugccaaa

SEQ ID NO: 2126707 - RNA, 19 nt, Artificial Sequence
  Description of Artificial Sequence: Synthetic oligonucleotide
  Antisense strand to SEQ ID NO: 2126706
uuuggcacagaggucuucu

SEQ ID NO: 2126708 - RNA, 19 nt, Artificial Sequence
  Description of Artificial Sequence: Synthetic oligonucleotide
  Sense strand starting at position 865 of SEQ ID NO: 1882510
agccaaugagaauggcauu

SEQ ID NO: 2126709 - RNA, 19 nt, Artificial Sequence
  Description of Artificial Sequence: Synthetic oligonucleotide
  Antisense strand to SEQ ID NO: 2126708
aaugccauucucauuggcu

SEQ ID NO: 2126710 - RNA, 19 nt, Artificial Sequence
  Description of Artificial Sequence: Synthetic oligonucleotide
  Sense strand starting at position 931 of SEQ ID NO: 1882510
ugaggauggugaguucuau

SEQ ID NO: 2126711 - RNA, 19 nt, Artificial Sequence
  Description of Artificial Sequence: Synthetic oligonucleotide
  Antisense strand to SEQ ID NO: 2126710
auagaacucaccauccuca

SEQ ID NO: 2126712 - RNA, 19 nt, Artificial Sequence
  Description of Artificial Sequence: Synthetic oligonucleotide
  Sense strand starting at position 988 of SEQ ID NO: 1882510
cccacuguccaggauucua

SEQ ID NO: 2126713 - RNA, 19 nt, Artificial Sequence
  Description of Artificial Sequence: Synthetic oligonucleotide
  Antisense strand to SEQ ID NO: 2126712
uagaauccuggacaguggg

SEQ ID NO: 2126714 - RNA, 19 nt, Artificial Sequence
  Description of Artificial Sequence: Synthetic oligonucleotide
  Sense strand starting at position 1234 of SEQ ID NO: 1882510
uccuguggaaguuauugaa

SEQ ID NO: 2126715 - RNA, 19 nt, Artificial Sequence
  Description of Artificial Sequence: Synthetic oligonucleotide
  Antisense strand to SEQ ID NO: 2126714
uucaauaacuuccacagga

SEQ ID NO: 2126716 - RNA, 19 nt, Artificial Sequence
  Description of Artificial Sequence: Synthetic oligonucleotide
  Sense strand starting at position 1269 of SEQ ID NO: 1882510
ccaacaguuugagcacaga

SEQ ID NO: 2126717 - RNA, 19 nt, Artificial Sequence
  Description of Artificial Sequence: Synthetic oligonucleotide
  Antisense strand to SEQ ID NO: 2126716
ucugugcucaaacuguugg

SEQ ID NO: 2126718 - RNA, 19 nt, Artificial Sequence
  Description of Artificial Sequence: Synthetic oligonucleotide
  Sense strand starting at position 1984 of SEQ ID NO: 1882510
ccuauugaagugugagaua

SEQ ID NO: 2126719 - RNA, 19 nt, Artificial Sequence
  Description of Artificial Sequence: Synthetic oligonucleotide
  Antisense strand to SEQ ID NO: 2126718
uaucucacacuucaauagg

SEQ ID NO: 2126720 - RNA, 19 nt, Artificial Sequence
  Description of Artificial Sequence: Synthetic oligonucleotide
  Sense strand starting at position 2063 of SEQ ID NO: 1882510
cugagaacuaccuggguuu

SEQ ID NO: 2126721 - RNA, 19 nt, Artificial Sequence
  Description of Artificial Sequence: Synthetic oligonucleotide
  Antisense strand to SEQ ID NO: 2126720
aaacccagguaguucucag

SEQ ID NO: 2126722 - RNA, 19 nt, Artificial Sequence
  Description of Artificial Sequence: Synthetic oligonucleotide
  Sense strand starting at position 2128 of SEQ ID NO: 1882510
acuagaaagguuggucauc

SEQ ID NO: 2126723 - RNA, 19 nt, Artificial Sequence
  Description of Artificial Sequence: Synthetic oligonucleotide
  Antisense strand to SEQ ID NO: 2126722
gaugaccaaccuuucuagu

SEQ ID NO: 2126724 - RNA, 19 nt, Artificial Sequence
  Description of Artificial Sequence: Synthetic oligonucleotide
  Sense strand starting at position 2133 of SEQ ID NO: 1882510
aaagguuggucauccuaga

SEQ ID NO: 2126725 - RNA, 19 nt, Artificial Sequence
  Description of Artificial Sequence: Synthetic oligonucleotide
  Antisense strand to SEQ ID NO: 2126724
ucuaggaugaccaaccuuu

SEQ ID NO: 2126726 - RNA, 19 nt, Artificial Sequence
  Description of Artificial Sequence: Synthetic oligonucleotide
  Sense strand starting at position 2138 of SEQ ID NO: 1882510
uuggucauccuagacuagu

SEQ ID NO: 2126727 - RNA, 19 nt, Artificial Sequence
  Description of Artificial Sequence: Synthetic oligonucleotide
  Antisense strand to SEQ ID NO: 2126726
acuagucuaggaugaccaa

SEQ ID NO: 2126728 - RNA, 19 nt, Artificial Sequence
  Description of Artificial Sequence: Synthetic oligonucleotide
  Sense strand starting at position 2243 of SEQ ID NO: 1882510
uggguuacuacuggaaucu

SEQ ID NO: 2126729 - RNA, 19 nt, Artificial Sequence
  Description of Artificial Sequence: Synthetic oligonucleotide
  Antisense strand to SEQ ID NO: 2126728
agauuccaguaguaaccca

SEQ ID NO: 2126730 - RNA, 19 nt, Artificial Sequence
  Description of Artificial Sequence: Synthetic oligonucleotide
  Sense strand starting at position 2376 of SEQ ID NO: 1882510
gcagguggauuauuagaau

SEQ ID NO: 2126731 - RNA, 19 nt, Artificial Sequence
  Description of Artificial Sequence: Synthetic oligonucleotide
  Antisense strand to SEQ ID NO: 2126730
auucuaauaauccaccugc

SEQ ID NO: 2126732 - RNA, 19 nt, Artificial Sequence
  Description of Artificial Sequence: Synthetic oligonucleotide
  Sense strand starting at position 2382 of SEQ ID NO: 1882510
ggauuauuagaauguauug

SEQ ID NO: 2126733 - RNA, 19 nt, Artificial Sequence
  Description of Artificial Sequence: Synthetic oligonucleotide
  Antisense strand to SEQ ID NO: 2126732
caauacauucuaauaaucc

SEQ ID NO: 2126734 - RNA, 19 nt, Artificial Sequence
  Description of Artificial Sequence: Synthetic oligonucleotide
  Sense strand starting at position 2640 of SEQ ID NO: 1882510
ugguuacagccucagauga

SEQ ID NO: 2126735 - RNA, 19 nt, Artificial Sequence
  Description of Artificial Sequence: Synthetic oligonucleotide
  Antisense strand to SEQ ID NO: 2126734
ucaucugaggcuguaacca

SEQ ID NO: 2126736 - RNA, 19 nt, Artificial Sequence
  Description of Artificial Sequence: Synthetic oligonucleotide
  Sense strand starting at position 2648 of SEQ ID NO: 1882510
gccucagaugagcacaaau

SEQ ID NO: 2126737 - RNA, 19 nt, Artificial Sequence
  Description of Artificial Sequence: Synthetic oligonucleotide
  Antisense strand to SEQ ID NO: 2126736
auuugugcucaucugaggc

SEQ ID NO: 2126738 - RNA, 19 nt, Artificial Sequence
  Description of Artificial Sequence: Synthetic oligonucleotide
  Sense strand starting at position 2658 of SEQ ID NO: 1882510
agcacaaauggucaguuua

SEQ ID NO: 2126739 - RNA, 19 nt, Artificial Sequence
  Description of Artificial Sequence: Synthetic oligonucleotide
  Antisense strand to SEQ ID NO: 2126738
uaaacugaccauuugugcu

SEQ ID NO: 2126740 - RNA, 19 nt, Artificial Sequence
  Description of Artificial Sequence: Synthetic oligonucleotide
  Sense strand starting at position 2678 of SEQ ID NO: 1882510
cgugucucuagauagaaug

SEQ ID NO: 2126741 - RNA, 19 nt, Artificial Sequence
  Description of Artificial Sequence: Synthetic oligonucleotide
  Antisense strand to SEQ ID NO: 2126740
cauucuaucuagagacacg

SEQ ID NO: 2126742 - RNA, 19 nt, Artificial Sequence
  Description of Artificial Sequence: Synthetic oligonucleotide
  Sense strand starting at position 2710 of SEQ ID NO: 1882510
gguggaaggccucgaagaa

SEQ ID NO: 2126743 - RNA, 19 nt, Artificial Sequence
  Description of Artificial Sequence: Synthetic oligonucleotide
  Antisense strand to SEQ ID NO: 2126742
uucuucgaggccuuccacc

SEQ ID NO: 2126744 - RNA, 19 nt, Artificial Sequence
  Description of Artificial Sequence: Synthetic oligonucleotide
  Sense strand starting at position 2782 of SEQ ID NO: 1882510
ucugacuauuucuagagga

SEQ ID NO: 2126745 - RNA, 19 nt, Artificial Sequence
  Description of Artificial Sequence: Synthetic oligonucleotide
  Antisense strand to SEQ ID NO: 2126744
uccucuagaaauagucaga

SEQ ID NO: 2126746 - RNA, 19 nt, Artificial Sequence
  Description of Artificial Sequence: Synthetic oligonucleotide
  Sense strand starting at position 2790 of SEQ ID NO: 1882510
uuucuagaggacuauguuu

SEQ ID NO: 2126747 - RNA, 19 nt, Artificial Sequence
  Description of Artificial Sequence: Synthetic oligonucleotide
  Antisense strand to SEQ ID NO: 2126746
aaacauaguccucuagaaa

SEQ ID NO: 2126748 - RNA, 19 nt, Artificial Sequence
  Description of Artificial Sequence: Synthetic oligonucleotide
  Sense strand starting at position 2792 of SEQ ID NO: 1882510
ucuagaggacuauguuuga

SEQ ID NO: 2126749 - RNA, 19 nt, Artificial Sequence
  Description of Artificial Sequence: Synthetic oligonucleotide
  Antisense strand to SEQ ID NO: 2126748
ucaaacauaguccucuaga

SEQ ID NO: 2126750 - RNA, 19 nt, Artificial Sequence
  Description of Artificial Sequence: Synthetic oligonucleotide
  Sense strand starting at position 2970 of SEQ ID NO: 1882510
gugcuucugaaauaguaug

SEQ ID NO: 2126751 - RNA, 19 nt, Artificial Sequence
  Description of Artificial Sequence: Synthetic oligonucleotide
  Antisense strand to SEQ ID NO: 2126750
cauacuauuucagaagcac

SEQ ID NO: 2126752 - RNA, 19 nt, Artificial Sequence
  Description of Artificial Sequence: Synthetic oligonucleotide
  Sense strand starting at position 2975 of SEQ ID NO: 1882510
ucugaaauaguauguuaug

SEQ ID NO: 2126753 - RNA, 19 nt, Artificial Sequence
  Description of Artificial Sequence: Synthetic oligonucleotide
  Antisense strand to SEQ ID NO: 2126752
cauaacauacuauuucaga

SEQ ID NO: 2126754 - RNA, 19 nt, Artificial Sequence
  Description of Artificial Sequence: Synthetic oligonucleotide
  Sense strand starting at position 3099 of SEQ ID NO: 1882510
ggaugcugccaauaucauu

SEQ ID NO: 2126755 - RNA, 19 nt, Artificial Sequence
  Description of Artificial Sequence: Synthetic oligonucleotide
  Antisense strand to SEQ ID NO: 2126754
aaugauauuggcagcaucc

SEQ ID NO: 2126756 - RNA, 19 nt, Artificial Sequence
  Description of Artificial Sequence: Synthetic oligonucleotide
  Sense strand starting at position 3230 of SEQ ID NO: 1882510
uacggagagguuuaaguua

SEQ ID NO: 2126757 - RNA, 19 nt, Artificial Sequence
  Description of Artificial Sequence: Synthetic oligonucleotide
  Antisense strand to SEQ ID NO: 2126756
uaacuuaaaccucuccgua

SEQ ID NO: 2126758 - RNA, 19 nt, Artificial Sequence
  Description of Artificial Sequence: Synthetic oligonucleotide
  Sense strand starting at position 3352 of SEQ ID NO: 1882510
aucuaagaaugcuugauca

SEQ ID NO: 2126759 - RNA, 19 nt, Artificial Sequence
  Description of Artificial Sequence: Synthetic oligonucleotide
  Antisense strand to SEQ ID NO: 2126758
ugaucaagcauucuuagau

SEQ ID NO: 2126760 - RNA, 19 nt, Artificial Sequence
  Description of Artificial Sequence: Synthetic oligonucleotide
  Sense strand starting at position 3365 of SEQ ID NO: 1882510
ugaucaaggccugaaguua

SEQ ID NO: 2126761 - RNA, 19 nt, Artificial Sequence
  Description of Artificial Sequence: Synthetic oligonucleotide
  Antisense strand to SEQ ID NO: 2126760
uaacuucaggccuugauca

SEQ ID NO: 2126762 - RNA, 19 nt, Artificial Sequence
  Description of Artificial Sequence: Synthetic oligonucleotide
  Sense strand starting at position 3537 of SEQ ID NO: 1882510
ggagauguguuccuaugga

SEQ ID NO: 2126763 - RNA, 19 nt, Artificial Sequence
  Description of Artificial Sequence: Synthetic oligonucleotide
  Antisense strand to SEQ ID NO: 2126762
uccauaggaacacaucucc

SEQ ID NO: 2126764 - RNA, 19 nt, Artificial Sequence
  Description of Artificial Sequence: Synthetic oligonucleotide
  Sense strand starting at position 3683 of SEQ ID NO: 1882510
acacuugugaggugggaaa

SEQ ID NO: 2126765 - RNA, 19 nt, Artificial Sequence
  Description of Artificial Sequence: Synthetic oligonucleotide
  Antisense strand to SEQ ID NO: 2126764
uuucccaccucacaagugu

SEQ ID NO: 2126766 - RNA, 19 nt, Artificial Sequence
  Description of Artificial Sequence: Synthetic oligonucleotide
  Sense strand starting at position 3709 of SEQ ID NO: 1882510
gcauuugguucuuugucua

SEQ ID NO: 2126767 - RNA, 19 nt, Artificial Sequence
  Description of Artificial Sequence: Synthetic oligonucleotide
  Antisense strand to SEQ ID NO: 2126766
uagacaaagaaccaaaugc

SEQ ID NO: 2126768 - RNA, 19 nt, Artificial Sequence
  Description of Artificial Sequence: Synthetic oligonucleotide
  Sense strand starting at position 3714 of SEQ ID NO: 1882510
ugguucuuugucuaaggau

SEQ ID NO: 2126769 - RNA, 19 nt, Artificial Sequence
  Description of Artificial Sequence: Synthetic oligonucleotide
  Antisense strand to SEQ ID NO: 2126768
auccuuagacaaagaacca

SEQ ID NO: 2126770 - RNA, 19 nt, Artificial Sequence
  Description of Artificial Sequence: Synthetic oligonucleotide
  Sense strand starting at position 3729 of SEQ ID NO: 1882510
ggaucugugcuagacucca

SEQ ID NO: 2126771 - RNA, 19 nt, Artificial Sequence
  Description of Artificial Sequence: Synthetic oligonucleotide
  Antisense strand to SEQ ID NO: 2126770
uggagucuagcacagaucc

SEQ ID NO: 2126772 - RNA, 19 nt, Artificial Sequence
  Description of Artificial Sequence: Synthetic oligonucleotide
  Sense strand starting at position 3734 of SEQ ID NO: 1882510
ugugcuagacuccagguaa

SEQ ID NO: 2126773 - RNA, 19 nt, Artificial Sequence
  Description of Artificial Sequence: Synthetic oligonucleotide
  Antisense strand to SEQ ID NO: 2126772
uuaccuggagucuagcaca

SEQ ID NO: 2126774 - RNA, 19 nt, Artificial Sequence
  Description of Artificial Sequence: Synthetic oligonucleotide
  Sense strand starting at position 3788 of SEQ ID NO: 1882510
ccaaguuuacccugaacug

SEQ ID NO: 2126775 - RNA, 19 nt, Artificial Sequence
  Description of Artificial Sequence: Synthetic oligonucleotide
  Antisense strand to SEQ ID NO: 2126774
caguucaggguaaacuugg

SEQ ID NO: 2126776 - RNA, 19 nt, Artificial Sequence
  Description of Artificial Sequence: Synthetic oligonucleotide
  Sense strand starting at position 238 of SEQ ID NO: 1882511
cgcggcaguccuugaaaug

SEQ ID NO: 2126777 - RNA, 19 nt, Artificial Sequence
  Description of Artificial Sequence: Synthetic oligonucleotide
  Antisense strand to SEQ ID NO: 2126776
cauuucaaggacugccgcg

SEQ ID NO: 2126778 - RNA, 19 nt, Artificial Sequence
  Description of Artificial Sequence: Synthetic oligonucleotide
  Sense strand starting at position 239 of SEQ ID NO: 1882511
gcggcaguccuugaaaugu

SEQ ID NO: 2126779 - RNA, 19 nt, Artificial Sequence
  Description of Artificial Sequence: Synthetic oligonucleotide
  Antisense strand to SEQ ID NO: 2126778
acauuucaaggacugccgc

SEQ ID NO: 2126780 - RNA, 19 nt, Artificial Sequence
  Description of Artificial Sequence: Synthetic oligonucleotide
  Sense strand starting at position 537 of SEQ ID NO: 1882511
aggcaucacugucuggaau

SEQ ID NO: 2126781 - RNA, 19 nt, Artificial Sequence
  Description of Artificial Sequence: Synthetic oligonucleotide
  Antisense strand to SEQ ID NO: 2126780
auuccagacagugaugccu

SEQ ID NO: 2126782 - RNA, 19 nt, Artificial Sequence
  Description of Artificial Sequence: Synthetic oligonucleotide
  Sense strand starting at position 538 of SEQ ID NO: 1882511
ggcaucacugucuggaauu

SEQ ID NO: 2126783 - RNA, 19 nt, Artificial Sequence
  Description of Artificial Sequence: Synthetic oligonucleotide
  Antisense strand to SEQ ID NO: 2126782
aauuccagacagugaugcc

SEQ ID NO: 2126784 - RNA, 19 nt, Artificial Sequence
  Description of Artificial Sequence: Synthetic oligonucleotide
  Sense strand starting at position 549 of SEQ ID NO: 1882511
cuggaauucugacaggauu

SEQ ID NO: 2126785 - RNA, 19 nt, Artificial Sequence
  Description of Artificial Sequence: Synthetic oligonucleotide
  Antisense strand to SEQ ID NO: 2126784
aauccugucagaauuccag

SEQ ID NO: 2126786 - RNA, 19 nt, Artificial Sequence
  Description of Artificial Sequence: Synthetic oligonucleotide
  Sense strand starting at position 772 of SEQ ID NO: 1882511
guagcuggguuucagagaa

SEQ ID NO: 2126787 - RNA, 19 nt, Artificial Sequence
  Description of Artificial Sequence: Synthetic oligonucleotide
  Antisense strand to SEQ ID NO: 2126786
uucucugaaacccagcuac

SEQ ID NO: 2126788 - RNA, 19 nt, Artificial Sequence
  Description of Artificial Sequence: Synthetic oligonucleotide
  Sense strand starting at position 795 of SEQ ID NO: 1882511
guguaagugucacaguggu

SEQ ID NO: 2126789 - RNA, 19 nt, Artificial Sequence
  Description of Artificial Sequence: Synthetic oligonucleotide
  Antisense strand to SEQ ID NO: 2126788
accacugugacacuuacac

SEQ ID NO: 2126790 - RNA, 19 nt, Artificial Sequence
  Description of Artificial Sequence: Synthetic oligonucleotide
  Sense strand starting at position 977 of SEQ ID NO: 1882511
ggccguaacgcacuuauua

SEQ ID NO: 2126791 - RNA, 19 nt, Artificial Sequence
  Description of Artificial Sequence: Synthetic oligonucleotide
  Antisense strand to SEQ ID NO: 2126790
uaauaagugcguuacggcc

SEQ ID NO: 2126792 - RNA, 19 nt, Artificial Sequence
  Description of Artificial Sequence: Synthetic oligonucleotide
  Sense strand starting at position 979 of SEQ ID NO: 1882511
ccguaacgcacuuauuaag

SEQ ID NO: 2126793 - RNA, 19 nt, Artificial Sequence
  Description of Artificial Sequence: Synthetic oligonucleotide
  Antisense strand to SEQ ID NO: 2126792
cuuaauaagugcguuacgg

SEQ ID NO: 2126794 - RNA, 19 nt, Artificial Sequence
  Description of Artificial Sequence: Synthetic oligonucleotide
  Sense strand starting at position 985 of SEQ ID NO: 1882511
cgcacuuauuaagccagau

SEQ ID NO: 2126795 - RNA, 19 nt, Artificial Sequence
  Description of Artificial Sequence: Synthetic oligonucleotide
  Antisense strand to SEQ ID NO: 2126794
aucuggcuuaauaagugcg

SEQ ID NO: 2126796 - RNA, 19 nt, Artificial Sequence
  Description of Artificial Sequence: Synthetic oligonucleotide
  Sense strand starting at position 1107 of SEQ ID NO: 1882511
agagaaagauccuugcuca

SEQ ID NO: 2126797 - RNA, 19 nt, Artificial Sequence
  Description of Artificial Sequence: Synthetic oligonucleotide
  Antisense strand to SEQ ID NO: 2126796
ugagcaaggaucuuucucu

SEQ ID NO: 2126798 - RNA, 19 nt, Artificial Sequence
  Description of Artificial Sequence: Synthetic oligonucleotide
  Sense strand starting at position 1108 of SEQ ID NO: 1882511
gagaaagauccuugcucag

SEQ ID NO: 2126799 - RNA, 19 nt, Artificial Sequence
  Description of Artificial Sequence: Synthetic oligonucleotide
  Antisense strand to SEQ ID NO: 2126798
cugagcaaggaucuuucuc

SEQ ID NO: 2126800 - RNA, 19 nt, Artificial Sequence
  Description of Artificial Sequence: Synthetic oligonucleotide
  Sense strand starting at position 1179 of SEQ ID NO: 1882511
ccaagcucuccucagagaa

SEQ ID NO: 2126801 - RNA, 19 nt, Artificial Sequence
  Description of Artificial Sequence: Synthetic oligonucleotide
  Antisense strand to SEQ ID NO: 2126800
uucucugaggagagcuugg

SEQ ID NO: 2126802 - RNA, 19 nt, Artificial Sequence
  Description of Artificial Sequence: Synthetic oligonucleotide
  Sense strand starting at position 1181 of SEQ ID NO: 1882511
aagcucuccucagagaagu

SEQ ID NO: 2126803 - RNA, 19 nt, Artificial Sequence
  Description of Artificial Sequence: Synthetic oligonucleotide
  Antisense strand to SEQ ID NO: 2126802
acuucucugaggagagcuu

SEQ ID NO: 2126804 - RNA, 19 nt, Artificial Sequence
  Description of Artificial Sequence: Synthetic oligonucleotide
  Sense strand starting at position 1195 of SEQ ID NO: 1882511
gaaguucucgggcaggaua

SEQ ID NO: 2126805 - RNA, 19 nt, Artificial Sequence
  Description of Artificial Sequence: Synthetic oligonucleotide
  Antisense strand to SEQ ID NO: 2126804
uauccugcccgagaacuuc

SEQ ID NO: 2126806 - RNA, 19 nt, Artificial Sequence
  Description of Artificial Sequence: Synthetic oligonucleotide
  Sense strand starting at position 1272 of SEQ ID NO: 1882511
acaauaagggcucacugua

SEQ ID NO: 2126807 - RNA, 19 nt, Artificial Sequence
  Description of Artificial Sequence: Synthetic oligonucleotide
  Antisense strand to SEQ ID NO: 2126806
uacagugagcccuuauugu

SEQ ID NO: 2126808 - RNA, 19 nt, Artificial Sequence
  Description of Artificial Sequence: Synthetic oligonucleotide
  Sense strand starting at position 1280 of SEQ ID NO: 1882511
ggcucacuguagucuaaau

SEQ ID NO: 2126809 - RNA, 19 nt, Artificial Sequence
  Description of Artificial Sequence: Synthetic oligonucleotide
  Antisense strand to SEQ ID NO: 2126808
auuuagacuacagugagcc

SEQ ID NO: 2126810 - RNA, 19 nt, Artificial Sequence
  Description of Artificial Sequence: Synthetic oligonucleotide
  Sense strand starting at position 1291 of SEQ ID NO: 1882511
gucuaaaucucccaggucu

SEQ ID NO: 2126811 - RNA, 19 nt, Artificial Sequence
  Description of Artificial Sequence: Synthetic oligonucleotide
  Antisense strand to SEQ ID NO: 2126810
agaccugggagauuuagac

SEQ ID NO: 2126812 - RNA, 19 nt, Artificial Sequence
  Description of Artificial Sequence: Synthetic oligonucleotide
  Sense strand starting at position 1487 of SEQ ID NO: 1882511
aaacuccuggguugaagau

SEQ ID NO: 2126813 - RNA, 19 nt, Artificial Sequence
  Description of Artificial Sequence: Synthetic oligonucleotide
  Antisense strand to SEQ ID NO: 2126812
aucuucaacccaggaguuu

SEQ ID NO: 2126814 - RNA, 19 nt, Artificial Sequence
  Description of Artificial Sequence: Synthetic oligonucleotide
  Sense strand starting at position 1570 of SEQ ID NO: 1882511
aggguauguugaugagaac

SEQ ID NO: 2126815 - RNA, 19 nt, Artificial Sequence
  Description of Artificial Sequence: Synthetic oligonucleotide
  Antisense strand to SEQ ID NO: 2126814
guucucaucaacauacccu

SEQ ID NO: 2126816 - RNA, 19 nt, Artificial Sequence
  Description of Artificial Sequence: Synthetic oligonucleotide
  Sense strand starting at position 1573 of SEQ ID NO: 1882511
guauguugaugagaacuca

SEQ ID NO: 2126817 - RNA, 19 nt, Artificial Sequence
  Description of Artificial Sequence: Synthetic oligonucleotide
  Antisense strand to SEQ ID NO: 2126816
ugaguucucaucaacauac

SEQ ID NO: 2126818 - RNA, 19 nt, Artificial Sequence
  Description of Artificial Sequence: Synthetic oligonucleotide
  Sense strand starting at position 1675 of SEQ ID NO: 1882511
cccuauuggccuuggaaga

SEQ ID NO: 2126819 - RNA, 19 nt, Artificial Sequence
  Description of Artificial Sequence: Synthetic oligonucleotide
  Antisense strand to SEQ ID NO: 2126818
ucuuccaaggccaauaggg

SEQ ID NO: 2126820 - RNA, 19 nt, Artificial Sequence
  Description of Artificial Sequence: Synthetic oligonucleotide
  Sense strand starting at position 1676 of SEQ ID NO: 1882511
ccuauuggccuuggaagaa

SEQ ID NO: 2126821 - RNA, 19 nt, Artificial Sequence
  Description of Artificial Sequence: Synthetic oligonucleotide
  Antisense strand to SEQ ID NO: 2126820
uucuuccaaggccaauagg

SEQ ID NO: 2126822 - RNA, 19 nt, Artificial Sequence
  Description of Artificial Sequence: Synthetic oligonucleotide
  Sense strand starting at position 2179 of SEQ ID NO: 1882511
agccaagagucucaucuuu

SEQ ID NO: 2126823 - RNA, 19 nt, Artificial Sequence
  Description of Artificial Sequence: Synthetic oligonucleotide
  Antisense strand to SEQ ID NO: 2126822
aaagaugagacucuuggcu

SEQ ID NO: 2126824 - RNA, 19 nt, Artificial Sequence
  Description of Artificial Sequence: Synthetic oligonucleotide
  Sense strand starting at position 2243 of SEQ ID NO: 1882511
cuuuguacuuguuccaaau

SEQ ID NO: 2126825 - RNA, 19 nt, Artificial Sequence
  Description of Artificial Sequence: Synthetic oligonucleotide
  Antisense strand to SEQ ID NO: 2126824
auuuggaacaaguacaaag

SEQ ID NO: 2126826 - RNA, 19 nt, Artificial Sequence
  Description of Artificial Sequence: Synthetic oligonucleotide
  Sense strand starting at position 2245 of SEQ ID NO: 1882511
uuguacuuguuccaaauaa

SEQ ID NO: 2126827 - RNA, 19 nt, Artificial Sequence
  Description of Artificial Sequence: Synthetic oligonucleotide
  Antisense strand to SEQ ID NO: 2126826
uuauuuggaacaaguacaa

SEQ ID NO: 2126828 - RNA, 19 nt, Artificial Sequence
  Description of Artificial Sequence: Synthetic oligonucleotide
  Sense strand starting at position 2757 of SEQ ID NO: 1882511
aagggaugaucacaugaaa

SEQ ID NO: 2126829 - RNA, 19 nt, Artificial Sequence
  Description of Artificial Sequence: Synthetic oligonucleotide
  Antisense strand to SEQ ID NO: 2126828
uuucaugugaucaucccuu

SEQ ID NO: 2126830 - RNA, 19 nt, Artificial Sequence
  Description of Artificial Sequence: Synthetic oligonucleotide
  Sense strand starting at position 2814 of SEQ ID NO: 1882511
cagggaagccucugacaaa

SEQ ID NO: 2126831 - RNA, 19 nt, Artificial Sequence
  Description of Artificial Sequence: Synthetic oligonucleotide
  Antisense strand to SEQ ID NO: 2126830
uuugucagaggcuucccug

SEQ ID NO: 2126832 - RNA, 19 nt, Artificial Sequence
  Description of Artificial Sequence: Synthetic oligonucleotide
  Sense strand starting at position 2881 of SEQ ID NO: 1882511
cccuguucgcugccuguaa

SEQ ID NO: 2126833 - RNA, 19 nt, Artificial Sequence
  Description of Artificial Sequence: Synthetic oligonucleotide
  Antisense strand to SEQ ID NO: 2126832
uuacaggcagcgaacaggg

SEQ ID NO: 2126834 - RNA, 19 nt, Artificial Sequence
  Description of Artificial Sequence: Synthetic oligonucleotide
  Sense strand starting at position 2882 of SEQ ID NO: 1882511
ccuguucgcugccuguaau

SEQ ID NO: 2126835 - RNA, 19 nt, Artificial Sequence
  Description of Artificial Sequence: Synthetic oligonucleotide
  Antisense strand to SEQ ID NO: 2126834
auuacaggcagcgaacagg

SEQ ID NO: 2126836 - RNA, 19 nt, Artificial Sequence
  Description of Artificial Sequence: Synthetic oligonucleotide
  Sense strand starting at position 2926 of SEQ ID NO: 1882511
ucuagucugucccacacua

SEQ ID NO: 2126837 - RNA, 19 nt, Artificial Sequence
  Description of Artificial Sequence: Synthetic oligonucleotide
  Antisense strand to SEQ ID NO: 2126836
uagugugggacagacuaga

SEQ ID NO: 2126838 - RNA, 19 nt, Artificial Sequence
  Description of Artificial Sequence: Synthetic oligonucleotide
  Sense strand starting at position 3095 of SEQ ID NO: 1882511
cuggcucuucccuagguaa

SEQ ID NO: 2126839 - RNA, 19 nt, Artificial Sequence
  Description of Artificial Sequence: Synthetic oligonucleotide
  Antisense strand to SEQ ID NO: 2126838
uuaccuagggaagagccag

SEQ ID NO: 2126840 - RNA, 19 nt, Artificial Sequence
  Description of Artificial Sequence: Synthetic oligonucleotide
  Sense strand starting at position 3097 of SEQ ID NO: 1882511
ggcucuucccuagguaagu

SEQ ID NO: 2126841 - RNA, 19 nt, Artificial Sequence
  Description of Artificial Sequence: Synthetic oligonucleotide
  Antisense strand to SEQ ID NO: 2126840
acuuaccuagggaagagcc

SEQ ID NO: 2126842 - RNA, 19 nt, Artificial Sequence
  Description of Artificial Sequence: Synthetic oligonucleotide
  Sense strand starting at position 3136 of SEQ ID NO: 1882511
agaccuuaccuugauguca

SEQ ID NO: 2126843 - RNA, 19 nt, Artificial Sequence
  Description of Artificial Sequence: Synthetic oligonucleotide
  Antisense strand to SEQ ID NO: 2126842
ugacaucaagguaaggucu

SEQ ID NO: 2126844 - RNA, 19 nt, Artificial Sequence
  Description of Artificial Sequence: Synthetic oligonucleotide
  Sense strand starting at position 3138 of SEQ ID NO: 1882511
accuuaccuugaugucaga

SEQ ID NO: 2126845 - RNA, 19 nt, Artificial Sequence
  Description of Artificial Sequence: Synthetic oligonucleotide
  Antisense strand to SEQ ID NO: 2126844
ucugacaucaagguaaggu

SEQ ID NO: 2126846 - RNA, 19 nt, Artificial Sequence
  Description of Artificial Sequence: Synthetic oligonucleotide
  Sense strand starting at position 3260 of SEQ ID NO: 1882511
uacuccaucugagaaggua

SEQ ID NO: 2126847 - RNA, 19 nt, Artificial Sequence
  Description of Artificial Sequence: Synthetic oligonucleotide
  Antisense strand to SEQ ID NO: 2126846
uaccuucucagauggagua

SEQ ID NO: 2126848 - RNA, 19 nt, Artificial Sequence
  Description of Artificial Sequence: Synthetic oligonucleotide
  Sense strand starting at position 3653 of SEQ ID NO: 1882511
agcccaugucaucagacau

SEQ ID NO: 2126849 - RNA, 19 nt, Artificial Sequence
  Description of Artificial Sequence: Synthetic oligonucleotide
  Antisense strand to SEQ ID NO: 2126848
augucugaugacaugggcu

SEQ ID NO: 2126850 - RNA, 19 nt, Artificial Sequence
  Description of Artificial Sequence: Synthetic oligonucleotide
  Sense strand starting at position 3660 of SEQ ID NO: 1882511
gucaucagacauugagaua

SEQ ID NO: 2126851 - RNA, 19 nt, Artificial Sequence
  Description of Artificial Sequence: Synthetic oligonucleotide
  Antisense strand to SEQ ID NO: 2126850
uaucucaaugucugaugac

SEQ ID NO: 2126852 - RNA, 19 nt, Artificial Sequence
  Description of Artificial Sequence: Synthetic oligonucleotide
  Sense strand starting at position 3929 of SEQ ID NO: 1882511
uccucugaacccugugaga

SEQ ID NO: 2126853 - RNA, 19 nt, Artificial Sequence
  Description of Artificial Sequence: Synthetic oligonucleotide
  Antisense strand to SEQ ID NO: 2126852
ucucacaggguucagagga

SEQ ID NO: 2126854 - RNA, 19 nt, Artificial Sequence
  Description of Artificial Sequence: Synthetic oligonucleotide
  Sense strand starting at position 3931 of SEQ ID NO: 1882511
cucugaacccugugagaac

SEQ ID NO: 2126855 - RNA, 19 nt, Artificial Sequence
  Description of Artificial Sequence: Synthetic oligonucleotide
  Antisense strand to SEQ ID NO: 2126854
guucucacaggguucagag

SEQ ID NO: 2126856 - RNA, 19 nt, Artificial Sequence
  Description of Artificial Sequence: Synthetic oligonucleotide
  Sense strand starting at position 204 of SEQ ID NO: 1882512
auguaaggaucauuggauu

SEQ ID NO: 2126857 - RNA, 19 nt, Artificial Sequence
  Description of Artificial Sequence: Synthetic oligonucleotide
  Antisense strand to SEQ ID NO: 2126856
aauccaaugauccuuacau

SEQ ID NO: 2126858 - RNA, 19 nt, Artificial Sequence
  Description of Artificial Sequence: Synthetic oligonucleotide
  Sense strand starting at position 210 of SEQ ID NO: 1882512
ggaucauuggauugagagu

SEQ ID NO: 2126859 - RNA, 19 nt, Artificial Sequence
  Description of Artificial Sequence: Synthetic oligonucleotide
  Antisense strand to SEQ ID NO: 2126858
acucucaauccaaugaucc

SEQ ID NO: 2126860 - RNA, 19 nt, Artificial Sequence
  Description of Artificial Sequence: Synthetic oligonucleotide
  Sense strand starting at position 225 of SEQ ID NO: 1882512
gaguuuagauauccaaugu

SEQ ID NO: 2126861 - RNA, 19 nt, Artificial Sequence
  Description of Artificial Sequence: Synthetic oligonucleotide
  Antisense strand to SEQ ID NO: 2126860
acauuggauaucuaaacuc

SEQ ID NO: 2126862 - RNA, 19 nt, Artificial Sequence
  Description of Artificial Sequence: Synthetic oligonucleotide
  Sense strand starting at position 311 of SEQ ID NO: 1882512
augagugaacuaggccaua

SEQ ID NO: 2126863 - RNA, 19 nt, Artificial Sequence
  Description of Artificial Sequence: Synthetic oligonucleotide
  Antisense strand to SEQ ID NO: 2126862
uauggccuaguucacucau

SEQ ID NO: 2126864 - RNA, 19 nt, Artificial Sequence
  Description of Artificial Sequence: Synthetic oligonucleotide
  Sense strand starting at position 644 of SEQ ID NO: 1882512
ugcagaaaguucuugaaau

SEQ ID NO: 2126865 - RNA, 19 nt, Artificial Sequence
  Description of Artificial Sequence: Synthetic oligonucleotide
  Antisense strand to SEQ ID NO: 2126864
auuucaagaacuuucugca

SEQ ID NO: 2126866 - RNA, 19 nt, Artificial Sequence
  Description of Artificial Sequence: Synthetic oligonucleotide
  Sense strand starting at position 656 of SEQ ID NO: 1882512
uugaaaucuuugucuacug

SEQ ID NO: 2126867 - RNA, 19 nt, Artificial Sequence
  Description of Artificial Sequence: Synthetic oligonucleotide
  Antisense strand to SEQ ID NO: 2126866
caguagacaaagauuucaa

SEQ ID NO: 2126868 - RNA, 19 nt, Artificial Sequence
  Description of Artificial Sequence: Synthetic oligonucleotide
  Sense strand starting at position 760 of SEQ ID NO: 1882512
aguacuuucuggucagaca

SEQ ID NO: 2126869 - RNA, 19 nt, Artificial Sequence
  Description of Artificial Sequence: Synthetic oligonucleotide
  Antisense strand to SEQ ID NO: 2126868
ugucugaccagaaaguacu

SEQ ID NO: 2126870 - RNA, 19 nt, Artificial Sequence
  Description of Artificial Sequence: Synthetic oligonucleotide
  Sense strand starting at position 761 of SEQ ID NO: 1882512
guacuuucuggucagacau

SEQ ID NO: 2126871 - RNA, 19 nt, Artificial Sequence
  Description of Artificial Sequence: Synthetic oligonucleotide
  Antisense strand to SEQ ID NO: 2126870
augucugaccagaaaguac

SEQ ID NO: 2126872 - RNA, 19 nt, Artificial Sequence
  Description of Artificial Sequence: Synthetic oligonucleotide
  Sense strand starting at position 881 of SEQ ID NO: 1882512
cuugaaugccaguaauaac

SEQ ID NO: 2126873 - RNA, 19 nt, Artificial Sequence
  Description of Artificial Sequence: Synthetic oligonucleotide
  Antisense strand to SEQ ID NO: 2126872
guuauuacuggcauucaag

SEQ ID NO: 2126874 - RNA, 19 nt, Artificial Sequence
  Description of Artificial Sequence: Synthetic oligonucleotide
  Sense strand starting at position 984 of SEQ ID NO: 1882512
ugccauuugggauguuugu

SEQ ID NO: 2126875 - RNA, 19 nt, Artificial Sequence
  Description of Artificial Sequence: Synthetic oligonucleotide
  Antisense strand to SEQ ID NO: 2126874
acaaacaucccaaauggca

SEQ ID NO: 2126876 - RNA, 19 nt, Artificial Sequence
  Description of Artificial Sequence: Synthetic oligonucleotide
  Sense strand starting at position 1305 of SEQ ID NO: 1882512
uucuauguccugcacagau

SEQ ID NO: 2126877 - RNA, 19 nt, Artificial Sequence
  Description of Artificial Sequence: Synthetic oligonucleotide
  Antisense strand to SEQ ID NO: 2126876
aucugugcaggacauagaa

SEQ ID NO: 2126878 - RNA, 19 nt, Artificial Sequence
  Description of Artificial Sequence: Synthetic oligonucleotide
  Sense strand starting at position 1420 of SEQ ID NO: 1882512
gccugugucauagcuugua

SEQ ID NO: 2126879 - RNA, 19 nt, Artificial Sequence
  Description of Artificial Sequence: Synthetic oligonucleotide
  Antisense strand to SEQ ID NO: 2126878
uacaagcuaugacacaggc

SEQ ID NO: 2126880 - RNA, 19 nt, Artificial Sequence
  Description of Artificial Sequence: Synthetic oligonucleotide
  Sense strand starting at position 1550 of SEQ ID NO: 1882512
cucucaguggaauggugaa

SEQ ID NO: 2126881 - RNA, 19 nt, Artificial Sequence
  Description of Artificial Sequence: Synthetic oligonucleotide
  Antisense strand to SEQ ID NO: 2126880
uucaccauuccacugagag

SEQ ID NO: 2126882 - RNA, 19 nt, Artificial Sequence
  Description of Artificial Sequence: Synthetic oligonucleotide
  Sense strand starting at position 1576 of SEQ ID NO: 1882512
gugauuaccuaauccaaag

SEQ ID NO: 2126883 - RNA, 19 nt, Artificial Sequence
  Description of Artificial Sequence: Synthetic oligonucleotide
  Antisense strand to SEQ ID NO: 2126882
cuuuggauuagguaaucac

SEQ ID NO: 2126884 - RNA, 19 nt, Artificial Sequence
  Description of Artificial Sequence: Synthetic oligonucleotide
  Sense strand starting at position 1702 of SEQ ID NO: 1882512
ugucucuaucagcacuaga

SEQ ID NO: 2126885 - RNA, 19 nt, Artificial Sequence
  Description of Artificial Sequence: Synthetic oligonucleotide
  Antisense strand to SEQ ID NO: 2126884
ucuagugcugauagagaca

SEQ ID NO: 2126886 - RNA, 19 nt, Artificial Sequence
  Description of Artificial Sequence: Synthetic oligonucleotide
  Sense strand starting at position 1705 of SEQ ID NO: 1882512
cucuaucagcacuagagau

SEQ ID NO: 2126887 - RNA, 19 nt, Artificial Sequence
  Description of Artificial Sequence: Synthetic oligonucleotide
  Antisense strand to SEQ ID NO: 2126886
aucucuagugcugauagag

SEQ ID NO: 2126888 - RNA, 19 nt, Artificial Sequence
  Description of Artificial Sequence: Synthetic oligonucleotide
  Sense strand starting at position 1762 of SEQ ID NO: 1882512
uuaauuaguuaggugagua

SEQ ID NO: 2126889 - RNA, 19 nt, Artificial Sequence
  Description of Artificial Sequence: Synthetic oligonucleotide
  Antisense strand to SEQ ID NO: 2126888
uacucaccuaacuaauuaa

SEQ ID NO: 2126890 - RNA, 19 nt, Artificial Sequence
  Description of Artificial Sequence: Synthetic oligonucleotide
  Sense strand starting at position 2044 of SEQ ID NO: 1882512
gccagcagaucaccaauau

SEQ ID NO: 2126891 - RNA, 19 nt, Artificial Sequence
  Description of Artificial Sequence: Synthetic oligonucleotide
  Antisense strand to SEQ ID NO: 2126890
auauuggugaucugcuggc

SEQ ID NO: 2126892 - RNA, 19 nt, Artificial Sequence
  Description of Artificial Sequence: Synthetic oligonucleotide
  Sense strand starting at position 2103 of SEQ ID NO: 1882512
uuugacuuauugguuuaca

SEQ ID NO: 2126893 - RNA, 19 nt, Artificial Sequence
  Description of Artificial Sequence: Synthetic oligonucleotide
  Antisense strand to SEQ ID NO: 2126892
uguaaaccaauaagucaaa

SEQ ID NO: 2126894 - RNA, 19 nt, Artificial Sequence
  Description of Artificial Sequence: Synthetic oligonucleotide
  Sense strand starting at position 2104 of SEQ ID NO: 1882512
uugacuuauugguuuacaa

SEQ ID NO: 2126895 - RNA, 19 nt, Artificial Sequence
  Description of Artificial Sequence: Synthetic oligonucleotide
  Antisense strand to SEQ ID NO: 2126894
uuguaaaccaauaagucaa

SEQ ID NO: 2126896 - RNA, 19 nt, Artificial Sequence
  Description of Artificial Sequence: Synthetic oligonucleotide
  Sense strand starting at position 2106 of SEQ ID NO: 1882512
gacuuauugguuuacaagu

SEQ ID NO: 2126897 - RNA, 19 nt, Artificial Sequence
  Description of Artificial Sequence: Synthetic oligonucleotide
  Antisense strand to SEQ ID NO: 2126896
acuuguaaaccaauaaguc

SEQ ID NO: 2126898 - RNA, 19 nt, Artificial Sequence
  Description of Artificial Sequence: Synthetic oligonucleotide
  Sense strand starting at position 2218 of SEQ ID NO: 1882512
caaaguccugaguaaagua

SEQ ID NO: 2126899 - RNA, 19 nt, Artificial Sequence
  Description of Artificial Sequence: Synthetic oligonucleotide
  Antisense strand to SEQ ID NO: 2126898
uacuuuacucaggacuuug

SEQ ID NO: 2126900 - RNA, 19 nt, Artificial Sequence
  Description of Artificial Sequence: Synthetic oligonucleotide
  Sense strand starting at position 2284 of SEQ ID NO: 1882512
ucacuuguucuugaguaaa

SEQ ID NO: 2126901 - RNA, 19 nt, Artificial Sequence
  Description of Artificial Sequence: Synthetic oligonucleotide
  Antisense strand to SEQ ID NO: 2126900
uuuacucaagaacaaguga

SEQ ID NO: 2126902 - RNA, 19 nt, Artificial Sequence
  Description of Artificial Sequence: Synthetic oligonucleotide
  Sense strand starting at position 2287 of SEQ ID NO: 1882512
cuuguucuugaguaaacca

SEQ ID NO: 2126903 - RNA, 19 nt, Artificial Sequence
  Description of Artificial Sequence: Synthetic oligonucleotide
  Antisense strand to SEQ ID NO: 2126902
ugguuuacucaagaacaag

SEQ ID NO: 2126904 - RNA, 19 nt, Artificial Sequence
  Description of Artificial Sequence: Synthetic oligonucleotide
  Sense strand starting at position 2614 of SEQ ID NO: 1882512
cauuguauggaacauaguu

SEQ ID NO: 2126905 - RNA, 19 nt, Artificial Sequence
  Description of Artificial Sequence: Synthetic oligonucleotide
  Antisense strand to SEQ ID NO: 2126904
aacuauguuccauacaaug

SEQ ID NO: 2126906 - RNA, 19 nt, Artificial Sequence
  Description of Artificial Sequence: Synthetic oligonucleotide
  Sense strand starting at position 2849 of SEQ ID NO: 1882512
uagauaugauggcuggauu

SEQ ID NO: 2126907 - RNA, 19 nt, Artificial Sequence
  Description of Artificial Sequence: Synthetic oligonucleotide
  Antisense strand to SEQ ID NO: 2126906
aauccagccaucauaucua

SEQ ID NO: 2126908 - RNA, 19 nt, Artificial Sequence
  Description of Artificial Sequence: Synthetic oligonucleotide
  Sense strand starting at position 2961 of SEQ ID NO: 1882512
auccaauaaugucugggau

SEQ ID NO: 2126909 - RNA, 19 nt, Artificial Sequence
  Description of Artificial Sequence: Synthetic oligonucleotide
  Antisense strand to SEQ ID NO: 2126908
aucccagacauuauuggau

SEQ ID NO: 2126910 - RNA, 19 nt, Artificial Sequence
  Description of Artificial Sequence: Synthetic oligonucleotide
  Sense strand starting at position 2962 of SEQ ID NO: 1882512
uccaauaaugucugggauu

SEQ ID NO: 2126911 - RNA, 19 nt, Artificial Sequence
  Description of Artificial Sequence: Synthetic oligonucleotide
  Antisense strand to SEQ ID NO: 2126910
aaucccagacauuauugga

SEQ ID NO: 2126912 - RNA, 19 nt, Artificial Sequence
  Description of Artificial Sequence: Synthetic oligonucleotide
  Sense strand starting at position 3083 of SEQ ID NO: 1882512
gauuuauucugguaaaggg

SEQ ID NO: 2126913 - RNA, 19 nt, Artificial Sequence
  Description of Artificial Sequence: Synthetic oligonucleotide
  Antisense strand to SEQ ID NO: 2126912
cccuuuaccagaauaaauc

SEQ ID NO: 2126914 - RNA, 19 nt, Artificial Sequence
  Description of Artificial Sequence: Synthetic oligonucleotide
  Sense strand starting at position 3300 of SEQ ID NO: 1882512
aagcaaagacuggguuaua

SEQ ID NO: 2126915 - RNA, 19 nt, Artificial Sequence
  Description of Artificial Sequence: Synthetic oligonucleotide
  Antisense strand to SEQ ID NO: 2126914
uauaacccagucuuugcuu

SEQ ID NO: 2126916 - RNA, 19 nt, Artificial Sequence
  Description of Artificial Sequence: Synthetic oligonucleotide
  Sense strand starting at position 3310 of SEQ ID NO: 1882512
uggguuauacagcacacaa

SEQ ID NO: 2126917 - RNA, 19 nt, Artificial Sequence
  Description of Artificial Sequence: Synthetic oligonucleotide
  Antisense strand to SEQ ID NO: 2126916
uugugugcuguauaaccca

SEQ ID NO: 2126918 - RNA, 19 nt, Artificial Sequence
  Description of Artificial Sequence: Synthetic oligonucleotide
  Sense strand starting at position 3542 of SEQ ID NO: 1882512
aguguuugcaaaugaaaga

SEQ ID NO: 2126919 - RNA, 19 nt, Artificial Sequence
  Description of Artificial Sequence: Synthetic oligonucleotide
  Antisense strand to SEQ ID NO: 2126918
ucuuucauuugcaaacacu

SEQ ID NO: 2126920 - RNA, 19 nt, Artificial Sequence
  Description of Artificial Sequence: Synthetic oligonucleotide
  Sense strand starting at position 3702 of SEQ ID NO: 1882512
gaguccauagcugaguaaa

SEQ ID NO: 2126921 - RNA, 19 nt, Artificial Sequence
  Description of Artificial Sequence: Synthetic oligonucleotide
  Antisense strand to SEQ ID NO: 2126920
uuuacucagcuauggacuc

SEQ ID NO: 2126922 - RNA, 19 nt, Artificial Sequence
  Description of Artificial Sequence: Synthetic oligonucleotide
  Sense strand starting at position 3782 of SEQ ID NO: 1882512
agagucaccucagucuuga

SEQ ID NO: 2126923 - RNA, 19 nt, Artificial Sequence
  Description of Artificial Sequence: Synthetic oligonucleotide
  Antisense strand to SEQ ID NO: 2126922
ucaagacugaggugacucu

SEQ ID NO: 2126924 - RNA, 19 nt, Artificial Sequence
  Description of Artificial Sequence: Synthetic oligonucleotide
  Sense strand starting at position 3807 of SEQ ID NO: 1882512
gagucaauauccucagaag

SEQ ID NO: 2126925 - RNA, 19 nt, Artificial Sequence
  Description of Artificial Sequence: Synthetic oligonucleotide
  Antisense strand to SEQ ID NO: 2126924
cuucugaggauauugacuc

SEQ ID NO: 2126926 - RNA, 19 nt, Artificial Sequence
  Description of Artificial Sequence: Synthetic oligonucleotide
  Sense strand starting at position 3840 of SEQ ID NO: 1882512
aggauaauccgagguaacu

SEQ ID NO: 2126927 - RNA, 19 nt, Artificial Sequence
  Description of Artificial Sequence: Synthetic oligonucleotide
  Antisense strand to SEQ ID NO: 2126926
aguuaccucggauuauccu

SEQ ID NO: 2126928 - RNA, 19 nt, Artificial Sequence
  Description of Artificial Sequence: Synthetic oligonucleotide
  Sense strand starting at position 3861 of SEQ ID NO: 1882512
gagauaaucagagguuguu

SEQ ID NO: 2126929 - RNA, 19 nt, Artificial Sequence
  Description of Artificial Sequence: Synthetic oligonucleotide
  Antisense strand to SEQ ID NO: 2126928
aacaaccucugauuaucuc

SEQ ID NO: 2126930 - RNA, 19 nt, Artificial Sequence
  Description of Artificial Sequence: Synthetic oligonucleotide
  Sense strand starting at position 3864 of SEQ ID NO: 1882512
auaaucagagguuguugaa

SEQ ID NO: 2126931 - RNA, 19 nt, Artificial Sequence
  Description of Artificial Sequence: Synthetic oligonucleotide
  Antisense strand to SEQ ID NO: 2126930
uucaacaaccucugauuau

SEQ ID NO: 2126932 - RNA, 19 nt, Artificial Sequence
  Description of Artificial Sequence: Synthetic oligonucleotide
  Sense strand starting at position 3955 of SEQ ID NO: 1882512
gaauaugaguaaucaaguc

SEQ ID NO: 2126933 - RNA, 19 nt, Artificial Sequence
  Description of Artificial Sequence: Synthetic oligonucleotide
  Antisense strand to SEQ ID NO: 2126932
gacuugauuacucauauuc

SEQ ID NO: 2126934 - RNA, 19 nt, Artificial Sequence
  Description of Artificial Sequence: Synthetic oligonucleotide
  Sense strand starting at position 3969 of SEQ ID NO: 1882512
aagucaauguaguuacaga

SEQ ID NO: 2126935 - RNA, 19 nt, Artificial Sequence
  Description of Artificial Sequence: Synthetic oligonucleotide
  Antisense strand to SEQ ID NO: 2126934
ucuguaacuacauugacuu

SEQ ID NO: 2126936 - RNA, 19 nt, Artificial Sequence
  Description of Artificial Sequence: Synthetic oligonucleotide
  Sense strand starting at position 22 of SEQ ID NO: 1882513
aaagaaaccgagugcuaga

SEQ ID NO: 2126937 - RNA, 19 nt, Artificial Sequence
  Description of Artificial Sequence: Synthetic oligonucleotide
  Antisense strand to SEQ ID NO: 2126936
ucuagcacucgguuucuuu

SEQ ID NO: 2126938 - RNA, 19 nt, Artificial Sequence
  Description of Artificial Sequence: Synthetic oligonucleotide
  Sense strand starting at position 32 of SEQ ID NO: 1882513
agugcuagaacacgaagau

SEQ ID NO: 2126939 - RNA, 19 nt, Artificial Sequence
  Description of Artificial Sequence: Synthetic oligonucleotide
  Antisense strand to SEQ ID NO: 2126938
aucuucguguucuagcacu

SEQ ID NO: 2126940 - RNA, 19 nt, Artificial Sequence
  Description of Artificial Sequence: Synthetic oligonucleotide
  Sense strand starting at position 107 of SEQ ID NO: 1882513
agacuagcgaucuauugaa

SEQ ID NO: 2126941 - RNA, 19 nt, Artificial Sequence
  Description of Artificial Sequence: Synthetic oligonucleotide
  Antisense strand to SEQ ID NO: 2126940
uucaauagaucgcuagucu

SEQ ID NO: 2126942 - RNA, 19 nt, Artificial Sequence
  Description of Artificial Sequence: Synthetic oligonucleotide
  Sense strand starting at position 173 of SEQ ID NO: 1882513
ugagaagccuccuuaugua

SEQ ID NO: 2126943 - RNA, 19 nt, Artificial Sequence
  Description of Artificial Sequence: Synthetic oligonucleotide
  Antisense strand to SEQ ID NO: 2126942
uacauaaggaggcuucuca

SEQ ID NO: 2126944 - RNA, 19 nt, Artificial Sequence
  Description of Artificial Sequence: Synthetic oligonucleotide
  Sense strand starting at position 266 of SEQ ID NO: 1882513
aggaaauccaguuggugga

SEQ ID NO: 2126945 - RNA, 19 nt, Artificial Sequence
  Description of Artificial Sequence: Synthetic oligonucleotide
  Antisense strand to SEQ ID NO: 2126944
uccaccaacuggauuuccu

SEQ ID NO: 2126946 - RNA, 19 nt, Artificial Sequence
  Description of Artificial Sequence: Synthetic oligonucleotide
  Sense strand starting at position 360 of SEQ ID NO: 1882513
ucucauuacuugccuuagu

SEQ ID NO: 2126947 - RNA, 19 nt, Artificial Sequence
  Description of Artificial Sequence: Synthetic oligonucleotide
  Antisense strand to SEQ ID NO: 2126946
acuaaggcaaguaaugaga

SEQ ID NO: 2126948 - RNA, 19 nt, Artificial Sequence
  Description of Artificial Sequence: Synthetic oligonucleotide
  Sense strand starting at position 422 of SEQ ID NO: 1882513
cgcaacuucgccugacuga

SEQ ID NO: 2126949 - RNA, 19 nt, Artificial Sequence
  Description of Artificial Sequence: Synthetic oligonucleotide
  Antisense strand to SEQ ID NO: 2126948
ucagucaggcgaaguugcg

SEQ ID NO: 2126950 - RNA, 19 nt, Artificial Sequence
  Description of Artificial Sequence: Synthetic oligonucleotide
  Sense strand starting at position 423 of SEQ ID NO: 1882513
gcaacuucgccugacugaa

SEQ ID NO: 2126951 - RNA, 19 nt, Artificial Sequence
  Description of Artificial Sequence: Synthetic oligonucleotide
  Antisense strand to SEQ ID NO: 2126950
uucagucaggcgaaguugc

SEQ ID NO: 2126952 - RNA, 19 nt, Artificial Sequence
  Description of Artificial Sequence: Synthetic oligonucleotide
  Sense strand starting at position 630 of SEQ ID NO: 1882513
ggcaucucucagggccaaa

SEQ ID NO: 2126953 - RNA, 19 nt, Artificial Sequence
  Description of Artificial Sequence: Synthetic oligonucleotide
  Antisense strand to SEQ ID NO: 2126952
uuuggcccugagagaugcc

SEQ ID NO: 2126954 - RNA, 19 nt, Artificial Sequence
  Description of Artificial Sequence: Synthetic oligonucleotide
  Sense strand starting at position 697 of SEQ ID NO: 1882513
uucucuacgucugcgaaga

SEQ ID NO: 2126955 - RNA, 19 nt, Artificial Sequence
  Description of Artificial Sequence: Synthetic oligonucleotide
  Antisense strand to SEQ ID NO: 2126954
ucuucgcagacguagagaa

SEQ ID NO: 2126956 - RNA, 19 nt, Artificial Sequence
  Description of Artificial Sequence: Synthetic oligonucleotide
  Sense strand starting at position 698 of SEQ ID NO: 1882513
ucucuacgucugcgaagaa

SEQ ID NO: 2126957 - RNA, 19 nt, Artificial Sequence
  Description of Artificial Sequence: Synthetic oligonucleotide
  Antisense strand to SEQ ID NO: 2126956
uucuucgcagacguagaga

SEQ ID NO: 2126958 - RNA, 19 nt, Artificial Sequence
  Description of Artificial Sequence: Synthetic oligonucleotide
  Sense strand starting at position 707 of SEQ ID NO: 1882513
cugcgaagaauuggcagau

SEQ ID NO: 2126959 - RNA, 19 nt, Artificial Sequence
  Description of Artificial Sequence: Synthetic oligonucleotide
  Antisense strand to SEQ ID NO: 2126958
aucugccaauucuucgcag

SEQ ID NO: 2126960 - RNA, 19 nt, Artificial Sequence
  Description of Artificial Sequence: Synthetic oligonucleotide
  Sense strand starting at position 708 of SEQ ID NO: 1882513
ugcgaagaauuggcagaua

SEQ ID NO: 2126961 - RNA, 19 nt, Artificial Sequence
  Description of Artificial Sequence: Synthetic oligonucleotide
  Antisense strand to SEQ ID NO: 2126960
uaucugccaauucuucgca

SEQ ID NO: 2126962 - RNA, 19 nt, Artificial Sequence
  Description of Artificial Sequence: Synthetic oligonucleotide
  Sense strand starting at position 719 of SEQ ID NO: 1882513
ggcagauaacgaugugucu

SEQ ID NO: 2126963 - RNA, 19 nt, Artificial Sequence
  Description of Artificial Sequence: Synthetic oligonucleotide
  Antisense strand to SEQ ID NO: 2126962
agacacaucguuaucugcc

SEQ ID NO: 2126964 - RNA, 19 nt, Artificial Sequence
  Description of Artificial Sequence: Synthetic oligonucleotide
  Sense strand starting at position 721 of SEQ ID NO: 1882513
cagauaacgaugugucuga

SEQ ID NO: 2126965 - RNA, 19 nt, Artificial Sequence
  Description of Artificial Sequence: Synthetic oligonucleotide
  Antisense strand to SEQ ID NO: 2126964
ucagacacaucguuaucug

SEQ ID NO: 2126966 - RNA, 19 nt, Artificial Sequence
  Description of Artificial Sequence: Synthetic oligonucleotide
  Sense strand starting at position 725 of SEQ ID NO: 1882513
uaacgaugugucugagaga

SEQ ID NO: 2126967 - RNA, 19 nt, Artificial Sequence
  Description of Artificial Sequence: Synthetic oligonucleotide
  Antisense strand to SEQ ID NO: 2126966
ucucucagacacaucguua

SEQ ID NO: 2126968 - RNA, 19 nt, Artificial Sequence
  Description of Artificial Sequence: Synthetic oligonucleotide
  Sense strand starting at position 786 of SEQ ID NO: 1882513
ccaaccucacucugugaga

SEQ ID NO: 2126969 - RNA, 19 nt, Artificial Sequence
  Description of Artificial Sequence: Synthetic oligonucleotide
  Antisense strand to SEQ ID NO: 2126968
ucucacagagugagguugg

SEQ ID NO: 2126970 - RNA, 19 nt, Artificial Sequence
  Description of Artificial Sequence: Synthetic oligonucleotide
  Sense strand starting at position 903 of SEQ ID NO: 1882513
guguccuccgcggaagaaa

SEQ ID NO: 2126971 - RNA, 19 nt, Artificial Sequence
  Description of Artificial Sequence: Synthetic oligonucleotide
  Antisense strand to SEQ ID NO: 2126970
uuucuuccgcggaggacac

SEQ ID NO: 2126972 - RNA, 19 nt, Artificial Sequence
  Description of Artificial Sequence: Synthetic oligonucleotide
  Sense strand starting at position 3268 of SEQ ID NO: 1882513
ccuguaaaucgcuccgcaa

SEQ ID NO: 2126973 - RNA, 19 nt, Artificial Sequence
  Description of Artificial Sequence: Synthetic oligonucleotide
  Antisense strand to SEQ ID NO: 2126972
uugcggagcgauuuacagg

SEQ ID NO: 2126974 - RNA, 19 nt, Artificial Sequence
  Description of Artificial Sequence: Synthetic oligonucleotide
  Sense strand starting at position 3353 of SEQ ID NO: 1882513
caauauuugugcccguuua

SEQ ID NO: 2126975 - RNA, 19 nt, Artificial Sequence
  Description of Artificial Sequence: Synthetic oligonucleotide
  Antisense strand to SEQ ID NO: 2126974
uaaacgggcacaaauauug

SEQ ID NO: 2126976 - RNA, 19 nt, Artificial Sequence
  Description of Artificial Sequence: Synthetic oligonucleotide
  Sense strand starting at position 3463 of SEQ ID NO: 1882513
aaacauguuuggcagauuu

SEQ ID NO: 2126977 - RNA, 19 nt, Artificial Sequence
  Description of Artificial Sequence: Synthetic oligonucleotide
  Antisense strand to SEQ ID NO: 2126976
aaaucugccaaacauguuu

SEQ ID NO: 2126978 - RNA, 19 nt, Artificial Sequence
  Description of Artificial Sequence: Synthetic oligonucleotide
  Sense strand starting at position 3470 of SEQ ID NO: 1882513
uuuggcagauuugaacauu

SEQ ID NO: 2126979 - RNA, 19 nt, Artificial Sequence
  Description of Artificial Sequence: Synthetic oligonucleotide
  Antisense strand to SEQ ID NO: 2126978
aauguucaaaucugccaaa

SEQ ID NO: 2126980 - RNA, 19 nt, Artificial Sequence
  Description of Artificial Sequence: Synthetic oligonucleotide
  Sense strand starting at position 3479 of SEQ ID NO: 1882513
uuugaacauucuuacgaaa

SEQ ID NO: 2126981 - RNA, 19 nt, Artificial Sequence
  Description of Artificial Sequence: Synthetic oligonucleotide
  Antisense strand to SEQ ID NO: 2126980
uuucguaagaauguucaaa

SEQ ID NO: 2126982 - RNA, 19 nt, Artificial Sequence
  Description of Artificial Sequence: Synthetic oligonucleotide
  Sense strand starting at position 3534 of SEQ ID NO: 1882513
uugagagaauuugacuauu

SEQ ID NO: 2126983 - RNA, 19 nt, Artificial Sequence
  Description of Artificial Sequence: Synthetic oligonucleotide
  Antisense strand to SEQ ID NO: 2126982
aauagucaaauucucucaa

SEQ ID NO: 2126984 - RNA, 19 nt, Artificial Sequence
  Description of Artificial Sequence: Synthetic oligonucleotide
  Sense strand starting at position 3645 of SEQ ID NO: 1882513
gcuagccauuugucuuaau

SEQ ID NO: 2126985 - RNA, 19 nt, Artificial Sequence
  Description of Artificial Sequence: Synthetic oligonucleotide
  Antisense strand to SEQ ID NO: 2126984
auuaagacaaauggcuagc

SEQ ID NO: 2126986 - RNA, 19 nt, Artificial Sequence
  Description of Artificial Sequence: Synthetic oligonucleotide
  Sense strand starting at position 3657 of SEQ ID NO: 1882513
ucuuaauacugaguugaau

SEQ ID NO: 2126987 - RNA, 19 nt, Artificial Sequence
  Description of Artificial Sequence: Synthetic oligonucleotide
  Antisense strand to SEQ ID NO: 2126986
auucaacucaguauuaaga

SEQ ID NO: 2126988 - RNA, 19 nt, Artificial Sequence
  Description of Artificial Sequence: Synthetic oligonucleotide
  Sense strand starting at position 3690 of SEQ ID NO: 1882513
uuaggcucagguugucaau

SEQ ID NO: 2126989 - RNA, 19 nt, Artificial Sequence
  Description of Artificial Sequence: Synthetic oligonucleotide
  Antisense strand to SEQ ID NO: 2126988
auugacaaccugagccuaa

SEQ ID NO: 2126990 - RNA, 19 nt, Artificial Sequence
  Description of Artificial Sequence: Synthetic oligonucleotide
  Sense strand starting at position 3692 of SEQ ID NO: 1882513
aggcucagguugucaauuu

SEQ ID NO: 2126991 - RNA, 19 nt, Artificial Sequence
  Description of Artificial Sequence: Synthetic oligonucleotide
  Antisense strand to SEQ ID NO: 2126990
aaauugacaaccugagccu

SEQ ID NO: 2126992 - RNA, 19 nt, Artificial Sequence
  Description of Artificial Sequence: Synthetic oligonucleotide
  Sense strand starting at position 3699 of SEQ ID NO: 1882513
gguugucaauuugagcaua

SEQ ID NO: 2126993 - RNA, 19 nt, Artificial Sequence
  Description of Artificial Sequence: Synthetic oligonucleotide
  Antisense strand to SEQ ID NO: 2126992
uaugcucaaauugacaacc

SEQ ID NO: 2126994 - RNA, 19 nt, Artificial Sequence
  Description of Artificial Sequence: Synthetic oligonucleotide
  Sense strand starting at position 3714 of SEQ ID NO: 1882513
cauagauguuauguuaagu

SEQ ID NO: 2126995 - RNA, 19 nt, Artificial Sequence
  Description of Artificial Sequence: Synthetic oligonucleotide
  Antisense strand to SEQ ID NO: 2126994
acuuaacauaacaucuaug

SEQ ID NO: 2126996 - RNA, 19 nt, Artificial Sequence
  Description of Artificial Sequence: Synthetic oligonucleotide
  Sense strand starting at position 3724 of SEQ ID NO: 1882513
auguuaaguuacuccugau

SEQ ID NO: 2126997 - RNA, 19 nt, Artificial Sequence
  Description of Artificial Sequence: Synthetic oligonucleotide
  Antisense strand to SEQ ID NO: 2126996
aucaggaguaacuuaacau

SEQ ID NO: 2126998 - RNA, 19 nt, Artificial Sequence
  Description of Artificial Sequence: Synthetic oligonucleotide
  Sense strand starting at position 3775 of SEQ ID NO: 1882513
gguucuaguaagggaguua

SEQ ID NO: 2126999 - RNA, 19 nt, Artificial Sequence
  Description of Artificial Sequence: Synthetic oligonucleotide
  Antisense strand to SEQ ID NO: 2126998
uaacucccuuacuagaacc

SEQ ID NO: 2127000 - RNA, 19 nt, Artificial Sequence
  Description of Artificial Sequence: Synthetic oligonucleotide
  Sense strand starting at position 3780 of SEQ ID NO: 1882513
uaguaagggaguuaguacu

SEQ ID NO: 2127001 - RNA, 19 nt, Artificial Sequence
  Description of Artificial Sequence: Synthetic oligonucleotide
  Antisense strand to SEQ ID NO: 2127000
aguacuaacucccuuacua

SEQ ID NO: 2127002 - RNA, 19 nt, Artificial Sequence
  Description of Artificial Sequence: Synthetic oligonucleotide
  Sense strand starting at position 3788 of SEQ ID NO: 1882513
gaguuaguacuauguacuu

SEQ ID NO: 2127003 - RNA, 19 nt, Artificial Sequence
  Description of Artificial Sequence: Synthetic oligonucleotide
  Antisense strand to SEQ ID NO: 2127002
aaguacauaguacuaacuc

SEQ ID NO: 2127004 - RNA, 19 nt, Artificial Sequence
  Description of Artificial Sequence: Synthetic oligonucleotide
  Sense strand starting at position 3801 of SEQ ID NO: 1882513
guacuuaaguguucguuca

SEQ ID NO: 2127005 - RNA, 19 nt, Artificial Sequence
  Description of Artificial Sequence: Synthetic oligonucleotide
  Antisense strand to SEQ ID NO: 2127004
ugaacgaacacuuaaguac

SEQ ID NO: 2127006 - RNA, 19 nt, Artificial Sequence
  Description of Artificial Sequence: Synthetic oligonucleotide
  Sense strand starting at position 3813 of SEQ ID NO: 1882513
ucguucauagacuagugua

SEQ ID NO: 2127007 - RNA, 19 nt, Artificial Sequence
  Description of Artificial Sequence: Synthetic oligonucleotide
  Antisense strand to SEQ ID NO: 2127006
uacacuagucuaugaacga

SEQ ID NO: 2127008 - RNA, 19 nt, Artificial Sequence
  Description of Artificial Sequence: Synthetic oligonucleotide
  Sense strand starting at position 3821 of SEQ ID NO: 1882513
agacuaguguaucuuuaga

SEQ ID NO: 2127009 - RNA, 19 nt, Artificial Sequence
  Description of Artificial Sequence: Synthetic oligonucleotide
  Antisense strand to SEQ ID NO: 2127008
ucuaaagauacacuagucu

SEQ ID NO: 2127010 - RNA, 19 nt, Artificial Sequence
  Description of Artificial Sequence: Synthetic oligonucleotide
  Sense strand starting at position 3823 of SEQ ID NO: 1882513
acuaguguaucuuuagaaa

SEQ ID NO: 2127011 - RNA, 19 nt, Artificial Sequence
  Description of Artificial Sequence: Synthetic oligonucleotide
  Antisense strand to SEQ ID NO: 2127010
uuucuaaagauacacuagu

SEQ ID NO: 2127012 - RNA, 19 nt, Artificial Sequence
  Description of Artificial Sequence: Synthetic oligonucleotide
  Sense strand starting at position 3832 of SEQ ID NO: 1882513
ucuuuagaaaggugacaug

SEQ ID NO: 2127013 - RNA, 19 nt, Artificial Sequence
  Description of Artificial Sequence: Synthetic oligonucleotide
  Antisense strand to SEQ ID NO: 2127012
caugucaccuuucuaaaga

SEQ ID NO: 2127014 - RNA, 19 nt, Artificial Sequence
  Description of Artificial Sequence: Synthetic oligonucleotide
  Sense strand starting at position 3835 of SEQ ID NO: 1882513
uuagaaaggugacaugaua

SEQ ID NO: 2127015 - RNA, 19 nt, Artificial Sequence
  Description of Artificial Sequence: Synthetic oligonucleotide
  Antisense strand to SEQ ID NO: 2127014
uaucaugucaccuuucuaa

SEQ ID NO: 2127016 - RNA, 19 nt, Artificial Sequence
  Description of Artificial Sequence: Synthetic oligonucleotide
  Sense strand starting at position 70 of SEQ ID NO: 1882514
ugcugaagauaauccuaau

SEQ ID NO: 2127017 - RNA, 19 nt, Artificial Sequence
  Description of Artificial Sequence: Synthetic oligonucleotide
  Antisense strand to SEQ ID NO: 2127016
auuaggauuaucuucagca

SEQ ID NO: 2127018 - RNA, 19 nt, Artificial Sequence
  Description of Artificial Sequence: Synthetic oligonucleotide
  Sense strand starting at position 175 of SEQ ID NO: 1882514
aguggcagcauggauaaua

SEQ ID NO: 2127019 - RNA, 19 nt, Artificial Sequence
  Description of Artificial Sequence: Synthetic oligonucleotide
  Antisense strand to SEQ ID NO: 2127018
uauuauccaugcugccacu

SEQ ID NO: 2127020 - RNA, 19 nt, Artificial Sequence
  Description of Artificial Sequence: Synthetic oligonucleotide
  Sense strand starting at position 245 of SEQ ID NO: 1882514
guucuaaguauauacguua

SEQ ID NO: 2127021 - RNA, 19 nt, Artificial Sequence
  Description of Artificial Sequence: Synthetic oligonucleotide
  Antisense strand to SEQ ID NO: 2127020
uaacguauauacuuagaac

SEQ ID NO: 2127022 - RNA, 19 nt, Artificial Sequence
  Description of Artificial Sequence: Synthetic oligonucleotide
  Sense strand starting at position 248 of SEQ ID NO: 1882514
cuaaguauauacguuaaca

SEQ ID NO: 2127023 - RNA, 19 nt, Artificial Sequence
  Description of Artificial Sequence: Synthetic oligonucleotide
  Antisense strand to SEQ ID NO: 2127022
uguuaacguauauacuuag

SEQ ID NO: 2127024 - RNA, 19 nt, Artificial Sequence
  Description of Artificial Sequence: Synthetic oligonucleotide
  Sense strand starting at position 288 of SEQ ID NO: 1882514
ugugacauccuaugaagua

SEQ ID NO: 2127025 - RNA, 19 nt, Artificial Sequence
  Description of Artificial Sequence: Synthetic oligonucleotide
  Antisense strand to SEQ ID NO: 2127024
uacuucauaggaugucaca

SEQ ID NO: 2127026 - RNA, 19 nt, Artificial Sequence
  Description of Artificial Sequence: Synthetic oligonucleotide
  Sense strand starting at position 318 of SEQ ID NO: 1882514
ucuuacuuugcagaugaga

SEQ ID NO: 2127027 - RNA, 19 nt, Artificial Sequence
  Description of Artificial Sequence: Synthetic oligonucleotide
  Antisense strand to SEQ ID NO: 2127026
ucucaucugcaaaguaaga

SEQ ID NO: 2127028 - RNA, 19 nt, Artificial Sequence
  Description of Artificial Sequence: Synthetic oligonucleotide
  Sense strand starting at position 362 of SEQ ID NO: 1882514
cuuggugaaucccuaauaa

SEQ ID NO: 2127029 - RNA, 19 nt, Artificial Sequence
  Description of Artificial Sequence: Synthetic oligonucleotide
  Antisense strand to SEQ ID NO: 2127028
uuauuagggauucaccaag

SEQ ID NO: 2127030 - RNA, 19 nt, Artificial Sequence
  Description of Artificial Sequence: Synthetic oligonucleotide
  Sense strand starting at position 613 of SEQ ID NO: 1882514
aggacuaaaugcuuccaca

SEQ ID NO: 2127031 - RNA, 19 nt, Artificial Sequence
  Description of Artificial Sequence: Synthetic oligonucleotide
  Antisense strand to SEQ ID NO: 2127030
uguggaagcauuuaguccu

SEQ ID NO: 2127032 - RNA, 19 nt, Artificial Sequence
  Description of Artificial Sequence: Synthetic oligonucleotide
  Sense strand starting at position 629 of SEQ ID NO: 1882514
acaugugagucacucaaca

SEQ ID NO: 2127033 - RNA, 19 nt, Artificial Sequence
  Description of Artificial Sequence: Synthetic oligonucleotide
  Antisense strand to SEQ ID NO: 2127032
uguugagugacucacaugu

SEQ ID NO: 2127034 - RNA, 19 nt, Artificial Sequence
  Description of Artificial Sequence: Synthetic oligonucleotide
  Sense strand starting at position 775 of SEQ ID NO: 1882514
auguucagaguuugaggau

SEQ ID NO: 2127035 - RNA, 19 nt, Artificial Sequence
  Description of Artificial Sequence: Synthetic oligonucleotide
  Antisense strand to SEQ ID NO: 2127034
auccucaaacucugaacau

SEQ ID NO: 2127036 - RNA, 19 nt, Artificial Sequence
  Description of Artificial Sequence: Synthetic oligonucleotide
  Sense strand starting at position 876 of SEQ ID NO: 1882514
gcggaagucauugagcaau

SEQ ID NO: 2127037 - RNA, 19 nt, Artificial Sequence
  Description of Artificial Sequence: Synthetic oligonucleotide
  Antisense strand to SEQ ID NO: 2127036
auugcucaaugacuuccgc

SEQ ID NO: 2127038 - RNA, 19 nt, Artificial Sequence
  Description of Artificial Sequence: Synthetic oligonucleotide
  Sense strand starting at position 878 of SEQ ID NO: 1882514
ggaagucauugagcaauau

SEQ ID NO: 2127039 - RNA, 19 nt, Artificial Sequence
  Description of Artificial Sequence: Synthetic oligonucleotide
  Antisense strand to SEQ ID NO: 2127038
auauugcucaaugacuucc

SEQ ID NO: 2127040 - RNA, 19 nt, Artificial Sequence
  Description of Artificial Sequence: Synthetic oligonucleotide
  Sense strand starting at position 1184 of SEQ ID NO: 1882514
ccuguucugcucuaggaua

SEQ ID NO: 2127041 - RNA, 19 nt, Artificial Sequence
  Description of Artificial Sequence: Synthetic oligonucleotide
  Antisense strand to SEQ ID NO: 2127040
uauccuagagcagaacagg

SEQ ID NO: 2127042 - RNA, 19 nt, Artificial Sequence
  Description of Artificial Sequence: Synthetic oligonucleotide
  Sense strand starting at position 1313 of SEQ ID NO: 1882514
auguuuagucagucgcacu

SEQ ID NO: 2127043 - RNA, 19 nt, Artificial Sequence
  Description of Artificial Sequence: Synthetic oligonucleotide
  Antisense strand to SEQ ID NO: 2127042
agugcgacugacuaaacau

SEQ ID NO: 2127044 - RNA, 19 nt, Artificial Sequence
  Description of Artificial Sequence: Synthetic oligonucleotide
  Sense strand starting at position 1475 of SEQ ID NO: 1882514
ccgaauuucuggccaagcu

SEQ ID NO: 2127045 - RNA, 19 nt, Artificial Sequence
  Description of Artificial Sequence: Synthetic oligonucleotide
  Antisense strand to SEQ ID NO: 2127044
agcuuggccagaaauucgg

SEQ ID NO: 2127046 - RNA, 19 nt, Artificial Sequence
  Description of Artificial Sequence: Synthetic oligonucleotide
  Sense strand starting at position 2144 of SEQ ID NO: 1882514
gauuuaggucgugguguga

SEQ ID NO: 2127047 - RNA, 19 nt, Artificial Sequence
  Description of Artificial Sequence: Synthetic oligonucleotide
  Antisense strand to SEQ ID NO: 2127046
ucacaccacgaccuaaauc

SEQ ID NO: 2127048 - RNA, 19 nt, Artificial Sequence
  Description of Artificial Sequence: Synthetic oligonucleotide
  Sense strand starting at position 2235 of SEQ ID NO: 1882514
guaaacugcgguuaucaaa

SEQ ID NO: 2127049 - RNA, 19 nt, Artificial Sequence
  Description of Artificial Sequence: Synthetic oligonucleotide
  Antisense strand to SEQ ID NO: 2127048
uuugauaaccgcaguuuac

SEQ ID NO: 2127050 - RNA, 19 nt, Artificial Sequence
  Description of Artificial Sequence: Synthetic oligonucleotide
  Sense strand starting at position 2243 of SEQ ID NO: 1882514
cgguuaucaaaguaaguaa

SEQ ID NO: 2127051 - RNA, 19 nt, Artificial Sequence
  Description of Artificial Sequence: Synthetic oligonucleotide
  Antisense strand to SEQ ID NO: 2127050
uuacuuacuuugauaaccg

SEQ ID NO: 2127052 - RNA, 19 nt, Artificial Sequence
  Description of Artificial Sequence: Synthetic oligonucleotide
  Sense strand starting at position 2300 of SEQ ID NO: 1882514
ucagaaguccgugaaauau

SEQ ID NO: 2127053 - RNA, 19 nt, Artificial Sequence
  Description of Artificial Sequence: Synthetic oligonucleotide
  Antisense strand to SEQ ID NO: 2127052
auauuucacggacuucuga

SEQ ID NO: 2127054 - RNA, 19 nt, Artificial Sequence
  Description of Artificial Sequence: Synthetic oligonucleotide
  Sense strand starting at position 2593 of SEQ ID NO: 1882514
guaugaauagaauguccuu

SEQ ID NO: 2127055 - RNA, 19 nt, Artificial Sequence
  Description of Artificial Sequence: Synthetic oligonucleotide
  Antisense strand to SEQ ID NO: 2127054
aaggacauucuauucauac

SEQ ID NO: 2127056 - RNA, 19 nt, Artificial Sequence
  Description of Artificial Sequence: Synthetic oligonucleotide
  Sense strand starting at position 2698 of SEQ ID NO: 1882514
aucugcuuucuacagucau

SEQ ID NO: 2127057 - RNA, 19 nt, Artificial Sequence
  Description of Artificial Sequence: Synthetic oligonucleotide
  Antisense strand to SEQ ID NO: 2127056
augacuguagaaagcagau

SEQ ID NO: 2127058 - RNA, 19 nt, Artificial Sequence
  Description of Artificial Sequence: Synthetic oligonucleotide
  Sense strand starting at position 2947 of SEQ ID NO: 1882514
gugggaauauagcuccuga

SEQ ID NO: 2127059 - RNA, 19 nt, Artificial Sequence
  Description of Artificial Sequence: Synthetic oligonucleotide
  Antisense strand to SEQ ID NO: 2127058
ucaggagcuauauucccac

SEQ ID NO: 2127060 - RNA, 19 nt, Artificial Sequence
  Description of Artificial Sequence: Synthetic oligonucleotide
  Sense strand starting at position 2958 of SEQ ID NO: 1882514
gcuccugaucuugaagaau

SEQ ID NO: 2127061 - RNA, 19 nt, Artificial Sequence
  Description of Artificial Sequence: Synthetic oligonucleotide
  Antisense strand to SEQ ID NO: 2127060
auucuucaagaucaggagc

SEQ ID NO: 2127062 - RNA, 19 nt, Artificial Sequence
  Description of Artificial Sequence: Synthetic oligonucleotide
  Sense strand starting at position 3147 of SEQ ID NO: 1882514
uguguuugaaacugaugag

SEQ ID NO: 2127063 - RNA, 19 nt, Artificial Sequence
  Description of Artificial Sequence: Synthetic oligonucleotide
  Antisense strand to SEQ ID NO: 2127062
cucaucaguuucaaacaca

SEQ ID NO: 2127064 - RNA, 19 nt, Artificial Sequence
  Description of Artificial Sequence: Synthetic oligonucleotide
  Sense strand starting at position 3166 of SEQ ID NO: 1882514
acaaguaugccagaggucu

SEQ ID NO: 2127065 - RNA, 19 nt, Artificial Sequence
  Description of Artificial Sequence: Synthetic oligonucleotide
  Antisense strand to SEQ ID NO: 2127064
agaccucuggcauacuugu

SEQ ID NO: 2127066 - RNA, 19 nt, Artificial Sequence
  Description of Artificial Sequence: Synthetic oligonucleotide
  Sense strand starting at position 3239 of SEQ ID NO: 1882514
aaguuuagauaugucugga

SEQ ID NO: 2127067 - RNA, 19 nt, Artificial Sequence
  Description of Artificial Sequence: Synthetic oligonucleotide
  Antisense strand to SEQ ID NO: 2127066
uccagacauaucuaaacuu

SEQ ID NO: 2127068 - RNA, 19 nt, Artificial Sequence
  Description of Artificial Sequence: Synthetic oligonucleotide
  Sense strand starting at position 3315 of SEQ ID NO: 1882514
auguaugaggcuugaagag

SEQ ID NO: 2127069 - RNA, 19 nt, Artificial Sequence
  Description of Artificial Sequence: Synthetic oligonucleotide
  Antisense strand to SEQ ID NO: 2127068
cucuucaagccucauacau

SEQ ID NO: 2127070 - RNA, 19 nt, Artificial Sequence
  Description of Artificial Sequence: Synthetic oligonucleotide
  Sense strand starting at position 3408 of SEQ ID NO: 1882514
cuuggagccucucuagauu

SEQ ID NO: 2127071 - RNA, 19 nt, Artificial Sequence
  Description of Artificial Sequence: Synthetic oligonucleotide
  Antisense strand to SEQ ID NO: 2127070
aaucuagagaggcuccaag

SEQ ID NO: 2127072 - RNA, 19 nt, Artificial Sequence
  Description of Artificial Sequence: Synthetic oligonucleotide
  Sense strand starting at position 3438 of SEQ ID NO: 1882514
auacaaguuguaugugauc

SEQ ID NO: 2127073 - RNA, 19 nt, Artificial Sequence
  Description of Artificial Sequence: Synthetic oligonucleotide
  Antisense strand to SEQ ID NO: 2127072
gaucacauacaacuuguau

SEQ ID NO: 2127074 - RNA, 19 nt, Artificial Sequence
  Description of Artificial Sequence: Synthetic oligonucleotide
  Sense strand starting at position 3440 of SEQ ID NO: 1882514
acaaguuguaugugaucau

SEQ ID NO: 2127075 - RNA, 19 nt, Artificial Sequence
  Description of Artificial Sequence: Synthetic oligonucleotide
  Antisense strand to SEQ ID NO: 2127074
augaucacauacaacuugu

SEQ ID NO: 2127076 - RNA, 19 nt, Artificial Sequence
  Description of Artificial Sequence: Synthetic oligonucleotide
  Sense strand starting at position 3533 of SEQ ID NO: 1882514
cuguuugaaggcugaaauc

SEQ ID NO: 2127077 - RNA, 19 nt, Artificial Sequence
  Description of Artificial Sequence: Synthetic oligonucleotide
  Antisense strand to SEQ ID NO: 2127076
gauuucagccuucaaacag

SEQ ID NO: 2127078 - RNA, 19 nt, Artificial Sequence
  Description of Artificial Sequence: Synthetic oligonucleotide
  Sense strand starting at position 3699 of SEQ ID NO: 1882514
uauggugauuaagugucau

SEQ ID NO: 2127079 - RNA, 19 nt, Artificial Sequence
  Description of Artificial Sequence: Synthetic oligonucleotide
  Antisense strand to SEQ ID NO: 2127078
augacacuuaaucaccaua

SEQ ID NO: 2127080 - RNA, 19 nt, Artificial Sequence
  Description of Artificial Sequence: Synthetic oligonucleotide
  Sense strand starting at position 3732 of SEQ ID NO: 1882514
cugcuaauggcugggaaua

SEQ ID NO: 2127081 - RNA, 19 nt, Artificial Sequence
  Description of Artificial Sequence: Synthetic oligonucleotide
  Antisense strand to SEQ ID NO: 2127080
uauucccagccauuagcag

SEQ ID NO: 2127082 - RNA, 19 nt, Artificial Sequence
  Description of Artificial Sequence: Synthetic oligonucleotide
  Sense strand starting at position 3733 of SEQ ID NO: 1882514
ugcuaauggcugggaauaa

SEQ ID NO: 2127083 - RNA, 19 nt, Artificial Sequence
  Description of Artificial Sequence: Synthetic oligonucleotide
  Antisense strand to SEQ ID NO: 2127082
uuauucccagccauuagca

SEQ ID NO: 2127084 - RNA, 19 nt, Artificial Sequence
  Description of Artificial Sequence: Synthetic oligonucleotide
  Sense strand starting at position 3795 of SEQ ID NO: 1882514
gugacaaguccauggauug

SEQ ID NO: 2127085 - RNA, 19 nt, Artificial Sequence
  Description of Artificial Sequence: Synthetic oligonucleotide
  Antisense strand to SEQ ID NO: 2127084
caauccauggacuugucac

SEQ ID NO: 2127086 - RNA, 19 nt, Artificial Sequence
  Description of Artificial Sequence: Synthetic oligonucleotide
  Sense strand starting at position 3796 of SEQ ID NO: 1882514
ugacaaguccauggauuga

SEQ ID NO: 2127087 - RNA, 19 nt, Artificial Sequence
  Description of Artificial Sequence: Synthetic oligonucleotide
  Antisense strand to SEQ ID NO: 2127086
ucaauccauggacuuguca

SEQ ID NO: 2127088 - RNA, 19 nt, Artificial Sequence
  Description of Artificial Sequence: Synthetic oligonucleotide
  Sense strand starting at position 3807 of SEQ ID NO: 1882514
uggauugauuuggaggguu

SEQ ID NO: 2127089 - RNA, 19 nt, Artificial Sequence
  Description of Artificial Sequence: Synthetic oligonucleotide
  Antisense strand to SEQ ID NO: 2127088
aacccuccaaaucaaucca

SEQ ID NO: 2127090 - RNA, 19 nt, Artificial Sequence
  Description of Artificial Sequence: Synthetic oligonucleotide
  Sense strand starting at position 3835 of SEQ ID NO: 1882514
ccugaacuugaaugcauaa

SEQ ID NO: 2127091 - RNA, 19 nt, Artificial Sequence
  Description of Artificial Sequence: Synthetic oligonucleotide
  Antisense strand to SEQ ID NO: 2127090
uuaugcauucaaguucagg

SEQ ID NO: 2127092 - RNA, 19 nt, Artificial Sequence
  Description of Artificial Sequence: Synthetic oligonucleotide
  Sense strand starting at position 3888 of SEQ ID NO: 1882514
uuugucacaugcucaaaga

SEQ ID NO: 2127093 - RNA, 19 nt, Artificial Sequence
  Description of Artificial Sequence: Synthetic oligonucleotide
  Antisense strand to SEQ ID NO: 2127092
ucuuugagcaugugacaaa

SEQ ID NO: 2127094 - RNA, 19 nt, Artificial Sequence
  Description of Artificial Sequence: Synthetic oligonucleotide
  Sense strand starting at position 3914 of SEQ ID NO: 1882514
ggaacauacuguccuagaa

SEQ ID NO: 2127095 - RNA, 19 nt, Artificial Sequence
  Description of Artificial Sequence: Synthetic oligonucleotide
  Antisense strand to SEQ ID NO: 2127094
uucuaggacaguauguucc

SEQ ID NO: 2127096 - RNA, 19 nt, Artificial Sequence
  Description of Artificial Sequence: Synthetic oligonucleotide
  Sense strand starting at position 33 of SEQ ID NO: 1882515
auguuauccuuagcuguac

SEQ ID NO: 2127097 - RNA, 19 nt, Artificial Sequence
  Description of Artificial Sequence: Synthetic oligonucleotide
  Antisense strand to SEQ ID NO: 2127096
guacagcuaaggauaacau

SEQ ID NO: 2127098 - RNA, 19 nt, Artificial Sequence
  Description of Artificial Sequence: Synthetic oligonucleotide
  Sense strand starting at position 189 of SEQ ID NO: 1882515
gauacauugcugugcucca

SEQ ID NO: 2127099 - RNA, 19 nt, Artificial Sequence
  Description of Artificial Sequence: Synthetic oligonucleotide
  Antisense strand to SEQ ID NO: 2127098
uggagcacagcaauguauc

SEQ ID NO: 2127100 - RNA, 19 nt, Artificial Sequence
  Description of Artificial Sequence: Synthetic oligonucleotide
  Sense strand starting at position 280 of SEQ ID NO: 1882515
agugaagcuucuguuuaca

SEQ ID NO: 2127101 - RNA, 19 nt, Artificial Sequence
  Description of Artificial Sequence: Synthetic oligonucleotide
  Antisense strand to SEQ ID NO: 2127100
uguaaacagaagcuucacu

SEQ ID NO: 2127102 - RNA, 19 nt, Artificial Sequence
  Description of Artificial Sequence: Synthetic oligonucleotide
  Sense strand starting at position 282 of SEQ ID NO: 1882515
ugaagcuucuguuuacaag

SEQ ID NO: 2127103 - RNA, 19 nt, Artificial Sequence
  Description of Artificial Sequence: Synthetic oligonucleotide
  Antisense strand to SEQ ID NO: 2127102
cuuguaaacagaagcuuca

SEQ ID NO: 2127104 - RNA, 19 nt, Artificial Sequence
  Description of Artificial Sequence: Synthetic oligonucleotide
  Sense strand starting at position 283 of SEQ ID NO: 1882515
gaagcuucuguuuacaagu

SEQ ID NO: 2127105 - RNA, 19 nt, Artificial Sequence
  Description of Artificial Sequence: Synthetic oligonucleotide
  Antisense strand to SEQ ID NO: 2127104
acuuguaaacagaagcuuc

SEQ ID NO: 2127106 - RNA, 19 nt, Artificial Sequence
  Description of Artificial Sequence: Synthetic oligonucleotide
  Sense strand starting at position 291 of SEQ ID NO: 1882515
uguuuacaaguuuaccaua

SEQ ID NO: 2127107 - RNA, 19 nt, Artificial Sequence
  Description of Artificial Sequence: Synthetic oligonucleotide
  Antisense strand to SEQ ID NO: 2127106
uaugguaaacuuguaaaca

SEQ ID NO: 2127108 - RNA, 19 nt, Artificial Sequence
  Description of Artificial Sequence: Synthetic oligonucleotide
  Sense strand starting at position 296 of SEQ ID NO: 1882515
acaaguuuaccauauggca

SEQ ID NO: 2127109 - RNA, 19 nt, Artificial Sequence
  Description of Artificial Sequence: Synthetic oligonucleotide
  Antisense strand to SEQ ID NO: 2127108
ugccauaugguaaacuugu

SEQ ID NO: 2127110 - RNA, 19 nt, Artificial Sequence
  Description of Artificial Sequence: Synthetic oligonucleotide
  Sense strand starting at position 695 of SEQ ID NO: 1882515
ccgcgaaugcucuuuguuu

SEQ ID NO: 2127111 - RNA, 19 nt, Artificial Sequence
  Description of Artificial Sequence: Synthetic oligonucleotide
  Antisense strand to SEQ ID NO: 2127110
aaacaaagagcauucgcgg

SEQ ID NO: 2127112 - RNA, 19 nt, Artificial Sequence
  Description of Artificial Sequence: Synthetic oligonucleotide
  Sense strand starting at position 706 of SEQ ID NO: 1882515
cuuuguuucuaacuggaaa

SEQ ID NO: 2127113 - RNA, 19 nt, Artificial Sequence
  Description of Artificial Sequence: Synthetic oligonucleotide
  Antisense strand to SEQ ID NO: 2127112
uuuccaguuagaaacaaag

SEQ ID NO: 2127114 - RNA, 19 nt, Artificial Sequence
  Description of Artificial Sequence: Synthetic oligonucleotide
  Sense strand starting at position 770 of SEQ ID NO: 1882515
agagacacgucacuuuacu

SEQ ID NO: 2127115 - RNA, 19 nt, Artificial Sequence
  Description of Artificial Sequence: Synthetic oligonucleotide
  Antisense strand to SEQ ID NO: 2127114
aguaaagugacgugucucu

SEQ ID NO: 2127116 - RNA, 19 nt, Artificial Sequence
  Description of Artificial Sequence: Synthetic oligonucleotide
  Sense strand starting at position 782 of SEQ ID NO: 1882515
cuuuacuuugguugacaga

SEQ ID NO: 2127117 - RNA, 19 nt, Artificial Sequence
  Description of Artificial Sequence: Synthetic oligonucleotide
  Antisense strand to SEQ ID NO: 2127116
ucugucaaccaaaguaaag

SEQ ID NO: 2127118 - RNA, 19 nt, Artificial Sequence
  Description of Artificial Sequence: Synthetic oligonucleotide
  Sense strand starting at position 795 of SEQ ID NO: 1882515
gacagaauuucguauauaa

SEQ ID NO: 2127119 - RNA, 19 nt, Artificial Sequence
  Description of Artificial Sequence: Synthetic oligonucleotide
  Antisense strand to SEQ ID NO: 2127118
uuauauacgaaauucuguc

SEQ ID NO: 2127120 - RNA, 19 nt, Artificial Sequence
  Description of Artificial Sequence: Synthetic oligonucleotide
  Sense strand starting at position 841 of SEQ ID NO: 1882515
agcuuaaaguccuuagaau

SEQ ID NO: 2127121 - RNA, 19 nt, Artificial Sequence
  Description of Artificial Sequence: Synthetic oligonucleotide
  Antisense strand to SEQ ID NO: 2127120
auucuaaggacuuuaagcu

SEQ ID NO: 2127122 - RNA, 19 nt, Artificial Sequence
  Description of Artificial Sequence: Synthetic oligonucleotide
  Sense strand starting at position 842 of SEQ ID NO: 1882515
gcuuaaaguccuuagaaug

SEQ ID NO: 2127123 - RNA, 19 nt, Artificial Sequence
  Description of Artificial Sequence: Synthetic oligonucleotide
  Antisense strand to SEQ ID NO: 2127122
cauucuaaggacuuuaagc

SEQ ID NO: 2127124 - RNA, 19 nt, Artificial Sequence
  Description of Artificial Sequence: Synthetic oligonucleotide
  Sense strand starting at position 1797 of SEQ ID NO: 1882515
ugagguagucccggaaauc

SEQ ID NO: 2127125 - RNA, 19 nt, Artificial Sequence
  Description of Artificial Sequence: Synthetic oligonucleotide
  Antisense strand to SEQ ID NO: 2127124
gauuuccgggacuaccuca

SEQ ID NO: 2127126 - RNA, 19 nt, Artificial Sequence
  Description of Artificial Sequence: Synthetic oligonucleotide
  Sense strand starting at position 1808 of SEQ ID NO: 1882515
cggaaauccuugcuucgga

SEQ ID NO: 2127127 - RNA, 19 nt, Artificial Sequence
  Description of Artificial Sequence: Synthetic oligonucleotide
  Antisense strand to SEQ ID NO: 2127126
uccgaagcaaggauuuccg

SEQ ID NO: 2127128 - RNA, 19 nt, Artificial Sequence
  Description of Artificial Sequence: Synthetic oligonucleotide
  Sense strand starting at position 2657 of SEQ ID NO: 1882515
aagccuuaggcucgaggaa

SEQ ID NO: 2127129 - RNA, 19 nt, Artificial Sequence
  Description of Artificial Sequence: Synthetic oligonucleotide
  Antisense strand to SEQ ID NO: 2127128
uuccucgagccuaaggcuu

SEQ ID NO: 2127130 - RNA, 19 nt, Artificial Sequence
  Description of Artificial Sequence: Synthetic oligonucleotide
  Sense strand starting at position 2670 of SEQ ID NO: 1882515
gaggaagcgugacugcuua

SEQ ID NO: 2127131 - RNA, 19 nt, Artificial Sequence
  Description of Artificial Sequence: Synthetic oligonucleotide
  Antisense strand to SEQ ID NO: 2127130
uaagcagucacgcuuccuc

SEQ ID NO: 2127132 - RNA, 19 nt, Artificial Sequence
  Description of Artificial Sequence: Synthetic oligonucleotide
  Sense strand starting at position 2698 of SEQ ID NO: 1882515
aauaaagguucuguaaguc

SEQ ID NO: 2127133 - RNA, 19 nt, Artificial Sequence
  Description of Artificial Sequence: Synthetic oligonucleotide
  Antisense strand to SEQ ID NO: 2127132
gacuuacagaaccuuuauu

SEQ ID NO: 2127134 - RNA, 19 nt, Artificial Sequence
  Description of Artificial Sequence: Synthetic oligonucleotide
  Sense strand starting at position 2764 of SEQ ID NO: 1882515
cucgccuaggaguauauaa

SEQ ID NO: 2127135 - RNA, 19 nt, Artificial Sequence
  Description of Artificial Sequence: Synthetic oligonucleotide
  Antisense strand to SEQ ID NO: 2127134
uuauauacuccuaggcgag

SEQ ID NO: 2127136 - RNA, 19 nt, Artificial Sequence
  Description of Artificial Sequence: Synthetic oligonucleotide
  Sense strand starting at position 2766 of SEQ ID NO: 1882515
cgccuaggaguauauaaac

SEQ ID NO: 2127137 - RNA, 19 nt, Artificial Sequence
  Description of Artificial Sequence: Synthetic oligonucleotide
  Antisense strand to SEQ ID NO: 2127136
guuuauauacuccuaggcg

SEQ ID NO: 2127138 - RNA, 19 nt, Artificial Sequence
  Description of Artificial Sequence: Synthetic oligonucleotide
  Sense strand starting at position 2874 of SEQ ID NO: 1882515
uucuaauguggacgaucau

SEQ ID NO: 2127139 - RNA, 19 nt, Artificial Sequence
  Description of Artificial Sequence: Synthetic oligonucleotide
  Antisense strand to SEQ ID NO: 2127138
augaucguccacauuagaa

SEQ ID NO: 2127140 - RNA, 19 nt, Artificial Sequence
  Description of Artificial Sequence: Synthetic oligonucleotide
  Sense strand starting at position 2875 of SEQ ID NO: 1882515
ucuaauguggacgaucauu

SEQ ID NO: 2127141 - RNA, 19 nt, Artificial Sequence
  Description of Artificial Sequence: Synthetic oligonucleotide
  Antisense strand to SEQ ID NO: 2127140
aaugaucguccacauuaga

SEQ ID NO: 2127142 - RNA, 19 nt, Artificial Sequence
  Description of Artificial Sequence: Synthetic oligonucleotide
  Sense strand starting at position 2922 of SEQ ID NO: 1882515
gacugacgccuguaaucac

SEQ ID NO: 2127143 - RNA, 19 nt, Artificial Sequence
  Description of Artificial Sequence: Synthetic oligonucleotide
  Antisense strand to SEQ ID NO: 2127142
gugauuacaggcgucaguc

SEQ ID NO: 2127144 - RNA, 19 nt, Artificial Sequence
  Description of Artificial Sequence: Synthetic oligonucleotide
  Sense strand starting at position 3372 of SEQ ID NO: 1882515
uggugaugcgcuccuguga

SEQ ID NO: 2127145 - RNA, 19 nt, Artificial Sequence
  Description of Artificial Sequence: Synthetic oligonucleotide
  Antisense strand to SEQ ID NO: 2127144
ucacaggagcgcaucacca

SEQ ID NO: 2127146 - RNA, 19 nt, Artificial Sequence
  Description of Artificial Sequence: Synthetic oligonucleotide
  Sense strand starting at position 3373 of SEQ ID NO: 1882515
ggugaugcgcuccugugau

SEQ ID NO: 2127147 - RNA, 19 nt, Artificial Sequence
  Description of Artificial Sequence: Synthetic oligonucleotide
  Antisense strand to SEQ ID NO: 2127146
aucacaggagcgcaucacc

SEQ ID NO: 2127148 - RNA, 19 nt, Artificial Sequence
  Description of Artificial Sequence: Synthetic oligonucleotide
  Sense strand starting at position 3532 of SEQ ID NO: 1882515
gccuuuggugaacaggaau

SEQ ID NO: 2127149 - RNA, 19 nt, Artificial Sequence
  Description of Artificial Sequence: Synthetic oligonucleotide
  Antisense strand to SEQ ID NO: 2127148
auuccuguucaccaaaggc

SEQ ID NO: 2127150 - RNA, 19 nt, Artificial Sequence
  Description of Artificial Sequence: Synthetic oligonucleotide
  Sense strand starting at position 3558 of SEQ ID NO: 1882515
auuagugacccgcagugua

SEQ ID NO: 2127151 - RNA, 19 nt, Artificial Sequence
  Description of Artificial Sequence: Synthetic oligonucleotide
  Antisense strand to SEQ ID NO: 2127150
uacacugcgggucacuaau

SEQ ID NO: 2127152 - RNA, 19 nt, Artificial Sequence
  Description of Artificial Sequence: Synthetic oligonucleotide
  Sense strand starting at position 3623 of SEQ ID NO: 1882515
gagauuuccuaggauagac

SEQ ID NO: 2127153 - RNA, 19 nt, Artificial Sequence
  Description of Artificial Sequence: Synthetic oligonucleotide
  Antisense strand to SEQ ID NO: 2127152
gucuauccuaggaaaucuc

SEQ ID NO: 2127154 - RNA, 19 nt, Artificial Sequence
  Description of Artificial Sequence: Synthetic oligonucleotide
  Sense strand starting at position 3642 of SEQ ID NO: 1882515
aagccaguuugugcaauuu

SEQ ID NO: 2127155 - RNA, 19 nt, Artificial Sequence
  Description of Artificial Sequence: Synthetic oligonucleotide
  Antisense strand to SEQ ID NO: 2127154
aaauugcacaaacuggcuu

SEQ ID NO: 2127156 - RNA, 19 nt, Artificial Sequence
  Description of Artificial Sequence: Synthetic oligonucleotide
  Sense strand starting at position 3685 of SEQ ID NO: 1882515
auggaaagauuagaguuua

SEQ ID NO: 2127157 - RNA, 19 nt, Artificial Sequence
  Description of Artificial Sequence: Synthetic oligonucleotide
  Antisense strand to SEQ ID NO: 2127156
uaaacucuaaucuuuccau

SEQ ID NO: 2127158 - RNA, 19 nt, Artificial Sequence
  Description of Artificial Sequence: Synthetic oligonucleotide
  Sense strand starting at position 3740 of SEQ ID NO: 1882515
ggugcauccguuuagugga

SEQ ID NO: 2127159 - RNA, 19 nt, Artificial Sequence
  Description of Artificial Sequence: Synthetic oligonucleotide
  Antisense strand to SEQ ID NO: 2127158
uccacuaaacggaugcacc

SEQ ID NO: 2127160 - RNA, 19 nt, Artificial Sequence
  Description of Artificial Sequence: Synthetic oligonucleotide
  Sense strand starting at position 3745 of SEQ ID NO: 1882515
auccguuuaguggauuagu

SEQ ID NO: 2127161 - RNA, 19 nt, Artificial Sequence
  Description of Artificial Sequence: Synthetic oligonucleotide
  Antisense strand to SEQ ID NO: 2127160
acuaauccacuaaacggau

SEQ ID NO: 2127162 - RNA, 19 nt, Artificial Sequence
  Description of Artificial Sequence: Synthetic oligonucleotide
  Sense strand starting at position 3748 of SEQ ID NO: 1882515
cguuuaguggauuaguaua

SEQ ID NO: 2127163 - RNA, 19 nt, Artificial Sequence
  Description of Artificial Sequence: Synthetic oligonucleotide
  Antisense strand to SEQ ID NO: 2127162
uauacuaauccacuaaacg

SEQ ID NO: 2127164 - RNA, 19 nt, Artificial Sequence
  Description of Artificial Sequence: Synthetic oligonucleotide
  Sense strand starting at position 3750 of SEQ ID NO: 1882515
uuuaguggauuaguauaca

SEQ ID NO: 2127165 - RNA, 19 nt, Artificial Sequence
  Description of Artificial Sequence: Synthetic oligonucleotide
  Antisense strand to SEQ ID NO: 2127164
uguauacuaauccacuaaa

SEQ ID NO: 2127166 - RNA, 19 nt, Artificial Sequence
  Description of Artificial Sequence: Synthetic oligonucleotide
  Sense strand starting at position 3762 of SEQ ID NO: 1882515
guauacagccauuaggaau

SEQ ID NO: 2127167 - RNA, 19 nt, Artificial Sequence
  Description of Artificial Sequence: Synthetic oligonucleotide
  Antisense strand to SEQ ID NO: 2127166
auuccuaauggcuguauac

SEQ ID NO: 2127168 - RNA, 19 nt, Artificial Sequence
  Description of Artificial Sequence: Synthetic oligonucleotide
  Sense strand starting at position 3784 of SEQ ID NO: 1882515
ggaauucuuuaugugcuga

SEQ ID NO: 2127169 - RNA, 19 nt, Artificial Sequence
  Description of Artificial Sequence: Synthetic oligonucleotide
  Antisense strand to SEQ ID NO: 2127168
ucagcacauaaagaauucc

SEQ ID NO: 2127170 - RNA, 19 nt, Artificial Sequence
  Description of Artificial Sequence: Synthetic oligonucleotide
  Sense strand starting at position 3837 of SEQ ID NO: 1882515
ccagguucugaauagugua

SEQ ID NO: 2127171 - RNA, 19 nt, Artificial Sequence
  Description of Artificial Sequence: Synthetic oligonucleotide
  Antisense strand to SEQ ID NO: 2127170
uacacuauucagaaccugg

SEQ ID NO: 2127172 - RNA, 19 nt, Artificial Sequence
  Description of Artificial Sequence: Synthetic oligonucleotide
  Sense strand starting at position 3844 of SEQ ID NO: 1882515
cugaauaguguauaaagua

SEQ ID NO: 2127173 - RNA, 19 nt, Artificial Sequence
  Description of Artificial Sequence: Synthetic oligonucleotide
  Antisense strand to SEQ ID NO: 2127172
uacuuuauacacuauucag

SEQ ID NO: 2127174 - RNA, 19 nt, Artificial Sequence
  Description of Artificial Sequence: Synthetic oligonucleotide
  Sense strand starting at position 3936 of SEQ ID NO: 1882515
aguggcugccucuaaggau

SEQ ID NO: 2127175 - RNA, 19 nt, Artificial Sequence
  Description of Artificial Sequence: Synthetic oligonucleotide
  Antisense strand to SEQ ID NO: 2127174
auccuuagaggcagccacu

SEQ ID NO: 2127176 - RNA, 19 nt, Artificial Sequence
  Description of Artificial Sequence: Synthetic oligonucleotide
  Sense strand starting at position 17 of SEQ ID NO: 1882516
auaucucagaguuggauga

SEQ ID NO: 2127177 - RNA, 19 nt, Artificial Sequence
  Description of Artificial Sequence: Synthetic oligonucleotide
  Antisense strand to SEQ ID NO: 2127176
ucauccaacucugagauau

SEQ ID NO: 2127178 - RNA, 19 nt, Artificial Sequence
  Description of Artificial Sequence: Synthetic oligonucleotide
  Sense strand starting at position 18 of SEQ ID NO: 1882516
uaucucagaguuggaugaa

SEQ ID NO: 2127179 - RNA, 19 nt, Artificial Sequence
  Description of Artificial Sequence: Synthetic oligonucleotide
  Antisense strand to SEQ ID NO: 2127178
uucauccaacucugagaua

SEQ ID NO: 2127180 - RNA, 19 nt, Artificial Sequence
  Description of Artificial Sequence: Synthetic oligonucleotide
  Sense strand starting at position 181 of SEQ ID NO: 1882516
ccaguugacuggcucauaa

SEQ ID NO: 2127181 - RNA, 19 nt, Artificial Sequence
  Description of Artificial Sequence: Synthetic oligonucleotide
  Antisense strand to SEQ ID NO: 2127180
uuaugagccagucaacugg

SEQ ID NO: 2127182 - RNA, 19 nt, Artificial Sequence
  Description of Artificial Sequence: Synthetic oligonucleotide
  Sense strand starting at position 183 of SEQ ID NO: 1882516
aguugacuggcucauaaau

SEQ ID NO: 2127183 - RNA, 19 nt, Artificial Sequence
  Description of Artificial Sequence: Synthetic oligonucleotide
  Antisense strand to SEQ ID NO: 2127182
auuuaugagccagucaacu

SEQ ID NO: 2127184 - RNA, 19 nt, Artificial Sequence
  Description of Artificial Sequence: Synthetic oligonucleotide
  Sense strand starting at position 317 of SEQ ID NO: 1882516
cgugauuagacugagucga

SEQ ID NO: 2127185 - RNA, 19 nt, Artificial Sequence
  Description of Artificial Sequence: Synthetic oligonucleotide
  Antisense strand to SEQ ID NO: 2127184
ucgacucagucuaaucacg

SEQ ID NO: 2127186 - RNA, 19 nt, Artificial Sequence
  Description of Artificial Sequence: Synthetic oligonucleotide
  Sense strand starting at position 319 of SEQ ID NO: 1882516
ugauuagacugagucgaag

SEQ ID NO: 2127187 - RNA, 19 nt, Artificial Sequence
  Description of Artificial Sequence: Synthetic oligonucleotide
  Antisense strand to SEQ ID NO: 2127186
cuucgacucagucuaauca

SEQ ID NO: 2127188 - RNA, 19 nt, Artificial Sequence
  Description of Artificial Sequence: Synthetic oligonucleotide
  Sense strand starting at position 340 of SEQ ID NO: 1882516
agcggugaaguauaaucaa

SEQ ID NO: 2127189 - RNA, 19 nt, Artificial Sequence
  Description of Artificial Sequence: Synthetic oligonucleotide
  Antisense strand to SEQ ID NO: 2127188
uugauuauacuucaccgcu

SEQ ID NO: 2127190 - RNA, 19 nt, Artificial Sequence
  Description of Artificial Sequence: Synthetic oligonucleotide
  Sense strand starting at position 343 of SEQ ID NO: 1882516
ggugaaguauaaucaagua

SEQ ID NO: 2127191 - RNA, 19 nt, Artificial Sequence
  Description of Artificial Sequence: Synthetic oligonucleotide
  Antisense strand to SEQ ID NO: 2127190
uacuugauuauacuucacc

SEQ ID NO: 2127192 - RNA, 19 nt, Artificial Sequence
  Description of Artificial Sequence: Synthetic oligonucleotide
  Sense strand starting at position 625 of SEQ ID NO: 1882516
cgggauugagauugugaac

SEQ ID NO: 2127193 - RNA, 19 nt, Artificial Sequence
  Description of Artificial Sequence: Synthetic oligonucleotide
  Antisense strand to SEQ ID NO: 2127192
guucacaaucucaaucccg

SEQ ID NO: 2127194 - RNA, 19 nt, Artificial Sequence
  Description of Artificial Sequence: Synthetic oligonucleotide
  Sense strand starting at position 631 of SEQ ID NO: 1882516
ugagauugugaacgucaau

SEQ ID NO: 2127195 - RNA, 19 nt, Artificial Sequence
  Description of Artificial Sequence: Synthetic oligonucleotide
  Antisense strand to SEQ ID NO: 2127194
auugacguucacaaucuca

SEQ ID NO: 2127196 - RNA, 19 nt, Artificial Sequence
  Description of Artificial Sequence: Synthetic oligonucleotide
  Sense strand starting at position 695 of SEQ ID NO: 1882516
agcauuaucaauugagggu

SEQ ID NO: 2127197 - RNA, 19 nt, Artificial Sequence
  Description of Artificial Sequence: Synthetic oligonucleotide
  Antisense strand to SEQ ID NO: 2127196
acccucaauugauaaugcu

SEQ ID NO: 2127198 - RNA, 19 nt, Artificial Sequence
  Description of Artificial Sequence: Synthetic oligonucleotide
  Sense strand starting at position 988 of SEQ ID NO: 1882516
uuacuuauagaguacugua

SEQ ID NO: 2127199 - RNA, 19 nt, Artificial Sequence
  Description of Artificial Sequence: Synthetic oligonucleotide
  Antisense strand to SEQ ID NO: 2127198
uacaguacucuauaaguaa

SEQ ID NO: 2127200 - RNA, 19 nt, Artificial Sequence
  Description of Artificial Sequence: Synthetic oligonucleotide
  Sense strand starting at position 993 of SEQ ID NO: 1882516
uauagaguacuguaguuga

SEQ ID NO: 2127201 - RNA, 19 nt, Artificial Sequence
  Description of Artificial Sequence: Synthetic oligonucleotide
  Antisense strand to SEQ ID NO: 2127200
ucaacuacaguacucuaua

SEQ ID NO: 2127202 - RNA, 19 nt, Artificial Sequence
  Description of Artificial Sequence: Synthetic oligonucleotide
  Sense strand starting at position 998 of SEQ ID NO: 1882516
aguacuguaguugaaagua

SEQ ID NO: 2127203 - RNA, 19 nt, Artificial Sequence
  Description of Artificial Sequence: Synthetic oligonucleotide
  Antisense strand to SEQ ID NO: 2127202
uacuuucaacuacaguacu

SEQ ID NO: 2127204 - RNA, 19 nt, Artificial Sequence
  Description of Artificial Sequence: Synthetic oligonucleotide
  Sense strand starting at position 1092 of SEQ ID NO: 1882516
guauaaauguguccauaac

SEQ ID NO: 2127205 - RNA, 19 nt, Artificial Sequence
  Description of Artificial Sequence: Synthetic oligonucleotide
  Antisense strand to SEQ ID NO: 2127204
guuauggacacauuuauac

SEQ ID NO: 2127206 - RNA, 19 nt, Artificial Sequence
  Description of Artificial Sequence: Synthetic oligonucleotide
  Sense strand starting at position 1161 of SEQ ID NO: 1882516
agaugaaauccuuguuuaa

SEQ ID NO: 2127207 - RNA, 19 nt, Artificial Sequence
  Description of Artificial Sequence: Synthetic oligonucleotide
  Antisense strand to SEQ ID NO: 2127206
uuaaacaaggauuucaucu

SEQ ID NO: 2127208 - RNA, 19 nt, Artificial Sequence
  Description of Artificial Sequence: Synthetic oligonucleotide
  Sense strand starting at position 1234 of SEQ ID NO: 1882516
aggcuaaugcguuaggaug

SEQ ID NO: 2127209 - RNA, 19 nt, Artificial Sequence
  Description of Artificial Sequence: Synthetic oligonucleotide
  Antisense strand to SEQ ID NO: 2127208
cauccuaacgcauuagccu

SEQ ID NO: 2127210 - RNA, 19 nt, Artificial Sequence
  Description of Artificial Sequence: Synthetic oligonucleotide
  Sense strand starting at position 1245 of SEQ ID NO: 1882516
uuaggauggcucgaggcaa

SEQ ID NO: 2127211 - RNA, 19 nt, Artificial Sequence
  Description of Artificial Sequence: Synthetic oligonucleotide
  Antisense strand to SEQ ID NO: 2127210
uugccucgagccauccuaa

SEQ ID NO: 2127212 - RNA, 19 nt, Artificial Sequence
  Description of Artificial Sequence: Synthetic oligonucleotide
  Sense strand starting at position 1392 of SEQ ID NO: 1882516
uguuccuaugguuacauaa

SEQ ID NO: 2127213 - RNA, 19 nt, Artificial Sequence
  Description of Artificial Sequence: Synthetic oligonucleotide
  Antisense strand to SEQ ID NO: 2127212
uuauguaaccauaggaaca

SEQ ID NO: 2127214 - RNA, 19 nt, Artificial Sequence
  Description of Artificial Sequence: Synthetic oligonucleotide
  Sense strand starting at position 1491 of SEQ ID NO: 1882516
gcauucugagcgaguggga

SEQ ID NO: 2127215 - RNA, 19 nt, Artificial Sequence
  Description of Artificial Sequence: Synthetic oligonucleotide
  Antisense strand to SEQ ID NO: 2127214
ucccacucgcucagaaugc

SEQ ID NO: 2127216 - RNA, 19 nt, Artificial Sequence
  Description of Artificial Sequence: Synthetic oligonucleotide
  Sense strand starting at position 2051 of SEQ ID NO: 1882516
cuguuaaguccacagccaa

SEQ ID NO: 2127217 - RNA, 19 nt, Artificial Sequence
  Description of Artificial Sequence: Synthetic oligonucleotide
  Antisense strand to SEQ ID NO: 2127216
uuggcuguggacuuaacag

SEQ ID NO: 2127218 - RNA, 19 nt, Artificial Sequence
  Description of Artificial Sequence: Synthetic oligonucleotide
  Sense strand starting at position 2161 of SEQ ID NO: 1882516
aagugagcuguccaaccua

SEQ ID NO: 2127219 - RNA, 19 nt, Artificial Sequence
  Description of Artificial Sequence: Synthetic oligonucleotide
  Antisense strand to SEQ ID NO: 2127218
uagguuggacagcucacuu

SEQ ID NO: 2127220 - RNA, 19 nt, Artificial Sequence
  Description of Artificial Sequence: Synthetic oligonucleotide
  Sense strand starting at position 2296 of SEQ ID NO: 1882516
uuaaauuuaacguggugua

SEQ ID NO: 2127221 - RNA, 19 nt, Artificial Sequence
  Description of Artificial Sequence: Synthetic oligonucleotide
  Antisense strand to SEQ ID NO: 2127220
uacaccacguuaaauuuaa

SEQ ID NO: 2127222 - RNA, 19 nt, Artificial Sequence
  Description of Artificial Sequence: Synthetic oligonucleotide
  Sense strand starting at position 2346 of SEQ ID NO: 1882516
cucugaaaguugcuggaau

SEQ ID NO: 2127223 - RNA, 19 nt, Artificial Sequence
  Description of Artificial Sequence: Synthetic oligonucleotide
  Antisense strand to SEQ ID NO: 2127222
auuccagcaacuuucagag

SEQ ID NO: 2127224 - RNA, 19 nt, Artificial Sequence
  Description of Artificial Sequence: Synthetic oligonucleotide
  Sense strand starting at position 2348 of SEQ ID NO: 1882516
cugaaaguugcuggaauga

SEQ ID NO: 2127225 - RNA, 19 nt, Artificial Sequence
  Description of Artificial Sequence: Synthetic oligonucleotide
  Antisense strand to SEQ ID NO: 2127224
ucauuccagcaacuuucag

SEQ ID NO: 2127226 - RNA, 19 nt, Artificial Sequence
  Description of Artificial Sequence: Synthetic oligonucleotide
  Sense strand starting at position 2460 of SEQ ID NO: 1882516
aauuaagguccagaugcuu

SEQ ID NO: 2127227 - RNA, 19 nt, Artificial Sequence
  Description of Artificial Sequence: Synthetic oligonucleotide
  Antisense strand to SEQ ID NO: 2127226
aagcaucuggaccuuaauu

SEQ ID NO: 2127228 - RNA, 19 nt, Artificial Sequence
  Description of Artificial Sequence: Synthetic oligonucleotide
  Sense strand starting at position 2484 of SEQ ID NO: 1882516
cccuucuuuguugaguaga

SEQ ID NO: 2127229 - RNA, 19 nt, Artificial Sequence
  Description of Artificial Sequence: Synthetic oligonucleotide
  Antisense strand to SEQ ID NO: 2127228
ucuacucaacaaagaaggg

SEQ ID NO: 2127230 - RNA, 19 nt, Artificial Sequence
  Description of Artificial Sequence: Synthetic oligonucleotide
  Sense strand starting at position 2492 of SEQ ID NO: 1882516
uguugaguagagggagaua

SEQ ID NO: 2127231 - RNA, 19 nt, Artificial Sequence
  Description of Artificial Sequence: Synthetic oligonucleotide
  Antisense strand to SEQ ID NO: 2127230
uaucucccucuacucaaca

SEQ ID NO: 2127232 - RNA, 19 nt, Artificial Sequence
  Description of Artificial Sequence: Synthetic oligonucleotide
  Sense strand starting at position 2545 of SEQ ID NO: 1882516
gcaaaugauucuccuugga

SEQ ID NO: 2127233 - RNA, 19 nt, Artificial Sequence
  Description of Artificial Sequence: Synthetic oligonucleotide
  Antisense strand to SEQ ID NO: 2127232
uccaaggagaaucauuugc

SEQ ID NO: 2127234 - RNA, 19 nt, Artificial Sequence
  Description of Artificial Sequence: Synthetic oligonucleotide
  Sense strand starting at position 2549 of SEQ ID NO: 1882516
augauucuccuuggacauu

SEQ ID NO: 2127235 - RNA, 19 nt, Artificial Sequence
  Description of Artificial Sequence: Synthetic oligonucleotide
  Antisense strand to SEQ ID NO: 2127234
aauguccaaggagaaucau

SEQ ID NO: 2127236 - RNA, 19 nt, Artificial Sequence
  Description of Artificial Sequence: Synthetic oligonucleotide
  Sense strand starting at position 2597 of SEQ ID NO: 1882516
guggacaagcugugaaacu

SEQ ID NO: 2127237 - RNA, 19 nt, Artificial Sequence
  Description of Artificial Sequence: Synthetic oligonucleotide
  Antisense strand to SEQ ID NO: 2127236
aguuucacagcuuguccac

SEQ ID NO: 2127238 - RNA, 19 nt, Artificial Sequence
  Description of Artificial Sequence: Synthetic oligonucleotide
  Sense strand starting at position 2646 of SEQ ID NO: 1882516
agguaaaguuucccaggua

SEQ ID NO: 2127239 - RNA, 19 nt, Artificial Sequence
  Description of Artificial Sequence: Synthetic oligonucleotide
  Antisense strand to SEQ ID NO: 2127238
uaccugggaaacuuuaccu

SEQ ID NO: 2127240 - RNA, 19 nt, Artificial Sequence
  Description of Artificial Sequence: Synthetic oligonucleotide
  Sense strand starting at position 2671 of SEQ ID NO: 1882516
uggagcuacccucagaagu

SEQ ID NO: 2127241 - RNA, 19 nt, Artificial Sequence
  Description of Artificial Sequence: Synthetic oligonucleotide
  Antisense strand to SEQ ID NO: 2127240
acuucugaggguagcucca

SEQ ID NO: 2127242 - RNA, 19 nt, Artificial Sequence
  Description of Artificial Sequence: Synthetic oligonucleotide
  Sense strand starting at position 2732 of SEQ ID NO: 1882516
ucucuucucugggugauua

SEQ ID NO: 2127243 - RNA, 19 nt, Artificial Sequence
  Description of Artificial Sequence: Synthetic oligonucleotide
  Antisense strand to SEQ ID NO: 2127242
uaaucacccagagaagaga

SEQ ID NO: 2127244 - RNA, 19 nt, Artificial Sequence
  Description of Artificial Sequence: Synthetic oligonucleotide
  Sense strand starting at position 2743 of SEQ ID NO: 1882516
ggugauuaaucucuucuga

SEQ ID NO: 2127245 - RNA, 19 nt, Artificial Sequence
  Description of Artificial Sequence: Synthetic oligonucleotide
  Antisense strand to SEQ ID NO: 2127244
ucagaagagauuaaucacc

SEQ ID NO: 2127246 - RNA, 19 nt, Artificial Sequence
  Description of Artificial Sequence: Synthetic oligonucleotide
  Sense strand starting at position 2839 of SEQ ID NO: 1882516
ggaaauuccuuaucuggcu

SEQ ID NO: 2127247 - RNA, 19 nt, Artificial Sequence
  Description of Artificial Sequence: Synthetic oligonucleotide
  Antisense strand to SEQ ID NO: 2127246
agccagauaaggaauuucc

SEQ ID NO: 2127248 - RNA, 19 nt, Artificial Sequence
  Description of Artificial Sequence: Synthetic oligonucleotide
  Sense strand starting at position 3208 of SEQ ID NO: 1882516
gcauaagaauugcuggaau

SEQ ID NO: 2127249 - RNA, 19 nt, Artificial Sequence
  Description of Artificial Sequence: Synthetic oligonucleotide
  Antisense strand to SEQ ID NO: 2127248
auuccagcaauucuuaugc

SEQ ID NO: 2127250 - RNA, 19 nt, Artificial Sequence
  Description of Artificial Sequence: Synthetic oligonucleotide
  Sense strand starting at position 3644 of SEQ ID NO: 1882516
gguuaaauacaguauguau

SEQ ID NO: 2127251 - RNA, 19 nt, Artificial Sequence
  Description of Artificial Sequence: Synthetic oligonucleotide
  Antisense strand to SEQ ID NO: 2127250
auacauacuguauuuaacc

SEQ ID NO: 2127252 - RNA, 19 nt, Artificial Sequence
  Description of Artificial Sequence: Synthetic oligonucleotide
  Sense strand starting at position 3870 of SEQ ID NO: 1882516
gaggauguuugacuugaua

SEQ ID NO: 2127253 - RNA, 19 nt, Artificial Sequence
  Description of Artificial Sequence: Synthetic oligonucleotide
  Antisense strand to SEQ ID NO: 2127252
uaucaagucaaacauccuc

SEQ ID NO: 2127254 - RNA, 19 nt, Artificial Sequence
  Description of Artificial Sequence: Synthetic oligonucleotide
  Sense strand starting at position 3872 of SEQ ID NO: 1882516
ggauguuugacuugauaau

SEQ ID NO: 2127255 - RNA, 19 nt, Artificial Sequence
  Description of Artificial Sequence: Synthetic oligonucleotide
  Antisense strand to SEQ ID NO: 2127254
auuaucaagucaaacaucc

SEQ ID NO: 2127256 - RNA, 19 nt, Artificial Sequence
  Description of Artificial Sequence: Synthetic oligonucleotide
  Sense strand starting at position 73 of SEQ ID NO: 1882517
cccuucuuccaugaguuga

SEQ ID NO: 2127257 - RNA, 19 nt, Artificial Sequence
  Description of Artificial Sequence: Synthetic oligonucleotide
  Antisense strand to SEQ ID NO: 2127256
ucaacucauggaagaaggg

SEQ ID NO: 2127258 - RNA, 19 nt, Artificial Sequence
  Description of Artificial Sequence: Synthetic oligonucleotide
  Sense strand starting at position 99 of SEQ ID NO: 1882517
ugaggcucucaccagugaa

SEQ ID NO: 2127259 - RNA, 19 nt, Artificial Sequence
  Description of Artificial Sequence: Synthetic oligonucleotide
  Antisense strand to SEQ ID NO: 2127258
uucacuggugagagccuca

SEQ ID NO: 2127260 - RNA, 19 nt, Artificial Sequence
  Description of Artificial Sequence: Synthetic oligonucleotide
  Sense strand starting at position 102 of SEQ ID NO: 1882517
ggcucucaccagugaagau

SEQ ID NO: 2127261 - RNA, 19 nt, Artificial Sequence
  Description of Artificial Sequence: Synthetic oligonucleotide
  Antisense strand to SEQ ID NO: 2127260
aucuucacuggugagagcc

SEQ ID NO: 2127262 - RNA, 19 nt, Artificial Sequence
  Description of Artificial Sequence: Synthetic oligonucleotide
  Sense strand starting at position 204 of SEQ ID NO: 1882517
gguauuuccuuacagcaac

SEQ ID NO: 2127263 - RNA, 19 nt, Artificial Sequence
  Description of Artificial Sequence: Synthetic oligonucleotide
  Antisense strand to SEQ ID NO: 2127262
guugcuguaaggaaauacc

SEQ ID NO: 2127264 - RNA, 19 nt, Artificial Sequence
  Description of Artificial Sequence: Synthetic oligonucleotide
  Sense strand starting at position 234 of SEQ ID NO: 1882517
uagacagugaggugaguua

SEQ ID NO: 2127265 - RNA, 19 nt, Artificial Sequence
  Description of Artificial Sequence: Synthetic oligonucleotide
  Antisense strand to SEQ ID NO: 2127264
uaacucaccucacugucua

SEQ ID NO: 2127266 - RNA, 19 nt, Artificial Sequence
  Description of Artificial Sequence: Synthetic oligonucleotide
  Sense strand starting at position 780 of SEQ ID NO: 1882517
gauggaucuguccagcaag

SEQ ID NO: 2127267 - RNA, 19 nt, Artificial Sequence
  Description of Artificial Sequence: Synthetic oligonucleotide
  Antisense strand to SEQ ID NO: 2127266
cuugcuggacagauccauc

SEQ ID NO: 2127268 - RNA, 19 nt, Artificial Sequence
  Description of Artificial Sequence: Synthetic oligonucleotide
  Sense strand starting at position 806 of SEQ ID NO: 1882517
ggaaaucacuauuagaauc

SEQ ID NO: 2127269 - RNA, 19 nt, Artificial Sequence
  Description of Artificial Sequence: Synthetic oligonucleotide
  Antisense strand to SEQ ID NO: 2127268
gauucuaauagugauuucc

SEQ ID NO: 2127270 - RNA, 19 nt, Artificial Sequence
  Description of Artificial Sequence: Synthetic oligonucleotide
  Sense strand starting at position 826 of SEQ ID NO: 1882517
cucauaaguguaggguuua

SEQ ID NO: 2127271 - RNA, 19 nt, Artificial Sequence
  Description of Artificial Sequence: Synthetic oligonucleotide
  Antisense strand to SEQ ID NO: 2127270
uaaacccuacacuuaugag

SEQ ID NO: 2127272 - RNA, 19 nt, Artificial Sequence
  Description of Artificial Sequence: Synthetic oligonucleotide
  Sense strand starting at position 836 of SEQ ID NO: 1882517
uaggguuuaccaugucuua

SEQ ID NO: 2127273 - RNA, 19 nt, Artificial Sequence
  Description of Artificial Sequence: Synthetic oligonucleotide
  Antisense strand to SEQ ID NO: 2127272
uaagacaugguaaacccua

SEQ ID NO: 2127274 - RNA, 19 nt, Artificial Sequence
  Description of Artificial Sequence: Synthetic oligonucleotide
  Sense strand starting at position 839 of SEQ ID NO: 1882517
gguuuaccaugucuuauau

SEQ ID NO: 2127275 - RNA, 19 nt, Artificial Sequence
  Description of Artificial Sequence: Synthetic oligonucleotide
  Antisense strand to SEQ ID NO: 2127274
auauaagacaugguaaacc

SEQ ID NO: 2127276 - RNA, 19 nt, Artificial Sequence
  Description of Artificial Sequence: Synthetic oligonucleotide
  Sense strand starting at position 1642 of SEQ ID NO: 1882517
ggaggugaauucucgggua

SEQ ID NO: 2127277 - RNA, 19 nt, Artificial Sequence
  Description of Artificial Sequence: Synthetic oligonucleotide
  Antisense strand to SEQ ID NO: 2127276
uacccgagaauucaccucc

SEQ ID NO: 2127278 - RNA, 19 nt, Artificial Sequence
  Description of Artificial Sequence: Synthetic oligonucleotide
  Sense strand starting at position 1644 of SEQ ID NO: 1882517
aggugaauucucggguauu

SEQ ID NO: 2127279 - RNA, 19 nt, Artificial Sequence
  Description of Artificial Sequence: Synthetic oligonucleotide
  Antisense strand to SEQ ID NO: 2127278
aauacccgagaauucaccu

SEQ ID NO: 2127280 - RNA, 19 nt, Artificial Sequence
  Description of Artificial Sequence: Synthetic oligonucleotide
  Sense strand starting at position 2017 of SEQ ID NO: 1882517
ccggauccagccuagagau

SEQ ID NO: 2127281 - RNA, 19 nt, Artificial Sequence
  Description of Artificial Sequence: Synthetic oligonucleotide
  Antisense strand to SEQ ID NO: 2127280
aucucuaggcuggauccgg

SEQ ID NO: 2127282 - RNA, 19 nt, Artificial Sequence
  Description of Artificial Sequence: Synthetic oligonucleotide
  Sense strand starting at position 2175 of SEQ ID NO: 1882517
cacuguuucugggauuuga

SEQ ID NO: 2127283 - RNA, 19 nt, Artificial Sequence
  Description of Artificial Sequence: Synthetic oligonucleotide
  Antisense strand to SEQ ID NO: 2127282
ucaaaucccagaaacagug

SEQ ID NO: 2127284 - RNA, 19 nt, Artificial Sequence
  Description of Artificial Sequence: Synthetic oligonucleotide
  Sense strand starting at position 2183 of SEQ ID NO: 1882517
cugggauuugauuggcgca

SEQ ID NO: 2127285 - RNA, 19 nt, Artificial Sequence
  Description of Artificial Sequence: Synthetic oligonucleotide
  Antisense strand to SEQ ID NO: 2127284
ugcgccaaucaaaucccag

SEQ ID NO: 2127286 - RNA, 19 nt, Artificial Sequence
  Description of Artificial Sequence: Synthetic oligonucleotide
  Sense strand starting at position 2185 of SEQ ID NO: 1882517
gggauuugauuggcgcagu

SEQ ID NO: 2127287 - RNA, 19 nt, Artificial Sequence
  Description of Artificial Sequence: Synthetic oligonucleotide
  Antisense strand to SEQ ID NO: 2127286
acugcgccaaucaaauccc

SEQ ID NO: 2127288 - RNA, 19 nt, Artificial Sequence
  Description of Artificial Sequence: Synthetic oligonucleotide
  Sense strand starting at position 2353 of SEQ ID NO: 1882517
uguacccucugaguuaaua

SEQ ID NO: 2127289 - RNA, 19 nt, Artificial Sequence
  Description of Artificial Sequence: Synthetic oligonucleotide
  Antisense strand to SEQ ID NO: 2127288
uauuaacucagaggguaca

SEQ ID NO: 2127290 - RNA, 19 nt, Artificial Sequence
  Description of Artificial Sequence: Synthetic oligonucleotide
  Sense strand starting at position 2412 of SEQ ID NO: 1882517
gaccuaaaugagcgguguu

SEQ ID NO: 2127291 - RNA, 19 nt, Artificial Sequence
  Description of Artificial Sequence: Synthetic oligonucleotide
  Antisense strand to SEQ ID NO: 2127290
aacaccgcucauuuagguc

SEQ ID NO: 2127292 - RNA, 19 nt, Artificial Sequence
  Description of Artificial Sequence: Synthetic oligonucleotide
  Sense strand starting at position 2562 of SEQ ID NO: 1882517
gguggaagcauucgaauua

SEQ ID NO: 2127293 - RNA, 19 nt, Artificial Sequence
  Description of Artificial Sequence: Synthetic oligonucleotide
  Antisense strand to SEQ ID NO: 2127292
uaauucgaaugcuuccacc

SEQ ID NO: 2127294 - RNA, 19 nt, Artificial Sequence
  Description of Artificial Sequence: Synthetic oligonucleotide
  Sense strand starting at position 2697 of SEQ ID NO: 1882517
ucaugcauucggcaacuau

SEQ ID NO: 2127295 - RNA, 19 nt, Artificial Sequence
  Description of Artificial Sequence: Synthetic oligonucleotide
  Antisense strand to SEQ ID NO: 2127294
auaguugccgaaugcauga

SEQ ID NO: 2127296 - RNA, 19 nt, Artificial Sequence
  Description of Artificial Sequence: Synthetic oligonucleotide
  Sense strand starting at position 2743 of SEQ ID NO: 1882517
gacucaaagcggugaacau

SEQ ID NO: 2127297 - RNA, 19 nt, Artificial Sequence
  Description of Artificial Sequence: Synthetic oligonucleotide
  Antisense strand to SEQ ID NO: 2127296
auguucaccgcuuugaguc

SEQ ID NO: 2127298 - RNA, 19 nt, Artificial Sequence
  Description of Artificial Sequence: Synthetic oligonucleotide
  Sense strand starting at position 2744 of SEQ ID NO: 1882517
acucaaagcggugaacaua

SEQ ID NO: 2127299 - RNA, 19 nt, Artificial Sequence
  Description of Artificial Sequence: Synthetic oligonucleotide
  Antisense strand to SEQ ID NO: 2127298
uauguucaccgcuuugagu

SEQ ID NO: 2127300 - RNA, 19 nt, Artificial Sequence
  Description of Artificial Sequence: Synthetic oligonucleotide
  Sense strand starting at position 2764 of SEQ ID NO: 1882517
ugaagucacugcuccauaa

SEQ ID NO: 2127301 - RNA, 19 nt, Artificial Sequence
  Description of Artificial Sequence: Synthetic oligonucleotide
  Antisense strand to SEQ ID NO: 2127300
uuauggagcagugacuuca

SEQ ID NO: 2127302 - RNA, 19 nt, Artificial Sequence
  Description of Artificial Sequence: Synthetic oligonucleotide
  Sense strand starting at position 2768 of SEQ ID NO: 1882517
gucacugcuccauaaagcu

SEQ ID NO: 2127303 - RNA, 19 nt, Artificial Sequence
  Description of Artificial Sequence: Synthetic oligonucleotide
  Antisense strand to SEQ ID NO: 2127302
agcuuuauggagcagugac

SEQ ID NO: 2127304 - RNA, 19 nt, Artificial Sequence
  Description of Artificial Sequence: Synthetic oligonucleotide
  Sense strand starting at position 2927 of SEQ ID NO: 1882517
uuccuaguacccugagaug

SEQ ID NO: 2127305 - RNA, 19 nt, Artificial Sequence
  Description of Artificial Sequence: Synthetic oligonucleotide
  Antisense strand to SEQ ID NO: 2127304
caucucaggguacuaggaa

SEQ ID NO: 2127306 - RNA, 19 nt, Artificial Sequence
  Description of Artificial Sequence: Synthetic oligonucleotide
  Sense strand starting at position 2972 of SEQ ID NO: 1882517
ccaagaaguuaggaaagau

SEQ ID NO: 2127307 - RNA, 19 nt, Artificial Sequence
  Description of Artificial Sequence: Synthetic oligonucleotide
  Antisense strand to SEQ ID NO: 2127306
aucuuuccuaacuucuugg

SEQ ID NO: 2127308 - RNA, 19 nt, Artificial Sequence
  Description of Artificial Sequence: Synthetic oligonucleotide
  Sense strand starting at position 3016 of SEQ ID NO: 1882517
gcuaaccaguaauuggaaa

SEQ ID NO: 2127309 - RNA, 19 nt, Artificial Sequence
  Description of Artificial Sequence: Synthetic oligonucleotide
  Antisense strand to SEQ ID NO: 2127308
uuuccaauuacugguuagc

SEQ ID NO: 2127310 - RNA, 19 nt, Artificial Sequence
  Description of Artificial Sequence: Synthetic oligonucleotide
  Sense strand starting at position 3064 of SEQ ID NO: 1882517
agaguuaagggcuggguua

SEQ ID NO: 2127311 - RNA, 19 nt, Artificial Sequence
  Description of Artificial Sequence: Synthetic oligonucleotide
  Antisense strand to SEQ ID NO: 2127310
uaacccagcccuuaacucu

SEQ ID NO: 2127312 - RNA, 19 nt, Artificial Sequence
  Description of Artificial Sequence: Synthetic oligonucleotide
  Sense strand starting at position 3065 of SEQ ID NO: 1882517
gaguuaagggcuggguuaa

SEQ ID NO: 2127313 - RNA, 19 nt, Artificial Sequence
  Description of Artificial Sequence: Synthetic oligonucleotide
  Antisense strand to SEQ ID NO: 2127312
uuaacccagcccuuaacuc

SEQ ID NO: 2127314 - RNA, 19 nt, Artificial Sequence
  Description of Artificial Sequence: Synthetic oligonucleotide
  Sense strand starting at position 3066 of SEQ ID NO: 1882517
aguuaagggcuggguuaau

SEQ ID NO: 2127315 - RNA, 19 nt, Artificial Sequence
  Description of Artificial Sequence: Synthetic oligonucleotide
  Antisense strand to SEQ ID NO: 2127314
auuaacccagcccuuaacu

SEQ ID NO: 2127316 - RNA, 19 nt, Artificial Sequence
  Description of Artificial Sequence: Synthetic oligonucleotide
  Sense strand starting at position 3095 of SEQ ID NO: 1882517
ggcaaaucuguugagcaau

SEQ ID NO: 2127317 - RNA, 19 nt, Artificial Sequence
  Description of Artificial Sequence: Synthetic oligonucleotide
  Antisense strand to SEQ ID NO: 2127316
auugcucaacagauuugcc

SEQ ID NO: 2127318 - RNA, 19 nt, Artificial Sequence
  Description of Artificial Sequence: Synthetic oligonucleotide
  Sense strand starting at position 3311 of SEQ ID NO: 1882517
gagggaaaccucuguugca

SEQ ID NO: 2127319 - RNA, 19 nt, Artificial Sequence
  Description of Artificial Sequence: Synthetic oligonucleotide
  Antisense strand to SEQ ID NO: 2127318
ugcaacagagguuucccuc

SEQ ID NO: 2127320 - RNA, 19 nt, Artificial Sequence
  Description of Artificial Sequence: Synthetic oligonucleotide
  Sense strand starting at position 3396 of SEQ ID NO: 1882517
gguaaauuaaggcacgaua

SEQ ID NO: 2127321 - RNA, 19 nt, Artificial Sequence
  Description of Artificial Sequence: Synthetic oligonucleotide
  Antisense strand to SEQ ID NO: 2127320
uaucgugccuuaauuuacc

SEQ ID NO: 2127322 - RNA, 19 nt, Artificial Sequence
  Description of Artificial Sequence: Synthetic oligonucleotide
  Sense strand starting at position 3438 of SEQ ID NO: 1882517
agccaaagucaauauugau

SEQ ID NO: 2127323 - RNA, 19 nt, Artificial Sequence
  Description of Artificial Sequence: Synthetic oligonucleotide
  Antisense strand to SEQ ID NO: 2127322
aucaauauugacuuuggcu

SEQ ID NO: 2127324 - RNA, 19 nt, Artificial Sequence
  Description of Artificial Sequence: Synthetic oligonucleotide
  Sense strand starting at position 3472 of SEQ ID NO: 1882517
gcuauaaagcuguaggaga

SEQ ID NO: 2127325 - RNA, 19 nt, Artificial Sequence
  Description of Artificial Sequence: Synthetic oligonucleotide
  Antisense strand to SEQ ID NO: 2127324
ucuccuacagcuuuauagc

SEQ ID NO: 2127326 - RNA, 19 nt, Artificial Sequence
  Description of Artificial Sequence: Synthetic oligonucleotide
  Sense strand starting at position 3513 of SEQ ID NO: 1882517
ugccaaaccuguuugaucu

SEQ ID NO: 2127327 - RNA, 19 nt, Artificial Sequence
  Description of Artificial Sequence: Synthetic oligonucleotide
  Antisense strand to SEQ ID NO: 2127326
agaucaaacagguuuggca

SEQ ID NO: 2127328 - RNA, 19 nt, Artificial Sequence
  Description of Artificial Sequence: Synthetic oligonucleotide
  Sense strand starting at position 3514 of SEQ ID NO: 1882517
gccaaaccuguuugaucuu

SEQ ID NO: 2127329 - RNA, 19 nt, Artificial Sequence
  Description of Artificial Sequence: Synthetic oligonucleotide
  Antisense strand to SEQ ID NO: 2127328
aagaucaaacagguuuggc

SEQ ID NO: 2127330 - RNA, 19 nt, Artificial Sequence
  Description of Artificial Sequence: Synthetic oligonucleotide
  Sense strand starting at position 3639 of SEQ ID NO: 1882517
ggguccugugugcagauuu

SEQ ID NO: 2127331 - RNA, 19 nt, Artificial Sequence
  Description of Artificial Sequence: Synthetic oligonucleotide
  Antisense strand to SEQ ID NO: 2127330
aaaucugcacacaggaccc

SEQ ID NO: 2127332 - RNA, 19 nt, Artificial Sequence
  Description of Artificial Sequence: Synthetic oligonucleotide
  Sense strand starting at position 3751 of SEQ ID NO: 1882517
agccuuucugucgggagga

SEQ ID NO: 2127333 - RNA, 19 nt, Artificial Sequence
  Description of Artificial Sequence: Synthetic oligonucleotide
  Antisense strand to SEQ ID NO: 2127332
uccucccgacagaaaggcu

SEQ ID NO: 2127334 - RNA, 19 nt, Artificial Sequence
  Description of Artificial Sequence: Synthetic oligonucleotide
  Sense strand starting at position 3753 of SEQ ID NO: 1882517
ccuuucugucgggaggaga

SEQ ID NO: 2127335 - RNA, 19 nt, Artificial Sequence
  Description of Artificial Sequence: Synthetic oligonucleotide
  Antisense strand to SEQ ID NO: 2127334
ucuccucccgacagaaagg

SEQ ID NO: 2127336 - RNA, 19 nt, Artificial Sequence
  Description of Artificial Sequence: Synthetic oligonucleotide
  Sense strand starting at position 354 of SEQ ID NO: 1882518
ggccaaggaucucuuacuu

SEQ ID NO: 2127337 - RNA, 19 nt, Artificial Sequence
  Description of Artificial Sequence: Synthetic oligonucleotide
  Antisense strand to SEQ ID NO: 2127336
aaguaagagauccuuggcc

SEQ ID NO: 2127338 - RNA, 19 nt, Artificial Sequence
  Description of Artificial Sequence: Synthetic oligonucleotide
  Sense strand starting at position 493 of SEQ ID NO: 1882518
guguauuucuggccuuguu

SEQ ID NO: 2127339 - RNA, 19 nt, Artificial Sequence
  Description of Artificial Sequence: Synthetic oligonucleotide
  Antisense strand to SEQ ID NO: 2127338
aacaaggccagaaauacac

SEQ ID NO: 2127340 - RNA, 19 nt, Artificial Sequence
  Description of Artificial Sequence: Synthetic oligonucleotide
  Sense strand starting at position 496 of SEQ ID NO: 1882518
uauuucuggccuuguuaga

SEQ ID NO: 2127341 - RNA, 19 nt, Artificial Sequence
  Description of Artificial Sequence: Synthetic oligonucleotide
  Antisense strand to SEQ ID NO: 2127340
ucuaacaaggccagaaaua

SEQ ID NO: 2127342 - RNA, 19 nt, Artificial Sequence
  Description of Artificial Sequence: Synthetic oligonucleotide
  Sense strand starting at position 510 of SEQ ID NO: 1882518
uuagacuuguuucuaucuu

SEQ ID NO: 2127343 - RNA, 19 nt, Artificial Sequence
  Description of Artificial Sequence: Synthetic oligonucleotide
  Antisense strand to SEQ ID NO: 2127342
aagauagaaacaagucuaa

SEQ ID NO: 2127344 - RNA, 19 nt, Artificial Sequence
  Description of Artificial Sequence: Synthetic oligonucleotide
  Sense strand starting at position 539 of SEQ ID NO: 1882518
cccugaguguucucaucua

SEQ ID NO: 2127345 - RNA, 19 nt, Artificial Sequence
  Description of Artificial Sequence: Synthetic oligonucleotide
  Antisense strand to SEQ ID NO: 2127344
uagaugagaacacucaggg

SEQ ID NO: 2127346 - RNA, 19 nt, Artificial Sequence
  Description of Artificial Sequence: Synthetic oligonucleotide
  Sense strand starting at position 582 of SEQ ID NO: 1882518
acuguauaucucgagagcu

SEQ ID NO: 2127347 - RNA, 19 nt, Artificial Sequence
  Description of Artificial Sequence: Synthetic oligonucleotide
  Antisense strand to SEQ ID NO: 2127346
agcucucgagauauacagu

SEQ ID NO: 2127348 - RNA, 19 nt, Artificial Sequence
  Description of Artificial Sequence: Synthetic oligonucleotide
  Sense strand starting at position 584 of SEQ ID NO: 1882518
uguauaucucgagagcucu

SEQ ID NO: 2127349 - RNA, 19 nt, Artificial Sequence
  Description of Artificial Sequence: Synthetic oligonucleotide
  Antisense strand to SEQ ID NO: 2127348
agagcucucgagauauaca

SEQ ID NO: 2127350 - RNA, 19 nt, Artificial Sequence
  Description of Artificial Sequence: Synthetic oligonucleotide
  Sense strand starting at position 896 of SEQ ID NO: 1882518
gagucagaacuaugccuau

SEQ ID NO: 2127351 - RNA, 19 nt, Artificial Sequence
  Description of Artificial Sequence: Synthetic oligonucleotide
  Antisense strand to SEQ ID NO: 2127350
auaggcauaguucugacuc

SEQ ID NO: 2127352 - RNA, 19 nt, Artificial Sequence
  Description of Artificial Sequence: Synthetic oligonucleotide
  Sense strand starting at position 970 of SEQ ID NO: 1882518
agcguuucuggagaauacu

SEQ ID NO: 2127353 - RNA, 19 nt, Artificial Sequence
  Description of Artificial Sequence: Synthetic oligonucleotide
  Antisense strand to SEQ ID NO: 2127352
aguauucuccagaaacgcu

SEQ ID NO: 2127354 - RNA, 19 nt, Artificial Sequence
  Description of Artificial Sequence: Synthetic oligonucleotide
  Sense strand starting at position 989 of SEQ ID NO: 1882518
ccaauuuauccucagcgca

SEQ ID NO: 2127355 - RNA, 19 nt, Artificial Sequence
  Description of Artificial Sequence: Synthetic oligonucleotide
  Antisense strand to SEQ ID NO: 2127354
ugcgcugaggauaaauugg

SEQ ID NO: 2127356 - RNA, 19 nt, Artificial Sequence
  Description of Artificial Sequence: Synthetic oligonucleotide
  Sense strand starting at position 1027 of SEQ ID NO: 1882518
uuacaaagacgugaauucu

SEQ ID NO: 2127357 - RNA, 19 nt, Artificial Sequence
  Description of Artificial Sequence: Synthetic oligonucleotide
  Antisense strand to SEQ ID NO: 2127356
agaauucacgucuuuguaa

SEQ ID NO: 2127358 - RNA, 19 nt, Artificial Sequence
  Description of Artificial Sequence: Synthetic oligonucleotide
  Sense strand starting at position 1106 of SEQ ID NO: 1882518
cuugcaagguucuuaacua

SEQ ID NO: 2127359 - RNA, 19 nt, Artificial Sequence
  Description of Artificial Sequence: Synthetic oligonucleotide
  Antisense strand to SEQ ID NO: 2127358
uaguuaagaaccuugcaag

SEQ ID NO: 2127360 - RNA, 19 nt, Artificial Sequence
  Description of Artificial Sequence: Synthetic oligonucleotide
  Sense strand starting at position 1212 of SEQ ID NO: 1882518
cacguauaggucugagauu

SEQ ID NO: 2127361 - RNA, 19 nt, Artificial Sequence
  Description of Artificial Sequence: Synthetic oligonucleotide
  Antisense strand to SEQ ID NO: 2127360
aaucucagaccuauacgug

SEQ ID NO: 2127362 - RNA, 19 nt, Artificial Sequence
  Description of Artificial Sequence: Synthetic oligonucleotide
  Sense strand starting at position 1223 of SEQ ID NO: 1882518
cugagauucugaguccuaa

SEQ ID NO: 2127363 - RNA, 19 nt, Artificial Sequence
  Description of Artificial Sequence: Synthetic oligonucleotide
  Antisense strand to SEQ ID NO: 2127362
uuaggacucagaaucucag

SEQ ID NO: 2127364 - RNA, 19 nt, Artificial Sequence
  Description of Artificial Sequence: Synthetic oligonucleotide
  Sense strand starting at position 2143 of SEQ ID NO: 1882518
gaaagccucuugguaggua

SEQ ID NO: 2127365 - RNA, 19 nt, Artificial Sequence
  Description of Artificial Sequence: Synthetic oligonucleotide
  Antisense strand to SEQ ID NO: 2127364
uaccuaccaagaggcuuuc

SEQ ID NO: 2127366 - RNA, 19 nt, Artificial Sequence
  Description of Artificial Sequence: Synthetic oligonucleotide
  Sense strand starting at position 2462 of SEQ ID NO: 1882518
aggacuugauaaguguauu

SEQ ID NO: 2127367 - RNA, 19 nt, Artificial Sequence
  Description of Artificial Sequence: Synthetic oligonucleotide
  Antisense strand to SEQ ID NO: 2127366
aauacacuuaucaaguccu

SEQ ID NO: 2127368 - RNA, 19 nt, Artificial Sequence
  Description of Artificial Sequence: Synthetic oligonucleotide
  Sense strand starting at position 2463 of SEQ ID NO: 1882518
ggacuugauaaguguauua

SEQ ID NO: 2127369 - RNA, 19 nt, Artificial Sequence
  Description of Artificial Sequence: Synthetic oligonucleotide
  Antisense strand to SEQ ID NO: 2127368
uaauacacuuaucaagucc

SEQ ID NO: 2127370 - RNA, 19 nt, Artificial Sequence
  Description of Artificial Sequence: Synthetic oligonucleotide
  Sense strand starting at position 2465 of SEQ ID NO: 1882518
acuugauaaguguauuaug

SEQ ID NO: 2127371 - RNA, 19 nt, Artificial Sequence
  Description of Artificial Sequence: Synthetic oligonucleotide
  Antisense strand to SEQ ID NO: 2127370
cauaauacacuuaucaagu

SEQ ID NO: 2127372 - RNA, 19 nt, Artificial Sequence
  Description of Artificial Sequence: Synthetic oligonucleotide
  Sense strand starting at position 2672 of SEQ ID NO: 1882518
gauaucugccuccaggagu

SEQ ID NO: 2127373 - RNA, 19 nt, Artificial Sequence
  Description of Artificial Sequence: Synthetic oligonucleotide
  Antisense strand to SEQ ID NO: 2127372
acuccuggaggcagauauc

SEQ ID NO: 2127374 - RNA, 19 nt, Artificial Sequence
  Description of Artificial Sequence: Synthetic oligonucleotide
  Sense strand starting at position 2801 of SEQ ID NO: 1882518
agaaauaaauaugagggaa

SEQ ID NO: 2127375 - RNA, 19 nt, Artificial Sequence
  Description of Artificial Sequence: Synthetic oligonucleotide
  Antisense strand to SEQ ID NO: 2127374
uucccucauauuuauuucu

SEQ ID NO: 2127376 - RNA, 19 nt, Artificial Sequence
  Description of Artificial Sequence: Synthetic oligonucleotide
  Sense strand starting at position 2902 of SEQ ID NO: 1882518
cgucuacuaagugguauuu

SEQ ID NO: 2127377 - RNA, 19 nt, Artificial Sequence
  Description of Artificial Sequence: Synthetic oligonucleotide
  Antisense strand to SEQ ID NO: 2127376
aaauaccacuuaguagacg

SEQ ID NO: 2127378 - RNA, 19 nt, Artificial Sequence
  Description of Artificial Sequence: Synthetic oligonucleotide
  Sense strand starting at position 2912 of SEQ ID NO: 1882518
gugguauuucacuguugag

SEQ ID NO: 2127379 - RNA, 19 nt, Artificial Sequence
  Description of Artificial Sequence: Synthetic oligonucleotide
  Antisense strand to SEQ ID NO: 2127378
cucaacagugaaauaccac

SEQ ID NO: 2127380 - RNA, 19 nt, Artificial Sequence
  Description of Artificial Sequence: Synthetic oligonucleotide
  Sense strand starting at position 2922 of SEQ ID NO: 1882518
acuguugagagaggugaua

SEQ ID NO: 2127381 - RNA, 19 nt, Artificial Sequence
  Description of Artificial Sequence: Synthetic oligonucleotide
  Antisense strand to SEQ ID NO: 2127380
uaucaccucucucaacagu

SEQ ID NO: 2127382 - RNA, 19 nt, Artificial Sequence
  Description of Artificial Sequence: Synthetic oligonucleotide
  Sense strand starting at position 2924 of SEQ ID NO: 1882518
uguugagagaggugauaua

SEQ ID NO: 2127383 - RNA, 19 nt, Artificial Sequence
  Description of Artificial Sequence: Synthetic oligonucleotide
  Antisense strand to SEQ ID NO: 2127382
uauaucaccucucucaaca

SEQ ID NO: 2127384 - RNA, 19 nt, Artificial Sequence
  Description of Artificial Sequence: Synthetic oligonucleotide
  Sense strand starting at position 2940 of SEQ ID NO: 1882518
auauuagaaguacgaaacu

SEQ ID NO: 2127385 - RNA, 19 nt, Artificial Sequence
  Description of Artificial Sequence: Synthetic oligonucleotide
  Antisense strand to SEQ ID NO: 2127384
aguuucguacuucuaauau

SEQ ID NO: 2127386 - RNA, 19 nt, Artificial Sequence
  Description of Artificial Sequence: Synthetic oligonucleotide
  Sense strand starting at position 2949 of SEQ ID NO: 1882518
guacgaaacuucuaauuua

SEQ ID NO: 2127387 - RNA, 19 nt, Artificial Sequence
  Description of Artificial Sequence: Synthetic oligonucleotide
  Antisense strand to SEQ ID NO: 2127386
uaaauuagaaguuucguac

SEQ ID NO: 2127388 - RNA, 19 nt, Artificial Sequence
  Description of Artificial Sequence: Synthetic oligonucleotide
  Sense strand starting at position 3024 of SEQ ID NO: 1882518
uaggucaucuaaucgaaac

SEQ ID NO: 2127389 - RNA, 19 nt, Artificial Sequence
  Description of Artificial Sequence: Synthetic oligonucleotide
  Antisense strand to SEQ ID NO: 2127388
guuucgauuagaugaccua

SEQ ID NO: 2127390 - RNA, 19 nt, Artificial Sequence
  Description of Artificial Sequence: Synthetic oligonucleotide
  Sense strand starting at position 3037 of SEQ ID NO: 1882518
cgaaacuguuaaguauaaa

SEQ ID NO: 2127391 - RNA, 19 nt, Artificial Sequence
  Description of Artificial Sequence: Synthetic oligonucleotide
  Antisense strand to SEQ ID NO: 2127390
uuuauacuuaacaguuucg

SEQ ID NO: 2127392 - RNA, 19 nt, Artificial Sequence
  Description of Artificial Sequence: Synthetic oligonucleotide
  Sense strand starting at position 3096 of SEQ ID NO: 1882518
aucucuuagcacgauaaca

SEQ ID NO: 2127393 - RNA, 19 nt, Artificial Sequence
  Description of Artificial Sequence: Synthetic oligonucleotide
  Antisense strand to SEQ ID NO: 2127392
uguuaucgugcuaagagau

SEQ ID NO: 2127394 - RNA, 19 nt, Artificial Sequence
  Description of Artificial Sequence: Synthetic oligonucleotide
  Sense strand starting at position 3098 of SEQ ID NO: 1882518
cucuuagcacgauaacaaa

SEQ ID NO: 2127395 - RNA, 19 nt, Artificial Sequence
  Description of Artificial Sequence: Synthetic oligonucleotide
  Antisense strand to SEQ ID NO: 2127394
uuuguuaucgugcuaagag

SEQ ID NO: 2127396 - RNA, 19 nt, Artificial Sequence
  Description of Artificial Sequence: Synthetic oligonucleotide
  Sense strand starting at position 3351 of SEQ ID NO: 1882518
gucugaacuuaacuuugaa

SEQ ID NO: 2127397 - RNA, 19 nt, Artificial Sequence
  Description of Artificial Sequence: Synthetic oligonucleotide
  Antisense strand to SEQ ID NO: 2127396
uucaaaguuaaguucagac

SEQ ID NO: 2127398 - RNA, 19 nt, Artificial Sequence
  Description of Artificial Sequence: Synthetic oligonucleotide
  Sense strand starting at position 3389 of SEQ ID NO: 1882518
uggugagaaucacuugaac

SEQ ID NO: 2127399 - RNA, 19 nt, Artificial Sequence
  Description of Artificial Sequence: Synthetic oligonucleotide
  Antisense strand to SEQ ID NO: 2127398
guucaagugauucucacca

SEQ ID NO: 2127400 - RNA, 19 nt, Artificial Sequence
  Description of Artificial Sequence: Synthetic oligonucleotide
  Sense strand starting at position 3403 of SEQ ID NO: 1882518
ugaacucaacaugguauau

SEQ ID NO: 2127401 - RNA, 19 nt, Artificial Sequence
  Description of Artificial Sequence: Synthetic oligonucleotide
  Antisense strand to SEQ ID NO: 2127400
auauaccauguugaguuca

SEQ ID NO: 2127402 - RNA, 19 nt, Artificial Sequence
  Description of Artificial Sequence: Synthetic oligonucleotide
  Sense strand starting at position 3425 of SEQ ID NO: 1882518
ucaguugaguucucagaac

SEQ ID NO: 2127403 - RNA, 19 nt, Artificial Sequence
  Description of Artificial Sequence: Synthetic oligonucleotide
  Antisense strand to SEQ ID NO: 2127402
guucugagaacucaacuga

SEQ ID NO: 2127404 - RNA, 19 nt, Artificial Sequence
  Description of Artificial Sequence: Synthetic oligonucleotide
  Sense strand starting at position 3639 of SEQ ID NO: 1882518
aaggauacauuguugaauu

SEQ ID NO: 2127405 - RNA, 19 nt, Artificial Sequence
  Description of Artificial Sequence: Synthetic oligonucleotide
  Antisense strand to SEQ ID NO: 2127404
aauucaacaauguauccuu

SEQ ID NO: 2127406 - RNA, 19 nt, Artificial Sequence
  Description of Artificial Sequence: Synthetic oligonucleotide
  Sense strand starting at position 3678 of SEQ ID NO: 1882518
uuaagaaagucaguguaau

SEQ ID NO: 2127407 - RNA, 19 nt, Artificial Sequence
  Description of Artificial Sequence: Synthetic oligonucleotide
  Antisense strand to SEQ ID NO: 2127406
auuacacugacuuucuuaa

SEQ ID NO: 2127408 - RNA, 19 nt, Artificial Sequence
  Description of Artificial Sequence: Synthetic oligonucleotide
  Sense strand starting at position 3679 of SEQ ID NO: 1882518
uaagaaagucaguguaaug

SEQ ID NO: 2127409 - RNA, 19 nt, Artificial Sequence
  Description of Artificial Sequence: Synthetic oligonucleotide
  Antisense strand to SEQ ID NO: 2127408
cauuacacugacuuucuua

SEQ ID NO: 2127410 - RNA, 19 nt, Artificial Sequence
  Description of Artificial Sequence: Synthetic oligonucleotide
  Sense strand starting at position 3688 of SEQ ID NO: 1882518
caguguaaugcauaugcau

SEQ ID NO: 2127411 - RNA, 19 nt, Artificial Sequence
  Description of Artificial Sequence: Synthetic oligonucleotide
  Antisense strand to SEQ ID NO: 2127410
augcauaugcauuacacug

SEQ ID NO: 2127412 - RNA, 19 nt, Artificial Sequence
  Description of Artificial Sequence: Synthetic oligonucleotide
  Sense strand starting at position 3782 of SEQ ID NO: 1882518
aaaccuauaguucgagacu

SEQ ID NO: 2127413 - RNA, 19 nt, Artificial Sequence
  Description of Artificial Sequence: Synthetic oligonucleotide
  Antisense strand to SEQ ID NO: 2127412
agucucgaacuauagguuu

SEQ ID NO: 2127414 - RNA, 19 nt, Artificial Sequence
  Description of Artificial Sequence: Synthetic oligonucleotide
  Sense strand starting at position 3785 of SEQ ID NO: 1882518
ccuauaguucgagacuucu

SEQ ID NO: 2127415 - RNA, 19 nt, Artificial Sequence
  Description of Artificial Sequence: Synthetic oligonucleotide
  Antisense strand to SEQ ID NO: 2127414
agaagucucgaacuauagg

SEQ ID NO: 2127416 - RNA, 19 nt, Artificial Sequence
  Description of Artificial Sequence: Synthetic oligonucleotide
  Sense strand starting at position 18 of SEQ ID NO: 1882519
ggccacuuaccuugauauc

SEQ ID NO: 2127417 - RNA, 19 nt, Artificial Sequence
  Description of Artificial Sequence: Synthetic oligonucleotide
  Antisense strand to SEQ ID NO: 2127416
gauaucaagguaaguggcc

SEQ ID NO: 2127418 - RNA, 19 nt, Artificial Sequence
  Description of Artificial Sequence: Synthetic oligonucleotide
  Sense strand starting at position 181 of SEQ ID NO: 1882519
uuaauuccaggaugaguga

SEQ ID NO: 2127419 - RNA, 19 nt, Artificial Sequence
  Description of Artificial Sequence: Synthetic oligonucleotide
  Antisense strand to SEQ ID NO: 2127418
ucacucauccuggaauuaa

SEQ ID NO: 2127420 - RNA, 19 nt, Artificial Sequence
  Description of Artificial Sequence: Synthetic oligonucleotide
  Sense strand starting at position 238 of SEQ ID NO: 1882519
gccuuaauguaacuaguaa

SEQ ID NO: 2127421 - RNA, 19 nt, Artificial Sequence
  Description of Artificial Sequence: Synthetic oligonucleotide
  Antisense strand to SEQ ID NO: 2127420
uuacuaguuacauuaaggc

SEQ ID NO: 2127422 - RNA, 19 nt, Artificial Sequence
  Description of Artificial Sequence: Synthetic oligonucleotide
  Sense strand starting at position 321 of SEQ ID NO: 1882519
ccugcugagaaguagcaau

SEQ ID NO: 2127423 - RNA, 19 nt, Artificial Sequence
  Description of Artificial Sequence: Synthetic oligonucleotide
  Antisense strand to SEQ ID NO: 2127422
auugcuacuucucagcagg

SEQ ID NO: 2127424 - RNA, 19 nt, Artificial Sequence
  Description of Artificial Sequence: Synthetic oligonucleotide
  Sense strand starting at position 480 of SEQ ID NO: 1882519
gauuacuugcgagaacuuu

SEQ ID NO: 2127425 - RNA, 19 nt, Artificial Sequence
  Description of Artificial Sequence: Synthetic oligonucleotide
  Antisense strand to SEQ ID NO: 2127424
aaaguucucgcaaguaauc

SEQ ID NO: 2127426 - RNA, 19 nt, Artificial Sequence
  Description of Artificial Sequence: Synthetic oligonucleotide
  Sense strand starting at position 585 of SEQ ID NO: 1882519
uuccuacucgggugaauau

SEQ ID NO: 2127427 - RNA, 19 nt, Artificial Sequence
  Description of Artificial Sequence: Synthetic oligonucleotide
  Antisense strand to SEQ ID NO: 2127426
auauucacccgaguaggaa

SEQ ID NO: 2127428 - RNA, 19 nt, Artificial Sequence
  Description of Artificial Sequence: Synthetic oligonucleotide
  Sense strand starting at position 586 of SEQ ID NO: 1882519
uccuacucgggugaauauu

SEQ ID NO: 2127429 - RNA, 19 nt, Artificial Sequence
  Description of Artificial Sequence: Synthetic oligonucleotide
  Antisense strand to SEQ ID NO: 2127428
aauauucacccgaguagga

SEQ ID NO: 2127430 - RNA, 19 nt, Artificial Sequence
  Description of Artificial Sequence: Synthetic oligonucleotide
  Sense strand starting at position 732 of SEQ ID NO: 1882519
cugaucaugcuaugaagac

SEQ ID NO: 2127431 - RNA, 19 nt, Artificial Sequence
  Description of Artificial Sequence: Synthetic oligonucleotide
  Antisense strand to SEQ ID NO: 2127430
gucuucauagcaugaucag

SEQ ID NO: 2127432 - RNA, 19 nt, Artificial Sequence
  Description of Artificial Sequence: Synthetic oligonucleotide
  Sense strand starting at position 844 of SEQ ID NO: 1882519
gguacagcauccucagaau

SEQ ID NO: 2127433 - RNA, 19 nt, Artificial Sequence
  Description of Artificial Sequence: Synthetic oligonucleotide
  Antisense strand to SEQ ID NO: 2127432
auucugaggaugcuguacc

SEQ ID NO: 2127434 - RNA, 19 nt, Artificial Sequence
  Description of Artificial Sequence: Synthetic oligonucleotide
  Sense strand starting at position 1076 of SEQ ID NO: 1882519
gcaguuugucaugugguuu

SEQ ID NO: 2127435 - RNA, 19 nt, Artificial Sequence
  Description of Artificial Sequence: Synthetic oligonucleotide
  Antisense strand to SEQ ID NO: 2127434
aaaccacaugacaaacugc

SEQ ID NO: 2127436 - RNA, 19 nt, Artificial Sequence
  Description of Artificial Sequence: Synthetic oligonucleotide
  Sense strand starting at position 1125 of SEQ ID NO: 1882519
gagcaagagucuuugugac

SEQ ID NO: 2127437 - RNA, 19 nt, Artificial Sequence
  Description of Artificial Sequence: Synthetic oligonucleotide
  Antisense strand to SEQ ID NO: 2127436
gucacaaagacucuugcuc

SEQ ID NO: 2127438 - RNA, 19 nt, Artificial Sequence
  Description of Artificial Sequence: Synthetic oligonucleotide
  Sense strand starting at position 1162 of SEQ ID NO: 1882519
agugguguucagggacaga

SEQ ID NO: 2127439 - RNA, 19 nt, Artificial Sequence
  Description of Artificial Sequence: Synthetic oligonucleotide
  Antisense strand to SEQ ID NO: 2127438
ucugucccugaacaccacu

SEQ ID NO: 2127440 - RNA, 19 nt, Artificial Sequence
  Description of Artificial Sequence: Synthetic oligonucleotide
  Sense strand starting at position 1243 of SEQ ID NO: 1882519
gaaguacucugaucucugu

SEQ ID NO: 2127441 - RNA, 19 nt, Artificial Sequence
  Description of Artificial Sequence: Synthetic oligonucleotide
  Antisense strand to SEQ ID NO: 2127440
acagagaucagaguacuuc

SEQ ID NO: 2127442 - RNA, 19 nt, Artificial Sequence
  Description of Artificial Sequence: Synthetic oligonucleotide
  Sense strand starting at position 1825 of SEQ ID NO: 1882519
gcgagaugugguggcauuu

SEQ ID NO: 2127443 - RNA, 19 nt, Artificial Sequence
  Description of Artificial Sequence: Synthetic oligonucleotide
  Antisense strand to SEQ ID NO: 2127442
aaaugccaccacaucucgc

SEQ ID NO: 2127444 - RNA, 19 nt, Artificial Sequence
  Description of Artificial Sequence: Synthetic oligonucleotide
  Sense strand starting at position 1883 of SEQ ID NO: 1882519
ugauguaucugccugagaa

SEQ ID NO: 2127445 - RNA, 19 nt, Artificial Sequence
  Description of Artificial Sequence: Synthetic oligonucleotide
  Antisense strand to SEQ ID NO: 2127444
uucucaggcagauacauca

SEQ ID NO: 2127446 - RNA, 19 nt, Artificial Sequence
  Description of Artificial Sequence: Synthetic oligonucleotide
  Sense strand starting at position 1884 of SEQ ID NO: 1882519
gauguaucugccugagaag

SEQ ID NO: 2127447 - RNA, 19 nt, Artificial Sequence
  Description of Artificial Sequence: Synthetic oligonucleotide
  Antisense strand to SEQ ID NO: 2127446
cuucucaggcagauacauc

SEQ ID NO: 2127448 - RNA, 19 nt, Artificial Sequence
  Description of Artificial Sequence: Synthetic oligonucleotide
  Sense strand starting at position 2044 of SEQ ID NO: 1882519
uguaaauuguagucuggau

SEQ ID NO: 2127449 - RNA, 19 nt, Artificial Sequence
  Description of Artificial Sequence: Synthetic oligonucleotide
  Antisense strand to SEQ ID NO: 2127448
auccagacuacaauuuaca

SEQ ID NO: 2127450 - RNA, 19 nt, Artificial Sequence
  Description of Artificial Sequence: Synthetic oligonucleotide
  Sense strand starting at position 2046 of SEQ ID NO: 1882519
uaaauuguagucuggaugu

SEQ ID NO: 2127451 - RNA, 19 nt, Artificial Sequence
  Description of Artificial Sequence: Synthetic oligonucleotide
  Antisense strand to SEQ ID NO: 2127450
acauccagacuacaauuua

SEQ ID NO: 2127452 - RNA, 19 nt, Artificial Sequence
  Description of Artificial Sequence: Synthetic oligonucleotide
  Sense strand starting at position 2146 of SEQ ID NO: 1882519
gauuuaaaugcaugugcau

SEQ ID NO: 2127453 - RNA, 19 nt, Artificial Sequence
  Description of Artificial Sequence: Synthetic oligonucleotide
  Antisense strand to SEQ ID NO: 2127452
augcacaugcauuuaaauc

SEQ ID NO: 2127454 - RNA, 19 nt, Artificial Sequence
  Description of Artificial Sequence: Synthetic oligonucleotide
  Sense strand starting at position 2233 of SEQ ID NO: 1882519
gcuugauugcagcuugugu

SEQ ID NO: 2127455 - RNA, 19 nt, Artificial Sequence
  Description of Artificial Sequence: Synthetic oligonucleotide
  Antisense strand to SEQ ID NO: 2127454
acacaagcugcaaucaagc

SEQ ID NO: 2127456 - RNA, 19 nt, Artificial Sequence
  Description of Artificial Sequence: Synthetic oligonucleotide
  Sense strand starting at position 2560 of SEQ ID NO: 1882519
augcuaaaugcucagugga

SEQ ID NO: 2127457 - RNA, 19 nt, Artificial Sequence
  Description of Artificial Sequence: Synthetic oligonucleotide
  Antisense strand to SEQ ID NO: 2127456
uccacugagcauuuagcau

SEQ ID NO: 2127458 - RNA, 19 nt, Artificial Sequence
  Description of Artificial Sequence: Synthetic oligonucleotide
  Sense strand starting at position 2562 of SEQ ID NO: 1882519
gcuaaaugcucaguggaga

SEQ ID NO: 2127459 - RNA, 19 nt, Artificial Sequence
  Description of Artificial Sequence: Synthetic oligonucleotide
  Antisense strand to SEQ ID NO: 2127458
ucuccacugagcauuuagc

SEQ ID NO: 2127460 - RNA, 19 nt, Artificial Sequence
  Description of Artificial Sequence: Synthetic oligonucleotide
  Sense strand starting at position 2563 of SEQ ID NO: 1882519
cuaaaugcucaguggagau

SEQ ID NO: 2127461 - RNA, 19 nt, Artificial Sequence
  Description of Artificial Sequence: Synthetic oligonucleotide
  Antisense strand to SEQ ID NO: 2127460
aucuccacugagcauuuag

SEQ ID NO: 2127462 - RNA, 19 nt, Artificial Sequence
  Description of Artificial Sequence: Synthetic oligonucleotide
  Sense strand starting at position 2578 of SEQ ID NO: 1882519
agaugaauacaguguuaua

SEQ ID NO: 2127463 - RNA, 19 nt, Artificial Sequence
  Description of Artificial Sequence: Synthetic oligonucleotide
  Antisense strand to SEQ ID NO: 2127462
uauaacacuguauucaucu

SEQ ID NO: 2127464 - RNA, 19 nt, Artificial Sequence
  Description of Artificial Sequence: Synthetic oligonucleotide
  Sense strand starting at position 2615 of SEQ ID NO: 1882519
ccgggaucagccuauaauu

SEQ ID NO: 2127465 - RNA, 19 nt, Artificial Sequence
  Description of Artificial Sequence: Synthetic oligonucleotide
  Antisense strand to SEQ ID NO: 2127464
aauuauaggcugaucccgg

SEQ ID NO: 2127466 - RNA, 19 nt, Artificial Sequence
  Description of Artificial Sequence: Synthetic oligonucleotide
  Sense strand starting at position 2727 of SEQ ID NO: 1882519
ggagauuugcaguguugca

SEQ ID NO: 2127467 - RNA, 19 nt, Artificial Sequence
  Description of Artificial Sequence: Synthetic oligonucleotide
  Antisense strand to SEQ ID NO: 2127466
ugcaacacugcaaaucucc

SEQ ID NO: 2127468 - RNA, 19 nt, Artificial Sequence
  Description of Artificial Sequence: Synthetic oligonucleotide
  Sense strand starting at position 2782 of SEQ ID NO: 1882519
guuguuaguauggagaaug

SEQ ID NO: 2127469 - RNA, 19 nt, Artificial Sequence
  Description of Artificial Sequence: Synthetic oligonucleotide
  Antisense strand to SEQ ID NO: 2127468
cauucuccauacuaacaac

SEQ ID NO: 2127470 - RNA, 19 nt, Artificial Sequence
  Description of Artificial Sequence: Synthetic oligonucleotide
  Sense strand starting at position 2793 of SEQ ID NO: 1882519
ggagaaugcuugcuucuaa

SEQ ID NO: 2127471 - RNA, 19 nt, Artificial Sequence
  Description of Artificial Sequence: Synthetic oligonucleotide
  Antisense strand to SEQ ID NO: 2127470
uuagaagcaagcauucucc

SEQ ID NO: 2127472 - RNA, 19 nt, Artificial Sequence
  Description of Artificial Sequence: Synthetic oligonucleotide
  Sense strand starting at position 2829 of SEQ ID NO: 1882519
ccgaaugcccucugaauag

SEQ ID NO: 2127473 - RNA, 19 nt, Artificial Sequence
  Description of Artificial Sequence: Synthetic oligonucleotide
  Antisense strand to SEQ ID NO: 2127472
cuauucagagggcauucgg

SEQ ID NO: 2127474 - RNA, 19 nt, Artificial Sequence
  Description of Artificial Sequence: Synthetic oligonucleotide
  Sense strand starting at position 3014 of SEQ ID NO: 1882519
guuuguuacuaauucuaca

SEQ ID NO: 2127475 - RNA, 19 nt, Artificial Sequence
  Description of Artificial Sequence: Synthetic oligonucleotide
  Antisense strand to SEQ ID NO: 2127474
uguagaauuaguaacaaac

SEQ ID NO: 2127476 - RNA, 19 nt, Artificial Sequence
  Description of Artificial Sequence: Synthetic oligonucleotide
  Sense strand starting at position 3198 of SEQ ID NO: 1882519
ccucuuucuccagauaguc

SEQ ID NO: 2127477 - RNA, 19 nt, Artificial Sequence
  Description of Artificial Sequence: Synthetic oligonucleotide
  Antisense strand to SEQ ID NO: 2127476
gacuaucuggagaaagagg

SEQ ID NO: 2127478 - RNA, 19 nt, Artificial Sequence
  Description of Artificial Sequence: Synthetic oligonucleotide
  Sense strand starting at position 3435 of SEQ ID NO: 1882519
ugauaugugccacaaagug

SEQ ID NO: 2127479 - RNA, 19 nt, Artificial Sequence
  Description of Artificial Sequence: Synthetic oligonucleotide
  Antisense strand to SEQ ID NO: 2127478
cacuuuguggcacauauca

SEQ ID NO: 2127480 - RNA, 19 nt, Artificial Sequence
  Description of Artificial Sequence: Synthetic oligonucleotide
  Sense strand starting at position 3462 of SEQ ID NO: 1882519
agucauaacuaaguuauca

SEQ ID NO: 2127481 - RNA, 19 nt, Artificial Sequence
  Description of Artificial Sequence: Synthetic oligonucleotide
  Antisense strand to SEQ ID NO: 2127480
ugauaacuuaguuaugacu

SEQ ID NO: 2127482 - RNA, 19 nt, Artificial Sequence
  Description of Artificial Sequence: Synthetic oligonucleotide
  Sense strand starting at position 3565 of SEQ ID NO: 1882519
cugaauucugcguaauuga

SEQ ID NO: 2127483 - RNA, 19 nt, Artificial Sequence
  Description of Artificial Sequence: Synthetic oligonucleotide
  Antisense strand to SEQ ID NO: 2127482
ucaauuacgcagaauucag

SEQ ID NO: 2127484 - RNA, 19 nt, Artificial Sequence
  Description of Artificial Sequence: Synthetic oligonucleotide
  Sense strand starting at position 3576 of SEQ ID NO: 1882519
guaauugaaggcugaauua

SEQ ID NO: 2127485 - RNA, 19 nt, Artificial Sequence
  Description of Artificial Sequence: Synthetic oligonucleotide
  Antisense strand to SEQ ID NO: 2127484
uaauucagccuucaauuac

SEQ ID NO: 2127486 - RNA, 19 nt, Artificial Sequence
  Description of Artificial Sequence: Synthetic oligonucleotide
  Sense strand starting at position 3626 of SEQ ID NO: 1882519
ugaaacugugaacgcuuaa

SEQ ID NO: 2127487 - RNA, 19 nt, Artificial Sequence
  Description of Artificial Sequence: Synthetic oligonucleotide
  Antisense strand to SEQ ID NO: 2127486
uuaagcguucacaguuuca

SEQ ID NO: 2127488 - RNA, 19 nt, Artificial Sequence
  Description of Artificial Sequence: Synthetic oligonucleotide
  Sense strand starting at position 3804 of SEQ ID NO: 1882519
guuacauucgaguaaauag

SEQ ID NO: 2127489 - RNA, 19 nt, Artificial Sequence
  Description of Artificial Sequence: Synthetic oligonucleotide
  Antisense strand to SEQ ID NO: 2127488
cuauuuacucgaauguaac

SEQ ID NO: 2127490 - RNA, 19 nt, Artificial Sequence
  Description of Artificial Sequence: Synthetic oligonucleotide
  Sense strand starting at position 3886 of SEQ ID NO: 1882519
uggugaucucccgaguuua

SEQ ID NO: 2127491 - RNA, 19 nt, Artificial Sequence
  Description of Artificial Sequence: Synthetic oligonucleotide
  Antisense strand to SEQ ID NO: 2127490
uaaacucgggagaucacca

SEQ ID NO: 2127492 - RNA, 19 nt, Artificial Sequence
  Description of Artificial Sequence: Synthetic oligonucleotide
  Sense strand starting at position 3949 of SEQ ID NO: 1882519
gucaguaaucguuauggga

SEQ ID NO: 2127493 - RNA, 19 nt, Artificial Sequence
  Description of Artificial Sequence: Synthetic oligonucleotide
  Antisense strand to SEQ ID NO: 2127492
ucccauaacgauuacugac

SEQ ID NO: 2127494 - RNA, 19 nt, Artificial Sequence
  Description of Artificial Sequence: Synthetic oligonucleotide
  Sense strand starting at position 3975 of SEQ ID NO: 1882519
guaccacaguuguugagau

SEQ ID NO: 2127495 - RNA, 19 nt, Artificial Sequence
  Description of Artificial Sequence: Synthetic oligonucleotide
  Antisense strand to SEQ ID NO: 2127494
aucucaacaacugugguac

SEQ ID NO: 2127496 - RNA, 19 nt, Artificial Sequence
  Description of Artificial Sequence: Synthetic oligonucleotide
  Sense strand starting at position 331 of SEQ ID NO: 1882520
ugggcuauuuaugaacaaa

SEQ ID NO: 2127497 - RNA, 19 nt, Artificial Sequence
  Description of Artificial Sequence: Synthetic oligonucleotide
  Antisense strand to SEQ ID NO: 2127496
uuuguucauaaauagccca

SEQ ID NO: 2127498 - RNA, 19 nt, Artificial Sequence
  Description of Artificial Sequence: Synthetic oligonucleotide
  Sense strand starting at position 411 of SEQ ID NO: 1882520
cugagauaauugucugaga

SEQ ID NO: 2127499 - RNA, 19 nt, Artificial Sequence
  Description of Artificial Sequence: Synthetic oligonucleotide
  Antisense strand to SEQ ID NO: 2127498
ucucagacaauuaucucag

SEQ ID NO: 2127500 - RNA, 19 nt, Artificial Sequence
  Description of Artificial Sequence: Synthetic oligonucleotide
  Sense strand starting at position 413 of SEQ ID NO: 1882520
gagauaauugucugagagu

SEQ ID NO: 2127501 - RNA, 19 nt, Artificial Sequence
  Description of Artificial Sequence: Synthetic oligonucleotide
  Antisense strand to SEQ ID NO: 2127500
acucucagacaauuaucuc

SEQ ID NO: 2127502 - RNA, 19 nt, Artificial Sequence
  Description of Artificial Sequence: Synthetic oligonucleotide
  Sense strand starting at position 523 of SEQ ID NO: 1882520
aucagcaaagucugaguaa

SEQ ID NO: 2127503 - RNA, 19 nt, Artificial Sequence
  Description of Artificial Sequence: Synthetic oligonucleotide
  Antisense strand to SEQ ID NO: 2127502
uuacucagacuuugcugau

SEQ ID NO: 2127504 - RNA, 19 nt, Artificial Sequence
  Description of Artificial Sequence: Synthetic oligonucleotide
  Sense strand starting at position 532 of SEQ ID NO: 1882520
gucugaguaauccaguuug

SEQ ID NO: 2127505 - RNA, 19 nt, Artificial Sequence
  Description of Artificial Sequence: Synthetic oligonucleotide
  Antisense strand to SEQ ID NO: 2127504
caaacuggauuacucagac

SEQ ID NO: 2127506 - RNA, 19 nt, Artificial Sequence
  Description of Artificial Sequence: Synthetic oligonucleotide
  Sense strand starting at position 557 of SEQ ID NO: 1882520
uugucauuuggugguguca

SEQ ID NO: 2127507 - RNA, 19 nt, Artificial Sequence
  Description of Artificial Sequence: Synthetic oligonucleotide
  Antisense strand to SEQ ID NO: 2127506
ugacaccaccaaaugacaa

SEQ ID NO: 2127508 - RNA, 19 nt, Artificial Sequence
  Description of Artificial Sequence: Synthetic oligonucleotide
  Sense strand starting at position 598 of SEQ ID NO: 1882520
cuauucugauaaguaugua

SEQ ID NO: 2127509 - RNA, 19 nt, Artificial Sequence
  Description of Artificial Sequence: Synthetic oligonucleotide
  Antisense strand to SEQ ID NO: 2127508
uacauacuuaucagaauag

SEQ ID NO: 2127510 - RNA, 19 nt, Artificial Sequence
  Description of Artificial Sequence: Synthetic oligonucleotide
  Sense strand starting at position 657 of SEQ ID NO: 1882520
guuagugaaguuuaacauu

SEQ ID NO: 2127511 - RNA, 19 nt, Artificial Sequence
  Description of Artificial Sequence: Synthetic oligonucleotide
  Antisense strand to SEQ ID NO: 2127510
aauguuaaacuucacuaac

SEQ ID NO: 2127512 - RNA, 19 nt, Artificial Sequence
  Description of Artificial Sequence: Synthetic oligonucleotide
  Sense strand starting at position 747 of SEQ ID NO: 1882520
cuaauugaauuguuuaggu

SEQ ID NO: 2127513 - RNA, 19 nt, Artificial Sequence
  Description of Artificial Sequence: Synthetic oligonucleotide
  Antisense strand to SEQ ID NO: 2127512
accuaaacaauucaauuag

SEQ ID NO: 2127514 - RNA, 19 nt, Artificial Sequence
  Description of Artificial Sequence: Synthetic oligonucleotide
  Sense strand starting at position 860 of SEQ ID NO: 1882520
aacagaguugcagagcaaa

SEQ ID NO: 2127515 - RNA, 19 nt, Artificial Sequence
  Description of Artificial Sequence: Synthetic oligonucleotide
  Antisense strand to SEQ ID NO: 2127514
uuugcucugcaacucuguu

SEQ ID NO: 2127516 - RNA, 19 nt, Artificial Sequence
  Description of Artificial Sequence: Synthetic oligonucleotide
  Sense strand starting at position 969 of SEQ ID NO: 1882520
guauguucugaagauucuc

SEQ ID NO: 2127517 - RNA, 19 nt, Artificial Sequence
  Description of Artificial Sequence: Synthetic oligonucleotide
  Antisense strand to SEQ ID NO: 2127516
gagaaucuucagaacauac

SEQ ID NO: 2127518 - RNA, 19 nt, Artificial Sequence
  Description of Artificial Sequence: Synthetic oligonucleotide
  Sense strand starting at position 1063 of SEQ ID NO: 1882520
guggauaagauaugaguuu

SEQ ID NO: 2127519 - RNA, 19 nt, Artificial Sequence
  Description of Artificial Sequence: Synthetic oligonucleotide
  Antisense strand to SEQ ID NO: 2127518
aaacucauaucuuauccac

SEQ ID NO: 2127520 - RNA, 19 nt, Artificial Sequence
  Description of Artificial Sequence: Synthetic oligonucleotide
  Sense strand starting at position 1339 of SEQ ID NO: 1882520
aagugauuccuguaguaaa

SEQ ID NO: 2127521 - RNA, 19 nt, Artificial Sequence
  Description of Artificial Sequence: Synthetic oligonucleotide
  Antisense strand to SEQ ID NO: 2127520
uuuacuacaggaaucacuu

SEQ ID NO: 2127522 - RNA, 19 nt, Artificial Sequence
  Description of Artificial Sequence: Synthetic oligonucleotide
  Sense strand starting at position 1577 of SEQ ID NO: 1882520
aaaugugaucuugggagca

SEQ ID NO: 2127523 - RNA, 19 nt, Artificial Sequence
  Description of Artificial Sequence: Synthetic oligonucleotide
  Antisense strand to SEQ ID NO: 2127522
ugcucccaagaucacauuu

SEQ ID NO: 2127524 - RNA, 19 nt, Artificial Sequence
  Description of Artificial Sequence: Synthetic oligonucleotide
  Sense strand starting at position 1613 of SEQ ID NO: 1882520
ggaugaaaucagugaugcu

SEQ ID NO: 2127525 - RNA, 19 nt, Artificial Sequence
  Description of Artificial Sequence: Synthetic oligonucleotide
  Antisense strand to SEQ ID NO: 2127524
agcaucacugauuucaucc

SEQ ID NO: 2127526 - RNA, 19 nt, Artificial Sequence
  Description of Artificial Sequence: Synthetic oligonucleotide
  Sense strand starting at position 1654 of SEQ ID NO: 1882520
auuuguaacuaggaaauga

SEQ ID NO: 2127527 - RNA, 19 nt, Artificial Sequence
  Description of Artificial Sequence: Synthetic oligonucleotide
  Antisense strand to SEQ ID NO: 2127526
ucauuuccuaguuacaaau

SEQ ID NO: 2127528 - RNA, 19 nt, Artificial Sequence
  Description of Artificial Sequence: Synthetic oligonucleotide
  Sense strand starting at position 1753 of SEQ ID NO: 1882520
cugacaaaccuguaguuua

SEQ ID NO: 2127529 - RNA, 19 nt, Artificial Sequence
  Description of Artificial Sequence: Synthetic oligonucleotide
  Antisense strand to SEQ ID NO: 2127528
uaaacuacagguuugucag

SEQ ID NO: 2127530 - RNA, 19 nt, Artificial Sequence
  Description of Artificial Sequence: Synthetic oligonucleotide
  Sense strand starting at position 1782 of SEQ ID NO: 1882520
ugcaguggaagccagaaau

SEQ ID NO: 2127531 - RNA, 19 nt, Artificial Sequence
  Description of Artificial Sequence: Synthetic oligonucleotide
  Antisense strand to SEQ ID NO: 2127530
auuucuggcuuccacugca

SEQ ID NO: 2127532 - RNA, 19 nt, Artificial Sequence
  Description of Artificial Sequence: Synthetic oligonucleotide
  Sense strand starting at position 1905 of SEQ ID NO: 1882520
cugacuuaacuguggaauu

SEQ ID NO: 2127533 - RNA, 19 nt, Artificial Sequence
  Description of Artificial Sequence: Synthetic oligonucleotide
  Antisense strand to SEQ ID NO: 2127532
aauuccacaguuaagucag

SEQ ID NO: 2127534 - RNA, 19 nt, Artificial Sequence
  Description of Artificial Sequence: Synthetic oligonucleotide
  Sense strand starting at position 1918 of SEQ ID NO: 1882520
ggaauuaccauguggaacu

SEQ ID NO: 2127535 - RNA, 19 nt, Artificial Sequence
  Description of Artificial Sequence: Synthetic oligonucleotide
  Antisense strand to SEQ ID NO: 2127534
aguuccacaugguaauucc

SEQ ID NO: 2127536 - RNA, 19 nt, Artificial Sequence
  Description of Artificial Sequence: Synthetic oligonucleotide
  Sense strand starting at position 1954 of SEQ ID NO: 1882520
gaaagcugguuucugacaa

SEQ ID NO: 2127537 - RNA, 19 nt, Artificial Sequence
  Description of Artificial Sequence: Synthetic oligonucleotide
  Antisense strand to SEQ ID NO: 2127536
uugucagaaaccagcuuuc

SEQ ID NO: 2127538 - RNA, 19 nt, Artificial Sequence
  Description of Artificial Sequence: Synthetic oligonucleotide
  Sense strand starting at position 2015 of SEQ ID NO: 1882520
caagcaagaucucuggaga

SEQ ID NO: 2127539 - RNA, 19 nt, Artificial Sequence
  Description of Artificial Sequence: Synthetic oligonucleotide
  Antisense strand to SEQ ID NO: 2127538
ucuccagagaucuugcuug

SEQ ID NO: 2127540 - RNA, 19 nt, Artificial Sequence
  Description of Artificial Sequence: Synthetic oligonucleotide
  Sense strand starting at position 2126 of SEQ ID NO: 1882520
ugguguucugaggaaguca

SEQ ID NO: 2127541 - RNA, 19 nt, Artificial Sequence
  Description of Artificial Sequence: Synthetic oligonucleotide
  Antisense strand to SEQ ID NO: 2127540
ugacuuccucagaacacca

SEQ ID NO: 2127542 - RNA, 19 nt, Artificial Sequence
  Description of Artificial Sequence: Synthetic oligonucleotide
  Sense strand starting at position 2262 of SEQ ID NO: 1882520
uuuccuccugaguaguuaa

SEQ ID NO: 2127543 - RNA, 19 nt, Artificial Sequence
  Description of Artificial Sequence: Synthetic oligonucleotide
  Antisense strand to SEQ ID NO: 2127542
uuaacuacucaggaggaaa

SEQ ID NO: 2127544 - RNA, 19 nt, Artificial Sequence
  Description of Artificial Sequence: Synthetic oligonucleotide
  Sense strand starting at position 2265 of SEQ ID NO: 1882520
ccuccugaguaguuaaaua

SEQ ID NO: 2127545 - RNA, 19 nt, Artificial Sequence
  Description of Artificial Sequence: Synthetic oligonucleotide
  Antisense strand to SEQ ID NO: 2127544
uauuuaacuacucaggagg

SEQ ID NO: 2127546 - RNA, 19 nt, Artificial Sequence
  Description of Artificial Sequence: Synthetic oligonucleotide
  Sense strand starting at position 2341 of SEQ ID NO: 1882520
guguuugauaaauaguccu

SEQ ID NO: 2127547 - RNA, 19 nt, Artificial Sequence
  Description of Artificial Sequence: Synthetic oligonucleotide
  Antisense strand to SEQ ID NO: 2127546
aggacuauuuaucaaacac

SEQ ID NO: 2127548 - RNA, 19 nt, Artificial Sequence
  Description of Artificial Sequence: Synthetic oligonucleotide
  Sense strand starting at position 2804 of SEQ ID NO: 1882520
cuauuuguacuguguacaa

SEQ ID NO: 2127549 - RNA, 19 nt, Artificial Sequence
  Description of Artificial Sequence: Synthetic oligonucleotide
  Antisense strand to SEQ ID NO: 2127548
uuguacacaguacaaauag

SEQ ID NO: 2127550 - RNA, 19 nt, Artificial Sequence
  Description of Artificial Sequence: Synthetic oligonucleotide
  Sense strand starting at position 2846 of SEQ ID NO: 1882520
uaucaugugucauuuguua

SEQ ID NO: 2127551 - RNA, 19 nt, Artificial Sequence
  Description of Artificial Sequence: Synthetic oligonucleotide
  Antisense strand to SEQ ID NO: 2127550
uaacaaaugacacaugaua

SEQ ID NO: 2127552 - RNA, 19 nt, Artificial Sequence
  Description of Artificial Sequence: Synthetic oligonucleotide
  Sense strand starting at position 2952 of SEQ ID NO: 1882520
gcuugacauuauuuggcuu

SEQ ID NO: 2127553 - RNA, 19 nt, Artificial Sequence
  Description of Artificial Sequence: Synthetic oligonucleotide
  Antisense strand to SEQ ID NO: 2127552
aagccaaauaaugucaagc

SEQ ID NO: 2127554 - RNA, 19 nt, Artificial Sequence
  Description of Artificial Sequence: Synthetic oligonucleotide
  Sense strand starting at position 2996 of SEQ ID NO: 1882520
augccauugguugaagauu

SEQ ID NO: 2127555 - RNA, 19 nt, Artificial Sequence
  Description of Artificial Sequence: Synthetic oligonucleotide
  Antisense strand to SEQ ID NO: 2127554
aaucuucaaccaauggcau

SEQ ID NO: 2127556 - RNA, 19 nt, Artificial Sequence
  Description of Artificial Sequence: Synthetic oligonucleotide
  Sense strand starting at position 3004 of SEQ ID NO: 1882520
gguugaagauucuuugaaa

SEQ ID NO: 2127557 - RNA, 19 nt, Artificial Sequence
  Description of Artificial Sequence: Synthetic oligonucleotide
  Antisense strand to SEQ ID NO: 2127556
uuucaaagaaucuucaacc

SEQ ID NO: 2127558 - RNA, 19 nt, Artificial Sequence
  Description of Artificial Sequence: Synthetic oligonucleotide
  Sense strand starting at position 3005 of SEQ ID NO: 1882520
guugaagauucuuugaaag

SEQ ID NO: 2127559 - RNA, 19 nt, Artificial Sequence
  Description of Artificial Sequence: Synthetic oligonucleotide
  Antisense strand to SEQ ID NO: 2127558
cuuucaaagaaucuucaac

SEQ ID NO: 2127560 - RNA, 19 nt, Artificial Sequence
  Description of Artificial Sequence: Synthetic oligonucleotide
  Sense strand starting at position 3034 of SEQ ID NO: 1882520
ggaucaagcguugauugaa

SEQ ID NO: 2127561 - RNA, 19 nt, Artificial Sequence
  Description of Artificial Sequence: Synthetic oligonucleotide
  Antisense strand to SEQ ID NO: 2127560
uucaaucaacgcuugaucc

SEQ ID NO: 2127562 - RNA, 19 nt, Artificial Sequence
  Description of Artificial Sequence: Synthetic oligonucleotide
  Sense strand starting at position 3136 of SEQ ID NO: 1882520
gggaguaaacagugaguaa

SEQ ID NO: 2127563 - RNA, 19 nt, Artificial Sequence
  Description of Artificial Sequence: Synthetic oligonucleotide
  Antisense strand to SEQ ID NO: 2127562
uuacucacuguuuacuccc

SEQ ID NO: 2127564 - RNA, 19 nt, Artificial Sequence
  Description of Artificial Sequence: Synthetic oligonucleotide
  Sense strand starting at position 3139 of SEQ ID NO: 1882520
aguaaacagugaguaauau

SEQ ID NO: 2127565 - RNA, 19 nt, Artificial Sequence
  Description of Artificial Sequence: Synthetic oligonucleotide
  Antisense strand to SEQ ID NO: 2127564
auauuacucacuguuuacu

SEQ ID NO: 2127566 - RNA, 19 nt, Artificial Sequence
  Description of Artificial Sequence: Synthetic oligonucleotide
  Sense strand starting at position 3336 of SEQ ID NO: 1882520
augcaaaguguagaacauu

SEQ ID NO: 2127567 - RNA, 19 nt, Artificial Sequence
  Description of Artificial Sequence: Synthetic oligonucleotide
  Antisense strand to SEQ ID NO: 2127566
aauguucuacacuuugcau

SEQ ID NO: 2127568 - RNA, 19 nt, Artificial Sequence
  Description of Artificial Sequence: Synthetic oligonucleotide
  Sense strand starting at position 3706 of SEQ ID NO: 1882520
uguagcuuucguguucaag

SEQ ID NO: 2127569 - RNA, 19 nt, Artificial Sequence
  Description of Artificial Sequence: Synthetic oligonucleotide
  Antisense strand to SEQ ID NO: 2127568
cuugaacacgaaagcuaca

SEQ ID NO: 2127570 - RNA, 19 nt, Artificial Sequence
  Description of Artificial Sequence: Synthetic oligonucleotide
  Sense strand starting at position 3707 of SEQ ID NO: 1882520
guagcuuucguguucaagu

SEQ ID NO: 2127571 - RNA, 19 nt, Artificial Sequence
  Description of Artificial Sequence: Synthetic oligonucleotide
  Antisense strand to SEQ ID NO: 2127570
acuugaacacgaaagcuac

SEQ ID NO: 2127572 - RNA, 19 nt, Artificial Sequence
  Description of Artificial Sequence: Synthetic oligonucleotide
  Sense strand starting at position 3735 of SEQ ID NO: 1882520
ccaagauggcuaugaagau

SEQ ID NO: 2127573 - RNA, 19 nt, Artificial Sequence
  Description of Artificial Sequence: Synthetic oligonucleotide
  Antisense strand to SEQ ID NO: 2127572
aucuucauagccaucuugg

SEQ ID NO: 2127574 - RNA, 19 nt, Artificial Sequence
  Description of Artificial Sequence: Synthetic oligonucleotide
  Sense strand starting at position 3901 of SEQ ID NO: 1882520
uguuguucagaucagggaa

SEQ ID NO: 2127575 - RNA, 19 nt, Artificial Sequence
  Description of Artificial Sequence: Synthetic oligonucleotide
  Antisense strand to SEQ ID NO: 2127574
uucccugaucugaacaaca

SEQ ID NO: 2127576 - RNA, 19 nt, Artificial Sequence
  Description of Artificial Sequence: Synthetic oligonucleotide
  Sense strand starting at position 175 of SEQ ID NO: 1882521
aagcucucaggucaugaga

SEQ ID NO: 2127577 - RNA, 19 nt, Artificial Sequence
  Description of Artificial Sequence: Synthetic oligonucleotide
  Antisense strand to SEQ ID NO: 2127576
ucucaugaccugagagcuu

SEQ ID NO: 2127578 - RNA, 19 nt, Artificial Sequence
  Description of Artificial Sequence: Synthetic oligonucleotide
  Sense strand starting at position 349 of SEQ ID NO: 1882521
cccuuauuuacguguagag

SEQ ID NO: 2127579 - RNA, 19 nt, Artificial Sequence
  Description of Artificial Sequence: Synthetic oligonucleotide
  Antisense strand to SEQ ID NO: 2127578
cucuacacguaaauaaggg

SEQ ID NO: 2127580 - RNA, 19 nt, Artificial Sequence
  Description of Artificial Sequence: Synthetic oligonucleotide
  Sense strand starting at position 572 of SEQ ID NO: 1882521
cgccuuagccuccugcaua

SEQ ID NO: 2127581 - RNA, 19 nt, Artificial Sequence
  Description of Artificial Sequence: Synthetic oligonucleotide
  Antisense strand to SEQ ID NO: 2127580
uaugcaggaggcuaaggcg

SEQ ID NO: 2127582 - RNA, 19 nt, Artificial Sequence
  Description of Artificial Sequence: Synthetic oligonucleotide
  Sense strand starting at position 774 of SEQ ID NO: 1882521
ccaggaauguccucgaaag

SEQ ID NO: 2127583 - RNA, 19 nt, Artificial Sequence
  Description of Artificial Sequence: Synthetic oligonucleotide
  Antisense strand to SEQ ID NO: 2127582
cuuucgaggacauuccugg

SEQ ID NO: 2127584 - RNA, 19 nt, Artificial Sequence
  Description of Artificial Sequence: Synthetic oligonucleotide
  Sense strand starting at position 776 of SEQ ID NO: 1882521
aggaauguccucgaaagua

SEQ ID NO: 2127585 - RNA, 19 nt, Artificial Sequence
  Description of Artificial Sequence: Synthetic oligonucleotide
  Antisense strand to SEQ ID NO: 2127584
uacuuucgaggacauuccu

SEQ ID NO: 2127586 - RNA, 19 nt, Artificial Sequence
  Description of Artificial Sequence: Synthetic oligonucleotide
  Sense strand starting at position 838 of SEQ ID NO: 1882521
gcagauucccaguauucug

SEQ ID NO: 2127587 - RNA, 19 nt, Artificial Sequence
  Description of Artificial Sequence: Synthetic oligonucleotide
  Antisense strand to SEQ ID NO: 2127586
cagaauacugggaaucugc

SEQ ID NO: 2127588 - RNA, 19 nt, Artificial Sequence
  Description of Artificial Sequence: Synthetic oligonucleotide
  Sense strand starting at position 849 of SEQ ID NO: 1882521
guauucugucauggacaau

SEQ ID NO: 2127589 - RNA, 19 nt, Artificial Sequence
  Description of Artificial Sequence: Synthetic oligonucleotide
  Antisense strand to SEQ ID NO: 2127588
auuguccaugacagaauac

SEQ ID NO: 2127590 - RNA, 19 nt, Artificial Sequence
  Description of Artificial Sequence: Synthetic oligonucleotide
  Sense strand starting at position 1006 of SEQ ID NO: 1882521
cucugcauagcuuagaauu

SEQ ID NO: 2127591 - RNA, 19 nt, Artificial Sequence
  Description of Artificial Sequence: Synthetic oligonucleotide
  Antisense strand to SEQ ID NO: 2127590
aauucuaagcuaugcagag

SEQ ID NO: 2127592 - RNA, 19 nt, Artificial Sequence
  Description of Artificial Sequence: Synthetic oligonucleotide
  Sense strand starting at position 1351 of SEQ ID NO: 1882521
caggacucauguccaaaga

SEQ ID NO: 2127593 - RNA, 19 nt, Artificial Sequence
  Description of Artificial Sequence: Synthetic oligonucleotide
  Antisense strand to SEQ ID NO: 2127592
ucuuuggacaugaguccug

SEQ ID NO: 2127594 - RNA, 19 nt, Artificial Sequence
  Description of Artificial Sequence: Synthetic oligonucleotide
  Sense strand starting at position 1379 of SEQ ID NO: 1882521
ggacguaaaugauucuaau

SEQ ID NO: 2127595 - RNA, 19 nt, Artificial Sequence
  Description of Artificial Sequence: Synthetic oligonucleotide
  Antisense strand to SEQ ID NO: 2127594
auuagaaucauuuacgucc

SEQ ID NO: 2127596 - RNA, 19 nt, Artificial Sequence
  Description of Artificial Sequence: Synthetic oligonucleotide
  Sense strand starting at position 1563 of SEQ ID NO: 1882521
agaaaucaugcugguuuga

SEQ ID NO: 2127597 - RNA, 19 nt, Artificial Sequence
  Description of Artificial Sequence: Synthetic oligonucleotide
  Antisense strand to SEQ ID NO: 2127596
ucaaaccagcaugauuucu

SEQ ID NO: 2127598 - RNA, 19 nt, Artificial Sequence
  Description of Artificial Sequence: Synthetic oligonucleotide
  Sense strand starting at position 1728 of SEQ ID NO: 1882521
gaaguaggagccugaauga

SEQ ID NO: 2127599 - RNA, 19 nt, Artificial Sequence
  Description of Artificial Sequence: Synthetic oligonucleotide
  Antisense strand to SEQ ID NO: 2127598
ucauucaggcuccuacuuc

SEQ ID NO: 2127600 - RNA, 19 nt, Artificial Sequence
  Description of Artificial Sequence: Synthetic oligonucleotide
  Sense strand starting at position 2086 of SEQ ID NO: 1882521
uucugauucgcugaggaca

SEQ ID NO: 2127601 - RNA, 19 nt, Artificial Sequence
  Description of Artificial Sequence: Synthetic oligonucleotide
  Antisense strand to SEQ ID NO: 2127600
uguccucagcgaaucagaa

SEQ ID NO: 2127602 - RNA, 19 nt, Artificial Sequence
  Description of Artificial Sequence: Synthetic oligonucleotide
  Sense strand starting at position 2097 of SEQ ID NO: 1882521
ugaggacacuuuguaguuu

SEQ ID NO: 2127603 - RNA, 19 nt, Artificial Sequence
  Description of Artificial Sequence: Synthetic oligonucleotide
  Antisense strand to SEQ ID NO: 2127602
aaacuacaaaguguccuca

SEQ ID NO: 2127604 - RNA, 19 nt, Artificial Sequence
  Description of Artificial Sequence: Synthetic oligonucleotide
  Sense strand starting at position 2109 of SEQ ID NO: 1882521
guaguuuagggacagguaa

SEQ ID NO: 2127605 - RNA, 19 nt, Artificial Sequence
  Description of Artificial Sequence: Synthetic oligonucleotide
  Antisense strand to SEQ ID NO: 2127604
uuaccugucccuaaacuac

SEQ ID NO: 2127606 - RNA, 19 nt, Artificial Sequence
  Description of Artificial Sequence: Synthetic oligonucleotide
  Sense strand starting at position 2163 of SEQ ID NO: 1882521
uagaaagguaggugaucuu

SEQ ID NO: 2127607 - RNA, 19 nt, Artificial Sequence
  Description of Artificial Sequence: Synthetic oligonucleotide
  Antisense strand to SEQ ID NO: 2127606
aagaucaccuaccuuucua

SEQ ID NO: 2127608 - RNA, 19 nt, Artificial Sequence
  Description of Artificial Sequence: Synthetic oligonucleotide
  Sense strand starting at position 2166 of SEQ ID NO: 1882521
aaagguaggugaucuuuaa

SEQ ID NO: 2127609 - RNA, 19 nt, Artificial Sequence
  Description of Artificial Sequence: Synthetic oligonucleotide
  Antisense strand to SEQ ID NO: 2127608
uuaaagaucaccuaccuuu

SEQ ID NO: 2127610 - RNA, 19 nt, Artificial Sequence
  Description of Artificial Sequence: Synthetic oligonucleotide
  Sense strand starting at position 2170 of SEQ ID NO: 1882521
guaggugaucuuuaaauuc

SEQ ID NO: 2127611 - RNA, 19 nt, Artificial Sequence
  Description of Artificial Sequence: Synthetic oligonucleotide
  Antisense strand to SEQ ID NO: 2127610
gaauuuaaagaucaccuac

SEQ ID NO: 2127612 - RNA, 19 nt, Artificial Sequence
  Description of Artificial Sequence: Synthetic oligonucleotide
  Sense strand starting at position 2382 of SEQ ID NO: 1882521
gagcuuguacacuggaaua

SEQ ID NO: 2127613 - RNA, 19 nt, Artificial Sequence
  Description of Artificial Sequence: Synthetic oligonucleotide
  Antisense strand to SEQ ID NO: 2127612
uauuccaguguacaagcuc

SEQ ID NO: 2127614 - RNA, 19 nt, Artificial Sequence
  Description of Artificial Sequence: Synthetic oligonucleotide
  Sense strand starting at position 2384 of SEQ ID NO: 1882521
gcuuguacacuggaauaga

SEQ ID NO: 2127615 - RNA, 19 nt, Artificial Sequence
  Description of Artificial Sequence: Synthetic oligonucleotide
  Antisense strand to SEQ ID NO: 2127614
ucuauuccaguguacaagc

SEQ ID NO: 2127616 - RNA, 19 nt, Artificial Sequence
  Description of Artificial Sequence: Synthetic oligonucleotide
  Sense strand starting at position 2424 of SEQ ID NO: 1882521
cucagagaguuuccuacuu

SEQ ID NO: 2127617 - RNA, 19 nt, Artificial Sequence
  Description of Artificial Sequence: Synthetic oligonucleotide
  Antisense strand to SEQ ID NO: 2127616
aaguaggaaacucucugag

SEQ ID NO: 2127618 - RNA, 19 nt, Artificial Sequence
  Description of Artificial Sequence: Synthetic oligonucleotide
  Sense strand starting at position 2460 of SEQ ID NO: 1882521
ccuagaucuguguauguag

SEQ ID NO: 2127619 - RNA, 19 nt, Artificial Sequence
  Description of Artificial Sequence: Synthetic oligonucleotide
  Antisense strand to SEQ ID NO: 2127618
cuacauacacagaucuagg

SEQ ID NO: 2127620 - RNA, 19 nt, Artificial Sequence
  Description of Artificial Sequence: Synthetic oligonucleotide
  Sense strand starting at position 2463 of SEQ ID NO: 1882521
agaucuguguauguagaag

SEQ ID NO: 2127621 - RNA, 19 nt, Artificial Sequence
  Description of Artificial Sequence: Synthetic oligonucleotide
  Antisense strand to SEQ ID NO: 2127620
cuucuacauacacagaucu

SEQ ID NO: 2127622 - RNA, 19 nt, Artificial Sequence
  Description of Artificial Sequence: Synthetic oligonucleotide
  Sense strand starting at position 2469 of SEQ ID NO: 1882521
guguauguagaagggaauu

SEQ ID NO: 2127623 - RNA, 19 nt, Artificial Sequence
  Description of Artificial Sequence: Synthetic oligonucleotide
  Antisense strand to SEQ ID NO: 2127622
aauucccuucuacauacac

SEQ ID NO: 2127624 - RNA, 19 nt, Artificial Sequence
  Description of Artificial Sequence: Synthetic oligonucleotide
  Sense strand starting at position 2636 of SEQ ID NO: 1882521
ggaacagucacaggauugu

SEQ ID NO: 2127625 - RNA, 19 nt, Artificial Sequence
  Description of Artificial Sequence: Synthetic oligonucleotide
  Antisense strand to SEQ ID NO: 2127624
acaauccugugacuguucc

SEQ ID NO: 2127626 - RNA, 19 nt, Artificial Sequence
  Description of Artificial Sequence: Synthetic oligonucleotide
  Sense strand starting at position 2666 of SEQ ID NO: 1882521
agugaauuaguacauguaa

SEQ ID NO: 2127627 - RNA, 19 nt, Artificial Sequence
  Description of Artificial Sequence: Synthetic oligonucleotide
  Antisense strand to SEQ ID NO: 2127626
uuacauguacuaauucacu

SEQ ID NO: 2127628 - RNA, 19 nt, Artificial Sequence
  Description of Artificial Sequence: Synthetic oligonucleotide
  Sense strand starting at position 2680 of SEQ ID NO: 1882521
uguaaagcacuccaagaau

SEQ ID NO: 2127629 - RNA, 19 nt, Artificial Sequence
  Description of Artificial Sequence: Synthetic oligonucleotide
  Antisense strand to SEQ ID NO: 2127628
auucuuggagugcuuuaca

SEQ ID NO: 2127630 - RNA, 19 nt, Artificial Sequence
  Description of Artificial Sequence: Synthetic oligonucleotide
  Sense strand starting at position 2691 of SEQ ID NO: 1882521
ccaagaaugccuggcacaa

SEQ ID NO: 2127631 - RNA, 19 nt, Artificial Sequence
  Description of Artificial Sequence: Synthetic oligonucleotide
  Antisense strand to SEQ ID NO: 2127630
uugugccaggcauucuugg

SEQ ID NO: 2127632 - RNA, 19 nt, Artificial Sequence
  Description of Artificial Sequence: Synthetic oligonucleotide
  Sense strand starting at position 2760 of SEQ ID NO: 1882521
guauuauuaucagcugaga

SEQ ID NO: 2127633 - RNA, 19 nt, Artificial Sequence
  Description of Artificial Sequence: Synthetic oligonucleotide
  Antisense strand to SEQ ID NO: 2127632
ucucagcugauaauaauac

SEQ ID NO: 2127634 - RNA, 19 nt, Artificial Sequence
  Description of Artificial Sequence: Synthetic oligonucleotide
  Sense strand starting at position 2763 of SEQ ID NO: 1882521
uuauuaucagcugagaucu

SEQ ID NO: 2127635 - RNA, 19 nt, Artificial Sequence
  Description of Artificial Sequence: Synthetic oligonucleotide
  Antisense strand to SEQ ID NO: 2127634
agaucucagcugauaauaa

SEQ ID NO: 2127636 - RNA, 19 nt, Artificial Sequence
  Description of Artificial Sequence: Synthetic oligonucleotide
  Sense strand starting at position 2876 of SEQ ID NO: 1882521
ugguuugauaauggauguu

SEQ ID NO: 2127637 - RNA, 19 nt, Artificial Sequence
  Description of Artificial Sequence: Synthetic oligonucleotide
  Antisense strand to SEQ ID NO: 2127636
aacauccauuaucaaacca

SEQ ID NO: 2127638 - RNA, 19 nt, Artificial Sequence
  Description of Artificial Sequence: Synthetic oligonucleotide
  Sense strand starting at position 2912 of SEQ ID NO: 1882521
gugcuugauguuucugcuu

SEQ ID NO: 2127639 - RNA, 19 nt, Artificial Sequence
  Description of Artificial Sequence: Synthetic oligonucleotide
  Antisense strand to SEQ ID NO: 2127638
aagcagaaacaucaagcac

SEQ ID NO: 2127640 - RNA, 19 nt, Artificial Sequence
  Description of Artificial Sequence: Synthetic oligonucleotide
  Sense strand starting at position 2988 of SEQ ID NO: 1882521
ucagacucagcucauguau

SEQ ID NO: 2127641 - RNA, 19 nt, Artificial Sequence
  Description of Artificial Sequence: Synthetic oligonucleotide
  Antisense strand to SEQ ID NO: 2127640
auacaugagcugagucuga

SEQ ID NO: 2127642 - RNA, 19 nt, Artificial Sequence
  Description of Artificial Sequence: Synthetic oligonucleotide
  Sense strand starting at position 3079 of SEQ ID NO: 1882521
guaagacuucucugaaauu

SEQ ID NO: 2127643 - RNA, 19 nt, Artificial Sequence
  Description of Artificial Sequence: Synthetic oligonucleotide
  Antisense strand to SEQ ID NO: 2127642
aauuucagagaagucuuac

SEQ ID NO: 2127644 - RNA, 19 nt, Artificial Sequence
  Description of Artificial Sequence: Synthetic oligonucleotide
  Sense strand starting at position 3285 of SEQ ID NO: 1882521
accuguuaagugcaauuaa

SEQ ID NO: 2127645 - RNA, 19 nt, Artificial Sequence
  Description of Artificial Sequence: Synthetic oligonucleotide
  Antisense strand to SEQ ID NO: 2127644
uuaauugcacuuaacaggu

SEQ ID NO: 2127646 - RNA, 19 nt, Artificial Sequence
  Description of Artificial Sequence: Synthetic oligonucleotide
  Sense strand starting at position 3384 of SEQ ID NO: 1882521
guauccacaucauuccaga

SEQ ID NO: 2127647 - RNA, 19 nt, Artificial Sequence
  Description of Artificial Sequence: Synthetic oligonucleotide
  Antisense strand to SEQ ID NO: 2127646
ucuggaaugauguggauac

SEQ ID NO: 2127648 - RNA, 19 nt, Artificial Sequence
  Description of Artificial Sequence: Synthetic oligonucleotide
  Sense strand starting at position 3473 of SEQ ID NO: 1882521
gguagagaagucuggauag

SEQ ID NO: 2127649 - RNA, 19 nt, Artificial Sequence
  Description of Artificial Sequence: Synthetic oligonucleotide
  Antisense strand to SEQ ID NO: 2127648
cuauccagacuucucuacc

SEQ ID NO: 2127650 - RNA, 19 nt, Artificial Sequence
  Description of Artificial Sequence: Synthetic oligonucleotide
  Sense strand starting at position 3623 of SEQ ID NO: 1882521
uuuguaguaugacuugaau

SEQ ID NO: 2127651 - RNA, 19 nt, Artificial Sequence
  Description of Artificial Sequence: Synthetic oligonucleotide
  Antisense strand to SEQ ID NO: 2127650
auucaagucauacuacaaa

SEQ ID NO: 2127652 - RNA, 19 nt, Artificial Sequence
  Description of Artificial Sequence: Synthetic oligonucleotide
  Sense strand starting at position 3626 of SEQ ID NO: 1882521
guaguaugacuugaauauu

SEQ ID NO: 2127653 - RNA, 19 nt, Artificial Sequence
  Description of Artificial Sequence: Synthetic oligonucleotide
  Antisense strand to SEQ ID NO: 2127652
aauauucaagucauacuac

SEQ ID NO: 2127654 - RNA, 19 nt, Artificial Sequence
  Description of Artificial Sequence: Synthetic oligonucleotide
  Sense strand starting at position 3652 of SEQ ID NO: 1882521
ucaaauugucugcauaagu

SEQ ID NO: 2127655 - RNA, 19 nt, Artificial Sequence
  Description of Artificial Sequence: Synthetic oligonucleotide
  Antisense strand to SEQ ID NO: 2127654
acuuaugcagacaauuuga

SEQ ID NO: 2127656 - RNA, 19 nt, Artificial Sequence
  Description of Artificial Sequence: Synthetic oligonucleotide
  Sense strand starting at position 136 of SEQ ID NO: 1882522
aauucuuuauuguuggaga

SEQ ID NO: 2127657 - RNA, 19 nt, Artificial Sequence
  Description of Artificial Sequence: Synthetic oligonucleotide
  Antisense strand to SEQ ID NO: 2127656
ucuccaacaauaaagaauu

SEQ ID NO: 2127658 - RNA, 19 nt, Artificial Sequence
  Description of Artificial Sequence: Synthetic oligonucleotide
  Sense strand starting at position 138 of SEQ ID NO: 1882522
uucuuuauuguuggagaug

SEQ ID NO: 2127659 - RNA, 19 nt, Artificial Sequence
  Description of Artificial Sequence: Synthetic oligonucleotide
  Antisense strand to SEQ ID NO: 2127658
caucuccaacaauaaagaa

SEQ ID NO: 2127660 - RNA, 19 nt, Artificial Sequence
  Description of Artificial Sequence: Synthetic oligonucleotide
  Sense strand starting at position 141 of SEQ ID NO: 1882522
uuuauuguuggagaugcaa

SEQ ID NO: 2127661 - RNA, 19 nt, Artificial Sequence
  Description of Artificial Sequence: Synthetic oligonucleotide
  Antisense strand to SEQ ID NO: 2127660
uugcaucuccaacaauaaa

SEQ ID NO: 2127662 - RNA, 19 nt, Artificial Sequence
  Description of Artificial Sequence: Synthetic oligonucleotide
  Sense strand starting at position 212 of SEQ ID NO: 1882522
uugugcauuugcccaauua

SEQ ID NO: 2127663 - RNA, 19 nt, Artificial Sequence
  Description of Artificial Sequence: Synthetic oligonucleotide
  Antisense strand to SEQ ID NO: 2127662
uaauugggcaaaugcacaa

SEQ ID NO: 2127664 - RNA, 19 nt, Artificial Sequence
  Description of Artificial Sequence: Synthetic oligonucleotide
  Sense strand starting at position 213 of SEQ ID NO: 1882522
ugugcauuugcccaauuau

SEQ ID NO: 2127665 - RNA, 19 nt, Artificial Sequence
  Description of Artificial Sequence: Synthetic oligonucleotide
  Antisense strand to SEQ ID NO: 2127664
auaauugggcaaaugcaca

SEQ ID NO: 2127666 - RNA, 19 nt, Artificial Sequence
  Description of Artificial Sequence: Synthetic oligonucleotide
  Sense strand starting at position 468 of SEQ ID NO: 1882522
caaaguggccuuuaugauu

SEQ ID NO: 2127667 - RNA, 19 nt, Artificial Sequence
  Description of Artificial Sequence: Synthetic oligonucleotide
  Antisense strand to SEQ ID NO: 2127666
aaucauaaaggccacuuug

SEQ ID NO: 2127668 - RNA, 19 nt, Artificial Sequence
  Description of Artificial Sequence: Synthetic oligonucleotide
  Sense strand starting at position 539 of SEQ ID NO: 1882522
cucacaaaucuaggcagaa

SEQ ID NO: 2127669 - RNA, 19 nt, Artificial Sequence
  Description of Artificial Sequence: Synthetic oligonucleotide
  Antisense strand to SEQ ID NO: 2127668
uucugccuagauuugugag

SEQ ID NO: 2127670 - RNA, 19 nt, Artificial Sequence
  Description of Artificial Sequence: Synthetic oligonucleotide
  Sense strand starting at position 540 of SEQ ID NO: 1882522
ucacaaaucuaggcagaau

SEQ ID NO: 2127671 - RNA, 19 nt, Artificial Sequence
  Description of Artificial Sequence: Synthetic oligonucleotide
  Antisense strand to SEQ ID NO: 2127670
auucugccuagauuuguga

SEQ ID NO: 2127672 - RNA, 19 nt, Artificial Sequence
  Description of Artificial Sequence: Synthetic oligonucleotide
  Sense strand starting at position 552 of SEQ ID NO: 1882522
gcagaauucuauucuugac

SEQ ID NO: 2127673 - RNA, 19 nt, Artificial Sequence
  Description of Artificial Sequence: Synthetic oligonucleotide
  Antisense strand to SEQ ID NO: 2127672
gucaagaauagaauucugc

SEQ ID NO: 2127674 - RNA, 19 nt, Artificial Sequence
  Description of Artificial Sequence: Synthetic oligonucleotide
  Sense strand starting at position 675 of SEQ ID NO: 1882522
uguguauucccauauauuc

SEQ ID NO: 2127675 - RNA, 19 nt, Artificial Sequence
  Description of Artificial Sequence: Synthetic oligonucleotide
  Antisense strand to SEQ ID NO: 2127674
gaauauaugggaauacaca

SEQ ID NO: 2127676 - RNA, 19 nt, Artificial Sequence
  Description of Artificial Sequence: Synthetic oligonucleotide
  Sense strand starting at position 697 of SEQ ID NO: 1882522
ggcaucuucccaugauaau

SEQ ID NO: 2127677 - RNA, 19 nt, Artificial Sequence
  Description of Artificial Sequence: Synthetic oligonucleotide
  Antisense strand to SEQ ID NO: 2127676
auuaucaugggaagaugcc

SEQ ID NO: 2127678 - RNA, 19 nt, Artificial Sequence
  Description of Artificial Sequence: Synthetic oligonucleotide
  Sense strand starting at position 708 of SEQ ID NO: 1882522
augauaauagugcaaguau

SEQ ID NO: 2127679 - RNA, 19 nt, Artificial Sequence
  Description of Artificial Sequence: Synthetic oligonucleotide
  Antisense strand to SEQ ID NO: 2127678
auacuugcacuauuaucau

SEQ ID NO: 2127680 - RNA, 19 nt, Artificial Sequence
  Description of Artificial Sequence: Synthetic oligonucleotide
  Sense strand starting at position 990 of SEQ ID NO: 1882522
auuaaagugugacucaaac

SEQ ID NO: 2127681 - RNA, 19 nt, Artificial Sequence
  Description of Artificial Sequence: Synthetic oligonucleotide
  Antisense strand to SEQ ID NO: 2127680
guuugagucacacuuuaau

SEQ ID NO: 2127682 - RNA, 19 nt, Artificial Sequence
  Description of Artificial Sequence: Synthetic oligonucleotide
  Sense strand starting at position 1302 of SEQ ID NO: 1882522
uuuagucugugaucuauuu

SEQ ID NO: 2127683 - RNA, 19 nt, Artificial Sequence
  Description of Artificial Sequence: Synthetic oligonucleotide
  Antisense strand to SEQ ID NO: 2127682
aaauagaucacagacuaaa

SEQ ID NO: 2127684 - RNA, 19 nt, Artificial Sequence
  Description of Artificial Sequence: Synthetic oligonucleotide
  Sense strand starting at position 1377 of SEQ ID NO: 1882522
ggcauuaucuauccaauug

SEQ ID NO: 2127685 - RNA, 19 nt, Artificial Sequence
  Description of Artificial Sequence: Synthetic oligonucleotide
  Antisense strand to SEQ ID NO: 2127684
caauuggauagauaaugcc

SEQ ID NO: 2127686 - RNA, 19 nt, Artificial Sequence
  Description of Artificial Sequence: Synthetic oligonucleotide
  Sense strand starting at position 1458 of SEQ ID NO: 1882522
gagaucaguuaacuauugu

SEQ ID NO: 2127687 - RNA, 19 nt, Artificial Sequence
  Description of Artificial Sequence: Synthetic oligonucleotide
  Antisense strand to SEQ ID NO: 2127686
acaauaguuaacugaucuc

SEQ ID NO: 2127688 - RNA, 19 nt, Artificial Sequence
  Description of Artificial Sequence: Synthetic oligonucleotide
  Sense strand starting at position 1564 of SEQ ID NO: 1882522
acuauaugaucaguacugu

SEQ ID NO: 2127689 - RNA, 19 nt, Artificial Sequence
  Description of Artificial Sequence: Synthetic oligonucleotide
  Antisense strand to SEQ ID NO: 2127688
acaguacugaucauauagu

SEQ ID NO: 2127690 - RNA, 19 nt, Artificial Sequence
  Description of Artificial Sequence: Synthetic oligonucleotide
  Sense strand starting at position 1565 of SEQ ID NO: 1882522
cuauaugaucaguacuguu

SEQ ID NO: 2127691 - RNA, 19 nt, Artificial Sequence
  Description of Artificial Sequence: Synthetic oligonucleotide
  Antisense strand to SEQ ID NO: 2127690
aacaguacugaucauauag

SEQ ID NO: 2127692 - RNA, 19 nt, Artificial Sequence
  Description of Artificial Sequence: Synthetic oligonucleotide
  Sense strand starting at position 1613 of SEQ ID NO: 1882522
gaaagagauuuacggaaau

SEQ ID NO: 2127693 - RNA, 19 nt, Artificial Sequence
  Description of Artificial Sequence: Synthetic oligonucleotide
  Antisense strand to SEQ ID NO: 2127692
auuuccguaaaucucuuuc

SEQ ID NO: 2127694 - RNA, 19 nt, Artificial Sequence
  Description of Artificial Sequence: Synthetic oligonucleotide
  Sense strand starting at position 1624 of SEQ ID NO: 1882522
acggaaauaaguuagcuuu

SEQ ID NO: 2127695 - RNA, 19 nt, Artificial Sequence
  Description of Artificial Sequence: Synthetic oligonucleotide
  Antisense strand to SEQ ID NO: 2127694
aaagcuaacuuauuuccgu

SEQ ID NO: 2127696 - RNA, 19 nt, Artificial Sequence
  Description of Artificial Sequence: Synthetic oligonucleotide
  Sense strand starting at position 1643 of SEQ ID NO: 1882522
ugagucucauuuguacagu

SEQ ID NO: 2127697 - RNA, 19 nt, Artificial Sequence
  Description of Artificial Sequence: Synthetic oligonucleotide
  Antisense strand to SEQ ID NO: 2127696
acuguacaaaugagacuca

SEQ ID NO: 2127698 - RNA, 19 nt, Artificial Sequence
  Description of Artificial Sequence: Synthetic oligonucleotide
  Sense strand starting at position 1730 of SEQ ID NO: 1882522
gcaucauggccaugaagaa

SEQ ID NO: 2127699 - RNA, 19 nt, Artificial Sequence
  Description of Artificial Sequence: Synthetic oligonucleotide
  Antisense strand to SEQ ID NO: 2127698
uucuucauggccaugaugc

SEQ ID NO: 2127700 - RNA, 19 nt, Artificial Sequence
  Description of Artificial Sequence: Synthetic oligonucleotide
  Sense strand starting at position 1760 of SEQ ID NO: 1882522
agaugacauuucuagacug

SEQ ID NO: 2127701 - RNA, 19 nt, Artificial Sequence
  Description of Artificial Sequence: Synthetic oligonucleotide
  Antisense strand to SEQ ID NO: 2127700
cagucuagaaaugucaucu

SEQ ID NO: 2127702 - RNA, 19 nt, Artificial Sequence
  Description of Artificial Sequence: Synthetic oligonucleotide
  Sense strand starting at position 1799 of SEQ ID NO: 1882522
ugagaacucagagguguca

SEQ ID NO: 2127703 - RNA, 19 nt, Artificial Sequence
  Description of Artificial Sequence: Synthetic oligonucleotide
  Antisense strand to SEQ ID NO: 2127702
ugacaccucugaguucuca

SEQ ID NO: 2127704 - RNA, 19 nt, Artificial Sequence
  Description of Artificial Sequence: Synthetic oligonucleotide
  Sense strand starting at position 1875 of SEQ ID NO: 1882522
augguauauuugucuguuu

SEQ ID NO: 2127705 - RNA, 19 nt, Artificial Sequence
  Description of Artificial Sequence: Synthetic oligonucleotide
  Antisense strand to SEQ ID NO: 2127704
aaacagacaaauauaccau

SEQ ID NO: 2127706 - RNA, 19 nt, Artificial Sequence
  Description of Artificial Sequence: Synthetic oligonucleotide
  Sense strand starting at position 2284 of SEQ ID NO: 1882522
aauagagaaugaguugcaa

SEQ ID NO: 2127707 - RNA, 19 nt, Artificial Sequence
  Description of Artificial Sequence: Synthetic oligonucleotide
  Antisense strand to SEQ ID NO: 2127706
uugcaacucauucucuauu

SEQ ID NO: 2127708 - RNA, 19 nt, Artificial Sequence
  Description of Artificial Sequence: Synthetic oligonucleotide
  Sense strand starting at position 2305 of SEQ ID NO: 1882522
uagucaauuguguggaaga

SEQ ID NO: 2127709 - RNA, 19 nt, Artificial Sequence
  Description of Artificial Sequence: Synthetic oligonucleotide
  Antisense strand to SEQ ID NO: 2127708
ucuuccacacaauugacua

SEQ ID NO: 2127710 - RNA, 19 nt, Artificial Sequence
  Description of Artificial Sequence: Synthetic oligonucleotide
  Sense strand starting at position 2307 of SEQ ID NO: 1882522
gucaauuguguggaagaaa

SEQ ID NO: 2127711 - RNA, 19 nt, Artificial Sequence
  Description of Artificial Sequence: Synthetic oligonucleotide
  Antisense strand to SEQ ID NO: 2127710
uuucuuccacacaauugac

SEQ ID NO: 2127712 - RNA, 19 nt, Artificial Sequence
  Description of Artificial Sequence: Synthetic oligonucleotide
  Sense strand starting at position 2341 of SEQ ID NO: 1882522
aaguaauuucagggcgggu

SEQ ID NO: 2127713 - RNA, 19 nt, Artificial Sequence
  Description of Artificial Sequence: Synthetic oligonucleotide
  Antisense strand to SEQ ID NO: 2127712
acccgcccugaaauuacuu

SEQ ID NO: 2127714 - RNA, 19 nt, Artificial Sequence
  Description of Artificial Sequence: Synthetic oligonucleotide
  Sense strand starting at position 2497 of SEQ ID NO: 1882522
gugguauuaaccuauaguc

SEQ ID NO: 2127715 - RNA, 19 nt, Artificial Sequence
  Description of Artificial Sequence: Synthetic oligonucleotide
  Antisense strand to SEQ ID NO: 2127714
gacuauagguuaauaccac

SEQ ID NO: 2127716 - RNA, 19 nt, Artificial Sequence
  Description of Artificial Sequence: Synthetic oligonucleotide
  Sense strand starting at position 2781 of SEQ ID NO: 1882522
acuugaaccuuuccaguga

SEQ ID NO: 2127717 - RNA, 19 nt, Artificial Sequence
  Description of Artificial Sequence: Synthetic oligonucleotide
  Antisense strand to SEQ ID NO: 2127716
ucacuggaaagguucaagu

SEQ ID NO: 2127718 - RNA, 19 nt, Artificial Sequence
  Description of Artificial Sequence: Synthetic oligonucleotide
  Sense strand starting at position 2785 of SEQ ID NO: 1882522
gaaccuuuccagugacagg

SEQ ID NO: 2127719 - RNA, 19 nt, Artificial Sequence
  Description of Artificial Sequence: Synthetic oligonucleotide
  Antisense strand to SEQ ID NO: 2127718
ccugucacuggaaagguuc

SEQ ID NO: 2127720 - RNA, 19 nt, Artificial Sequence
  Description of Artificial Sequence: Synthetic oligonucleotide
  Sense strand starting at position 3139 of SEQ ID NO: 1882522
gguugcuaacaagaaacuu

SEQ ID NO: 2127721 - RNA, 19 nt, Artificial Sequence
  Description of Artificial Sequence: Synthetic oligonucleotide
  Antisense strand to SEQ ID NO: 2127720
aaguuucuuguuagcaacc

SEQ ID NO: 2127722 - RNA, 19 nt, Artificial Sequence
  Description of Artificial Sequence: Synthetic oligonucleotide
  Sense strand starting at position 3556 of SEQ ID NO: 1882522
gagguuaaauguuuaaagu

SEQ ID NO: 2127723 - RNA, 19 nt, Artificial Sequence
  Description of Artificial Sequence: Synthetic oligonucleotide
  Antisense strand to SEQ ID NO: 2127722
acuuuaaacauuuaaccuc

SEQ ID NO: 2127724 - RNA, 19 nt, Artificial Sequence
  Description of Artificial Sequence: Synthetic oligonucleotide
  Sense strand starting at position 3567 of SEQ ID NO: 1882522
uuuaaaguuccucaugaug

SEQ ID NO: 2127725 - RNA, 19 nt, Artificial Sequence
  Description of Artificial Sequence: Synthetic oligonucleotide
  Antisense strand to SEQ ID NO: 2127724
caucaugaggaacuuuaaa

SEQ ID NO: 2127726 - RNA, 19 nt, Artificial Sequence
  Description of Artificial Sequence: Synthetic oligonucleotide
  Sense strand starting at position 3578 of SEQ ID NO: 1882522
ucaugaugccucgacuaaa

SEQ ID NO: 2127727 - RNA, 19 nt, Artificial Sequence
  Description of Artificial Sequence: Synthetic oligonucleotide
  Antisense strand to SEQ ID NO: 2127726
uuuagucgaggcaucauga

SEQ ID NO: 2127728 - RNA, 19 nt, Artificial Sequence
  Description of Artificial Sequence: Synthetic oligonucleotide
  Sense strand starting at position 3581 of SEQ ID NO: 1882522
ugaugccucgacuaaagau

SEQ ID NO: 2127729 - RNA, 19 nt, Artificial Sequence
  Description of Artificial Sequence: Synthetic oligonucleotide
  Antisense strand to SEQ ID NO: 2127728
aucuuuagucgaggcauca

SEQ ID NO: 2127730 - RNA, 19 nt, Artificial Sequence
  Description of Artificial Sequence: Synthetic oligonucleotide
  Sense strand starting at position 3764 of SEQ ID NO: 1882522
ggaacaaucagcugaagug

SEQ ID NO: 2127731 - RNA, 19 nt, Artificial Sequence
  Description of Artificial Sequence: Synthetic oligonucleotide
  Antisense strand to SEQ ID NO: 2127730
cacuucagcugauuguucc

SEQ ID NO: 2127732 - RNA, 19 nt, Artificial Sequence
  Description of Artificial Sequence: Synthetic oligonucleotide
  Sense strand starting at position 3880 of SEQ ID NO: 1882522
uguuuacacuacguaauuu

SEQ ID NO: 2127733 - RNA, 19 nt, Artificial Sequence
  Description of Artificial Sequence: Synthetic oligonucleotide
  Antisense strand to SEQ ID NO: 2127732
aaauuacguaguguaaaca

SEQ ID NO: 2127734 - RNA, 19 nt, Artificial Sequence
  Description of Artificial Sequence: Synthetic oligonucleotide
  Sense strand starting at position 3950 of SEQ ID NO: 1882522
gcauauuaccugugaauaa

SEQ ID NO: 2127735 - RNA, 19 nt, Artificial Sequence
  Description of Artificial Sequence: Synthetic oligonucleotide
  Antisense strand to SEQ ID NO: 2127734
uuauucacagguaauaugc

SEQ ID NO: 2127736 - RNA, 19 nt, Artificial Sequence
  Description of Artificial Sequence: Synthetic oligonucleotide
  Sense strand starting at position 155 of SEQ ID NO: 1882524
ggcccaugagcucagcaua

SEQ ID NO: 2127737 - RNA, 19 nt, Artificial Sequence
  Description of Artificial Sequence: Synthetic oligonucleotide
  Antisense strand to SEQ ID NO: 2127736
uaugcugagcucaugggcc

SEQ ID NO: 2127738 - RNA, 19 nt, Artificial Sequence
  Description of Artificial Sequence: Synthetic oligonucleotide
  Sense strand starting at position 513 of SEQ ID NO: 1882524
cugucucuacccugagaac

SEQ ID NO: 2127739 - RNA, 19 nt, Artificial Sequence
  Description of Artificial Sequence: Synthetic oligonucleotide
  Antisense strand to SEQ ID NO: 2127738
guucucaggguagagacag

SEQ ID NO: 2127740 - RNA, 19 nt, Artificial Sequence
  Description of Artificial Sequence: Synthetic oligonucleotide
  Sense strand starting at position 514 of SEQ ID NO: 1882524
ugucucuacccugagaacu

SEQ ID NO: 2127741 - RNA, 19 nt, Artificial Sequence
  Description of Artificial Sequence: Synthetic oligonucleotide
  Antisense strand to SEQ ID NO: 2127740
aguucucaggguagagaca

SEQ ID NO: 2127742 - RNA, 19 nt, Artificial Sequence
  Description of Artificial Sequence: Synthetic oligonucleotide
  Sense strand starting at position 549 of SEQ ID NO: 1882524
ugaccugauagcuacgcaa

SEQ ID NO: 2127743 - RNA, 19 nt, Artificial Sequence
  Description of Artificial Sequence: Synthetic oligonucleotide
  Antisense strand to SEQ ID NO: 2127742
uugcguagcuaucagguca

SEQ ID NO: 2127744 - RNA, 19 nt, Artificial Sequence
  Description of Artificial Sequence: Synthetic oligonucleotide
  Sense strand starting at position 553 of SEQ ID NO: 1882524
cugauagcuacgcaaagua

SEQ ID NO: 2127745 - RNA, 19 nt, Artificial Sequence
  Description of Artificial Sequence: Synthetic oligonucleotide
  Antisense strand to SEQ ID NO: 2127744
uacuuugcguagcuaucag

SEQ ID NO: 2127746 - RNA, 19 nt, Artificial Sequence
  Description of Artificial Sequence: Synthetic oligonucleotide
  Sense strand starting at position 667 of SEQ ID NO: 1882524
ggaucucaagcaggacaua

SEQ ID NO: 2127747 - RNA, 19 nt, Artificial Sequence
  Description of Artificial Sequence: Synthetic oligonucleotide
  Antisense strand to SEQ ID NO: 2127746
uauguccugcuugagaucc

SEQ ID NO: 2127748 - RNA, 19 nt, Artificial Sequence
  Description of Artificial Sequence: Synthetic oligonucleotide
  Sense strand starting at position 688 of SEQ ID NO: 1882524
caaaguugcagaggugaga

SEQ ID NO: 2127749 - RNA, 19 nt, Artificial Sequence
  Description of Artificial Sequence: Synthetic oligonucleotide
  Antisense strand to SEQ ID NO: 2127748
ucucaccucugcaacuuug

SEQ ID NO: 2127750 - RNA, 19 nt, Artificial Sequence
  Description of Artificial Sequence: Synthetic oligonucleotide
  Sense strand starting at position 709 of SEQ ID NO: 1882524
cauaucuugugcuuaggga

SEQ ID NO: 2127751 - RNA, 19 nt, Artificial Sequence
  Description of Artificial Sequence: Synthetic oligonucleotide
  Antisense strand to SEQ ID NO: 2127750
ucccuaagcacaagauaug

SEQ ID NO: 2127752 - RNA, 19 nt, Artificial Sequence
  Description of Artificial Sequence: Synthetic oligonucleotide
  Sense strand starting at position 710 of SEQ ID NO: 1882524
auaucuugugcuuagggaa

SEQ ID NO: 2127753 - RNA, 19 nt, Artificial Sequence
  Description of Artificial Sequence: Synthetic oligonucleotide
  Antisense strand to SEQ ID NO: 2127752
uucccuaagcacaagauau

SEQ ID NO: 2127754 - RNA, 19 nt, Artificial Sequence
  Description of Artificial Sequence: Synthetic oligonucleotide
  Sense strand starting at position 759 of SEQ ID NO: 1882524
ggauaugugcuguggagga

SEQ ID NO: 2127755 - RNA, 19 nt, Artificial Sequence
  Description of Artificial Sequence: Synthetic oligonucleotide
  Antisense strand to SEQ ID NO: 2127754
uccuccacagcacauaucc

SEQ ID NO: 2127756 - RNA, 19 nt, Artificial Sequence
  Description of Artificial Sequence: Synthetic oligonucleotide
  Sense strand starting at position 761 of SEQ ID NO: 1882524
auaugugcuguggaggaau

SEQ ID NO: 2127757 - RNA, 19 nt, Artificial Sequence
  Description of Artificial Sequence: Synthetic oligonucleotide
  Antisense strand to SEQ ID NO: 2127756
auuccuccacagcacauau

SEQ ID NO: 2127758 - RNA, 19 nt, Artificial Sequence
  Description of Artificial Sequence: Synthetic oligonucleotide
  Sense strand starting at position 783 of SEQ ID NO: 1882524
agcugagauuaguuccuca

SEQ ID NO: 2127759 - RNA, 19 nt, Artificial Sequence
  Description of Artificial Sequence: Synthetic oligonucleotide
  Antisense strand to SEQ ID NO: 2127758
ugaggaacuaaucucagcu

SEQ ID NO: 2127760 - RNA, 19 nt, Artificial Sequence
  Description of Artificial Sequence: Synthetic oligonucleotide
  Sense strand starting at position 786 of SEQ ID NO: 1882524
ugagauuaguuccucaauu

SEQ ID NO: 2127761 - RNA, 19 nt, Artificial Sequence
  Description of Artificial Sequence: Synthetic oligonucleotide
  Antisense strand to SEQ ID NO: 2127760
aauugaggaacuaaucuca

SEQ ID NO: 2127762 - RNA, 19 nt, Artificial Sequence
  Description of Artificial Sequence: Synthetic oligonucleotide
  Sense strand starting at position 946 of SEQ ID NO: 1882524
uacagugaccucugaagga

SEQ ID NO: 2127763 - RNA, 19 nt, Artificial Sequence
  Description of Artificial Sequence: Synthetic oligonucleotide
  Antisense strand to SEQ ID NO: 2127762
uccuucagaggucacugua

SEQ ID NO: 2127764 - RNA, 19 nt, Artificial Sequence
  Description of Artificial Sequence: Synthetic oligonucleotide
  Sense strand starting at position 1150 of SEQ ID NO: 1882524
gaaacaguggcagaauguu

SEQ ID NO: 2127765 - RNA, 19 nt, Artificial Sequence
  Description of Artificial Sequence: Synthetic oligonucleotide
  Antisense strand to SEQ ID NO: 2127764
aacauucugccacuguuuc

SEQ ID NO: 2127766 - RNA, 19 nt, Artificial Sequence
  Description of Artificial Sequence: Synthetic oligonucleotide
  Sense strand starting at position 1587 of SEQ ID NO: 1882524
cgcuuucaagguucgaguu

SEQ ID NO: 2127767 - RNA, 19 nt, Artificial Sequence
  Description of Artificial Sequence: Synthetic oligonucleotide
  Antisense strand to SEQ ID NO: 2127766
aacucgaaccuugaaagcg

SEQ ID NO: 2127768 - RNA, 19 nt, Artificial Sequence
  Description of Artificial Sequence: Synthetic oligonucleotide
  Sense strand starting at position 1622 of SEQ ID NO: 1882524
cccugucauuuguuuccaa

SEQ ID NO: 2127769 - RNA, 19 nt, Artificial Sequence
  Description of Artificial Sequence: Synthetic oligonucleotide
  Antisense strand to SEQ ID NO: 2127768
uuggaaacaaaugacaggg

SEQ ID NO: 2127770 - RNA, 19 nt, Artificial Sequence
  Description of Artificial Sequence: Synthetic oligonucleotide
  Sense strand starting at position 2042 of SEQ ID NO: 1882524
cugucucuccgucacagaa

SEQ ID NO: 2127771 - RNA, 19 nt, Artificial Sequence
  Description of Artificial Sequence: Synthetic oligonucleotide
  Antisense strand to SEQ ID NO: 2127770
uucugugacggagagacag

SEQ ID NO: 2127772 - RNA, 19 nt, Artificial Sequence
  Description of Artificial Sequence: Synthetic oligonucleotide
  Sense strand starting at position 2273 of SEQ ID NO: 1882524
guugcuaagaauggcaaau

SEQ ID NO: 2127773 - RNA, 19 nt, Artificial Sequence
  Description of Artificial Sequence: Synthetic oligonucleotide
  Antisense strand to SEQ ID NO: 2127772
auuugccauucuuagcaac

SEQ ID NO: 2127774 - RNA, 19 nt, Artificial Sequence
  Description of Artificial Sequence: Synthetic oligonucleotide
  Sense strand starting at position 2306 of SEQ ID NO: 1882524
uacugaaagguuuguugua

SEQ ID NO: 2127775 - RNA, 19 nt, Artificial Sequence
  Description of Artificial Sequence: Synthetic oligonucleotide
  Antisense strand to SEQ ID NO: 2127774
uacaacaaaccuuucagua

SEQ ID NO: 2127776 - RNA, 19 nt, Artificial Sequence
  Description of Artificial Sequence: Synthetic oligonucleotide
  Sense strand starting at position 2307 of SEQ ID NO: 1882524
acugaaagguuuguuguaa

SEQ ID NO: 2127777 - RNA, 19 nt, Artificial Sequence
  Description of Artificial Sequence: Synthetic oligonucleotide
  Antisense strand to SEQ ID NO: 2127776
uuacaacaaaccuuucagu

SEQ ID NO: 2127778 - RNA, 19 nt, Artificial Sequence
  Description of Artificial Sequence: Synthetic oligonucleotide
  Sense strand starting at position 2308 of SEQ ID NO: 1882524
cugaaagguuuguuguaau

SEQ ID NO: 2127779 - RNA, 19 nt, Artificial Sequence
  Description of Artificial Sequence: Synthetic oligonucleotide
  Antisense strand to SEQ ID NO: 2127778
auuacaacaaaccuuucag

SEQ ID NO: 2127780 - RNA, 19 nt, Artificial Sequence
  Description of Artificial Sequence: Synthetic oligonucleotide
  Sense strand starting at position 2322 of SEQ ID NO: 1882524
guaauagugccagagauug

SEQ ID NO: 2127781 - RNA, 19 nt, Artificial Sequence
  Description of Artificial Sequence: Synthetic oligonucleotide
  Antisense strand to SEQ ID NO: 2127780
caaucucuggcacuauuac

SEQ ID NO: 2127782 - RNA, 19 nt, Artificial Sequence
  Description of Artificial Sequence: Synthetic oligonucleotide
  Sense strand starting at position 2333 of SEQ ID NO: 1882524
agagauuguugauuaguaa

SEQ ID NO: 2127783 - RNA, 19 nt, Artificial Sequence
  Description of Artificial Sequence: Synthetic oligonucleotide
  Antisense strand to SEQ ID NO: 2127782
uuacuaaucaacaaucucu

SEQ ID NO: 2127784 - RNA, 19 nt, Artificial Sequence
  Description of Artificial Sequence: Synthetic oligonucleotide
  Sense strand starting at position 2336 of SEQ ID NO: 1882524
gauuguugauuaguaacca

SEQ ID NO: 2127785 - RNA, 19 nt, Artificial Sequence
  Description of Artificial Sequence: Synthetic oligonucleotide
  Antisense strand to SEQ ID NO: 2127784
ugguuacuaaucaacaauc

SEQ ID NO: 2127786 - RNA, 19 nt, Artificial Sequence
  Description of Artificial Sequence: Synthetic oligonucleotide
  Sense strand starting at position 2382 of SEQ ID NO: 1882524
gauaguaaccuuugucaga

SEQ ID NO: 2127787 - RNA, 19 nt, Artificial Sequence
  Description of Artificial Sequence: Synthetic oligonucleotide
  Antisense strand to SEQ ID NO: 2127786
ucugacaaagguuacuauc

SEQ ID NO: 2127788 - RNA, 19 nt, Artificial Sequence
  Description of Artificial Sequence: Synthetic oligonucleotide
  Sense strand starting at position 2383 of SEQ ID NO: 1882524
auaguaaccuuugucagaa

SEQ ID NO: 2127789 - RNA, 19 nt, Artificial Sequence
  Description of Artificial Sequence: Synthetic oligonucleotide
  Antisense strand to SEQ ID NO: 2127788
uucugacaaagguuacuau

SEQ ID NO: 2127790 - RNA, 19 nt, Artificial Sequence
  Description of Artificial Sequence: Synthetic oligonucleotide
  Sense strand starting at position 2415 of SEQ ID NO: 1882524
agcuaaggaccuugucaca

SEQ ID NO: 2127791 - RNA, 19 nt, Artificial Sequence
  Description of Artificial Sequence: Synthetic oligonucleotide
  Antisense strand to SEQ ID NO: 2127790
ugugacaagguccuuagcu

SEQ ID NO: 2127792 - RNA, 19 nt, Artificial Sequence
  Description of Artificial Sequence: Synthetic oligonucleotide
  Sense strand starting at position 2511 of SEQ ID NO: 1882524
gagagauaauugccugagu

SEQ ID NO: 2127793 - RNA, 19 nt, Artificial Sequence
  Description of Artificial Sequence: Synthetic oligonucleotide
  Antisense strand to SEQ ID NO: 2127792
acucaggcaauuaucucuc

SEQ ID NO: 2127794 - RNA, 19 nt, Artificial Sequence
  Description of Artificial Sequence: Synthetic oligonucleotide
  Sense strand starting at position 2512 of SEQ ID NO: 1882524
agagauaauugccugaguu

SEQ ID NO: 2127795 - RNA, 19 nt, Artificial Sequence
  Description of Artificial Sequence: Synthetic oligonucleotide
  Antisense strand to SEQ ID NO: 2127794
aacucaggcaauuaucucu

SEQ ID NO: 2127796 - RNA, 19 nt, Artificial Sequence
  Description of Artificial Sequence: Synthetic oligonucleotide
  Sense strand starting at position 2513 of SEQ ID NO: 1882524
gagauaauugccugaguua

SEQ ID NO: 2127797 - RNA, 19 nt, Artificial Sequence
  Description of Artificial Sequence: Synthetic oligonucleotide
  Antisense strand to SEQ ID NO: 2127796
uaacucaggcaauuaucuc

SEQ ID NO: 2127798 - RNA, 19 nt, Artificial Sequence
  Description of Artificial Sequence: Synthetic oligonucleotide
  Sense strand starting at position 2514 of SEQ ID NO: 1882524
agauaauugccugaguuag

SEQ ID NO: 2127799 - RNA, 19 nt, Artificial Sequence
  Description of Artificial Sequence: Synthetic oligonucleotide
  Antisense strand to SEQ ID NO: 2127798
cuaacucaggcaauuaucu

SEQ ID NO: 2127800 - RNA, 19 nt, Artificial Sequence
  Description of Artificial Sequence: Synthetic oligonucleotide
  Sense strand starting at position 2516 of SEQ ID NO: 1882524
auaauugccugaguuagga

SEQ ID NO: 2127801 - RNA, 19 nt, Artificial Sequence
  Description of Artificial Sequence: Synthetic oligonucleotide
  Antisense strand to SEQ ID NO: 2127800
uccuaacucaggcaauuau

SEQ ID NO: 2127802 - RNA, 19 nt, Artificial Sequence
  Description of Artificial Sequence: Synthetic oligonucleotide
  Sense strand starting at position 2715 of SEQ ID NO: 1882524
ucaguaaguugucccaaau

SEQ ID NO: 2127803 - RNA, 19 nt, Artificial Sequence
  Description of Artificial Sequence: Synthetic oligonucleotide
  Antisense strand to SEQ ID NO: 2127802
auuugggacaacuuacuga

SEQ ID NO: 2127804 - RNA, 19 nt, Artificial Sequence
  Description of Artificial Sequence: Synthetic oligonucleotide
  Sense strand starting at position 3090 of SEQ ID NO: 1882524
gaaaguccucucuacacga

SEQ ID NO: 2127805 - RNA, 19 nt, Artificial Sequence
  Description of Artificial Sequence: Synthetic oligonucleotide
  Antisense strand to SEQ ID NO: 2127804
ucguguagagaggacuuuc

SEQ ID NO: 2127806 - RNA, 19 nt, Artificial Sequence
  Description of Artificial Sequence: Synthetic oligonucleotide
  Sense strand starting at position 3547 of SEQ ID NO: 1882524
ggagaauccacugggugau

SEQ ID NO: 2127807 - RNA, 19 nt, Artificial Sequence
  Description of Artificial Sequence: Synthetic oligonucleotide
  Antisense strand to SEQ ID NO: 2127806
aucacccaguggauucucc

SEQ ID NO: 2127808 - RNA, 19 nt, Artificial Sequence
  Description of Artificial Sequence: Synthetic oligonucleotide
  Sense strand starting at position 3642 of SEQ ID NO: 1882524
agauguuuaaccugaggca

SEQ ID NO: 2127809 - RNA, 19 nt, Artificial Sequence
  Description of Artificial Sequence: Synthetic oligonucleotide
  Antisense strand to SEQ ID NO: 2127808
ugccucagguuaaacaucu

SEQ ID NO: 2127810 - RNA, 19 nt, Artificial Sequence
  Description of Artificial Sequence: Synthetic oligonucleotide
  Sense strand starting at position 3643 of SEQ ID NO: 1882524
gauguuuaaccugaggcau

SEQ ID NO: 2127811 - RNA, 19 nt, Artificial Sequence
  Description of Artificial Sequence: Synthetic oligonucleotide
  Antisense strand to SEQ ID NO: 2127810
augccucagguuaaacauc

SEQ ID NO: 2127812 - RNA, 19 nt, Artificial Sequence
  Description of Artificial Sequence: Synthetic oligonucleotide
  Sense strand starting at position 3732 of SEQ ID NO: 1882524
guaagaaaucaaggucucu

SEQ ID NO: 2127813 - RNA, 19 nt, Artificial Sequence
  Description of Artificial Sequence: Synthetic oligonucleotide
  Antisense strand to SEQ ID NO: 2127812
agagaccuugauuucuuac

SEQ ID NO: 2127814 - RNA, 19 nt, Artificial Sequence
  Description of Artificial Sequence: Synthetic oligonucleotide
  Sense strand starting at position 3969 of SEQ ID NO: 1882524
uugcgauaagcugagaucu

SEQ ID NO: 2127815 - RNA, 19 nt, Artificial Sequence
  Description of Artificial Sequence: Synthetic oligonucleotide
  Antisense strand to SEQ ID NO: 2127814
agaucucagcuuaucgcaa

SEQ ID NO: 2127816 - RNA, 19 nt, Artificial Sequence
  Description of Artificial Sequence: Synthetic oligonucleotide
  Sense strand starting at position 9 of SEQ ID NO: 1882523
ggaggucuugcugaucaag

SEQ ID NO: 2127817 - RNA, 19 nt, Artificial Sequence
  Description of Artificial Sequence: Synthetic oligonucleotide
  Antisense strand to SEQ ID NO: 2127816
cuugaucagcaagaccucc

SEQ ID NO: 2127818 - RNA, 19 nt, Artificial Sequence
  Description of Artificial Sequence: Synthetic oligonucleotide
  Sense strand starting at position 169 of SEQ ID NO: 1882523
gggagacuucagggccaga

SEQ ID NO: 2127819 - RNA, 19 nt, Artificial Sequence
  Description of Artificial Sequence: Synthetic oligonucleotide
  Antisense strand to SEQ ID NO: 2127818
ucuggcccugaagucuccc

SEQ ID NO: 2127820 - RNA, 19 nt, Artificial Sequence
  Description of Artificial Sequence: Synthetic oligonucleotide
  Sense strand starting at position 348 of SEQ ID NO: 1882523
cccugauccugacuucuga

SEQ ID NO: 2127821 - RNA, 19 nt, Artificial Sequence
  Description of Artificial Sequence: Synthetic oligonucleotide
  Antisense strand to SEQ ID NO: 2127820
ucagaagucaggaucaggg

SEQ ID NO: 2127822 - RNA, 19 nt, Artificial Sequence
  Description of Artificial Sequence: Synthetic oligonucleotide
  Sense strand starting at position 355 of SEQ ID NO: 1882523
ccugacuucugauccaugu

SEQ ID NO: 2127823 - RNA, 19 nt, Artificial Sequence
  Description of Artificial Sequence: Synthetic oligonucleotide
  Antisense strand to SEQ ID NO: 2127822
acauggaucagaagucagg

SEQ ID NO: 2127824 - RNA, 19 nt, Artificial Sequence
  Description of Artificial Sequence: Synthetic oligonucleotide
  Sense strand starting at position 561 of SEQ ID NO: 1882523
ggcccaugagcucagcaua

SEQ ID NO: 2127825 - RNA, 19 nt, Artificial Sequence
  Description of Artificial Sequence: Synthetic oligonucleotide
  Antisense strand to SEQ ID NO: 2127824
uaugcugagcucaugggcc

SEQ ID NO: 2127826 - RNA, 19 nt, Artificial Sequence
  Description of Artificial Sequence: Synthetic oligonucleotide
  Sense strand starting at position 919 of SEQ ID NO: 1882523
cugucucuacccugagaac

SEQ ID NO: 2127827 - RNA, 19 nt, Artificial Sequence
  Description of Artificial Sequence: Synthetic oligonucleotide
  Antisense strand to SEQ ID NO: 2127826
guucucaggguagagacag

SEQ ID NO: 2127828 - RNA, 19 nt, Artificial Sequence
  Description of Artificial Sequence: Synthetic oligonucleotide
  Sense strand starting at position 920 of SEQ ID NO: 1882523
ugucucuacccugagaacu

SEQ ID NO: 2127829 - RNA, 19 nt, Artificial Sequence
  Description of Artificial Sequence: Synthetic oligonucleotide
  Antisense strand to SEQ ID NO: 2127828
aguucucaggguagagaca

SEQ ID NO: 2127830 - RNA, 19 nt, Artificial Sequence
  Description of Artificial Sequence: Synthetic oligonucleotide
  Sense strand starting at position 955 of SEQ ID NO: 1882523
ugaccugauagcuacgcaa

SEQ ID NO: 2127831 - RNA, 19 nt, Artificial Sequence
  Description of Artificial Sequence: Synthetic oligonucleotide
  Antisense strand to SEQ ID NO: 2127830
uugcguagcuaucagguca

SEQ ID NO: 2127832 - RNA, 19 nt, Artificial Sequence
  Description of Artificial Sequence: Synthetic oligonucleotide
  Sense strand starting at position 959 of SEQ ID NO: 1882523
cugauagcuacgcaaagua

SEQ ID NO: 2127833 - RNA, 19 nt, Artificial Sequence
  Description of Artificial Sequence: Synthetic oligonucleotide
  Antisense strand to SEQ ID NO: 2127832
uacuuugcguagcuaucag

SEQ ID NO: 2127834 - RNA, 19 nt, Artificial Sequence
  Description of Artificial Sequence: Synthetic oligonucleotide
  Sense strand starting at position 1073 of SEQ ID NO: 1882523
ggaucucaagcaggacaua

SEQ ID NO: 2127835 - RNA, 19 nt, Artificial Sequence
  Description of Artificial Sequence: Synthetic oligonucleotide
  Antisense strand to SEQ ID NO: 2127834
uauguccugcuugagaucc

SEQ ID NO: 2127836 - RNA, 19 nt, Artificial Sequence
  Description of Artificial Sequence: Synthetic oligonucleotide
  Sense strand starting at position 1094 of SEQ ID NO: 1882523
caaaguugcagaggugaga

SEQ ID NO: 2127837 - RNA, 19 nt, Artificial Sequence
  Description of Artificial Sequence: Synthetic oligonucleotide
  Antisense strand to SEQ ID NO: 2127836
ucucaccucugcaacuuug

SEQ ID NO: 2127838 - RNA, 19 nt, Artificial Sequence
  Description of Artificial Sequence: Synthetic oligonucleotide
  Sense strand starting at position 1115 of SEQ ID NO: 1882523
cauaucuugugcuuaggga

SEQ ID NO: 2127839 - RNA, 19 nt, Artificial Sequence
  Description of Artificial Sequence: Synthetic oligonucleotide
  Antisense strand to SEQ ID NO: 2127838
ucccuaagcacaagauaug

SEQ ID NO: 2127840 - RNA, 19 nt, Artificial Sequence
  Description of Artificial Sequence: Synthetic oligonucleotide
  Sense strand starting at position 1116 of SEQ ID NO: 1882523
auaucuugugcuuagggaa

SEQ ID NO: 2127841 - RNA, 19 nt, Artificial Sequence
  Description of Artificial Sequence: Synthetic oligonucleotide
  Antisense strand to SEQ ID NO: 2127840
uucccuaagcacaagauau

SEQ ID NO: 2127842 - RNA, 19 nt, Artificial Sequence
  Description of Artificial Sequence: Synthetic oligonucleotide
  Sense strand starting at position 1165 of SEQ ID NO: 1882523
ggauaugugcuguggagga

SEQ ID NO: 2127843 - RNA, 19 nt, Artificial Sequence
  Description of Artificial Sequence: Synthetic oligonucleotide
  Antisense strand to SEQ ID NO: 2127842
uccuccacagcacauaucc

SEQ ID NO: 2127844 - RNA, 19 nt, Artificial Sequence
  Description of Artificial Sequence: Synthetic oligonucleotide
  Sense strand starting at position 1167 of SEQ ID NO: 1882523
auaugugcuguggaggaau

SEQ ID NO: 2127845 - RNA, 19 nt, Artificial Sequence
  Description of Artificial Sequence: Synthetic oligonucleotide
  Antisense strand to SEQ ID NO: 2127844
auuccuccacagcacauau

SEQ ID NO: 2127846 - RNA, 19 nt, Artificial Sequence
  Description of Artificial Sequence: Synthetic oligonucleotide
  Sense strand starting at position 1189 of SEQ ID NO: 1882523
agcugagauuaguuccuca

SEQ ID NO: 2127847 - RNA, 19 nt, Artificial Sequence
  Description of Artificial Sequence: Synthetic oligonucleotide
  Antisense strand to SEQ ID NO: 2127846
ugaggaacuaaucucagcu

SEQ ID NO: 2127848 - RNA, 19 nt, Artificial Sequence
  Description of Artificial Sequence: Synthetic oligonucleotide
  Sense strand starting at position 1192 of SEQ ID NO: 1882523
ugagauuaguuccucaauu

SEQ ID NO: 2127849 - RNA, 19 nt, Artificial Sequence
  Description of Artificial Sequence: Synthetic oligonucleotide
  Antisense strand to SEQ ID NO: 2127848
aauugaggaacuaaucuca

SEQ ID NO: 2127850 - RNA, 19 nt, Artificial Sequence
  Description of Artificial Sequence: Synthetic oligonucleotide
  Sense strand starting at position 1352 of SEQ ID NO: 1882523
uacagugaccucugaagga

SEQ ID NO: 2127851 - RNA, 19 nt, Artificial Sequence
  Description of Artificial Sequence: Synthetic oligonucleotide
  Antisense strand to SEQ ID NO: 2127850
uccuucagaggucacugua

SEQ ID NO: 2127852 - RNA, 19 nt, Artificial Sequence
  Description of Artificial Sequence: Synthetic oligonucleotide
  Sense strand starting at position 1556 of SEQ ID NO: 1882523
gaaacaguggcagaauguu

SEQ ID NO: 2127853 - RNA, 19 nt, Artificial Sequence
  Description of Artificial Sequence: Synthetic oligonucleotide
  Antisense strand to SEQ ID NO: 2127852
aacauucugccacuguuuc

SEQ ID NO: 2127854 - RNA, 19 nt, Artificial Sequence
  Description of Artificial Sequence: Synthetic oligonucleotide
  Sense strand starting at position 1993 of SEQ ID NO: 1882523
cgcuuucaagguucgaguu

SEQ ID NO: 2127855 - RNA, 19 nt, Artificial Sequence
  Description of Artificial Sequence: Synthetic oligonucleotide
  Antisense strand to SEQ ID NO: 2127854
aacucgaaccuugaaagcg

SEQ ID NO: 2127856 - RNA, 19 nt, Artificial Sequence
  Description of Artificial Sequence: Synthetic oligonucleotide
  Sense strand starting at position 2028 of SEQ ID NO: 1882523
cccugucauuuguuuccaa

SEQ ID NO: 2127857 - RNA, 19 nt, Artificial Sequence
  Description of Artificial Sequence: Synthetic oligonucleotide
  Antisense strand to SEQ ID NO: 2127856
uuggaaacaaaugacaggg

SEQ ID NO: 2127858 - RNA, 19 nt, Artificial Sequence
  Description of Artificial Sequence: Synthetic oligonucleotide
  Sense strand starting at position 2448 of SEQ ID NO: 1882523
cugucucuccgucacagaa

SEQ ID NO: 2127859 - RNA, 19 nt, Artificial Sequence
  Description of Artificial Sequence: Synthetic oligonucleotide
  Antisense strand to SEQ ID NO: 2127858
uucugugacggagagacag

SEQ ID NO: 2127860 - RNA, 19 nt, Artificial Sequence
  Description of Artificial Sequence: Synthetic oligonucleotide
  Sense strand starting at position 2679 of SEQ ID NO: 1882523
guugcuaagaauggcaaau

SEQ ID NO: 2127861 - RNA, 19 nt, Artificial Sequence
  Description of Artificial Sequence: Synthetic oligonucleotide
  Antisense strand to SEQ ID NO: 2127860
auuugccauucuuagcaac

SEQ ID NO: 2127862 - RNA, 19 nt, Artificial Sequence
  Description of Artificial Sequence: Synthetic oligonucleotide
  Sense strand starting at position 2712 of SEQ ID NO: 1882523
uacugaaagguuuguugua

SEQ ID NO: 2127863 - RNA, 19 nt, Artificial Sequence
  Description of Artificial Sequence: Synthetic oligonucleotide
  Antisense strand to SEQ ID NO: 2127862
uacaacaaaccuuucagua

SEQ ID NO: 2127864 - RNA, 19 nt, Artificial Sequence
  Description of Artificial Sequence: Synthetic oligonucleotide
  Sense strand starting at position 2713 of SEQ ID NO: 1882523
acugaaagguuuguuguaa

SEQ ID NO: 2127865 - RNA, 19 nt, Artificial Sequence
  Description of Artificial Sequence: Synthetic oligonucleotide
  Antisense strand to SEQ ID NO: 2127864
uuacaacaaaccuuucagu

SEQ ID NO: 2127866 - RNA, 19 nt, Artificial Sequence
  Description of Artificial Sequence: Synthetic oligonucleotide
  Sense strand starting at position 2714 of SEQ ID NO: 1882523
cugaaagguuuguuguaau

SEQ ID NO: 2127867 - RNA, 19 nt, Artificial Sequence
  Description of Artificial Sequence: Synthetic oligonucleotide
  Antisense strand to SEQ ID NO: 2127866
auuacaacaaaccuuucag

SEQ ID NO: 2127868 - RNA, 19 nt, Artificial Sequence
  Description of Artificial Sequence: Synthetic oligonucleotide
  Sense strand starting at position 2728 of SEQ ID NO: 1882523
guaauagugccagagauug

SEQ ID NO: 2127869 - RNA, 19 nt, Artificial Sequence
  Description of Artificial Sequence: Synthetic oligonucleotide
  Antisense strand to SEQ ID NO: 2127868
caaucucuggcacuauuac

SEQ ID NO: 2127870 - RNA, 19 nt, Artificial Sequence
  Description of Artificial Sequence: Synthetic oligonucleotide
  Sense strand starting at position 2739 of SEQ ID NO: 1882523
agagauuguugauuaguaa

SEQ ID NO: 2127871 - RNA, 19 nt, Artificial Sequence
  Description of Artificial Sequence: Synthetic oligonucleotide
  Antisense strand to SEQ ID NO: 2127870
uuacuaaucaacaaucucu

SEQ ID NO: 2127872 - RNA, 19 nt, Artificial Sequence
  Description of Artificial Sequence: Synthetic oligonucleotide
  Sense strand starting at position 2742 of SEQ ID NO: 1882523
gauuguugauuaguaacca

SEQ ID NO: 2127873 - RNA, 19 nt, Artificial Sequence
  Description of Artificial Sequence: Synthetic oligonucleotide
  Antisense strand to SEQ ID NO: 2127872
ugguuacuaaucaacaauc

SEQ ID NO: 2127874 - RNA, 19 nt, Artificial Sequence
  Description of Artificial Sequence: Synthetic oligonucleotide
  Sense strand starting at position 2788 of SEQ ID NO: 1882523
gauaguaaccuuugucaga

SEQ ID NO: 2127875 - RNA, 19 nt, Artificial Sequence
  Description of Artificial Sequence: Synthetic oligonucleotide
  Antisense strand to SEQ ID NO: 2127874
ucugacaaagguuacuauc

SEQ ID NO: 2127876 - RNA, 19 nt, Artificial Sequence
  Description of Artificial Sequence: Synthetic oligonucleotide
  Sense strand starting at position 2789 of SEQ ID NO: 1882523
auaguaaccuuugucagaa

SEQ ID NO: 2127877 - RNA, 19 nt, Artificial Sequence
  Description of Artificial Sequence: Synthetic oligonucleotide
  Antisense strand to SEQ ID NO: 2127876
uucugacaaagguuacuau

SEQ ID NO: 2127878 - RNA, 19 nt, Artificial Sequence
  Description of Artificial Sequence: Synthetic oligonucleotide
  Sense strand starting at position 2821 of SEQ ID NO: 1882523
agcuaaggaccuugucaca

SEQ ID NO: 2127879 - RNA, 19 nt, Artificial Sequence
  Description of Artificial Sequence: Synthetic oligonucleotide
  Antisense strand to SEQ ID NO: 2127878
ugugacaagguccuuagcu

SEQ ID NO: 2127880 - RNA, 19 nt, Artificial Sequence
  Description of Artificial Sequence: Synthetic oligonucleotide
  Sense strand starting at position 2917 of SEQ ID NO: 1882523
gagagauaauugccugagu

SEQ ID NO: 2127881 - RNA, 19 nt, Artificial Sequence
  Description of Artificial Sequence: Synthetic oligonucleotide
  Antisense strand to SEQ ID NO: 2127880
acucaggcaauuaucucuc

SEQ ID NO: 2127882 - RNA, 19 nt, Artificial Sequence
  Description of Artificial Sequence: Synthetic oligonucleotide
  Sense strand starting at position 2918 of SEQ ID NO: 1882523
agagauaauugccugaguu

SEQ ID NO: 2127883 - RNA, 19 nt, Artificial Sequence
  Description of Artificial Sequence: Synthetic oligonucleotide
  Antisense strand to SEQ ID NO: 2127882
aacucaggcaauuaucucu

SEQ ID NO: 2127884 - RNA, 19 nt, Artificial Sequence
  Description of Artificial Sequence: Synthetic oligonucleotide
  Sense strand starting at position 2919 of SEQ ID NO: 1882523
gagauaauugccugaguua

SEQ ID NO: 2127885 - RNA, 19 nt, Artificial Sequence
  Description of Artificial Sequence: Synthetic oligonucleotide
  Antisense strand to SEQ ID NO: 2127884
uaacucaggcaauuaucuc

SEQ ID NO: 2127886 - RNA, 19 nt, Artificial Sequence
  Description of Artificial Sequence: Synthetic oligonucleotide
  Sense strand starting at position 2920 of SEQ ID NO: 1882523
agauaauugccugaguuag

SEQ ID NO: 2127887 - RNA, 19 nt, Artificial Sequence
  Description of Artificial Sequence: Synthetic oligonucleotide
  Antisense strand to SEQ ID NO: 2127886
cuaacucaggcaauuaucu

SEQ ID NO: 2127888 - RNA, 19 nt, Artificial Sequence
  Description of Artificial Sequence: Synthetic oligonucleotide
  Sense strand starting at position 2922 of SEQ ID NO: 1882523
auaauugccugaguuagga

SEQ ID NO: 2127889 - RNA, 19 nt, Artificial Sequence
  Description of Artificial Sequence: Synthetic oligonucleotide
  Antisense strand to SEQ ID NO: 2127888
uccuaacucaggcaauuau

SEQ ID NO: 2127890 - RNA, 19 nt, Artificial Sequence
  Description of Artificial Sequence: Synthetic oligonucleotide
  Sense strand starting at position 3121 of SEQ ID NO: 1882523
ucaguaaguugucccaaau

SEQ ID NO: 2127891 - RNA, 19 nt, Artificial Sequence
  Description of Artificial Sequence: Synthetic oligonucleotide
  Antisense strand to SEQ ID NO: 2127890
auuugggacaacuuacuga

SEQ ID NO: 2127892 - RNA, 19 nt, Artificial Sequence
  Description of Artificial Sequence: Synthetic oligonucleotide
  Sense strand starting at position 3496 of SEQ ID NO: 1882523
gaaaguccucucuacacga

SEQ ID NO: 2127893 - RNA, 19 nt, Artificial Sequence
  Description of Artificial Sequence: Synthetic oligonucleotide
  Antisense strand to SEQ ID NO: 2127892
ucguguagagaggacuuuc

SEQ ID NO: 2127894 - RNA, 19 nt, Artificial Sequence
  Description of Artificial Sequence: Synthetic oligonucleotide
  Sense strand starting at position 3953 of SEQ ID NO: 1882523
ggagaauccacugggugau

SEQ ID NO: 2127895 - RNA, 19 nt, Artificial Sequence
  Description of Artificial Sequence: Synthetic oligonucleotide
  Antisense strand to SEQ ID NO: 2127894
aucacccaguggauucucc

SEQ ID NO: 2127896 - RNA, 19 nt, Artificial Sequence
  Description of Artificial Sequence: Synthetic oligonucleotide
  Sense strand starting at position 247 of SEQ ID NO: 1882525
guauaagacuucgucucca

SEQ ID NO: 2127897 - RNA, 19 nt, Artificial Sequence
  Description of Artificial Sequence: Synthetic oligonucleotide
  Antisense strand to SEQ ID NO: 2127896
uggagacgaagucuuauac

SEQ ID NO: 2127898 - RNA, 19 nt, Artificial Sequence
  Description of Artificial Sequence: Synthetic oligonucleotide
  Sense strand starting at position 278 of SEQ ID NO: 1882525
guaucuuuccuagagcuag

SEQ ID NO: 2127899 - RNA, 19 nt, Artificial Sequence
  Description of Artificial Sequence: Synthetic oligonucleotide
  Antisense strand to SEQ ID NO: 2127898
cuagcucuaggaaagauac

SEQ ID NO: 2127900 - RNA, 19 nt, Artificial Sequence
  Description of Artificial Sequence: Synthetic oligonucleotide
  Sense strand starting at position 289 of SEQ ID NO: 1882525
agagcuagauagcuuucuu

SEQ ID NO: 2127901 - RNA, 19 nt, Artificial Sequence
  Description of Artificial Sequence: Synthetic oligonucleotide
  Antisense strand to SEQ ID NO: 2127900
aagaaagcuaucuagcucu

SEQ ID NO: 2127902 - RNA, 19 nt, Artificial Sequence
  Description of Artificial Sequence: Synthetic oligonucleotide
  Sense strand starting at position 485 of SEQ ID NO: 1882525
cuagguagcuuucuaugga

SEQ ID NO: 2127903 - RNA, 19 nt, Artificial Sequence
  Description of Artificial Sequence: Synthetic oligonucleotide
  Antisense strand to SEQ ID NO: 2127902
uccauagaaagcuaccuag

SEQ ID NO: 2127904 - RNA, 19 nt, Artificial Sequence
  Description of Artificial Sequence: Synthetic oligonucleotide
  Sense strand starting at position 883 of SEQ ID NO: 1882525
uugagacuuuggccaaguu

SEQ ID NO: 2127905 - RNA, 19 nt, Artificial Sequence
  Description of Artificial Sequence: Synthetic oligonucleotide
  Antisense strand to SEQ ID NO: 2127904
aacuuggccaaagucucaa

SEQ ID NO: 2127906 - RNA, 19 nt, Artificial Sequence
  Description of Artificial Sequence: Synthetic oligonucleotide
  Sense strand starting at position 906 of SEQ ID NO: 1882525
ucacuaaaucgugguaaau

SEQ ID NO: 2127907 - RNA, 19 nt, Artificial Sequence
  Description of Artificial Sequence: Synthetic oligonucleotide
  Antisense strand to SEQ ID NO: 2127906
auuuaccacgauuuaguga

SEQ ID NO: 2127908 - RNA, 19 nt, Artificial Sequence
  Description of Artificial Sequence: Synthetic oligonucleotide
  Sense strand starting at position 949 of SEQ ID NO: 1882525
uacuuagggaguuguuaug

SEQ ID NO: 2127909 - RNA, 19 nt, Artificial Sequence
  Description of Artificial Sequence: Synthetic oligonucleotide
  Antisense strand to SEQ ID NO: 2127908
cauaacaacucccuaagua

SEQ ID NO: 2127910 - RNA, 19 nt, Artificial Sequence
  Description of Artificial Sequence: Synthetic oligonucleotide
  Sense strand starting at position 1000 of SEQ ID NO: 1882525
ugcacaguaucugucacau

SEQ ID NO: 2127911 - RNA, 19 nt, Artificial Sequence
  Description of Artificial Sequence: Synthetic oligonucleotide
  Antisense strand to SEQ ID NO: 2127910
augugacagauacugugca

SEQ ID NO: 2127912 - RNA, 19 nt, Artificial Sequence
  Description of Artificial Sequence: Synthetic oligonucleotide
  Sense strand starting at position 1017 of SEQ ID NO: 1882525
auaguacaugcucaagaua

SEQ ID NO: 2127913 - RNA, 19 nt, Artificial Sequence
  Description of Artificial Sequence: Synthetic oligonucleotide
  Antisense strand to SEQ ID NO: 2127912
uaucuugagcauguacuau

SEQ ID NO: 2127914 - RNA, 19 nt, Artificial Sequence
  Description of Artificial Sequence: Synthetic oligonucleotide
  Sense strand starting at position 1020 of SEQ ID NO: 1882525
guacaugcucaagauauau

SEQ ID NO: 2127915 - RNA, 19 nt, Artificial Sequence
  Description of Artificial Sequence: Synthetic oligonucleotide
  Antisense strand to SEQ ID NO: 2127914
auauaucuugagcauguac

SEQ ID NO: 2127916 - RNA, 19 nt, Artificial Sequence
  Description of Artificial Sequence: Synthetic oligonucleotide
  Sense strand starting at position 1137 of SEQ ID NO: 1882525
gcacauagucgacagucaa

SEQ ID NO: 2127917 - RNA, 19 nt, Artificial Sequence
  Description of Artificial Sequence: Synthetic oligonucleotide
  Antisense strand to SEQ ID NO: 2127916
uugacugucgacuaugugc

SEQ ID NO: 2127918 - RNA, 19 nt, Artificial Sequence
  Description of Artificial Sequence: Synthetic oligonucleotide
  Sense strand starting at position 1219 of SEQ ID NO: 1882525
cuaaaugauguugggcaaa

SEQ ID NO: 2127919 - RNA, 19 nt, Artificial Sequence
  Description of Artificial Sequence: Synthetic oligonucleotide
  Antisense strand to SEQ ID NO: 2127918
uuugcccaacaucauuuag

SEQ ID NO: 2127920 - RNA, 19 nt, Artificial Sequence
  Description of Artificial Sequence: Synthetic oligonucleotide
  Sense strand starting at position 1221 of SEQ ID NO: 1882525
aaaugauguugggcaaauc

SEQ ID NO: 2127921 - RNA, 19 nt, Artificial Sequence
  Description of Artificial Sequence: Synthetic oligonucleotide
  Antisense strand to SEQ ID NO: 2127920
gauuugcccaacaucauuu

SEQ ID NO: 2127922 - RNA, 19 nt, Artificial Sequence
  Description of Artificial Sequence: Synthetic oligonucleotide
  Sense strand starting at position 1384 of SEQ ID NO: 1882525
ucaccauggugucugauau

SEQ ID NO: 2127923 - RNA, 19 nt, Artificial Sequence
  Description of Artificial Sequence: Synthetic oligonucleotide
  Antisense strand to SEQ ID NO: 2127922
auaucagacaccaugguga

SEQ ID NO: 2127924 - RNA, 19 nt, Artificial Sequence
  Description of Artificial Sequence: Synthetic oligonucleotide
  Sense strand starting at position 1385 of SEQ ID NO: 1882525
caccauggugucugauauc

SEQ ID NO: 2127925 - RNA, 19 nt, Artificial Sequence
  Description of Artificial Sequence: Synthetic oligonucleotide
  Antisense strand to SEQ ID NO: 2127924
gauaucagacaccauggug

SEQ ID NO: 2127926 - RNA, 19 nt, Artificial Sequence
  Description of Artificial Sequence: Synthetic oligonucleotide
  Sense strand starting at position 1551 of SEQ ID NO: 1882525
uugugcucccguccggaaa

SEQ ID NO: 2127927 - RNA, 19 nt, Artificial Sequence
  Description of Artificial Sequence: Synthetic oligonucleotide
  Antisense strand to SEQ ID NO: 2127926
uuuccggacgggagcacaa

SEQ ID NO: 2127928 - RNA, 19 nt, Artificial Sequence
  Description of Artificial Sequence: Synthetic oligonucleotide
  Sense strand starting at position 1563 of SEQ ID NO: 1882525
ccggaaauguugcuccaaa

SEQ ID NO: 2127929 - RNA, 19 nt, Artificial Sequence
  Description of Artificial Sequence: Synthetic oligonucleotide
  Antisense strand to SEQ ID NO: 2127928
uuuggagcaacauuuccgg

SEQ ID NO: 2127930 - RNA, 19 nt, Artificial Sequence
  Description of Artificial Sequence: Synthetic oligonucleotide
  Sense strand starting at position 1591 of SEQ ID NO: 1882525
augguauggugaguuuaaa

SEQ ID NO: 2127931 - RNA, 19 nt, Artificial Sequence
  Description of Artificial Sequence: Synthetic oligonucleotide
  Antisense strand to SEQ ID NO: 2127930
uuuaaacucaccauaccau

SEQ ID NO: 2127932 - RNA, 19 nt, Artificial Sequence
  Description of Artificial Sequence: Synthetic oligonucleotide
  Sense strand starting at position 1894 of SEQ ID NO: 1882525
ggacacaaacuucgcauaa

SEQ ID NO: 2127933 - RNA, 19 nt, Artificial Sequence
  Description of Artificial Sequence: Synthetic oligonucleotide
  Antisense strand to SEQ ID NO: 2127932
uuaugcgaaguuugugucc

SEQ ID NO: 2127934 - RNA, 19 nt, Artificial Sequence
  Description of Artificial Sequence: Synthetic oligonucleotide
  Sense strand starting at position 2041 of SEQ ID NO: 1882525
gagagucaauucucgucga

SEQ ID NO: 2127935 - RNA, 19 nt, Artificial Sequence
  Description of Artificial Sequence: Synthetic oligonucleotide
  Antisense strand to SEQ ID NO: 2127934
ucgacgagaauugacucuc

SEQ ID NO: 2127936 - RNA, 19 nt, Artificial Sequence
  Description of Artificial Sequence: Synthetic oligonucleotide
  Sense strand starting at position 2137 of SEQ ID NO: 1882525
gcgcuuuggccuuugagca

SEQ ID NO: 2127937 - RNA, 19 nt, Artificial Sequence
  Description of Artificial Sequence: Synthetic oligonucleotide
  Antisense strand to SEQ ID NO: 2127936
ugcucaaaggccaaagcgc

SEQ ID NO: 2127938 - RNA, 19 nt, Artificial Sequence
  Description of Artificial Sequence: Synthetic oligonucleotide
  Sense strand starting at position 2145 of SEQ ID NO: 1882525
gccuuugagcaguaggacu

SEQ ID NO: 2127939 - RNA, 19 nt, Artificial Sequence
  Description of Artificial Sequence: Synthetic oligonucleotide
  Antisense strand to SEQ ID NO: 2127938
aguccuacugcucaaaggc

SEQ ID NO: 2127940 - RNA, 19 nt, Artificial Sequence
  Description of Artificial Sequence: Synthetic oligonucleotide
  Sense strand starting at position 2168 of SEQ ID NO: 1882525
ccuaaucugcaaugucagu

SEQ ID NO: 2127941 - RNA, 19 nt, Artificial Sequence
  Description of Artificial Sequence: Synthetic oligonucleotide
  Antisense strand to SEQ ID NO: 2127940
acugacauugcagauuagg

SEQ ID NO: 2127942 - RNA, 19 nt, Artificial Sequence
  Description of Artificial Sequence: Synthetic oligonucleotide
  Sense strand starting at position 2199 of SEQ ID NO: 1882525
ucaauaauugugcagugua

SEQ ID NO: 2127943 - RNA, 19 nt, Artificial Sequence
  Description of Artificial Sequence: Synthetic oligonucleotide
  Antisense strand to SEQ ID NO: 2127942
uacacugcacaauuauuga

SEQ ID NO: 2127944 - RNA, 19 nt, Artificial Sequence
  Description of Artificial Sequence: Synthetic oligonucleotide
  Sense strand starting at position 2323 of SEQ ID NO: 1882525
uuaaauacucguggaagua

SEQ ID NO: 2127945 - RNA, 19 nt, Artificial Sequence
  Description of Artificial Sequence: Synthetic oligonucleotide
  Antisense strand to SEQ ID NO: 2127944
uacuuccacgaguauuuaa

SEQ ID NO: 2127946 - RNA, 19 nt, Artificial Sequence
  Description of Artificial Sequence: Synthetic oligonucleotide
  Sense strand starting at position 2333 of SEQ ID NO: 1882525
guggaaguaccucgaauaa

SEQ ID NO: 2127947 - RNA, 19 nt, Artificial Sequence
  Description of Artificial Sequence: Synthetic oligonucleotide
  Antisense strand to SEQ ID NO: 2127946
uuauucgagguacuuccac

SEQ ID NO: 2127948 - RNA, 19 nt, Artificial Sequence
  Description of Artificial Sequence: Synthetic oligonucleotide
  Sense strand starting at position 2477 of SEQ ID NO: 1882525
ccaauugccuagcuuugau

SEQ ID NO: 2127949 - RNA, 19 nt, Artificial Sequence
  Description of Artificial Sequence: Synthetic oligonucleotide
  Antisense strand to SEQ ID NO: 2127948
aucaaagcuaggcaauugg

SEQ ID NO: 2127950 - RNA, 19 nt, Artificial Sequence
  Description of Artificial Sequence: Synthetic oligonucleotide
  Sense strand starting at position 2480 of SEQ ID NO: 1882525
auugccuagcuuugaucaa

SEQ ID NO: 2127951 - RNA, 19 nt, Artificial Sequence
  Description of Artificial Sequence: Synthetic oligonucleotide
  Antisense strand to SEQ ID NO: 2127950
uugaucaaagcuaggcaau

SEQ ID NO: 2127952 - RNA, 19 nt, Artificial Sequence
  Description of Artificial Sequence: Synthetic oligonucleotide
  Sense strand starting at position 2501 of SEQ ID NO: 1882525
caauuacgugcaugauuaa

SEQ ID NO: 2127953 - RNA, 19 nt, Artificial Sequence
  Description of Artificial Sequence: Synthetic oligonucleotide
  Antisense strand to SEQ ID NO: 2127952
uuaaucaugcacguaauug

SEQ ID NO: 2127954 - RNA, 19 nt, Artificial Sequence
  Description of Artificial Sequence: Synthetic oligonucleotide
  Sense strand starting at position 2504 of SEQ ID NO: 1882525
uuacgugcaugauuaagaa

SEQ ID NO: 2127955 - RNA, 19 nt, Artificial Sequence
  Description of Artificial Sequence: Synthetic oligonucleotide
  Antisense strand to SEQ ID NO: 2127954
uucuuaaucaugcacguaa

SEQ ID NO: 2127956 - RNA, 19 nt, Artificial Sequence
  Description of Artificial Sequence: Synthetic oligonucleotide
  Sense strand starting at position 2518 of SEQ ID NO: 1882525
aagaaugaaguuugugaua

SEQ ID NO: 2127957 - RNA, 19 nt, Artificial Sequence
  Description of Artificial Sequence: Synthetic oligonucleotide
  Antisense strand to SEQ ID NO: 2127956
uaucacaaacuucauucuu

SEQ ID NO: 2127958 - RNA, 19 nt, Artificial Sequence
  Description of Artificial Sequence: Synthetic oligonucleotide
  Sense strand starting at position 2527 of SEQ ID NO: 1882525
guuugugauaccuauuguc

SEQ ID NO: 2127959 - RNA, 19 nt, Artificial Sequence
  Description of Artificial Sequence: Synthetic oligonucleotide
  Antisense strand to SEQ ID NO: 2127958
gacaauagguaucacaaac

SEQ ID NO: 2127960 - RNA, 19 nt, Artificial Sequence
  Description of Artificial Sequence: Synthetic oligonucleotide
  Sense strand starting at position 2686 of SEQ ID NO: 1882525
agccaauguugaucuaaau

SEQ ID NO: 2127961 - RNA, 19 nt, Artificial Sequence
  Description of Artificial Sequence: Synthetic oligonucleotide
  Antisense strand to SEQ ID NO: 2127960
auuuagaucaacauuggcu

SEQ ID NO: 2127962 - RNA, 19 nt, Artificial Sequence
  Description of Artificial Sequence: Synthetic oligonucleotide
  Sense strand starting at position 3172 of SEQ ID NO: 1882525
guauguugguuauuucuuu

SEQ ID NO: 2127963 - RNA, 19 nt, Artificial Sequence
  Description of Artificial Sequence: Synthetic oligonucleotide
  Antisense strand to SEQ ID NO: 2127962
aaagaaauaaccaacauac

SEQ ID NO: 2127964 - RNA, 19 nt, Artificial Sequence
  Description of Artificial Sequence: Synthetic oligonucleotide
  Sense strand starting at position 3224 of SEQ ID NO: 1882525
ugauauugguaguccuacu

SEQ ID NO: 2127965 - RNA, 19 nt, Artificial Sequence
  Description of Artificial Sequence: Synthetic oligonucleotide
  Antisense strand to SEQ ID NO: 2127964
aguaggacuaccaauauca

SEQ ID NO: 2127966 - RNA, 19 nt, Artificial Sequence
  Description of Artificial Sequence: Synthetic oligonucleotide
  Sense strand starting at position 3260 of SEQ ID NO: 1882525
ggaagcacugcauguaaau

SEQ ID NO: 2127967 - RNA, 19 nt, Artificial Sequence
  Description of Artificial Sequence: Synthetic oligonucleotide
  Antisense strand to SEQ ID NO: 2127966
auuuacaugcagugcuucc

SEQ ID NO: 2127968 - RNA, 19 nt, Artificial Sequence
  Description of Artificial Sequence: Synthetic oligonucleotide
  Sense strand starting at position 3288 of SEQ ID NO: 1882525
cugggucagcuuuagaguu

SEQ ID NO: 2127969 - RNA, 19 nt, Artificial Sequence
  Description of Artificial Sequence: Synthetic oligonucleotide
  Antisense strand to SEQ ID NO: 2127968
aacucuaaagcugacccag

SEQ ID NO: 2127970 - RNA, 19 nt, Artificial Sequence
  Description of Artificial Sequence: Synthetic oligonucleotide
  Sense strand starting at position 3304 of SEQ ID NO: 1882525
guuaccaguuuccuaucaa

SEQ ID NO: 2127971 - RNA, 19 nt, Artificial Sequence
  Description of Artificial Sequence: Synthetic oligonucleotide
  Antisense strand to SEQ ID NO: 2127970
uugauaggaaacugguaac

SEQ ID NO: 2127972 - RNA, 19 nt, Artificial Sequence
  Description of Artificial Sequence: Synthetic oligonucleotide
  Sense strand starting at position 3388 of SEQ ID NO: 1882525
aaauauuaaguggguuaca

SEQ ID NO: 2127973 - RNA, 19 nt, Artificial Sequence
  Description of Artificial Sequence: Synthetic oligonucleotide
  Antisense strand to SEQ ID NO: 2127972
uguaacccacuuaauauuu

SEQ ID NO: 2127974 - RNA, 19 nt, Artificial Sequence
  Description of Artificial Sequence: Synthetic oligonucleotide
  Sense strand starting at position 3904 of SEQ ID NO: 1882525
gauauaguggcacagaugu

SEQ ID NO: 2127975 - RNA, 19 nt, Artificial Sequence
  Description of Artificial Sequence: Synthetic oligonucleotide
  Antisense strand to SEQ ID NO: 2127974
acaucugugccacuauauc

SEQ ID NO: 2127976 - RNA, 19 nt, Artificial Sequence
  Description of Artificial Sequence: Synthetic oligonucleotide
  Sense strand starting at position 55 of SEQ ID NO: 1882526
gggugucaucuagaauguc

SEQ ID NO: 2127977 - RNA, 19 nt, Artificial Sequence
  Description of Artificial Sequence: Synthetic oligonucleotide
  Antisense strand to SEQ ID NO: 2127976
gacauucuagaugacaccc

SEQ ID NO: 2127978 - RNA, 19 nt, Artificial Sequence
  Description of Artificial Sequence: Synthetic oligonucleotide
  Sense strand starting at position 84 of SEQ ID NO: 1882526
uuaguagaauguuuccaga

SEQ ID NO: 2127979 - RNA, 19 nt, Artificial Sequence
  Description of Artificial Sequence: Synthetic oligonucleotide
  Antisense strand to SEQ ID NO: 2127978
ucuggaaacauucuacuaa

SEQ ID NO: 2127980 - RNA, 19 nt, Artificial Sequence
  Description of Artificial Sequence: Synthetic oligonucleotide
  Sense strand starting at position 86 of SEQ ID NO: 1882526
aguagaauguuuccagaac

SEQ ID NO: 2127981 - RNA, 19 nt, Artificial Sequence
  Description of Artificial Sequence: Synthetic oligonucleotide
  Antisense strand to SEQ ID NO: 2127980
guucuggaaacauucuacu

SEQ ID NO: 2127982 - RNA, 19 nt, Artificial Sequence
  Description of Artificial Sequence: Synthetic oligonucleotide
  Sense strand starting at position 116 of SEQ ID NO: 1882526
uuagaaucgcuggacggau

SEQ ID NO: 2127983 - RNA, 19 nt, Artificial Sequence
  Description of Artificial Sequence: Synthetic oligonucleotide
  Antisense strand to SEQ ID NO: 2127982
auccguccagcgauucuaa

SEQ ID NO: 2127984 - RNA, 19 nt, Artificial Sequence
  Description of Artificial Sequence: Synthetic oligonucleotide
  Sense strand starting at position 280 of SEQ ID NO: 1882526
acacgacuuuauccuaaga

SEQ ID NO: 2127985 - RNA, 19 nt, Artificial Sequence
  Description of Artificial Sequence: Synthetic oligonucleotide
  Antisense strand to SEQ ID NO: 2127984
ucuuaggauaaagucgugu

SEQ ID NO: 2127986 - RNA, 19 nt, Artificial Sequence
  Description of Artificial Sequence: Synthetic oligonucleotide
  Sense strand starting at position 293 of SEQ ID NO: 1882526
cuaagagguuauccuaaua

SEQ ID NO: 2127987 - RNA, 19 nt, Artificial Sequence
  Description of Artificial Sequence: Synthetic oligonucleotide
  Antisense strand to SEQ ID NO: 2127986
uauuaggauaaccucuuag

SEQ ID NO: 2127988 - RNA, 19 nt, Artificial Sequence
  Description of Artificial Sequence: Synthetic oligonucleotide
  Sense strand starting at position 398 of SEQ ID NO: 1882526
ccaggaggugcuuauaaug

SEQ ID NO: 2127989 - RNA, 19 nt, Artificial Sequence
  Description of Artificial Sequence: Synthetic oligonucleotide
  Antisense strand to SEQ ID NO: 2127988
cauuauaagcaccuccugg

SEQ ID NO: 2127990 - RNA, 19 nt, Artificial Sequence
  Description of Artificial Sequence: Synthetic oligonucleotide
  Sense strand starting at position 417 of SEQ ID NO: 1882526
gaauauagcugagccagaa

SEQ ID NO: 2127991 - RNA, 19 nt, Artificial Sequence
  Description of Artificial Sequence: Synthetic oligonucleotide
  Antisense strand to SEQ ID NO: 2127990
uucuggcucagcuauauuc

SEQ ID NO: 2127992 - RNA, 19 nt, Artificial Sequence
  Description of Artificial Sequence: Synthetic oligonucleotide
  Sense strand starting at position 526 of SEQ ID NO: 1882526
aaaccuguuguaugaaaga

SEQ ID NO: 2127993 - RNA, 19 nt, Artificial Sequence
  Description of Artificial Sequence: Synthetic oligonucleotide
  Antisense strand to SEQ ID NO: 2127992
ucuuucauacaacagguuu

SEQ ID NO: 2127994 - RNA, 19 nt, Artificial Sequence
  Description of Artificial Sequence: Synthetic oligonucleotide
  Sense strand starting at position 553 of SEQ ID NO: 1882526
ucuggugaauuacucugaa

SEQ ID NO: 2127995 - RNA, 19 nt, Artificial Sequence
  Description of Artificial Sequence: Synthetic oligonucleotide
  Antisense strand to SEQ ID NO: 2127994
uucagaguaauucaccaga

SEQ ID NO: 2127996 - RNA, 19 nt, Artificial Sequence
  Description of Artificial Sequence: Synthetic oligonucleotide
  Sense strand starting at position 556 of SEQ ID NO: 1882526
ggugaauuacucugaagac

SEQ ID NO: 2127997 - RNA, 19 nt, Artificial Sequence
  Description of Artificial Sequence: Synthetic oligonucleotide
  Antisense strand to SEQ ID NO: 2127996
gucuucagaguaauucacc

SEQ ID NO: 2127998 - RNA, 19 nt, Artificial Sequence
  Description of Artificial Sequence: Synthetic oligonucleotide
  Sense strand starting at position 581 of SEQ ID NO: 1882526
agaguaaugaggugguuug

SEQ ID NO: 2127999 - RNA, 19 nt, Artificial Sequence
  Description of Artificial Sequence: Synthetic oligonucleotide
  Antisense strand to SEQ ID NO: 2127998
caaaccaccucauuacucu

SEQ ID NO: 2128000 - RNA, 19 nt, Artificial Sequence
  Description of Artificial Sequence: Synthetic oligonucleotide
  Sense strand starting at position 718 of SEQ ID NO: 1882526
gaaggauguagcuggaaug

SEQ ID NO: 2128001 - RNA, 19 nt, Artificial Sequence
  Description of Artificial Sequence: Synthetic oligonucleotide
  Antisense strand to SEQ ID NO: 2128000
cauuccagcuacauccuuc

SEQ ID NO: 2128002 - RNA, 19 nt, Artificial Sequence
  Description of Artificial Sequence: Synthetic oligonucleotide
  Sense strand starting at position 942 of SEQ ID NO: 1882526
cuuaaugugcgugugcauu

SEQ ID NO: 2128003 - RNA, 19 nt, Artificial Sequence
  Description of Artificial Sequence: Synthetic oligonucleotide
  Antisense strand to SEQ ID NO: 2128002
aaugcacacgcacauuaag

SEQ ID NO: 2128004 - RNA, 19 nt, Artificial Sequence
  Description of Artificial Sequence: Synthetic oligonucleotide
  Sense strand starting at position 948 of SEQ ID NO: 1882526
gugcgugugcauucaccau

SEQ ID NO: 2128005 - RNA, 19 nt, Artificial Sequence
  Description of Artificial Sequence: Synthetic oligonucleotide
  Antisense strand to SEQ ID NO: 2128004
auggugaaugcacacgcac

SEQ ID NO: 2128006 - RNA, 19 nt, Artificial Sequence
  Description of Artificial Sequence: Synthetic oligonucleotide
  Sense strand starting at position 1062 of SEQ ID NO: 1882526
gcuaaagagugacucagaa

SEQ ID NO: 2128007 - RNA, 19 nt, Artificial Sequence
  Description of Artificial Sequence: Synthetic oligonucleotide
  Antisense strand to SEQ ID NO: 2128006
uucugagucacucuuuagc

SEQ ID NO: 2128008 - RNA, 19 nt, Artificial Sequence
  Description of Artificial Sequence: Synthetic oligonucleotide
  Sense strand starting at position 1075 of SEQ ID NO: 1882526
ucagaaugcggaggauuau

SEQ ID NO: 2128009 - RNA, 19 nt, Artificial Sequence
  Description of Artificial Sequence: Synthetic oligonucleotide
  Antisense strand to SEQ ID NO: 2128008
auaauccuccgcauucuga

SEQ ID NO: 2128010 - RNA, 19 nt, Artificial Sequence
  Description of Artificial Sequence: Synthetic oligonucleotide
  Sense strand starting at position 1081 of SEQ ID NO: 1882526
ugcggaggauuauuauuga

SEQ ID NO: 2128011 - RNA, 19 nt, Artificial Sequence
  Description of Artificial Sequence: Synthetic oligonucleotide
  Antisense strand to SEQ ID NO: 2128010
ucaauaauaauccuccgca

SEQ ID NO: 2128012 - RNA, 19 nt, Artificial Sequence
  Description of Artificial Sequence: Synthetic oligonucleotide
  Sense strand starting at position 2025 of SEQ ID NO: 1882526
caagauuccuuuguugaug

SEQ ID NO: 2128013 - RNA, 19 nt, Artificial Sequence
  Description of Artificial Sequence: Synthetic oligonucleotide
  Antisense strand to SEQ ID NO: 2128012
caucaacaaaggaaucuug

SEQ ID NO: 2128014 - RNA, 19 nt, Artificial Sequence
  Description of Artificial Sequence: Synthetic oligonucleotide
  Sense strand starting at position 2066 of SEQ ID NO: 1882526
aaggguugaagagguguaa

SEQ ID NO: 2128015 - RNA, 19 nt, Artificial Sequence
  Description of Artificial Sequence: Synthetic oligonucleotide
  Antisense strand to SEQ ID NO: 2128014
uuacaccucuucaacccuu

SEQ ID NO: 2128016 - RNA, 19 nt, Artificial Sequence
  Description of Artificial Sequence: Synthetic oligonucleotide
  Sense strand starting at position 2154 of SEQ ID NO: 1882526
cuuugagacaucugaggua

SEQ ID NO: 2128017 - RNA, 19 nt, Artificial Sequence
  Description of Artificial Sequence: Synthetic oligonucleotide
  Antisense strand to SEQ ID NO: 2128016
uaccucagaugucucaaag

SEQ ID NO: 2128018 - RNA, 19 nt, Artificial Sequence
  Description of Artificial Sequence: Synthetic oligonucleotide
  Sense strand starting at position 2362 of SEQ ID NO: 1882526
guuugagacagugaguacu

SEQ ID NO: 2128019 - RNA, 19 nt, Artificial Sequence
  Description of Artificial Sequence: Synthetic oligonucleotide
  Antisense strand to SEQ ID NO: 2128018
aguacucacugucucaaac

SEQ ID NO: 2128020 - RNA, 19 nt, Artificial Sequence
  Description of Artificial Sequence: Synthetic oligonucleotide
  Sense strand starting at position 2643 of SEQ ID NO: 1882526
accauagauuuagagggua

SEQ ID NO: 2128021 - RNA, 19 nt, Artificial Sequence
  Description of Artificial Sequence: Synthetic oligonucleotide
  Antisense strand to SEQ ID NO: 2128020
uacccucuaaaucuauggu

SEQ ID NO: 2128022 - RNA, 19 nt, Artificial Sequence
  Description of Artificial Sequence: Synthetic oligonucleotide
  Sense strand starting at position 2819 of SEQ ID NO: 1882526
gggaaucccaauggucagu

SEQ ID NO: 2128023 - RNA, 19 nt, Artificial Sequence
  Description of Artificial Sequence: Synthetic oligonucleotide
  Antisense strand to SEQ ID NO: 2128022
acugaccauugggauuccc

SEQ ID NO: 2128024 - RNA, 19 nt, Artificial Sequence
  Description of Artificial Sequence: Synthetic oligonucleotide
  Sense strand starting at position 2862 of SEQ ID NO: 1882526
guacuuuccucagccauuu

SEQ ID NO: 2128025 - RNA, 19 nt, Artificial Sequence
  Description of Artificial Sequence: Synthetic oligonucleotide
  Antisense strand to SEQ ID NO: 2128024
aaauggcugaggaaaguac

SEQ ID NO: 2128026 - RNA, 19 nt, Artificial Sequence
  Description of Artificial Sequence: Synthetic oligonucleotide
  Sense strand starting at position 2911 of SEQ ID NO: 1882526
cccucugaucaguaggguu

SEQ ID NO: 2128027 - RNA, 19 nt, Artificial Sequence
  Description of Artificial Sequence: Synthetic oligonucleotide
  Antisense strand to SEQ ID NO: 2128026
aacccuacugaucagaggg

SEQ ID NO: 2128028 - RNA, 19 nt, Artificial Sequence
  Description of Artificial Sequence: Synthetic oligonucleotide
  Sense strand starting at position 2925 of SEQ ID NO: 1882526
ggguuaaacccuuagcucu

SEQ ID NO: 2128029 - RNA, 19 nt, Artificial Sequence
  Description of Artificial Sequence: Synthetic oligonucleotide
  Antisense strand to SEQ ID NO: 2128028
agagcuaaggguuuaaccc

SEQ ID NO: 2128030 - RNA, 19 nt, Artificial Sequence
  Description of Artificial Sequence: Synthetic oligonucleotide
  Sense strand starting at position 3037 of SEQ ID NO: 1882526
ccagguaugacuggcauaa

SEQ ID NO: 2128031 - RNA, 19 nt, Artificial Sequence
  Description of Artificial Sequence: Synthetic oligonucleotide
  Antisense strand to SEQ ID NO: 2128030
uuaugccagucauaccugg

SEQ ID NO: 2128032 - RNA, 19 nt, Artificial Sequence
  Description of Artificial Sequence: Synthetic oligonucleotide
  Sense strand starting at position 3127 of SEQ ID NO: 1882526
gagugucuggcagauagga

SEQ ID NO: 2128033 - RNA, 19 nt, Artificial Sequence
  Description of Artificial Sequence: Synthetic oligonucleotide
  Antisense strand to SEQ ID NO: 2128032
uccuaucugccagacacuc

SEQ ID NO: 2128034 - RNA, 19 nt, Artificial Sequence
  Description of Artificial Sequence: Synthetic oligonucleotide
  Sense strand starting at position 3156 of SEQ ID NO: 1882526
cugcuacuggacuagauau

SEQ ID NO: 2128035 - RNA, 19 nt, Artificial Sequence
  Description of Artificial Sequence: Synthetic oligonucleotide
  Antisense strand to SEQ ID NO: 2128034
auaucuaguccaguagcag

SEQ ID NO: 2128036 - RNA, 19 nt, Artificial Sequence
  Description of Artificial Sequence: Synthetic oligonucleotide
  Sense strand starting at position 3167 of SEQ ID NO: 1882526
cuagauaucaaggguaagu

SEQ ID NO: 2128037 - RNA, 19 nt, Artificial Sequence
  Description of Artificial Sequence: Synthetic oligonucleotide
  Antisense strand to SEQ ID NO: 2128036
acuuacccuugauaucuag

SEQ ID NO: 2128038 - RNA, 19 nt, Artificial Sequence
  Description of Artificial Sequence: Synthetic oligonucleotide
  Sense strand starting at position 3177 of SEQ ID NO: 1882526
aggguaagugggugacaau

SEQ ID NO: 2128039 - RNA, 19 nt, Artificial Sequence
  Description of Artificial Sequence: Synthetic oligonucleotide
  Antisense strand to SEQ ID NO: 2128038
auugucacccacuuacccu

SEQ ID NO: 2128040 - RNA, 19 nt, Artificial Sequence
  Description of Artificial Sequence: Synthetic oligonucleotide
  Sense strand starting at position 3261 of SEQ ID NO: 1882526
ccaacaaugccauaagugu

SEQ ID NO: 2128041 - RNA, 19 nt, Artificial Sequence
  Description of Artificial Sequence: Synthetic oligonucleotide
  Antisense strand to SEQ ID NO: 2128040
acacuuauggcauuguugg

SEQ ID NO: 2128042 - RNA, 19 nt, Artificial Sequence
  Description of Artificial Sequence: Synthetic oligonucleotide
  Sense strand starting at position 3322 of SEQ ID NO: 1882526
uuggcauuacaaugaaacu

SEQ ID NO: 2128043 - RNA, 19 nt, Artificial Sequence
  Description of Artificial Sequence: Synthetic oligonucleotide
  Antisense strand to SEQ ID NO: 2128042
aguuucauuguaaugccaa

SEQ ID NO: 2128044 - RNA, 19 nt, Artificial Sequence
  Description of Artificial Sequence: Synthetic oligonucleotide
  Sense strand starting at position 3331 of SEQ ID NO: 1882526
caaugaaacuguucgaaag

SEQ ID NO: 2128045 - RNA, 19 nt, Artificial Sequence
  Description of Artificial Sequence: Synthetic oligonucleotide
  Antisense strand to SEQ ID NO: 2128044
cuuucgaacaguuucauug

SEQ ID NO: 2128046 - RNA, 19 nt, Artificial Sequence
  Description of Artificial Sequence: Synthetic oligonucleotide
  Sense strand starting at position 3332 of SEQ ID NO: 1882526
aaugaaacuguucgaaagu

SEQ ID NO: 2128047 - RNA, 19 nt, Artificial Sequence
  Description of Artificial Sequence: Synthetic oligonucleotide
  Antisense strand to SEQ ID NO: 2128046
acuuucgaacaguuucauu

SEQ ID NO: 2128048 - RNA, 19 nt, Artificial Sequence
  Description of Artificial Sequence: Synthetic oligonucleotide
  Sense strand starting at position 3430 of SEQ ID NO: 1882526
gcuuaacauguagaguaga

SEQ ID NO: 2128049 - RNA, 19 nt, Artificial Sequence
  Description of Artificial Sequence: Synthetic oligonucleotide
  Antisense strand to SEQ ID NO: 2128048
ucuacucuacauguuaagc

SEQ ID NO: 2128050 - RNA, 19 nt, Artificial Sequence
  Description of Artificial Sequence: Synthetic oligonucleotide
  Sense strand starting at position 3700 of SEQ ID NO: 1882526
ugcuuaaugguccauuaaa

SEQ ID NO: 2128051 - RNA, 19 nt, Artificial Sequence
  Description of Artificial Sequence: Synthetic oligonucleotide
  Antisense strand to SEQ ID NO: 2128050
uuuaauggaccauuaagca

SEQ ID NO: 2128052 - RNA, 19 nt, Artificial Sequence
  Description of Artificial Sequence: Synthetic oligonucleotide
  Sense strand starting at position 3766 of SEQ ID NO: 1882526
uacggaguuccagagcaaa

SEQ ID NO: 2128053 - RNA, 19 nt, Artificial Sequence
  Description of Artificial Sequence: Synthetic oligonucleotide
  Antisense strand to SEQ ID NO: 2128052
uuugcucuggaacuccgua

SEQ ID NO: 2128054 - RNA, 19 nt, Artificial Sequence
  Description of Artificial Sequence: Synthetic oligonucleotide
  Sense strand starting at position 3926 of SEQ ID NO: 1882526
acacaaggcucauugaaac

SEQ ID NO: 2128055 - RNA, 19 nt, Artificial Sequence
  Description of Artificial Sequence: Synthetic oligonucleotide
  Antisense strand to SEQ ID NO: 2128054
guuucaaugagccuugugu

SEQ ID NO: 2128056 - RNA, 19 nt, Artificial Sequence
  Description of Artificial Sequence: Synthetic oligonucleotide
  Sense strand starting at position 198 of SEQ ID NO: 1882527
ggaaauuagcuuuacucuu

SEQ ID NO: 2128057 - RNA, 19 nt, Artificial Sequence
  Description of Artificial Sequence: Synthetic oligonucleotide
  Antisense strand to SEQ ID NO: 2128056
aagaguaaagcuaauuucc

SEQ ID NO: 2128058 - RNA, 19 nt, Artificial Sequence
  Description of Artificial Sequence: Synthetic oligonucleotide
  Sense strand starting at position 326 of SEQ ID NO: 1882527
auuuaagagcuccgcugaa

SEQ ID NO: 2128059 - RNA, 19 nt, Artificial Sequence
  Description of Artificial Sequence: Synthetic oligonucleotide
  Antisense strand to SEQ ID NO: 2128058
uucagcggagcucuuaaau

SEQ ID NO: 2128060 - RNA, 19 nt, Artificial Sequence
  Description of Artificial Sequence: Synthetic oligonucleotide
  Sense strand starting at position 338 of SEQ ID NO: 1882527
cgcugaaaccugcaauacu

SEQ ID NO: 2128061 - RNA, 19 nt, Artificial Sequence
  Description of Artificial Sequence: Synthetic oligonucleotide
  Antisense strand to SEQ ID NO: 2128060
aguauugcagguuucagcg

SEQ ID NO: 2128062 - RNA, 19 nt, Artificial Sequence
  Description of Artificial Sequence: Synthetic oligonucleotide
  Sense strand starting at position 347 of SEQ ID NO: 1882527
cugcaauacuugcugaaua

SEQ ID NO: 2128063 - RNA, 19 nt, Artificial Sequence
  Description of Artificial Sequence: Synthetic oligonucleotide
  Antisense strand to SEQ ID NO: 2128062
uauucagcaaguauugcag

SEQ ID NO: 2128064 - RNA, 19 nt, Artificial Sequence
  Description of Artificial Sequence: Synthetic oligonucleotide
  Sense strand starting at position 354 of SEQ ID NO: 1882527
acuugcugaauaggugaaa

SEQ ID NO: 2128065 - RNA, 19 nt, Artificial Sequence
  Description of Artificial Sequence: Synthetic oligonucleotide
  Antisense strand to SEQ ID NO: 2128064
uuucaccuauucagcaagu

SEQ ID NO: 2128066 - RNA, 19 nt, Artificial Sequence
  Description of Artificial Sequence: Synthetic oligonucleotide
  Sense strand starting at position 398 of SEQ ID NO: 1882527
ugccauguucccuauauac

SEQ ID NO: 2128067 - RNA, 19 nt, Artificial Sequence
  Description of Artificial Sequence: Synthetic oligonucleotide
  Antisense strand to SEQ ID NO: 2128066
guauauagggaacauggca

SEQ ID NO: 2128068 - RNA, 19 nt, Artificial Sequence
  Description of Artificial Sequence: Synthetic oligonucleotide
  Sense strand starting at position 612 of SEQ ID NO: 1882527
cgggaacaucuggguaaac

SEQ ID NO: 2128069 - RNA, 19 nt, Artificial Sequence
  Description of Artificial Sequence: Synthetic oligonucleotide
  Antisense strand to SEQ ID NO: 2128068
guuuacccagauguucccg

SEQ ID NO: 2128070 - RNA, 19 nt, Artificial Sequence
  Description of Artificial Sequence: Synthetic oligonucleotide
  Sense strand starting at position 670 of SEQ ID NO: 1882527
auaagaacacuuugucuag

SEQ ID NO: 2128071 - RNA, 19 nt, Artificial Sequence
  Description of Artificial Sequence: Synthetic oligonucleotide
  Antisense strand to SEQ ID NO: 2128070
cuagacaaaguguucuuau

SEQ ID NO: 2128072 - RNA, 19 nt, Artificial Sequence
  Description of Artificial Sequence: Synthetic oligonucleotide
  Sense strand starting at position 674 of SEQ ID NO: 1882527
gaacacuuugucuagagca

SEQ ID NO: 2128073 - RNA, 19 nt, Artificial Sequence
  Description of Artificial Sequence: Synthetic oligonucleotide
  Antisense strand to SEQ ID NO: 2128072
ugcucuagacaaaguguuc

SEQ ID NO: 2128074 - RNA, 19 nt, Artificial Sequence
  Description of Artificial Sequence: Synthetic oligonucleotide
  Sense strand starting at position 726 of SEQ ID NO: 1882527
guuucuaauguggaauuau

SEQ ID NO: 2128075 - RNA, 19 nt, Artificial Sequence
  Description of Artificial Sequence: Synthetic oligonucleotide
  Antisense strand to SEQ ID NO: 2128074
auaauuccacauuagaaac

SEQ ID NO: 2128076 - RNA, 19 nt, Artificial Sequence
  Description of Artificial Sequence: Synthetic oligonucleotide
  Sense strand starting at position 877 of SEQ ID NO: 1882527
ggcaaacuggucuaggcaa

SEQ ID NO: 2128077 - RNA, 19 nt, Artificial Sequence
  Description of Artificial Sequence: Synthetic oligonucleotide
  Antisense strand to SEQ ID NO: 2128076
uugccuagaccaguuugcc

SEQ ID NO: 2128078 - RNA, 19 nt, Artificial Sequence
  Description of Artificial Sequence: Synthetic oligonucleotide
  Sense strand starting at position 892 of SEQ ID NO: 1882527
gcaacacauuugucauguu

SEQ ID NO: 2128079 - RNA, 19 nt, Artificial Sequence
  Description of Artificial Sequence: Synthetic oligonucleotide
  Antisense strand to SEQ ID NO: 2128078
aacaugacaaauguguugc

SEQ ID NO: 2128080 - RNA, 19 nt, Artificial Sequence
  Description of Artificial Sequence: Synthetic oligonucleotide
  Sense strand starting at position 929 of SEQ ID NO: 1882527
cugucauggagagaugcua

SEQ ID NO: 2128081 - RNA, 19 nt, Artificial Sequence
  Description of Artificial Sequence: Synthetic oligonucleotide
  Antisense strand to SEQ ID NO: 2128080
uagcaucucuccaugacag

SEQ ID NO: 2128082 - RNA, 19 nt, Artificial Sequence
  Description of Artificial Sequence: Synthetic oligonucleotide
  Sense strand starting at position 1257 of SEQ ID NO: 1882527
cuuugcucaguauaaggaa

SEQ ID NO: 2128083 - RNA, 19 nt, Artificial Sequence
  Description of Artificial Sequence: Synthetic oligonucleotide
  Antisense strand to SEQ ID NO: 2128082
uuccuuauacugagcaaag

SEQ ID NO: 2128084 - RNA, 19 nt, Artificial Sequence
  Description of Artificial Sequence: Synthetic oligonucleotide
  Sense strand starting at position 1373 of SEQ ID NO: 1882527
cuuucuuuaucaguugaag

SEQ ID NO: 2128085 - RNA, 19 nt, Artificial Sequence
  Description of Artificial Sequence: Synthetic oligonucleotide
  Antisense strand to SEQ ID NO: 2128084
cuucaacugauaaagaaag

SEQ ID NO: 2128086 - RNA, 19 nt, Artificial Sequence
  Description of Artificial Sequence: Synthetic oligonucleotide
  Sense strand starting at position 1493 of SEQ ID NO: 1882527
aacauugagccuugggagu

SEQ ID NO: 2128087 - RNA, 19 nt, Artificial Sequence
  Description of Artificial Sequence: Synthetic oligonucleotide
  Antisense strand to SEQ ID NO: 2128086
acucccaaggcucaauguu

SEQ ID NO: 2128088 - RNA, 19 nt, Artificial Sequence
  Description of Artificial Sequence: Synthetic oligonucleotide
  Sense strand starting at position 2329 of SEQ ID NO: 1882527
gggcuaacaucacucaauu

SEQ ID NO: 2128089 - RNA, 19 nt, Artificial Sequence
  Description of Artificial Sequence: Synthetic oligonucleotide
  Antisense strand to SEQ ID NO: 2128088
aauugagugauguuagccc

SEQ ID NO: 2128090 - RNA, 19 nt, Artificial Sequence
  Description of Artificial Sequence: Synthetic oligonucleotide
  Sense strand starting at position 2379 of SEQ ID NO: 1882527
agggaauacauuggcuuga

SEQ ID NO: 2128091 - RNA, 19 nt, Artificial Sequence
  Description of Artificial Sequence: Synthetic oligonucleotide
  Antisense strand to SEQ ID NO: 2128090
ucaagccaauguauucccu

SEQ ID NO: 2128092 - RNA, 19 nt, Artificial Sequence
  Description of Artificial Sequence: Synthetic oligonucleotide
  Sense strand starting at position 2380 of SEQ ID NO: 1882527
gggaauacauuggcuugau

SEQ ID NO: 2128093 - RNA, 19 nt, Artificial Sequence
  Description of Artificial Sequence: Synthetic oligonucleotide
  Antisense strand to SEQ ID NO: 2128092
aucaagccaauguauuccc

SEQ ID NO: 2128094 - RNA, 19 nt, Artificial Sequence
  Description of Artificial Sequence: Synthetic oligonucleotide
  Sense strand starting at position 2381 of SEQ ID NO: 1882527
ggaauacauuggcuugaug

SEQ ID NO: 2128095 - RNA, 19 nt, Artificial Sequence
  Description of Artificial Sequence: Synthetic oligonucleotide
  Antisense strand to SEQ ID NO: 2128094
caucaagccaauguauucc

SEQ ID NO: 2128096 - RNA, 19 nt, Artificial Sequence
  Description of Artificial Sequence: Synthetic oligonucleotide
  Sense strand starting at position 2526 of SEQ ID NO: 1882527
agguaauaauguuucucca

SEQ ID NO: 2128097 - RNA, 19 nt, Artificial Sequence
  Description of Artificial Sequence: Synthetic oligonucleotide
  Antisense strand to SEQ ID NO: 2128096
uggagaaacauuauuaccu

SEQ ID NO: 2128098 - RNA, 19 nt, Artificial Sequence
  Description of Artificial Sequence: Synthetic oligonucleotide
  Sense strand starting at position 2706 of SEQ ID NO: 1882527
ggcauaagaagugguuaca

SEQ ID NO: 2128099 - RNA, 19 nt, Artificial Sequence
  Description of Artificial Sequence: Synthetic oligonucleotide
  Antisense strand to SEQ ID NO: 2128098
uguaaccacuucuuaugcc

SEQ ID NO: 2128100 - RNA, 19 nt, Artificial Sequence
  Description of Artificial Sequence: Synthetic oligonucleotide
  Sense strand starting at position 2735 of SEQ ID NO: 1882527
gguuguggcauccaguaaa

SEQ ID NO: 2128101 - RNA, 19 nt, Artificial Sequence
  Description of Artificial Sequence: Synthetic oligonucleotide
  Antisense strand to SEQ ID NO: 2128100
uuuacuggaugccacaacc

SEQ ID NO: 2128102 - RNA, 19 nt, Artificial Sequence
  Description of Artificial Sequence: Synthetic oligonucleotide
  Sense strand starting at position 2794 of SEQ ID NO: 1882527
cauagaccuguuuggaauu

SEQ ID NO: 2128103 - RNA, 19 nt, Artificial Sequence
  Description of Artificial Sequence: Synthetic oligonucleotide
  Antisense strand to SEQ ID NO: 2128102
aauuccaaacaggucuaug

SEQ ID NO: 2128104 - RNA, 19 nt, Artificial Sequence
  Description of Artificial Sequence: Synthetic oligonucleotide
  Sense strand starting at position 2827 of SEQ ID NO: 1882527
ucugaagacuuccucgaua

SEQ ID NO: 2128105 - RNA, 19 nt, Artificial Sequence
  Description of Artificial Sequence: Synthetic oligonucleotide
  Antisense strand to SEQ ID NO: 2128104
uaucgaggaagucuucaga

SEQ ID NO: 2128106 - RNA, 19 nt, Artificial Sequence
  Description of Artificial Sequence: Synthetic oligonucleotide
  Sense strand starting at position 2829 of SEQ ID NO: 1882527
ugaagacuuccucgauaga

SEQ ID NO: 2128107 - RNA, 19 nt, Artificial Sequence
  Description of Artificial Sequence: Synthetic oligonucleotide
  Antisense strand to SEQ ID NO: 2128106
ucuaucgaggaagucuuca

SEQ ID NO: 2128108 - RNA, 19 nt, Artificial Sequence
  Description of Artificial Sequence: Synthetic oligonucleotide
  Sense strand starting at position 2942 of SEQ ID NO: 1882527
auggaauuagaguggccua

SEQ ID NO: 2128109 - RNA, 19 nt, Artificial Sequence
  Description of Artificial Sequence: Synthetic oligonucleotide
  Antisense strand to SEQ ID NO: 2128108
uaggccacucuaauuccau

SEQ ID NO: 2128110 - RNA, 19 nt, Artificial Sequence
  Description of Artificial Sequence: Synthetic oligonucleotide
  Sense strand starting at position 2945 of SEQ ID NO: 1882527
gaauuagaguggccuacaa

SEQ ID NO: 2128111 - RNA, 19 nt, Artificial Sequence
  Description of Artificial Sequence: Synthetic oligonucleotide
  Antisense strand to SEQ ID NO: 2128110
uuguaggccacucuaauuc

SEQ ID NO: 2128112 - RNA, 19 nt, Artificial Sequence
  Description of Artificial Sequence: Synthetic oligonucleotide
  Sense strand starting at position 2947 of SEQ ID NO: 1882527
auuagaguggccuacaaca

SEQ ID NO: 2128113 - RNA, 19 nt, Artificial Sequence
  Description of Artificial Sequence: Synthetic oligonucleotide
  Antisense strand to SEQ ID NO: 2128112
uguuguaggccacucuaau

SEQ ID NO: 2128114 - RNA, 19 nt, Artificial Sequence
  Description of Artificial Sequence: Synthetic oligonucleotide
  Sense strand starting at position 3046 of SEQ ID NO: 1882527
auuuguaaauaccaagagu

SEQ ID NO: 2128115 - RNA, 19 nt, Artificial Sequence
  Description of Artificial Sequence: Synthetic oligonucleotide
  Antisense strand to SEQ ID NO: 2128114
acucuugguauuuacaaau

SEQ ID NO: 2128116 - RNA, 19 nt, Artificial Sequence
  Description of Artificial Sequence: Synthetic oligonucleotide
  Sense strand starting at position 3059 of SEQ ID NO: 1882527
aagaguaaguucuuggucu

SEQ ID NO: 2128117 - RNA, 19 nt, Artificial Sequence
  Description of Artificial Sequence: Synthetic oligonucleotide
  Antisense strand to SEQ ID NO: 2128116
agaccaagaacuuacucuu

SEQ ID NO: 2128118 - RNA, 19 nt, Artificial Sequence
  Description of Artificial Sequence: Synthetic oligonucleotide
  Sense strand starting at position 3272 of SEQ ID NO: 1882527
uggcauuuaucuuagaaac

SEQ ID NO: 2128119 - RNA, 19 nt, Artificial Sequence
  Description of Artificial Sequence: Synthetic oligonucleotide
  Antisense strand to SEQ ID NO: 2128118
guuucuaagauaaaugcca

SEQ ID NO: 2128120 - RNA, 19 nt, Artificial Sequence
  Description of Artificial Sequence: Synthetic oligonucleotide
  Sense strand starting at position 3274 of SEQ ID NO: 1882527
gcauuuaucuuagaaacag

SEQ ID NO: 2128121 - RNA, 19 nt, Artificial Sequence
  Description of Artificial Sequence: Synthetic oligonucleotide
  Antisense strand to SEQ ID NO: 2128120
cuguuucuaagauaaaugc

SEQ ID NO: 2128122 - RNA, 19 nt, Artificial Sequence
  Description of Artificial Sequence: Synthetic oligonucleotide
  Sense strand starting at position 3464 of SEQ ID NO: 1882527
cucuuauauugagcugaaa

SEQ ID NO: 2128123 - RNA, 19 nt, Artificial Sequence
  Description of Artificial Sequence: Synthetic oligonucleotide
  Antisense strand to SEQ ID NO: 2128122
uuucagcucaauauaagag

SEQ ID NO: 2128124 - RNA, 19 nt, Artificial Sequence
  Description of Artificial Sequence: Synthetic oligonucleotide
  Sense strand starting at position 3604 of SEQ ID NO: 1882527
ugaguuuggacauguuacu

SEQ ID NO: 2128125 - RNA, 19 nt, Artificial Sequence
  Description of Artificial Sequence: Synthetic oligonucleotide
  Antisense strand to SEQ ID NO: 2128124
aguaacauguccaaacuca

SEQ ID NO: 2128126 - RNA, 19 nt, Artificial Sequence
  Description of Artificial Sequence: Synthetic oligonucleotide
  Sense strand starting at position 3617 of SEQ ID NO: 1882527
guuacuuuacccuacagga

SEQ ID NO: 2128127 - RNA, 19 nt, Artificial Sequence
  Description of Artificial Sequence: Synthetic oligonucleotide
  Antisense strand to SEQ ID NO: 2128126
uccuguaggguaaaguaac

SEQ ID NO: 2128128 - RNA, 19 nt, Artificial Sequence
  Description of Artificial Sequence: Synthetic oligonucleotide
  Sense strand starting at position 3633 of SEQ ID NO: 1882527
ggaugacagucuucucauu

SEQ ID NO: 2128129 - RNA, 19 nt, Artificial Sequence
  Description of Artificial Sequence: Synthetic oligonucleotide
  Antisense strand to SEQ ID NO: 2128128
aaugagaagacugucaucc

SEQ ID NO: 2128130 - RNA, 19 nt, Artificial Sequence
  Description of Artificial Sequence: Synthetic oligonucleotide
  Sense strand starting at position 3635 of SEQ ID NO: 1882527
augacagucuucucauuac

SEQ ID NO: 2128131 - RNA, 19 nt, Artificial Sequence
  Description of Artificial Sequence: Synthetic oligonucleotide
  Antisense strand to SEQ ID NO: 2128130
guaaugagaagacugucau

SEQ ID NO: 2128132 - RNA, 19 nt, Artificial Sequence
  Description of Artificial Sequence: Synthetic oligonucleotide
  Sense strand starting at position 3695 of SEQ ID NO: 1882527
gucuguuagcaggauuaaa

SEQ ID NO: 2128133 - RNA, 19 nt, Artificial Sequence
  Description of Artificial Sequence: Synthetic oligonucleotide
  Antisense strand to SEQ ID NO: 2128132
uuuaauccugcuaacagac

SEQ ID NO: 2128134 - RNA, 19 nt, Artificial Sequence
  Description of Artificial Sequence: Synthetic oligonucleotide
  Sense strand starting at position 3713 of SEQ ID NO: 1882527
augaguauacauugcaaua

SEQ ID NO: 2128135 - RNA, 19 nt, Artificial Sequence
  Description of Artificial Sequence: Synthetic oligonucleotide
  Antisense strand to SEQ ID NO: 2128134
uauugcaauguauacucau

SEQ ID NO: 2128136 - RNA, 19 nt, Artificial Sequence
  Description of Artificial Sequence: Synthetic oligonucleotide
  Sense strand starting at position 107 of SEQ ID NO: 1882528
ucccgaacagcugguauua

SEQ ID NO: 2128137 - RNA, 19 nt, Artificial Sequence
  Description of Artificial Sequence: Synthetic oligonucleotide
  Antisense strand to SEQ ID NO: 2128136
uaauaccagcuguucggga

SEQ ID NO: 2128138 - RNA, 19 nt, Artificial Sequence
  Description of Artificial Sequence: Synthetic oligonucleotide
  Sense strand starting at position 523 of SEQ ID NO: 1882528
gacgaauauauuggguaga

SEQ ID NO: 2128139 - RNA, 19 nt, Artificial Sequence
  Description of Artificial Sequence: Synthetic oligonucleotide
  Antisense strand to SEQ ID NO: 2128138
ucuacccaauauauucguc

SEQ ID NO: 2128140 - RNA, 19 nt, Artificial Sequence
  Description of Artificial Sequence: Synthetic oligonucleotide
  Sense strand starting at position 525 of SEQ ID NO: 1882528
cgaauauauuggguagaaa

SEQ ID NO: 2128141 - RNA, 19 nt, Artificial Sequence
  Description of Artificial Sequence: Synthetic oligonucleotide
  Antisense strand to SEQ ID NO: 2128140
uuucuacccaauauauucg

SEQ ID NO: 2128142 - RNA, 19 nt, Artificial Sequence
  Description of Artificial Sequence: Synthetic oligonucleotide
  Sense strand starting at position 636 of SEQ ID NO: 1882528
auggucuuacccgagauau

SEQ ID NO: 2128143 - RNA, 19 nt, Artificial Sequence
  Description of Artificial Sequence: Synthetic oligonucleotide
  Antisense strand to SEQ ID NO: 2128142
auaucucggguaagaccau

SEQ ID NO: 2128144 - RNA, 19 nt, Artificial Sequence
  Description of Artificial Sequence: Synthetic oligonucleotide
  Sense strand starting at position 638 of SEQ ID NO: 1882528
ggucuuacccgagauauag

SEQ ID NO: 2128145 - RNA, 19 nt, Artificial Sequence
  Description of Artificial Sequence: Synthetic oligonucleotide
  Antisense strand to SEQ ID NO: 2128144
cuauaucucggguaagacc

SEQ ID NO: 2128146 - RNA, 19 nt, Artificial Sequence
  Description of Artificial Sequence: Synthetic oligonucleotide
  Sense strand starting at position 646 of SEQ ID NO: 1882528
ccgagauauagccagauuc

SEQ ID NO: 2128147 - RNA, 19 nt, Artificial Sequence
  Description of Artificial Sequence: Synthetic oligonucleotide
  Antisense strand to SEQ ID NO: 2128146
gaaucuggcuauaucucgg

SEQ ID NO: 2128148 - RNA, 19 nt, Artificial Sequence
  Description of Artificial Sequence: Synthetic oligonucleotide
  Sense strand starting at position 681 of SEQ ID NO: 1882528
aguguuagguguucuaaug

SEQ ID NO: 2128149 - RNA, 19 nt, Artificial Sequence
  Description of Artificial Sequence: Synthetic oligonucleotide
  Antisense strand to SEQ ID NO: 2128148
cauuagaacaccuaacacu

SEQ ID NO: 2128150 - RNA, 19 nt, Artificial Sequence
  Description of Artificial Sequence: Synthetic oligonucleotide
  Sense strand starting at position 728 of SEQ ID NO: 1882528
agccaagagcugugcugaa

SEQ ID NO: 2128151 - RNA, 19 nt, Artificial Sequence
  Description of Artificial Sequence: Synthetic oligonucleotide
  Antisense strand to SEQ ID NO: 2128150
uucagcacagcucuuggcu

SEQ ID NO: 2128152 - RNA, 19 nt, Artificial Sequence
  Description of Artificial Sequence: Synthetic oligonucleotide
  Sense strand starting at position 732 of SEQ ID NO: 1882528
aagagcugugcugaauaga

SEQ ID NO: 2128153 - RNA, 19 nt, Artificial Sequence
  Description of Artificial Sequence: Synthetic oligonucleotide
  Antisense strand to SEQ ID NO: 2128152
ucuauucagcacagcucuu

SEQ ID NO: 2128154 - RNA, 19 nt, Artificial Sequence
  Description of Artificial Sequence: Synthetic oligonucleotide
  Sense strand starting at position 735 of SEQ ID NO: 1882528
agcugugcugaauagaauu

SEQ ID NO: 2128155 - RNA, 19 nt, Artificial Sequence
  Description of Artificial Sequence: Synthetic oligonucleotide
  Antisense strand to SEQ ID NO: 2128154
aauucuauucagcacagcu

SEQ ID NO: 2128156 - RNA, 19 nt, Artificial Sequence
  Description of Artificial Sequence: Synthetic oligonucleotide
  Sense strand starting at position 764 of SEQ ID NO: 1882528
ugcagaagagggugucaua

SEQ ID NO: 2128157 - RNA, 19 nt, Artificial Sequence
  Description of Artificial Sequence: Synthetic oligonucleotide
  Antisense strand to SEQ ID NO: 2128156
uaugacacccucuucugca

SEQ ID NO: 2128158 - RNA, 19 nt, Artificial Sequence
  Description of Artificial Sequence: Synthetic oligonucleotide
  Sense strand starting at position 767 of SEQ ID NO: 1882528
agaagagggugucauauuu

SEQ ID NO: 2128159 - RNA, 19 nt, Artificial Sequence
  Description of Artificial Sequence: Synthetic oligonucleotide
  Antisense strand to SEQ ID NO: 2128158
aaauaugacacccucuucu

SEQ ID NO: 2128160 - RNA, 19 nt, Artificial Sequence
  Description of Artificial Sequence: Synthetic oligonucleotide
  Sense strand starting at position 856 of SEQ ID NO: 1882528
gggccagaccucuggaaga

SEQ ID NO: 2128161 - RNA, 19 nt, Artificial Sequence
  Description of Artificial Sequence: Synthetic oligonucleotide
  Antisense strand to SEQ ID NO: 2128160
ucuuccagaggucuggccc

SEQ ID NO: 2128162 - RNA, 19 nt, Artificial Sequence
  Description of Artificial Sequence: Synthetic oligonucleotide
  Sense strand starting at position 886 of SEQ ID NO: 1882528
uguugauuacagggcaaga

SEQ ID NO: 2128163 - RNA, 19 nt, Artificial Sequence
  Description of Artificial Sequence: Synthetic oligonucleotide
  Antisense strand to SEQ ID NO: 2128162
ucuugcccuguaaucaaca

SEQ ID NO: 2128164 - RNA, 19 nt, Artificial Sequence
  Description of Artificial Sequence: Synthetic oligonucleotide
  Sense strand starting at position 1032 of SEQ ID NO: 1882528
ugcauugauuuguacauga

SEQ ID NO: 2128165 - RNA, 19 nt, Artificial Sequence
  Description of Artificial Sequence: Synthetic oligonucleotide
  Antisense strand to SEQ ID NO: 2128164
ucauguacaaaucaaugca

SEQ ID NO: 2128166 - RNA, 19 nt, Artificial Sequence
  Description of Artificial Sequence: Synthetic oligonucleotide
  Sense strand starting at position 1372 of SEQ ID NO: 1882528
uuauguggccauuauuauu

SEQ ID NO: 2128167 - RNA, 19 nt, Artificial Sequence
  Description of Artificial Sequence: Synthetic oligonucleotide
  Antisense strand to SEQ ID NO: 2128166
aauaauaauggccacauaa

SEQ ID NO: 2128168 - RNA, 19 nt, Artificial Sequence
  Description of Artificial Sequence: Synthetic oligonucleotide
  Sense strand starting at position 1445 of SEQ ID NO: 1882528
cagagaagcuucccaguua

SEQ ID NO: 2128169 - RNA, 19 nt, Artificial Sequence
  Description of Artificial Sequence: Synthetic oligonucleotide
  Antisense strand to SEQ ID NO: 2128168
uaacugggaagcuucucug

SEQ ID NO: 2128170 - RNA, 19 nt, Artificial Sequence
  Description of Artificial Sequence: Synthetic oligonucleotide
  Sense strand starting at position 1457 of SEQ ID NO: 1882528
ccaguuaggaggugaagaa

SEQ ID NO: 2128171 - RNA, 19 nt, Artificial Sequence
  Description of Artificial Sequence: Synthetic oligonucleotide
  Antisense strand to SEQ ID NO: 2128170
uucuucaccuccuaacugg

SEQ ID NO: 2128172 - RNA, 19 nt, Artificial Sequence
  Description of Artificial Sequence: Synthetic oligonucleotide
  Sense strand starting at position 1709 of SEQ ID NO: 1882528
gugaguagagaucacgcua

SEQ ID NO: 2128173 - RNA, 19 nt, Artificial Sequence
  Description of Artificial Sequence: Synthetic oligonucleotide
  Antisense strand to SEQ ID NO: 2128172
uagcgugaucucuacucac

SEQ ID NO: 2128174 - RNA, 19 nt, Artificial Sequence
  Description of Artificial Sequence: Synthetic oligonucleotide
  Sense strand starting at position 2033 of SEQ ID NO: 1882528
uguacuuccucaucccaga

SEQ ID NO: 2128175 - RNA, 19 nt, Artificial Sequence
  Description of Artificial Sequence: Synthetic oligonucleotide
  Antisense strand to SEQ ID NO: 2128174
ucugggaugaggaaguaca

SEQ ID NO: 2128176 - RNA, 19 nt, Artificial Sequence
  Description of Artificial Sequence: Synthetic oligonucleotide
  Sense strand starting at position 2076 of SEQ ID NO: 1882528
ggugucauccaagacgaca

SEQ ID NO: 2128177 - RNA, 19 nt, Artificial Sequence
  Description of Artificial Sequence: Synthetic oligonucleotide
  Antisense strand to SEQ ID NO: 2128176
ugucgucuuggaugacacc

SEQ ID NO: 2128178 - RNA, 19 nt, Artificial Sequence
  Description of Artificial Sequence: Synthetic oligonucleotide
  Sense strand starting at position 2143 of SEQ ID NO: 1882528
cuacccucuccuugaguca

SEQ ID NO: 2128179 - RNA, 19 nt, Artificial Sequence
  Description of Artificial Sequence: Synthetic oligonucleotide
  Antisense strand to SEQ ID NO: 2128178
ugacucaaggagaggguag

SEQ ID NO: 2128180 - RNA, 19 nt, Artificial Sequence
  Description of Artificial Sequence: Synthetic oligonucleotide
  Sense strand starting at position 2193 of SEQ ID NO: 1882528
gacggagucucauuuguuu

SEQ ID NO: 2128181 - RNA, 19 nt, Artificial Sequence
  Description of Artificial Sequence: Synthetic oligonucleotide
  Antisense strand to SEQ ID NO: 2128180
aaacaaaugagacuccguc

SEQ ID NO: 2128182 - RNA, 19 nt, Artificial Sequence
  Description of Artificial Sequence: Synthetic oligonucleotide
  Sense strand starting at position 2513 of SEQ ID NO: 1882528
ggaugcauuuagcaagcaa

SEQ ID NO: 2128183 - RNA, 19 nt, Artificial Sequence
  Description of Artificial Sequence: Synthetic oligonucleotide
  Antisense strand to SEQ ID NO: 2128182
uugcuugcuaaaugcaucc

SEQ ID NO: 2128184 - RNA, 19 nt, Artificial Sequence
  Description of Artificial Sequence: Synthetic oligonucleotide
  Sense strand starting at position 2549 of SEQ ID NO: 1882528
ggcacagugcuaggaauua

SEQ ID NO: 2128185 - RNA, 19 nt, Artificial Sequence
  Description of Artificial Sequence: Synthetic oligonucleotide
  Antisense strand to SEQ ID NO: 2128184
uaauuccuagcacugugcc

SEQ ID NO: 2128186 - RNA, 19 nt, Artificial Sequence
  Description of Artificial Sequence: Synthetic oligonucleotide
  Sense strand starting at position 2660 of SEQ ID NO: 1882528
ugaugaaagucucaaggaa

SEQ ID NO: 2128187 - RNA, 19 nt, Artificial Sequence
  Description of Artificial Sequence: Synthetic oligonucleotide
  Antisense strand to SEQ ID NO: 2128186
uuccuugagacuuucauca

SEQ ID NO: 2128188 - RNA, 19 nt, Artificial Sequence
  Description of Artificial Sequence: Synthetic oligonucleotide
  Sense strand starting at position 2884 of SEQ ID NO: 1882528
uuagauuuaucuugagaga

SEQ ID NO: 2128189 - RNA, 19 nt, Artificial Sequence
  Description of Artificial Sequence: Synthetic oligonucleotide
  Antisense strand to SEQ ID NO: 2128188
ucucucaagauaaaucuaa

SEQ ID NO: 2128190 - RNA, 19 nt, Artificial Sequence
  Description of Artificial Sequence: Synthetic oligonucleotide
  Sense strand starting at position 2951 of SEQ ID NO: 1882528
ggaggacaugauuggucuu

SEQ ID NO: 2128191 - RNA, 19 nt, Artificial Sequence
  Description of Artificial Sequence: Synthetic oligonucleotide
  Antisense strand to SEQ ID NO: 2128190
aagaccaaucauguccucc

SEQ ID NO: 2128192 - RNA, 19 nt, Artificial Sequence
  Description of Artificial Sequence: Synthetic oligonucleotide
  Sense strand starting at position 2993 of SEQ ID NO: 1882528
gcuguccgauuugugcaua

SEQ ID NO: 2128193 - RNA, 19 nt, Artificial Sequence
  Description of Artificial Sequence: Synthetic oligonucleotide
  Antisense strand to SEQ ID NO: 2128192
uaugcacaaaucggacagc

SEQ ID NO: 2128194 - RNA, 19 nt, Artificial Sequence
  Description of Artificial Sequence: Synthetic oligonucleotide
  Sense strand starting at position 3029 of SEQ ID NO: 1882528
ugagaagccagucaagcau

SEQ ID NO: 2128195 - RNA, 19 nt, Artificial Sequence
  Description of Artificial Sequence: Synthetic oligonucleotide
  Antisense strand to SEQ ID NO: 2128194
augcuugacuggcuucuca

SEQ ID NO: 2128196 - RNA, 19 nt, Artificial Sequence
  Description of Artificial Sequence: Synthetic oligonucleotide
  Sense strand starting at position 3165 of SEQ ID NO: 1882528
aucguaagaccuggcucua

SEQ ID NO: 2128197 - RNA, 19 nt, Artificial Sequence
  Description of Artificial Sequence: Synthetic oligonucleotide
  Antisense strand to SEQ ID NO: 2128196
uagagccaggucuuacgau

SEQ ID NO: 2128198 - RNA, 19 nt, Artificial Sequence
  Description of Artificial Sequence: Synthetic oligonucleotide
  Sense strand starting at position 3186 of SEQ ID NO: 1882528
ccuggaauauguuucugau

SEQ ID NO: 2128199 - RNA, 19 nt, Artificial Sequence
  Description of Artificial Sequence: Synthetic oligonucleotide
  Antisense strand to SEQ ID NO: 2128198
aucagaaacauauuccagg

SEQ ID NO: 2128200 - RNA, 19 nt, Artificial Sequence
  Description of Artificial Sequence: Synthetic oligonucleotide
  Sense strand starting at position 3188 of SEQ ID NO: 1882528
uggaauauguuucugaucu

SEQ ID NO: 2128201 - RNA, 19 nt, Artificial Sequence
  Description of Artificial Sequence: Synthetic oligonucleotide
  Antisense strand to SEQ ID NO: 2128200
agaucagaaacauauucca

SEQ ID NO: 2128202 - RNA, 19 nt, Artificial Sequence
  Description of Artificial Sequence: Synthetic oligonucleotide
  Sense strand starting at position 3192 of SEQ ID NO: 1882528
auauguuucugaucugaag

SEQ ID NO: 2128203 - RNA, 19 nt, Artificial Sequence
  Description of Artificial Sequence: Synthetic oligonucleotide
  Antisense strand to SEQ ID NO: 2128202
cuucagaucagaaacauau

SEQ ID NO: 2128204 - RNA, 19 nt, Artificial Sequence
  Description of Artificial Sequence: Synthetic oligonucleotide
  Sense strand starting at position 3238 of SEQ ID NO: 1882528
aguccuuggcaacaauuaa

SEQ ID NO: 2128205 - RNA, 19 nt, Artificial Sequence
  Description of Artificial Sequence: Synthetic oligonucleotide
  Antisense strand to SEQ ID NO: 2128204
uuaauuguugccaaggacu

SEQ ID NO: 2128206 - RNA, 19 nt, Artificial Sequence
  Description of Artificial Sequence: Synthetic oligonucleotide
  Sense strand starting at position 3301 of SEQ ID NO: 1882528
auguuaagaagugguuugu

SEQ ID NO: 2128207 - RNA, 19 nt, Artificial Sequence
  Description of Artificial Sequence: Synthetic oligonucleotide
  Antisense strand to SEQ ID NO: 2128206
acaaaccacuucuuaacau

SEQ ID NO: 2128208 - RNA, 19 nt, Artificial Sequence
  Description of Artificial Sequence: Synthetic oligonucleotide
  Sense strand starting at position 3305 of SEQ ID NO: 1882528
uaagaagugguuugucuuc

SEQ ID NO: 2128209 - RNA, 19 nt, Artificial Sequence
  Description of Artificial Sequence: Synthetic oligonucleotide
  Antisense strand to SEQ ID NO: 2128208
gaagacaaaccacuucuua

SEQ ID NO: 2128210 - RNA, 19 nt, Artificial Sequence
  Description of Artificial Sequence: Synthetic oligonucleotide
  Sense strand starting at position 3311 of SEQ ID NO: 1882528
gugguuugucuucacugua

SEQ ID NO: 2128211 - RNA, 19 nt, Artificial Sequence
  Description of Artificial Sequence: Synthetic oligonucleotide
  Antisense strand to SEQ ID NO: 2128210
uacagugaagacaaaccac

SEQ ID NO: 2128212 - RNA, 19 nt, Artificial Sequence
  Description of Artificial Sequence: Synthetic oligonucleotide
  Sense strand starting at position 3529 of SEQ ID NO: 1882528
guuugaaguccuugguuua

SEQ ID NO: 2128213 - RNA, 19 nt, Artificial Sequence
  Description of Artificial Sequence: Synthetic oligonucleotide
  Antisense strand to SEQ ID NO: 2128212
uaaaccaaggacuucaaac

SEQ ID NO: 2128214 - RNA, 19 nt, Artificial Sequence
  Description of Artificial Sequence: Synthetic oligonucleotide
  Sense strand starting at position 3530 of SEQ ID NO: 1882528
uuugaaguccuugguuuaa

SEQ ID NO: 2128215 - RNA, 19 nt, Artificial Sequence
  Description of Artificial Sequence: Synthetic oligonucleotide
  Antisense strand to SEQ ID NO: 2128214
uuaaaccaaggacuucaaa

SEQ ID NO: 2128216 - RNA, 19 nt, Artificial Sequence
  Description of Artificial Sequence: Synthetic oligonucleotide
  Sense strand starting at position 481 of SEQ ID NO: 1882529
augcucuccugucugauuu

SEQ ID NO: 2128217 - RNA, 19 nt, Artificial Sequence
  Description of Artificial Sequence: Synthetic oligonucleotide
  Antisense strand to SEQ ID NO: 2128216
aaaucagacaggagagcau

SEQ ID NO: 2128218 - RNA, 19 nt, Artificial Sequence
  Description of Artificial Sequence: Synthetic oligonucleotide
  Sense strand starting at position 482 of SEQ ID NO: 1882529
ugcucuccugucugauuua

SEQ ID NO: 2128219 - RNA, 19 nt, Artificial Sequence
  Description of Artificial Sequence: Synthetic oligonucleotide
  Antisense strand to SEQ ID NO: 2128218
uaaaucagacaggagagca

SEQ ID NO: 2128220 - RNA, 19 nt, Artificial Sequence
  Description of Artificial Sequence: Synthetic oligonucleotide
  Sense strand starting at position 652 of SEQ ID NO: 1882529
uacugcugucuugagggaa

SEQ ID NO: 2128221 - RNA, 19 nt, Artificial Sequence
  Description of Artificial Sequence: Synthetic oligonucleotide
  Antisense strand to SEQ ID NO: 2128220
uucccucaagacagcagua

SEQ ID NO: 2128222 - RNA, 19 nt, Artificial Sequence
  Description of Artificial Sequence: Synthetic oligonucleotide
  Sense strand starting at position 655 of SEQ ID NO: 1882529
ugcugucuugagggaagaa

SEQ ID NO: 2128223 - RNA, 19 nt, Artificial Sequence
  Description of Artificial Sequence: Synthetic oligonucleotide
  Antisense strand to SEQ ID NO: 2128222
uucuucccucaagacagca

SEQ ID NO: 2128224 - RNA, 19 nt, Artificial Sequence
  Description of Artificial Sequence: Synthetic oligonucleotide
  Sense strand starting at position 656 of SEQ ID NO: 1882529
gcugucuugagggaagaau

SEQ ID NO: 2128225 - RNA, 19 nt, Artificial Sequence
  Description of Artificial Sequence: Synthetic oligonucleotide
  Antisense strand to SEQ ID NO: 2128224
auucuucccucaagacagc

SEQ ID NO: 2128226 - RNA, 19 nt, Artificial Sequence
  Description of Artificial Sequence: Synthetic oligonucleotide
  Sense strand starting at position 671 of SEQ ID NO: 1882529
gaauuaucagcccaaggua

SEQ ID NO: 2128227 - RNA, 19 nt, Artificial Sequence
  Description of Artificial Sequence: Synthetic oligonucleotide
  Antisense strand to SEQ ID NO: 2128226
uaccuugggcugauaauuc

SEQ ID NO: 2128228 - RNA, 19 nt, Artificial Sequence
  Description of Artificial Sequence: Synthetic oligonucleotide
  Sense strand starting at position 687 of SEQ ID NO: 1882529
guaagauuccuuggagaca

SEQ ID NO: 2128229 - RNA, 19 nt, Artificial Sequence
  Description of Artificial Sequence: Synthetic oligonucleotide
  Antisense strand to SEQ ID NO: 2128228
ugucuccaaggaaucuuac

SEQ ID NO: 2128230 - RNA, 19 nt, Artificial Sequence
  Description of Artificial Sequence: Synthetic oligonucleotide
  Sense strand starting at position 733 of SEQ ID NO: 1882529
gcugcucucguggagaaag

SEQ ID NO: 2128231 - RNA, 19 nt, Artificial Sequence
  Description of Artificial Sequence: Synthetic oligonucleotide
  Antisense strand to SEQ ID NO: 2128230
cuuucuccacgagagcagc

SEQ ID NO: 2128232 - RNA, 19 nt, Artificial Sequence
  Description of Artificial Sequence: Synthetic oligonucleotide
  Sense strand starting at position 741 of SEQ ID NO: 1882529
cguggagaaagguguucau

SEQ ID NO: 2128233 - RNA, 19 nt, Artificial Sequence
  Description of Artificial Sequence: Synthetic oligonucleotide
  Antisense strand to SEQ ID NO: 2128232
augaacaccuuucuccacg

SEQ ID NO: 2128234 - RNA, 19 nt, Artificial Sequence
  Description of Artificial Sequence: Synthetic oligonucleotide
  Sense strand starting at position 744 of SEQ ID NO: 1882529
ggagaaagguguucauuau

SEQ ID NO: 2128235 - RNA, 19 nt, Artificial Sequence
  Description of Artificial Sequence: Synthetic oligonucleotide
  Antisense strand to SEQ ID NO: 2128234
auaaugaacaccuuucucc

SEQ ID NO: 2128236 - RNA, 19 nt, Artificial Sequence
  Description of Artificial Sequence: Synthetic oligonucleotide
  Sense strand starting at position 1298 of SEQ ID NO: 1882529
gucaaucuguguuuggaca

SEQ ID NO: 2128237 - RNA, 19 nt, Artificial Sequence
  Description of Artificial Sequence: Synthetic oligonucleotide
  Antisense strand to SEQ ID NO: 2128236
uguccaaacacagauugac

SEQ ID NO: 2128238 - RNA, 19 nt, Artificial Sequence
  Description of Artificial Sequence: Synthetic oligonucleotide
  Sense strand starting at position 1299 of SEQ ID NO: 1882529
ucaaucuguguuuggacaa

SEQ ID NO: 2128239 - RNA, 19 nt, Artificial Sequence
  Description of Artificial Sequence: Synthetic oligonucleotide
  Antisense strand to SEQ ID NO: 2128238
uuguccaaacacagauuga

SEQ ID NO: 2128240 - RNA, 19 nt, Artificial Sequence
  Description of Artificial Sequence: Synthetic oligonucleotide
  Sense strand starting at position 1404 of SEQ ID NO: 1882529
uuggaaggcucagcugaaa

SEQ ID NO: 2128241 - RNA, 19 nt, Artificial Sequence
  Description of Artificial Sequence: Synthetic oligonucleotide
  Antisense strand to SEQ ID NO: 2128240
uuucagcugagccuuccaa

SEQ ID NO: 2128242 - RNA, 19 nt, Artificial Sequence
  Description of Artificial Sequence: Synthetic oligonucleotide
  Sense strand starting at position 1586 of SEQ ID NO: 1882529
ucguccucagucuagaaca

SEQ ID NO: 2128243 - RNA, 19 nt, Artificial Sequence
  Description of Artificial Sequence: Synthetic oligonucleotide
  Antisense strand to SEQ ID NO: 2128242
uguucuagacugaggacga

SEQ ID NO: 2128244 - RNA, 19 nt, Artificial Sequence
  Description of Artificial Sequence: Synthetic oligonucleotide
  Sense strand starting at position 1754 of SEQ ID NO: 1882529
uuucgaaauauucgaugua

SEQ ID NO: 2128245 - RNA, 19 nt, Artificial Sequence
  Description of Artificial Sequence: Synthetic oligonucleotide
  Antisense strand to SEQ ID NO: 2128244
uacaucgaauauuucgaaa

SEQ ID NO: 2128246 - RNA, 19 nt, Artificial Sequence
  Description of Artificial Sequence: Synthetic oligonucleotide
  Sense strand starting at position 1757 of SEQ ID NO: 1882529
cgaaauauucgauguaauu

SEQ ID NO: 2128247 - RNA, 19 nt, Artificial Sequence
  Description of Artificial Sequence: Synthetic oligonucleotide
  Antisense strand to SEQ ID NO: 2128246
aauuacaucgaauauuucg

SEQ ID NO: 2128248 - RNA, 19 nt, Artificial Sequence
  Description of Artificial Sequence: Synthetic oligonucleotide
  Sense strand starting at position 1779 of SEQ ID NO: 1882529
gucuuuacauuugagacuu

SEQ ID NO: 2128249 - RNA, 19 nt, Artificial Sequence
  Description of Artificial Sequence: Synthetic oligonucleotide
  Antisense strand to SEQ ID NO: 2128248
aagucucaaauguaaagac

SEQ ID NO: 2128250 - RNA, 19 nt, Artificial Sequence
  Description of Artificial Sequence: Synthetic oligonucleotide
  Sense strand starting at position 1888 of SEQ ID NO: 1882529
augacuuacguauaaucuu

SEQ ID NO: 2128251 - RNA, 19 nt, Artificial Sequence
  Description of Artificial Sequence: Synthetic oligonucleotide
  Antisense strand to SEQ ID NO: 2128250
aagauuauacguaagucau

SEQ ID NO: 2128252 - RNA, 19 nt, Artificial Sequence
  Description of Artificial Sequence: Synthetic oligonucleotide
  Sense strand starting at position 1921 of SEQ ID NO: 1882529
gaaguaagaugucuguauu

SEQ ID NO: 2128253 - RNA, 19 nt, Artificial Sequence
  Description of Artificial Sequence: Synthetic oligonucleotide
  Antisense strand to SEQ ID NO: 2128252
aauacagacaucuuacuuc

SEQ ID NO: 2128254 - RNA, 19 nt, Artificial Sequence
  Description of Artificial Sequence: Synthetic oligonucleotide
  Sense strand starting at position 1922 of SEQ ID NO: 1882529
aaguaagaugucuguauua

SEQ ID NO: 2128255 - RNA, 19 nt, Artificial Sequence
  Description of Artificial Sequence: Synthetic oligonucleotide
  Antisense strand to SEQ ID NO: 2128254
uaauacagacaucuuacuu

SEQ ID NO: 2128256 - RNA, 19 nt, Artificial Sequence
  Description of Artificial Sequence: Synthetic oligonucleotide
  Sense strand starting at position 1924 of SEQ ID NO: 1882529
guaagaugucuguauuagc

SEQ ID NO: 2128257 - RNA, 19 nt, Artificial Sequence
  Description of Artificial Sequence: Synthetic oligonucleotide
  Antisense strand to SEQ ID NO: 2128256
gcuaauacagacaucuuac

SEQ ID NO: 2128258 - RNA, 19 nt, Artificial Sequence
  Description of Artificial Sequence: Synthetic oligonucleotide
  Sense strand starting at position 2065 of SEQ ID NO: 1882529
auucuagaaccagagcuuu

SEQ ID NO: 2128259 - RNA, 19 nt, Artificial Sequence
  Description of Artificial Sequence: Synthetic oligonucleotide
  Antisense strand to SEQ ID NO: 2128258
aaagcucugguucuagaau

SEQ ID NO: 2128260 - RNA, 19 nt, Artificial Sequence
  Description of Artificial Sequence: Synthetic oligonucleotide
  Sense strand starting at position 2232 of SEQ ID NO: 1882529
uaugucauaugaguaggau

SEQ ID NO: 2128261 - RNA, 19 nt, Artificial Sequence
  Description of Artificial Sequence: Synthetic oligonucleotide
  Antisense strand to SEQ ID NO: 2128260
auccuacucauaugacaua

SEQ ID NO: 2128262 - RNA, 19 nt, Artificial Sequence
  Description of Artificial Sequence: Synthetic oligonucleotide
  Sense strand starting at position 2323 of SEQ ID NO: 1882529
auuccugaacugugacaau

SEQ ID NO: 2128263 - RNA, 19 nt, Artificial Sequence
  Description of Artificial Sequence: Synthetic oligonucleotide
  Antisense strand to SEQ ID NO: 2128262
auugucacaguucaggaau

SEQ ID NO: 2128264 - RNA, 19 nt, Artificial Sequence
  Description of Artificial Sequence: Synthetic oligonucleotide
  Sense strand starting at position 2353 of SEQ ID NO: 1882529
ucuaauauuauguggugga

SEQ ID NO: 2128265 - RNA, 19 nt, Artificial Sequence
  Description of Artificial Sequence: Synthetic oligonucleotide
  Antisense strand to SEQ ID NO: 2128264
uccaccacauaauauuaga

SEQ ID NO: 2128266 - RNA, 19 nt, Artificial Sequence
  Description of Artificial Sequence: Synthetic oligonucleotide
  Sense strand starting at position 2357 of SEQ ID NO: 1882529
auauuaugugguggaucuu

SEQ ID NO: 2128267 - RNA, 19 nt, Artificial Sequence
  Description of Artificial Sequence: Synthetic oligonucleotide
  Antisense strand to SEQ ID NO: 2128266
aagauccaccacauaauau

SEQ ID NO: 2128268 - RNA, 19 nt, Artificial Sequence
  Description of Artificial Sequence: Synthetic oligonucleotide
  Sense strand starting at position 2367 of SEQ ID NO: 1882529
guggaucuuuguuugugga

SEQ ID NO: 2128269 - RNA, 19 nt, Artificial Sequence
  Description of Artificial Sequence: Synthetic oligonucleotide
  Antisense strand to SEQ ID NO: 2128268
uccacaaacaaagauccac

SEQ ID NO: 2128270 - RNA, 19 nt, Artificial Sequence
  Description of Artificial Sequence: Synthetic oligonucleotide
  Sense strand starting at position 2369 of SEQ ID NO: 1882529
ggaucuuuguuuguggaga

SEQ ID NO: 2128271 - RNA, 19 nt, Artificial Sequence
  Description of Artificial Sequence: Synthetic oligonucleotide
  Antisense strand to SEQ ID NO: 2128270
ucuccacaaacaaagaucc

SEQ ID NO: 2128272 - RNA, 19 nt, Artificial Sequence
  Description of Artificial Sequence: Synthetic oligonucleotide
  Sense strand starting at position 2551 of SEQ ID NO: 1882529
ggccacauagcugacaaau

SEQ ID NO: 2128273 - RNA, 19 nt, Artificial Sequence
  Description of Artificial Sequence: Synthetic oligonucleotide
  Antisense strand to SEQ ID NO: 2128272
auuugucagcuauguggcc

SEQ ID NO: 2128274 - RNA, 19 nt, Artificial Sequence
  Description of Artificial Sequence: Synthetic oligonucleotide
  Sense strand starting at position 2608 of SEQ ID NO: 1882529
cgaauaaugcuuuauucug

SEQ ID NO: 2128275 - RNA, 19 nt, Artificial Sequence
  Description of Artificial Sequence: Synthetic oligonucleotide
  Antisense strand to SEQ ID NO: 2128274
cagaauaaagcauuauucg

SEQ ID NO: 2128276 - RNA, 19 nt, Artificial Sequence
  Description of Artificial Sequence: Synthetic oligonucleotide
  Sense strand starting at position 2704 of SEQ ID NO: 1882529
ccuucauugccggaggaag

SEQ ID NO: 2128277 - RNA, 19 nt, Artificial Sequence
  Description of Artificial Sequence: Synthetic oligonucleotide
  Antisense strand to SEQ ID NO: 2128276
cuuccuccggcaaugaagg

SEQ ID NO: 2128278 - RNA, 19 nt, Artificial Sequence
  Description of Artificial Sequence: Synthetic oligonucleotide
  Sense strand starting at position 2762 of SEQ ID NO: 1882529
ggugaaggcauguggaaau

SEQ ID NO: 2128279 - RNA, 19 nt, Artificial Sequence
  Description of Artificial Sequence: Synthetic oligonucleotide
  Antisense strand to SEQ ID NO: 2128278
auuuccacaugccuucacc

SEQ ID NO: 2128280 - RNA, 19 nt, Artificial Sequence
  Description of Artificial Sequence: Synthetic oligonucleotide
  Sense strand starting at position 2814 of SEQ ID NO: 1882529
cguaguucccacuaaagag

SEQ ID NO: 2128281 - RNA, 19 nt, Artificial Sequence
  Description of Artificial Sequence: Synthetic oligonucleotide
  Antisense strand to SEQ ID NO: 2128280
cucuuuagugggaacuacg

SEQ ID NO: 2128282 - RNA, 19 nt, Artificial Sequence
  Description of Artificial Sequence: Synthetic oligonucleotide
  Sense strand starting at position 2877 of SEQ ID NO: 1882529
ucuggaucccaauguuugu

SEQ ID NO: 2128283 - RNA, 19 nt, Artificial Sequence
  Description of Artificial Sequence: Synthetic oligonucleotide
  Antisense strand to SEQ ID NO: 2128282
acaaacauugggauccaga

SEQ ID NO: 2128284 - RNA, 19 nt, Artificial Sequence
  Description of Artificial Sequence: Synthetic oligonucleotide
  Sense strand starting at position 3068 of SEQ ID NO: 1882529
gugugagguggagaguaaa

SEQ ID NO: 2128285 - RNA, 19 nt, Artificial Sequence
  Description of Artificial Sequence: Synthetic oligonucleotide
  Antisense strand to SEQ ID NO: 2128284
uuuacucuccaccucacac

SEQ ID NO: 2128286 - RNA, 19 nt, Artificial Sequence
  Description of Artificial Sequence: Synthetic oligonucleotide
  Sense strand starting at position 3201 of SEQ ID NO: 1882529
acuuaauacugugcugaca

SEQ ID NO: 2128287 - RNA, 19 nt, Artificial Sequence
  Description of Artificial Sequence: Synthetic oligonucleotide
  Antisense strand to SEQ ID NO: 2128286
ugucagcacaguauuaagu

SEQ ID NO: 2128288 - RNA, 19 nt, Artificial Sequence
  Description of Artificial Sequence: Synthetic oligonucleotide
  Sense strand starting at position 3762 of SEQ ID NO: 1882529
auggaacccguuuguuuaa

SEQ ID NO: 2128289 - RNA, 19 nt, Artificial Sequence
  Description of Artificial Sequence: Synthetic oligonucleotide
  Antisense strand to SEQ ID NO: 2128288
uuaaacaaacggguuccau

SEQ ID NO: 2128290 - RNA, 19 nt, Artificial Sequence
  Description of Artificial Sequence: Synthetic oligonucleotide
  Sense strand starting at position 3836 of SEQ ID NO: 1882529
acaccugagaagugauguu

SEQ ID NO: 2128291 - RNA, 19 nt, Artificial Sequence
  Description of Artificial Sequence: Synthetic oligonucleotide
  Antisense strand to SEQ ID NO: 2128290
aacaucacuucucaggugu

SEQ ID NO: 2128292 - RNA, 19 nt, Artificial Sequence
  Description of Artificial Sequence: Synthetic oligonucleotide
  Sense strand starting at position 3843 of SEQ ID NO: 1882529
agaagugauguuggguguu

SEQ ID NO: 2128293 - RNA, 19 nt, Artificial Sequence
  Description of Artificial Sequence: Synthetic oligonucleotide
  Antisense strand to SEQ ID NO: 2128292
aacacccaacaucacuucu

SEQ ID NO: 2128294 - RNA, 19 nt, Artificial Sequence
  Description of Artificial Sequence: Synthetic oligonucleotide
  Sense strand starting at position 3982 of SEQ ID NO: 1882529
aaagauguguggcuccuuu

SEQ ID NO: 2128295 - RNA, 19 nt, Artificial Sequence
  Description of Artificial Sequence: Synthetic oligonucleotide
  Antisense strand to SEQ ID NO: 2128294
aaaggagccacacaucuuu

SEQ ID NO: 2128296 - RNA, 19 nt, Artificial Sequence
  Description of Artificial Sequence: Synthetic oligonucleotide
  Sense strand starting at position 313 of SEQ ID NO: 1882530
uuagccagucaugguugua

SEQ ID NO: 2128297 - RNA, 19 nt, Artificial Sequence
  Description of Artificial Sequence: Synthetic oligonucleotide
  Antisense strand to SEQ ID NO: 2128296
uacaaccaugacuggcuaa

SEQ ID NO: 2128298 - RNA, 19 nt, Artificial Sequence
  Description of Artificial Sequence: Synthetic oligonucleotide
  Sense strand starting at position 316 of SEQ ID NO: 1882530
gccagucaugguuguacau

SEQ ID NO: 2128299 - RNA, 19 nt, Artificial Sequence
  Description of Artificial Sequence: Synthetic oligonucleotide
  Antisense strand to SEQ ID NO: 2128298
auguacaaccaugacuggc

SEQ ID NO: 2128300 - RNA, 19 nt, Artificial Sequence
  Description of Artificial Sequence: Synthetic oligonucleotide
  Sense strand starting at position 549 of SEQ ID NO: 1882530
aacugaggucgagguuuga

SEQ ID NO: 2128301 - RNA, 19 nt, Artificial Sequence
  Description of Artificial Sequence: Synthetic oligonucleotide
  Antisense strand to SEQ ID NO: 2128300
ucaaaccucgaccucaguu

SEQ ID NO: 2128302 - RNA, 19 nt, Artificial Sequence
  Description of Artificial Sequence: Synthetic oligonucleotide
  Sense strand starting at position 627 of SEQ ID NO: 1882530
gcgagucaucgucugacgu

SEQ ID NO: 2128303 - RNA, 19 nt, Artificial Sequence
  Description of Artificial Sequence: Synthetic oligonucleotide
  Antisense strand to SEQ ID NO: 2128302
acgucagacgaugacucgc

SEQ ID NO: 2128304 - RNA, 19 nt, Artificial Sequence
  Description of Artificial Sequence: Synthetic oligonucleotide
  Sense strand starting at position 836 of SEQ ID NO: 1882530
caggcaagacucgaaacuu

SEQ ID NO: 2128305 - RNA, 19 nt, Artificial Sequence
  Description of Artificial Sequence: Synthetic oligonucleotide
  Antisense strand to SEQ ID NO: 2128304
aaguuucgagucuugccug

SEQ ID NO: 2128306 - RNA, 19 nt, Artificial Sequence
  Description of Artificial Sequence: Synthetic oligonucleotide
  Sense strand starting at position 1109 of SEQ ID NO: 1882530
uggcuaugucggugaagcu

SEQ ID NO: 2128307 - RNA, 19 nt, Artificial Sequence
  Description of Artificial Sequence: Synthetic oligonucleotide
  Antisense strand to SEQ ID NO: 2128306
agcuucaccgacauagcca

SEQ ID NO: 2128308 - RNA, 19 nt, Artificial Sequence
  Description of Artificial Sequence: Synthetic oligonucleotide
  Sense strand starting at position 1119 of SEQ ID NO: 1882530
ggugaagcucuauggaacu

SEQ ID NO: 2128309 - RNA, 19 nt, Artificial Sequence
  Description of Artificial Sequence: Synthetic oligonucleotide
  Antisense strand to SEQ ID NO: 2128308
aguuccauagagcuucacc

SEQ ID NO: 2128310 - RNA, 19 nt, Artificial Sequence
  Description of Artificial Sequence: Synthetic oligonucleotide
  Sense strand starting at position 1181 of SEQ ID NO: 1882530
ggcagaacuuggcaugaug

SEQ ID NO: 2128311 - RNA, 19 nt, Artificial Sequence
  Description of Artificial Sequence: Synthetic oligonucleotide
  Antisense strand to SEQ ID NO: 2128310
caucaugccaaguucugcc

SEQ ID NO: 2128312 - RNA, 19 nt, Artificial Sequence
  Description of Artificial Sequence: Synthetic oligonucleotide
  Sense strand starting at position 1183 of SEQ ID NO: 1882530
cagaacuuggcaugaugga

SEQ ID NO: 2128313 - RNA, 19 nt, Artificial Sequence
  Description of Artificial Sequence: Synthetic oligonucleotide
  Antisense strand to SEQ ID NO: 2128312
uccaucaugccaaguucug

SEQ ID NO: 2128314 - RNA, 19 nt, Artificial Sequence
  Description of Artificial Sequence: Synthetic oligonucleotide
  Sense strand starting at position 1267 of SEQ ID NO: 1882530
cuaguaguaaaccgaguuu

SEQ ID NO: 2128315 - RNA, 19 nt, Artificial Sequence
  Description of Artificial Sequence: Synthetic oligonucleotide
  Antisense strand to SEQ ID NO: 2128314
aaacucgguuuacuacuag

SEQ ID NO: 2128316 - RNA, 19 nt, Artificial Sequence
  Description of Artificial Sequence: Synthetic oligonucleotide
  Sense strand starting at position 1418 of SEQ ID NO: 1882530
cuuguuuguugggaaagga

SEQ ID NO: 2128317 - RNA, 19 nt, Artificial Sequence
  Description of Artificial Sequence: Synthetic oligonucleotide
  Antisense strand to SEQ ID NO: 2128316
uccuuucccaacaaacaag

SEQ ID NO: 2128318 - RNA, 19 nt, Artificial Sequence
  Description of Artificial Sequence: Synthetic oligonucleotide
  Sense strand starting at position 1534 of SEQ ID NO: 1882530
uugugucugcugcaaaucu

SEQ ID NO: 2128319 - RNA, 19 nt, Artificial Sequence
  Description of Artificial Sequence: Synthetic oligonucleotide
  Antisense strand to SEQ ID NO: 2128318
agauuugcagcagacacaa

SEQ ID NO: 2128320 - RNA, 19 nt, Artificial Sequence
  Description of Artificial Sequence: Synthetic oligonucleotide
  Sense strand starting at position 1708 of SEQ ID NO: 1882530
cucuguuacgugcacacau

SEQ ID NO: 2128321 - RNA, 19 nt, Artificial Sequence
  Description of Artificial Sequence: Synthetic oligonucleotide
  Antisense strand to SEQ ID NO: 2128320
augugugcacguaacagag

SEQ ID NO: 2128322 - RNA, 19 nt, Artificial Sequence
  Description of Artificial Sequence: Synthetic oligonucleotide
  Sense strand starting at position 1758 of SEQ ID NO: 1882530
cuuaacaggugucauagau

SEQ ID NO: 2128323 - RNA, 19 nt, Artificial Sequence
  Description of Artificial Sequence: Synthetic oligonucleotide
  Antisense strand to SEQ ID NO: 2128322
aucuaugacaccuguuaag

SEQ ID NO: 2128324 - RNA, 19 nt, Artificial Sequence
  Description of Artificial Sequence: Synthetic oligonucleotide
  Sense strand starting at position 1762 of SEQ ID NO: 1882530
acaggugucauagauguag

SEQ ID NO: 2128325 - RNA, 19 nt, Artificial Sequence
  Description of Artificial Sequence: Synthetic oligonucleotide
  Antisense strand to SEQ ID NO: 2128324
cuacaucuaugacaccugu

SEQ ID NO: 2128326 - RNA, 19 nt, Artificial Sequence
  Description of Artificial Sequence: Synthetic oligonucleotide
  Sense strand starting at position 1764 of SEQ ID NO: 1882530
aggugucauagauguagcu

SEQ ID NO: 2128327 - RNA, 19 nt, Artificial Sequence
  Description of Artificial Sequence: Synthetic oligonucleotide
  Antisense strand to SEQ ID NO: 2128326
agcuacaucuaugacaccu

SEQ ID NO: 2128328 - RNA, 19 nt, Artificial Sequence
  Description of Artificial Sequence: Synthetic oligonucleotide
  Sense strand starting at position 1766 of SEQ ID NO: 1882530
gugucauagauguagcuuu

SEQ ID NO: 2128329 - RNA, 19 nt, Artificial Sequence
  Description of Artificial Sequence: Synthetic oligonucleotide
  Antisense strand to SEQ ID NO: 2128328
aaagcuacaucuaugacac

SEQ ID NO: 2128330 - RNA, 19 nt, Artificial Sequence
  Description of Artificial Sequence: Synthetic oligonucleotide
  Sense strand starting at position 1951 of SEQ ID NO: 1882530
uauagaucugcgggagcau

SEQ ID NO: 2128331 - RNA, 19 nt, Artificial Sequence
  Description of Artificial Sequence: Synthetic oligonucleotide
  Antisense strand to SEQ ID NO: 2128330
augcucccgcagaucuaua

SEQ ID NO: 2128332 - RNA, 19 nt, Artificial Sequence
  Description of Artificial Sequence: Synthetic oligonucleotide
  Sense strand starting at position 2056 of SEQ ID NO: 1882530
gagguucccuaucuaugga

SEQ ID NO: 2128333 - RNA, 19 nt, Artificial Sequence
  Description of Artificial Sequence: Synthetic oligonucleotide
  Antisense strand to SEQ ID NO: 2128332
uccauagauagggaaccuc

SEQ ID NO: 2128334 - RNA, 19 nt, Artificial Sequence
  Description of Artificial Sequence: Synthetic oligonucleotide
  Sense strand starting at position 2916 of SEQ ID NO: 1882530
ggcugccucugcucaauaa

SEQ ID NO: 2128335 - RNA, 19 nt, Artificial Sequence
  Description of Artificial Sequence: Synthetic oligonucleotide
  Antisense strand to SEQ ID NO: 2128334
uuauugagcagaggcagcc

SEQ ID NO: 2128336 - RNA, 19 nt, Artificial Sequence
  Description of Artificial Sequence: Synthetic oligonucleotide
  Sense strand starting at position 2917 of SEQ ID NO: 1882530
gcugccucugcucaauaau

SEQ ID NO: 2128337 - RNA, 19 nt, Artificial Sequence
  Description of Artificial Sequence: Synthetic oligonucleotide
  Antisense strand to SEQ ID NO: 2128336
auuauugagcagaggcagc

SEQ ID NO: 2128338 - RNA, 19 nt, Artificial Sequence
  Description of Artificial Sequence: Synthetic oligonucleotide
  Sense strand starting at position 2920 of SEQ ID NO: 1882530
gccucugcucaauaauguu

SEQ ID NO: 2128339 - RNA, 19 nt, Artificial Sequence
  Description of Artificial Sequence: Synthetic oligonucleotide
  Antisense strand to SEQ ID NO: 2128338
aacauuauugagcagaggc

SEQ ID NO: 2128340 - RNA, 19 nt, Artificial Sequence
  Description of Artificial Sequence: Synthetic oligonucleotide
  Sense strand starting at position 2990 of SEQ ID NO: 1882530
gaaggugaauuccucugaa

SEQ ID NO: 2128341 - RNA, 19 nt, Artificial Sequence
  Description of Artificial Sequence: Synthetic oligonucleotide
  Antisense strand to SEQ ID NO: 2128340
uucagaggaauucaccuuc

SEQ ID NO: 2128342 - RNA, 19 nt, Artificial Sequence
  Description of Artificial Sequence: Synthetic oligonucleotide
  Sense strand starting at position 2993 of SEQ ID NO: 1882530
ggugaauuccucugaaagc

SEQ ID NO: 2128343 - RNA, 19 nt, Artificial Sequence
  Description of Artificial Sequence: Synthetic oligonucleotide
  Antisense strand to SEQ ID NO: 2128342
gcuuucagaggaauucacc

SEQ ID NO: 2128344 - RNA, 19 nt, Artificial Sequence
  Description of Artificial Sequence: Synthetic oligonucleotide
  Sense strand starting at position 2994 of SEQ ID NO: 1882530
gugaauuccucugaaagcu

SEQ ID NO: 2128345 - RNA, 19 nt, Artificial Sequence
  Description of Artificial Sequence: Synthetic oligonucleotide
  Antisense strand to SEQ ID NO: 2128344
agcuuucagaggaauucac

SEQ ID NO: 2128346 - RNA, 19 nt, Artificial Sequence
  Description of Artificial Sequence: Synthetic oligonucleotide
  Sense strand starting at position 3038 of SEQ ID NO: 1882530
gucucuuucugagaaaugg

SEQ ID NO: 2128347 - RNA, 19 nt, Artificial Sequence
  Description of Artificial Sequence: Synthetic oligonucleotide
  Antisense strand to SEQ ID NO: 2128346
ccauuucucagaaagagac

SEQ ID NO: 2128348 - RNA, 19 nt, Artificial Sequence
  Description of Artificial Sequence: Synthetic oligonucleotide
  Sense strand starting at position 3048 of SEQ ID NO: 1882530
gagaaauggugacauuguu

SEQ ID NO: 2128349 - RNA, 19 nt, Artificial Sequence
  Description of Artificial Sequence: Synthetic oligonucleotide
  Antisense strand to SEQ ID NO: 2128348
aacaaugucaccauuucuc

SEQ ID NO: 2128350 - RNA, 19 nt, Artificial Sequence
  Description of Artificial Sequence: Synthetic oligonucleotide
  Sense strand starting at position 3259 of SEQ ID NO: 1882530
gccugcuucccaggaacau

SEQ ID NO: 2128351 - RNA, 19 nt, Artificial Sequence
  Description of Artificial Sequence: Synthetic oligonucleotide
  Antisense strand to SEQ ID NO: 2128350
auguuccugggaagcaggc

SEQ ID NO: 2128352 - RNA, 19 nt, Artificial Sequence
  Description of Artificial Sequence: Synthetic oligonucleotide
  Sense strand starting at position 3444 of SEQ ID NO: 1882530
gguaaaccuuagccuguua

SEQ ID NO: 2128353 - RNA, 19 nt, Artificial Sequence
  Description of Artificial Sequence: Synthetic oligonucleotide
  Antisense strand to SEQ ID NO: 2128352
uaacaggcuaagguuuacc

SEQ ID NO: 2128354 - RNA, 19 nt, Artificial Sequence
  Description of Artificial Sequence: Synthetic oligonucleotide
  Sense strand starting at position 3470 of SEQ ID NO: 1882530
caggguaugugaucugcca

SEQ ID NO: 2128355 - RNA, 19 nt, Artificial Sequence
  Description of Artificial Sequence: Synthetic oligonucleotide
  Antisense strand to SEQ ID NO: 2128354
uggcagaucacauacccug

SEQ ID NO: 2128356 - RNA, 19 nt, Artificial Sequence
  Description of Artificial Sequence: Synthetic oligonucleotide
  Sense strand starting at position 3486 of SEQ ID NO: 1882530
ccagcagauccuugcgaca

SEQ ID NO: 2128357 - RNA, 19 nt, Artificial Sequence
  Description of Artificial Sequence: Synthetic oligonucleotide
  Antisense strand to SEQ ID NO: 2128356
ugucgcaaggaucugcugg

SEQ ID NO: 2128358 - RNA, 19 nt, Artificial Sequence
  Description of Artificial Sequence: Synthetic oligonucleotide
  Sense strand starting at position 3538 of SEQ ID NO: 1882530
gugugugcugggagucaga

SEQ ID NO: 2128359 - RNA, 19 nt, Artificial Sequence
  Description of Artificial Sequence: Synthetic oligonucleotide
  Antisense strand to SEQ ID NO: 2128358
ucugacucccagcacacac

SEQ ID NO: 2128360 - RNA, 19 nt, Artificial Sequence
  Description of Artificial Sequence: Synthetic oligonucleotide
  Sense strand starting at position 3615 of SEQ ID NO: 1882530
cuuagagugugucugggua

SEQ ID NO: 2128361 - RNA, 19 nt, Artificial Sequence
  Description of Artificial Sequence: Synthetic oligonucleotide
  Antisense strand to SEQ ID NO: 2128360
uacccagacacacucuaag

SEQ ID NO: 2128362 - RNA, 19 nt, Artificial Sequence
  Description of Artificial Sequence: Synthetic oligonucleotide
  Sense strand starting at position 3619 of SEQ ID NO: 1882530
gagugugucuggguacaca

SEQ ID NO: 2128363 - RNA, 19 nt, Artificial Sequence
  Description of Artificial Sequence: Synthetic oligonucleotide
  Antisense strand to SEQ ID NO: 2128362
uguguacccagacacacuc

SEQ ID NO: 2128364 - RNA, 19 nt, Artificial Sequence
  Description of Artificial Sequence: Synthetic oligonucleotide
  Sense strand starting at position 3639 of SEQ ID NO: 1882530
ucaagugcaugguugcaaa

SEQ ID NO: 2128365 - RNA, 19 nt, Artificial Sequence
  Description of Artificial Sequence: Synthetic oligonucleotide
  Antisense strand to SEQ ID NO: 2128364
uuugcaaccaugcacuuga

SEQ ID NO: 2128366 - RNA, 19 nt, Artificial Sequence
  Description of Artificial Sequence: Synthetic oligonucleotide
  Sense strand starting at position 3688 of SEQ ID NO: 1882530
gacacuuaguagguacuua

SEQ ID NO: 2128367 - RNA, 19 nt, Artificial Sequence
  Description of Artificial Sequence: Synthetic oligonucleotide
  Antisense strand to SEQ ID NO: 2128366
uaaguaccuacuaaguguc

SEQ ID NO: 2128368 - RNA, 19 nt, Artificial Sequence
  Description of Artificial Sequence: Synthetic oligonucleotide
  Sense strand starting at position 3692 of SEQ ID NO: 1882530
cuuaguagguacuuaagaa

SEQ ID NO: 2128369 - RNA, 19 nt, Artificial Sequence
  Description of Artificial Sequence: Synthetic oligonucleotide
  Antisense strand to SEQ ID NO: 2128368
uucuuaaguaccuacuaag

SEQ ID NO: 2128370 - RNA, 19 nt, Artificial Sequence
  Description of Artificial Sequence: Synthetic oligonucleotide
  Sense strand starting at position 3696 of SEQ ID NO: 1882530
guagguacuuaagaaauau

SEQ ID NO: 2128371 - RNA, 19 nt, Artificial Sequence
  Description of Artificial Sequence: Synthetic oligonucleotide
  Antisense strand to SEQ ID NO: 2128370
auauuucuuaaguaccuac

SEQ ID NO: 2128372 - RNA, 19 nt, Artificial Sequence
  Description of Artificial Sequence: Synthetic oligonucleotide
  Sense strand starting at position 3728 of SEQ ID NO: 1882530
gguggugagcuagaaguua

SEQ ID NO: 2128373 - RNA, 19 nt, Artificial Sequence
  Description of Artificial Sequence: Synthetic oligonucleotide
  Antisense strand to SEQ ID NO: 2128372
uaacuucuagcucaccacc

SEQ ID NO: 2128374 - RNA, 19 nt, Artificial Sequence
  Description of Artificial Sequence: Synthetic oligonucleotide
  Sense strand starting at position 3874 of SEQ ID NO: 1882530
acagacaaugucuagucua

SEQ ID NO: 2128375 - RNA, 19 nt, Artificial Sequence
  Description of Artificial Sequence: Synthetic oligonucleotide
  Antisense strand to SEQ ID NO: 2128374
uagacuagacauugucugu

SEQ ID NO: 2128376 - RNA, 19 nt, Artificial Sequence
  Description of Artificial Sequence: Synthetic oligonucleotide
  Sense strand starting at position 286 of SEQ ID NO: 1882531
agaggacuucgggagcauu

SEQ ID NO: 2128377 - RNA, 19 nt, Artificial Sequence
  Description of Artificial Sequence: Synthetic oligonucleotide
  Antisense strand to SEQ ID NO: 2128376
aaugcucccgaaguccucu

SEQ ID NO: 2128378 - RNA, 19 nt, Artificial Sequence
  Description of Artificial Sequence: Synthetic oligonucleotide
  Sense strand starting at position 570 of SEQ ID NO: 1882531
ggccaaagccugggaauga

SEQ ID NO: 2128379 - RNA, 19 nt, Artificial Sequence
  Description of Artificial Sequence: Synthetic oligonucleotide
  Antisense strand to SEQ ID NO: 2128378
ucauucccaggcuuuggcc

SEQ ID NO: 2128380 - RNA, 19 nt, Artificial Sequence
  Description of Artificial Sequence: Synthetic oligonucleotide
  Sense strand starting at position 938 of SEQ ID NO: 1882531
ccugcuuccuucuagcgaa

SEQ ID NO: 2128381 - RNA, 19 nt, Artificial Sequence
  Description of Artificial Sequence: Synthetic oligonucleotide
  Antisense strand to SEQ ID NO: 2128380
uucgcuagaaggaagcagg

SEQ ID NO: 2128382 - RNA, 19 nt, Artificial Sequence
  Description of Artificial Sequence: Synthetic oligonucleotide
  Sense strand starting at position 1475 of SEQ ID NO: 1882531
gaaccuaaguggucacaaa

SEQ ID NO: 2128383 - RNA, 19 nt, Artificial Sequence
  Description of Artificial Sequence: Synthetic oligonucleotide
  Antisense strand to SEQ ID NO: 2128382
uuugugaccacuuagguuc

SEQ ID NO: 2128384 - RNA, 19 nt, Artificial Sequence
  Description of Artificial Sequence: Synthetic oligonucleotide
  Sense strand starting at position 1484 of SEQ ID NO: 1882531
uggucacaaaguugaguau

SEQ ID NO: 2128385 - RNA, 19 nt, Artificial Sequence
  Description of Artificial Sequence: Synthetic oligonucleotide
  Antisense strand to SEQ ID NO: 2128384
auacucaacuuugugacca

SEQ ID NO: 2128386 - RNA, 19 nt, Artificial Sequence
  Description of Artificial Sequence: Synthetic oligonucleotide
  Sense strand starting at position 1485 of SEQ ID NO: 1882531
ggucacaaaguugaguaua

SEQ ID NO: 2128387 - RNA, 19 nt, Artificial Sequence
  Description of Artificial Sequence: Synthetic oligonucleotide
  Antisense strand to SEQ ID NO: 2128386
uauacucaacuuugugacc

SEQ ID NO: 2128388 - RNA, 19 nt, Artificial Sequence
  Description of Artificial Sequence: Synthetic oligonucleotide
  Sense strand starting at position 1487 of SEQ ID NO: 1882531
ucacaaaguugaguauaaa

SEQ ID NO: 2128389 - RNA, 19 nt, Artificial Sequence
  Description of Artificial Sequence: Synthetic oligonucleotide
  Antisense strand to SEQ ID NO: 2128388
uuuauacucaacuuuguga

SEQ ID NO: 2128390 - RNA, 19 nt, Artificial Sequence
  Description of Artificial Sequence: Synthetic oligonucleotide
  Sense strand starting at position 1514 of SEQ ID NO: 1882531
ggacaaguguggccagaaa

SEQ ID NO: 2128391 - RNA, 19 nt, Artificial Sequence
  Description of Artificial Sequence: Synthetic oligonucleotide
  Antisense strand to SEQ ID NO: 2128390
uuucuggccacacuugucc

SEQ ID NO: 2128392 - RNA, 19 nt, Artificial Sequence
  Description of Artificial Sequence: Synthetic oligonucleotide
  Sense strand starting at position 1877 of SEQ ID NO: 1882531
ggaagcagcucgcauuauu

SEQ ID NO: 2128393 - RNA, 19 nt, Artificial Sequence
  Description of Artificial Sequence: Synthetic oligonucleotide
  Antisense strand to SEQ ID NO: 2128392
aauaaugcgagcugcuucc

SEQ ID NO: 2128394 - RNA, 19 nt, Artificial Sequence
  Description of Artificial Sequence: Synthetic oligonucleotide
  Sense strand starting at position 1880 of SEQ ID NO: 1882531
agcagcucgcauuauuaga

SEQ ID NO: 2128395 - RNA, 19 nt, Artificial Sequence
  Description of Artificial Sequence: Synthetic oligonucleotide
  Antisense strand to SEQ ID NO: 2128394
ucuaauaaugcgagcugcu

SEQ ID NO: 2128396 - RNA, 19 nt, Artificial Sequence
  Description of Artificial Sequence: Synthetic oligonucleotide
  Sense strand starting at position 1888 of SEQ ID NO: 1882531
gcauuauuagaagguccau

SEQ ID NO: 2128397 - RNA, 19 nt, Artificial Sequence
  Description of Artificial Sequence: Synthetic oligonucleotide
  Antisense strand to SEQ ID NO: 2128396
auggaccuucuaauaaugc

SEQ ID NO: 2128398 - RNA, 19 nt, Artificial Sequence
  Description of Artificial Sequence: Synthetic oligonucleotide
  Sense strand starting at position 3333 of SEQ ID NO: 1882531
uccgguguuucggauucua

SEQ ID NO: 2128399 - RNA, 19 nt, Artificial Sequence
  Description of Artificial Sequence: Synthetic oligonucleotide
  Antisense strand to SEQ ID NO: 2128398
uagaauccgaaacaccgga

SEQ ID NO: 2128400 - RNA, 19 nt, Artificial Sequence
  Description of Artificial Sequence: Synthetic oligonucleotide
  Sense strand starting at position 3474 of SEQ ID NO: 1882531
gucagaguucccgggagag

SEQ ID NO: 2128401 - RNA, 19 nt, Artificial Sequence
  Description of Artificial Sequence: Synthetic oligonucleotide
  Antisense strand to SEQ ID NO: 2128400
cucucccgggaacucugac

SEQ ID NO: 2128402 - RNA, 19 nt, Artificial Sequence
  Description of Artificial Sequence: Synthetic oligonucleotide
  Sense strand starting at position 3504 of SEQ ID NO: 1882531
ggaccuuugguuggaguuu

SEQ ID NO: 2128403 - RNA, 19 nt, Artificial Sequence
  Description of Artificial Sequence: Synthetic oligonucleotide
  Antisense strand to SEQ ID NO: 2128402
aaacuccaaccaaaggucc

SEQ ID NO: 2128404 - RNA, 19 nt, Artificial Sequence
  Description of Artificial Sequence: Synthetic oligonucleotide
  Sense strand starting at position 3510 of SEQ ID NO: 1882531
uugguuggaguuuaaauca

SEQ ID NO: 2128405 - RNA, 19 nt, Artificial Sequence
  Description of Artificial Sequence: Synthetic oligonucleotide
  Antisense strand to SEQ ID NO: 2128404
ugauuuaaacuccaaccaa

SEQ ID NO: 2128406 - RNA, 19 nt, Artificial Sequence
  Description of Artificial Sequence: Synthetic oligonucleotide
  Sense strand starting at position 3522 of SEQ ID NO: 1882531
uaaaucaacucgcaguguu

SEQ ID NO: 2128407 - RNA, 19 nt, Artificial Sequence
  Description of Artificial Sequence: Synthetic oligonucleotide
  Antisense strand to SEQ ID NO: 2128406
aacacugcgaguugauuua

SEQ ID NO: 2128408 - RNA, 19 nt, Artificial Sequence
  Description of Artificial Sequence: Synthetic oligonucleotide
  Sense strand starting at position 3530 of SEQ ID NO: 1882531
cucgcaguguuucccauaa

SEQ ID NO: 2128409 - RNA, 19 nt, Artificial Sequence
  Description of Artificial Sequence: Synthetic oligonucleotide
  Antisense strand to SEQ ID NO: 2128408
uuaugggaaacacugcgag

SEQ ID NO: 2128410 - RNA, 19 nt, Artificial Sequence
  Description of Artificial Sequence: Synthetic oligonucleotide
  Sense strand starting at position 3532 of SEQ ID NO: 1882531
cgcaguguuucccauaaac

SEQ ID NO: 2128411 - RNA, 19 nt, Artificial Sequence
  Description of Artificial Sequence: Synthetic oligonucleotide
  Antisense strand to SEQ ID NO: 2128410
guuuaugggaaacacugcg

SEQ ID NO: 2128412 - RNA, 19 nt, Artificial Sequence
  Description of Artificial Sequence: Synthetic oligonucleotide
  Sense strand starting at position 3542 of SEQ ID NO: 1882531
cccauaaacuaggguuuga

SEQ ID NO: 2128413 - RNA, 19 nt, Artificial Sequence
  Description of Artificial Sequence: Synthetic oligonucleotide
  Antisense strand to SEQ ID NO: 2128412
ucaaacccuaguuuauggg

SEQ ID NO: 2128414 - RNA, 19 nt, Artificial Sequence
  Description of Artificial Sequence: Synthetic oligonucleotide
  Sense strand starting at position 3606 of SEQ ID NO: 1882531
acgaacuucgugugcacaa

SEQ ID NO: 2128415 - RNA, 19 nt, Artificial Sequence
  Description of Artificial Sequence: Synthetic oligonucleotide
  Antisense strand to SEQ ID NO: 2128414
uugugcacacgaaguucgu

SEQ ID NO: 2128416 - RNA, 19 nt, Artificial Sequence
  Description of Artificial Sequence: Synthetic oligonucleotide
  Sense strand starting at position 3684 of SEQ ID NO: 1882531
gcaagacugugcgaucauu

SEQ ID NO: 2128417 - RNA, 19 nt, Artificial Sequence
  Description of Artificial Sequence: Synthetic oligonucleotide
  Antisense strand to SEQ ID NO: 2128416
aaugaucgcacagucuugc

SEQ ID NO: 2128418 - RNA, 19 nt, Artificial Sequence
  Description of Artificial Sequence: Synthetic oligonucleotide
  Sense strand starting at position 3713 of SEQ ID NO: 1882531
cugagaccgccuugccaua

SEQ ID NO: 2128419 - RNA, 19 nt, Artificial Sequence
  Description of Artificial Sequence: Synthetic oligonucleotide
  Antisense strand to SEQ ID NO: 2128418
uauggcaaggcggucucag

SEQ ID NO: 2128420 - RNA, 19 nt, Artificial Sequence
  Description of Artificial Sequence: Synthetic oligonucleotide
  Sense strand starting at position 8 of SEQ ID NO: 1882532
ccaucuucugccugcaaag

SEQ ID NO: 2128421 - RNA, 19 nt, Artificial Sequence
  Description of Artificial Sequence: Synthetic oligonucleotide
  Antisense strand to SEQ ID NO: 2128420
cuuugcaggcagaagaugg

SEQ ID NO: 2128422 - RNA, 19 nt, Artificial Sequence
  Description of Artificial Sequence: Synthetic oligonucleotide
  Sense strand starting at position 51 of SEQ ID NO: 1882532
gcuucucccugggcugaaa

SEQ ID NO: 2128423 - RNA, 19 nt, Artificial Sequence
  Description of Artificial Sequence: Synthetic oligonucleotide
  Antisense strand to SEQ ID NO: 2128422
uuucagcccagggagaagc

SEQ ID NO: 2128424 - RNA, 19 nt, Artificial Sequence
  Description of Artificial Sequence: Synthetic oligonucleotide
  Sense strand starting at position 304 of SEQ ID NO: 1882532
gagagaacacagugucaca

SEQ ID NO: 2128425 - RNA, 19 nt, Artificial Sequence
  Description of Artificial Sequence: Synthetic oligonucleotide
  Antisense strand to SEQ ID NO: 2128424
ugugacacuguguucucuc

SEQ ID NO: 2128426 - RNA, 19 nt, Artificial Sequence
  Description of Artificial Sequence: Synthetic oligonucleotide
  Sense strand starting at position 384 of SEQ ID NO: 1882532
aaucucaggucucuagagu

SEQ ID NO: 2128427 - RNA, 19 nt, Artificial Sequence
  Description of Artificial Sequence: Synthetic oligonucleotide
  Antisense strand to SEQ ID NO: 2128426
acucuagagaccugagauu

SEQ ID NO: 2128428 - RNA, 19 nt, Artificial Sequence
  Description of Artificial Sequence: Synthetic oligonucleotide
  Sense strand starting at position 398 of SEQ ID NO: 1882532
agagucuuaccagggcuaa

SEQ ID NO: 2128429 - RNA, 19 nt, Artificial Sequence
  Description of Artificial Sequence: Synthetic oligonucleotide
  Antisense strand to SEQ ID NO: 2128428
uuagcccugguaagacucu

SEQ ID NO: 2128430 - RNA, 19 nt, Artificial Sequence
  Description of Artificial Sequence: Synthetic oligonucleotide
  Sense strand starting at position 399 of SEQ ID NO: 1882532
gagucuuaccagggcuaau

SEQ ID NO: 2128431 - RNA, 19 nt, Artificial Sequence
  Description of Artificial Sequence: Synthetic oligonucleotide
  Antisense strand to SEQ ID NO: 2128430
auuagcccugguaagacuc

SEQ ID NO: 2128432 - RNA, 19 nt, Artificial Sequence
  Description of Artificial Sequence: Synthetic oligonucleotide
  Sense strand starting at position 526 of SEQ ID NO: 1882532
agaauuagauaagggaacu

SEQ ID NO: 2128433 - RNA, 19 nt, Artificial Sequence
  Description of Artificial Sequence: Synthetic oligonucleotide
  Antisense strand to SEQ ID NO: 2128432
aguucccuuaucuaauucu

SEQ ID NO: 2128434 - RNA, 19 nt, Artificial Sequence
  Description of Artificial Sequence: Synthetic oligonucleotide
  Sense strand starting at position 560 of SEQ ID NO: 1882532
gguagaaggucuuaccuuu

SEQ ID NO: 2128435 - RNA, 19 nt, Artificial Sequence
  Description of Artificial Sequence: Synthetic oligonucleotide
  Antisense strand to SEQ ID NO: 2128434
aaagguaagaccuucuacc

SEQ ID NO: 2128436 - RNA, 19 nt, Artificial Sequence
  Description of Artificial Sequence: Synthetic oligonucleotide
  Sense strand starting at position 772 of SEQ ID NO: 1882532
ggagaagguuaugaaugcu

SEQ ID NO: 2128437 - RNA, 19 nt, Artificial Sequence
  Description of Artificial Sequence: Synthetic oligonucleotide
  Antisense strand to SEQ ID NO: 2128436
agcauucauaaccuucucc

SEQ ID NO: 2128438 - RNA, 19 nt, Artificial Sequence
  Description of Artificial Sequence: Synthetic oligonucleotide
  Sense strand starting at position 778 of SEQ ID NO: 1882532
gguuaugaaugcugagaaa

SEQ ID NO: 2128439 - RNA, 19 nt, Artificial Sequence
  Description of Artificial Sequence: Synthetic oligonucleotide
  Antisense strand to SEQ ID NO: 2128438
uuucucagcauucauaacc

SEQ ID NO: 2128440 - RNA, 19 nt, Artificial Sequence
  Description of Artificial Sequence: Synthetic oligonucleotide
  Sense strand starting at position 1143 of SEQ ID NO: 1882532
ugccaucaagaaugaagua

SEQ ID NO: 2128441 - RNA, 19 nt, Artificial Sequence
  Description of Artificial Sequence: Synthetic oligonucleotide
  Antisense strand to SEQ ID NO: 2128440
uacuucauucuugauggca

SEQ ID NO: 2128442 - RNA, 19 nt, Artificial Sequence
  Description of Artificial Sequence: Synthetic oligonucleotide
  Sense strand starting at position 1187 of SEQ ID NO: 1882532
gagacaccuugauaggaaa

SEQ ID NO: 2128443 - RNA, 19 nt, Artificial Sequence
  Description of Artificial Sequence: Synthetic oligonucleotide
  Antisense strand to SEQ ID NO: 2128442
uuuccuaucaaggugucuc

SEQ ID NO: 2128444 - RNA, 19 nt, Artificial Sequence
  Description of Artificial Sequence: Synthetic oligonucleotide
  Sense strand starting at position 1259 of SEQ ID NO: 1882532
gcucuccucucgguaacua

SEQ ID NO: 2128445 - RNA, 19 nt, Artificial Sequence
  Description of Artificial Sequence: Synthetic oligonucleotide
  Antisense strand to SEQ ID NO: 2128444
uaguuaccgagaggagagc

SEQ ID NO: 2128446 - RNA, 19 nt, Artificial Sequence
  Description of Artificial Sequence: Synthetic oligonucleotide
  Sense strand starting at position 1260 of SEQ ID NO: 1882532
cucuccucucgguaacuaa

SEQ ID NO: 2128447 - RNA, 19 nt, Artificial Sequence
  Description of Artificial Sequence: Synthetic oligonucleotide
  Antisense strand to SEQ ID NO: 2128446
uuaguuaccgagaggagag

SEQ ID NO: 2128448 - RNA, 19 nt, Artificial Sequence
  Description of Artificial Sequence: Synthetic oligonucleotide
  Sense strand starting at position 1325 of SEQ ID NO: 1882532
cagagcucuccugggauau

SEQ ID NO: 2128449 - RNA, 19 nt, Artificial Sequence
  Description of Artificial Sequence: Synthetic oligonucleotide
  Antisense strand to SEQ ID NO: 2128448
auaucccaggagagcucug

SEQ ID NO: 2128450 - RNA, 19 nt, Artificial Sequence
  Description of Artificial Sequence: Synthetic oligonucleotide
  Sense strand starting at position 1326 of SEQ ID NO: 1882532
agagcucuccugggauauu

SEQ ID NO: 2128451 - RNA, 19 nt, Artificial Sequence
  Description of Artificial Sequence: Synthetic oligonucleotide
  Antisense strand to SEQ ID NO: 2128450
aauaucccaggagagcucu

SEQ ID NO: 2128452 - RNA, 19 nt, Artificial Sequence
  Description of Artificial Sequence: Synthetic oligonucleotide
  Sense strand starting at position 1327 of SEQ ID NO: 1882532
gagcucuccugggauauua

SEQ ID NO: 2128453 - RNA, 19 nt, Artificial Sequence
  Description of Artificial Sequence: Synthetic oligonucleotide
  Antisense strand to SEQ ID NO: 2128452
uaauaucccaggagagcuc

SEQ ID NO: 2128454 - RNA, 19 nt, Artificial Sequence
  Description of Artificial Sequence: Synthetic oligonucleotide
  Sense strand starting at position 1329 of SEQ ID NO: 1882532
gcucuccugggauauuaua

SEQ ID NO: 2128455 - RNA, 19 nt, Artificial Sequence
  Description of Artificial Sequence: Synthetic oligonucleotide
  Antisense strand to SEQ ID NO: 2128454
uauaauaucccaggagagc

SEQ ID NO: 2128456 - RNA, 19 nt, Artificial Sequence
  Description of Artificial Sequence: Synthetic oligonucleotide
  Sense strand starting at position 1342 of SEQ ID NO: 1882532
auuauauacuggccuugaa

SEQ ID NO: 2128457 - RNA, 19 nt, Artificial Sequence
  Description of Artificial Sequence: Synthetic oligonucleotide
  Antisense strand to SEQ ID NO: 2128456
uucaaggccaguauauaau

SEQ ID NO: 2128458 - RNA, 19 nt, Artificial Sequence
  Description of Artificial Sequence: Synthetic oligonucleotide
  Sense strand starting at position 1345 of SEQ ID NO: 1882532
auauacuggccuugaaauu

SEQ ID NO: 2128459 - RNA, 19 nt, Artificial Sequence
  Description of Artificial Sequence: Synthetic oligonucleotide
  Antisense strand to SEQ ID NO: 2128458
aauuucaaggccaguauau

SEQ ID NO: 2128460 - RNA, 19 nt, Artificial Sequence
  Description of Artificial Sequence: Synthetic oligonucleotide
  Sense strand starting at position 1366 of SEQ ID NO: 1882532
aggagaaauuaugguugua

SEQ ID NO: 2128461 - RNA, 19 nt, Artificial Sequence
  Description of Artificial Sequence: Synthetic oligonucleotide
  Antisense strand to SEQ ID NO: 2128460
uacaaccauaauuucuccu

SEQ ID NO: 2128462 - RNA, 19 nt, Artificial Sequence
  Description of Artificial Sequence: Synthetic oligonucleotide
  Sense strand starting at position 1368 of SEQ ID NO: 1882532
gagaaauuaugguuguaga

SEQ ID NO: 2128463 - RNA, 19 nt, Artificial Sequence
  Description of Artificial Sequence: Synthetic oligonucleotide
  Antisense strand to SEQ ID NO: 2128462
ucuacaaccauaauuucuc

SEQ ID NO: 2128464 - RNA, 19 nt, Artificial Sequence
  Description of Artificial Sequence: Synthetic oligonucleotide
  Sense strand starting at position 1369 of SEQ ID NO: 1882532
agaaauuaugguuguagaa

SEQ ID NO: 2128465 - RNA, 19 nt, Artificial Sequence
  Description of Artificial Sequence: Synthetic oligonucleotide
  Antisense strand to SEQ ID NO: 2128464
uucuacaaccauaauuucu

SEQ ID NO: 2128466 - RNA, 19 nt, Artificial Sequence
  Description of Artificial Sequence: Synthetic oligonucleotide
  Sense strand starting at position 1390 of SEQ ID NO: 1882532
aaaggcuacucaguuuaga

SEQ ID NO: 2128467 - RNA, 19 nt, Artificial Sequence
  Description of Artificial Sequence: Synthetic oligonucleotide
  Antisense strand to SEQ ID NO: 2128466
ucuaaacugaguagccuuu

SEQ ID NO: 2128468 - RNA, 19 nt, Artificial Sequence
  Description of Artificial Sequence: Synthetic oligonucleotide
  Sense strand starting at position 1395 of SEQ ID NO: 1882532
cuacucaguuuagagguau

SEQ ID NO: 2128469 - RNA, 19 nt, Artificial Sequence
  Description of Artificial Sequence: Synthetic oligonucleotide
  Antisense strand to SEQ ID NO: 2128468
auaccucuaaacugaguag

SEQ ID NO: 2128470 - RNA, 19 nt, Artificial Sequence
  Description of Artificial Sequence: Synthetic oligonucleotide
  Sense strand starting at position 1424 of SEQ ID NO: 1882532
guguccuguugcccagaga

SEQ ID NO: 2128471 - RNA, 19 nt, Artificial Sequence
  Description of Artificial Sequence: Synthetic oligonucleotide
  Antisense strand to SEQ ID NO: 2128470
ucucugggcaacaggacac

SEQ ID NO: 2128472 - RNA, 19 nt, Artificial Sequence
  Description of Artificial Sequence: Synthetic oligonucleotide
  Sense strand starting at position 1499 of SEQ ID NO: 1882532
aggccugcgcgucucauua

SEQ ID NO: 2128473 - RNA, 19 nt, Artificial Sequence
  Description of Artificial Sequence: Synthetic oligonucleotide
  Antisense strand to SEQ ID NO: 2128472
uaaugagacgcgcaggccu

SEQ ID NO: 2128474 - RNA, 19 nt, Artificial Sequence
  Description of Artificial Sequence: Synthetic oligonucleotide
  Sense strand starting at position 1503 of SEQ ID NO: 1882532
cugcgcgucucauuaagaa

SEQ ID NO: 2128475 - RNA, 19 nt, Artificial Sequence
  Description of Artificial Sequence: Synthetic oligonucleotide
  Antisense strand to SEQ ID NO: 2128474
uucuuaaugagacgcgcag

SEQ ID NO: 2128476 - RNA, 19 nt, Artificial Sequence
  Description of Artificial Sequence: Synthetic oligonucleotide
  Sense strand starting at position 1507 of SEQ ID NO: 1882532
gcgucucauuaagaacaau

SEQ ID NO: 2128477 - RNA, 19 nt, Artificial Sequence
  Description of Artificial Sequence: Synthetic oligonucleotide
  Antisense strand to SEQ ID NO: 2128476
auuguucuuaaugagacgc

SEQ ID NO: 2128478 - RNA, 19 nt, Artificial Sequence
  Description of Artificial Sequence: Synthetic oligonucleotide
  Sense strand starting at position 1584 of SEQ ID NO: 1882532
uuagacaacuucucugagu

SEQ ID NO: 2128479 - RNA, 19 nt, Artificial Sequence
  Description of Artificial Sequence: Synthetic oligonucleotide
  Antisense strand to SEQ ID NO: 2128478
acucagagaaguugucuaa

SEQ ID NO: 2128480 - RNA, 19 nt, Artificial Sequence
  Description of Artificial Sequence: Synthetic oligonucleotide
  Sense strand starting at position 2848 of SEQ ID NO: 1882532
gggugaaaguuaccuauaa

SEQ ID NO: 2128481 - RNA, 19 nt, Artificial Sequence
  Description of Artificial Sequence: Synthetic oligonucleotide
  Antisense strand to SEQ ID NO: 2128480
uuauagguaacuuucaccc

SEQ ID NO: 2128482 - RNA, 19 nt, Artificial Sequence
  Description of Artificial Sequence: Synthetic oligonucleotide
  Sense strand starting at position 2849 of SEQ ID NO: 1882532
ggugaaaguuaccuauaac

SEQ ID NO: 2128483 - RNA, 19 nt, Artificial Sequence
  Description of Artificial Sequence: Synthetic oligonucleotide
  Antisense strand to SEQ ID NO: 2128482
guuauagguaacuuucacc

SEQ ID NO: 2128484 - RNA, 19 nt, Artificial Sequence
  Description of Artificial Sequence: Synthetic oligonucleotide
  Sense strand starting at position 3032 of SEQ ID NO: 1882532
cacguaaacguuuggcaga

SEQ ID NO: 2128485 - RNA, 19 nt, Artificial Sequence
  Description of Artificial Sequence: Synthetic oligonucleotide
  Antisense strand to SEQ ID NO: 2128484
ucugccaaacguuuacgug

SEQ ID NO: 2128486 - RNA, 19 nt, Artificial Sequence
  Description of Artificial Sequence: Synthetic oligonucleotide
  Sense strand starting at position 3037 of SEQ ID NO: 1882532
aaacguuuggcagagggua

SEQ ID NO: 2128487 - RNA, 19 nt, Artificial Sequence
  Description of Artificial Sequence: Synthetic oligonucleotide
  Antisense strand to SEQ ID NO: 2128486
uacccucugccaaacguuu

SEQ ID NO: 2128488 - RNA, 19 nt, Artificial Sequence
  Description of Artificial Sequence: Synthetic oligonucleotide
  Sense strand starting at position 3379 of SEQ ID NO: 1882532
aaguuugcagcguaaccaa

SEQ ID NO: 2128489 - RNA, 19 nt, Artificial Sequence
  Description of Artificial Sequence: Synthetic oligonucleotide
  Antisense strand to SEQ ID NO: 2128488
uugguuacgcugcaaacuu

SEQ ID NO: 2128490 - RNA, 19 nt, Artificial Sequence
  Description of Artificial Sequence: Synthetic oligonucleotide
  Sense strand starting at position 3435 of SEQ ID NO: 1882532
uagggcugcccucagaaau

SEQ ID NO: 2128491 - RNA, 19 nt, Artificial Sequence
  Description of Artificial Sequence: Synthetic oligonucleotide
  Antisense strand to SEQ ID NO: 2128490
auuucugagggcagcccua

SEQ ID NO: 2128492 - RNA, 19 nt, Artificial Sequence
  Description of Artificial Sequence: Synthetic oligonucleotide
  Sense strand starting at position 3485 of SEQ ID NO: 1882532
gcuggugccaguuaugguu

SEQ ID NO: 2128493 - RNA, 19 nt, Artificial Sequence
  Description of Artificial Sequence: Synthetic oligonucleotide
  Antisense strand to SEQ ID NO: 2128492
aaccauaacuggcaccagc

SEQ ID NO: 2128494 - RNA, 19 nt, Artificial Sequence
  Description of Artificial Sequence: Synthetic oligonucleotide
  Sense strand starting at position 3489 of SEQ ID NO: 1882532
gugccaguuaugguuuguu

SEQ ID NO: 2128495 - RNA, 19 nt, Artificial Sequence
  Description of Artificial Sequence: Synthetic oligonucleotide
  Antisense strand to SEQ ID NO: 2128494
aacaaaccauaacuggcac

SEQ ID NO: 2128496 - RNA, 19 nt, Artificial Sequence
  Description of Artificial Sequence: Synthetic oligonucleotide
  Sense strand starting at position 3607 of SEQ ID NO: 1882532
agcaauacccuguacuaga

SEQ ID NO: 2128497 - RNA, 19 nt, Artificial Sequence
  Description of Artificial Sequence: Synthetic oligonucleotide
  Antisense strand to SEQ ID NO: 2128496
ucuaguacaggguauugcu

SEQ ID NO: 2128498 - RNA, 19 nt, Artificial Sequence
  Description of Artificial Sequence: Synthetic oligonucleotide
  Sense strand starting at position 3763 of SEQ ID NO: 1882532
cuacuagaguucugucuaa

SEQ ID NO: 2128499 - RNA, 19 nt, Artificial Sequence
  Description of Artificial Sequence: Synthetic oligonucleotide
  Antisense strand to SEQ ID NO: 2128498
uuagacagaacucuaguag

SEQ ID NO: 2128500 - RNA, 19 nt, Artificial Sequence
  Description of Artificial Sequence: Synthetic oligonucleotide
  Sense strand starting at position 1991 of SEQ ID NO: 1882533
cgcuucgauccgucaguuu

SEQ ID NO: 2128501 - RNA, 19 nt, Artificial Sequence
  Description of Artificial Sequence: Synthetic oligonucleotide
  Antisense strand to SEQ ID NO: 2128500
aaacugacggaucgaagcg

SEQ ID NO: 2128502 - RNA, 19 nt, Artificial Sequence
  Description of Artificial Sequence: Synthetic oligonucleotide
  Sense strand starting at position 2335 of SEQ ID NO: 1882533
caguuuauuuacgugauca

SEQ ID NO: 2128503 - RNA, 19 nt, Artificial Sequence
  Description of Artificial Sequence: Synthetic oligonucleotide
  Antisense strand to SEQ ID NO: 2128502
ugaucacguaaauaaacug

SEQ ID NO: 2128504 - RNA, 19 nt, Artificial Sequence
  Description of Artificial Sequence: Synthetic oligonucleotide
  Sense strand starting at position 2404 of SEQ ID NO: 1882533
acucgaaugcccuaucauc

SEQ ID NO: 2128505 - RNA, 19 nt, Artificial Sequence
  Description of Artificial Sequence: Synthetic oligonucleotide
  Antisense strand to SEQ ID NO: 2128504
gaugauagggcauucgagu

SEQ ID NO: 2128506 - RNA, 19 nt, Artificial Sequence
  Description of Artificial Sequence: Synthetic oligonucleotide
  Sense strand starting at position 2509 of SEQ ID NO: 1882533
caguguguuauggaagaaa

SEQ ID NO: 2128507 - RNA, 19 nt, Artificial Sequence
  Description of Artificial Sequence: Synthetic oligonucleotide
  Antisense strand to SEQ ID NO: 2128506
uuucuuccauaacacacug

SEQ ID NO: 2128508 - RNA, 19 nt, Artificial Sequence
  Description of Artificial Sequence: Synthetic oligonucleotide
  Sense strand starting at position 2524 of SEQ ID NO: 1882533
gaaagaccucagcgcucua

SEQ ID NO: 2128509 - RNA, 19 nt, Artificial Sequence
  Description of Artificial Sequence: Synthetic oligonucleotide
  Antisense strand to SEQ ID NO: 2128508
uagagcgcugaggucuuuc

SEQ ID NO: 2128510 - RNA, 19 nt, Artificial Sequence
  Description of Artificial Sequence: Synthetic oligonucleotide
  Sense strand starting at position 2529 of SEQ ID NO: 1882533
accucagcgcucuagaagu

SEQ ID NO: 2128511 - RNA, 19 nt, Artificial Sequence
  Description of Artificial Sequence: Synthetic oligonucleotide
  Antisense strand to SEQ ID NO: 2128510
acuucuagagcgcugaggu

SEQ ID NO: 2128512 - RNA, 19 nt, Artificial Sequence
  Description of Artificial Sequence: Synthetic oligonucleotide
  Sense strand starting at position 2537 of SEQ ID NO: 1882533
gcucuagaagugugauaac

SEQ ID NO: 2128513 - RNA, 19 nt, Artificial Sequence
  Description of Artificial Sequence: Synthetic oligonucleotide
  Antisense strand to SEQ ID NO: 2128512
guuaucacacuucuagagc

SEQ ID NO: 2128514 - RNA, 19 nt, Artificial Sequence
  Description of Artificial Sequence: Synthetic oligonucleotide
  Sense strand starting at position 2577 of SEQ ID NO: 1882533
ccacuagcugauuguuuga

SEQ ID NO: 2128515 - RNA, 19 nt, Artificial Sequence
  Description of Artificial Sequence: Synthetic oligonucleotide
  Antisense strand to SEQ ID NO: 2128514
ucaaacaaucagcuagugg

SEQ ID NO: 2128516 - RNA, 19 nt, Artificial Sequence
  Description of Artificial Sequence: Synthetic oligonucleotide
  Sense strand starting at position 2584 of SEQ ID NO: 1882533
cugauuguuugaucuugga

SEQ ID NO: 2128517 - RNA, 19 nt, Artificial Sequence
  Description of Artificial Sequence: Synthetic oligonucleotide
  Antisense strand to SEQ ID NO: 2128516
uccaagaucaaacaaucag

SEQ ID NO: 2128518 - RNA, 19 nt, Artificial Sequence
  Description of Artificial Sequence: Synthetic oligonucleotide
  Sense strand starting at position 2588 of SEQ ID NO: 1882533
uuguuugaucuuggauaag

SEQ ID NO: 2128519 - RNA, 19 nt, Artificial Sequence
  Description of Artificial Sequence: Synthetic oligonucleotide
  Antisense strand to SEQ ID NO: 2128518
cuuauccaagaucaaacaa

SEQ ID NO: 2128520 - RNA, 19 nt, Artificial Sequence
  Description of Artificial Sequence: Synthetic oligonucleotide
  Sense strand starting at position 2598 of SEQ ID NO: 1882533
uuggauaagucacucaaca

SEQ ID NO: 2128521 - RNA, 19 nt, Artificial Sequence
  Description of Artificial Sequence: Synthetic oligonucleotide
  Antisense strand to SEQ ID NO: 2128520
uguugagugacuuauccaa

SEQ ID NO: 2128522 - RNA, 19 nt, Artificial Sequence
  Description of Artificial Sequence: Synthetic oligonucleotide
  Sense strand starting at position 2625 of SEQ ID NO: 1882533
gcucuauugcugccucuau

SEQ ID NO: 2128523 - RNA, 19 nt, Artificial Sequence
  Description of Artificial Sequence: Synthetic oligonucleotide
  Antisense strand to SEQ ID NO: 2128522
auagaggcagcaauagagc

SEQ ID NO: 2128524 - RNA, 19 nt, Artificial Sequence
  Description of Artificial Sequence: Synthetic oligonucleotide
  Sense strand starting at position 2655 of SEQ ID NO: 1882533
ggaggaguuuagguaaauu

SEQ ID NO: 2128525 - RNA, 19 nt, Artificial Sequence
  Description of Artificial Sequence: Synthetic oligonucleotide
  Antisense strand to SEQ ID NO: 2128524
aauuuaccuaaacuccucc

SEQ ID NO: 2128526 - RNA, 19 nt, Artificial Sequence
  Description of Artificial Sequence: Synthetic oligonucleotide
  Sense strand starting at position 2778 of SEQ ID NO: 1882533
gcaaauauguucucuaaug

SEQ ID NO: 2128527 - RNA, 19 nt, Artificial Sequence
  Description of Artificial Sequence: Synthetic oligonucleotide
  Antisense strand to SEQ ID NO: 2128526
cauuagagaacauauuugc

SEQ ID NO: 2128528 - RNA, 19 nt, Artificial Sequence
  Description of Artificial Sequence: Synthetic oligonucleotide
  Sense strand starting at position 2832 of SEQ ID NO: 1882533
uuauuaugugugcugcuau

SEQ ID NO: 2128529 - RNA, 19 nt, Artificial Sequence
  Description of Artificial Sequence: Synthetic oligonucleotide
  Antisense strand to SEQ ID NO: 2128528
auagcagcacacauaauaa

SEQ ID NO: 2128530 - RNA, 19 nt, Artificial Sequence
  Description of Artificial Sequence: Synthetic oligonucleotide
  Sense strand starting at position 3002 of SEQ ID NO: 1882533
guccuaagaaguuagugaa

SEQ ID NO: 2128531 - RNA, 19 nt, Artificial Sequence
  Description of Artificial Sequence: Synthetic oligonucleotide
  Antisense strand to SEQ ID NO: 2128530
uucacuaacuucuuaggac

SEQ ID NO: 2128532 - RNA, 19 nt, Artificial Sequence
  Description of Artificial Sequence: Synthetic oligonucleotide
  Sense strand starting at position 3078 of SEQ ID NO: 1882533
cccacuguuuccuuaggga

SEQ ID NO: 2128533 - RNA, 19 nt, Artificial Sequence
  Description of Artificial Sequence: Synthetic oligonucleotide
  Antisense strand to SEQ ID NO: 2128532
ucccuaaggaaacaguggg

SEQ ID NO: 2128534 - RNA, 19 nt, Artificial Sequence
  Description of Artificial Sequence: Synthetic oligonucleotide
  Sense strand starting at position 3107 of SEQ ID NO: 1882533
uuccauuagagguagcuga

SEQ ID NO: 2128535 - RNA, 19 nt, Artificial Sequence
  Description of Artificial Sequence: Synthetic oligonucleotide
  Antisense strand to SEQ ID NO: 2128534
ucagcuaccucuaauggaa

SEQ ID NO: 2128536 - RNA, 19 nt, Artificial Sequence
  Description of Artificial Sequence: Synthetic oligonucleotide
  Sense strand starting at position 3111 of SEQ ID NO: 1882533
auuagagguagcugagagu

SEQ ID NO: 2128537 - RNA, 19 nt, Artificial Sequence
  Description of Artificial Sequence: Synthetic oligonucleotide
  Antisense strand to SEQ ID NO: 2128536
acucucagcuaccucuaau

SEQ ID NO: 2128538 - RNA, 19 nt, Artificial Sequence
  Description of Artificial Sequence: Synthetic oligonucleotide
  Sense strand starting at position 3128 of SEQ ID NO: 1882533
gucugauaagcuuagcaga

SEQ ID NO: 2128539 - RNA, 19 nt, Artificial Sequence
  Description of Artificial Sequence: Synthetic oligonucleotide
  Antisense strand to SEQ ID NO: 2128538
ucugcuaagcuuaucagac

SEQ ID NO: 2128540 - RNA, 19 nt, Artificial Sequence
  Description of Artificial Sequence: Synthetic oligonucleotide
  Sense strand starting at position 3130 of SEQ ID NO: 1882533
cugauaagcuuagcagagu

SEQ ID NO: 2128541 - RNA, 19 nt, Artificial Sequence
  Description of Artificial Sequence: Synthetic oligonucleotide
  Antisense strand to SEQ ID NO: 2128540
acucugcuaagcuuaucag

SEQ ID NO: 2128542 - RNA, 19 nt, Artificial Sequence
  Description of Artificial Sequence: Synthetic oligonucleotide
  Sense strand starting at position 3151 of SEQ ID NO: 1882533
uugacaaacucaguggauu

SEQ ID NO: 2128543 - RNA, 19 nt, Artificial Sequence
  Description of Artificial Sequence: Synthetic oligonucleotide
  Antisense strand to SEQ ID NO: 2128542
aauccacugaguuugucaa

SEQ ID NO: 2128544 - RNA, 19 nt, Artificial Sequence
  Description of Artificial Sequence: Synthetic oligonucleotide
  Sense strand starting at position 3152 of SEQ ID NO: 1882533
ugacaaacucaguggauua

SEQ ID NO: 2128545 - RNA, 19 nt, Artificial Sequence
  Description of Artificial Sequence: Synthetic oligonucleotide
  Antisense strand to SEQ ID NO: 2128544
uaauccacugaguuuguca

SEQ ID NO: 2128546 - RNA, 19 nt, Artificial Sequence
  Description of Artificial Sequence: Synthetic oligonucleotide
  Sense strand starting at position 3201 of SEQ ID NO: 1882533
acagcaauugucugcuaaa

SEQ ID NO: 2128547 - RNA, 19 nt, Artificial Sequence
  Description of Artificial Sequence: Synthetic oligonucleotide
  Antisense strand to SEQ ID NO: 2128546
uuuagcagacaauugcugu

SEQ ID NO: 2128548 - RNA, 19 nt, Artificial Sequence
  Description of Artificial Sequence: Synthetic oligonucleotide
  Sense strand starting at position 3244 of SEQ ID NO: 1882533
ccugaaaggcuauauagca

SEQ ID NO: 2128549 - RNA, 19 nt, Artificial Sequence
  Description of Artificial Sequence: Synthetic oligonucleotide
  Antisense strand to SEQ ID NO: 2128548
ugcuauauagccuuucagg

SEQ ID NO: 2128550 - RNA, 19 nt, Artificial Sequence
  Description of Artificial Sequence: Synthetic oligonucleotide
  Sense strand starting at position 3251 of SEQ ID NO: 1882533
ggcuauauagcaugggagu

SEQ ID NO: 2128551 - RNA, 19 nt, Artificial Sequence
  Description of Artificial Sequence: Synthetic oligonucleotide
  Antisense strand to SEQ ID NO: 2128550
acucccaugcuauauagcc

SEQ ID NO: 2128552 - RNA, 19 nt, Artificial Sequence
  Description of Artificial Sequence: Synthetic oligonucleotide
  Sense strand starting at position 3252 of SEQ ID NO: 1882533
gcuauauagcaugggagua

SEQ ID NO: 2128553 - RNA, 19 nt, Artificial Sequence
  Description of Artificial Sequence: Synthetic oligonucleotide
  Antisense strand to SEQ ID NO: 2128552
uacucccaugcuauauagc

SEQ ID NO: 2128554 - RNA, 19 nt, Artificial Sequence
  Description of Artificial Sequence: Synthetic oligonucleotide
  Sense strand starting at position 3253 of SEQ ID NO: 1882533
cuauauagcaugggaguaa

SEQ ID NO: 2128555 - RNA, 19 nt, Artificial Sequence
  Description of Artificial Sequence: Synthetic oligonucleotide
  Antisense strand to SEQ ID NO: 2128554
uuacucccaugcuauauag

SEQ ID NO: 2128556 - RNA, 19 nt, Artificial Sequence
  Description of Artificial Sequence: Synthetic oligonucleotide
  Sense strand starting at position 3257 of SEQ ID NO: 1882533
auagcaugggaguaaaugu

SEQ ID NO: 2128557 - RNA, 19 nt, Artificial Sequence
  Description of Artificial Sequence: Synthetic oligonucleotide
  Antisense strand to SEQ ID NO: 2128556
acauuuacucccaugcuau

SEQ ID NO: 2128558 - RNA, 19 nt, Artificial Sequence
  Description of Artificial Sequence: Synthetic oligonucleotide
  Sense strand starting at position 3264 of SEQ ID NO: 1882533
gggaguaaauguguauaga

SEQ ID NO: 2128559 - RNA, 19 nt, Artificial Sequence
  Description of Artificial Sequence: Synthetic oligonucleotide
  Antisense strand to SEQ ID NO: 2128558
ucuauacacauuuacuccc

SEQ ID NO: 2128560 - RNA, 19 nt, Artificial Sequence
  Description of Artificial Sequence: Synthetic oligonucleotide
  Sense strand starting at position 3359 of SEQ ID NO: 1882533
uggguaauaucccuagaug

SEQ ID NO: 2128561 - RNA, 19 nt, Artificial Sequence
  Description of Artificial Sequence: Synthetic oligonucleotide
  Antisense strand to SEQ ID NO: 2128560
caucuagggauauuaccca

SEQ ID NO: 2128562 - RNA, 19 nt, Artificial Sequence
  Description of Artificial Sequence: Synthetic oligonucleotide
  Sense strand starting at position 3360 of SEQ ID NO: 1882533
ggguaauaucccuagaugu

SEQ ID NO: 2128563 - RNA, 19 nt, Artificial Sequence
  Description of Artificial Sequence: Synthetic oligonucleotide
  Antisense strand to SEQ ID NO: 2128562
acaucuagggauauuaccc

SEQ ID NO: 2128564 - RNA, 19 nt, Artificial Sequence
  Description of Artificial Sequence: Synthetic oligonucleotide
  Sense strand starting at position 3362 of SEQ ID NO: 1882533
guaauaucccuagaugucu

SEQ ID NO: 2128565 - RNA, 19 nt, Artificial Sequence
  Description of Artificial Sequence: Synthetic oligonucleotide
  Antisense strand to SEQ ID NO: 2128564
agacaucuagggauauuac

SEQ ID NO: 2128566 - RNA, 19 nt, Artificial Sequence
  Description of Artificial Sequence: Synthetic oligonucleotide
  Sense strand starting at position 3394 of SEQ ID NO: 1882533
uuauauuccucuuuggaga

SEQ ID NO: 2128567 - RNA, 19 nt, Artificial Sequence
  Description of Artificial Sequence: Synthetic oligonucleotide
  Antisense strand to SEQ ID NO: 2128566
ucuccaaagaggaauauaa

SEQ ID NO: 2128568 - RNA, 19 nt, Artificial Sequence
  Description of Artificial Sequence: Synthetic oligonucleotide
  Sense strand starting at position 3461 of SEQ ID NO: 1882533
auguguaauguccagaauu

SEQ ID NO: 2128569 - RNA, 19 nt, Artificial Sequence
  Description of Artificial Sequence: Synthetic oligonucleotide
  Antisense strand to SEQ ID NO: 2128568
aauucuggacauuacacau

SEQ ID NO: 2128570 - RNA, 19 nt, Artificial Sequence
  Description of Artificial Sequence: Synthetic oligonucleotide
  Sense strand starting at position 3506 of SEQ ID NO: 1882533
gagucaagacaaugugacu

SEQ ID NO: 2128571 - RNA, 19 nt, Artificial Sequence
  Description of Artificial Sequence: Synthetic oligonucleotide
  Antisense strand to SEQ ID NO: 2128570
agucacauugucuugacuc

SEQ ID NO: 2128572 - RNA, 19 nt, Artificial Sequence
  Description of Artificial Sequence: Synthetic oligonucleotide
  Sense strand starting at position 3567 of SEQ ID NO: 1882533
gggauccugccauaucuca

SEQ ID NO: 2128573 - RNA, 19 nt, Artificial Sequence
  Description of Artificial Sequence: Synthetic oligonucleotide
  Antisense strand to SEQ ID NO: 2128572
ugagauauggcaggauccc

SEQ ID NO: 2128574 - RNA, 19 nt, Artificial Sequence
  Description of Artificial Sequence: Synthetic oligonucleotide
  Sense strand starting at position 3659 of SEQ ID NO: 1882533
gcaacuuaagcagagaacu

SEQ ID NO: 2128575 - RNA, 19 nt, Artificial Sequence
  Description of Artificial Sequence: Synthetic oligonucleotide
  Antisense strand to SEQ ID NO: 2128574
aguucucugcuuaaguugc

SEQ ID NO: 2128576 - RNA, 19 nt, Artificial Sequence
  Description of Artificial Sequence: Synthetic oligonucleotide
  Sense strand starting at position 3733 of SEQ ID NO: 1882533
cucaauggauaagauuuau

SEQ ID NO: 2128577 - RNA, 19 nt, Artificial Sequence
  Description of Artificial Sequence: Synthetic oligonucleotide
  Antisense strand to SEQ ID NO: 2128576
auaaaucuuauccauugag

SEQ ID NO: 2128578 - RNA, 19 nt, Artificial Sequence
  Description of Artificial Sequence: Synthetic oligonucleotide
  Sense strand starting at position 3739 of SEQ ID NO: 1882533
ggauaagauuuauggcaga

SEQ ID NO: 2128579 - RNA, 19 nt, Artificial Sequence
  Description of Artificial Sequence: Synthetic oligonucleotide
  Antisense strand to SEQ ID NO: 2128578
ucugccauaaaucuuaucc

SEQ ID NO: 2128580 - RNA, 19 nt, Artificial Sequence
  Description of Artificial Sequence: Synthetic oligonucleotide
  Sense strand starting at position 142 of SEQ ID NO: 1882534
uggagcgaaggcuauauaa

SEQ ID NO: 2128581 - RNA, 19 nt, Artificial Sequence
  Description of Artificial Sequence: Synthetic oligonucleotide
  Antisense strand to SEQ ID NO: 2128580
uuauauagccuucgcucca

SEQ ID NO: 2128582 - RNA, 19 nt, Artificial Sequence
  Description of Artificial Sequence: Synthetic oligonucleotide
  Sense strand starting at position 144 of SEQ ID NO: 1882534
gagcgaaggcuauauaauc

SEQ ID NO: 2128583 - RNA, 19 nt, Artificial Sequence
  Description of Artificial Sequence: Synthetic oligonucleotide
  Antisense strand to SEQ ID NO: 2128582
gauuauauagccuucgcuc

SEQ ID NO: 2128584 - RNA, 19 nt, Artificial Sequence
  Description of Artificial Sequence: Synthetic oligonucleotide
  Sense strand starting at position 151 of SEQ ID NO: 1882534
ggcuauauaauccggaggu

SEQ ID NO: 2128585 - RNA, 19 nt, Artificial Sequence
  Description of Artificial Sequence: Synthetic oligonucleotide
  Antisense strand to SEQ ID NO: 2128584
accuccggauuauauagcc

SEQ ID NO: 2128586 - RNA, 19 nt, Artificial Sequence
  Description of Artificial Sequence: Synthetic oligonucleotide
  Sense strand starting at position 300 of SEQ ID NO: 1882534
cucaauuuaugacgaugau

SEQ ID NO: 2128587 - RNA, 19 nt, Artificial Sequence
  Description of Artificial Sequence: Synthetic oligonucleotide
  Antisense strand to SEQ ID NO: 2128586
aucaucgucauaaauugag

SEQ ID NO: 2128588 - RNA, 19 nt, Artificial Sequence
  Description of Artificial Sequence: Synthetic oligonucleotide
  Sense strand starting at position 309 of SEQ ID NO: 1882534
ugacgaugauguguuuacu

SEQ ID NO: 2128589 - RNA, 19 nt, Artificial Sequence
  Description of Artificial Sequence: Synthetic oligonucleotide
  Antisense strand to SEQ ID NO: 2128588
aguaaacacaucaucguca

SEQ ID NO: 2128590 - RNA, 19 nt, Artificial Sequence
  Description of Artificial Sequence: Synthetic oligonucleotide
  Sense strand starting at position 351 of SEQ ID NO: 1882534
gagcauacugacuguguau

SEQ ID NO: 2128591 - RNA, 19 nt, Artificial Sequence
  Description of Artificial Sequence: Synthetic oligonucleotide
  Antisense strand to SEQ ID NO: 2128590
auacacagucaguaugcuc

SEQ ID NO: 2128592 - RNA, 19 nt, Artificial Sequence
  Description of Artificial Sequence: Synthetic oligonucleotide
  Sense strand starting at position 369 of SEQ ID NO: 1882534
uugucucugcaccauuaua

SEQ ID NO: 2128593 - RNA, 19 nt, Artificial Sequence
  Description of Artificial Sequence: Synthetic oligonucleotide
  Antisense strand to SEQ ID NO: 2128592
uauaauggugcagagacaa

SEQ ID NO: 2128594 - RNA, 19 nt, Artificial Sequence
  Description of Artificial Sequence: Synthetic oligonucleotide
  Sense strand starting at position 1492 of SEQ ID NO: 1882534
cagggauauugcuugaauc

SEQ ID NO: 2128595 - RNA, 19 nt, Artificial Sequence
  Description of Artificial Sequence: Synthetic oligonucleotide
  Antisense strand to SEQ ID NO: 2128594
gauucaagcaauaucccug

SEQ ID NO: 2128596 - RNA, 19 nt, Artificial Sequence
  Description of Artificial Sequence: Synthetic oligonucleotide
  Sense strand starting at position 1493 of SEQ ID NO: 1882534
agggauauugcuugaaucc

SEQ ID NO: 2128597 - RNA, 19 nt, Artificial Sequence
  Description of Artificial Sequence: Synthetic oligonucleotide
  Antisense strand to SEQ ID NO: 2128596
ggauucaagcaauaucccu

SEQ ID NO: 2128598 - RNA, 19 nt, Artificial Sequence
  Description of Artificial Sequence: Synthetic oligonucleotide
  Sense strand starting at position 1635 of SEQ ID NO: 1882534
agugaaacuauagguaaug

SEQ ID NO: 2128599 - RNA, 19 nt, Artificial Sequence
  Description of Artificial Sequence: Synthetic oligonucleotide
  Antisense strand to SEQ ID NO: 2128598
cauuaccuauaguuucacu

SEQ ID NO: 2128600 - RNA, 19 nt, Artificial Sequence
  Description of Artificial Sequence: Synthetic oligonucleotide
  Sense strand starting at position 1687 of SEQ ID NO: 1882534
ggagccucugacugucuaa

SEQ ID NO: 2128601 - RNA, 19 nt, Artificial Sequence
  Description of Artificial Sequence: Synthetic oligonucleotide
  Antisense strand to SEQ ID NO: 2128600
uuagacagucagaggcucc

SEQ ID NO: 2128602 - RNA, 19 nt, Artificial Sequence
  Description of Artificial Sequence: Synthetic oligonucleotide
  Sense strand starting at position 1726 of SEQ ID NO: 1882534
ucuugaucucaagauguau

SEQ ID NO: 2128603 - RNA, 19 nt, Artificial Sequence
  Description of Artificial Sequence: Synthetic oligonucleotide
  Antisense strand to SEQ ID NO: 2128602
auacaucuugagaucaaga

SEQ ID NO: 2128604 - RNA, 19 nt, Artificial Sequence
  Description of Artificial Sequence: Synthetic oligonucleotide
  Sense strand starting at position 1765 of SEQ ID NO: 1882534
uuggaagacuuguuuaucu

SEQ ID NO: 2128605 - RNA, 19 nt, Artificial Sequence
  Description of Artificial Sequence: Synthetic oligonucleotide
  Antisense strand to SEQ ID NO: 2128604
agauaaacaagucuuccaa

SEQ ID NO: 2128606 - RNA, 19 nt, Artificial Sequence
  Description of Artificial Sequence: Synthetic oligonucleotide
  Sense strand starting at position 1767 of SEQ ID NO: 1882534
ggaagacuuguuuaucucu

SEQ ID NO: 2128607 - RNA, 19 nt, Artificial Sequence
  Description of Artificial Sequence: Synthetic oligonucleotide
  Antisense strand to SEQ ID NO: 2128606
agagauaaacaagucuucc

SEQ ID NO: 2128608 - RNA, 19 nt, Artificial Sequence
  Description of Artificial Sequence: Synthetic oligonucleotide
  Sense strand starting at position 1770 of SEQ ID NO: 1882534
agacuuguuuaucucuaag

SEQ ID NO: 2128609 - RNA, 19 nt, Artificial Sequence
  Description of Artificial Sequence: Synthetic oligonucleotide
  Antisense strand to SEQ ID NO: 2128608
cuuagagauaaacaagucu

SEQ ID NO: 2128610 - RNA, 19 nt, Artificial Sequence
  Description of Artificial Sequence: Synthetic oligonucleotide
  Sense strand starting at position 1833 of SEQ ID NO: 1882534
acuacaguuucuucuguua

SEQ ID NO: 2128611 - RNA, 19 nt, Artificial Sequence
  Description of Artificial Sequence: Synthetic oligonucleotide
  Antisense strand to SEQ ID NO: 2128610
uaacagaagaaacuguagu

SEQ ID NO: 2128612 - RNA, 19 nt, Artificial Sequence
  Description of Artificial Sequence: Synthetic oligonucleotide
  Sense strand starting at position 1931 of SEQ ID NO: 1882534
aguuuaccugagcaacaaa

SEQ ID NO: 2128613 - RNA, 19 nt, Artificial Sequence
  Description of Artificial Sequence: Synthetic oligonucleotide
  Antisense strand to SEQ ID NO: 2128612
uuuguugcucagguaaacu

SEQ ID NO: 2128614 - RNA, 19 nt, Artificial Sequence
  Description of Artificial Sequence: Synthetic oligonucleotide
  Sense strand starting at position 2085 of SEQ ID NO: 1882534
ugcuuuauuugggcauaau

SEQ ID NO: 2128615 - RNA, 19 nt, Artificial Sequence
  Description of Artificial Sequence: Synthetic oligonucleotide
  Antisense strand to SEQ ID NO: 2128614
auuaugcccaaauaaagca

SEQ ID NO: 2128616 - RNA, 19 nt, Artificial Sequence
  Description of Artificial Sequence: Synthetic oligonucleotide
  Sense strand starting at position 2120 of SEQ ID NO: 1882534
cugugauuggcugaaaccu

SEQ ID NO: 2128617 - RNA, 19 nt, Artificial Sequence
  Description of Artificial Sequence: Synthetic oligonucleotide
  Antisense strand to SEQ ID NO: 2128616
agguuucagccaaucacag

SEQ ID NO: 2128618 - RNA, 19 nt, Artificial Sequence
  Description of Artificial Sequence: Synthetic oligonucleotide
  Sense strand starting at position 2129 of SEQ ID NO: 1882534
gcugaaaccuggcuauuac

SEQ ID NO: 2128619 - RNA, 19 nt, Artificial Sequence
  Description of Artificial Sequence: Synthetic oligonucleotide
  Antisense strand to SEQ ID NO: 2128618
guaauagccagguuucagc

SEQ ID NO: 2128620 - RNA, 19 nt, Artificial Sequence
  Description of Artificial Sequence: Synthetic oligonucleotide
  Sense strand starting at position 2177 of SEQ ID NO: 1882534
uucguuuauguacaaaguu

SEQ ID NO: 2128621 - RNA, 19 nt, Artificial Sequence
  Description of Artificial Sequence: Synthetic oligonucleotide
  Antisense strand to SEQ ID NO: 2128620
aacuuuguacauaaacgaa

SEQ ID NO: 2128622 - RNA, 19 nt, Artificial Sequence
  Description of Artificial Sequence: Synthetic oligonucleotide
  Sense strand starting at position 2718 of SEQ ID NO: 1882534
gcugcauuauuuguauucu

SEQ ID NO: 2128623 - RNA, 19 nt, Artificial Sequence
  Description of Artificial Sequence: Synthetic oligonucleotide
  Antisense strand to SEQ ID NO: 2128622
agaauacaaauaaugcagc

SEQ ID NO: 2128624 - RNA, 19 nt, Artificial Sequence
  Description of Artificial Sequence: Synthetic oligonucleotide
  Sense strand starting at position 2904 of SEQ ID NO: 1882534
ugaagacugccauggauug

SEQ ID NO: 2128625 - RNA, 19 nt, Artificial Sequence
  Description of Artificial Sequence: Synthetic oligonucleotide
  Antisense strand to SEQ ID NO: 2128624
caauccauggcagucuuca

SEQ ID NO: 2128626 - RNA, 19 nt, Artificial Sequence
  Description of Artificial Sequence: Synthetic oligonucleotide
  Sense strand starting at position 2914 of SEQ ID NO: 1882534
cauggauuguucuccagga

SEQ ID NO: 2128627 - RNA, 19 nt, Artificial Sequence
  Description of Artificial Sequence: Synthetic oligonucleotide
  Antisense strand to SEQ ID NO: 2128626
uccuggagaacaauccaug

SEQ ID NO: 2128628 - RNA, 19 nt, Artificial Sequence
  Description of Artificial Sequence: Synthetic oligonucleotide
  Sense strand starting at position 2918 of SEQ ID NO: 1882534
gauuguucuccaggaccag

SEQ ID NO: 2128629 - RNA, 19 nt, Artificial Sequence
  Description of Artificial Sequence: Synthetic oligonucleotide
  Antisense strand to SEQ ID NO: 2128628
cugguccuggagaacaauc

SEQ ID NO: 2128630 - RNA, 19 nt, Artificial Sequence
  Description of Artificial Sequence: Synthetic oligonucleotide
  Sense strand starting at position 3434 of SEQ ID NO: 1882534
gauggagauucuucuguaa

SEQ ID NO: 2128631 - RNA, 19 nt, Artificial Sequence
  Description of Artificial Sequence: Synthetic oligonucleotide
  Antisense strand to SEQ ID NO: 2128630
uuacagaagaaucuccauc

SEQ ID NO: 2128632 - RNA, 19 nt, Artificial Sequence
  Description of Artificial Sequence: Synthetic oligonucleotide
  Sense strand starting at position 3437 of SEQ ID NO: 1882534
ggagauucuucuguaagcu

SEQ ID NO: 2128633 - RNA, 19 nt, Artificial Sequence
  Description of Artificial Sequence: Synthetic oligonucleotide
  Antisense strand to SEQ ID NO: 2128632
agcuuacagaagaaucucc

SEQ ID NO: 2128634 - RNA, 19 nt, Artificial Sequence
  Description of Artificial Sequence: Synthetic oligonucleotide
  Sense strand starting at position 3438 of SEQ ID NO: 1882534
gagauucuucuguaagcuu

SEQ ID NO: 2128635 - RNA, 19 nt, Artificial Sequence
  Description of Artificial Sequence: Synthetic oligonucleotide
  Antisense strand to SEQ ID NO: 2128634
aagcuuacagaagaaucuc

SEQ ID NO: 2128636 - RNA, 19 nt, Artificial Sequence
  Description of Artificial Sequence: Synthetic oligonucleotide
  Sense strand starting at position 3531 of SEQ ID NO: 1882534
gccagagucacuggagguu

SEQ ID NO: 2128637 - RNA, 19 nt, Artificial Sequence
  Description of Artificial Sequence: Synthetic oligonucleotide
  Antisense strand to SEQ ID NO: 2128636
aaccuccagugacucuggc

SEQ ID NO: 2128638 - RNA, 19 nt, Artificial Sequence
  Description of Artificial Sequence: Synthetic oligonucleotide
  Sense strand starting at position 3534 of SEQ ID NO: 1882534
agagucacuggagguuauu

SEQ ID NO: 2128639 - RNA, 19 nt, Artificial Sequence
  Description of Artificial Sequence: Synthetic oligonucleotide
  Antisense strand to SEQ ID NO: 2128638
aauaaccuccagugacucu

SEQ ID NO: 2128640 - RNA, 19 nt, Artificial Sequence
  Description of Artificial Sequence: Synthetic oligonucleotide
  Sense strand starting at position 3537 of SEQ ID NO: 1882534
gucacuggagguuauuauu

SEQ ID NO: 2128641 - RNA, 19 nt, Artificial Sequence
  Description of Artificial Sequence: Synthetic oligonucleotide
  Antisense strand to SEQ ID NO: 2128640
aauaauaaccuccagugac

SEQ ID NO: 2128642 - RNA, 19 nt, Artificial Sequence
  Description of Artificial Sequence: Synthetic oligonucleotide
  Sense strand starting at position 3543 of SEQ ID NO: 1882534
ggagguuauuauucuguug

SEQ ID NO: 2128643 - RNA, 19 nt, Artificial Sequence
  Description of Artificial Sequence: Synthetic oligonucleotide
  Antisense strand to SEQ ID NO: 2128642
caacagaauaauaaccucc

SEQ ID NO: 2128644 - RNA, 19 nt, Artificial Sequence
  Description of Artificial Sequence: Synthetic oligonucleotide
  Sense strand starting at position 3546 of SEQ ID NO: 1882534
gguuauuauucuguugaag

SEQ ID NO: 2128645 - RNA, 19 nt, Artificial Sequence
  Description of Artificial Sequence: Synthetic oligonucleotide
  Antisense strand to SEQ ID NO: 2128644
cuucaacagaauaauaacc

SEQ ID NO: 2128646 - RNA, 19 nt, Artificial Sequence
  Description of Artificial Sequence: Synthetic oligonucleotide
  Sense strand starting at position 3599 of SEQ ID NO: 1882534
gugaaucaaucccuggauu

SEQ ID NO: 2128647 - RNA, 19 nt, Artificial Sequence
  Description of Artificial Sequence: Synthetic oligonucleotide
  Antisense strand to SEQ ID NO: 2128646
aauccagggauugauucac

SEQ ID NO: 2128648 - RNA, 19 nt, Artificial Sequence
  Description of Artificial Sequence: Synthetic oligonucleotide
  Sense strand starting at position 3600 of SEQ ID NO: 1882534
ugaaucaaucccuggauuc

SEQ ID NO: 2128649 - RNA, 19 nt, Artificial Sequence
  Description of Artificial Sequence: Synthetic oligonucleotide
  Antisense strand to SEQ ID NO: 2128648
gaauccagggauugauuca

SEQ ID NO: 2128650 - RNA, 19 nt, Artificial Sequence
  Description of Artificial Sequence: Synthetic oligonucleotide
  Sense strand starting at position 3781 of SEQ ID NO: 1882534
aaucgaaucggugauucga

SEQ ID NO: 2128651 - RNA, 19 nt, Artificial Sequence
  Description of Artificial Sequence: Synthetic oligonucleotide
  Antisense strand to SEQ ID NO: 2128650
ucgaaucaccgauucgauu

SEQ ID NO: 2128652 - RNA, 19 nt, Artificial Sequence
  Description of Artificial Sequence: Synthetic oligonucleotide
  Sense strand starting at position 3790 of SEQ ID NO: 1882534
ggugauucgauauacucuu

SEQ ID NO: 2128653 - RNA, 19 nt, Artificial Sequence
  Description of Artificial Sequence: Synthetic oligonucleotide
  Antisense strand to SEQ ID NO: 2128652
aagaguauaucgaaucacc

SEQ ID NO: 2128654 - RNA, 19 nt, Artificial Sequence
  Description of Artificial Sequence: Synthetic oligonucleotide
  Sense strand starting at position 3940 of SEQ ID NO: 1882534
ugaaauuucuugccugcca

SEQ ID NO: 2128655 - RNA, 19 nt, Artificial Sequence
  Description of Artificial Sequence: Synthetic oligonucleotide
  Antisense strand to SEQ ID NO: 2128654
uggcaggcaagaaauuuca

SEQ ID NO: 2128656 - RNA, 19 nt, Artificial Sequence
  Description of Artificial Sequence: Synthetic oligonucleotide
  Sense strand starting at position 3960 of SEQ ID NO: 1882534
guugcuuauguguuaugcu

SEQ ID NO: 2128657 - RNA, 19 nt, Artificial Sequence
  Description of Artificial Sequence: Synthetic oligonucleotide
  Antisense strand to SEQ ID NO: 2128656
agcauaacacauaagcaac

SEQ ID NO: 2128658 - RNA, 19 nt, Artificial Sequence
  Description of Artificial Sequence: Synthetic oligonucleotide
  Sense strand starting at position 3967 of SEQ ID NO: 1882534
auguguuaugcucacauac

SEQ ID NO: 2128659 - RNA, 19 nt, Artificial Sequence
  Description of Artificial Sequence: Synthetic oligonucleotide
  Antisense strand to SEQ ID NO: 2128658
guaugugagcauaacacau

SEQ ID NO: 2128660 - RNA, 19 nt, Artificial Sequence
  Description of Artificial Sequence: Synthetic oligonucleotide
  Sense strand starting at position 65 of SEQ ID NO: 1882535
ggccauuaacuuugguaau

SEQ ID NO: 2128661 - RNA, 19 nt, Artificial Sequence
  Description of Artificial Sequence: Synthetic oligonucleotide
  Antisense strand to SEQ ID NO: 2128660
auuaccaaaguuaauggcc

SEQ ID NO: 2128662 - RNA, 19 nt, Artificial Sequence
  Description of Artificial Sequence: Synthetic oligonucleotide
  Sense strand starting at position 448 of SEQ ID NO: 1882535
gagucaccgcgccaagaua

SEQ ID NO: 2128663 - RNA, 19 nt, Artificial Sequence
  Description of Artificial Sequence: Synthetic oligonucleotide
  Antisense strand to SEQ ID NO: 2128662
uaucuuggcgcggugacuc

SEQ ID NO: 2128664 - RNA, 19 nt, Artificial Sequence
  Description of Artificial Sequence: Synthetic oligonucleotide
  Sense strand starting at position 456 of SEQ ID NO: 1882535
gcgccaagauaucuucuau

SEQ ID NO: 2128665 - RNA, 19 nt, Artificial Sequence
  Description of Artificial Sequence: Synthetic oligonucleotide
  Antisense strand to SEQ ID NO: 2128664
auagaagauaucuuggcgc

SEQ ID NO: 2128666 - RNA, 19 nt, Artificial Sequence
  Description of Artificial Sequence: Synthetic oligonucleotide
  Sense strand starting at position 466 of SEQ ID NO: 1882535
aucuucuauuugggaacau

SEQ ID NO: 2128667 - RNA, 19 nt, Artificial Sequence
  Description of Artificial Sequence: Synthetic oligonucleotide
  Antisense strand to SEQ ID NO: 2128666
auguucccaaauagaagau

SEQ ID NO: 2128668 - RNA, 19 nt, Artificial Sequence
  Description of Artificial Sequence: Synthetic oligonucleotide
  Sense strand starting at position 467 of SEQ ID NO: 1882535
ucuucuauuugggaacauu

SEQ ID NO: 2128669 - RNA, 19 nt, Artificial Sequence
  Description of Artificial Sequence: Synthetic oligonucleotide
  Antisense strand to SEQ ID NO: 2128668
aauguucccaaauagaaga

SEQ ID NO: 2128670 - RNA, 19 nt, Artificial Sequence
  Description of Artificial Sequence: Synthetic oligonucleotide
  Sense strand starting at position 505 of SEQ ID NO: 1882535
uggguacuucgggaguuaa

SEQ ID NO: 2128671 - RNA, 19 nt, Artificial Sequence
  Description of Artificial Sequence: Synthetic oligonucleotide
  Antisense strand to SEQ ID NO: 2128670
uuaacucccgaaguaccca

SEQ ID NO: 2128672 - RNA, 19 nt, Artificial Sequence
  Description of Artificial Sequence: Synthetic oligonucleotide
  Sense strand starting at position 536 of SEQ ID NO: 1882535
aggcaugguccuggaguca

SEQ ID NO: 2128673 - RNA, 19 nt, Artificial Sequence
  Description of Artificial Sequence: Synthetic oligonucleotide
  Antisense strand to SEQ ID NO: 2128672
ugacuccaggaccaugccu

SEQ ID NO: 2128674 - RNA, 19 nt, Artificial Sequence
  Description of Artificial Sequence: Synthetic oligonucleotide
  Sense strand starting at position 545 of SEQ ID NO: 1882535
ccuggagucaagugagcuu

SEQ ID NO: 2128675 - RNA, 19 nt, Artificial Sequence
  Description of Artificial Sequence: Synthetic oligonucleotide
  Antisense strand to SEQ ID NO: 2128674
aagcucacuugacuccagg

SEQ ID NO: 2128676 - RNA, 19 nt, Artificial Sequence
  Description of Artificial Sequence: Synthetic oligonucleotide
  Sense strand starting at position 554 of SEQ ID NO: 1882535
aagugagcuucggcgagaa

SEQ ID NO: 2128677 - RNA, 19 nt, Artificial Sequence
  Description of Artificial Sequence: Synthetic oligonucleotide
  Antisense strand to SEQ ID NO: 2128676
uucucgccgaagcucacuu

SEQ ID NO: 2128678 - RNA, 19 nt, Artificial Sequence
  Description of Artificial Sequence: Synthetic oligonucleotide
  Sense strand starting at position 556 of SEQ ID NO: 1882535
gugagcuucggcgagaagu

SEQ ID NO: 2128679 - RNA, 19 nt, Artificial Sequence
  Description of Artificial Sequence: Synthetic oligonucleotide
  Antisense strand to SEQ ID NO: 2128678
acuucucgccgaagcucac

SEQ ID NO: 2128680 - RNA, 19 nt, Artificial Sequence
  Description of Artificial Sequence: Synthetic oligonucleotide
  Sense strand starting at position 557 of SEQ ID NO: 1882535
ugagcuucggcgagaaguu

SEQ ID NO: 2128681 - RNA, 19 nt, Artificial Sequence
  Description of Artificial Sequence: Synthetic oligonucleotide
  Antisense strand to SEQ ID NO: 2128680
aacuucucgccgaagcuca

SEQ ID NO: 2128682 - RNA, 19 nt, Artificial Sequence
  Description of Artificial Sequence: Synthetic oligonucleotide
  Sense strand starting at position 558 of SEQ ID NO: 1882535
gagcuucggcgagaaguuu

SEQ ID NO: 2128683 - RNA, 19 nt, Artificial Sequence
  Description of Artificial Sequence: Synthetic oligonucleotide
  Antisense strand to SEQ ID NO: 2128682
aaacuucucgccgaagcuc

SEQ ID NO: 2128684 - RNA, 19 nt, Artificial Sequence
  Description of Artificial Sequence: Synthetic oligonucleotide
  Sense strand starting at position 566 of SEQ ID NO: 1882535
gcgagaaguuugccaugga

SEQ ID NO: 2128685 - RNA, 19 nt, Artificial Sequence
  Description of Artificial Sequence: Synthetic oligonucleotide
  Antisense strand to SEQ ID NO: 2128684
uccauggcaaacuucucgc

SEQ ID NO: 2128686 - RNA, 19 nt, Artificial Sequence
  Description of Artificial Sequence: Synthetic oligonucleotide
  Sense strand starting at position 594 of SEQ ID NO: 1882535
uggagcaaacccuguaaga

SEQ ID NO: 2128687 - RNA, 19 nt, Artificial Sequence
  Description of Artificial Sequence: Synthetic oligonucleotide
  Antisense strand to SEQ ID NO: 2128686
ucuuacaggguuugcucca

SEQ ID NO: 2128688 - RNA, 19 nt, Artificial Sequence
  Description of Artificial Sequence: Synthetic oligonucleotide
  Sense strand starting at position 680 of SEQ ID NO: 1882535
gcaugacugaucuggccaa

SEQ ID NO: 2128689 - RNA, 19 nt, Artificial Sequence
  Description of Artificial Sequence: Synthetic oligonucleotide
  Antisense strand to SEQ ID NO: 2128688
uuggccagaucagucaugc

SEQ ID NO: 2128690 - RNA, 19 nt, Artificial Sequence
  Description of Artificial Sequence: Synthetic oligonucleotide
  Sense strand starting at position 692 of SEQ ID NO: 1882535
uggccaaauucuuccaguu

SEQ ID NO: 2128691 - RNA, 19 nt, Artificial Sequence
  Description of Artificial Sequence: Synthetic oligonucleotide
  Antisense strand to SEQ ID NO: 2128690
aacuggaagaauuuggcca

SEQ ID NO: 2128692 - RNA, 19 nt, Artificial Sequence
  Description of Artificial Sequence: Synthetic oligonucleotide
  Sense strand starting at position 726 of SEQ ID NO: 1882535
ccuuuaguaucguucugag

SEQ ID NO: 2128693 - RNA, 19 nt, Artificial Sequence
  Description of Artificial Sequence: Synthetic oligonucleotide
  Antisense strand to SEQ ID NO: 2128692
cucagaacgauacuaaagg

SEQ ID NO: 2128694 - RNA, 19 nt, Artificial Sequence
  Description of Artificial Sequence: Synthetic oligonucleotide
  Sense strand starting at position 733 of SEQ ID NO: 1882535
uaucguucugaguguuuac

SEQ ID NO: 2128695 - RNA, 19 nt, Artificial Sequence
  Description of Artificial Sequence: Synthetic oligonucleotide
  Antisense strand to SEQ ID NO: 2128694
guaaacacucagaacgaua

SEQ ID NO: 2128696 - RNA, 19 nt, Artificial Sequence
  Description of Artificial Sequence: Synthetic oligonucleotide
  Sense strand starting at position 736 of SEQ ID NO: 1882535
cguucugaguguuuacaaa

SEQ ID NO: 2128697 - RNA, 19 nt, Artificial Sequence
  Description of Artificial Sequence: Synthetic oligonucleotide
  Antisense strand to SEQ ID NO: 2128696
uuuguaaacacucagaacg

SEQ ID NO: 2128698 - RNA, 19 nt, Artificial Sequence
  Description of Artificial Sequence: Synthetic oligonucleotide
  Sense strand starting at position 778 of SEQ ID NO: 1882535
ugaagcaucuaguucgauu

SEQ ID NO: 2128699 - RNA, 19 nt, Artificial Sequence
  Description of Artificial Sequence: Synthetic oligonucleotide
  Antisense strand to SEQ ID NO: 2128698
aaucgaacuagaugcuuca

SEQ ID NO: 2128700 - RNA, 19 nt, Artificial Sequence
  Description of Artificial Sequence: Synthetic oligonucleotide
  Sense strand starting at position 841 of SEQ ID NO: 1882535
ccgcaugaauaguuaacaa

SEQ ID NO: 2128701 - RNA, 19 nt, Artificial Sequence
  Description of Artificial Sequence: Synthetic oligonucleotide
  Antisense strand to SEQ ID NO: 2128700
uuguuaacuauucaugcgg

SEQ ID NO: 2128702 - RNA, 19 nt, Artificial Sequence
  Description of Artificial Sequence: Synthetic oligonucleotide
  Sense strand starting at position 1002 of SEQ ID NO: 1882535
gggauuaccuuaucuccca

SEQ ID NO: 2128703 - RNA, 19 nt, Artificial Sequence
  Description of Artificial Sequence: Synthetic oligonucleotide
  Antisense strand to SEQ ID NO: 2128702
ugggagauaagguaauccc

SEQ ID NO: 2128704 - RNA, 19 nt, Artificial Sequence
  Description of Artificial Sequence: Synthetic oligonucleotide
  Sense strand starting at position 1042 of SEQ ID NO: 1882535
ucgcucaguucucccuuua

SEQ ID NO: 2128705 - RNA, 19 nt, Artificial Sequence
  Description of Artificial Sequence: Synthetic oligonucleotide
  Antisense strand to SEQ ID NO: 2128704
uaaagggagaacugagcga

SEQ ID NO: 2128706 - RNA, 19 nt, Artificial Sequence
  Description of Artificial Sequence: Synthetic oligonucleotide
  Sense strand starting at position 1265 of SEQ ID NO: 1882535
ggagguuucucugugguua

SEQ ID NO: 2128707 - RNA, 19 nt, Artificial Sequence
  Description of Artificial Sequence: Synthetic oligonucleotide
  Antisense strand to SEQ ID NO: 2128706
uaaccacagagaaaccucc

SEQ ID NO: 2128708 - RNA, 19 nt, Artificial Sequence
  Description of Artificial Sequence: Synthetic oligonucleotide
  Sense strand starting at position 1266 of SEQ ID NO: 1882535
gagguuucucugugguuac

SEQ ID NO: 2128709 - RNA, 19 nt, Artificial Sequence
  Description of Artificial Sequence: Synthetic oligonucleotide
  Antisense strand to SEQ ID NO: 2128708
guaaccacagagaaaccuc

SEQ ID NO: 2128710 - RNA, 19 nt, Artificial Sequence
  Description of Artificial Sequence: Synthetic oligonucleotide
  Sense strand starting at position 2596 of SEQ ID NO: 1882535
ccaagaagguccuaugacu

SEQ ID NO: 2128711 - RNA, 19 nt, Artificial Sequence
  Description of Artificial Sequence: Synthetic oligonucleotide
  Antisense strand to SEQ ID NO: 2128710
agucauaggaccuucuugg

SEQ ID NO: 2128712 - RNA, 19 nt, Artificial Sequence
  Description of Artificial Sequence: Synthetic oligonucleotide
  Sense strand starting at position 2715 of SEQ ID NO: 1882535
gcugaucagagcuggaaga

SEQ ID NO: 2128713 - RNA, 19 nt, Artificial Sequence
  Description of Artificial Sequence: Synthetic oligonucleotide
  Antisense strand to SEQ ID NO: 2128712
ucuuccagcucugaucagc

SEQ ID NO: 2128714 - RNA, 19 nt, Artificial Sequence
  Description of Artificial Sequence: Synthetic oligonucleotide
  Sense strand starting at position 3114 of SEQ ID NO: 1882535
gccuaugugacccauguga

SEQ ID NO: 2128715 - RNA, 19 nt, Artificial Sequence
  Description of Artificial Sequence: Synthetic oligonucleotide
  Antisense strand to SEQ ID NO: 2128714
ucacaugggucacauaggc

SEQ ID NO: 2128716 - RNA, 19 nt, Artificial Sequence
  Description of Artificial Sequence: Synthetic oligonucleotide
  Sense strand starting at position 3116 of SEQ ID NO: 1882535
cuaugugacccaugugagu

SEQ ID NO: 2128717 - RNA, 19 nt, Artificial Sequence
  Description of Artificial Sequence: Synthetic oligonucleotide
  Antisense strand to SEQ ID NO: 2128716
acucacaugggucacauag

SEQ ID NO: 2128718 - RNA, 19 nt, Artificial Sequence
  Description of Artificial Sequence: Synthetic oligonucleotide
  Sense strand starting at position 3183 of SEQ ID NO: 1882535
gagagaugguacuucucua

SEQ ID NO: 2128719 - RNA, 19 nt, Artificial Sequence
  Description of Artificial Sequence: Synthetic oligonucleotide
  Antisense strand to SEQ ID NO: 2128718
uagagaaguaccaucucuc

SEQ ID NO: 2128720 - RNA, 19 nt, Artificial Sequence
  Description of Artificial Sequence: Synthetic oligonucleotide
  Sense strand starting at position 3191 of SEQ ID NO: 1882535
guacuucucuagcucucau

SEQ ID NO: 2128721 - RNA, 19 nt, Artificial Sequence
  Description of Artificial Sequence: Synthetic oligonucleotide
  Antisense strand to SEQ ID NO: 2128720
augagagcuagagaaguac

SEQ ID NO: 2128722 - RNA, 19 nt, Artificial Sequence
  Description of Artificial Sequence: Synthetic oligonucleotide
  Sense strand starting at position 3259 of SEQ ID NO: 1882535
aggcuuauccauuguauac

SEQ ID NO: 2128723 - RNA, 19 nt, Artificial Sequence
  Description of Artificial Sequence: Synthetic oligonucleotide
  Antisense strand to SEQ ID NO: 2128722
guauacaauggauaagccu

SEQ ID NO: 2128724 - RNA, 19 nt, Artificial Sequence
  Description of Artificial Sequence: Synthetic oligonucleotide
  Sense strand starting at position 3334 of SEQ ID NO: 1882535
ucagucuuaucugcuguga

SEQ ID NO: 2128725 - RNA, 19 nt, Artificial Sequence
  Description of Artificial Sequence: Synthetic oligonucleotide
  Antisense strand to SEQ ID NO: 2128724
ucacagcagauaagacuga

SEQ ID NO: 2128726 - RNA, 19 nt, Artificial Sequence
  Description of Artificial Sequence: Synthetic oligonucleotide
  Sense strand starting at position 3715 of SEQ ID NO: 1882535
ugaggacuugccuguuacu

SEQ ID NO: 2128727 - RNA, 19 nt, Artificial Sequence
  Description of Artificial Sequence: Synthetic oligonucleotide
  Antisense strand to SEQ ID NO: 2128726
aguaacaggcaaguccuca

SEQ ID NO: 2128728 - RNA, 19 nt, Artificial Sequence
  Description of Artificial Sequence: Synthetic oligonucleotide
  Sense strand starting at position 3799 of SEQ ID NO: 1882535
cccuuagggcucugaggaa

SEQ ID NO: 2128729 - RNA, 19 nt, Artificial Sequence
  Description of Artificial Sequence: Synthetic oligonucleotide
  Antisense strand to SEQ ID NO: 2128728
uuccucagagcccuaaggg

SEQ ID NO: 2128730 - RNA, 19 nt, Artificial Sequence
  Description of Artificial Sequence: Synthetic oligonucleotide
  Sense strand starting at position 3942 of SEQ ID NO: 1882535
ugcugugucucuuugucua

SEQ ID NO: 2128731 - RNA, 19 nt, Artificial Sequence
  Description of Artificial Sequence: Synthetic oligonucleotide
  Antisense strand to SEQ ID NO: 2128730
uagacaaagagacacagca

SEQ ID NO: 2128732 - RNA, 19 nt, Artificial Sequence
  Description of Artificial Sequence: Synthetic oligonucleotide
  Sense strand starting at position 3945 of SEQ ID NO: 1882535
ugugucucuuugucuacua

SEQ ID NO: 2128733 - RNA, 19 nt, Artificial Sequence
  Description of Artificial Sequence: Synthetic oligonucleotide
  Antisense strand to SEQ ID NO: 2128732
uaguagacaaagagacaca

SEQ ID NO: 2128734 - RNA, 19 nt, Artificial Sequence
  Description of Artificial Sequence: Synthetic oligonucleotide
  Sense strand starting at position 3946 of SEQ ID NO: 1882535
gugucucuuugucuacuaa

SEQ ID NO: 2128735 - RNA, 19 nt, Artificial Sequence
  Description of Artificial Sequence: Synthetic oligonucleotide
  Antisense strand to SEQ ID NO: 2128734
uuaguagacaaagagacac

SEQ ID NO: 2128736 - RNA, 19 nt, Artificial Sequence
  Description of Artificial Sequence: Synthetic oligonucleotide
  Sense strand starting at position 3957 of SEQ ID NO: 1882535
ucuacuaaccuguguagau

SEQ ID NO: 2128737 - RNA, 19 nt, Artificial Sequence
  Description of Artificial Sequence: Synthetic oligonucleotide
  Antisense strand to SEQ ID NO: 2128736
aucuacacagguuaguaga

SEQ ID NO: 2128738 - RNA, 19 nt, Artificial Sequence
  Description of Artificial Sequence: Synthetic oligonucleotide
  Sense strand starting at position 3958 of SEQ ID NO: 1882535
cuacuaaccuguguagauc

SEQ ID NO: 2128739 - RNA, 19 nt, Artificial Sequence
  Description of Artificial Sequence: Synthetic oligonucleotide
  Antisense strand to SEQ ID NO: 2128738
gaucuacacagguuaguag

SEQ ID NO: 2128740 - RNA, 19 nt, Artificial Sequence
  Description of Artificial Sequence: Synthetic oligonucleotide
  Sense strand starting at position 229 of SEQ ID NO: 1882536
caaggaaagucgccauauu

SEQ ID NO: 2128741 - RNA, 19 nt, Artificial Sequence
  Description of Artificial Sequence: Synthetic oligonucleotide
  Antisense strand to SEQ ID NO: 2128740
aauauggcgacuuuccuug

SEQ ID NO: 2128742 - RNA, 19 nt, Artificial Sequence
  Description of Artificial Sequence: Synthetic oligonucleotide
  Sense strand starting at position 230 of SEQ ID NO: 1882536
aaggaaagucgccauauug

SEQ ID NO: 2128743 - RNA, 19 nt, Artificial Sequence
  Description of Artificial Sequence: Synthetic oligonucleotide
  Antisense strand to SEQ ID NO: 2128742
caauauggcgacuuuccuu

SEQ ID NO: 2128744 - RNA, 19 nt, Artificial Sequence
  Description of Artificial Sequence: Synthetic oligonucleotide
  Sense strand starting at position 498 of SEQ ID NO: 1882536
auguacuggcacuaagauu

SEQ ID NO: 2128745 - RNA, 19 nt, Artificial Sequence
  Description of Artificial Sequence: Synthetic oligonucleotide
  Antisense strand to SEQ ID NO: 2128744
aaucuuagugccaguacau

SEQ ID NO: 2128746 - RNA, 19 nt, Artificial Sequence
  Description of Artificial Sequence: Synthetic oligonucleotide
  Sense strand starting at position 635 of SEQ ID NO: 1882536
guuauagcgagcuauuacu

SEQ ID NO: 2128747 - RNA, 19 nt, Artificial Sequence
  Description of Artificial Sequence: Synthetic oligonucleotide
  Antisense strand to SEQ ID NO: 2128746
aguaauagcucgcuauaac

SEQ ID NO: 2128748 - RNA, 19 nt, Artificial Sequence
  Description of Artificial Sequence: Synthetic oligonucleotide
  Sense strand starting at position 677 of SEQ ID NO: 1882536
ugcaaucuuuauguacaga

SEQ ID NO: 2128749 - RNA, 19 nt, Artificial Sequence
  Description of Artificial Sequence: Synthetic oligonucleotide
  Antisense strand to SEQ ID NO: 2128748
ucuguacauaaagauugca

SEQ ID NO: 2128750 - RNA, 19 nt, Artificial Sequence
  Description of Artificial Sequence: Synthetic oligonucleotide
  Sense strand starting at position 685 of SEQ ID NO: 1882536
uuauguacagauugcuuau

SEQ ID NO: 2128751 - RNA, 19 nt, Artificial Sequence
  Description of Artificial Sequence: Synthetic oligonucleotide
  Antisense strand to SEQ ID NO: 2128750
auaagcaaucuguacauaa

SEQ ID NO: 2128752 - RNA, 19 nt, Artificial Sequence
  Description of Artificial Sequence: Synthetic oligonucleotide
  Sense strand starting at position 687 of SEQ ID NO: 1882536
auguacagauugcuuauua

SEQ ID NO: 2128753 - RNA, 19 nt, Artificial Sequence
  Description of Artificial Sequence: Synthetic oligonucleotide
  Antisense strand to SEQ ID NO: 2128752
uaauaagcaaucuguacau

SEQ ID NO: 2128754 - RNA, 19 nt, Artificial Sequence
  Description of Artificial Sequence: Synthetic oligonucleotide
  Sense strand starting at position 688 of SEQ ID NO: 1882536
uguacagauugcuuauuaa

SEQ ID NO: 2128755 - RNA, 19 nt, Artificial Sequence
  Description of Artificial Sequence: Synthetic oligonucleotide
  Antisense strand to SEQ ID NO: 2128754
uuaauaagcaaucuguaca

SEQ ID NO: 2128756 - RNA, 19 nt, Artificial Sequence
  Description of Artificial Sequence: Synthetic oligonucleotide
  Sense strand starting at position 752 of SEQ ID NO: 1882536
ugguacuucugggccacaa

SEQ ID NO: 2128757 - RNA, 19 nt, Artificial Sequence
  Description of Artificial Sequence: Synthetic oligonucleotide
  Antisense strand to SEQ ID NO: 2128756
uuguggcccagaaguacca

SEQ ID NO: 2128758 - RNA, 19 nt, Artificial Sequence
  Description of Artificial Sequence: Synthetic oligonucleotide
  Sense strand starting at position 754 of SEQ ID NO: 1882536
guacuucugggccacaaga

SEQ ID NO: 2128759 - RNA, 19 nt, Artificial Sequence
  Description of Artificial Sequence: Synthetic oligonucleotide
  Antisense strand to SEQ ID NO: 2128758
ucuuguggcccagaaguac

SEQ ID NO: 2128760 - RNA, 19 nt, Artificial Sequence
  Description of Artificial Sequence: Synthetic oligonucleotide
  Sense strand starting at position 788 of SEQ ID NO: 1882536
augugagcucauuaacccu

SEQ ID NO: 2128761 - RNA, 19 nt, Artificial Sequence
  Description of Artificial Sequence: Synthetic oligonucleotide
  Antisense strand to SEQ ID NO: 2128760
aggguuaaugagcucacau

SEQ ID NO: 2128762 - RNA, 19 nt, Artificial Sequence
  Description of Artificial Sequence: Synthetic oligonucleotide
  Sense strand starting at position 876 of SEQ ID NO: 1882536
ucuggaaauuggcuggauu

SEQ ID NO: 2128763 - RNA, 19 nt, Artificial Sequence
  Description of Artificial Sequence: Synthetic oligonucleotide
  Antisense strand to SEQ ID NO: 2128762
aauccagccaauuuccaga

SEQ ID NO: 2128764 - RNA, 19 nt, Artificial Sequence
  Description of Artificial Sequence: Synthetic oligonucleotide
  Sense strand starting at position 878 of SEQ ID NO: 1882536
uggaaauuggcuggauuac

SEQ ID NO: 2128765 - RNA, 19 nt, Artificial Sequence
  Description of Artificial Sequence: Synthetic oligonucleotide
  Antisense strand to SEQ ID NO: 2128764
guaauccagccaauuucca

SEQ ID NO: 2128766 - RNA, 19 nt, Artificial Sequence
  Description of Artificial Sequence: Synthetic oligonucleotide
  Sense strand starting at position 888 of SEQ ID NO: 1882536
cuggauuaccaaggguuaa

SEQ ID NO: 2128767 - RNA, 19 nt, Artificial Sequence
  Description of Artificial Sequence: Synthetic oligonucleotide
  Antisense strand to SEQ ID NO: 2128766
uuaacccuugguaauccag

SEQ ID NO: 2128768 - RNA, 19 nt, Artificial Sequence
  Description of Artificial Sequence: Synthetic oligonucleotide
  Sense strand starting at position 889 of SEQ ID NO: 1882536
uggauuaccaaggguuaac

SEQ ID NO: 2128769 - RNA, 19 nt, Artificial Sequence
  Description of Artificial Sequence: Synthetic oligonucleotide
  Antisense strand to SEQ ID NO: 2128768
guuaacccuugguaaucca

SEQ ID NO: 2128770 - RNA, 19 nt, Artificial Sequence
  Description of Artificial Sequence: Synthetic oligonucleotide
  Sense strand starting at position 1042 of SEQ ID NO: 1882536
ccagauugguccuucucca

SEQ ID NO: 2128771 - RNA, 19 nt, Artificial Sequence
  Description of Artificial Sequence: Synthetic oligonucleotide
  Antisense strand to SEQ ID NO: 2128770
uggagaaggaccaaucugg

SEQ ID NO: 2128772 - RNA, 19 nt, Artificial Sequence
  Description of Artificial Sequence: Synthetic oligonucleotide
  Sense strand starting at position 1125 of SEQ ID NO: 1882536
guugauuucuuguugcaag

SEQ ID NO: 2128773 - RNA, 19 nt, Artificial Sequence
  Description of Artificial Sequence: Synthetic oligonucleotide
  Antisense strand to SEQ ID NO: 2128772
cuugcaacaagaaaucaac

SEQ ID NO: 2128774 - RNA, 19 nt, Artificial Sequence
  Description of Artificial Sequence: Synthetic oligonucleotide
  Sense strand starting at position 1401 of SEQ ID NO: 1882536
aaguaaacgcuggaugagu

SEQ ID NO: 2128775 - RNA, 19 nt, Artificial Sequence
  Description of Artificial Sequence: Synthetic oligonucleotide
  Antisense strand to SEQ ID NO: 2128774
acucauccagcguuuacuu

SEQ ID NO: 2128776 - RNA, 19 nt, Artificial Sequence
  Description of Artificial Sequence: Synthetic oligonucleotide
  Sense strand starting at position 1438 of SEQ ID NO: 1882536
aagggagggugguugauua

SEQ ID NO: 2128777 - RNA, 19 nt, Artificial Sequence
  Description of Artificial Sequence: Synthetic oligonucleotide
  Antisense strand to SEQ ID NO: 2128776
uaaucaaccacccucccuu

SEQ ID NO: 2128778 - RNA, 19 nt, Artificial Sequence
  Description of Artificial Sequence: Synthetic oligonucleotide
  Sense strand starting at position 1439 of SEQ ID NO: 1882536
agggagggugguugauuau

SEQ ID NO: 2128779 - RNA, 19 nt, Artificial Sequence
  Description of Artificial Sequence: Synthetic oligonucleotide
  Antisense strand to SEQ ID NO: 2128778
auaaucaaccacccucccu

SEQ ID NO: 2128780 - RNA, 19 nt, Artificial Sequence
  Description of Artificial Sequence: Synthetic oligonucleotide
  Sense strand starting at position 1440 of SEQ ID NO: 1882536
gggagggugguugauuauu

SEQ ID NO: 2128781 - RNA, 19 nt, Artificial Sequence
  Description of Artificial Sequence: Synthetic oligonucleotide
  Antisense strand to SEQ ID NO: 2128780
aauaaucaaccacccuccc

SEQ ID NO: 2128782 - RNA, 19 nt, Artificial Sequence
  Description of Artificial Sequence: Synthetic oligonucleotide
  Sense strand starting at position 1665 of SEQ ID NO: 1882536
ccugucuuucuccgagaaa

SEQ ID NO: 2128783 - RNA, 19 nt, Artificial Sequence
  Description of Artificial Sequence: Synthetic oligonucleotide
  Antisense strand to SEQ ID NO: 2128782
uuucucggagaaagacagg

SEQ ID NO: 2128784 - RNA, 19 nt, Artificial Sequence
  Description of Artificial Sequence: Synthetic oligonucleotide
  Sense strand starting at position 1719 of SEQ ID NO: 1882536
agauguaaucaguacgggu

SEQ ID NO: 2128785 - RNA, 19 nt, Artificial Sequence
  Description of Artificial Sequence: Synthetic oligonucleotide
  Antisense strand to SEQ ID NO: 2128784
acccguacugauuacaucu

SEQ ID NO: 2128786 - RNA, 19 nt, Artificial Sequence
  Description of Artificial Sequence: Synthetic oligonucleotide
  Sense strand starting at position 2012 of SEQ ID NO: 1882536
cuugucgcgagacauuaua

SEQ ID NO: 2128787 - RNA, 19 nt, Artificial Sequence
  Description of Artificial Sequence: Synthetic oligonucleotide
  Antisense strand to SEQ ID NO: 2128786
uauaaugucucgcgacaag

SEQ ID NO: 2128788 - RNA, 19 nt, Artificial Sequence
  Description of Artificial Sequence: Synthetic oligonucleotide
  Sense strand starting at position 2038 of SEQ ID NO: 1882536
cgugaacucauuggucaac

SEQ ID NO: 2128789 - RNA, 19 nt, Artificial Sequence
  Description of Artificial Sequence: Synthetic oligonucleotide
  Antisense strand to SEQ ID NO: 2128788
guugaccaaugaguucacg

SEQ ID NO: 2128790 - RNA, 19 nt, Artificial Sequence
  Description of Artificial Sequence: Synthetic oligonucleotide
  Sense strand starting at position 2202 of SEQ ID NO: 1882536
ccacuuccgcccuggagaa

SEQ ID NO: 2128791 - RNA, 19 nt, Artificial Sequence
  Description of Artificial Sequence: Synthetic oligonucleotide
  Antisense strand to SEQ ID NO: 2128790
uucuccagggcggaagugg

SEQ ID NO: 2128792 - RNA, 19 nt, Artificial Sequence
  Description of Artificial Sequence: Synthetic oligonucleotide
  Sense strand starting at position 2633 of SEQ ID NO: 1882536
ucagguaacucuucgaaag

SEQ ID NO: 2128793 - RNA, 19 nt, Artificial Sequence
  Description of Artificial Sequence: Synthetic oligonucleotide
  Antisense strand to SEQ ID NO: 2128792
cuuucgaagaguuaccuga

SEQ ID NO: 2128794 - RNA, 19 nt, Artificial Sequence
  Description of Artificial Sequence: Synthetic oligonucleotide
  Sense strand starting at position 2634 of SEQ ID NO: 1882536
cagguaacucuucgaaaga

SEQ ID NO: 2128795 - RNA, 19 nt, Artificial Sequence
  Description of Artificial Sequence: Synthetic oligonucleotide
  Antisense strand to SEQ ID NO: 2128794
ucuuucgaagaguuaccug

SEQ ID NO: 2128796 - RNA, 19 nt, Artificial Sequence
  Description of Artificial Sequence: Synthetic oligonucleotide
  Sense strand starting at position 2674 of SEQ ID NO: 1882536
gguuauaccuucucgaggu

SEQ ID NO: 2128797 - RNA, 19 nt, Artificial Sequence
  Description of Artificial Sequence: Synthetic oligonucleotide
  Antisense strand to SEQ ID NO: 2128796
accucgagaagguauaacc

SEQ ID NO: 2128798 - RNA, 19 nt, Artificial Sequence
  Description of Artificial Sequence: Synthetic oligonucleotide
  Sense strand starting at position 3029 of SEQ ID NO: 1882536
uaugcaaguggugacuaaa

SEQ ID NO: 2128799 - RNA, 19 nt, Artificial Sequence
  Description of Artificial Sequence: Synthetic oligonucleotide
  Antisense strand to SEQ ID NO: 2128798
uuuagucaccacuugcaua

SEQ ID NO: 2128800 - RNA, 19 nt, Artificial Sequence
  Description of Artificial Sequence: Synthetic oligonucleotide
  Sense strand starting at position 3032 of SEQ ID NO: 1882536
gcaaguggugacuaaaucu

SEQ ID NO: 2128801 - RNA, 19 nt, Artificial Sequence
  Description of Artificial Sequence: Synthetic oligonucleotide
  Antisense strand to SEQ ID NO: 2128800
agauuuagucaccacuugc

SEQ ID NO: 2128802 - RNA, 19 nt, Artificial Sequence
  Description of Artificial Sequence: Synthetic oligonucleotide
  Sense strand starting at position 3124 of SEQ ID NO: 1882536
caggauauauucuuacgac

SEQ ID NO: 2128803 - RNA, 19 nt, Artificial Sequence
  Description of Artificial Sequence: Synthetic oligonucleotide
  Antisense strand to SEQ ID NO: 2128802
gucguaagaauauauccug

SEQ ID NO: 2128804 - RNA, 19 nt, Artificial Sequence
  Description of Artificial Sequence: Synthetic oligonucleotide
  Sense strand starting at position 3174 of SEQ ID NO: 1882536
aucaguuucuuaucggagu

SEQ ID NO: 2128805 - RNA, 19 nt, Artificial Sequence
  Description of Artificial Sequence: Synthetic oligonucleotide
  Antisense strand to SEQ ID NO: 2128804
acuccgauaagaaacugau

SEQ ID NO: 2128806 - RNA, 19 nt, Artificial Sequence
  Description of Artificial Sequence: Synthetic oligonucleotide
  Sense strand starting at position 3181 of SEQ ID NO: 1882536
ucuuaucggaguuaugaga

SEQ ID NO: 2128807 - RNA, 19 nt, Artificial Sequence
  Description of Artificial Sequence: Synthetic oligonucleotide
  Antisense strand to SEQ ID NO: 2128806
ucucauaacuccgauaaga

SEQ ID NO: 2128808 - RNA, 19 nt, Artificial Sequence
  Description of Artificial Sequence: Synthetic oligonucleotide
  Sense strand starting at position 3202 of SEQ ID NO: 1882536
uuaacuccguccuuugaau

SEQ ID NO: 2128809 - RNA, 19 nt, Artificial Sequence
  Description of Artificial Sequence: Synthetic oligonucleotide
  Antisense strand to SEQ ID NO: 2128808
auucaaaggacggaguuaa

SEQ ID NO: 2128810 - RNA, 19 nt, Artificial Sequence
  Description of Artificial Sequence: Synthetic oligonucleotide
  Sense strand starting at position 3210 of SEQ ID NO: 1882536
guccuuugaauugagguuu

SEQ ID NO: 2128811 - RNA, 19 nt, Artificial Sequence
  Description of Artificial Sequence: Synthetic oligonucleotide
  Antisense strand to SEQ ID NO: 2128810
aaaccucaauucaaaggac

SEQ ID NO: 2128812 - RNA, 19 nt, Artificial Sequence
  Description of Artificial Sequence: Synthetic oligonucleotide
  Sense strand starting at position 3222 of SEQ ID NO: 1882536
gagguuucccuccagucuu

SEQ ID NO: 2128813 - RNA, 19 nt, Artificial Sequence
  Description of Artificial Sequence: Synthetic oligonucleotide
  Antisense strand to SEQ ID NO: 2128812
aagacuggagggaaaccuc

SEQ ID NO: 2128814 - RNA, 19 nt, Artificial Sequence
  Description of Artificial Sequence: Synthetic oligonucleotide
  Sense strand starting at position 3382 of SEQ ID NO: 1882536
agcguuaggacucaaguuu

SEQ ID NO: 2128815 - RNA, 19 nt, Artificial Sequence
  Description of Artificial Sequence: Synthetic oligonucleotide
  Antisense strand to SEQ ID NO: 2128814
aaacuugaguccuaacgcu

SEQ ID NO: 2128816 - RNA, 19 nt, Artificial Sequence
  Description of Artificial Sequence: Synthetic oligonucleotide
  Sense strand starting at position 3400 of SEQ ID NO: 1882536
uguucugcccuguagaaug

SEQ ID NO: 2128817 - RNA, 19 nt, Artificial Sequence
  Description of Artificial Sequence: Synthetic oligonucleotide
  Antisense strand to SEQ ID NO: 2128816
cauucuacagggcagaaca

SEQ ID NO: 2128818 - RNA, 19 nt, Artificial Sequence
  Description of Artificial Sequence: Synthetic oligonucleotide
  Sense strand starting at position 3462 of SEQ ID NO: 1882536
uuggauugauuuggagacu

SEQ ID NO: 2128819 - RNA, 19 nt, Artificial Sequence
  Description of Artificial Sequence: Synthetic oligonucleotide
  Antisense strand to SEQ ID NO: 2128818
agucuccaaaucaauccaa

SEQ ID NO: 2128820 - RNA, 19 nt, Artificial Sequence
  Description of Artificial Sequence: Synthetic oligonucleotide
  Sense strand starting at position 124 of SEQ ID NO: 1882537
ccgugucuggcaagcgaau

SEQ ID NO: 2128821 - RNA, 19 nt, Artificial Sequence
  Description of Artificial Sequence: Synthetic oligonucleotide
  Antisense strand to SEQ ID NO: 2128820
auucgcuugccagacacgg

SEQ ID NO: 2128822 - RNA, 19 nt, Artificial Sequence
  Description of Artificial Sequence: Synthetic oligonucleotide
  Sense strand starting at position 143 of SEQ ID NO: 1882537
ggcaaugcuaagugaccau

SEQ ID NO: 2128823 - RNA, 19 nt, Artificial Sequence
  Description of Artificial Sequence: Synthetic oligonucleotide
  Antisense strand to SEQ ID NO: 2128822
auggucacuuagcauugcc

SEQ ID NO: 2128824 - RNA, 19 nt, Artificial Sequence
  Description of Artificial Sequence: Synthetic oligonucleotide
  Sense strand starting at position 186 of SEQ ID NO: 1882537
gggcauucuauggagucua

SEQ ID NO: 2128825 - RNA, 19 nt, Artificial Sequence
  Description of Artificial Sequence: Synthetic oligonucleotide
  Antisense strand to SEQ ID NO: 2128824
uagacuccauagaaugccc

SEQ ID NO: 2128826 - RNA, 19 nt, Artificial Sequence
  Description of Artificial Sequence: Synthetic oligonucleotide
  Sense strand starting at position 506 of SEQ ID NO: 1882537
agugacugagcccgaauua

SEQ ID NO: 2128827 - RNA, 19 nt, Artificial Sequence
  Description of Artificial Sequence: Synthetic oligonucleotide
  Antisense strand to SEQ ID NO: 2128826
uaauucgggcucagucacu

SEQ ID NO: 2128828 - RNA, 19 nt, Artificial Sequence
  Description of Artificial Sequence: Synthetic oligonucleotide
  Sense strand starting at position 541 of SEQ ID NO: 1882537
ccucuaguucuaggauguu

SEQ ID NO: 2128829 - RNA, 19 nt, Artificial Sequence
  Description of Artificial Sequence: Synthetic oligonucleotide
  Antisense strand to SEQ ID NO: 2128828
aacauccuagaacuagagg

SEQ ID NO: 2128830 - RNA, 19 nt, Artificial Sequence
  Description of Artificial Sequence: Synthetic oligonucleotide
  Sense strand starting at position 575 of SEQ ID NO: 1882537
agcccuuauguccaagaac

SEQ ID NO: 2128831 - RNA, 19 nt, Artificial Sequence
  Description of Artificial Sequence: Synthetic oligonucleotide
  Antisense strand to SEQ ID NO: 2128830
guucuuggacauaagggcu

SEQ ID NO: 2128832 - RNA, 19 nt, Artificial Sequence
  Description of Artificial Sequence: Synthetic oligonucleotide
  Sense strand starting at position 584 of SEQ ID NO: 1882537
guccaagaaccauggguaa

SEQ ID NO: 2128833 - RNA, 19 nt, Artificial Sequence
  Description of Artificial Sequence: Synthetic oligonucleotide
  Antisense strand to SEQ ID NO: 2128832
uuacccaugguucuuggac

SEQ ID NO: 2128834 - RNA, 19 nt, Artificial Sequence
  Description of Artificial Sequence: Synthetic oligonucleotide
  Sense strand starting at position 716 of SEQ ID NO: 1882537
ggagcaaugugguucagaa

SEQ ID NO: 2128835 - RNA, 19 nt, Artificial Sequence
  Description of Artificial Sequence: Synthetic oligonucleotide
  Antisense strand to SEQ ID NO: 2128834
uucugaaccacauugcucc

SEQ ID NO: 2128836 - RNA, 19 nt, Artificial Sequence
  Description of Artificial Sequence: Synthetic oligonucleotide
  Sense strand starting at position 745 of SEQ ID NO: 1882537
uaggaagugucccucagau

SEQ ID NO: 2128837 - RNA, 19 nt, Artificial Sequence
  Description of Artificial Sequence: Synthetic oligonucleotide
  Antisense strand to SEQ ID NO: 2128836
aucugagggacacuuccua

SEQ ID NO: 2128838 - RNA, 19 nt, Artificial Sequence
  Description of Artificial Sequence: Synthetic oligonucleotide
  Sense strand starting at position 751 of SEQ ID NO: 1882537
gugucccucagauaaggau

SEQ ID NO: 2128839 - RNA, 19 nt, Artificial Sequence
  Description of Artificial Sequence: Synthetic oligonucleotide
  Antisense strand to SEQ ID NO: 2128838
auccuuaucugagggacac

SEQ ID NO: 2128840 - RNA, 19 nt, Artificial Sequence
  Description of Artificial Sequence: Synthetic oligonucleotide
  Sense strand starting at position 776 of SEQ ID NO: 1882537
ucagauagggcuuaggagu

SEQ ID NO: 2128841 - RNA, 19 nt, Artificial Sequence
  Description of Artificial Sequence: Synthetic oligonucleotide
  Antisense strand to SEQ ID NO: 2128840
acuccuaagcccuaucuga

SEQ ID NO: 2128842 - RNA, 19 nt, Artificial Sequence
  Description of Artificial Sequence: Synthetic oligonucleotide
  Sense strand starting at position 1040 of SEQ ID NO: 1882537
cguccacaggucuauugua

SEQ ID NO: 2128843 - RNA, 19 nt, Artificial Sequence
  Description of Artificial Sequence: Synthetic oligonucleotide
  Antisense strand to SEQ ID NO: 2128842
uacaauagaccuguggacg

SEQ ID NO: 2128844 - RNA, 19 nt, Artificial Sequence
  Description of Artificial Sequence: Synthetic oligonucleotide
  Sense strand starting at position 1050 of SEQ ID NO: 1882537
ucuauuguacccugcuaga

SEQ ID NO: 2128845 - RNA, 19 nt, Artificial Sequence
  Description of Artificial Sequence: Synthetic oligonucleotide
  Antisense strand to SEQ ID NO: 2128844
ucuagcaggguacaauaga

SEQ ID NO: 2128846 - RNA, 19 nt, Artificial Sequence
  Description of Artificial Sequence: Synthetic oligonucleotide
  Sense strand starting at position 1105 of SEQ ID NO: 1882537
gcaccagcucccugaggaa

SEQ ID NO: 2128847 - RNA, 19 nt, Artificial Sequence
  Description of Artificial Sequence: Synthetic oligonucleotide
  Antisense strand to SEQ ID NO: 2128846
uuccucagggagcuggugc

SEQ ID NO: 2128848 - RNA, 19 nt, Artificial Sequence
  Description of Artificial Sequence: Synthetic oligonucleotide
  Sense strand starting at position 1213 of SEQ ID NO: 1882537
ccugccagaccucauugau

SEQ ID NO: 2128849 - RNA, 19 nt, Artificial Sequence
  Description of Artificial Sequence: Synthetic oligonucleotide
  Antisense strand to SEQ ID NO: 2128848
aucaaugaggucuggcagg

SEQ ID NO: 2128850 - RNA, 19 nt, Artificial Sequence
  Description of Artificial Sequence: Synthetic oligonucleotide
  Sense strand starting at position 1423 of SEQ ID NO: 1882537
gggugauaagggcauguga

SEQ ID NO: 2128851 - RNA, 19 nt, Artificial Sequence
  Description of Artificial Sequence: Synthetic oligonucleotide
  Antisense strand to SEQ ID NO: 2128850
ucacaugcccuuaucaccc

SEQ ID NO: 2128852 - RNA, 19 nt, Artificial Sequence
  Description of Artificial Sequence: Synthetic oligonucleotide
  Sense strand starting at position 2232 of SEQ ID NO: 1882537
aagguaguccucugcauuu

SEQ ID NO: 2128853 - RNA, 19 nt, Artificial Sequence
  Description of Artificial Sequence: Synthetic oligonucleotide
  Antisense strand to SEQ ID NO: 2128852
aaaugcagaggacuaccuu

SEQ ID NO: 2128854 - RNA, 19 nt, Artificial Sequence
  Description of Artificial Sequence: Synthetic oligonucleotide
  Sense strand starting at position 2349 of SEQ ID NO: 1882537
aggucagcgacuuacaacu

SEQ ID NO: 2128855 - RNA, 19 nt, Artificial Sequence
  Description of Artificial Sequence: Synthetic oligonucleotide
  Antisense strand to SEQ ID NO: 2128854
aguuguaagucgcugaccu

SEQ ID NO: 2128856 - RNA, 19 nt, Artificial Sequence
  Description of Artificial Sequence: Synthetic oligonucleotide
  Sense strand starting at position 2543 of SEQ ID NO: 1882537
cguaauuucgaccagucuu

SEQ ID NO: 2128857 - RNA, 19 nt, Artificial Sequence
  Description of Artificial Sequence: Synthetic oligonucleotide
  Antisense strand to SEQ ID NO: 2128856
aagacuggucgaaauuacg

SEQ ID NO: 2128858 - RNA, 19 nt, Artificial Sequence
  Description of Artificial Sequence: Synthetic oligonucleotide
  Sense strand starting at position 2578 of SEQ ID NO: 1882537
ccagaaucuggcugucuga

SEQ ID NO: 2128859 - RNA, 19 nt, Artificial Sequence
  Description of Artificial Sequence: Synthetic oligonucleotide
  Antisense strand to SEQ ID NO: 2128858
ucagacagccagauucugg

SEQ ID NO: 2128860 - RNA, 19 nt, Artificial Sequence
  Description of Artificial Sequence: Synthetic oligonucleotide
  Sense strand starting at position 2715 of SEQ ID NO: 1882537
uaaagacguuucucuagag

SEQ ID NO: 2128861 - RNA, 19 nt, Artificial Sequence
  Description of Artificial Sequence: Synthetic oligonucleotide
  Antisense strand to SEQ ID NO: 2128860
cucuagagaaacgucuuua

SEQ ID NO: 2128862 - RNA, 19 nt, Artificial Sequence
  Description of Artificial Sequence: Synthetic oligonucleotide
  Sense strand starting at position 2716 of SEQ ID NO: 1882537
aaagacguuucucuagaga

SEQ ID NO: 2128863 - RNA, 19 nt, Artificial Sequence
  Description of Artificial Sequence: Synthetic oligonucleotide
  Antisense strand to SEQ ID NO: 2128862
ucucuagagaaacgucuuu

SEQ ID NO: 2128864 - RNA, 19 nt, Artificial Sequence
  Description of Artificial Sequence: Synthetic oligonucleotide
  Sense strand starting at position 2719 of SEQ ID NO: 1882537
gacguuucucuagagauaa

SEQ ID NO: 2128865 - RNA, 19 nt, Artificial Sequence
  Description of Artificial Sequence: Synthetic oligonucleotide
  Antisense strand to SEQ ID NO: 2128864
uuaucucuagagaaacguc

SEQ ID NO: 2128866 - RNA, 19 nt, Artificial Sequence
  Description of Artificial Sequence: Synthetic oligonucleotide
  Sense strand starting at position 2766 of SEQ ID NO: 1882537
cucuguuuacaaggucauu

SEQ ID NO: 2128867 - RNA, 19 nt, Artificial Sequence
  Description of Artificial Sequence: Synthetic oligonucleotide
  Antisense strand to SEQ ID NO: 2128866
aaugaccuuguaaacagag

SEQ ID NO: 2128868 - RNA, 19 nt, Artificial Sequence
  Description of Artificial Sequence: Synthetic oligonucleotide
  Sense strand starting at position 2776 of SEQ ID NO: 1882537
aaggucauugcuuggucua

SEQ ID NO: 2128869 - RNA, 19 nt, Artificial Sequence
  Description of Artificial Sequence: Synthetic oligonucleotide
  Antisense strand to SEQ ID NO: 2128868
uagaccaagcaaugaccuu

SEQ ID NO: 2128870 - RNA, 19 nt, Artificial Sequence
  Description of Artificial Sequence: Synthetic oligonucleotide
  Sense strand starting at position 2777 of SEQ ID NO: 1882537
aggucauugcuuggucuaa

SEQ ID NO: 2128871 - RNA, 19 nt, Artificial Sequence
  Description of Artificial Sequence: Synthetic oligonucleotide
  Antisense strand to SEQ ID NO: 2128870
uuagaccaagcaaugaccu

SEQ ID NO: 2128872 - RNA, 19 nt, Artificial Sequence
  Description of Artificial Sequence: Synthetic oligonucleotide
  Sense strand starting at position 2778 of SEQ ID NO: 1882537
ggucauugcuuggucuaaa

SEQ ID NO: 2128873 - RNA, 19 nt, Artificial Sequence
  Description of Artificial Sequence: Synthetic oligonucleotide
  Antisense strand to SEQ ID NO: 2128872
uuuagaccaagcaaugacc

SEQ ID NO: 2128874 - RNA, 19 nt, Artificial Sequence
  Description of Artificial Sequence: Synthetic oligonucleotide
  Sense strand starting at position 2904 of SEQ ID NO: 1882537
gugugaagccgugaucuga

SEQ ID NO: 2128875 - RNA, 19 nt, Artificial Sequence
  Description of Artificial Sequence: Synthetic oligonucleotide
  Antisense strand to SEQ ID NO: 2128874
ucagaucacggcuucacac

SEQ ID NO: 2128876 - RNA, 19 nt, Artificial Sequence
  Description of Artificial Sequence: Synthetic oligonucleotide
  Sense strand starting at position 3102 of SEQ ID NO: 1882537
ugguguaaaucuccauaga

SEQ ID NO: 2128877 - RNA, 19 nt, Artificial Sequence
  Description of Artificial Sequence: Synthetic oligonucleotide
  Antisense strand to SEQ ID NO: 2128876
ucuauggagauuuacacca

SEQ ID NO: 2128878 - RNA, 19 nt, Artificial Sequence
  Description of Artificial Sequence: Synthetic oligonucleotide
  Sense strand starting at position 3103 of SEQ ID NO: 1882537
gguguaaaucuccauagac

SEQ ID NO: 2128879 - RNA, 19 nt, Artificial Sequence
  Description of Artificial Sequence: Synthetic oligonucleotide
  Antisense strand to SEQ ID NO: 2128878
gucuauggagauuuacacc

SEQ ID NO: 2128880 - RNA, 19 nt, Artificial Sequence
  Description of Artificial Sequence: Synthetic oligonucleotide
  Sense strand starting at position 3260 of SEQ ID NO: 1882537
ggguuuagggaauggaucu

SEQ ID NO: 2128881 - RNA, 19 nt, Artificial Sequence
  Description of Artificial Sequence: Synthetic oligonucleotide
  Antisense strand to SEQ ID NO: 2128880
agauccauucccuaaaccc

SEQ ID NO: 2128882 - RNA, 19 nt, Artificial Sequence
  Description of Artificial Sequence: Synthetic oligonucleotide
  Sense strand starting at position 3267 of SEQ ID NO: 1882537
gggaauggaucugaacauu

SEQ ID NO: 2128883 - RNA, 19 nt, Artificial Sequence
  Description of Artificial Sequence: Synthetic oligonucleotide
  Antisense strand to SEQ ID NO: 2128882
aauguucagauccauuccc

SEQ ID NO: 2128884 - RNA, 19 nt, Artificial Sequence
  Description of Artificial Sequence: Synthetic oligonucleotide
  Sense strand starting at position 3362 of SEQ ID NO: 1882537
gccagaaaugagcaguuaa

SEQ ID NO: 2128885 - RNA, 19 nt, Artificial Sequence
  Description of Artificial Sequence: Synthetic oligonucleotide
  Antisense strand to SEQ ID NO: 2128884
uuaacugcucauuucuggc

SEQ ID NO: 2128886 - RNA, 19 nt, Artificial Sequence
  Description of Artificial Sequence: Synthetic oligonucleotide
  Sense strand starting at position 3415 of SEQ ID NO: 1882537
cuccuuaguccuggacgaa

SEQ ID NO: 2128887 - RNA, 19 nt, Artificial Sequence
  Description of Artificial Sequence: Synthetic oligonucleotide
  Antisense strand to SEQ ID NO: 2128886
uucguccaggacuaaggag

SEQ ID NO: 2128888 - RNA, 19 nt, Artificial Sequence
  Description of Artificial Sequence: Synthetic oligonucleotide
  Sense strand starting at position 3416 of SEQ ID NO: 1882537
uccuuaguccuggacgaag

SEQ ID NO: 2128889 - RNA, 19 nt, Artificial Sequence
  Description of Artificial Sequence: Synthetic oligonucleotide
  Antisense strand to SEQ ID NO: 2128888
cuucguccaggacuaagga

SEQ ID NO: 2128890 - RNA, 19 nt, Artificial Sequence
  Description of Artificial Sequence: Synthetic oligonucleotide
  Sense strand starting at position 3418 of SEQ ID NO: 1882537
cuuaguccuggacgaagaa

SEQ ID NO: 2128891 - RNA, 19 nt, Artificial Sequence
  Description of Artificial Sequence: Synthetic oligonucleotide
  Antisense strand to SEQ ID NO: 2128890
uucuucguccaggacuaag

SEQ ID NO: 2128892 - RNA, 19 nt, Artificial Sequence
  Description of Artificial Sequence: Synthetic oligonucleotide
  Sense strand starting at position 3576 of SEQ ID NO: 1882537
aguucugaacucugcacaa

SEQ ID NO: 2128893 - RNA, 19 nt, Artificial Sequence
  Description of Artificial Sequence: Synthetic oligonucleotide
  Antisense strand to SEQ ID NO: 2128892
uugugcagaguucagaacu

SEQ ID NO: 2128894 - RNA, 19 nt, Artificial Sequence
  Description of Artificial Sequence: Synthetic oligonucleotide
  Sense strand starting at position 3644 of SEQ ID NO: 1882537
ggccaaggauuugggagaa

SEQ ID NO: 2128895 - RNA, 19 nt, Artificial Sequence
  Description of Artificial Sequence: Synthetic oligonucleotide
  Antisense strand to SEQ ID NO: 2128894
uucucccaaauccuuggcc

SEQ ID NO: 2128896 - RNA, 19 nt, Artificial Sequence
  Description of Artificial Sequence: Synthetic oligonucleotide
  Sense strand starting at position 3711 of SEQ ID NO: 1882537
ggaggcaccuggguuauua

SEQ ID NO: 2128897 - RNA, 19 nt, Artificial Sequence
  Description of Artificial Sequence: Synthetic oligonucleotide
  Antisense strand to SEQ ID NO: 2128896
uaauaacccaggugccucc

SEQ ID NO: 2128898 - RNA, 19 nt, Artificial Sequence
  Description of Artificial Sequence: Synthetic oligonucleotide
  Sense strand starting at position 3852 of SEQ ID NO: 1882537
ccguguuuccaugacaacu

SEQ ID NO: 2128899 - RNA, 19 nt, Artificial Sequence
  Description of Artificial Sequence: Synthetic oligonucleotide
  Antisense strand to SEQ ID NO: 2128898
aguugucauggaaacacgg

SEQ ID NO: 2128900 - RNA, 19 nt, Artificial Sequence
  Description of Artificial Sequence: Synthetic oligonucleotide
  Sense strand starting at position 778 of SEQ ID NO: 1882538
acggaaagaugaucagcua

SEQ ID NO: 2128901 - RNA, 19 nt, Artificial Sequence
  Description of Artificial Sequence: Synthetic oligonucleotide
  Antisense strand to SEQ ID NO: 2128900
uagcugaucaucuuuccgu

SEQ ID NO: 2128902 - RNA, 19 nt, Artificial Sequence
  Description of Artificial Sequence: Synthetic oligonucleotide
  Sense strand starting at position 814 of SEQ ID NO: 1882538
ggcauaugcuggcccauaa

SEQ ID NO: 2128903 - RNA, 19 nt, Artificial Sequence
  Description of Artificial Sequence: Synthetic oligonucleotide
  Antisense strand to SEQ ID NO: 2128902
uuaugggccagcauaugcc

SEQ ID NO: 2128904 - RNA, 19 nt, Artificial Sequence
  Description of Artificial Sequence: Synthetic oligonucleotide
  Sense strand starting at position 836 of SEQ ID NO: 1882538
cccuguagguucuugauau

SEQ ID NO: 2128905 - RNA, 19 nt, Artificial Sequence
  Description of Artificial Sequence: Synthetic oligonucleotide
  Antisense strand to SEQ ID NO: 2128904
auaucaagaaccuacaggg

SEQ ID NO: 2128906 - RNA, 19 nt, Artificial Sequence
  Description of Artificial Sequence: Synthetic oligonucleotide
  Sense strand starting at position 840 of SEQ ID NO: 1882538
guagguucuugauauuuau

SEQ ID NO: 2128907 - RNA, 19 nt, Artificial Sequence
  Description of Artificial Sequence: Synthetic oligonucleotide
  Antisense strand to SEQ ID NO: 2128906
auaaauaucaagaaccuac

SEQ ID NO: 2128908 - RNA, 19 nt, Artificial Sequence
  Description of Artificial Sequence: Synthetic oligonucleotide
  Sense strand starting at position 877 of SEQ ID NO: 1882538
uacugugguuucuuauguu

SEQ ID NO: 2128909 - RNA, 19 nt, Artificial Sequence
  Description of Artificial Sequence: Synthetic oligonucleotide
  Antisense strand to SEQ ID NO: 2128908
aacauaagaaaccacagua

SEQ ID NO: 2128910 - RNA, 19 nt, Artificial Sequence
  Description of Artificial Sequence: Synthetic oligonucleotide
  Sense strand starting at position 889 of SEQ ID NO: 1882538
uuauguuuccggcacacca

SEQ ID NO: 2128911 - RNA, 19 nt, Artificial Sequence
  Description of Artificial Sequence: Synthetic oligonucleotide
  Antisense strand to SEQ ID NO: 2128910
uggugugccggaaacauaa

SEQ ID NO: 2128912 - RNA, 19 nt, Artificial Sequence
  Description of Artificial Sequence: Synthetic oligonucleotide
  Sense strand starting at position 1724 of SEQ ID NO: 1882538
gacuucuagucuucugguu

SEQ ID NO: 2128913 - RNA, 19 nt, Artificial Sequence
  Description of Artificial Sequence: Synthetic oligonucleotide
  Antisense strand to SEQ ID NO: 2128912
aaccagaagacuagaaguc

SEQ ID NO: 2128914 - RNA, 19 nt, Artificial Sequence
  Description of Artificial Sequence: Synthetic oligonucleotide
  Sense strand starting at position 1730 of SEQ ID NO: 1882538
uagucuucugguugaagcu

SEQ ID NO: 2128915 - RNA, 19 nt, Artificial Sequence
  Description of Artificial Sequence: Synthetic oligonucleotide
  Antisense strand to SEQ ID NO: 2128914
agcuucaaccagaagacua

SEQ ID NO: 2128916 - RNA, 19 nt, Artificial Sequence
  Description of Artificial Sequence: Synthetic oligonucleotide
  Sense strand starting at position 2086 of SEQ ID NO: 1882538
cggucauggcgcuacuaga

SEQ ID NO: 2128917 - RNA, 19 nt, Artificial Sequence
  Description of Artificial Sequence: Synthetic oligonucleotide
  Antisense strand to SEQ ID NO: 2128916
ucuaguagcgccaugaccg

SEQ ID NO: 2128918 - RNA, 19 nt, Artificial Sequence
  Description of Artificial Sequence: Synthetic oligonucleotide
  Sense strand starting at position 2188 of SEQ ID NO: 1882538
acaguuucucuaugcgauc

SEQ ID NO: 2128919 - RNA, 19 nt, Artificial Sequence
  Description of Artificial Sequence: Synthetic oligonucleotide
  Antisense strand to SEQ ID NO: 2128918
gaucgcauagagaaacugu

SEQ ID NO: 2128920 - RNA, 19 nt, Artificial Sequence
  Description of Artificial Sequence: Synthetic oligonucleotide
  Sense strand starting at position 2558 of SEQ ID NO: 1882538
ugggaaaccuaugaaauuu

SEQ ID NO: 2128921 - RNA, 19 nt, Artificial Sequence
  Description of Artificial Sequence: Synthetic oligonucleotide
  Antisense strand to SEQ ID NO: 2128920
aaauuucauagguuuccca

SEQ ID NO: 2128922 - RNA, 19 nt, Artificial Sequence
  Description of Artificial Sequence: Synthetic oligonucleotide
  Sense strand starting at position 2695 of SEQ ID NO: 1882538
gguugaaugcuuuaugcau

SEQ ID NO: 2128923 - RNA, 19 nt, Artificial Sequence
  Description of Artificial Sequence: Synthetic oligonucleotide
  Antisense strand to SEQ ID NO: 2128922
augcauaaagcauucaacc

SEQ ID NO: 2128924 - RNA, 19 nt, Artificial Sequence
  Description of Artificial Sequence: Synthetic oligonucleotide
  Sense strand starting at position 2701 of SEQ ID NO: 1882538
augcuuuaugcauggaaga

SEQ ID NO: 2128925 - RNA, 19 nt, Artificial Sequence
  Description of Artificial Sequence: Synthetic oligonucleotide
  Antisense strand to SEQ ID NO: 2128924
ucuuccaugcauaaagcau

SEQ ID NO: 2128926 - RNA, 19 nt, Artificial Sequence
  Description of Artificial Sequence: Synthetic oligonucleotide
  Sense strand starting at position 2702 of SEQ ID NO: 1882538
ugcuuuaugcauggaagaa

SEQ ID NO: 2128927 - RNA, 19 nt, Artificial Sequence
  Description of Artificial Sequence: Synthetic oligonucleotide
  Antisense strand to SEQ ID NO: 2128926
uucuuccaugcauaaagca

SEQ ID NO: 2128928 - RNA, 19 nt, Artificial Sequence
  Description of Artificial Sequence: Synthetic oligonucleotide
  Sense strand starting at position 2840 of SEQ ID NO: 1882538
gccauuuccuucuagagau

SEQ ID NO: 2128929 - RNA, 19 nt, Artificial Sequence
  Description of Artificial Sequence: Synthetic oligonucleotide
  Antisense strand to SEQ ID NO: 2128928
aucucuagaaggaaauggc

SEQ ID NO: 2128930 - RNA, 19 nt, Artificial Sequence
  Description of Artificial Sequence: Synthetic oligonucleotide
  Sense strand starting at position 2847 of SEQ ID NO: 1882538
ccuucuagagauugguuau

SEQ ID NO: 2128931 - RNA, 19 nt, Artificial Sequence
  Description of Artificial Sequence: Synthetic oligonucleotide
  Antisense strand to SEQ ID NO: 2128930
auaaccaaucucuagaagg

SEQ ID NO: 2128932 - RNA, 19 nt, Artificial Sequence
  Description of Artificial Sequence: Synthetic oligonucleotide
  Sense strand starting at position 2850 of SEQ ID NO: 1882538
ucuagagauugguuauuaa

SEQ ID NO: 2128933 - RNA, 19 nt, Artificial Sequence
  Description of Artificial Sequence: Synthetic oligonucleotide
  Antisense strand to SEQ ID NO: 2128932
uuaauaaccaaucucuaga

SEQ ID NO: 2128934 - RNA, 19 nt, Artificial Sequence
  Description of Artificial Sequence: Synthetic oligonucleotide
  Sense strand starting at position 2853 of SEQ ID NO: 1882538
agagauugguuauuaacug

SEQ ID NO: 2128935 - RNA, 19 nt, Artificial Sequence
  Description of Artificial Sequence: Synthetic oligonucleotide
  Antisense strand to SEQ ID NO: 2128934
caguuaauaaccaaucucu

SEQ ID NO: 2128936 - RNA, 19 nt, Artificial Sequence
  Description of Artificial Sequence: Synthetic oligonucleotide
  Sense strand starting at position 3098 of SEQ ID NO: 1882538
gagugauugcagcagugga

SEQ ID NO: 2128937 - RNA, 19 nt, Artificial Sequence
  Description of Artificial Sequence: Synthetic oligonucleotide
  Antisense strand to SEQ ID NO: 2128936
uccacugcugcaaucacuc

SEQ ID NO: 2128938 - RNA, 19 nt, Artificial Sequence
  Description of Artificial Sequence: Synthetic oligonucleotide
  Sense strand starting at position 3136 of SEQ ID NO: 1882538
uccuacauuagugagugua

SEQ ID NO: 2128939 - RNA, 19 nt, Artificial Sequence
  Description of Artificial Sequence: Synthetic oligonucleotide
  Antisense strand to SEQ ID NO: 2128938
uacacucacuaauguagga

SEQ ID NO: 2128940 - RNA, 19 nt, Artificial Sequence
  Description of Artificial Sequence: Synthetic oligonucleotide
  Sense strand starting at position 3138 of SEQ ID NO: 1882538
cuacauuagugaguguaua

SEQ ID NO: 2128941 - RNA, 19 nt, Artificial Sequence
  Description of Artificial Sequence: Synthetic oligonucleotide
  Antisense strand to SEQ ID NO: 2128940
uauacacucacuaauguag

SEQ ID NO: 2128942 - RNA, 19 nt, Artificial Sequence
  Description of Artificial Sequence: Synthetic oligonucleotide
  Sense strand starting at position 3139 of SEQ ID NO: 1882538
uacauuagugaguguauac

SEQ ID NO: 2128943 - RNA, 19 nt, Artificial Sequence
  Description of Artificial Sequence: Synthetic oligonucleotide
  Antisense strand to SEQ ID NO: 2128942
guauacacucacuaaugua

SEQ ID NO: 2128944 - RNA, 19 nt, Artificial Sequence
  Description of Artificial Sequence: Synthetic oligonucleotide
  Sense strand starting at position 3204 of SEQ ID NO: 1882538
aggccaacucugcaacaaa

SEQ ID NO: 2128945 - RNA, 19 nt, Artificial Sequence
  Description of Artificial Sequence: Synthetic oligonucleotide
  Antisense strand to SEQ ID NO: 2128944
uuuguugcagaguuggccu

SEQ ID NO: 2128946 - RNA, 19 nt, Artificial Sequence
  Description of Artificial Sequence: Synthetic oligonucleotide
  Sense strand starting at position 3225 of SEQ ID NO: 1882538
ggaaguggauauugauuua

SEQ ID NO: 2128947 - RNA, 19 nt, Artificial Sequence
  Description of Artificial Sequence: Synthetic oligonucleotide
  Antisense strand to SEQ ID NO: 2128946
uaaaucaauauccacuucc

SEQ ID NO: 2128948 - RNA, 19 nt, Artificial Sequence
  Description of Artificial Sequence: Synthetic oligonucleotide
  Sense strand starting at position 3232 of SEQ ID NO: 1882538
gauauugauuuaggacaca

SEQ ID NO: 2128949 - RNA, 19 nt, Artificial Sequence
  Description of Artificial Sequence: Synthetic oligonucleotide
  Antisense strand to SEQ ID NO: 2128948
uguguccuaaaucaauauc

SEQ ID NO: 2128950 - RNA, 19 nt, Artificial Sequence
  Description of Artificial Sequence: Synthetic oligonucleotide
  Sense strand starting at position 3304 of SEQ ID NO: 1882538
gugccuuacgggugaacaa

SEQ ID NO: 2128951 - RNA, 19 nt, Artificial Sequence
  Description of Artificial Sequence: Synthetic oligonucleotide
  Antisense strand to SEQ ID NO: 2128950
uuguucacccguaaggcac

SEQ ID NO: 2128952 - RNA, 19 nt, Artificial Sequence
  Description of Artificial Sequence: Synthetic oligonucleotide
  Sense strand starting at position 3313 of SEQ ID NO: 1882538
gggugaacaaggugauuga

SEQ ID NO: 2128953 - RNA, 19 nt, Artificial Sequence
  Description of Artificial Sequence: Synthetic oligonucleotide
  Antisense strand to SEQ ID NO: 2128952
ucaaucaccuuguucaccc

SEQ ID NO: 2128954 - RNA, 19 nt, Artificial Sequence
  Description of Artificial Sequence: Synthetic oligonucleotide
  Sense strand starting at position 3320 of SEQ ID NO: 1882538
caaggugauugagauuaac

SEQ ID NO: 2128955 - RNA, 19 nt, Artificial Sequence
  Description of Artificial Sequence: Synthetic oligonucleotide
  Antisense strand to SEQ ID NO: 2128954
guuaaucucaaucaccuug

SEQ ID NO: 2128956 - RNA, 19 nt, Artificial Sequence
  Description of Artificial Sequence: Synthetic oligonucleotide
  Sense strand starting at position 3450 of SEQ ID NO: 1882538
agugguuaaucccuggauc

SEQ ID NO: 2128957 - RNA, 19 nt, Artificial Sequence
  Description of Artificial Sequence: Synthetic oligonucleotide
  Antisense strand to SEQ ID NO: 2128956
gauccagggauuaaccacu

SEQ ID NO: 2128958 - RNA, 19 nt, Artificial Sequence
  Description of Artificial Sequence: Synthetic oligonucleotide
  Sense strand starting at position 3451 of SEQ ID NO: 1882538
gugguuaaucccuggaucu

SEQ ID NO: 2128959 - RNA, 19 nt, Artificial Sequence
  Description of Artificial Sequence: Synthetic oligonucleotide
  Antisense strand to SEQ ID NO: 2128958
agauccagggauuaaccac

SEQ ID NO: 2128960 - RNA, 19 nt, Artificial Sequence
  Description of Artificial Sequence: Synthetic oligonucleotide
  Sense strand starting at position 3452 of SEQ ID NO: 1882538
ugguuaaucccuggaucuc

SEQ ID NO: 2128961 - RNA, 19 nt, Artificial Sequence
  Description of Artificial Sequence: Synthetic oligonucleotide
  Antisense strand to SEQ ID NO: 2128960
gagauccagggauuaacca

SEQ ID NO: 2128962 - RNA, 19 nt, Artificial Sequence
  Description of Artificial Sequence: Synthetic oligonucleotide
  Sense strand starting at position 3453 of SEQ ID NO: 1882538
gguuaaucccuggaucucu

SEQ ID NO: 2128963 - RNA, 19 nt, Artificial Sequence
  Description of Artificial Sequence: Synthetic oligonucleotide
  Antisense strand to SEQ ID NO: 2128962
agagauccagggauuaacc

SEQ ID NO: 2128964 - RNA, 19 nt, Artificial Sequence
  Description of Artificial Sequence: Synthetic oligonucleotide
  Sense strand starting at position 3495 of SEQ ID NO: 1882538
uccuaugugguccaucuua

SEQ ID NO: 2128965 - RNA, 19 nt, Artificial Sequence
  Description of Artificial Sequence: Synthetic oligonucleotide
  Antisense strand to SEQ ID NO: 2128964
uaagauggaccacauagga

SEQ ID NO: 2128966 - RNA, 19 nt, Artificial Sequence
  Description of Artificial Sequence: Synthetic oligonucleotide
  Sense strand starting at position 3502 of SEQ ID NO: 1882538
ugguccaucuuagugcuaa

SEQ ID NO: 2128967 - RNA, 19 nt, Artificial Sequence
  Description of Artificial Sequence: Synthetic oligonucleotide
  Antisense strand to SEQ ID NO: 2128966
uuagcacuaagauggacca

SEQ ID NO: 2128968 - RNA, 19 nt, Artificial Sequence
  Description of Artificial Sequence: Synthetic oligonucleotide
  Sense strand starting at position 3596 of SEQ ID NO: 1882538
cagauaguacgucagguau

SEQ ID NO: 2128969 - RNA, 19 nt, Artificial Sequence
  Description of Artificial Sequence: Synthetic oligonucleotide
  Antisense strand to SEQ ID NO: 2128968
auaccugacguacuaucug

SEQ ID NO: 2128970 - RNA, 19 nt, Artificial Sequence
  Description of Artificial Sequence: Synthetic oligonucleotide
  Sense strand starting at position 3825 of SEQ ID NO: 1882538
cuguacuaucugcgaaaug

SEQ ID NO: 2128971 - RNA, 19 nt, Artificial Sequence
  Description of Artificial Sequence: Synthetic oligonucleotide
  Antisense strand to SEQ ID NO: 2128970
cauuucgcagauaguacag

SEQ ID NO: 2128972 - RNA, 19 nt, Artificial Sequence
  Description of Artificial Sequence: Synthetic oligonucleotide
  Sense strand starting at position 3830 of SEQ ID NO: 1882538
cuaucugcgaaauggagaa

SEQ ID NO: 2128973 - RNA, 19 nt, Artificial Sequence
  Description of Artificial Sequence: Synthetic oligonucleotide
  Antisense strand to SEQ ID NO: 2128972
uucuccauuucgcagauag

SEQ ID NO: 2128974 - RNA, 19 nt, Artificial Sequence
  Description of Artificial Sequence: Synthetic oligonucleotide
  Sense strand starting at position 3929 of SEQ ID NO: 1882538
uaugaucuguggcugggau

SEQ ID NO: 2128975 - RNA, 19 nt, Artificial Sequence
  Description of Artificial Sequence: Synthetic oligonucleotide
  Antisense strand to SEQ ID NO: 2128974
aucccagccacagaucaua

SEQ ID NO: 2128976 - RNA, 19 nt, Artificial Sequence
  Description of Artificial Sequence: Synthetic oligonucleotide
  Sense strand starting at position 3954 of SEQ ID NO: 1882538
gugggugcucuccauucuu

SEQ ID NO: 2128977 - RNA, 19 nt, Artificial Sequence
  Description of Artificial Sequence: Synthetic oligonucleotide
  Antisense strand to SEQ ID NO: 2128976
aagaauggagagcacccac

SEQ ID NO: 2128978 - RNA, 19 nt, Artificial Sequence
  Description of Artificial Sequence: Synthetic oligonucleotide
  Sense strand starting at position 3982 of SEQ ID NO: 1882538
ccaccauguucccuaugga

SEQ ID NO: 2128979 - RNA, 19 nt, Artificial Sequence
  Description of Artificial Sequence: Synthetic oligonucleotide
  Antisense strand to SEQ ID NO: 2128978
uccauagggaacauggugg

SEQ ID NO: 2128980 - RNA, 19 nt, Artificial Sequence
  Description of Artificial Sequence: Synthetic oligonucleotide
  Sense strand starting at position 43 of SEQ ID NO: 1882539
gagggugugugacucugaa

SEQ ID NO: 2128981 - RNA, 19 nt, Artificial Sequence
  Description of Artificial Sequence: Synthetic oligonucleotide
  Antisense strand to SEQ ID NO: 2128980
uucagagucacacacccuc

SEQ ID NO: 2128982 - RNA, 19 nt, Artificial Sequence
  Description of Artificial Sequence: Synthetic oligonucleotide
  Sense strand starting at position 191 of SEQ ID NO: 1882539
agacauaucuucucuguca

SEQ ID NO: 2128983 - RNA, 19 nt, Artificial Sequence
  Description of Artificial Sequence: Synthetic oligonucleotide
  Antisense strand to SEQ ID NO: 2128982
ugacagagaagauaugucu

SEQ ID NO: 2128984 - RNA, 19 nt, Artificial Sequence
  Description of Artificial Sequence: Synthetic oligonucleotide
  Sense strand starting at position 346 of SEQ ID NO: 1882539
guguuuaaaucccugaucu

SEQ ID NO: 2128985 - RNA, 19 nt, Artificial Sequence
  Description of Artificial Sequence: Synthetic oligonucleotide
  Antisense strand to SEQ ID NO: 2128984
agaucagggauuuaaacac

SEQ ID NO: 2128986 - RNA, 19 nt, Artificial Sequence
  Description of Artificial Sequence: Synthetic oligonucleotide
  Sense strand starting at position 482 of SEQ ID NO: 1882539
augagauaauccuugccag

SEQ ID NO: 2128987 - RNA, 19 nt, Artificial Sequence
  Description of Artificial Sequence: Synthetic oligonucleotide
  Antisense strand to SEQ ID NO: 2128986
cuggcaaggauuaucucau

SEQ ID NO: 2128988 - RNA, 19 nt, Artificial Sequence
  Description of Artificial Sequence: Synthetic oligonucleotide
  Sense strand starting at position 483 of SEQ ID NO: 1882539
ugagauaauccuugccagu

SEQ ID NO: 2128989 - RNA, 19 nt, Artificial Sequence
  Description of Artificial Sequence: Synthetic oligonucleotide
  Antisense strand to SEQ ID NO: 2128988
acuggcaaggauuaucuca

SEQ ID NO: 2128990 - RNA, 19 nt, Artificial Sequence
  Description of Artificial Sequence: Synthetic oligonucleotide
  Sense strand starting at position 499 of SEQ ID NO: 1882539
aguguuaauguaggaccua

SEQ ID NO: 2128991 - RNA, 19 nt, Artificial Sequence
  Description of Artificial Sequence: Synthetic oligonucleotide
  Antisense strand to SEQ ID NO: 2128990
uagguccuacauuaacacu

SEQ ID NO: 2128992 - RNA, 19 nt, Artificial Sequence
  Description of Artificial Sequence: Synthetic oligonucleotide
  Sense strand starting at position 552 of SEQ ID NO: 1882539
uaagguguauuauugguaa

SEQ ID NO: 2128993 - RNA, 19 nt, Artificial Sequence
  Description of Artificial Sequence: Synthetic oligonucleotide
  Antisense strand to SEQ ID NO: 2128992
uuaccaauaauacaccuua

SEQ ID NO: 2128994 - RNA, 19 nt, Artificial Sequence
  Description of Artificial Sequence: Synthetic oligonucleotide
  Sense strand starting at position 554 of SEQ ID NO: 1882539
agguguauuauugguaaca

SEQ ID NO: 2128995 - RNA, 19 nt, Artificial Sequence
  Description of Artificial Sequence: Synthetic oligonucleotide
  Antisense strand to SEQ ID NO: 2128994
uguuaccaauaauacaccu

SEQ ID NO: 2128996 - RNA, 19 nt, Artificial Sequence
  Description of Artificial Sequence: Synthetic oligonucleotide
  Sense strand starting at position 555 of SEQ ID NO: 1882539
gguguauuauugguaacag

SEQ ID NO: 2128997 - RNA, 19 nt, Artificial Sequence
  Description of Artificial Sequence: Synthetic oligonucleotide
  Antisense strand to SEQ ID NO: 2128996
cuguuaccaauaauacacc

SEQ ID NO: 2128998 - RNA, 19 nt, Artificial Sequence
  Description of Artificial Sequence: Synthetic oligonucleotide
  Sense strand starting at position 584 of SEQ ID NO: 1882539
agcacuuacuaggcuuaaa

SEQ ID NO: 2128999 - RNA, 19 nt, Artificial Sequence
  Description of Artificial Sequence: Synthetic oligonucleotide
  Antisense strand to SEQ ID NO: 2128998
uuuaagccuaguaagugcu

SEQ ID NO: 2129000 - RNA, 19 nt, Artificial Sequence
  Description of Artificial Sequence: Synthetic oligonucleotide
  Sense strand starting at position 587 of SEQ ID NO: 1882539
acuuacuaggcuuaaaugu

SEQ ID NO: 2129001 - RNA, 19 nt, Artificial Sequence
  Description of Artificial Sequence: Synthetic oligonucleotide
  Antisense strand to SEQ ID NO: 2129000
acauuuaagccuaguaagu

SEQ ID NO: 2129002 - RNA, 19 nt, Artificial Sequence
  Description of Artificial Sequence: Synthetic oligonucleotide
  Sense strand starting at position 597 of SEQ ID NO: 1882539
cuuaaauguuugcuagaug

SEQ ID NO: 2129003 - RNA, 19 nt, Artificial Sequence
  Description of Artificial Sequence: Synthetic oligonucleotide
  Antisense strand to SEQ ID NO: 2129002
caucuagcaaacauuuaag

SEQ ID NO: 2129004 - RNA, 19 nt, Artificial Sequence
  Description of Artificial Sequence: Synthetic oligonucleotide
  Sense strand starting at position 654 of SEQ ID NO: 1882539
gucaccagguuucuuauua

SEQ ID NO: 2129005 - RNA, 19 nt, Artificial Sequence
  Description of Artificial Sequence: Synthetic oligonucleotide
  Antisense strand to SEQ ID NO: 2129004
uaauaagaaaccuggugac

SEQ ID NO: 2129006 - RNA, 19 nt, Artificial Sequence
  Description of Artificial Sequence: Synthetic oligonucleotide
  Sense strand starting at position 1088 of SEQ ID NO: 1882539
auggcuucuuucuuagaga

SEQ ID NO: 2129007 - RNA, 19 nt, Artificial Sequence
  Description of Artificial Sequence: Synthetic oligonucleotide
  Antisense strand to SEQ ID NO: 2129006
ucucuaagaaagaagccau

SEQ ID NO: 2129008 - RNA, 19 nt, Artificial Sequence
  Description of Artificial Sequence: Synthetic oligonucleotide
  Sense strand starting at position 1104 of SEQ ID NO: 1882539
agaccuaguccuugacuga

SEQ ID NO: 2129009 - RNA, 19 nt, Artificial Sequence
  Description of Artificial Sequence: Synthetic oligonucleotide
  Antisense strand to SEQ ID NO: 2129008
ucagucaaggacuaggucu

SEQ ID NO: 2129010 - RNA, 19 nt, Artificial Sequence
  Description of Artificial Sequence: Synthetic oligonucleotide
  Sense strand starting at position 1574 of SEQ ID NO: 1882539
ucaggaucucagugaagug

SEQ ID NO: 2129011 - RNA, 19 nt, Artificial Sequence
  Description of Artificial Sequence: Synthetic oligonucleotide
  Antisense strand to SEQ ID NO: 2129010
cacuucacugagauccuga

SEQ ID NO: 2129012 - RNA, 19 nt, Artificial Sequence
  Description of Artificial Sequence: Synthetic oligonucleotide
  Sense strand starting at position 1638 of SEQ ID NO: 1882539
ugcaucuuagcugaacaau

SEQ ID NO: 2129013 - RNA, 19 nt, Artificial Sequence
  Description of Artificial Sequence: Synthetic oligonucleotide
  Antisense strand to SEQ ID NO: 2129012
auuguucagcuaagaugca

SEQ ID NO: 2129014 - RNA, 19 nt, Artificial Sequence
  Description of Artificial Sequence: Synthetic oligonucleotide
  Sense strand starting at position 1749 of SEQ ID NO: 1882539
gguuguugugugccaugau

SEQ ID NO: 2129015 - RNA, 19 nt, Artificial Sequence
  Description of Artificial Sequence: Synthetic oligonucleotide
  Antisense strand to SEQ ID NO: 2129014
aucauggcacacaacaacc

SEQ ID NO: 2129016 - RNA, 19 nt, Artificial Sequence
  Description of Artificial Sequence: Synthetic oligonucleotide
  Sense strand starting at position 2039 of SEQ ID NO: 1882539
acaggagucuuaccuggga

SEQ ID NO: 2129017 - RNA, 19 nt, Artificial Sequence
  Description of Artificial Sequence: Synthetic oligonucleotide
  Antisense strand to SEQ ID NO: 2129016
ucccagguaagacuccugu

SEQ ID NO: 2129018 - RNA, 19 nt, Artificial Sequence
  Description of Artificial Sequence: Synthetic oligonucleotide
  Sense strand starting at position 2041 of SEQ ID NO: 1882539
aggagucuuaccugggaga

SEQ ID NO: 2129019 - RNA, 19 nt, Artificial Sequence
  Description of Artificial Sequence: Synthetic oligonucleotide
  Antisense strand to SEQ ID NO: 2129018
ucucccagguaagacuccu

SEQ ID NO: 2129020 - RNA, 19 nt, Artificial Sequence
  Description of Artificial Sequence: Synthetic oligonucleotide
  Sense strand starting at position 2042 of SEQ ID NO: 1882539
ggagucuuaccugggagac

SEQ ID NO: 2129021 - RNA, 19 nt, Artificial Sequence
  Description of Artificial Sequence: Synthetic oligonucleotide
  Antisense strand to SEQ ID NO: 2129020
gucucccagguaagacucc

SEQ ID NO: 2129022 - RNA, 19 nt, Artificial Sequence
  Description of Artificial Sequence: Synthetic oligonucleotide
  Sense strand starting at position 2043 of SEQ ID NO: 1882539
gagucuuaccugggagaca

SEQ ID NO: 2129023 - RNA, 19 nt, Artificial Sequence
  Description of Artificial Sequence: Synthetic oligonucleotide
  Antisense strand to SEQ ID NO: 2129022
ugucucccagguaagacuc

SEQ ID NO: 2129024 - RNA, 19 nt, Artificial Sequence
  Description of Artificial Sequence: Synthetic oligonucleotide
  Sense strand starting at position 2266 of SEQ ID NO: 1882539
guuggucaucuggaccuaa

SEQ ID NO: 2129025 - RNA, 19 nt, Artificial Sequence
  Description of Artificial Sequence: Synthetic oligonucleotide
  Antisense strand to SEQ ID NO: 2129024
uuagguccagaugaccaac

SEQ ID NO: 2129026 - RNA, 19 nt, Artificial Sequence
  Description of Artificial Sequence: Synthetic oligonucleotide
  Sense strand starting at position 2270 of SEQ ID NO: 1882539
gucaucuggaccuaagguu

SEQ ID NO: 2129027 - RNA, 19 nt, Artificial Sequence
  Description of Artificial Sequence: Synthetic oligonucleotide
  Antisense strand to SEQ ID NO: 2129026
aaccuuagguccagaugac

SEQ ID NO: 2129028 - RNA, 19 nt, Artificial Sequence
  Description of Artificial Sequence: Synthetic oligonucleotide
  Sense strand starting at position 2285 of SEQ ID NO: 1882539
gguuccauauggccuuaaa

SEQ ID NO: 2129029 - RNA, 19 nt, Artificial Sequence
  Description of Artificial Sequence: Synthetic oligonucleotide
  Antisense strand to SEQ ID NO: 2129028
uuuaaggccauauggaacc

SEQ ID NO: 2129030 - RNA, 19 nt, Artificial Sequence
  Description of Artificial Sequence: Synthetic oligonucleotide
  Sense strand starting at position 2366 of SEQ ID NO: 1882539
uccuauauuccuggugagu

SEQ ID NO: 2129031 - RNA, 19 nt, Artificial Sequence
  Description of Artificial Sequence: Synthetic oligonucleotide
  Antisense strand to SEQ ID NO: 2129030
acucaccaggaauauagga

SEQ ID NO: 2129032 - RNA, 19 nt, Artificial Sequence
  Description of Artificial Sequence: Synthetic oligonucleotide
  Sense strand starting at position 2469 of SEQ ID NO: 1882539
gcacaauagcaugaaguga

SEQ ID NO: 2129033 - RNA, 19 nt, Artificial Sequence
  Description of Artificial Sequence: Synthetic oligonucleotide
  Antisense strand to SEQ ID NO: 2129032
ucacuucaugcuauugugc

SEQ ID NO: 2129034 - RNA, 19 nt, Artificial Sequence
  Description of Artificial Sequence: Synthetic oligonucleotide
  Sense strand starting at position 2624 of SEQ ID NO: 1882539
gcaaguuggguggaaugau

SEQ ID NO: 2129035 - RNA, 19 nt, Artificial Sequence
  Description of Artificial Sequence: Synthetic oligonucleotide
  Antisense strand to SEQ ID NO: 2129034
aucauuccacccaacuugc

SEQ ID NO: 2129036 - RNA, 19 nt, Artificial Sequence
  Description of Artificial Sequence: Synthetic oligonucleotide
  Sense strand starting at position 2712 of SEQ ID NO: 1882539
gugccucaugucucacgua

SEQ ID NO: 2129037 - RNA, 19 nt, Artificial Sequence
  Description of Artificial Sequence: Synthetic oligonucleotide
  Antisense strand to SEQ ID NO: 2129036
uacgugagacaugaggcac

SEQ ID NO: 2129038 - RNA, 19 nt, Artificial Sequence
  Description of Artificial Sequence: Synthetic oligonucleotide
  Sense strand starting at position 2830 of SEQ ID NO: 1882539
guuaucuauguguaacacu

SEQ ID NO: 2129039 - RNA, 19 nt, Artificial Sequence
  Description of Artificial Sequence: Synthetic oligonucleotide
  Antisense strand to SEQ ID NO: 2129038
aguguuacacauagauaac

SEQ ID NO: 2129040 - RNA, 19 nt, Artificial Sequence
  Description of Artificial Sequence: Synthetic oligonucleotide
  Sense strand starting at position 2871 of SEQ ID NO: 1882539
ugucuucuacagcagaauu

SEQ ID NO: 2129041 - RNA, 19 nt, Artificial Sequence
  Description of Artificial Sequence: Synthetic oligonucleotide
  Antisense strand to SEQ ID NO: 2129040
aauucugcuguagaagaca

SEQ ID NO: 2129042 - RNA, 19 nt, Artificial Sequence
  Description of Artificial Sequence: Synthetic oligonucleotide
  Sense strand starting at position 2911 of SEQ ID NO: 1882539
aagucugguguuuauccua

SEQ ID NO: 2129043 - RNA, 19 nt, Artificial Sequence
  Description of Artificial Sequence: Synthetic oligonucleotide
  Antisense strand to SEQ ID NO: 2129042
uaggauaaacaccagacuu

SEQ ID NO: 2129044 - RNA, 19 nt, Artificial Sequence
  Description of Artificial Sequence: Synthetic oligonucleotide
  Sense strand starting at position 3055 of SEQ ID NO: 1882539
cuuggauuauagccagagu

SEQ ID NO: 2129045 - RNA, 19 nt, Artificial Sequence
  Description of Artificial Sequence: Synthetic oligonucleotide
  Antisense strand to SEQ ID NO: 2129044
acucuggcuauaauccaag

SEQ ID NO: 2129046 - RNA, 19 nt, Artificial Sequence
  Description of Artificial Sequence: Synthetic oligonucleotide
  Sense strand starting at position 3058 of SEQ ID NO: 1882539
ggauuauagccagagucuu

SEQ ID NO: 2129047 - RNA, 19 nt, Artificial Sequence
  Description of Artificial Sequence: Synthetic oligonucleotide
  Antisense strand to SEQ ID NO: 2129046
aagacucuggcuauaaucc

SEQ ID NO: 2129048 - RNA, 19 nt, Artificial Sequence
  Description of Artificial Sequence: Synthetic oligonucleotide
  Sense strand starting at position 3066 of SEQ ID NO: 1882539
gccagagucuuucuaacug

SEQ ID NO: 2129049 - RNA, 19 nt, Artificial Sequence
  Description of Artificial Sequence: Synthetic oligonucleotide
  Antisense strand to SEQ ID NO: 2129048
caguuagaaagacucuggc

SEQ ID NO: 2129050 - RNA, 19 nt, Artificial Sequence
  Description of Artificial Sequence: Synthetic oligonucleotide
  Sense strand starting at position 3070 of SEQ ID NO: 1882539
gagucuuucuaacuggucu

SEQ ID NO: 2129051 - RNA, 19 nt, Artificial Sequence
  Description of Artificial Sequence: Synthetic oligonucleotide
  Antisense strand to SEQ ID NO: 2129050
agaccaguuagaaagacuc

SEQ ID NO: 2129052 - RNA, 19 nt, Artificial Sequence
  Description of Artificial Sequence: Synthetic oligonucleotide
  Sense strand starting at position 3116 of SEQ ID NO: 1882539
aucuguccuccuugauaua

SEQ ID NO: 2129053 - RNA, 19 nt, Artificial Sequence
  Description of Artificial Sequence: Synthetic oligonucleotide
  Antisense strand to SEQ ID NO: 2129052
uauaucaaggaggacagau

SEQ ID NO: 2129054 - RNA, 19 nt, Artificial Sequence
  Description of Artificial Sequence: Synthetic oligonucleotide
  Sense strand starting at position 3180 of SEQ ID NO: 1882539
cugcucuuccucuaaggau

SEQ ID NO: 2129055 - RNA, 19 nt, Artificial Sequence
  Description of Artificial Sequence: Synthetic oligonucleotide
  Antisense strand to SEQ ID NO: 2129054
auccuuagaggaagagcag

SEQ ID NO: 2129056 - RNA, 19 nt, Artificial Sequence
  Description of Artificial Sequence: Synthetic oligonucleotide
  Sense strand starting at position 3501 of SEQ ID NO: 1882539
cagagacggcucugacuuu

SEQ ID NO: 2129057 - RNA, 19 nt, Artificial Sequence
  Description of Artificial Sequence: Synthetic oligonucleotide
  Antisense strand to SEQ ID NO: 2129056
aaagucagagccgucucug

SEQ ID NO: 2129058 - RNA, 19 nt, Artificial Sequence
  Description of Artificial Sequence: Synthetic oligonucleotide
  Sense strand starting at position 3670 of SEQ ID NO: 1882539
ccugguaguuauguuuaaa

SEQ ID NO: 2129059 - RNA, 19 nt, Artificial Sequence
  Description of Artificial Sequence: Synthetic oligonucleotide
  Antisense strand to SEQ ID NO: 2129058
uuuaaacauaacuaccagg

SEQ ID NO: 2129060 - RNA, 19 nt, Artificial Sequence
  Description of Artificial Sequence: Synthetic oligonucleotide
  Sense strand starting at position 43 of SEQ ID NO: 1882540
gucaauuaacaucagaguc

SEQ ID NO: 2129061 - RNA, 19 nt, Artificial Sequence
  Description of Artificial Sequence: Synthetic oligonucleotide
  Antisense strand to SEQ ID NO: 2129060
gacucugauguuaauugac

SEQ ID NO: 2129062 - RNA, 19 nt, Artificial Sequence
  Description of Artificial Sequence: Synthetic oligonucleotide
  Sense strand starting at position 56 of SEQ ID NO: 1882540
agagucaucuucucaugga

SEQ ID NO: 2129063 - RNA, 19 nt, Artificial Sequence
  Description of Artificial Sequence: Synthetic oligonucleotide
  Antisense strand to SEQ ID NO: 2129062
uccaugagaagaugacucu

SEQ ID NO: 2129064 - RNA, 19 nt, Artificial Sequence
  Description of Artificial Sequence: Synthetic oligonucleotide
  Sense strand starting at position 57 of SEQ ID NO: 1882540
gagucaucuucucauggaa

SEQ ID NO: 2129065 - RNA, 19 nt, Artificial Sequence
  Description of Artificial Sequence: Synthetic oligonucleotide
  Antisense strand to SEQ ID NO: 2129064
uuccaugagaagaugacuc

SEQ ID NO: 2129066 - RNA, 19 nt, Artificial Sequence
  Description of Artificial Sequence: Synthetic oligonucleotide
  Sense strand starting at position 282 of SEQ ID NO: 1882540
uuccauacuuccucuggga

SEQ ID NO: 2129067 - RNA, 19 nt, Artificial Sequence
  Description of Artificial Sequence: Synthetic oligonucleotide
  Antisense strand to SEQ ID NO: 2129066
ucccagaggaaguauggaa

SEQ ID NO: 2129068 - RNA, 19 nt, Artificial Sequence
  Description of Artificial Sequence: Synthetic oligonucleotide
  Sense strand starting at position 308 of SEQ ID NO: 1882540
uggauucugccacgagcaa

SEQ ID NO: 2129069 - RNA, 19 nt, Artificial Sequence
  Description of Artificial Sequence: Synthetic oligonucleotide
  Antisense strand to SEQ ID NO: 2129068
uugcucguggcagaaucca

SEQ ID NO: 2129070 - RNA, 19 nt, Artificial Sequence
  Description of Artificial Sequence: Synthetic oligonucleotide
  Sense strand starting at position 309 of SEQ ID NO: 1882540
ggauucugccacgagcaau

SEQ ID NO: 2129071 - RNA, 19 nt, Artificial Sequence
  Description of Artificial Sequence: Synthetic oligonucleotide
  Antisense strand to SEQ ID NO: 2129070
auugcucguggcagaaucc

SEQ ID NO: 2129072 - RNA, 19 nt, Artificial Sequence
  Description of Artificial Sequence: Synthetic oligonucleotide
  Sense strand starting at position 376 of SEQ ID NO: 1882540
ccuccaaaucccuggagau

SEQ ID NO: 2129073 - RNA, 19 nt, Artificial Sequence
  Description of Artificial Sequence: Synthetic oligonucleotide
  Antisense strand to SEQ ID NO: 2129072
aucuccagggauuuggagg

SEQ ID NO: 2129074 - RNA, 19 nt, Artificial Sequence
  Description of Artificial Sequence: Synthetic oligonucleotide
  Sense strand starting at position 377 of SEQ ID NO: 1882540
cuccaaaucccuggagauu

SEQ ID NO: 2129075 - RNA, 19 nt, Artificial Sequence
  Description of Artificial Sequence: Synthetic oligonucleotide
  Antisense strand to SEQ ID NO: 2129074
aaucuccagggauuuggag

SEQ ID NO: 2129076 - RNA, 19 nt, Artificial Sequence
  Description of Artificial Sequence: Synthetic oligonucleotide
  Sense strand starting at position 386 of SEQ ID NO: 1882540
ccuggagauuggucucuuu

SEQ ID NO: 2129077 - RNA, 19 nt, Artificial Sequence
  Description of Artificial Sequence: Synthetic oligonucleotide
  Antisense strand to SEQ ID NO: 2129076
aaagagaccaaucuccagg

SEQ ID NO: 2129078 - RNA, 19 nt, Artificial Sequence
  Description of Artificial Sequence: Synthetic oligonucleotide
  Sense strand starting at position 389 of SEQ ID NO: 1882540
ggagauuggucucuuuccu

SEQ ID NO: 2129079 - RNA, 19 nt, Artificial Sequence
  Description of Artificial Sequence: Synthetic oligonucleotide
  Antisense strand to SEQ ID NO: 2129078
aggaaagagaccaaucucc

SEQ ID NO: 2129080 - RNA, 19 nt, Artificial Sequence
  Description of Artificial Sequence: Synthetic oligonucleotide
  Sense strand starting at position 395 of SEQ ID NO: 1882540
uggucucuuuccuggguua

SEQ ID NO: 2129081 - RNA, 19 nt, Artificial Sequence
  Description of Artificial Sequence: Synthetic oligonucleotide
  Antisense strand to SEQ ID NO: 2129080
uaacccaggaaagagacca

SEQ ID NO: 2129082 - RNA, 19 nt, Artificial Sequence
  Description of Artificial Sequence: Synthetic oligonucleotide
  Sense strand starting at position 397 of SEQ ID NO: 1882540
gucucuuuccuggguuaca

SEQ ID NO: 2129083 - RNA, 19 nt, Artificial Sequence
  Description of Artificial Sequence: Synthetic oligonucleotide
  Antisense strand to SEQ ID NO: 2129082
uguaacccaggaaagagac

SEQ ID NO: 2129084 - RNA, 19 nt, Artificial Sequence
  Description of Artificial Sequence: Synthetic oligonucleotide
  Sense strand starting at position 398 of SEQ ID NO: 1882540
ucucuuuccuggguuacau

SEQ ID NO: 2129085 - RNA, 19 nt, Artificial Sequence
  Description of Artificial Sequence: Synthetic oligonucleotide
  Antisense strand to SEQ ID NO: 2129084
auguaacccaggaaagaga

SEQ ID NO: 2129086 - RNA, 19 nt, Artificial Sequence
  Description of Artificial Sequence: Synthetic oligonucleotide
  Sense strand starting at position 493 of SEQ ID NO: 1882540
ccagaaagauauuagaaag

SEQ ID NO: 2129087 - RNA, 19 nt, Artificial Sequence
  Description of Artificial Sequence: Synthetic oligonucleotide
  Antisense strand to SEQ ID NO: 2129086
cuuucuaauaucuuucugg

SEQ ID NO: 2129088 - RNA, 19 nt, Artificial Sequence
  Description of Artificial Sequence: Synthetic oligonucleotide
  Sense strand starting at position 725 of SEQ ID NO: 1882540
agugaugacucuuaggugu

SEQ ID NO: 2129089 - RNA, 19 nt, Artificial Sequence
  Description of Artificial Sequence: Synthetic oligonucleotide
  Antisense strand to SEQ ID NO: 2129088
acaccuaagagucaucacu

SEQ ID NO: 2129090 - RNA, 19 nt, Artificial Sequence
  Description of Artificial Sequence: Synthetic oligonucleotide
  Sense strand starting at position 727 of SEQ ID NO: 1882540
ugaugacucuuagguguga

SEQ ID NO: 2129091 - RNA, 19 nt, Artificial Sequence
  Description of Artificial Sequence: Synthetic oligonucleotide
  Antisense strand to SEQ ID NO: 2129090
ucacaccuaagagucauca

SEQ ID NO: 2129092 - RNA, 19 nt, Artificial Sequence
  Description of Artificial Sequence: Synthetic oligonucleotide
  Sense strand starting at position 731 of SEQ ID NO: 1882540
gacucuuaggugugaccaa

SEQ ID NO: 2129093 - RNA, 19 nt, Artificial Sequence
  Description of Artificial Sequence: Synthetic oligonucleotide
  Antisense strand to SEQ ID NO: 2129092
uuggucacaccuaagaguc

SEQ ID NO: 2129094 - RNA, 19 nt, Artificial Sequence
  Description of Artificial Sequence: Synthetic oligonucleotide
  Sense strand starting at position 742 of SEQ ID NO: 1882540
gugaccaagccaggaaaua

SEQ ID NO: 2129095 - RNA, 19 nt, Artificial Sequence
  Description of Artificial Sequence: Synthetic oligonucleotide
  Antisense strand to SEQ ID NO: 2129094
uauuuccuggcuuggucac

SEQ ID NO: 2129096 - RNA, 19 nt, Artificial Sequence
  Description of Artificial Sequence: Synthetic oligonucleotide
  Sense strand starting at position 786 of SEQ ID NO: 1882540
ugcugucugcccuggugau

SEQ ID NO: 2129097 - RNA, 19 nt, Artificial Sequence
  Description of Artificial Sequence: Synthetic oligonucleotide
  Antisense strand to SEQ ID NO: 2129096
aucaccagggcagacagca

SEQ ID NO: 2129098 - RNA, 19 nt, Artificial Sequence
  Description of Artificial Sequence: Synthetic oligonucleotide
  Sense strand starting at position 807 of SEQ ID NO: 1882540
gggccacacccucguuaaa

SEQ ID NO: 2129099 - RNA, 19 nt, Artificial Sequence
  Description of Artificial Sequence: Synthetic oligonucleotide
  Antisense strand to SEQ ID NO: 2129098
uuuaacgaggguguggccc

SEQ ID NO: 2129100 - RNA, 19 nt, Artificial Sequence
  Description of Artificial Sequence: Synthetic oligonucleotide
  Sense strand starting at position 892 of SEQ ID NO: 1882540
uuccuuuccucugugagga

SEQ ID NO: 2129101 - RNA, 19 nt, Artificial Sequence
  Description of Artificial Sequence: Synthetic oligonucleotide
  Antisense strand to SEQ ID NO: 2129100
uccucacagaggaaaggaa

SEQ ID NO: 2129102 - RNA, 19 nt, Artificial Sequence
  Description of Artificial Sequence: Synthetic oligonucleotide
  Sense strand starting at position 1000 of SEQ ID NO: 1882540
cacauuagucaccgcgaca

SEQ ID NO: 2129103 - RNA, 19 nt, Artificial Sequence
  Description of Artificial Sequence: Synthetic oligonucleotide
  Antisense strand to SEQ ID NO: 2129102
ugucgcggugacuaaugug

SEQ ID NO: 2129104 - RNA, 19 nt, Artificial Sequence
  Description of Artificial Sequence: Synthetic oligonucleotide
  Sense strand starting at position 2200 of SEQ ID NO: 1882540
cuaagugacuugugcgauu

SEQ ID NO: 2129105 - RNA, 19 nt, Artificial Sequence
  Description of Artificial Sequence: Synthetic oligonucleotide
  Antisense strand to SEQ ID NO: 2129104
aaucgcacaagucacuuag

SEQ ID NO: 2129106 - RNA, 19 nt, Artificial Sequence
  Description of Artificial Sequence: Synthetic oligonucleotide
  Sense strand starting at position 2365 of SEQ ID NO: 1882540
acagcaggguguccuuaau

SEQ ID NO: 2129107 - RNA, 19 nt, Artificial Sequence
  Description of Artificial Sequence: Synthetic oligonucleotide
  Antisense strand to SEQ ID NO: 2129106
auuaaggacacccugcugu

SEQ ID NO: 2129108 - RNA, 19 nt, Artificial Sequence
  Description of Artificial Sequence: Synthetic oligonucleotide
  Sense strand starting at position 2424 of SEQ ID NO: 1882540
ggcugaagugugcaugacu

SEQ ID NO: 2129109 - RNA, 19 nt, Artificial Sequence
  Description of Artificial Sequence: Synthetic oligonucleotide
  Antisense strand to SEQ ID NO: 2129108
agucaugcacacuucagcc

SEQ ID NO: 2129110 - RNA, 19 nt, Artificial Sequence
  Description of Artificial Sequence: Synthetic oligonucleotide
  Sense strand starting at position 2510 of SEQ ID NO: 1882540
gcugaagucugcuaacuga

SEQ ID NO: 2129111 - RNA, 19 nt, Artificial Sequence
  Description of Artificial Sequence: Synthetic oligonucleotide
  Antisense strand to SEQ ID NO: 2129110
ucaguuagcagacuucagc

SEQ ID NO: 2129112 - RNA, 19 nt, Artificial Sequence
  Description of Artificial Sequence: Synthetic oligonucleotide
  Sense strand starting at position 2657 of SEQ ID NO: 1882540
auucuuucuuuguugugaa

SEQ ID NO: 2129113 - RNA, 19 nt, Artificial Sequence
  Description of Artificial Sequence: Synthetic oligonucleotide
  Antisense strand to SEQ ID NO: 2129112
uucacaacaaagaaagaau

SEQ ID NO: 2129114 - RNA, 19 nt, Artificial Sequence
  Description of Artificial Sequence: Synthetic oligonucleotide
  Sense strand starting at position 2658 of SEQ ID NO: 1882540
uucuuucuuuguugugaaa

SEQ ID NO: 2129115 - RNA, 19 nt, Artificial Sequence
  Description of Artificial Sequence: Synthetic oligonucleotide
  Antisense strand to SEQ ID NO: 2129114
uuucacaacaaagaaagaa

SEQ ID NO: 2129116 - RNA, 19 nt, Artificial Sequence
  Description of Artificial Sequence: Synthetic oligonucleotide
  Sense strand starting at position 2661 of SEQ ID NO: 1882540
uuucuuuguugugaaagca

SEQ ID NO: 2129117 - RNA, 19 nt, Artificial Sequence
  Description of Artificial Sequence: Synthetic oligonucleotide
  Antisense strand to SEQ ID NO: 2129116
ugcuuucacaacaaagaaa

SEQ ID NO: 2129118 - RNA, 19 nt, Artificial Sequence
  Description of Artificial Sequence: Synthetic oligonucleotide
  Sense strand starting at position 2740 of SEQ ID NO: 1882540
ugcucaggccuccaagaua

SEQ ID NO: 2129119 - RNA, 19 nt, Artificial Sequence
  Description of Artificial Sequence: Synthetic oligonucleotide
  Antisense strand to SEQ ID NO: 2129118
uaucuuggaggccugagca

SEQ ID NO: 2129120 - RNA, 19 nt, Artificial Sequence
  Description of Artificial Sequence: Synthetic oligonucleotide
  Sense strand starting at position 3015 of SEQ ID NO: 1882540
ggcccugcuggagaugaua

SEQ ID NO: 2129121 - RNA, 19 nt, Artificial Sequence
  Description of Artificial Sequence: Synthetic oligonucleotide
  Antisense strand to SEQ ID NO: 2129120
uaucaucuccagcagggcc

SEQ ID NO: 2129122 - RNA, 19 nt, Artificial Sequence
  Description of Artificial Sequence: Synthetic oligonucleotide
  Sense strand starting at position 3732 of SEQ ID NO: 1882540
caguguaucucuggaccua

SEQ ID NO: 2129123 - RNA, 19 nt, Artificial Sequence
  Description of Artificial Sequence: Synthetic oligonucleotide
  Antisense strand to SEQ ID NO: 2129122
uagguccagagauacacug

SEQ ID NO: 2129124 - RNA, 19 nt, Artificial Sequence
  Description of Artificial Sequence: Synthetic oligonucleotide
  Sense strand starting at position 3827 of SEQ ID NO: 1882540
gccacaaucugguggagaa

SEQ ID NO: 2129125 - RNA, 19 nt, Artificial Sequence
  Description of Artificial Sequence: Synthetic oligonucleotide
  Antisense strand to SEQ ID NO: 2129124
uucuccaccagauuguggc

SEQ ID NO: 2129126 - RNA, 19 nt, Artificial Sequence
  Description of Artificial Sequence: Synthetic oligonucleotide
  Sense strand starting at position 3860 of SEQ ID NO: 1882540
ccacaugaauacuggcaua

SEQ ID NO: 2129127 - RNA, 19 nt, Artificial Sequence
  Description of Artificial Sequence: Synthetic oligonucleotide
  Antisense strand to SEQ ID NO: 2129126
uaugccaguauucaugugg

SEQ ID NO: 2129128 - RNA, 19 nt, Artificial Sequence
  Description of Artificial Sequence: Synthetic oligonucleotide
  Sense strand starting at position 3865 of SEQ ID NO: 1882540
ugaauacuggcauauacuu

SEQ ID NO: 2129129 - RNA, 19 nt, Artificial Sequence
  Description of Artificial Sequence: Synthetic oligonucleotide
  Antisense strand to SEQ ID NO: 2129128
aaguauaugccaguauuca

SEQ ID NO: 2129130 - RNA, 19 nt, Artificial Sequence
  Description of Artificial Sequence: Synthetic oligonucleotide
  Sense strand starting at position 3873 of SEQ ID NO: 1882540
ggcauauacuuguguguug

SEQ ID NO: 2129131 - RNA, 19 nt, Artificial Sequence
  Description of Artificial Sequence: Synthetic oligonucleotide
  Antisense strand to SEQ ID NO: 2129130
caacacacaaguauaugcc

SEQ ID NO: 2129132 - RNA, 19 nt, Artificial Sequence
  Description of Artificial Sequence: Synthetic oligonucleotide
  Sense strand starting at position 3874 of SEQ ID NO: 1882540
gcauauacuuguguguuga

SEQ ID NO: 2129133 - RNA, 19 nt, Artificial Sequence
  Description of Artificial Sequence: Synthetic oligonucleotide
  Antisense strand to SEQ ID NO: 2129132
ucaacacacaaguauaugc

SEQ ID NO: 2129134 - RNA, 19 nt, Artificial Sequence
  Description of Artificial Sequence: Synthetic oligonucleotide
  Sense strand starting at position 3875 of SEQ ID NO: 1882540
cauauacuuguguguugau

SEQ ID NO: 2129135 - RNA, 19 nt, Artificial Sequence
  Description of Artificial Sequence: Synthetic oligonucleotide
  Antisense strand to SEQ ID NO: 2129134
aucaacacacaaguauaug

SEQ ID NO: 2129136 - RNA, 19 nt, Artificial Sequence
  Description of Artificial Sequence: Synthetic oligonucleotide
  Sense strand starting at position 3876 of SEQ ID NO: 1882540
auauacuuguguguugaua

SEQ ID NO: 2129137 - RNA, 19 nt, Artificial Sequence
  Description of Artificial Sequence: Synthetic oligonucleotide
  Antisense strand to SEQ ID NO: 2129136
uaucaacacacaaguauau

SEQ ID NO: 2129138 - RNA, 19 nt, Artificial Sequence
  Description of Artificial Sequence: Synthetic oligonucleotide
  Sense strand starting at position 3878 of SEQ ID NO: 1882540
auacuuguguguugauaca

SEQ ID NO: 2129139 - RNA, 19 nt, Artificial Sequence
  Description of Artificial Sequence: Synthetic oligonucleotide
  Antisense strand to SEQ ID NO: 2129138
uguaucaacacacaaguau

SEQ ID NO: 2129140 - RNA, 19 nt, Artificial Sequence
  Description of Artificial Sequence: Synthetic oligonucleotide
  Sense strand starting at position 219 of SEQ ID NO: 1882541
guggcauauccacauaaua

SEQ ID NO: 2129141 - RNA, 19 nt, Artificial Sequence
  Description of Artificial Sequence: Synthetic oligonucleotide
  Antisense strand to SEQ ID NO: 2129140
uauuauguggauaugccac

SEQ ID NO: 2129142 - RNA, 19 nt, Artificial Sequence
  Description of Artificial Sequence: Synthetic oligonucleotide
  Sense strand starting at position 277 of SEQ ID NO: 1882541
ugaaacaacuuggagaaau

SEQ ID NO: 2129143 - RNA, 19 nt, Artificial Sequence
  Description of Artificial Sequence: Synthetic oligonucleotide
  Antisense strand to SEQ ID NO: 2129142
auuucuccaaguuguuuca

SEQ ID NO: 2129144 - RNA, 19 nt, Artificial Sequence
  Description of Artificial Sequence: Synthetic oligonucleotide
  Sense strand starting at position 388 of SEQ ID NO: 1882541
ggguaaggaguaugauaua

SEQ ID NO: 2129145 - RNA, 19 nt, Artificial Sequence
  Description of Artificial Sequence: Synthetic oligonucleotide
  Antisense strand to SEQ ID NO: 2129144
uauaucauacuccuuaccc

SEQ ID NO: 2129146 - RNA, 19 nt, Artificial Sequence
  Description of Artificial Sequence: Synthetic oligonucleotide
  Sense strand starting at position 399 of SEQ ID NO: 1882541
augauauaaugggaucaca

SEQ ID NO: 2129147 - RNA, 19 nt, Artificial Sequence
  Description of Artificial Sequence: Synthetic oligonucleotide
  Antisense strand to SEQ ID NO: 2129146
ugugaucccauuauaucau

SEQ ID NO: 2129148 - RNA, 19 nt, Artificial Sequence
  Description of Artificial Sequence: Synthetic oligonucleotide
  Sense strand starting at position 444 of SEQ ID NO: 1882541
gcgauagauuuguucuaca

SEQ ID NO: 2129149 - RNA, 19 nt, Artificial Sequence
  Description of Artificial Sequence: Synthetic oligonucleotide
  Antisense strand to SEQ ID NO: 2129148
uguagaacaaaucuaucgc

SEQ ID NO: 2129150 - RNA, 19 nt, Artificial Sequence
  Description of Artificial Sequence: Synthetic oligonucleotide
  Sense strand starting at position 455 of SEQ ID NO: 1882541
guucuacauccuuacugua

SEQ ID NO: 2129151 - RNA, 19 nt, Artificial Sequence
  Description of Artificial Sequence: Synthetic oligonucleotide
  Antisense strand to SEQ ID NO: 2129150
uacaguaaggauguagaac

SEQ ID NO: 2129152 - RNA, 19 nt, Artificial Sequence
  Description of Artificial Sequence: Synthetic oligonucleotide
  Sense strand starting at position 499 of SEQ ID NO: 1882541
cgcagaacuguacaucgaa

SEQ ID NO: 2129153 - RNA, 19 nt, Artificial Sequence
  Description of Artificial Sequence: Synthetic oligonucleotide
  Antisense strand to SEQ ID NO: 2129152
uucgauguacaguucugcg

SEQ ID NO: 2129154 - RNA, 19 nt, Artificial Sequence
  Description of Artificial Sequence: Synthetic oligonucleotide
  Sense strand starting at position 661 of SEQ ID NO: 1882541
acaauuacguuccuagaaa

SEQ ID NO: 2129155 - RNA, 19 nt, Artificial Sequence
  Description of Artificial Sequence: Synthetic oligonucleotide
  Antisense strand to SEQ ID NO: 2129154
uuucuaggaacguaauugu

SEQ ID NO: 2129156 - RNA, 19 nt, Artificial Sequence
  Description of Artificial Sequence: Synthetic oligonucleotide
  Sense strand starting at position 683 of SEQ ID NO: 1882541
gcauacuucugaguacaau

SEQ ID NO: 2129157 - RNA, 19 nt, Artificial Sequence
  Description of Artificial Sequence: Synthetic oligonucleotide
  Antisense strand to SEQ ID NO: 2129156
auuguacucagaaguaugc

SEQ ID NO: 2129158 - RNA, 19 nt, Artificial Sequence
  Description of Artificial Sequence: Synthetic oligonucleotide
  Sense strand starting at position 762 of SEQ ID NO: 1882541
gcuaaugcggucuaauaaa

SEQ ID NO: 2129159 - RNA, 19 nt, Artificial Sequence
  Description of Artificial Sequence: Synthetic oligonucleotide
  Antisense strand to SEQ ID NO: 2129158
uuuauuagaccgcauuagc

SEQ ID NO: 2129160 - RNA, 19 nt, Artificial Sequence
  Description of Artificial Sequence: Synthetic oligonucleotide
  Sense strand starting at position 848 of SEQ ID NO: 1882541
aguagaaguacagguuaua

SEQ ID NO: 2129161 - RNA, 19 nt, Artificial Sequence
  Description of Artificial Sequence: Synthetic oligonucleotide
  Antisense strand to SEQ ID NO: 2129160
uauaaccuguacuucuacu

SEQ ID NO: 2129162 - RNA, 19 nt, Artificial Sequence
  Description of Artificial Sequence: Synthetic oligonucleotide
  Sense strand starting at position 976 of SEQ ID NO: 1882541
ucacuagcuccugauaaug

SEQ ID NO: 2129163 - RNA, 19 nt, Artificial Sequence
  Description of Artificial Sequence: Synthetic oligonucleotide
  Antisense strand to SEQ ID NO: 2129162
cauuaucaggagcuaguga

SEQ ID NO: 2129164 - RNA, 19 nt, Artificial Sequence
  Description of Artificial Sequence: Synthetic oligonucleotide
  Sense strand starting at position 1021 of SEQ ID NO: 1882541
guucuuacuccugggaacu

SEQ ID NO: 2129165 - RNA, 19 nt, Artificial Sequence
  Description of Artificial Sequence: Synthetic oligonucleotide
  Antisense strand to SEQ ID NO: 2129164
aguucccaggaguaagaac

SEQ ID NO: 2129166 - RNA, 19 nt, Artificial Sequence
  Description of Artificial Sequence: Synthetic oligonucleotide
  Sense strand starting at position 1053 of SEQ ID NO: 1882541
cggaucuccgaguaaaguu

SEQ ID NO: 2129167 - RNA, 19 nt, Artificial Sequence
  Description of Artificial Sequence: Synthetic oligonucleotide
  Antisense strand to SEQ ID NO: 2129166
aacuuuacucggagauccg

SEQ ID NO: 2129168 - RNA, 19 nt, Artificial Sequence
  Description of Artificial Sequence: Synthetic oligonucleotide
  Sense strand starting at position 1062 of SEQ ID NO: 1882541
gaguaaaguuaauucugua

SEQ ID NO: 2129169 - RNA, 19 nt, Artificial Sequence
  Description of Artificial Sequence: Synthetic oligonucleotide
  Antisense strand to SEQ ID NO: 2129168
uacagaauuaacuuuacuc

SEQ ID NO: 2129170 - RNA, 19 nt, Artificial Sequence
  Description of Artificial Sequence: Synthetic oligonucleotide
  Sense strand starting at position 1221 of SEQ ID NO: 1882541
ggacucucuucgccaucaa

SEQ ID NO: 2129171 - RNA, 19 nt, Artificial Sequence
  Description of Artificial Sequence: Synthetic oligonucleotide
  Antisense strand to SEQ ID NO: 2129170
uugauggcgaagagagucc

SEQ ID NO: 2129172 - RNA, 19 nt, Artificial Sequence
  Description of Artificial Sequence: Synthetic oligonucleotide
  Sense strand starting at position 2130 of SEQ ID NO: 1882541
cgagcaggaucuccuagau

SEQ ID NO: 2129173 - RNA, 19 nt, Artificial Sequence
  Description of Artificial Sequence: Synthetic oligonucleotide
  Antisense strand to SEQ ID NO: 2129172
aucuaggagauccugcucg

SEQ ID NO: 2129174 - RNA, 19 nt, Artificial Sequence
  Description of Artificial Sequence: Synthetic oligonucleotide
  Sense strand starting at position 2140 of SEQ ID NO: 1882541
cuccuagaucgugaacucu

SEQ ID NO: 2129175 - RNA, 19 nt, Artificial Sequence
  Description of Artificial Sequence: Synthetic oligonucleotide
  Antisense strand to SEQ ID NO: 2129174
agaguucacgaucuaggag

SEQ ID NO: 2129176 - RNA, 19 nt, Artificial Sequence
  Description of Artificial Sequence: Synthetic oligonucleotide
  Sense strand starting at position 2190 of SEQ ID NO: 1882541
augaguuucgccuacagag

SEQ ID NO: 2129177 - RNA, 19 nt, Artificial Sequence
  Description of Artificial Sequence: Synthetic oligonucleotide
  Antisense strand to SEQ ID NO: 2129176
cucuguaggcgaaacucau

SEQ ID NO: 2129178 - RNA, 19 nt, Artificial Sequence
  Description of Artificial Sequence: Synthetic oligonucleotide
  Sense strand starting at position 2192 of SEQ ID NO: 1882541
gaguuucgccuacagaguu

SEQ ID NO: 2129179 - RNA, 19 nt, Artificial Sequence
  Description of Artificial Sequence: Synthetic oligonucleotide
  Antisense strand to SEQ ID NO: 2129178
aacucuguaggcgaaacuc

SEQ ID NO: 2129180 - RNA, 19 nt, Artificial Sequence
  Description of Artificial Sequence: Synthetic oligonucleotide
  Sense strand starting at position 2200 of SEQ ID NO: 1882541
ccuacagaguuaucacacu

SEQ ID NO: 2129181 - RNA, 19 nt, Artificial Sequence
  Description of Artificial Sequence: Synthetic oligonucleotide
  Antisense strand to SEQ ID NO: 2129180
agugugauaacucuguagg

SEQ ID NO: 2129182 - RNA, 19 nt, Artificial Sequence
  Description of Artificial Sequence: Synthetic oligonucleotide
  Sense strand starting at position 2357 of SEQ ID NO: 1882541
agaagccugagaugguuaa

SEQ ID NO: 2129183 - RNA, 19 nt, Artificial Sequence
  Description of Artificial Sequence: Synthetic oligonucleotide
  Antisense strand to SEQ ID NO: 2129182
uuaaccaucucaggcuucu

SEQ ID NO: 2129184 - RNA, 19 nt, Artificial Sequence
  Description of Artificial Sequence: Synthetic oligonucleotide
  Sense strand starting at position 2358 of SEQ ID NO: 1882541
gaagccugagaugguuaau

SEQ ID NO: 2129185 - RNA, 19 nt, Artificial Sequence
  Description of Artificial Sequence: Synthetic oligonucleotide
  Antisense strand to SEQ ID NO: 2129184
auuaaccaucucaggcuuc

SEQ ID NO: 2129186 - RNA, 19 nt, Artificial Sequence
  Description of Artificial Sequence: Synthetic oligonucleotide
  Sense strand starting at position 2361 of SEQ ID NO: 1882541
gccugagaugguuaauuau

SEQ ID NO: 2129187 - RNA, 19 nt, Artificial Sequence
  Description of Artificial Sequence: Synthetic oligonucleotide
  Antisense strand to SEQ ID NO: 2129186
auaauuaaccaucucaggc

SEQ ID NO: 2129188 - RNA, 19 nt, Artificial Sequence
  Description of Artificial Sequence: Synthetic oligonucleotide
  Sense strand starting at position 2505 of SEQ ID NO: 1882541
gauguagaguaacugcauu

SEQ ID NO: 2129189 - RNA, 19 nt, Artificial Sequence
  Description of Artificial Sequence: Synthetic oligonucleotide
  Antisense strand to SEQ ID NO: 2129188
aaugcaguuacucuacauc

SEQ ID NO: 2129190 - RNA, 19 nt, Artificial Sequence
  Description of Artificial Sequence: Synthetic oligonucleotide
  Sense strand starting at position 2826 of SEQ ID NO: 1882541
aggcaauaacgugaaucaa

SEQ ID NO: 2129191 - RNA, 19 nt, Artificial Sequence
  Description of Artificial Sequence: Synthetic oligonucleotide
  Antisense strand to SEQ ID NO: 2129190
uugauucacguuauugccu

SEQ ID NO: 2129192 - RNA, 19 nt, Artificial Sequence
  Description of Artificial Sequence: Synthetic oligonucleotide
  Sense strand starting at position 2937 of SEQ ID NO: 1882541
ggcucaaaguuagcauaau

SEQ ID NO: 2129193 - RNA, 19 nt, Artificial Sequence
  Description of Artificial Sequence: Synthetic oligonucleotide
  Antisense strand to SEQ ID NO: 2129192
auuaugcuaacuuugagcc

SEQ ID NO: 2129194 - RNA, 19 nt, Artificial Sequence
  Description of Artificial Sequence: Synthetic oligonucleotide
  Sense strand starting at position 2987 of SEQ ID NO: 1882541
gaaggaguuagcgacuaga

SEQ ID NO: 2129195 - RNA, 19 nt, Artificial Sequence
  Description of Artificial Sequence: Synthetic oligonucleotide
  Antisense strand to SEQ ID NO: 2129194
ucuagucgcuaacuccuuc

SEQ ID NO: 2129196 - RNA, 19 nt, Artificial Sequence
  Description of Artificial Sequence: Synthetic oligonucleotide
  Sense strand starting at position 2990 of SEQ ID NO: 1882541
ggaguuagcgacuagaaga

SEQ ID NO: 2129197 - RNA, 19 nt, Artificial Sequence
  Description of Artificial Sequence: Synthetic oligonucleotide
  Antisense strand to SEQ ID NO: 2129196
ucuucuagucgcuaacucc

SEQ ID NO: 2129198 - RNA, 19 nt, Artificial Sequence
  Description of Artificial Sequence: Synthetic oligonucleotide
  Sense strand starting at position 3016 of SEQ ID NO: 1882541
ccaguuagcaacuggaaga

SEQ ID NO: 2129199 - RNA, 19 nt, Artificial Sequence
  Description of Artificial Sequence: Synthetic oligonucleotide
  Antisense strand to SEQ ID NO: 2129198
ucuuccaguugcuaacugg

SEQ ID NO: 2129200 - RNA, 19 nt, Artificial Sequence
  Description of Artificial Sequence: Synthetic oligonucleotide
  Sense strand starting at position 3229 of SEQ ID NO: 1882541
ucaaguagcuaacagauuu

SEQ ID NO: 2129201 - RNA, 19 nt, Artificial Sequence
  Description of Artificial Sequence: Synthetic oligonucleotide
  Antisense strand to SEQ ID NO: 2129200
aaaucuguuagcuacuuga

SEQ ID NO: 2129202 - RNA, 19 nt, Artificial Sequence
  Description of Artificial Sequence: Synthetic oligonucleotide
  Sense strand starting at position 3252 of SEQ ID NO: 1882541
cuaggauuugguuggcagu

SEQ ID NO: 2129203 - RNA, 19 nt, Artificial Sequence
  Description of Artificial Sequence: Synthetic oligonucleotide
  Antisense strand to SEQ ID NO: 2129202
acugccaaccaaauccuag

SEQ ID NO: 2129204 - RNA, 19 nt, Artificial Sequence
  Description of Artificial Sequence: Synthetic oligonucleotide
  Sense strand starting at position 3263 of SEQ ID NO: 1882541
uuggcaguaucucuuaaac

SEQ ID NO: 2129205 - RNA, 19 nt, Artificial Sequence
  Description of Artificial Sequence: Synthetic oligonucleotide
  Antisense strand to SEQ ID NO: 2129204
guuuaagagauacugccaa

SEQ ID NO: 2129206 - RNA, 19 nt, Artificial Sequence
  Description of Artificial Sequence: Synthetic oligonucleotide
  Sense strand starting at position 3274 of SEQ ID NO: 1882541
ucuuaaacuugaguaacgu

SEQ ID NO: 2129207 - RNA, 19 nt, Artificial Sequence
  Description of Artificial Sequence: Synthetic oligonucleotide
  Antisense strand to SEQ ID NO: 2129206
acguuacucaaguuuaaga

SEQ ID NO: 2129208 - RNA, 19 nt, Artificial Sequence
  Description of Artificial Sequence: Synthetic oligonucleotide
  Sense strand starting at position 3275 of SEQ ID NO: 1882541
cuuaaacuugaguaacgua

SEQ ID NO: 2129209 - RNA, 19 nt, Artificial Sequence
  Description of Artificial Sequence: Synthetic oligonucleotide
  Antisense strand to SEQ ID NO: 2129208
uacguuacucaaguuuaag

SEQ ID NO: 2129210 - RNA, 19 nt, Artificial Sequence
  Description of Artificial Sequence: Synthetic oligonucleotide
  Sense strand starting at position 3280 of SEQ ID NO: 1882541
acuugaguaacguacugau

SEQ ID NO: 2129211 - RNA, 19 nt, Artificial Sequence
  Description of Artificial Sequence: Synthetic oligonucleotide
  Antisense strand to SEQ ID NO: 2129210
aucaguacguuacucaagu

SEQ ID NO: 2129212 - RNA, 19 nt, Artificial Sequence
  Description of Artificial Sequence: Synthetic oligonucleotide
  Sense strand starting at position 3334 of SEQ ID NO: 1882541
guuggcaaaugacuugaau

SEQ ID NO: 2129213 - RNA, 19 nt, Artificial Sequence
  Description of Artificial Sequence: Synthetic oligonucleotide
  Antisense strand to SEQ ID NO: 2129212
auucaagucauuugccaac

SEQ ID NO: 2129214 - RNA, 19 nt, Artificial Sequence
  Description of Artificial Sequence: Synthetic oligonucleotide
  Sense strand starting at position 3382 of SEQ ID NO: 1882541
ggccgaugagcacaugaaa

SEQ ID NO: 2129215 - RNA, 19 nt, Artificial Sequence
  Description of Artificial Sequence: Synthetic oligonucleotide
  Antisense strand to SEQ ID NO: 2129214
uuucaugugcucaucggcc

SEQ ID NO: 2129216 - RNA, 19 nt, Artificial Sequence
  Description of Artificial Sequence: Synthetic oligonucleotide
  Sense strand starting at position 3507 of SEQ ID NO: 1882541
auaugaguguuggcaagga

SEQ ID NO: 2129217 - RNA, 19 nt, Artificial Sequence
  Description of Artificial Sequence: Synthetic oligonucleotide
  Antisense strand to SEQ ID NO: 2129216
uccuugccaacacucauau

SEQ ID NO: 2129218 - RNA, 19 nt, Artificial Sequence
  Description of Artificial Sequence: Synthetic oligonucleotide
  Sense strand starting at position 3853 of SEQ ID NO: 1882541
gagguaucccuguaauccc

SEQ ID NO: 2129219 - RNA, 19 nt, Artificial Sequence
  Description of Artificial Sequence: Synthetic oligonucleotide
  Antisense strand to SEQ ID NO: 2129218
gggauuacagggauaccuc

SEQ ID NO: 2129220 - RNA, 19 nt, Artificial Sequence
  Description of Artificial Sequence: Synthetic oligonucleotide
  Sense strand starting at position 16 of SEQ ID NO: 1882542
agcaauggguuccuaaaug

SEQ ID NO: 2129221 - RNA, 19 nt, Artificial Sequence
  Description of Artificial Sequence: Synthetic oligonucleotide
  Antisense strand to SEQ ID NO: 2129220
cauuuaggaacccauugcu

SEQ ID NO: 2129222 - RNA, 19 nt, Artificial Sequence
  Description of Artificial Sequence: Synthetic oligonucleotide
  Sense strand starting at position 30 of SEQ ID NO: 1882542
aaaugucaacucuggagau

SEQ ID NO: 2129223 - RNA, 19 nt, Artificial Sequence
  Description of Artificial Sequence: Synthetic oligonucleotide
  Antisense strand to SEQ ID NO: 2129222
aucuccagaguugacauuu

SEQ ID NO: 2129224 - RNA, 19 nt, Artificial Sequence
  Description of Artificial Sequence: Synthetic oligonucleotide
  Sense strand starting at position 57 of SEQ ID NO: 1882542
cauagcagagacugauauu

SEQ ID NO: 2129225 - RNA, 19 nt, Artificial Sequence
  Description of Artificial Sequence: Synthetic oligonucleotide
  Antisense strand to SEQ ID NO: 2129224
aauaucagucucugcuaug

SEQ ID NO: 2129226 - RNA, 19 nt, Artificial Sequence
  Description of Artificial Sequence: Synthetic oligonucleotide
  Sense strand starting at position 121 of SEQ ID NO: 1882542
uuaacaguguucuauuuac

SEQ ID NO: 2129227 - RNA, 19 nt, Artificial Sequence
  Description of Artificial Sequence: Synthetic oligonucleotide
  Antisense strand to SEQ ID NO: 2129226
guaaauagaacacuguuaa

SEQ ID NO: 2129228 - RNA, 19 nt, Artificial Sequence
  Description of Artificial Sequence: Synthetic oligonucleotide
  Sense strand starting at position 249 of SEQ ID NO: 1882542
ugcagaugcugcucacaga

SEQ ID NO: 2129229 - RNA, 19 nt, Artificial Sequence
  Description of Artificial Sequence: Synthetic oligonucleotide
  Antisense strand to SEQ ID NO: 2129228
ucugugagcagcaucugca

SEQ ID NO: 2129230 - RNA, 19 nt, Artificial Sequence
  Description of Artificial Sequence: Synthetic oligonucleotide
  Sense strand starting at position 250 of SEQ ID NO: 1882542
gcagaugcugcucacagaa

SEQ ID NO: 2129231 - RNA, 19 nt, Artificial Sequence
  Description of Artificial Sequence: Synthetic oligonucleotide
  Antisense strand to SEQ ID NO: 2129230
uucugugagcagcaucugc

SEQ ID NO: 2129232 - RNA, 19 nt, Artificial Sequence
  Description of Artificial Sequence: Synthetic oligonucleotide
  Sense strand starting at position 353 of SEQ ID NO: 1882542
acgugauauaaccgcuaga

SEQ ID NO: 2129233 - RNA, 19 nt, Artificial Sequence
  Description of Artificial Sequence: Synthetic oligonucleotide
  Antisense strand to SEQ ID NO: 2129232
ucuagcgguuauaucacgu

SEQ ID NO: 2129234 - RNA, 19 nt, Artificial Sequence
  Description of Artificial Sequence: Synthetic oligonucleotide
  Sense strand starting at position 378 of SEQ ID NO: 1882542
ucugucacaggcuguauua

SEQ ID NO: 2129235 - RNA, 19 nt, Artificial Sequence
  Description of Artificial Sequence: Synthetic oligonucleotide
  Antisense strand to SEQ ID NO: 2129234
uaauacagccugugacaga

SEQ ID NO: 2129236 - RNA, 19 nt, Artificial Sequence
  Description of Artificial Sequence: Synthetic oligonucleotide
  Sense strand starting at position 412 of SEQ ID NO: 1882542
guuggcuguguucagauuu

SEQ ID NO: 2129237 - RNA, 19 nt, Artificial Sequence
  Description of Artificial Sequence: Synthetic oligonucleotide
  Antisense strand to SEQ ID NO: 2129236
aaaucugaacacagccaac

SEQ ID NO: 2129238 - RNA, 19 nt, Artificial Sequence
  Description of Artificial Sequence: Synthetic oligonucleotide
  Sense strand starting at position 433 of SEQ ID NO: 1882542
uguuauauuuguggaaauc

SEQ ID NO: 2129239 - RNA, 19 nt, Artificial Sequence
  Description of Artificial Sequence: Synthetic oligonucleotide
  Antisense strand to SEQ ID NO: 2129238
gauuuccacaaauauaaca

SEQ ID NO: 2129240 - RNA, 19 nt, Artificial Sequence
  Description of Artificial Sequence: Synthetic oligonucleotide
  Sense strand starting at position 443 of SEQ ID NO: 1882542
guggaaaucugagugcaug

SEQ ID NO: 2129241 - RNA, 19 nt, Artificial Sequence
  Description of Artificial Sequence: Synthetic oligonucleotide
  Antisense strand to SEQ ID NO: 2129240
caugcacucagauuuccac

SEQ ID NO: 2129242 - RNA, 19 nt, Artificial Sequence
  Description of Artificial Sequence: Synthetic oligonucleotide
  Sense strand starting at position 444 of SEQ ID NO: 1882542
uggaaaucugagugcaugu

SEQ ID NO: 2129243 - RNA, 19 nt, Artificial Sequence
  Description of Artificial Sequence: Synthetic oligonucleotide
  Antisense strand to SEQ ID NO: 2129242
acaugcacucagauuucca

SEQ ID NO: 2129244 - RNA, 19 nt, Artificial Sequence
  Description of Artificial Sequence: Synthetic oligonucleotide
  Sense strand starting at position 446 of SEQ ID NO: 1882542
gaaaucugagugcauguga

SEQ ID NO: 2129245 - RNA, 19 nt, Artificial Sequence
  Description of Artificial Sequence: Synthetic oligonucleotide
  Antisense strand to SEQ ID NO: 2129244
ucacaugcacucagauuuc

SEQ ID NO: 2129246 - RNA, 19 nt, Artificial Sequence
  Description of Artificial Sequence: Synthetic oligonucleotide
  Sense strand starting at position 857 of SEQ ID NO: 1882542
ucacgaggauuugaagaca

SEQ ID NO: 2129247 - RNA, 19 nt, Artificial Sequence
  Description of Artificial Sequence: Synthetic oligonucleotide
  Antisense strand to SEQ ID NO: 2129246
ugucuucaaauccucguga

SEQ ID NO: 2129248 - RNA, 19 nt, Artificial Sequence
  Description of Artificial Sequence: Synthetic oligonucleotide
  Sense strand starting at position 2203 of SEQ ID NO: 1882542
ccagaagaguuucuggcau

SEQ ID NO: 2129249 - RNA, 19 nt, Artificial Sequence
  Description of Artificial Sequence: Synthetic oligonucleotide
  Antisense strand to SEQ ID NO: 2129248
augccagaaacucuucugg

SEQ ID NO: 2129250 - RNA, 19 nt, Artificial Sequence
  Description of Artificial Sequence: Synthetic oligonucleotide
  Sense strand starting at position 2209 of SEQ ID NO: 1882542
gaguuucuggcauggguuu

SEQ ID NO: 2129251 - RNA, 19 nt, Artificial Sequence
  Description of Artificial Sequence: Synthetic oligonucleotide
  Antisense strand to SEQ ID NO: 2129250
aaacccaugccagaaacuc

SEQ ID NO: 2129252 - RNA, 19 nt, Artificial Sequence
  Description of Artificial Sequence: Synthetic oligonucleotide
  Sense strand starting at position 2286 of SEQ ID NO: 1882542
ugacgugcuacuggaauuu

SEQ ID NO: 2129253 - RNA, 19 nt, Artificial Sequence
  Description of Artificial Sequence: Synthetic oligonucleotide
  Antisense strand to SEQ ID NO: 2129252
aaauuccaguagcacguca

SEQ ID NO: 2129254 - RNA, 19 nt, Artificial Sequence
  Description of Artificial Sequence: Synthetic oligonucleotide
  Sense strand starting at position 2331 of SEQ ID NO: 1882542
cugagaggauucguggaaa

SEQ ID NO: 2129255 - RNA, 19 nt, Artificial Sequence
  Description of Artificial Sequence: Synthetic oligonucleotide
  Antisense strand to SEQ ID NO: 2129254
uuuccacgaauccucucag

SEQ ID NO: 2129256 - RNA, 19 nt, Artificial Sequence
  Description of Artificial Sequence: Synthetic oligonucleotide
  Sense strand starting at position 2392 of SEQ ID NO: 1882542
uuuagucucauggguugua

SEQ ID NO: 2129257 - RNA, 19 nt, Artificial Sequence
  Description of Artificial Sequence: Synthetic oligonucleotide
  Antisense strand to SEQ ID NO: 2129256
uacaacccaugagacuaaa

SEQ ID NO: 2129258 - RNA, 19 nt, Artificial Sequence
  Description of Artificial Sequence: Synthetic oligonucleotide
  Sense strand starting at position 2393 of SEQ ID NO: 1882542
uuagucucauggguuguau

SEQ ID NO: 2129259 - RNA, 19 nt, Artificial Sequence
  Description of Artificial Sequence: Synthetic oligonucleotide
  Antisense strand to SEQ ID NO: 2129258
auacaacccaugagacuaa

SEQ ID NO: 2129260 - RNA, 19 nt, Artificial Sequence
  Description of Artificial Sequence: Synthetic oligonucleotide
  Sense strand starting at position 2395 of SEQ ID NO: 1882542
agucucauggguuguauaa

SEQ ID NO: 2129261 - RNA, 19 nt, Artificial Sequence
  Description of Artificial Sequence: Synthetic oligonucleotide
  Antisense strand to SEQ ID NO: 2129260
uuauacaacccaugagacu

SEQ ID NO: 2129262 - RNA, 19 nt, Artificial Sequence
  Description of Artificial Sequence: Synthetic oligonucleotide
  Sense strand starting at position 2404 of SEQ ID NO: 1882542
gguuguauaaggcaugguu

SEQ ID NO: 2129263 - RNA, 19 nt, Artificial Sequence
  Description of Artificial Sequence: Synthetic oligonucleotide
  Antisense strand to SEQ ID NO: 2129262
aaccaugccuuauacaacc

SEQ ID NO: 2129264 - RNA, 19 nt, Artificial Sequence
  Description of Artificial Sequence: Synthetic oligonucleotide
  Sense strand starting at position 2411 of SEQ ID NO: 1882542
uaaggcaugguuuguguua

SEQ ID NO: 2129265 - RNA, 19 nt, Artificial Sequence
  Description of Artificial Sequence: Synthetic oligonucleotide
  Antisense strand to SEQ ID NO: 2129264
uaacacaaaccaugccuua

SEQ ID NO: 2129266 - RNA, 19 nt, Artificial Sequence
  Description of Artificial Sequence: Synthetic oligonucleotide
  Sense strand starting at position 2412 of SEQ ID NO: 1882542
aaggcaugguuuguguuaa

SEQ ID NO: 2129267 - RNA, 19 nt, Artificial Sequence
  Description of Artificial Sequence: Synthetic oligonucleotide
  Antisense strand to SEQ ID NO: 2129266
uuaacacaaaccaugccuu

SEQ ID NO: 2129268 - RNA, 19 nt, Artificial Sequence
  Description of Artificial Sequence: Synthetic oligonucleotide
  Sense strand starting at position 2424 of SEQ ID NO: 1882542
guguuaaguaauugcaaga

SEQ ID NO: 2129269 - RNA, 19 nt, Artificial Sequence
  Description of Artificial Sequence: Synthetic oligonucleotide
  Antisense strand to SEQ ID NO: 2129268
ucuugcaauuacuuaacac

SEQ ID NO: 2129270 - RNA, 19 nt, Artificial Sequence
  Description of Artificial Sequence: Synthetic oligonucleotide
  Sense strand starting at position 3045 of SEQ ID NO: 1882542
aaugguagugguuggacau

SEQ ID NO: 2129271 - RNA, 19 nt, Artificial Sequence
  Description of Artificial Sequence: Synthetic oligonucleotide
  Antisense strand to SEQ ID NO: 2129270
auguccaaccacuaccauu

SEQ ID NO: 2129272 - RNA, 19 nt, Artificial Sequence
  Description of Artificial Sequence: Synthetic oligonucleotide
  Sense strand starting at position 3051 of SEQ ID NO: 1882542
agugguuggacaugaaugu

SEQ ID NO: 2129273 - RNA, 19 nt, Artificial Sequence
  Description of Artificial Sequence: Synthetic oligonucleotide
  Antisense strand to SEQ ID NO: 2129272
acauucauguccaaccacu

SEQ ID NO: 2129274 - RNA, 19 nt, Artificial Sequence
  Description of Artificial Sequence: Synthetic oligonucleotide
  Sense strand starting at position 3061 of SEQ ID NO: 1882542
caugaaugucacggaggga

SEQ ID NO: 2129275 - RNA, 19 nt, Artificial Sequence
  Description of Artificial Sequence: Synthetic oligonucleotide
  Antisense strand to SEQ ID NO: 2129274
ucccuccgugacauucaug

SEQ ID NO: 2129276 - RNA, 19 nt, Artificial Sequence
  Description of Artificial Sequence: Synthetic oligonucleotide
  Sense strand starting at position 3064 of SEQ ID NO: 1882542
gaaugucacggagggaaua

SEQ ID NO: 2129277 - RNA, 19 nt, Artificial Sequence
  Description of Artificial Sequence: Synthetic oligonucleotide
  Antisense strand to SEQ ID NO: 2129276
uauucccuccgugacauuc

SEQ ID NO: 2129278 - RNA, 19 nt, Artificial Sequence
  Description of Artificial Sequence: Synthetic oligonucleotide
  Sense strand starting at position 3134 of SEQ ID NO: 1882542
cccuguugcuguuugauuu

SEQ ID NO: 2129279 - RNA, 19 nt, Artificial Sequence
  Description of Artificial Sequence: Synthetic oligonucleotide
  Antisense strand to SEQ ID NO: 2129278
aaaucaaacagcaacaggg

SEQ ID NO: 2129280 - RNA, 19 nt, Artificial Sequence
  Description of Artificial Sequence: Synthetic oligonucleotide
  Sense strand starting at position 3135 of SEQ ID NO: 1882542
ccuguugcuguuugauuua

SEQ ID NO: 2129281 - RNA, 19 nt, Artificial Sequence
  Description of Artificial Sequence: Synthetic oligonucleotide
  Antisense strand to SEQ ID NO: 2129280
uaaaucaaacagcaacagg

SEQ ID NO: 2129282 - RNA, 19 nt, Artificial Sequence
  Description of Artificial Sequence: Synthetic oligonucleotide
  Sense strand starting at position 3138 of SEQ ID NO: 1882542
guugcuguuugauuuauaa

SEQ ID NO: 2129283 - RNA, 19 nt, Artificial Sequence
  Description of Artificial Sequence: Synthetic oligonucleotide
  Antisense strand to SEQ ID NO: 2129282
uuauaaaucaaacagcaac

SEQ ID NO: 2129284 - RNA, 19 nt, Artificial Sequence
  Description of Artificial Sequence: Synthetic oligonucleotide
  Sense strand starting at position 3150 of SEQ ID NO: 1882542
uuuauaauagcacgaauga

SEQ ID NO: 2129285 - RNA, 19 nt, Artificial Sequence
  Description of Artificial Sequence: Synthetic oligonucleotide
  Antisense strand to SEQ ID NO: 2129284
ucauucgugcuauuauaaa

SEQ ID NO: 2129286 - RNA, 19 nt, Artificial Sequence
  Description of Artificial Sequence: Synthetic oligonucleotide
  Sense strand starting at position 3151 of SEQ ID NO: 1882542
uuauaauagcacgaaugau

SEQ ID NO: 2129287 - RNA, 19 nt, Artificial Sequence
  Description of Artificial Sequence: Synthetic oligonucleotide
  Antisense strand to SEQ ID NO: 2129286
aucauucgugcuauuauaa

SEQ ID NO: 2129288 - RNA, 19 nt, Artificial Sequence
  Description of Artificial Sequence: Synthetic oligonucleotide
  Sense strand starting at position 3245 of SEQ ID NO: 1882542
ucuggaaaucuguguccau

SEQ ID NO: 2129289 - RNA, 19 nt, Artificial Sequence
  Description of Artificial Sequence: Synthetic oligonucleotide
  Antisense strand to SEQ ID NO: 2129288
auggacacagauuuccaga

SEQ ID NO: 2129290 - RNA, 19 nt, Artificial Sequence
  Description of Artificial Sequence: Synthetic oligonucleotide
  Sense strand starting at position 3246 of SEQ ID NO: 1882542
cuggaaaucuguguccauc

SEQ ID NO: 2129291 - RNA, 19 nt, Artificial Sequence
  Description of Artificial Sequence: Synthetic oligonucleotide
  Antisense strand to SEQ ID NO: 2129290
gauggacacagauuuccag

SEQ ID NO: 2129292 - RNA, 19 nt, Artificial Sequence
  Description of Artificial Sequence: Synthetic oligonucleotide
  Sense strand starting at position 3248 of SEQ ID NO: 1882542
ggaaaucuguguccaucac

SEQ ID NO: 2129293 - RNA, 19 nt, Artificial Sequence
  Description of Artificial Sequence: Synthetic oligonucleotide
  Antisense strand to SEQ ID NO: 2129292
gugauggacacagauuucc

SEQ ID NO: 2129294 - RNA, 19 nt, Artificial Sequence
  Description of Artificial Sequence: Synthetic oligonucleotide
  Sense strand starting at position 3536 of SEQ ID NO: 1882542
cuguguucucacuacuuac

SEQ ID NO: 2129295 - RNA, 19 nt, Artificial Sequence
  Description of Artificial Sequence: Synthetic oligonucleotide
  Antisense strand to SEQ ID NO: 2129294
guaaguagugagaacacag

SEQ ID NO: 2129296 - RNA, 19 nt, Artificial Sequence
  Description of Artificial Sequence: Synthetic oligonucleotide
  Sense strand starting at position 3662 of SEQ ID NO: 1882542
aguuuagauuacuuggaga

SEQ ID NO: 2129297 - RNA, 19 nt, Artificial Sequence
  Description of Artificial Sequence: Synthetic oligonucleotide
  Antisense strand to SEQ ID NO: 2129296
ucuccaaguaaucuaaacu

SEQ ID NO: 2129298 - RNA, 19 nt, Artificial Sequence
  Description of Artificial Sequence: Synthetic oligonucleotide
  Sense strand starting at position 3903 of SEQ ID NO: 1882542
ggucgcagugaguacagau

SEQ ID NO: 2129299 - RNA, 19 nt, Artificial Sequence
  Description of Artificial Sequence: Synthetic oligonucleotide
  Antisense strand to SEQ ID NO: 2129298
aucuguacucacugcgacc

SEQ ID NO: 2129300 - RNA, 19 nt, Artificial Sequence
  Description of Artificial Sequence: Synthetic oligonucleotide
  Sense strand starting at position 144 of SEQ ID NO: 1882543
auaggugagaguugaccaa

SEQ ID NO: 2129301 - RNA, 19 nt, Artificial Sequence
  Description of Artificial Sequence: Synthetic oligonucleotide
  Antisense strand to SEQ ID NO: 2129300
uuggucaacucucaccuau

SEQ ID NO: 2129302 - RNA, 19 nt, Artificial Sequence
  Description of Artificial Sequence: Synthetic oligonucleotide
  Sense strand starting at position 528 of SEQ ID NO: 1882543
uaugauagugccugauaca

SEQ ID NO: 2129303 - RNA, 19 nt, Artificial Sequence
  Description of Artificial Sequence: Synthetic oligonucleotide
  Antisense strand to SEQ ID NO: 2129302
uguaucaggcacuaucaua

SEQ ID NO: 2129304 - RNA, 19 nt, Artificial Sequence
  Description of Artificial Sequence: Synthetic oligonucleotide
  Sense strand starting at position 529 of SEQ ID NO: 1882543
augauagugccugauacau

SEQ ID NO: 2129305 - RNA, 19 nt, Artificial Sequence
  Description of Artificial Sequence: Synthetic oligonucleotide
  Antisense strand to SEQ ID NO: 2129304
auguaucaggcacuaucau

SEQ ID NO: 2129306 - RNA, 19 nt, Artificial Sequence
  Description of Artificial Sequence: Synthetic oligonucleotide
  Sense strand starting at position 537 of SEQ ID NO: 1882543
gccugauacauguaguaga

SEQ ID NO: 2129307 - RNA, 19 nt, Artificial Sequence
  Description of Artificial Sequence: Synthetic oligonucleotide
  Antisense strand to SEQ ID NO: 2129306
ucuacuacauguaucaggc

SEQ ID NO: 2129308 - RNA, 19 nt, Artificial Sequence
  Description of Artificial Sequence: Synthetic oligonucleotide
  Sense strand starting at position 565 of SEQ ID NO: 1882543
uuuauugagugacucaaua

SEQ ID NO: 2129309 - RNA, 19 nt, Artificial Sequence
  Description of Artificial Sequence: Synthetic oligonucleotide
  Antisense strand to SEQ ID NO: 2129308
uauugagucacucaauaaa

SEQ ID NO: 2129310 - RNA, 19 nt, Artificial Sequence
  Description of Artificial Sequence: Synthetic oligonucleotide
  Sense strand starting at position 650 of SEQ ID NO: 1882543
gccuguuugcagcuaguuu

SEQ ID NO: 2129311 - RNA, 19 nt, Artificial Sequence
  Description of Artificial Sequence: Synthetic oligonucleotide
  Antisense strand to SEQ ID NO: 2129310
aaacuagcugcaaacaggc

SEQ ID NO: 2129312 - RNA, 19 nt, Artificial Sequence
  Description of Artificial Sequence: Synthetic oligonucleotide
  Sense strand starting at position 681 of SEQ ID NO: 1882543
ggugugcuuggugagagaa

SEQ ID NO: 2129313 - RNA, 19 nt, Artificial Sequence
  Description of Artificial Sequence: Synthetic oligonucleotide
  Antisense strand to SEQ ID NO: 2129312
uucucucaccaagcacacc

SEQ ID NO: 2129314 - RNA, 19 nt, Artificial Sequence
  Description of Artificial Sequence: Synthetic oligonucleotide
  Sense strand starting at position 1081 of SEQ ID NO: 1882543
guuguuccaggguaaagaa

SEQ ID NO: 2129315 - RNA, 19 nt, Artificial Sequence
  Description of Artificial Sequence: Synthetic oligonucleotide
  Antisense strand to SEQ ID NO: 2129314
uucuuuacccuggaacaac

SEQ ID NO: 2129316 - RNA, 19 nt, Artificial Sequence
  Description of Artificial Sequence: Synthetic oligonucleotide
  Sense strand starting at position 1119 of SEQ ID NO: 1882543
cacgcuguuggauaacauu

SEQ ID NO: 2129317 - RNA, 19 nt, Artificial Sequence
  Description of Artificial Sequence: Synthetic oligonucleotide
  Antisense strand to SEQ ID NO: 2129316
aauguuauccaacagcgug

SEQ ID NO: 2129318 - RNA, 19 nt, Artificial Sequence
  Description of Artificial Sequence: Synthetic oligonucleotide
  Sense strand starting at position 1185 of SEQ ID NO: 1882543
ccuguuacucuccacagua

SEQ ID NO: 2129319 - RNA, 19 nt, Artificial Sequence
  Description of Artificial Sequence: Synthetic oligonucleotide
  Antisense strand to SEQ ID NO: 2129318
uacuguggagaguaacagg

SEQ ID NO: 2129320 - RNA, 19 nt, Artificial Sequence
  Description of Artificial Sequence: Synthetic oligonucleotide
  Sense strand starting at position 1198 of SEQ ID NO: 1882543
acaguaugcgaagaauauc

SEQ ID NO: 2129321 - RNA, 19 nt, Artificial Sequence
  Description of Artificial Sequence: Synthetic oligonucleotide
  Antisense strand to SEQ ID NO: 2129320
gauauucuucgcauacugu

SEQ ID NO: 2129322 - RNA, 19 nt, Artificial Sequence
  Description of Artificial Sequence: Synthetic oligonucleotide
  Sense strand starting at position 1206 of SEQ ID NO: 1882543
cgaagaauaucccugacuu

SEQ ID NO: 2129323 - RNA, 19 nt, Artificial Sequence
  Description of Artificial Sequence: Synthetic oligonucleotide
  Antisense strand to SEQ ID NO: 2129322
aagucagggauauucuucg

SEQ ID NO: 2129324 - RNA, 19 nt, Artificial Sequence
  Description of Artificial Sequence: Synthetic oligonucleotide
  Sense strand starting at position 1262 of SEQ ID NO: 1882543
acuaauagccuuggagauc

SEQ ID NO: 2129325 - RNA, 19 nt, Artificial Sequence
  Description of Artificial Sequence: Synthetic oligonucleotide
  Antisense strand to SEQ ID NO: 2129324
gaucuccaaggcuauuagu

SEQ ID NO: 2129326 - RNA, 19 nt, Artificial Sequence
  Description of Artificial Sequence: Synthetic oligonucleotide
  Sense strand starting at position 1273 of SEQ ID NO: 1882543
uggagaucaugguugguga

SEQ ID NO: 2129327 - RNA, 19 nt, Artificial Sequence
  Description of Artificial Sequence: Synthetic oligonucleotide
  Antisense strand to SEQ ID NO: 2129326
ucaccaaccaugaucucca

SEQ ID NO: 2129328 - RNA, 19 nt, Artificial Sequence
  Description of Artificial Sequence: Synthetic oligonucleotide
  Sense strand starting at position 1290 of SEQ ID NO: 1882543
gaguguccugagcacaaga

SEQ ID NO: 2129329 - RNA, 19 nt, Artificial Sequence
  Description of Artificial Sequence: Synthetic oligonucleotide
  Antisense strand to SEQ ID NO: 2129328
ucuugugcucaggacacuc

SEQ ID NO: 2129330 - RNA, 19 nt, Artificial Sequence
  Description of Artificial Sequence: Synthetic oligonucleotide
  Sense strand starting at position 1413 of SEQ ID NO: 1882543
agaggaucccugggauguu

SEQ ID NO: 2129331 - RNA, 19 nt, Artificial Sequence
  Description of Artificial Sequence: Synthetic oligonucleotide
  Antisense strand to SEQ ID NO: 2129330
aacaucccagggauccucu

SEQ ID NO: 2129332 - RNA, 19 nt, Artificial Sequence
  Description of Artificial Sequence: Synthetic oligonucleotide
  Sense strand starting at position 1416 of SEQ ID NO: 1882543
ggaucccugggauguuaca

SEQ ID NO: 2129333 - RNA, 19 nt, Artificial Sequence
  Description of Artificial Sequence: Synthetic oligonucleotide
  Antisense strand to SEQ ID NO: 2129332
uguaacaucccagggaucc

SEQ ID NO: 2129334 - RNA, 19 nt, Artificial Sequence
  Description of Artificial Sequence: Synthetic oligonucleotide
  Sense strand starting at position 1528 of SEQ ID NO: 1882543
ggucacuuuccugaacauc

SEQ ID NO: 2129335 - RNA, 19 nt, Artificial Sequence
  Description of Artificial Sequence: Synthetic oligonucleotide
  Antisense strand to SEQ ID NO: 2129334
gauguucaggaaagugacc

SEQ ID NO: 2129336 - RNA, 19 nt, Artificial Sequence
  Description of Artificial Sequence: Synthetic oligonucleotide
  Sense strand starting at position 1634 of SEQ ID NO: 1882543
uaagucucaggaggucaua

SEQ ID NO: 2129337 - RNA, 19 nt, Artificial Sequence
  Description of Artificial Sequence: Synthetic oligonucleotide
  Antisense strand to SEQ ID NO: 2129336
uaugaccuccugagacuua

SEQ ID NO: 2129338 - RNA, 19 nt, Artificial Sequence
  Description of Artificial Sequence: Synthetic oligonucleotide
  Sense strand starting at position 1673 of SEQ ID NO: 1882543
gccucagaacuugguagau

SEQ ID NO: 2129339 - RNA, 19 nt, Artificial Sequence
  Description of Artificial Sequence: Synthetic oligonucleotide
  Antisense strand to SEQ ID NO: 2129338
aucuaccaaguucugaggc

SEQ ID NO: 2129340 - RNA, 19 nt, Artificial Sequence
  Description of Artificial Sequence: Synthetic oligonucleotide
  Sense strand starting at position 1709 of SEQ ID NO: 1882543
ugacaugaauccuccuguu

SEQ ID NO: 2129341 - RNA, 19 nt, Artificial Sequence
  Description of Artificial Sequence: Synthetic oligonucleotide
  Antisense strand to SEQ ID NO: 2129340
aacaggaggauucauguca

SEQ ID NO: 2129342 - RNA, 19 nt, Artificial Sequence
  Description of Artificial Sequence: Synthetic oligonucleotide
  Sense strand starting at position 2029 of SEQ ID NO: 1882543
gcaggucuucuugaauaaa

SEQ ID NO: 2129343 - RNA, 19 nt, Artificial Sequence
  Description of Artificial Sequence: Synthetic oligonucleotide
  Antisense strand to SEQ ID NO: 2129342
uuuauucaagaagaccugc

SEQ ID NO: 2129344 - RNA, 19 nt, Artificial Sequence
  Description of Artificial Sequence: Synthetic oligonucleotide
  Sense strand starting at position 2299 of SEQ ID NO: 1882543
gguauaucuguguauugau

SEQ ID NO: 2129345 - RNA, 19 nt, Artificial Sequence
  Description of Artificial Sequence: Synthetic oligonucleotide
  Antisense strand to SEQ ID NO: 2129344
aucaauacacagauauacc

SEQ ID NO: 2129346 - RNA, 19 nt, Artificial Sequence
  Description of Artificial Sequence: Synthetic oligonucleotide
  Sense strand starting at position 2314 of SEQ ID NO: 1882543
ugaucauuggcccaaccau

SEQ ID NO: 2129347 - RNA, 19 nt, Artificial Sequence
  Description of Artificial Sequence: Synthetic oligonucleotide
  Antisense strand to SEQ ID NO: 2129346
augguugggccaaugauca

SEQ ID NO: 2129348 - RNA, 19 nt, Artificial Sequence
  Description of Artificial Sequence: Synthetic oligonucleotide
  Sense strand starting at position 2363 of SEQ ID NO: 1882543
gggcaagucugggcagaaa

SEQ ID NO: 2129349 - RNA, 19 nt, Artificial Sequence
  Description of Artificial Sequence: Synthetic oligonucleotide
  Antisense strand to SEQ ID NO: 2129348
uuucugcccagacuugccc

SEQ ID NO: 2129350 - RNA, 19 nt, Artificial Sequence
  Description of Artificial Sequence: Synthetic oligonucleotide
  Sense strand starting at position 2609 of SEQ ID NO: 1882543
guaauuaaucaugaagcca

SEQ ID NO: 2129351 - RNA, 19 nt, Artificial Sequence
  Description of Artificial Sequence: Synthetic oligonucleotide
  Antisense strand to SEQ ID NO: 2129350
uggcuucaugauuaauuac

SEQ ID NO: 2129352 - RNA, 19 nt, Artificial Sequence
  Description of Artificial Sequence: Synthetic oligonucleotide
  Sense strand starting at position 2617 of SEQ ID NO: 1882543
ucaugaagccaguaagauc

SEQ ID NO: 2129353 - RNA, 19 nt, Artificial Sequence
  Description of Artificial Sequence: Synthetic oligonucleotide
  Antisense strand to SEQ ID NO: 2129352
gaucuuacuggcuucauga

SEQ ID NO: 2129354 - RNA, 19 nt, Artificial Sequence
  Description of Artificial Sequence: Synthetic oligonucleotide
  Sense strand starting at position 3147 of SEQ ID NO: 1882543
ugugucauccuccaaacag

SEQ ID NO: 2129355 - RNA, 19 nt, Artificial Sequence
  Description of Artificial Sequence: Synthetic oligonucleotide
  Antisense strand to SEQ ID NO: 2129354
cuguuuggaggaugacaca

SEQ ID NO: 2129356 - RNA, 19 nt, Artificial Sequence
  Description of Artificial Sequence: Synthetic oligonucleotide
  Sense strand starting at position 3169 of SEQ ID NO: 1882543
uaaccacaguaaucgugaa

SEQ ID NO: 2129357 - RNA, 19 nt, Artificial Sequence
  Description of Artificial Sequence: Synthetic oligonucleotide
  Antisense strand to SEQ ID NO: 2129356
uucacgauuacugugguua

SEQ ID NO: 2129358 - RNA, 19 nt, Artificial Sequence
  Description of Artificial Sequence: Synthetic oligonucleotide
  Sense strand starting at position 3173 of SEQ ID NO: 1882543
cacaguaaucgugaaacug

SEQ ID NO: 2129359 - RNA, 19 nt, Artificial Sequence
  Description of Artificial Sequence: Synthetic oligonucleotide
  Antisense strand to SEQ ID NO: 2129358
caguuucacgauuacugug

SEQ ID NO: 2129360 - RNA, 19 nt, Artificial Sequence
  Description of Artificial Sequence: Synthetic oligonucleotide
  Sense strand starting at position 3193 of SEQ ID NO: 1882543
gugguaaucagauggauau

SEQ ID NO: 2129361 - RNA, 19 nt, Artificial Sequence
  Description of Artificial Sequence: Synthetic oligonucleotide
  Antisense strand to SEQ ID NO: 2129360
auauccaucugauuaccac

SEQ ID NO: 2129362 - RNA, 19 nt, Artificial Sequence
  Description of Artificial Sequence: Synthetic oligonucleotide
  Sense strand starting at position 3194 of SEQ ID NO: 1882543
ugguaaucagauggauauu

SEQ ID NO: 2129363 - RNA, 19 nt, Artificial Sequence
  Description of Artificial Sequence: Synthetic oligonucleotide
  Antisense strand to SEQ ID NO: 2129362
aauauccaucugauuacca

SEQ ID NO: 2129364 - RNA, 19 nt, Artificial Sequence
  Description of Artificial Sequence: Synthetic oligonucleotide
  Sense strand starting at position 3227 of SEQ ID NO: 1882543
guagaaaucugagcuccau

SEQ ID NO: 2129365 - RNA, 19 nt, Artificial Sequence
  Description of Artificial Sequence: Synthetic oligonucleotide
  Antisense strand to SEQ ID NO: 2129364
auggagcucagauuucuac

SEQ ID NO: 2129366 - RNA, 19 nt, Artificial Sequence
  Description of Artificial Sequence: Synthetic oligonucleotide
  Sense strand starting at position 3305 of SEQ ID NO: 1882543
acaugagccagugauuaug

SEQ ID NO: 2129367 - RNA, 19 nt, Artificial Sequence
  Description of Artificial Sequence: Synthetic oligonucleotide
  Antisense strand to SEQ ID NO: 2129366
cauaaucacuggcucaugu

SEQ ID NO: 2129368 - RNA, 19 nt, Artificial Sequence
  Description of Artificial Sequence: Synthetic oligonucleotide
  Sense strand starting at position 3454 of SEQ ID NO: 1882543
ucagauauccacuggucuu

SEQ ID NO: 2129369 - RNA, 19 nt, Artificial Sequence
  Description of Artificial Sequence: Synthetic oligonucleotide
  Antisense strand to SEQ ID NO: 2129368
aagaccaguggauaucuga

SEQ ID NO: 2129370 - RNA, 19 nt, Artificial Sequence
  Description of Artificial Sequence: Synthetic oligonucleotide
  Sense strand starting at position 3530 of SEQ ID NO: 1882543
ugggaauuguucucaucug

SEQ ID NO: 2129371 - RNA, 19 nt, Artificial Sequence
  Description of Artificial Sequence: Synthetic oligonucleotide
  Antisense strand to SEQ ID NO: 2129370
cagaugagaacaauuccca

SEQ ID NO: 2129372 - RNA, 19 nt, Artificial Sequence
  Description of Artificial Sequence: Synthetic oligonucleotide
  Sense strand starting at position 3626 of SEQ ID NO: 1882543
aggugaaucaugggucuca

SEQ ID NO: 2129373 - RNA, 19 nt, Artificial Sequence
  Description of Artificial Sequence: Synthetic oligonucleotide
  Antisense strand to SEQ ID NO: 2129372
ugagacccaugauucaccu

SEQ ID NO: 2129374 - RNA, 19 nt, Artificial Sequence
  Description of Artificial Sequence: Synthetic oligonucleotide
  Sense strand starting at position 3627 of SEQ ID NO: 1882543
ggugaaucaugggucucau

SEQ ID NO: 2129375 - RNA, 19 nt, Artificial Sequence
  Description of Artificial Sequence: Synthetic oligonucleotide
  Antisense strand to SEQ ID NO: 2129374
augagacccaugauucacc

SEQ ID NO: 2129376 - RNA, 19 nt, Artificial Sequence
  Description of Artificial Sequence: Synthetic oligonucleotide
  Sense strand starting at position 3856 of SEQ ID NO: 1882543
agcucuuugacggaaaguu

SEQ ID NO: 2129377 - RNA, 19 nt, Artificial Sequence
  Description of Artificial Sequence: Synthetic oligonucleotide
  Antisense strand to SEQ ID NO: 2129376
aacuuuccgucaaagagcu

SEQ ID NO: 2129378 - RNA, 19 nt, Artificial Sequence
  Description of Artificial Sequence: Synthetic oligonucleotide
  Sense strand starting at position 3886 of SEQ ID NO: 1882543
ugcguuuaccgugauuuag

SEQ ID NO: 2129379 - RNA, 19 nt, Artificial Sequence
  Description of Artificial Sequence: Synthetic oligonucleotide
  Antisense strand to SEQ ID NO: 2129378
cuaaaucacgguaaacgca

SEQ ID NO: 2129380 - RNA, 19 nt, Artificial Sequence
  Description of Artificial Sequence: Synthetic oligonucleotide
  Sense strand starting at position 33 of SEQ ID NO: 1882544
acaggcaauccaugaauga

SEQ ID NO: 2129381 - RNA, 19 nt, Artificial Sequence
  Description of Artificial Sequence: Synthetic oligonucleotide
  Antisense strand to SEQ ID NO: 2129380
ucauucauggauugccugu

SEQ ID NO: 2129382 - RNA, 19 nt, Artificial Sequence
  Description of Artificial Sequence: Synthetic oligonucleotide
  Sense strand starting at position 65 of SEQ ID NO: 1882544
ugccuuaagugcccaauga

SEQ ID NO: 2129383 - RNA, 19 nt, Artificial Sequence
  Description of Artificial Sequence: Synthetic oligonucleotide
  Antisense strand to SEQ ID NO: 2129382
ucauugggcacuuaaggca

SEQ ID NO: 2129384 - RNA, 19 nt, Artificial Sequence
  Description of Artificial Sequence: Synthetic oligonucleotide
  Sense strand starting at position 120 of SEQ ID NO: 1882544
uccaaugucuaauuggaga

SEQ ID NO: 2129385 - RNA, 19 nt, Artificial Sequence
  Description of Artificial Sequence: Synthetic oligonucleotide
  Antisense strand to SEQ ID NO: 2129384
ucuccaauuagacauugga

SEQ ID NO: 2129386 - RNA, 19 nt, Artificial Sequence
  Description of Artificial Sequence: Synthetic oligonucleotide
  Sense strand starting at position 131 of SEQ ID NO: 1882544
auuggagaaucacaacaua

SEQ ID NO: 2129387 - RNA, 19 nt, Artificial Sequence
  Description of Artificial Sequence: Synthetic oligonucleotide
  Antisense strand to SEQ ID NO: 2129386
uauguugugauucuccaau

SEQ ID NO: 2129388 - RNA, 19 nt, Artificial Sequence
  Description of Artificial Sequence: Synthetic oligonucleotide
  Sense strand starting at position 214 of SEQ ID NO: 1882544
aagugucuccuguagagua

SEQ ID NO: 2129389 - RNA, 19 nt, Artificial Sequence
  Description of Artificial Sequence: Synthetic oligonucleotide
  Antisense strand to SEQ ID NO: 2129388
uacucuacaggagacacuu

SEQ ID NO: 2129390 - RNA, 19 nt, Artificial Sequence
  Description of Artificial Sequence: Synthetic oligonucleotide
  Sense strand starting at position 335 of SEQ ID NO: 1882544
ggaagagaggucuggcagu

SEQ ID NO: 2129391 - RNA, 19 nt, Artificial Sequence
  Description of Artificial Sequence: Synthetic oligonucleotide
  Antisense strand to SEQ ID NO: 2129390
acugccagaccucucuucc

SEQ ID NO: 2129392 - RNA, 19 nt, Artificial Sequence
  Description of Artificial Sequence: Synthetic oligonucleotide
  Sense strand starting at position 688 of SEQ ID NO: 1882544
guacuauuugcugguacac

SEQ ID NO: 2129393 - RNA, 19 nt, Artificial Sequence
  Description of Artificial Sequence: Synthetic oligonucleotide
  Antisense strand to SEQ ID NO: 2129392
guguaccagcaaauaguac

SEQ ID NO: 2129394 - RNA, 19 nt, Artificial Sequence
  Description of Artificial Sequence: Synthetic oligonucleotide
  Sense strand starting at position 783 of SEQ ID NO: 1882544
ccugcuguugcucugcaaa

SEQ ID NO: 2129395 - RNA, 19 nt, Artificial Sequence
  Description of Artificial Sequence: Synthetic oligonucleotide
  Antisense strand to SEQ ID NO: 2129394
uuugcagagcaacagcagg

SEQ ID NO: 2129396 - RNA, 19 nt, Artificial Sequence
  Description of Artificial Sequence: Synthetic oligonucleotide
  Sense strand starting at position 1323 of SEQ ID NO: 1882544
ggaagguuugugugguuga

SEQ ID NO: 2129397 - RNA, 19 nt, Artificial Sequence
  Description of Artificial Sequence: Synthetic oligonucleotide
  Antisense strand to SEQ ID NO: 2129396
ucaaccacacaaaccuucc

SEQ ID NO: 2129398 - RNA, 19 nt, Artificial Sequence
  Description of Artificial Sequence: Synthetic oligonucleotide
  Sense strand starting at position 1326 of SEQ ID NO: 1882544
agguuugugugguugagag

SEQ ID NO: 2129399 - RNA, 19 nt, Artificial Sequence
  Description of Artificial Sequence: Synthetic oligonucleotide
  Antisense strand to SEQ ID NO: 2129398
cucucaaccacacaaaccu

SEQ ID NO: 2129400 - RNA, 19 nt, Artificial Sequence
  Description of Artificial Sequence: Synthetic oligonucleotide
  Sense strand starting at position 1918 of SEQ ID NO: 1882544
gcucgcaggcugucugaau

SEQ ID NO: 2129401 - RNA, 19 nt, Artificial Sequence
  Description of Artificial Sequence: Synthetic oligonucleotide
  Antisense strand to SEQ ID NO: 2129400
auucagacagccugcgagc

SEQ ID NO: 2129402 - RNA, 19 nt, Artificial Sequence
  Description of Artificial Sequence: Synthetic oligonucleotide
  Sense strand starting at position 2058 of SEQ ID NO: 1882544
agccaaguugcucauccaa

SEQ ID NO: 2129403 - RNA, 19 nt, Artificial Sequence
  Description of Artificial Sequence: Synthetic oligonucleotide
  Antisense strand to SEQ ID NO: 2129402
uuggaugagcaacuuggcu

SEQ ID NO: 2129404 - RNA, 19 nt, Artificial Sequence
  Description of Artificial Sequence: Synthetic oligonucleotide
  Sense strand starting at position 2060 of SEQ ID NO: 1882544
ccaaguugcucauccaagu

SEQ ID NO: 2129405 - RNA, 19 nt, Artificial Sequence
  Description of Artificial Sequence: Synthetic oligonucleotide
  Antisense strand to SEQ ID NO: 2129404
acuuggaugagcaacuugg

SEQ ID NO: 2129406 - RNA, 19 nt, Artificial Sequence
  Description of Artificial Sequence: Synthetic oligonucleotide
  Sense strand starting at position 2166 of SEQ ID NO: 1882544
gccaaaggcuucuuuccau

SEQ ID NO: 2129407 - RNA, 19 nt, Artificial Sequence
  Description of Artificial Sequence: Synthetic oligonucleotide
  Antisense strand to SEQ ID NO: 2129406
auggaaagaagccuuuggc

SEQ ID NO: 2129408 - RNA, 19 nt, Artificial Sequence
  Description of Artificial Sequence: Synthetic oligonucleotide
  Sense strand starting at position 2192 of SEQ ID NO: 1882544
ucauguaaucaucaccgca

SEQ ID NO: 2129409 - RNA, 19 nt, Artificial Sequence
  Description of Artificial Sequence: Synthetic oligonucleotide
  Antisense strand to SEQ ID NO: 2129408
ugcggugaugauuacauga

SEQ ID NO: 2129410 - RNA, 19 nt, Artificial Sequence
  Description of Artificial Sequence: Synthetic oligonucleotide
  Sense strand starting at position 2194 of SEQ ID NO: 1882544
auguaaucaucaccgcaau

SEQ ID NO: 2129411 - RNA, 19 nt, Artificial Sequence
  Description of Artificial Sequence: Synthetic oligonucleotide
  Antisense strand to SEQ ID NO: 2129410
auugcggugaugauuacau

SEQ ID NO: 2129412 - RNA, 19 nt, Artificial Sequence
  Description of Artificial Sequence: Synthetic oligonucleotide
  Sense strand starting at position 2195 of SEQ ID NO: 1882544
uguaaucaucaccgcaauu

SEQ ID NO: 2129413 - RNA, 19 nt, Artificial Sequence
  Description of Artificial Sequence: Synthetic oligonucleotide
  Antisense strand to SEQ ID NO: 2129412
aauugcggugaugauuaca

SEQ ID NO: 2129414 - RNA, 19 nt, Artificial Sequence
  Description of Artificial Sequence: Synthetic oligonucleotide
  Sense strand starting at position 2224 of SEQ ID NO: 1882544
guauuaauccaauguggau

SEQ ID NO: 2129415 - RNA, 19 nt, Artificial Sequence
  Description of Artificial Sequence: Synthetic oligonucleotide
  Antisense strand to SEQ ID NO: 2129414
auccacauuggauuaauac

SEQ ID NO: 2129416 - RNA, 19 nt, Artificial Sequence
  Description of Artificial Sequence: Synthetic oligonucleotide
  Sense strand starting at position 2924 of SEQ ID NO: 1882544
auaugugucuugcugggau

SEQ ID NO: 2129417 - RNA, 19 nt, Artificial Sequence
  Description of Artificial Sequence: Synthetic oligonucleotide
  Antisense strand to SEQ ID NO: 2129416
aucccagcaagacacauau

SEQ ID NO: 2129418 - RNA, 19 nt, Artificial Sequence
  Description of Artificial Sequence: Synthetic oligonucleotide
  Sense strand starting at position 2946 of SEQ ID NO: 1882544
cccaauucggauuggcaaa

SEQ ID NO: 2129419 - RNA, 19 nt, Artificial Sequence
  Description of Artificial Sequence: Synthetic oligonucleotide
  Antisense strand to SEQ ID NO: 2129418
uuugccaauccgaauuggg

SEQ ID NO: 2129420 - RNA, 19 nt, Artificial Sequence
  Description of Artificial Sequence: Synthetic oligonucleotide
  Sense strand starting at position 3046 of SEQ ID NO: 1882544
cuugcugauuuagaaagca

SEQ ID NO: 2129421 - RNA, 19 nt, Artificial Sequence
  Description of Artificial Sequence: Synthetic oligonucleotide
  Antisense strand to SEQ ID NO: 2129420
ugcuuucuaaaucagcaag

SEQ ID NO: 2129422 - RNA, 19 nt, Artificial Sequence
  Description of Artificial Sequence: Synthetic oligonucleotide
  Sense strand starting at position 3058 of SEQ ID NO: 1882544
gaaagcacaucagagagau

SEQ ID NO: 2129423 - RNA, 19 nt, Artificial Sequence
  Description of Artificial Sequence: Synthetic oligonucleotide
  Antisense strand to SEQ ID NO: 2129422
aucucucugaugugcuuuc

SEQ ID NO: 2129424 - RNA, 19 nt, Artificial Sequence
  Description of Artificial Sequence: Synthetic oligonucleotide
  Sense strand starting at position 3071 of SEQ ID NO: 1882544
agagauugacccugagcuc

SEQ ID NO: 2129425 - RNA, 19 nt, Artificial Sequence
  Description of Artificial Sequence: Synthetic oligonucleotide
  Antisense strand to SEQ ID NO: 2129424
gagcucagggucaaucucu

SEQ ID NO: 2129426 - RNA, 19 nt, Artificial Sequence
  Description of Artificial Sequence: Synthetic oligonucleotide
  Sense strand starting at position 3336 of SEQ ID NO: 1882544
cggaucucccugugugaca

SEQ ID NO: 2129427 - RNA, 19 nt, Artificial Sequence
  Description of Artificial Sequence: Synthetic oligonucleotide
  Antisense strand to SEQ ID NO: 2129426
ugucacacagggagauccg

SEQ ID NO: 2129428 - RNA, 19 nt, Artificial Sequence
  Description of Artificial Sequence: Synthetic oligonucleotide
  Sense strand starting at position 3337 of SEQ ID NO: 1882544
ggaucucccugugugacaa

SEQ ID NO: 2129429 - RNA, 19 nt, Artificial Sequence
  Description of Artificial Sequence: Synthetic oligonucleotide
  Antisense strand to SEQ ID NO: 2129428
uugucacacagggagaucc

SEQ ID NO: 2129430 - RNA, 19 nt, Artificial Sequence
  Description of Artificial Sequence: Synthetic oligonucleotide
  Sense strand starting at position 3338 of SEQ ID NO: 1882544
gaucucccugugugacaaa

SEQ ID NO: 2129431 - RNA, 19 nt, Artificial Sequence
  Description of Artificial Sequence: Synthetic oligonucleotide
  Antisense strand to SEQ ID NO: 2129430
uuugucacacagggagauc

SEQ ID NO: 2129432 - RNA, 19 nt, Artificial Sequence
  Description of Artificial Sequence: Synthetic oligonucleotide
  Sense strand starting at position 3348 of SEQ ID NO: 1882544
ugugacaaaugcucacaca

SEQ ID NO: 2129433 - RNA, 19 nt, Artificial Sequence
  Description of Artificial Sequence: Synthetic oligonucleotide
  Antisense strand to SEQ ID NO: 2129432
ugugugagcauuugucaca

SEQ ID NO: 2129434 - RNA, 19 nt, Artificial Sequence
  Description of Artificial Sequence: Synthetic oligonucleotide
  Sense strand starting at position 3349 of SEQ ID NO: 1882544
gugacaaaugcucacacau

SEQ ID NO: 2129435 - RNA, 19 nt, Artificial Sequence
  Description of Artificial Sequence: Synthetic oligonucleotide
  Antisense strand to SEQ ID NO: 2129434
augugugagcauuugucac

SEQ ID NO: 2129436 - RNA, 19 nt, Artificial Sequence
  Description of Artificial Sequence: Synthetic oligonucleotide
  Sense strand starting at position 3374 of SEQ ID NO: 1882544
gcuucucuacuagaagcau

SEQ ID NO: 2129437 - RNA, 19 nt, Artificial Sequence
  Description of Artificial Sequence: Synthetic oligonucleotide
  Antisense strand to SEQ ID NO: 2129436
augcuucuaguagagaagc

SEQ ID NO: 2129438 - RNA, 19 nt, Artificial Sequence
  Description of Artificial Sequence: Synthetic oligonucleotide
  Sense strand starting at position 3389 of SEQ ID NO: 1882544
gcaugaggucuuugagacu

SEQ ID NO: 2129439 - RNA, 19 nt, Artificial Sequence
  Description of Artificial Sequence: Synthetic oligonucleotide
  Antisense strand to SEQ ID NO: 2129438
agucucaaagaccucaugc

SEQ ID NO: 2129440 - RNA, 19 nt, Artificial Sequence
  Description of Artificial Sequence: Synthetic oligonucleotide
  Sense strand starting at position 3408 of SEQ ID NO: 1882544
auacuagaucuguguacag

SEQ ID NO: 2129441 - RNA, 19 nt, Artificial Sequence
  Description of Artificial Sequence: Synthetic oligonucleotide
  Antisense strand to SEQ ID NO: 2129440
cuguacacagaucuaguau

SEQ ID NO: 2129442 - RNA, 19 nt, Artificial Sequence
  Description of Artificial Sequence: Synthetic oligonucleotide
  Sense strand starting at position 3410 of SEQ ID NO: 1882544
acuagaucuguguacagcu

SEQ ID NO: 2129443 - RNA, 19 nt, Artificial Sequence
  Description of Artificial Sequence: Synthetic oligonucleotide
  Antisense strand to SEQ ID NO: 2129442
agcuguacacagaucuagu

SEQ ID NO: 2129444 - RNA, 19 nt, Artificial Sequence
  Description of Artificial Sequence: Synthetic oligonucleotide
  Sense strand starting at position 3462 of SEQ ID NO: 1882544
gcucaauuggaaugugauc

SEQ ID NO: 2129445 - RNA, 19 nt, Artificial Sequence
  Description of Artificial Sequence: Synthetic oligonucleotide
  Antisense strand to SEQ ID NO: 2129444
gaucacauuccaauugagc

SEQ ID NO: 2129446 - RNA, 19 nt, Artificial Sequence
  Description of Artificial Sequence: Synthetic oligonucleotide
  Sense strand starting at position 3467 of SEQ ID NO: 1882544
auuggaaugugaucaauug

SEQ ID NO: 2129447 - RNA, 19 nt, Artificial Sequence
  Description of Artificial Sequence: Synthetic oligonucleotide
  Antisense strand to SEQ ID NO: 2129446
caauugaucacauuccaau

SEQ ID NO: 2129448 - RNA, 19 nt, Artificial Sequence
  Description of Artificial Sequence: Synthetic oligonucleotide
  Sense strand starting at position 3468 of SEQ ID NO: 1882544
uuggaaugugaucaauugu

SEQ ID NO: 2129449 - RNA, 19 nt, Artificial Sequence
  Description of Artificial Sequence: Synthetic oligonucleotide
  Antisense strand to SEQ ID NO: 2129448
acaauugaucacauuccaa

SEQ ID NO: 2129450 - RNA, 19 nt, Artificial Sequence
  Description of Artificial Sequence: Synthetic oligonucleotide
  Sense strand starting at position 3568 of SEQ ID NO: 1882544
cauugaugccuggauccau

SEQ ID NO: 2129451 - RNA, 19 nt, Artificial Sequence
  Description of Artificial Sequence: Synthetic oligonucleotide
  Antisense strand to SEQ ID NO: 2129450
auggauccaggcaucaaug

SEQ ID NO: 2129452 - RNA, 19 nt, Artificial Sequence
  Description of Artificial Sequence: Synthetic oligonucleotide
  Sense strand starting at position 3650 of SEQ ID NO: 1882544
ccaauuguauccuugucuu

SEQ ID NO: 2129453 - RNA, 19 nt, Artificial Sequence
  Description of Artificial Sequence: Synthetic oligonucleotide
  Antisense strand to SEQ ID NO: 2129452
aagacaaggauacaauugg

SEQ ID NO: 2129454 - RNA, 19 nt, Artificial Sequence
  Description of Artificial Sequence: Synthetic oligonucleotide
  Sense strand starting at position 3653 of SEQ ID NO: 1882544
auuguauccuugucuuaau

SEQ ID NO: 2129455 - RNA, 19 nt, Artificial Sequence
  Description of Artificial Sequence: Synthetic oligonucleotide
  Antisense strand to SEQ ID NO: 2129454
auuaagacaaggauacaau

SEQ ID NO: 2129456 - RNA, 19 nt, Artificial Sequence
  Description of Artificial Sequence: Synthetic oligonucleotide
  Sense strand starting at position 3654 of SEQ ID NO: 1882544
uuguauccuugucuuaauu

SEQ ID NO: 2129457 - RNA, 19 nt, Artificial Sequence
  Description of Artificial Sequence: Synthetic oligonucleotide
  Antisense strand to SEQ ID NO: 2129456
aauuaagacaaggauacaa

SEQ ID NO: 2129458 - RNA, 19 nt, Artificial Sequence
  Description of Artificial Sequence: Synthetic oligonucleotide
  Sense strand starting at position 3741 of SEQ ID NO: 1882544
cugugaagggcuuagcuua

SEQ ID NO: 2129459 - RNA, 19 nt, Artificial Sequence
  Description of Artificial Sequence: Synthetic oligonucleotide
  Antisense strand to SEQ ID NO: 2129458
uaagcuaagcccuucacag

SEQ ID NO: 2129460 - RNA, 19 nt, Artificial Sequence
  Description of Artificial Sequence: Synthetic oligonucleotide
  Sense strand starting at position 55 of SEQ ID NO: 1882545
auagguugugcuggucaua

SEQ ID NO: 2129461 - RNA, 19 nt, Artificial Sequence
  Description of Artificial Sequence: Synthetic oligonucleotide
  Antisense strand to SEQ ID NO: 2129460
uaugaccagcacaaccuau

SEQ ID NO: 2129462 - RNA, 19 nt, Artificial Sequence
  Description of Artificial Sequence: Synthetic oligonucleotide
  Sense strand starting at position 58 of SEQ ID NO: 1882545
gguugugcuggucauauga

SEQ ID NO: 2129463 - RNA, 19 nt, Artificial Sequence
  Description of Artificial Sequence: Synthetic oligonucleotide
  Antisense strand to SEQ ID NO: 2129462
ucauaugaccagcacaacc

SEQ ID NO: 2129464 - RNA, 19 nt, Artificial Sequence
  Description of Artificial Sequence: Synthetic oligonucleotide
  Sense strand starting at position 200 of SEQ ID NO: 1882545
aggcaugugugguuggaaa

SEQ ID NO: 2129465 - RNA, 19 nt, Artificial Sequence
  Description of Artificial Sequence: Synthetic oligonucleotide
  Antisense strand to SEQ ID NO: 2129464
uuuccaaccacacaugccu

SEQ ID NO: 2129466 - RNA, 19 nt, Artificial Sequence
  Description of Artificial Sequence: Synthetic oligonucleotide
  Sense strand starting at position 617 of SEQ ID NO: 1882545
cccugauugccuugaggua

SEQ ID NO: 2129467 - RNA, 19 nt, Artificial Sequence
  Description of Artificial Sequence: Synthetic oligonucleotide
  Antisense strand to SEQ ID NO: 2129466
uaccucaaggcaaucaggg

SEQ ID NO: 2129468 - RNA, 19 nt, Artificial Sequence
  Description of Artificial Sequence: Synthetic oligonucleotide
  Sense strand starting at position 1014 of SEQ ID NO: 1882545
cugcguagugacuauucua

SEQ ID NO: 2129469 - RNA, 19 nt, Artificial Sequence
  Description of Artificial Sequence: Synthetic oligonucleotide
  Antisense strand to SEQ ID NO: 2129468
uagaauagucacuacgcag

SEQ ID NO: 2129470 - RNA, 19 nt, Artificial Sequence
  Description of Artificial Sequence: Synthetic oligonucleotide
  Sense strand starting at position 1017 of SEQ ID NO: 1882545
cguagugacuauucuauau

SEQ ID NO: 2129471 - RNA, 19 nt, Artificial Sequence
  Description of Artificial Sequence: Synthetic oligonucleotide
  Antisense strand to SEQ ID NO: 2129470
auauagaauagucacuacg

SEQ ID NO: 2129472 - RNA, 19 nt, Artificial Sequence
  Description of Artificial Sequence: Synthetic oligonucleotide
  Sense strand starting at position 1119 of SEQ ID NO: 1882545
ggucauccugagggaaaug

SEQ ID NO: 2129473 - RNA, 19 nt, Artificial Sequence
  Description of Artificial Sequence: Synthetic oligonucleotide
  Antisense strand to SEQ ID NO: 2129472
cauuucccucaggaugacc

SEQ ID NO: 2129474 - RNA, 19 nt, Artificial Sequence
  Description of Artificial Sequence: Synthetic oligonucleotide
  Sense strand starting at position 1156 of SEQ ID NO: 1882545
gcauuaaguucuguagaaa

SEQ ID NO: 2129475 - RNA, 19 nt, Artificial Sequence
  Description of Artificial Sequence: Synthetic oligonucleotide
  Antisense strand to SEQ ID NO: 2129474
uuucuacagaacuuaaugc

SEQ ID NO: 2129476 - RNA, 19 nt, Artificial Sequence
  Description of Artificial Sequence: Synthetic oligonucleotide
  Sense strand starting at position 1349 of SEQ ID NO: 1882545
uggugaggaaguggugaau

SEQ ID NO: 2129477 - RNA, 19 nt, Artificial Sequence
  Description of Artificial Sequence: Synthetic oligonucleotide
  Antisense strand to SEQ ID NO: 2129476
auucaccacuuccucacca

SEQ ID NO: 2129478 - RNA, 19 nt, Artificial Sequence
  Description of Artificial Sequence: Synthetic oligonucleotide
  Sense strand starting at position 1399 of SEQ ID NO: 1882545
aggugagugucugcagcaa

SEQ ID NO: 2129479 - RNA, 19 nt, Artificial Sequence
  Description of Artificial Sequence: Synthetic oligonucleotide
  Antisense strand to SEQ ID NO: 2129478
uugcugcagacacucaccu

SEQ ID NO: 2129480 - RNA, 19 nt, Artificial Sequence
  Description of Artificial Sequence: Synthetic oligonucleotide
  Sense strand starting at position 1503 of SEQ ID NO: 1882545
gggaguuugugaucgcauc

SEQ ID NO: 2129481 - RNA, 19 nt, Artificial Sequence
  Description of Artificial Sequence: Synthetic oligonucleotide
  Antisense strand to SEQ ID NO: 2129480
gaugcgaucacaaacuccc

SEQ ID NO: 2129482 - RNA, 19 nt, Artificial Sequence
  Description of Artificial Sequence: Synthetic oligonucleotide
  Sense strand starting at position 2054 of SEQ ID NO: 1882545
cggauaugggcggaggaau

SEQ ID NO: 2129483 - RNA, 19 nt, Artificial Sequence
  Description of Artificial Sequence: Synthetic oligonucleotide
  Antisense strand to SEQ ID NO: 2129482
auuccuccgcccauauccg

SEQ ID NO: 2129484 - RNA, 19 nt, Artificial Sequence
  Description of Artificial Sequence: Synthetic oligonucleotide
  Sense strand starting at position 2325 of SEQ ID NO: 1882545
ccaugacugccucguuuaa

SEQ ID NO: 2129485 - RNA, 19 nt, Artificial Sequence
  Description of Artificial Sequence: Synthetic oligonucleotide
  Antisense strand to SEQ ID NO: 2129484
uuaaacgaggcagucaugg

SEQ ID NO: 2129486 - RNA, 19 nt, Artificial Sequence
  Description of Artificial Sequence: Synthetic oligonucleotide
  Sense strand starting at position 2327 of SEQ ID NO: 1882545
augacugccucguuuaauu

SEQ ID NO: 2129487 - RNA, 19 nt, Artificial Sequence
  Description of Artificial Sequence: Synthetic oligonucleotide
  Antisense strand to SEQ ID NO: 2129486
aauuaaacgaggcagucau

SEQ ID NO: 2129488 - RNA, 19 nt, Artificial Sequence
  Description of Artificial Sequence: Synthetic oligonucleotide
  Sense strand starting at position 2569 of SEQ ID NO: 1882545
ugaggaggucuuugaguau

SEQ ID NO: 2129489 - RNA, 19 nt, Artificial Sequence
  Description of Artificial Sequence: Synthetic oligonucleotide
  Antisense strand to SEQ ID NO: 2129488
auacucaaagaccuccuca

SEQ ID NO: 2129490 - RNA, 19 nt, Artificial Sequence
  Description of Artificial Sequence: Synthetic oligonucleotide
  Sense strand starting at position 2572 of SEQ ID NO: 1882545
ggaggucuuugaguauauu

SEQ ID NO: 2129491 - RNA, 19 nt, Artificial Sequence
  Description of Artificial Sequence: Synthetic oligonucleotide
  Antisense strand to SEQ ID NO: 2129490
aauauacucaaagaccucc

SEQ ID NO: 2129492 - RNA, 19 nt, Artificial Sequence
  Description of Artificial Sequence: Synthetic oligonucleotide
  Sense strand starting at position 2573 of SEQ ID NO: 1882545
gaggucuuugaguauauuc

SEQ ID NO: 2129493 - RNA, 19 nt, Artificial Sequence
  Description of Artificial Sequence: Synthetic oligonucleotide
  Antisense strand to SEQ ID NO: 2129492
gaauauacucaaagaccuc

SEQ ID NO: 2129494 - RNA, 19 nt, Artificial Sequence
  Description of Artificial Sequence: Synthetic oligonucleotide
  Sense strand starting at position 2575 of SEQ ID NO: 1882545
ggucuuugaguauauucua

SEQ ID NO: 2129495 - RNA, 19 nt, Artificial Sequence
  Description of Artificial Sequence: Synthetic oligonucleotide
  Antisense strand to SEQ ID NO: 2129494
uagaauauacucaaagacc

SEQ ID NO: 2129496 - RNA, 19 nt, Artificial Sequence
  Description of Artificial Sequence: Synthetic oligonucleotide
  Sense strand starting at position 2636 of SEQ ID NO: 1882545
agaggccuacugugaucaa

SEQ ID NO: 2129497 - RNA, 19 nt, Artificial Sequence
  Description of Artificial Sequence: Synthetic oligonucleotide
  Antisense strand to SEQ ID NO: 2129496
uugaucacaguaggccucu

SEQ ID NO: 2129498 - RNA, 19 nt, Artificial Sequence
  Description of Artificial Sequence: Synthetic oligonucleotide
  Sense strand starting at position 2639 of SEQ ID NO: 1882545
ggccuacugugaucaacca

SEQ ID NO: 2129499 - RNA, 19 nt, Artificial Sequence
  Description of Artificial Sequence: Synthetic oligonucleotide
  Antisense strand to SEQ ID NO: 2129498
ugguugaucacaguaggcc

SEQ ID NO: 2129500 - RNA, 19 nt, Artificial Sequence
  Description of Artificial Sequence: Synthetic oligonucleotide
  Sense strand starting at position 2640 of SEQ ID NO: 1882545
gccuacugugaucaaccau

SEQ ID NO: 2129501 - RNA, 19 nt, Artificial Sequence
  Description of Artificial Sequence: Synthetic oligonucleotide
  Antisense strand to SEQ ID NO: 2129500
augguugaucacaguaggc

SEQ ID NO: 2129502 - RNA, 19 nt, Artificial Sequence
  Description of Artificial Sequence: Synthetic oligonucleotide
  Sense strand starting at position 2647 of SEQ ID NO: 1882545
gugaucaaccaucauguga

SEQ ID NO: 2129503 - RNA, 19 nt, Artificial Sequence
  Description of Artificial Sequence: Synthetic oligonucleotide
  Antisense strand to SEQ ID NO: 2129502
ucacaugaugguugaucac

SEQ ID NO: 2129504 - RNA, 19 nt, Artificial Sequence
  Description of Artificial Sequence: Synthetic oligonucleotide
  Sense strand starting at position 2654 of SEQ ID NO: 1882545
accaucaugugaucaauug

SEQ ID NO: 2129505 - RNA, 19 nt, Artificial Sequence
  Description of Artificial Sequence: Synthetic oligonucleotide
  Antisense strand to SEQ ID NO: 2129504
caauugaucacaugauggu

SEQ ID NO: 2129506 - RNA, 19 nt, Artificial Sequence
  Description of Artificial Sequence: Synthetic oligonucleotide
  Sense strand starting at position 2655 of SEQ ID NO: 1882545
ccaucaugugaucaauugu

SEQ ID NO: 2129507 - RNA, 19 nt, Artificial Sequence
  Description of Artificial Sequence: Synthetic oligonucleotide
  Antisense strand to SEQ ID NO: 2129506
acaauugaucacaugaugg

SEQ ID NO: 2129508 - RNA, 19 nt, Artificial Sequence
  Description of Artificial Sequence: Synthetic oligonucleotide
  Sense strand starting at position 2662 of SEQ ID NO: 1882545
gugaucaauuguguuucca

SEQ ID NO: 2129509 - RNA, 19 nt, Artificial Sequence
  Description of Artificial Sequence: Synthetic oligonucleotide
  Antisense strand to SEQ ID NO: 2129508
uggaaacacaauugaucac

SEQ ID NO: 2129510 - RNA, 19 nt, Artificial Sequence
  Description of Artificial Sequence: Synthetic oligonucleotide
  Sense strand starting at position 2684 of SEQ ID NO: 1882545
agagcagaacccgauagua

SEQ ID NO: 2129511 - RNA, 19 nt, Artificial Sequence
  Description of Artificial Sequence: Synthetic oligonucleotide
  Antisense strand to SEQ ID NO: 2129510
uacuaucggguucugcucu

SEQ ID NO: 2129512 - RNA, 19 nt, Artificial Sequence
  Description of Artificial Sequence: Synthetic oligonucleotide
  Sense strand starting at position 2992 of SEQ ID NO: 1882545
cccguucuccauugaauga

SEQ ID NO: 2129513 - RNA, 19 nt, Artificial Sequence
  Description of Artificial Sequence: Synthetic oligonucleotide
  Antisense strand to SEQ ID NO: 2129512
ucauucaauggagaacggg

SEQ ID NO: 2129514 - RNA, 19 nt, Artificial Sequence
  Description of Artificial Sequence: Synthetic oligonucleotide
  Sense strand starting at position 3358 of SEQ ID NO: 1882545
cggguuaguccuggaagua

SEQ ID NO: 2129515 - RNA, 19 nt, Artificial Sequence
  Description of Artificial Sequence: Synthetic oligonucleotide
  Antisense strand to SEQ ID NO: 2129514
uacuuccaggacuaacccg

SEQ ID NO: 2129516 - RNA, 19 nt, Artificial Sequence
  Description of Artificial Sequence: Synthetic oligonucleotide
  Sense strand starting at position 3359 of SEQ ID NO: 1882545
ggguuaguccuggaaguag

SEQ ID NO: 2129517 - RNA, 19 nt, Artificial Sequence
  Description of Artificial Sequence: Synthetic oligonucleotide
  Antisense strand to SEQ ID NO: 2129516
cuacuuccaggacuaaccc

SEQ ID NO: 2129518 - RNA, 19 nt, Artificial Sequence
  Description of Artificial Sequence: Synthetic oligonucleotide
  Sense strand starting at position 3483 of SEQ ID NO: 1882545
gcaggauagccaggugaga

SEQ ID NO: 2129519 - RNA, 19 nt, Artificial Sequence
  Description of Artificial Sequence: Synthetic oligonucleotide
  Antisense strand to SEQ ID NO: 2129518
ucucaccuggcuauccugc

SEQ ID NO: 2129520 - RNA, 19 nt, Artificial Sequence
  Description of Artificial Sequence: Synthetic oligonucleotide
  Sense strand starting at position 3612 of SEQ ID NO: 1882545
gacuguaauggcugugauu

SEQ ID NO: 2129521 - RNA, 19 nt, Artificial Sequence
  Description of Artificial Sequence: Synthetic oligonucleotide
  Antisense strand to SEQ ID NO: 2129520
aaucacagccauuacaguc

SEQ ID NO: 2129522 - RNA, 19 nt, Artificial Sequence
  Description of Artificial Sequence: Synthetic oligonucleotide
  Sense strand starting at position 3614 of SEQ ID NO: 1882545
cuguaauggcugugauuua

SEQ ID NO: 2129523 - RNA, 19 nt, Artificial Sequence
  Description of Artificial Sequence: Synthetic oligonucleotide
  Antisense strand to SEQ ID NO: 2129522
uaaaucacagccauuacag

SEQ ID NO: 2129524 - RNA, 19 nt, Artificial Sequence
  Description of Artificial Sequence: Synthetic oligonucleotide
  Sense strand starting at position 3615 of SEQ ID NO: 1882545
uguaauggcugugauuuag

SEQ ID NO: 2129525 - RNA, 19 nt, Artificial Sequence
  Description of Artificial Sequence: Synthetic oligonucleotide
  Antisense strand to SEQ ID NO: 2129524
cuaaaucacagccauuaca

SEQ ID NO: 2129526 - RNA, 19 nt, Artificial Sequence
  Description of Artificial Sequence: Synthetic oligonucleotide
  Sense strand starting at position 3621 of SEQ ID NO: 1882545
ggcugugauuuagagauca

SEQ ID NO: 2129527 - RNA, 19 nt, Artificial Sequence
  Description of Artificial Sequence: Synthetic oligonucleotide
  Antisense strand to SEQ ID NO: 2129526
ugaucucuaaaucacagcc

SEQ ID NO: 2129528 - RNA, 19 nt, Artificial Sequence
  Description of Artificial Sequence: Synthetic oligonucleotide
  Sense strand starting at position 3675 of SEQ ID NO: 1882545
ugaauauuccugugcaagg

SEQ ID NO: 2129529 - RNA, 19 nt, Artificial Sequence
  Description of Artificial Sequence: Synthetic oligonucleotide
  Antisense strand to SEQ ID NO: 2129528
ccuugcacaggaauauuca

SEQ ID NO: 2129530 - RNA, 19 nt, Artificial Sequence
  Description of Artificial Sequence: Synthetic oligonucleotide
  Sense strand starting at position 3676 of SEQ ID NO: 1882545
gaauauuccugugcaaggu

SEQ ID NO: 2129531 - RNA, 19 nt, Artificial Sequence
  Description of Artificial Sequence: Synthetic oligonucleotide
  Antisense strand to SEQ ID NO: 2129530
accuugcacaggaauauuc

SEQ ID NO: 2129532 - RNA, 19 nt, Artificial Sequence
  Description of Artificial Sequence: Synthetic oligonucleotide
  Sense strand starting at position 3677 of SEQ ID NO: 1882545
aauauuccugugcaagguu

SEQ ID NO: 2129533 - RNA, 19 nt, Artificial Sequence
  Description of Artificial Sequence: Synthetic oligonucleotide
  Antisense strand to SEQ ID NO: 2129532
aaccuugcacaggaauauu

SEQ ID NO: 2129534 - RNA, 19 nt, Artificial Sequence
  Description of Artificial Sequence: Synthetic oligonucleotide
  Sense strand starting at position 3698 of SEQ ID NO: 1882545
ucagcuuucugggcaugga

SEQ ID NO: 2129535 - RNA, 19 nt, Artificial Sequence
  Description of Artificial Sequence: Synthetic oligonucleotide
  Antisense strand to SEQ ID NO: 2129534
uccaugcccagaaagcuga

SEQ ID NO: 2129536 - RNA, 19 nt, Artificial Sequence
  Description of Artificial Sequence: Synthetic oligonucleotide
  Sense strand starting at position 3699 of SEQ ID NO: 1882545
cagcuuucugggcauggau

SEQ ID NO: 2129537 - RNA, 19 nt, Artificial Sequence
  Description of Artificial Sequence: Synthetic oligonucleotide
  Antisense strand to SEQ ID NO: 2129536
auccaugcccagaaagcug

SEQ ID NO: 2129538 - RNA, 19 nt, Artificial Sequence
  Description of Artificial Sequence: Synthetic oligonucleotide
  Sense strand starting at position 3969 of SEQ ID NO: 1882545
ucaggacucaggcauguuu

SEQ ID NO: 2129539 - RNA, 19 nt, Artificial Sequence
  Description of Artificial Sequence: Synthetic oligonucleotide
  Antisense strand to SEQ ID NO: 2129538
aaacaugccugaguccuga

SEQ ID NO: 2129540 - RNA, 19 nt, Artificial Sequence
  Description of Artificial Sequence: Synthetic oligonucleotide
  Sense strand starting at position 87 of SEQ ID NO: 1882546
cguuauaaagccuaaucua

SEQ ID NO: 2129541 - RNA, 19 nt, Artificial Sequence
  Description of Artificial Sequence: Synthetic oligonucleotide
  Antisense strand to SEQ ID NO: 2129540
uagauuaggcuuuauaacg

SEQ ID NO: 2129542 - RNA, 19 nt, Artificial Sequence
  Description of Artificial Sequence: Synthetic oligonucleotide
  Sense strand starting at position 323 of SEQ ID NO: 1882546
guacaagagugugcaagau

SEQ ID NO: 2129543 - RNA, 19 nt, Artificial Sequence
  Description of Artificial Sequence: Synthetic oligonucleotide
  Antisense strand to SEQ ID NO: 2129542
aucuugcacacucuuguac

SEQ ID NO: 2129544 - RNA, 19 nt, Artificial Sequence
  Description of Artificial Sequence: Synthetic oligonucleotide
  Sense strand starting at position 384 of SEQ ID NO: 1882546
accuaaacuccuuggaguu

SEQ ID NO: 2129545 - RNA, 19 nt, Artificial Sequence
  Description of Artificial Sequence: Synthetic oligonucleotide
  Antisense strand to SEQ ID NO: 2129544
aacuccaaggaguuuaggu

SEQ ID NO: 2129546 - RNA, 19 nt, Artificial Sequence
  Description of Artificial Sequence: Synthetic oligonucleotide
  Sense strand starting at position 699 of SEQ ID NO: 1882546
ugacuucuauguguuauuu

SEQ ID NO: 2129547 - RNA, 19 nt, Artificial Sequence
  Description of Artificial Sequence: Synthetic oligonucleotide
  Antisense strand to SEQ ID NO: 2129546
aaauaacacauagaaguca

SEQ ID NO: 2129548 - RNA, 19 nt, Artificial Sequence
  Description of Artificial Sequence: Synthetic oligonucleotide
  Sense strand starting at position 839 of SEQ ID NO: 1882546
gcugacuuccugugacuag

SEQ ID NO: 2129549 - RNA, 19 nt, Artificial Sequence
  Description of Artificial Sequence: Synthetic oligonucleotide
  Antisense strand to SEQ ID NO: 2129548
cuagucacaggaagucagc

SEQ ID NO: 2129550 - RNA, 19 nt, Artificial Sequence
  Description of Artificial Sequence: Synthetic oligonucleotide
  Sense strand starting at position 842 of SEQ ID NO: 1882546
gacuuccugugacuaggaa

SEQ ID NO: 2129551 - RNA, 19 nt, Artificial Sequence
  Description of Artificial Sequence: Synthetic oligonucleotide
  Antisense strand to SEQ ID NO: 2129550
uuccuagucacaggaaguc

SEQ ID NO: 2129552 - RNA, 19 nt, Artificial Sequence
  Description of Artificial Sequence: Synthetic oligonucleotide
  Sense strand starting at position 865 of SEQ ID NO: 1882546
aaacuagcuccgcaaguua

SEQ ID NO: 2129553 - RNA, 19 nt, Artificial Sequence
  Description of Artificial Sequence: Synthetic oligonucleotide
  Antisense strand to SEQ ID NO: 2129552
uaacuugcggagcuaguuu

SEQ ID NO: 2129554 - RNA, 19 nt, Artificial Sequence
  Description of Artificial Sequence: Synthetic oligonucleotide
  Sense strand starting at position 951 of SEQ ID NO: 1882546
uuuccuacucggcaaacuu

SEQ ID NO: 2129555 - RNA, 19 nt, Artificial Sequence
  Description of Artificial Sequence: Synthetic oligonucleotide
  Antisense strand to SEQ ID NO: 2129554
aaguuugccgaguaggaaa

SEQ ID NO: 2129556 - RNA, 19 nt, Artificial Sequence
  Description of Artificial Sequence: Synthetic oligonucleotide
  Sense strand starting at position 967 of SEQ ID NO: 1882546
cuuguaagacuguaacugu

SEQ ID NO: 2129557 - RNA, 19 nt, Artificial Sequence
  Description of Artificial Sequence: Synthetic oligonucleotide
  Antisense strand to SEQ ID NO: 2129556
acaguuacagucuuacaag

SEQ ID NO: 2129558 - RNA, 19 nt, Artificial Sequence
  Description of Artificial Sequence: Synthetic oligonucleotide
  Sense strand starting at position 970 of SEQ ID NO: 1882546
guaagacuguaacuguuaa

SEQ ID NO: 2129559 - RNA, 19 nt, Artificial Sequence
  Description of Artificial Sequence: Synthetic oligonucleotide
  Antisense strand to SEQ ID NO: 2129558
uuaacaguuacagucuuac

SEQ ID NO: 2129560 - RNA, 19 nt, Artificial Sequence
  Description of Artificial Sequence: Synthetic oligonucleotide
  Sense strand starting at position 1058 of SEQ ID NO: 1882546
auucgaacccuuuaggauu

SEQ ID NO: 2129561 - RNA, 19 nt, Artificial Sequence
  Description of Artificial Sequence: Synthetic oligonucleotide
  Antisense strand to SEQ ID NO: 2129560
aauccuaaaggguucgaau

SEQ ID NO: 2129562 - RNA, 19 nt, Artificial Sequence
  Description of Artificial Sequence: Synthetic oligonucleotide
  Sense strand starting at position 1061 of SEQ ID NO: 1882546
cgaacccuuuaggauuuaa

SEQ ID NO: 2129563 - RNA, 19 nt, Artificial Sequence
  Description of Artificial Sequence: Synthetic oligonucleotide
  Antisense strand to SEQ ID NO: 2129562
uuaaauccuaaaggguucg

SEQ ID NO: 2129564 - RNA, 19 nt, Artificial Sequence
  Description of Artificial Sequence: Synthetic oligonucleotide
  Sense strand starting at position 1245 of SEQ ID NO: 1882546
auaaguaaccuugaagcca

SEQ ID NO: 2129565 - RNA, 19 nt, Artificial Sequence
  Description of Artificial Sequence: Synthetic oligonucleotide
  Antisense strand to SEQ ID NO: 2129564
uggcuucaagguuacuuau

SEQ ID NO: 2129566 - RNA, 19 nt, Artificial Sequence
  Description of Artificial Sequence: Synthetic oligonucleotide
  Sense strand starting at position 2430 of SEQ ID NO: 1882546
cagccaauuuccgugugaa

SEQ ID NO: 2129567 - RNA, 19 nt, Artificial Sequence
  Description of Artificial Sequence: Synthetic oligonucleotide
  Antisense strand to SEQ ID NO: 2129566
uucacacggaaauuggcug

SEQ ID NO: 2129568 - RNA, 19 nt, Artificial Sequence
  Description of Artificial Sequence: Synthetic oligonucleotide
  Sense strand starting at position 2431 of SEQ ID NO: 1882546
agccaauuuccgugugaag

SEQ ID NO: 2129569 - RNA, 19 nt, Artificial Sequence
  Description of Artificial Sequence: Synthetic oligonucleotide
  Antisense strand to SEQ ID NO: 2129568
cuucacacggaaauuggcu

SEQ ID NO: 2129570 - RNA, 19 nt, Artificial Sequence
  Description of Artificial Sequence: Synthetic oligonucleotide
  Sense strand starting at position 2462 of SEQ ID NO: 1882546
gauggaauuaagcgagucu

SEQ ID NO: 2129571 - RNA, 19 nt, Artificial Sequence
  Description of Artificial Sequence: Synthetic oligonucleotide
  Antisense strand to SEQ ID NO: 2129570
agacucgcuuaauuccauc

SEQ ID NO: 2129572 - RNA, 19 nt, Artificial Sequence
  Description of Artificial Sequence: Synthetic oligonucleotide
  Sense strand starting at position 2463 of SEQ ID NO: 1882546
auggaauuaagcgagucua

SEQ ID NO: 2129573 - RNA, 19 nt, Artificial Sequence
  Description of Artificial Sequence: Synthetic oligonucleotide
  Antisense strand to SEQ ID NO: 2129572
uagacucgcuuaauuccau

SEQ ID NO: 2129574 - RNA, 19 nt, Artificial Sequence
  Description of Artificial Sequence: Synthetic oligonucleotide
  Sense strand starting at position 2506 of SEQ ID NO: 1882546
aggccaagugacugguuaa

SEQ ID NO: 2129575 - RNA, 19 nt, Artificial Sequence
  Description of Artificial Sequence: Synthetic oligonucleotide
  Antisense strand to SEQ ID NO: 2129574
uuaaccagucacuuggccu

SEQ ID NO: 2129576 - RNA, 19 nt, Artificial Sequence
  Description of Artificial Sequence: Synthetic oligonucleotide
  Sense strand starting at position 2507 of SEQ ID NO: 1882546
ggccaagugacugguuaau

SEQ ID NO: 2129577 - RNA, 19 nt, Artificial Sequence
  Description of Artificial Sequence: Synthetic oligonucleotide
  Antisense strand to SEQ ID NO: 2129576
auuaaccagucacuuggcc

SEQ ID NO: 2129578 - RNA, 19 nt, Artificial Sequence
  Description of Artificial Sequence: Synthetic oligonucleotide
  Sense strand starting at position 2509 of SEQ ID NO: 1882546
ccaagugacugguuaauug

SEQ ID NO: 2129579 - RNA, 19 nt, Artificial Sequence
  Description of Artificial Sequence: Synthetic oligonucleotide
  Antisense strand to SEQ ID NO: 2129578
caauuaaccagucacuugg

SEQ ID NO: 2129580 - RNA, 19 nt, Artificial Sequence
  Description of Artificial Sequence: Synthetic oligonucleotide
  Sense strand starting at position 2516 of SEQ ID NO: 1882546
acugguuaauugcuugauu

SEQ ID NO: 2129581 - RNA, 19 nt, Artificial Sequence
  Description of Artificial Sequence: Synthetic oligonucleotide
  Antisense strand to SEQ ID NO: 2129580
aaucaagcaauuaaccagu

SEQ ID NO: 2129582 - RNA, 19 nt, Artificial Sequence
  Description of Artificial Sequence: Synthetic oligonucleotide
  Sense strand starting at position 2548 of SEQ ID NO: 1882546
ggacuuggccuguggcaaa

SEQ ID NO: 2129583 - RNA, 19 nt, Artificial Sequence
  Description of Artificial Sequence: Synthetic oligonucleotide
  Antisense strand to SEQ ID NO: 2129582
uuugccacaggccaagucc

SEQ ID NO: 2129584 - RNA, 19 nt, Artificial Sequence
  Description of Artificial Sequence: Synthetic oligonucleotide
  Sense strand starting at position 2682 of SEQ ID NO: 1882546
cuccuuaagagaggaaugu

SEQ ID NO: 2129585 - RNA, 19 nt, Artificial Sequence
  Description of Artificial Sequence: Synthetic oligonucleotide
  Antisense strand to SEQ ID NO: 2129584
acauuccucucuuaaggag

SEQ ID NO: 2129586 - RNA, 19 nt, Artificial Sequence
  Description of Artificial Sequence: Synthetic oligonucleotide
  Sense strand starting at position 2805 of SEQ ID NO: 1882546
cgcuguucuggcuaagaga

SEQ ID NO: 2129587 - RNA, 19 nt, Artificial Sequence
  Description of Artificial Sequence: Synthetic oligonucleotide
  Antisense strand to SEQ ID NO: 2129586
ucucuuagccagaacagcg

SEQ ID NO: 2129588 - RNA, 19 nt, Artificial Sequence
  Description of Artificial Sequence: Synthetic oligonucleotide
  Sense strand starting at position 2836 of SEQ ID NO: 1882546
agucaugugauuugggcau

SEQ ID NO: 2129589 - RNA, 19 nt, Artificial Sequence
  Description of Artificial Sequence: Synthetic oligonucleotide
  Antisense strand to SEQ ID NO: 2129588
augcccaaaucacaugacu

SEQ ID NO: 2129590 - RNA, 19 nt, Artificial Sequence
  Description of Artificial Sequence: Synthetic oligonucleotide
  Sense strand starting at position 2850 of SEQ ID NO: 1882546
ggcauagagcucuaaauua

SEQ ID NO: 2129591 - RNA, 19 nt, Artificial Sequence
  Description of Artificial Sequence: Synthetic oligonucleotide
  Antisense strand to SEQ ID NO: 2129590
uaauuuagagcucuaugcc

SEQ ID NO: 2129592 - RNA, 19 nt, Artificial Sequence
  Description of Artificial Sequence: Synthetic oligonucleotide
  Sense strand starting at position 2947 of SEQ ID NO: 1882546
cucugucacuacuugguau

SEQ ID NO: 2129593 - RNA, 19 nt, Artificial Sequence
  Description of Artificial Sequence: Synthetic oligonucleotide
  Antisense strand to SEQ ID NO: 2129592
auaccaaguagugacagag

SEQ ID NO: 2129594 - RNA, 19 nt, Artificial Sequence
  Description of Artificial Sequence: Synthetic oligonucleotide
  Sense strand starting at position 2966 of SEQ ID NO: 1882546
uuugucacucaaugguaau

SEQ ID NO: 2129595 - RNA, 19 nt, Artificial Sequence
  Description of Artificial Sequence: Synthetic oligonucleotide
  Antisense strand to SEQ ID NO: 2129594
auuaccauugagugacaaa

SEQ ID NO: 2129596 - RNA, 19 nt, Artificial Sequence
  Description of Artificial Sequence: Synthetic oligonucleotide
  Sense strand starting at position 3004 of SEQ ID NO: 1882546
ggcaguguuguggaaugau

SEQ ID NO: 2129597 - RNA, 19 nt, Artificial Sequence
  Description of Artificial Sequence: Synthetic oligonucleotide
  Antisense strand to SEQ ID NO: 2129596
aucauuccacaacacugcc

SEQ ID NO: 2129598 - RNA, 19 nt, Artificial Sequence
  Description of Artificial Sequence: Synthetic oligonucleotide
  Sense strand starting at position 3007 of SEQ ID NO: 1882546
aguguuguggaaugauaau

SEQ ID NO: 2129599 - RNA, 19 nt, Artificial Sequence
  Description of Artificial Sequence: Synthetic oligonucleotide
  Antisense strand to SEQ ID NO: 2129598
auuaucauuccacaacacu

SEQ ID NO: 2129600 - RNA, 19 nt, Artificial Sequence
  Description of Artificial Sequence: Synthetic oligonucleotide
  Sense strand starting at position 3037 of SEQ ID NO: 1882546
aaguuaugauaugagacaa

SEQ ID NO: 2129601 - RNA, 19 nt, Artificial Sequence
  Description of Artificial Sequence: Synthetic oligonucleotide
  Antisense strand to SEQ ID NO: 2129600
uugucucauaucauaacuu

SEQ ID NO: 2129602 - RNA, 19 nt, Artificial Sequence
  Description of Artificial Sequence: Synthetic oligonucleotide
  Sense strand starting at position 3077 of SEQ ID NO: 1882546
cuguuucucugauuugagu

SEQ ID NO: 2129603 - RNA, 19 nt, Artificial Sequence
  Description of Artificial Sequence: Synthetic oligonucleotide
  Antisense strand to SEQ ID NO: 2129602
acucaaaucagagaaacag

SEQ ID NO: 2129604 - RNA, 19 nt, Artificial Sequence
  Description of Artificial Sequence: Synthetic oligonucleotide
  Sense strand starting at position 3131 of SEQ ID NO: 1882546
aguguuaugcaucgaggaa

SEQ ID NO: 2129605 - RNA, 19 nt, Artificial Sequence
  Description of Artificial Sequence: Synthetic oligonucleotide
  Antisense strand to SEQ ID NO: 2129604
uuccucgaugcauaacacu

SEQ ID NO: 2129606 - RNA, 19 nt, Artificial Sequence
  Description of Artificial Sequence: Synthetic oligonucleotide
  Sense strand starting at position 3132 of SEQ ID NO: 1882546
guguuaugcaucgaggaaa

SEQ ID NO: 2129607 - RNA, 19 nt, Artificial Sequence
  Description of Artificial Sequence: Synthetic oligonucleotide
  Antisense strand to SEQ ID NO: 2129606
uuuccucgaugcauaacac

SEQ ID NO: 2129608 - RNA, 19 nt, Artificial Sequence
  Description of Artificial Sequence: Synthetic oligonucleotide
  Sense strand starting at position 3237 of SEQ ID NO: 1882546
gauuguaaacuauaguugu

SEQ ID NO: 2129609 - RNA, 19 nt, Artificial Sequence
  Description of Artificial Sequence: Synthetic oligonucleotide
  Antisense strand to SEQ ID NO: 2129608
acaacuauaguuuacaauc

SEQ ID NO: 2129610 - RNA, 19 nt, Artificial Sequence
  Description of Artificial Sequence: Synthetic oligonucleotide
  Sense strand starting at position 3269 of SEQ ID NO: 1882546
ucagcuacugcauaggaaa

SEQ ID NO: 2129611 - RNA, 19 nt, Artificial Sequence
  Description of Artificial Sequence: Synthetic oligonucleotide
  Antisense strand to SEQ ID NO: 2129610
uuuccuaugcaguagcuga

SEQ ID NO: 2129612 - RNA, 19 nt, Artificial Sequence
  Description of Artificial Sequence: Synthetic oligonucleotide
  Sense strand starting at position 3344 of SEQ ID NO: 1882546
ugagauuuggguugcuucu

SEQ ID NO: 2129613 - RNA, 19 nt, Artificial Sequence
  Description of Artificial Sequence: Synthetic oligonucleotide
  Antisense strand to SEQ ID NO: 2129612
agaagcaacccaaaucuca

SEQ ID NO: 2129614 - RNA, 19 nt, Artificial Sequence
  Description of Artificial Sequence: Synthetic oligonucleotide
  Sense strand starting at position 3414 of SEQ ID NO: 1882546
aguuauuguuaggcuaaau

SEQ ID NO: 2129615 - RNA, 19 nt, Artificial Sequence
  Description of Artificial Sequence: Synthetic oligonucleotide
  Antisense strand to SEQ ID NO: 2129614
auuuagccuaacaauaacu

SEQ ID NO: 2129616 - RNA, 19 nt, Artificial Sequence
  Description of Artificial Sequence: Synthetic oligonucleotide
  Sense strand starting at position 3579 of SEQ ID NO: 1882546
cuaguuaaaucauugugga

SEQ ID NO: 2129617 - RNA, 19 nt, Artificial Sequence
  Description of Artificial Sequence: Synthetic oligonucleotide
  Antisense strand to SEQ ID NO: 2129616
uccacaaugauuuaacuag

SEQ ID NO: 2129618 - RNA, 19 nt, Artificial Sequence
  Description of Artificial Sequence: Synthetic oligonucleotide
  Sense strand starting at position 3740 of SEQ ID NO: 1882546
ugcagcacuauuugcgaua

SEQ ID NO: 2129619 - RNA, 19 nt, Artificial Sequence
  Description of Artificial Sequence: Synthetic oligonucleotide
  Antisense strand to SEQ ID NO: 2129618
uaucgcaaauagugcugca

SEQ ID NO: 2129620 - RNA, 19 nt, Artificial Sequence
  Description of Artificial Sequence: Synthetic oligonucleotide
  Sense strand starting at position 277 of SEQ ID NO: 1882547
acaaguguucucugaauac

SEQ ID NO: 2129621 - RNA, 19 nt, Artificial Sequence
  Description of Artificial Sequence: Synthetic oligonucleotide
  Antisense strand to SEQ ID NO: 2129620
guauucagagaacacuugu

SEQ ID NO: 2129622 - RNA, 19 nt, Artificial Sequence
  Description of Artificial Sequence: Synthetic oligonucleotide
  Sense strand starting at position 301 of SEQ ID NO: 1882547
cuauacuaaccaggaugua

SEQ ID NO: 2129623 - RNA, 19 nt, Artificial Sequence
  Description of Artificial Sequence: Synthetic oligonucleotide
  Antisense strand to SEQ ID NO: 2129622
uacauccugguuaguauag

SEQ ID NO: 2129624 - RNA, 19 nt, Artificial Sequence
  Description of Artificial Sequence: Synthetic oligonucleotide
  Sense strand starting at position 347 of SEQ ID NO: 1882547
ccucgaucucguggaauuu

SEQ ID NO: 2129625 - RNA, 19 nt, Artificial Sequence
  Description of Artificial Sequence: Synthetic oligonucleotide
  Antisense strand to SEQ ID NO: 2129624
aaauuccacgagaucgagg

SEQ ID NO: 2129626 - RNA, 19 nt, Artificial Sequence
  Description of Artificial Sequence: Synthetic oligonucleotide
  Sense strand starting at position 543 of SEQ ID NO: 1882547
cuuugaucugauuagcaau

SEQ ID NO: 2129627 - RNA, 19 nt, Artificial Sequence
  Description of Artificial Sequence: Synthetic oligonucleotide
  Antisense strand to SEQ ID NO: 2129626
auugcuaaucagaucaaag

SEQ ID NO: 2129628 - RNA, 19 nt, Artificial Sequence
  Description of Artificial Sequence: Synthetic oligonucleotide
  Sense strand starting at position 646 of SEQ ID NO: 1882547
acaagagguuucuuucucu

SEQ ID NO: 2129629 - RNA, 19 nt, Artificial Sequence
  Description of Artificial Sequence: Synthetic oligonucleotide
  Antisense strand to SEQ ID NO: 2129628
agagaaagaaaccucuugu

SEQ ID NO: 2129630 - RNA, 19 nt, Artificial Sequence
  Description of Artificial Sequence: Synthetic oligonucleotide
  Sense strand starting at position 689 of SEQ ID NO: 1882547
ccucacuuuggccagagaa

SEQ ID NO: 2129631 - RNA, 19 nt, Artificial Sequence
  Description of Artificial Sequence: Synthetic oligonucleotide
  Antisense strand to SEQ ID NO: 2129630
uucucuggccaaagugagg

SEQ ID NO: 2129632 - RNA, 19 nt, Artificial Sequence
  Description of Artificial Sequence: Synthetic oligonucleotide
  Sense strand starting at position 730 of SEQ ID NO: 1882547
ucauguuagcggcugcaau

SEQ ID NO: 2129633 - RNA, 19 nt, Artificial Sequence
  Description of Artificial Sequence: Synthetic oligonucleotide
  Antisense strand to SEQ ID NO: 2129632
auugcagccgcuaacauga

SEQ ID NO: 2129634 - RNA, 19 nt, Artificial Sequence
  Description of Artificial Sequence: Synthetic oligonucleotide
  Sense strand starting at position 761 of SEQ ID NO: 1882547
aggcuugucaagcaaggua

SEQ ID NO: 2129635 - RNA, 19 nt, Artificial Sequence
  Description of Artificial Sequence: Synthetic oligonucleotide
  Antisense strand to SEQ ID NO: 2129634
uaccuugcuugacaagccu

SEQ ID NO: 2129636 - RNA, 19 nt, Artificial Sequence
  Description of Artificial Sequence: Synthetic oligonucleotide
  Sense strand starting at position 814 of SEQ ID NO: 1882547
acaucuauagccugagaaa

SEQ ID NO: 2129637 - RNA, 19 nt, Artificial Sequence
  Description of Artificial Sequence: Synthetic oligonucleotide
  Antisense strand to SEQ ID NO: 2129636
uuucucaggcuauagaugu

SEQ ID NO: 2129638 - RNA, 19 nt, Artificial Sequence
  Description of Artificial Sequence: Synthetic oligonucleotide
  Sense strand starting at position 834 of SEQ ID NO: 1882547
agcagaagcugccucuaaa

SEQ ID NO: 2129639 - RNA, 19 nt, Artificial Sequence
  Description of Artificial Sequence: Synthetic oligonucleotide
  Antisense strand to SEQ ID NO: 2129638
uuuagaggcagcuucugcu

SEQ ID NO: 2129640 - RNA, 19 nt, Artificial Sequence
  Description of Artificial Sequence: Synthetic oligonucleotide
  Sense strand starting at position 887 of SEQ ID NO: 1882547
cuuugaaauccaugugaau

SEQ ID NO: 2129641 - RNA, 19 nt, Artificial Sequence
  Description of Artificial Sequence: Synthetic oligonucleotide
  Antisense strand to SEQ ID NO: 2129640
auucacauggauuucaaag

SEQ ID NO: 2129642 - RNA, 19 nt, Artificial Sequence
  Description of Artificial Sequence: Synthetic oligonucleotide
  Sense strand starting at position 920 of SEQ ID NO: 1882547
auaauauagcccugauagu

SEQ ID NO: 2129643 - RNA, 19 nt, Artificial Sequence
  Description of Artificial Sequence: Synthetic oligonucleotide
  Antisense strand to SEQ ID NO: 2129642
acuaucagggcuauauuau

SEQ ID NO: 2129644 - RNA, 19 nt, Artificial Sequence
  Description of Artificial Sequence: Synthetic oligonucleotide
  Sense strand starting at position 1034 of SEQ ID NO: 1882547
acuugagaccgugacuaua

SEQ ID NO: 2129645 - RNA, 19 nt, Artificial Sequence
  Description of Artificial Sequence: Synthetic oligonucleotide
  Antisense strand to SEQ ID NO: 2129644
uauagucacggucucaagu

SEQ ID NO: 2129646 - RNA, 19 nt, Artificial Sequence
  Description of Artificial Sequence: Synthetic oligonucleotide
  Sense strand starting at position 1185 of SEQ ID NO: 1882547
aaaguuagggucuacugua

SEQ ID NO: 2129647 - RNA, 19 nt, Artificial Sequence
  Description of Artificial Sequence: Synthetic oligonucleotide
  Antisense strand to SEQ ID NO: 2129646
uacaguagacccuaacuuu

SEQ ID NO: 2129648 - RNA, 19 nt, Artificial Sequence
  Description of Artificial Sequence: Synthetic oligonucleotide
  Sense strand starting at position 1190 of SEQ ID NO: 1882547
uagggucuacuguauaaau

SEQ ID NO: 2129649 - RNA, 19 nt, Artificial Sequence
  Description of Artificial Sequence: Synthetic oligonucleotide
  Antisense strand to SEQ ID NO: 2129648
auuuauacaguagacccua

SEQ ID NO: 2129650 - RNA, 19 nt, Artificial Sequence
  Description of Artificial Sequence: Synthetic oligonucleotide
  Sense strand starting at position 1192 of SEQ ID NO: 1882547
gggucuacuguauaaauua

SEQ ID NO: 2129651 - RNA, 19 nt, Artificial Sequence
  Description of Artificial Sequence: Synthetic oligonucleotide
  Antisense strand to SEQ ID NO: 2129650
uaauuuauacaguagaccc

SEQ ID NO: 2129652 - RNA, 19 nt, Artificial Sequence
  Description of Artificial Sequence: Synthetic oligonucleotide
  Sense strand starting at position 1208 of SEQ ID NO: 1882547
uuaaauaagcguugacagu

SEQ ID NO: 2129653 - RNA, 19 nt, Artificial Sequence
  Description of Artificial Sequence: Synthetic oligonucleotide
  Antisense strand to SEQ ID NO: 2129652
acugucaacgcuuauuuaa

SEQ ID NO: 2129654 - RNA, 19 nt, Artificial Sequence
  Description of Artificial Sequence: Synthetic oligonucleotide
  Sense strand starting at position 1284 of SEQ ID NO: 1882547
uccugacggacuugacauu

SEQ ID NO: 2129655 - RNA, 19 nt, Artificial Sequence
  Description of Artificial Sequence: Synthetic oligonucleotide
  Antisense strand to SEQ ID NO: 2129654
aaugucaaguccgucagga

SEQ ID NO: 2129656 - RNA, 19 nt, Artificial Sequence
  Description of Artificial Sequence: Synthetic oligonucleotide
  Sense strand starting at position 1319 of SEQ ID NO: 1882547
ugcguacuugcugauuaaa

SEQ ID NO: 2129657 - RNA, 19 nt, Artificial Sequence
  Description of Artificial Sequence: Synthetic oligonucleotide
  Antisense strand to SEQ ID NO: 2129656
uuuaaucagcaaguacgca

SEQ ID NO: 2129658 - RNA, 19 nt, Artificial Sequence
  Description of Artificial Sequence: Synthetic oligonucleotide
  Sense strand starting at position 1646 of SEQ ID NO: 1882547
ucuaacuuagauggguaau

SEQ ID NO: 2129659 - RNA, 19 nt, Artificial Sequence
  Description of Artificial Sequence: Synthetic oligonucleotide
  Antisense strand to SEQ ID NO: 2129658
auuacccaucuaaguuaga

SEQ ID NO: 2129660 - RNA, 19 nt, Artificial Sequence
  Description of Artificial Sequence: Synthetic oligonucleotide
  Sense strand starting at position 1647 of SEQ ID NO: 1882547
cuaacuuagauggguaaug

SEQ ID NO: 2129661 - RNA, 19 nt, Artificial Sequence
  Description of Artificial Sequence: Synthetic oligonucleotide
  Antisense strand to SEQ ID NO: 2129660
cauuacccaucuaaguuag

SEQ ID NO: 2129662 - RNA, 19 nt, Artificial Sequence
  Description of Artificial Sequence: Synthetic oligonucleotide
  Sense strand starting at position 2150 of SEQ ID NO: 1882547
aaugcuaaaguuugagaua

SEQ ID NO: 2129663 - RNA, 19 nt, Artificial Sequence
  Description of Artificial Sequence: Synthetic oligonucleotide
  Antisense strand to SEQ ID NO: 2129662
uaucucaaacuuuagcauu

SEQ ID NO: 2129664 - RNA, 19 nt, Artificial Sequence
  Description of Artificial Sequence: Synthetic oligonucleotide
  Sense strand starting at position 2159 of SEQ ID NO: 1882547
guuugagauaaacggacuu

SEQ ID NO: 2129665 - RNA, 19 nt, Artificial Sequence
  Description of Artificial Sequence: Synthetic oligonucleotide
  Antisense strand to SEQ ID NO: 2129664
aaguccguuuaucucaaac

SEQ ID NO: 2129666 - RNA, 19 nt, Artificial Sequence
  Description of Artificial Sequence: Synthetic oligonucleotide
  Sense strand starting at position 2201 of SEQ ID NO: 1882547
uccagaaugccuugcagau

SEQ ID NO: 2129667 - RNA, 19 nt, Artificial Sequence
  Description of Artificial Sequence: Synthetic oligonucleotide
  Antisense strand to SEQ ID NO: 2129666
aucugcaaggcauucugga

SEQ ID NO: 2129668 - RNA, 19 nt, Artificial Sequence
  Description of Artificial Sequence: Synthetic oligonucleotide
  Sense strand starting at position 2434 of SEQ ID NO: 1882547
cccuuuacucucugagucu

SEQ ID NO: 2129669 - RNA, 19 nt, Artificial Sequence
  Description of Artificial Sequence: Synthetic oligonucleotide
  Antisense strand to SEQ ID NO: 2129668
agacucagagaguaaaggg

SEQ ID NO: 2129670 - RNA, 19 nt, Artificial Sequence
  Description of Artificial Sequence: Synthetic oligonucleotide
  Sense strand starting at position 2624 of SEQ ID NO: 1882547
gucugaaugcauuggugga

SEQ ID NO: 2129671 - RNA, 19 nt, Artificial Sequence
  Description of Artificial Sequence: Synthetic oligonucleotide
  Antisense strand to SEQ ID NO: 2129670
uccaccaaugcauucagac

SEQ ID NO: 2129672 - RNA, 19 nt, Artificial Sequence
  Description of Artificial Sequence: Synthetic oligonucleotide
  Sense strand starting at position 2625 of SEQ ID NO: 1882547
ucugaaugcauugguggaa

SEQ ID NO: 2129673 - RNA, 19 nt, Artificial Sequence
  Description of Artificial Sequence: Synthetic oligonucleotide
  Antisense strand to SEQ ID NO: 2129672
uuccaccaaugcauucaga

SEQ ID NO: 2129674 - RNA, 19 nt, Artificial Sequence
  Description of Artificial Sequence: Synthetic oligonucleotide
  Sense strand starting at position 2894 of SEQ ID NO: 1882547
uccaguugccgugauaaua

SEQ ID NO: 2129675 - RNA, 19 nt, Artificial Sequence
  Description of Artificial Sequence: Synthetic oligonucleotide
  Antisense strand to SEQ ID NO: 2129674
uauuaucacggcaacugga

SEQ ID NO: 2129676 - RNA, 19 nt, Artificial Sequence
  Description of Artificial Sequence: Synthetic oligonucleotide
  Sense strand starting at position 3034 of SEQ ID NO: 1882547
ugagauucucgaggucaaa

SEQ ID NO: 2129677 - RNA, 19 nt, Artificial Sequence
  Description of Artificial Sequence: Synthetic oligonucleotide
  Antisense strand to SEQ ID NO: 2129676
uuugaccucgagaaucuca

SEQ ID NO: 2129678 - RNA, 19 nt, Artificial Sequence
  Description of Artificial Sequence: Synthetic oligonucleotide
  Sense strand starting at position 3072 of SEQ ID NO: 1882547
ugugaaaucccguacugcu

SEQ ID NO: 2129679 - RNA, 19 nt, Artificial Sequence
  Description of Artificial Sequence: Synthetic oligonucleotide
  Antisense strand to SEQ ID NO: 2129678
agcaguacgggauuucaca

SEQ ID NO: 2129680 - RNA, 19 nt, Artificial Sequence
  Description of Artificial Sequence: Synthetic oligonucleotide
  Sense strand starting at position 3398 of SEQ ID NO: 1882547
ccacuaucccaacggaaga

SEQ ID NO: 2129681 - RNA, 19 nt, Artificial Sequence
  Description of Artificial Sequence: Synthetic oligonucleotide
  Antisense strand to SEQ ID NO: 2129680
ucuuccguugggauagugg

SEQ ID NO: 2129682 - RNA, 19 nt, Artificial Sequence
  Description of Artificial Sequence: Synthetic oligonucleotide
  Sense strand starting at position 3420 of SEQ ID NO: 1882547
cggauggaguccgugagau

SEQ ID NO: 2129683 - RNA, 19 nt, Artificial Sequence
  Description of Artificial Sequence: Synthetic oligonucleotide
  Antisense strand to SEQ ID NO: 2129682
aucucacggacuccauccg

SEQ ID NO: 2129684 - RNA, 19 nt, Artificial Sequence
  Description of Artificial Sequence: Synthetic oligonucleotide
  Sense strand starting at position 3421 of SEQ ID NO: 1882547
ggauggaguccgugagaug

SEQ ID NO: 2129685 - RNA, 19 nt, Artificial Sequence
  Description of Artificial Sequence: Synthetic oligonucleotide
  Antisense strand to SEQ ID NO: 2129684
caucucacggacuccaucc

SEQ ID NO: 2129686 - RNA, 19 nt, Artificial Sequence
  Description of Artificial Sequence: Synthetic oligonucleotide
  Sense strand starting at position 3552 of SEQ ID NO: 1882547
cuaguucucguccaccaaa

SEQ ID NO: 2129687 - RNA, 19 nt, Artificial Sequence
  Description of Artificial Sequence: Synthetic oligonucleotide
  Antisense strand to SEQ ID NO: 2129686
uuugguggacgagaacuag

SEQ ID NO: 2129688 - RNA, 19 nt, Artificial Sequence
  Description of Artificial Sequence: Synthetic oligonucleotide
  Sense strand starting at position 3624 of SEQ ID NO: 1882547
auaauuagaacguaguuga

SEQ ID NO: 2129689 - RNA, 19 nt, Artificial Sequence
  Description of Artificial Sequence: Synthetic oligonucleotide
  Antisense strand to SEQ ID NO: 2129688
ucaacuacguucuaauuau

SEQ ID NO: 2129690 - RNA, 19 nt, Artificial Sequence
  Description of Artificial Sequence: Synthetic oligonucleotide
  Sense strand starting at position 3671 of SEQ ID NO: 1882547
cuuaauuauuggcuucuga

SEQ ID NO: 2129691 - RNA, 19 nt, Artificial Sequence
  Description of Artificial Sequence: Synthetic oligonucleotide
  Antisense strand to SEQ ID NO: 2129690
ucagaagccaauaauuaag

SEQ ID NO: 2129692 - RNA, 19 nt, Artificial Sequence
  Description of Artificial Sequence: Synthetic oligonucleotide
  Sense strand starting at position 3771 of SEQ ID NO: 1882547
augcauucucaggguaaau

SEQ ID NO: 2129693 - RNA, 19 nt, Artificial Sequence
  Description of Artificial Sequence: Synthetic oligonucleotide
  Antisense strand to SEQ ID NO: 2129692
auuuacccugagaaugcau

SEQ ID NO: 2129694 - RNA, 19 nt, Artificial Sequence
  Description of Artificial Sequence: Synthetic oligonucleotide
  Sense strand starting at position 3824 of SEQ ID NO: 1882547
cuugguaucuugcuuacau

SEQ ID NO: 2129695 - RNA, 19 nt, Artificial Sequence
  Description of Artificial Sequence: Synthetic oligonucleotide
  Antisense strand to SEQ ID NO: 2129694
auguaagcaagauaccaag

SEQ ID NO: 2129696 - RNA, 19 nt, Artificial Sequence
  Description of Artificial Sequence: Synthetic oligonucleotide
  Sense strand starting at position 3825 of SEQ ID NO: 1882547
uugguaucuugcuuacaua

SEQ ID NO: 2129697 - RNA, 19 nt, Artificial Sequence
  Description of Artificial Sequence: Synthetic oligonucleotide
  Antisense strand to SEQ ID NO: 2129696
uauguaagcaagauaccaa

SEQ ID NO: 2129698 - RNA, 19 nt, Artificial Sequence
  Description of Artificial Sequence: Synthetic oligonucleotide
  Sense strand starting at position 3882 of SEQ ID NO: 1882547
agcuucuuaguauggaaau

SEQ ID NO: 2129699 - RNA, 19 nt, Artificial Sequence
  Description of Artificial Sequence: Synthetic oligonucleotide
  Antisense strand to SEQ ID NO: 2129698
auuuccauacuaagaagcu

SEQ ID NO: 2129700 - RNA, 19 nt, Artificial Sequence
  Description of Artificial Sequence: Synthetic oligonucleotide
  Sense strand starting at position 89 of SEQ ID NO: 1882548
ccagucugcccacaugaua

SEQ ID NO: 2129701 - RNA, 19 nt, Artificial Sequence
  Description of Artificial Sequence: Synthetic oligonucleotide
  Antisense strand to SEQ ID NO: 2129700
uaucaugugggcagacugg

SEQ ID NO: 2129702 - RNA, 19 nt, Artificial Sequence
  Description of Artificial Sequence: Synthetic oligonucleotide
  Sense strand starting at position 109 of SEQ ID NO: 1882548
acuggcucauuugagacau

SEQ ID NO: 2129703 - RNA, 19 nt, Artificial Sequence
  Description of Artificial Sequence: Synthetic oligonucleotide
  Antisense strand to SEQ ID NO: 2129702
augucucaaaugagccagu

SEQ ID NO: 2129704 - RNA, 19 nt, Artificial Sequence
  Description of Artificial Sequence: Synthetic oligonucleotide
  Sense strand starting at position 111 of SEQ ID NO: 1882548
uggcucauuugagacauaa

SEQ ID NO: 2129705 - RNA, 19 nt, Artificial Sequence
  Description of Artificial Sequence: Synthetic oligonucleotide
  Antisense strand to SEQ ID NO: 2129704
uuaugucucaaaugagcca

SEQ ID NO: 2129706 - RNA, 19 nt, Artificial Sequence
  Description of Artificial Sequence: Synthetic oligonucleotide
  Sense strand starting at position 438 of SEQ ID NO: 1882548
uguccuaagucuuccaaau

SEQ ID NO: 2129707 - RNA, 19 nt, Artificial Sequence
  Description of Artificial Sequence: Synthetic oligonucleotide
  Antisense strand to SEQ ID NO: 2129706
auuuggaagacuuaggaca

SEQ ID NO: 2129708 - RNA, 19 nt, Artificial Sequence
  Description of Artificial Sequence: Synthetic oligonucleotide
  Sense strand starting at position 668 of SEQ ID NO: 1882548
agaaauaagugcucacuaa

SEQ ID NO: 2129709 - RNA, 19 nt, Artificial Sequence
  Description of Artificial Sequence: Synthetic oligonucleotide
  Antisense strand to SEQ ID NO: 2129708
uuagugagcacuuauuucu

SEQ ID NO: 2129710 - RNA, 19 nt, Artificial Sequence
  Description of Artificial Sequence: Synthetic oligonucleotide
  Sense strand starting at position 741 of SEQ ID NO: 1882548
agauucuaguugccaggau

SEQ ID NO: 2129711 - RNA, 19 nt, Artificial Sequence
  Description of Artificial Sequence: Synthetic oligonucleotide
  Antisense strand to SEQ ID NO: 2129710
auccuggcaacuagaaucu

SEQ ID NO: 2129712 - RNA, 19 nt, Artificial Sequence
  Description of Artificial Sequence: Synthetic oligonucleotide
  Sense strand starting at position 771 of SEQ ID NO: 1882548
cuuacaguccuguagguuu

SEQ ID NO: 2129713 - RNA, 19 nt, Artificial Sequence
  Description of Artificial Sequence: Synthetic oligonucleotide
  Antisense strand to SEQ ID NO: 2129712
aaaccuacaggacuguaag

SEQ ID NO: 2129714 - RNA, 19 nt, Artificial Sequence
  Description of Artificial Sequence: Synthetic oligonucleotide
  Sense strand starting at position 2202 of SEQ ID NO: 1882548
cuuugcuauccugaggaag

SEQ ID NO: 2129715 - RNA, 19 nt, Artificial Sequence
  Description of Artificial Sequence: Synthetic oligonucleotide
  Antisense strand to SEQ ID NO: 2129714
cuuccucaggauagcaaag

SEQ ID NO: 2129716 - RNA, 19 nt, Artificial Sequence
  Description of Artificial Sequence: Synthetic oligonucleotide
  Sense strand starting at position 2237 of SEQ ID NO: 1882548
ugaguuucggcuuaaagau

SEQ ID NO: 2129717 - RNA, 19 nt, Artificial Sequence
  Description of Artificial Sequence: Synthetic oligonucleotide
  Antisense strand to SEQ ID NO: 2129716
aucuuuaagccgaaacuca

SEQ ID NO: 2129718 - RNA, 19 nt, Artificial Sequence
  Description of Artificial Sequence: Synthetic oligonucleotide
  Sense strand starting at position 2246 of SEQ ID NO: 1882548
gcuuaaagaucccuuagca

SEQ ID NO: 2129719 - RNA, 19 nt, Artificial Sequence
  Description of Artificial Sequence: Synthetic oligonucleotide
  Antisense strand to SEQ ID NO: 2129718
ugcuaagggaucuuuaagc

SEQ ID NO: 2129720 - RNA, 19 nt, Artificial Sequence
  Description of Artificial Sequence: Synthetic oligonucleotide
  Sense strand starting at position 2322 of SEQ ID NO: 1882548
gagaguacuguaggacuuu

SEQ ID NO: 2129721 - RNA, 19 nt, Artificial Sequence
  Description of Artificial Sequence: Synthetic oligonucleotide
  Antisense strand to SEQ ID NO: 2129720
aaaguccuacaguacucuc

SEQ ID NO: 2129722 - RNA, 19 nt, Artificial Sequence
  Description of Artificial Sequence: Synthetic oligonucleotide
  Sense strand starting at position 2435 of SEQ ID NO: 1882548
acagaauagugccugagaa

SEQ ID NO: 2129723 - RNA, 19 nt, Artificial Sequence
  Description of Artificial Sequence: Synthetic oligonucleotide
  Antisense strand to SEQ ID NO: 2129722
uucucaggcacuauucugu

SEQ ID NO: 2129724 - RNA, 19 nt, Artificial Sequence
  Description of Artificial Sequence: Synthetic oligonucleotide
  Sense strand starting at position 2436 of SEQ ID NO: 1882548
cagaauagugccugagaaa

SEQ ID NO: 2129725 - RNA, 19 nt, Artificial Sequence
  Description of Artificial Sequence: Synthetic oligonucleotide
  Antisense strand to SEQ ID NO: 2129724
uuucucaggcacuauucug

SEQ ID NO: 2129726 - RNA, 19 nt, Artificial Sequence
  Description of Artificial Sequence: Synthetic oligonucleotide
  Sense strand starting at position 2456 of SEQ ID NO: 1882548
ugaagaaauuaaucugcau

SEQ ID NO: 2129727 - RNA, 19 nt, Artificial Sequence
  Description of Artificial Sequence: Synthetic oligonucleotide
  Antisense strand to SEQ ID NO: 2129726
augcagauuaauuucuuca

SEQ ID NO: 2129728 - RNA, 19 nt, Artificial Sequence
  Description of Artificial Sequence: Synthetic oligonucleotide
  Sense strand starting at position 2459 of SEQ ID NO: 1882548
agaaauuaaucugcaugau

SEQ ID NO: 2129729 - RNA, 19 nt, Artificial Sequence
  Description of Artificial Sequence: Synthetic oligonucleotide
  Antisense strand to SEQ ID NO: 2129728
aucaugcagauuaauuucu

SEQ ID NO: 2129730 - RNA, 19 nt, Artificial Sequence
  Description of Artificial Sequence: Synthetic oligonucleotide
  Sense strand starting at position 2525 of SEQ ID NO: 1882548
acaucagaacucuagcagu

SEQ ID NO: 2129731 - RNA, 19 nt, Artificial Sequence
  Description of Artificial Sequence: Synthetic oligonucleotide
  Antisense strand to SEQ ID NO: 2129730
acugcuagaguucugaugu

SEQ ID NO: 2129732 - RNA, 19 nt, Artificial Sequence
  Description of Artificial Sequence: Synthetic oligonucleotide
  Sense strand starting at position 2592 of SEQ ID NO: 1882548
uuuccuaauuuguaggaaa

SEQ ID NO: 2129733 - RNA, 19 nt, Artificial Sequence
  Description of Artificial Sequence: Synthetic oligonucleotide
  Antisense strand to SEQ ID NO: 2129732
uuuccuacaaauuaggaaa

SEQ ID NO: 2129734 - RNA, 19 nt, Artificial Sequence
  Description of Artificial Sequence: Synthetic oligonucleotide
  Sense strand starting at position 2640 of SEQ ID NO: 1882548
ucuuuagaagaguauguau

SEQ ID NO: 2129735 - RNA, 19 nt, Artificial Sequence
  Description of Artificial Sequence: Synthetic oligonucleotide
  Antisense strand to SEQ ID NO: 2129734
auacauacucuucuaaaga

SEQ ID NO: 2129736 - RNA, 19 nt, Artificial Sequence
  Description of Artificial Sequence: Synthetic oligonucleotide
  Sense strand starting at position 2682 of SEQ ID NO: 1882548
ucucauuugcauuaguguu

SEQ ID NO: 2129737 - RNA, 19 nt, Artificial Sequence
  Description of Artificial Sequence: Synthetic oligonucleotide
  Antisense strand to SEQ ID NO: 2129736
aacacuaaugcaaaugaga

SEQ ID NO: 2129738 - RNA, 19 nt, Artificial Sequence
  Description of Artificial Sequence: Synthetic oligonucleotide
  Sense strand starting at position 2687 of SEQ ID NO: 1882548
uuugcauuaguguugcauu

SEQ ID NO: 2129739 - RNA, 19 nt, Artificial Sequence
  Description of Artificial Sequence: Synthetic oligonucleotide
  Antisense strand to SEQ ID NO: 2129738
aaugcaacacuaaugcaaa

SEQ ID NO: 2129740 - RNA, 19 nt, Artificial Sequence
  Description of Artificial Sequence: Synthetic oligonucleotide
  Sense strand starting at position 2725 of SEQ ID NO: 1882548
uugauucaggauuggaagu

SEQ ID NO: 2129741 - RNA, 19 nt, Artificial Sequence
  Description of Artificial Sequence: Synthetic oligonucleotide
  Antisense strand to SEQ ID NO: 2129740
acuuccaauccugaaucaa

SEQ ID NO: 2129742 - RNA, 19 nt, Artificial Sequence
  Description of Artificial Sequence: Synthetic oligonucleotide
  Sense strand starting at position 2749 of SEQ ID NO: 1882548
guguccuuauagguauaga

SEQ ID NO: 2129743 - RNA, 19 nt, Artificial Sequence
  Description of Artificial Sequence: Synthetic oligonucleotide
  Antisense strand to SEQ ID NO: 2129742
ucuauaccuauaaggacac

SEQ ID NO: 2129744 - RNA, 19 nt, Artificial Sequence
  Description of Artificial Sequence: Synthetic oligonucleotide
  Sense strand starting at position 2760 of SEQ ID NO: 1882548
gguauagaaauguauaugu

SEQ ID NO: 2129745 - RNA, 19 nt, Artificial Sequence
  Description of Artificial Sequence: Synthetic oligonucleotide
  Antisense strand to SEQ ID NO: 2129744
acauauacauuucuauacc

SEQ ID NO: 2129746 - RNA, 19 nt, Artificial Sequence
  Description of Artificial Sequence: Synthetic oligonucleotide
  Sense strand starting at position 2909 of SEQ ID NO: 1882548
uguagaaauauugaagugu

SEQ ID NO: 2129747 - RNA, 19 nt, Artificial Sequence
  Description of Artificial Sequence: Synthetic oligonucleotide
  Antisense strand to SEQ ID NO: 2129746
acacuucaauauuucuaca

SEQ ID NO: 2129748 - RNA, 19 nt, Artificial Sequence
  Description of Artificial Sequence: Synthetic oligonucleotide
  Sense strand starting at position 2924 of SEQ ID NO: 1882548
guguauauccuuuaacuuu

SEQ ID NO: 2129749 - RNA, 19 nt, Artificial Sequence
  Description of Artificial Sequence: Synthetic oligonucleotide
  Antisense strand to SEQ ID NO: 2129748
aaaguuaaaggauauacac

SEQ ID NO: 2129750 - RNA, 19 nt, Artificial Sequence
  Description of Artificial Sequence: Synthetic oligonucleotide
  Sense strand starting at position 3031 of SEQ ID NO: 1882548
uuugauauguacucgaaga

SEQ ID NO: 2129751 - RNA, 19 nt, Artificial Sequence
  Description of Artificial Sequence: Synthetic oligonucleotide
  Antisense strand to SEQ ID NO: 2129750
ucuucgaguacauaucaaa

SEQ ID NO: 2129752 - RNA, 19 nt, Artificial Sequence
  Description of Artificial Sequence: Synthetic oligonucleotide
  Sense strand starting at position 3032 of SEQ ID NO: 1882548
uugauauguacucgaagau

SEQ ID NO: 2129753 - RNA, 19 nt, Artificial Sequence
  Description of Artificial Sequence: Synthetic oligonucleotide
  Antisense strand to SEQ ID NO: 2129752
aucuucgaguacauaucaa

SEQ ID NO: 2129754 - RNA, 19 nt, Artificial Sequence
  Description of Artificial Sequence: Synthetic oligonucleotide
  Sense strand starting at position 3033 of SEQ ID NO: 1882548
ugauauguacucgaagauu

SEQ ID NO: 2129755 - RNA, 19 nt, Artificial Sequence
  Description of Artificial Sequence: Synthetic oligonucleotide
  Antisense strand to SEQ ID NO: 2129754
aaucuucgaguacauauca

SEQ ID NO: 2129756 - RNA, 19 nt, Artificial Sequence
  Description of Artificial Sequence: Synthetic oligonucleotide
  Sense strand starting at position 3046 of SEQ ID NO: 1882548
aagauuccagcuugaagag

SEQ ID NO: 2129757 - RNA, 19 nt, Artificial Sequence
  Description of Artificial Sequence: Synthetic oligonucleotide
  Antisense strand to SEQ ID NO: 2129756
cucuucaagcuggaaucuu

SEQ ID NO: 2129758 - RNA, 19 nt, Artificial Sequence
  Description of Artificial Sequence: Synthetic oligonucleotide
  Sense strand starting at position 3089 of SEQ ID NO: 1882548
gugccagguguugcucuaa

SEQ ID NO: 2129759 - RNA, 19 nt, Artificial Sequence
  Description of Artificial Sequence: Synthetic oligonucleotide
  Antisense strand to SEQ ID NO: 2129758
uuagagcaacaccuggcac

SEQ ID NO: 2129760 - RNA, 19 nt, Artificial Sequence
  Description of Artificial Sequence: Synthetic oligonucleotide
  Sense strand starting at position 3422 of SEQ ID NO: 1882548
aucaucucuuguuuggauu

SEQ ID NO: 2129761 - RNA, 19 nt, Artificial Sequence
  Description of Artificial Sequence: Synthetic oligonucleotide
  Antisense strand to SEQ ID NO: 2129760
aauccaaacaagagaugau

SEQ ID NO: 2129762 - RNA, 19 nt, Artificial Sequence
  Description of Artificial Sequence: Synthetic oligonucleotide
  Sense strand starting at position 3423 of SEQ ID NO: 1882548
ucaucucuuguuuggauua

SEQ ID NO: 2129763 - RNA, 19 nt, Artificial Sequence
  Description of Artificial Sequence: Synthetic oligonucleotide
  Antisense strand to SEQ ID NO: 2129762
uaauccaaacaagagauga

SEQ ID NO: 2129764 - RNA, 19 nt, Artificial Sequence
  Description of Artificial Sequence: Synthetic oligonucleotide
  Sense strand starting at position 3556 of SEQ ID NO: 1882548
guggcuucccaacacaagu

SEQ ID NO: 2129765 - RNA, 19 nt, Artificial Sequence
  Description of Artificial Sequence: Synthetic oligonucleotide
  Antisense strand to SEQ ID NO: 2129764
acuuguguugggaagccac

SEQ ID NO: 2129766 - RNA, 19 nt, Artificial Sequence
  Description of Artificial Sequence: Synthetic oligonucleotide
  Sense strand starting at position 3586 of SEQ ID NO: 1882548
uccuaacgauggcuuuaaa

SEQ ID NO: 2129767 - RNA, 19 nt, Artificial Sequence
  Description of Artificial Sequence: Synthetic oligonucleotide
  Antisense strand to SEQ ID NO: 2129766
uuuaaagccaucguuagga

SEQ ID NO: 2129768 - RNA, 19 nt, Artificial Sequence
  Description of Artificial Sequence: Synthetic oligonucleotide
  Sense strand starting at position 3648 of SEQ ID NO: 1882548
agcuuuguauucccagaaa

SEQ ID NO: 2129769 - RNA, 19 nt, Artificial Sequence
  Description of Artificial Sequence: Synthetic oligonucleotide
  Antisense strand to SEQ ID NO: 2129768
uuucugggaauacaaagcu

SEQ ID NO: 2129770 - RNA, 19 nt, Artificial Sequence
  Description of Artificial Sequence: Synthetic oligonucleotide
  Sense strand starting at position 3651 of SEQ ID NO: 1882548
uuuguauucccagaaagcu

SEQ ID NO: 2129771 - RNA, 19 nt, Artificial Sequence
  Description of Artificial Sequence: Synthetic oligonucleotide
  Antisense strand to SEQ ID NO: 2129770
agcuuucugggaauacaaa

SEQ ID NO: 2129772 - RNA, 19 nt, Artificial Sequence
  Description of Artificial Sequence: Synthetic oligonucleotide
  Sense strand starting at position 3660 of SEQ ID NO: 1882548
ccagaaagcucuccacaag

SEQ ID NO: 2129773 - RNA, 19 nt, Artificial Sequence
  Description of Artificial Sequence: Synthetic oligonucleotide
  Antisense strand to SEQ ID NO: 2129772
cuuguggagagcuuucugg

SEQ ID NO: 2129774 - RNA, 19 nt, Artificial Sequence
  Description of Artificial Sequence: Synthetic oligonucleotide
  Sense strand starting at position 3747 of SEQ ID NO: 1882548
uccauaugugcucagaugu

SEQ ID NO: 2129775 - RNA, 19 nt, Artificial Sequence
  Description of Artificial Sequence: Synthetic oligonucleotide
  Antisense strand to SEQ ID NO: 2129774
acaucugagcacauaugga

SEQ ID NO: 2129776 - RNA, 19 nt, Artificial Sequence
  Description of Artificial Sequence: Synthetic oligonucleotide
  Sense strand starting at position 3861 of SEQ ID NO: 1882548
cuuaucacaguguaaugga

SEQ ID NO: 2129777 - RNA, 19 nt, Artificial Sequence
  Description of Artificial Sequence: Synthetic oligonucleotide
  Antisense strand to SEQ ID NO: 2129776
uccauuacacugugauaag

SEQ ID NO: 2129778 - RNA, 19 nt, Artificial Sequence
  Description of Artificial Sequence: Synthetic oligonucleotide
  Sense strand starting at position 3982 of SEQ ID NO: 1882548
ggaauagugccugacacac

SEQ ID NO: 2129779 - RNA, 19 nt, Artificial Sequence
  Description of Artificial Sequence: Synthetic oligonucleotide
  Antisense strand to SEQ ID NO: 2129778
gugugucaggcacuauucc

SEQ ID NO: 2129780 - RNA, 19 nt, Artificial Sequence
  Description of Artificial Sequence: Synthetic oligonucleotide
  Sense strand starting at position 189 of SEQ ID NO: 1882549
ccagucugcccacaugaua

SEQ ID NO: 2129781 - RNA, 19 nt, Artificial Sequence
  Description of Artificial Sequence: Synthetic oligonucleotide
  Antisense strand to SEQ ID NO: 2129780
uaucaugugggcagacugg

SEQ ID NO: 2129782 - RNA, 19 nt, Artificial Sequence
  Description of Artificial Sequence: Synthetic oligonucleotide
  Sense strand starting at position 209 of SEQ ID NO: 1882549
acuggcucauuugagacau

SEQ ID NO: 2129783 - RNA, 19 nt, Artificial Sequence
  Description of Artificial Sequence: Synthetic oligonucleotide
  Antisense strand to SEQ ID NO: 2129782
augucucaaaugagccagu

SEQ ID NO: 2129784 - RNA, 19 nt, Artificial Sequence
  Description of Artificial Sequence: Synthetic oligonucleotide
  Sense strand starting at position 211 of SEQ ID NO: 1882549
uggcucauuugagacauaa

SEQ ID NO: 2129785 - RNA, 19 nt, Artificial Sequence
  Description of Artificial Sequence: Synthetic oligonucleotide
  Antisense strand to SEQ ID NO: 2129784
uuaugucucaaaugagcca

SEQ ID NO: 2129786 - RNA, 19 nt, Artificial Sequence
  Description of Artificial Sequence: Synthetic oligonucleotide
  Sense strand starting at position 538 of SEQ ID NO: 1882549
uguccuaagucuuccaaau

SEQ ID NO: 2129787 - RNA, 19 nt, Artificial Sequence
  Description of Artificial Sequence: Synthetic oligonucleotide
  Antisense strand to SEQ ID NO: 2129786
auuuggaagacuuaggaca

SEQ ID NO: 2129788 - RNA, 19 nt, Artificial Sequence
  Description of Artificial Sequence: Synthetic oligonucleotide
  Sense strand starting at position 768 of SEQ ID NO: 1882549
agaaauaagugcucacuaa

SEQ ID NO: 2129789 - RNA, 19 nt, Artificial Sequence
  Description of Artificial Sequence: Synthetic oligonucleotide
  Antisense strand to SEQ ID NO: 2129788
uuagugagcacuuauuucu

SEQ ID NO: 2129790 - RNA, 19 nt, Artificial Sequence
  Description of Artificial Sequence: Synthetic oligonucleotide
  Sense strand starting at position 841 of SEQ ID NO: 1882549
agauucuaguugccaggau

SEQ ID NO: 2129791 - RNA, 19 nt, Artificial Sequence
  Description of Artificial Sequence: Synthetic oligonucleotide
  Antisense strand to SEQ ID NO: 2129790
auccuggcaacuagaaucu

SEQ ID NO: 2129792 - RNA, 19 nt, Artificial Sequence
  Description of Artificial Sequence: Synthetic oligonucleotide
  Sense strand starting at position 871 of SEQ ID NO: 1882549
cuuacaguccuguagguuu

SEQ ID NO: 2129793 - RNA, 19 nt, Artificial Sequence
  Description of Artificial Sequence: Synthetic oligonucleotide
  Antisense strand to SEQ ID NO: 2129792
aaaccuacaggacuguaag

SEQ ID NO: 2129794 - RNA, 19 nt, Artificial Sequence
  Description of Artificial Sequence: Synthetic oligonucleotide
  Sense strand starting at position 2302 of SEQ ID NO: 1882549
cuuugcuauccugaggaag

SEQ ID NO: 2129795 - RNA, 19 nt, Artificial Sequence
  Description of Artificial Sequence: Synthetic oligonucleotide
  Antisense strand to SEQ ID NO: 2129794
cuuccucaggauagcaaag

SEQ ID NO: 2129796 - RNA, 19 nt, Artificial Sequence
  Description of Artificial Sequence: Synthetic oligonucleotide
  Sense strand starting at position 2337 of SEQ ID NO: 1882549
ugaguuucggcuuaaagau

SEQ ID NO: 2129797 - RNA, 19 nt, Artificial Sequence
  Description of Artificial Sequence: Synthetic oligonucleotide
  Antisense strand to SEQ ID NO: 2129796
aucuuuaagccgaaacuca

SEQ ID NO: 2129798 - RNA, 19 nt, Artificial Sequence
  Description of Artificial Sequence: Synthetic oligonucleotide
  Sense strand starting at position 2346 of SEQ ID NO: 1882549
gcuuaaagaucccuuagca

SEQ ID NO: 2129799 - RNA, 19 nt, Artificial Sequence
  Description of Artificial Sequence: Synthetic oligonucleotide
  Antisense strand to SEQ ID NO: 2129798
ugcuaagggaucuuuaagc

SEQ ID NO: 2129800 - RNA, 19 nt, Artificial Sequence
  Description of Artificial Sequence: Synthetic oligonucleotide
  Sense strand starting at position 2422 of SEQ ID NO: 1882549
gagaguacuguaggacuuu

SEQ ID NO: 2129801 - RNA, 19 nt, Artificial Sequence
  Description of Artificial Sequence: Synthetic oligonucleotide
  Antisense strand to SEQ ID NO: 2129800
aaaguccuacaguacucuc

SEQ ID NO: 2129802 - RNA, 19 nt, Artificial Sequence
  Description of Artificial Sequence: Synthetic oligonucleotide
  Sense strand starting at position 2535 of SEQ ID NO: 1882549
acagaauagugccugagaa

SEQ ID NO: 2129803 - RNA, 19 nt, Artificial Sequence
  Description of Artificial Sequence: Synthetic oligonucleotide
  Antisense strand to SEQ ID NO: 2129802
uucucaggcacuauucugu

SEQ ID NO: 2129804 - RNA, 19 nt, Artificial Sequence
  Description of Artificial Sequence: Synthetic oligonucleotide
  Sense strand starting at position 2536 of SEQ ID NO: 1882549
cagaauagugccugagaaa

SEQ ID NO: 2129805 - RNA, 19 nt, Artificial Sequence
  Description of Artificial Sequence: Synthetic oligonucleotide
  Antisense strand to SEQ ID NO: 2129804
uuucucaggcacuauucug

SEQ ID NO: 2129806 - RNA, 19 nt, Artificial Sequence
  Description of Artificial Sequence: Synthetic oligonucleotide
  Sense strand starting at position 2556 of SEQ ID NO: 1882549
ugaagaaauuaaucugcau

SEQ ID NO: 2129807 - RNA, 19 nt, Artificial Sequence
  Description of Artificial Sequence: Synthetic oligonucleotide
  Antisense strand to SEQ ID NO: 2129806
augcagauuaauuucuuca

SEQ ID NO: 2129808 - RNA, 19 nt, Artificial Sequence
  Description of Artificial Sequence: Synthetic oligonucleotide
  Sense strand starting at position 2559 of SEQ ID NO: 1882549
agaaauuaaucugcaugau

SEQ ID NO: 2129809 - RNA, 19 nt, Artificial Sequence
  Description of Artificial Sequence: Synthetic oligonucleotide
  Antisense strand to SEQ ID NO: 2129808
aucaugcagauuaauuucu

SEQ ID NO: 2129810 - RNA, 19 nt, Artificial Sequence
  Description of Artificial Sequence: Synthetic oligonucleotide
  Sense strand starting at position 2625 of SEQ ID NO: 1882549
acaucagaacucuagcagu

SEQ ID NO: 2129811 - RNA, 19 nt, Artificial Sequence
  Description of Artificial Sequence: Synthetic oligonucleotide
  Antisense strand to SEQ ID NO: 2129810
acugcuagaguucugaugu

SEQ ID NO: 2129812 - RNA, 19 nt, Artificial Sequence
  Description of Artificial Sequence: Synthetic oligonucleotide
  Sense strand starting at position 2692 of SEQ ID NO: 1882549
uuuccuaauuuguaggaaa

SEQ ID NO: 2129813 - RNA, 19 nt, Artificial Sequence
  Description of Artificial Sequence: Synthetic oligonucleotide
  Antisense strand to SEQ ID NO: 2129812
uuuccuacaaauuaggaaa

SEQ ID NO: 2129814 - RNA, 19 nt, Artificial Sequence
  Description of Artificial Sequence: Synthetic oligonucleotide
  Sense strand starting at position 2740 of SEQ ID NO: 1882549
ucuuuagaagaguauguau

SEQ ID NO: 2129815 - RNA, 19 nt, Artificial Sequence
  Description of Artificial Sequence: Synthetic oligonucleotide
  Antisense strand to SEQ ID NO: 2129814
auacauacucuucuaaaga

SEQ ID NO: 2129816 - RNA, 19 nt, Artificial Sequence
  Description of Artificial Sequence: Synthetic oligonucleotide
  Sense strand starting at position 2775 of SEQ ID NO: 1882549
agcgucuucucauuugcau

SEQ ID NO: 2129817 - RNA, 19 nt, Artificial Sequence
  Description of Artificial Sequence: Synthetic oligonucleotide
  Antisense strand to SEQ ID NO: 2129816
augcaaaugagaagacgcu

SEQ ID NO: 2129818 - RNA, 19 nt, Artificial Sequence
  Description of Artificial Sequence: Synthetic oligonucleotide
  Sense strand starting at position 2782 of SEQ ID NO: 1882549
ucucauuugcauuaguguu

SEQ ID NO: 2129819 - RNA, 19 nt, Artificial Sequence
  Description of Artificial Sequence: Synthetic oligonucleotide
  Antisense strand to SEQ ID NO: 2129818
aacacuaaugcaaaugaga

SEQ ID NO: 2129820 - RNA, 19 nt, Artificial Sequence
  Description of Artificial Sequence: Synthetic oligonucleotide
  Sense strand starting at position 2787 of SEQ ID NO: 1882549
uuugcauuaguguugcauu

SEQ ID NO: 2129821 - RNA, 19 nt, Artificial Sequence
  Description of Artificial Sequence: Synthetic oligonucleotide
  Antisense strand to SEQ ID NO: 2129820
aaugcaacacuaaugcaaa

SEQ ID NO: 2129822 - RNA, 19 nt, Artificial Sequence
  Description of Artificial Sequence: Synthetic oligonucleotide
  Sense strand starting at position 2825 of SEQ ID NO: 1882549
uugauucaggauuggaagu

SEQ ID NO: 2129823 - RNA, 19 nt, Artificial Sequence
  Description of Artificial Sequence: Synthetic oligonucleotide
  Antisense strand to SEQ ID NO: 2129822
acuuccaauccugaaucaa

SEQ ID NO: 2129824 - RNA, 19 nt, Artificial Sequence
  Description of Artificial Sequence: Synthetic oligonucleotide
  Sense strand starting at position 2849 of SEQ ID NO: 1882549
guguccuuauagguauaga

SEQ ID NO: 2129825 - RNA, 19 nt, Artificial Sequence
  Description of Artificial Sequence: Synthetic oligonucleotide
  Antisense strand to SEQ ID NO: 2129824
ucuauaccuauaaggacac

SEQ ID NO: 2129826 - RNA, 19 nt, Artificial Sequence
  Description of Artificial Sequence: Synthetic oligonucleotide
  Sense strand starting at position 2860 of SEQ ID NO: 1882549
gguauagaaauguauaugu

SEQ ID NO: 2129827 - RNA, 19 nt, Artificial Sequence
  Description of Artificial Sequence: Synthetic oligonucleotide
  Antisense strand to SEQ ID NO: 2129826
acauauacauuucuauacc

SEQ ID NO: 2129828 - RNA, 19 nt, Artificial Sequence
  Description of Artificial Sequence: Synthetic oligonucleotide
  Sense strand starting at position 3009 of SEQ ID NO: 1882549
uguagaaauauugaagugu

SEQ ID NO: 2129829 - RNA, 19 nt, Artificial Sequence
  Description of Artificial Sequence: Synthetic oligonucleotide
  Antisense strand to SEQ ID NO: 2129828
acacuucaauauuucuaca

SEQ ID NO: 2129830 - RNA, 19 nt, Artificial Sequence
  Description of Artificial Sequence: Synthetic oligonucleotide
  Sense strand starting at position 3024 of SEQ ID NO: 1882549
guguauauccuuuaacuuu

SEQ ID NO: 2129831 - RNA, 19 nt, Artificial Sequence
  Description of Artificial Sequence: Synthetic oligonucleotide
  Antisense strand to SEQ ID NO: 2129830
aaaguuaaaggauauacac

SEQ ID NO: 2129832 - RNA, 19 nt, Artificial Sequence
  Description of Artificial Sequence: Synthetic oligonucleotide
  Sense strand starting at position 3131 of SEQ ID NO: 1882549
uuugauauguacucgaaga

SEQ ID NO: 2129833 - RNA, 19 nt, Artificial Sequence
  Description of Artificial Sequence: Synthetic oligonucleotide
  Antisense strand to SEQ ID NO: 2129832
ucuucgaguacauaucaaa

SEQ ID NO: 2129834 - RNA, 19 nt, Artificial Sequence
  Description of Artificial Sequence: Synthetic oligonucleotide
  Sense strand starting at position 3132 of SEQ ID NO: 1882549
uugauauguacucgaagau

SEQ ID NO: 2129835 - RNA, 19 nt, Artificial Sequence
  Description of Artificial Sequence: Synthetic oligonucleotide
  Antisense strand to SEQ ID NO: 2129834
aucuucgaguacauaucaa

SEQ ID NO: 2129836 - RNA, 19 nt, Artificial Sequence
  Description of Artificial Sequence: Synthetic oligonucleotide
  Sense strand starting at position 3133 of SEQ ID NO: 1882549
ugauauguacucgaagauu

SEQ ID NO: 2129837 - RNA, 19 nt, Artificial Sequence
  Description of Artificial Sequence: Synthetic oligonucleotide
  Antisense strand to SEQ ID NO: 2129836
aaucuucgaguacauauca

SEQ ID NO: 2129838 - RNA, 19 nt, Artificial Sequence
  Description of Artificial Sequence: Synthetic oligonucleotide
  Sense strand starting at position 3146 of SEQ ID NO: 1882549
aagauuccagcuugaagag

SEQ ID NO: 2129839 - RNA, 19 nt, Artificial Sequence
  Description of Artificial Sequence: Synthetic oligonucleotide
  Antisense strand to SEQ ID NO: 2129838
cucuucaagcuggaaucuu

SEQ ID NO: 2129840 - RNA, 19 nt, Artificial Sequence
  Description of Artificial Sequence: Synthetic oligonucleotide
  Sense strand starting at position 3189 of SEQ ID NO: 1882549
gugccagguguugcucuaa

SEQ ID NO: 2129841 - RNA, 19 nt, Artificial Sequence
  Description of Artificial Sequence: Synthetic oligonucleotide
  Antisense strand to SEQ ID NO: 2129840
uuagagcaacaccuggcac

SEQ ID NO: 2129842 - RNA, 19 nt, Artificial Sequence
  Description of Artificial Sequence: Synthetic oligonucleotide
  Sense strand starting at position 3522 of SEQ ID NO: 1882549
aucaucucuuguuuggauu

SEQ ID NO: 2129843 - RNA, 19 nt, Artificial Sequence
  Description of Artificial Sequence: Synthetic oligonucleotide
  Antisense strand to SEQ ID NO: 2129842
aauccaaacaagagaugau

SEQ ID NO: 2129844 - RNA, 19 nt, Artificial Sequence
  Description of Artificial Sequence: Synthetic oligonucleotide
  Sense strand starting at position 3523 of SEQ ID NO: 1882549
ucaucucuuguuuggauua

SEQ ID NO: 2129845 - RNA, 19 nt, Artificial Sequence
  Description of Artificial Sequence: Synthetic oligonucleotide
  Antisense strand to SEQ ID NO: 2129844
uaauccaaacaagagauga

SEQ ID NO: 2129846 - RNA, 19 nt, Artificial Sequence
  Description of Artificial Sequence: Synthetic oligonucleotide
  Sense strand starting at position 3656 of SEQ ID NO: 1882549
guggcuucccaacacaagu

SEQ ID NO: 2129847 - RNA, 19 nt, Artificial Sequence
  Description of Artificial Sequence: Synthetic oligonucleotide
  Antisense strand to SEQ ID NO: 2129846
acuuguguugggaagccac

SEQ ID NO: 2129848 - RNA, 19 nt, Artificial Sequence
  Description of Artificial Sequence: Synthetic oligonucleotide
  Sense strand starting at position 3686 of SEQ ID NO: 1882549
uccuaacgauggcuuuaaa

SEQ ID NO: 2129849 - RNA, 19 nt, Artificial Sequence
  Description of Artificial Sequence: Synthetic oligonucleotide
  Antisense strand to SEQ ID NO: 2129848
uuuaaagccaucguuagga

SEQ ID NO: 2129850 - RNA, 19 nt, Artificial Sequence
  Description of Artificial Sequence: Synthetic oligonucleotide
  Sense strand starting at position 3748 of SEQ ID NO: 1882549
agcuuuguauucccagaaa

SEQ ID NO: 2129851 - RNA, 19 nt, Artificial Sequence
  Description of Artificial Sequence: Synthetic oligonucleotide
  Antisense strand to SEQ ID NO: 2129850
uuucugggaauacaaagcu

SEQ ID NO: 2129852 - RNA, 19 nt, Artificial Sequence
  Description of Artificial Sequence: Synthetic oligonucleotide
  Sense strand starting at position 3751 of SEQ ID NO: 1882549
uuuguauucccagaaagcu

SEQ ID NO: 2129853 - RNA, 19 nt, Artificial Sequence
  Description of Artificial Sequence: Synthetic oligonucleotide
  Antisense strand to SEQ ID NO: 2129852
agcuuucugggaauacaaa

SEQ ID NO: 2129854 - RNA, 19 nt, Artificial Sequence
  Description of Artificial Sequence: Synthetic oligonucleotide
  Sense strand starting at position 3760 of SEQ ID NO: 1882549
ccagaaagcucuccacaag

SEQ ID NO: 2129855 - RNA, 19 nt, Artificial Sequence
  Description of Artificial Sequence: Synthetic oligonucleotide
  Antisense strand to SEQ ID NO: 2129854
cuuguggagagcuuucugg

SEQ ID NO: 2129856 - RNA, 19 nt, Artificial Sequence
  Description of Artificial Sequence: Synthetic oligonucleotide
  Sense strand starting at position 3847 of SEQ ID NO: 1882549
uccauaugugcucagaugu

SEQ ID NO: 2129857 - RNA, 19 nt, Artificial Sequence
  Description of Artificial Sequence: Synthetic oligonucleotide
  Antisense strand to SEQ ID NO: 2129856
acaucugagcacauaugga

SEQ ID NO: 2129858 - RNA, 19 nt, Artificial Sequence
  Description of Artificial Sequence: Synthetic oligonucleotide
  Sense strand starting at position 3961 of SEQ ID NO: 1882549
cuuaucacaguguaaugga

SEQ ID NO: 2129859 - RNA, 19 nt, Artificial Sequence
  Description of Artificial Sequence: Synthetic oligonucleotide
  Antisense strand to SEQ ID NO: 2129858
uccauuacacugugauaag

SEQ ID NO: 2129860 - RNA, 19 nt, Artificial Sequence
  Description of Artificial Sequence: Synthetic oligonucleotide
  Sense strand starting at position 90 of SEQ ID NO: 1882550
cccaauaauguuggaguau

SEQ ID NO: 2129861 - RNA, 19 nt, Artificial Sequence
  Description of Artificial Sequence: Synthetic oligonucleotide
  Antisense strand to SEQ ID NO: 2129860
auacuccaacauuauuggg

SEQ ID NO: 2129862 - RNA, 19 nt, Artificial Sequence
  Description of Artificial Sequence: Synthetic oligonucleotide
  Sense strand starting at position 101 of SEQ ID NO: 1882550
uggaguauauauucucaua

SEQ ID NO: 2129863 - RNA, 19 nt, Artificial Sequence
  Description of Artificial Sequence: Synthetic oligonucleotide
  Antisense strand to SEQ ID NO: 2129862
uaugagaauauauacucca

SEQ ID NO: 2129864 - RNA, 19 nt, Artificial Sequence
  Description of Artificial Sequence: Synthetic oligonucleotide
  Sense strand starting at position 156 of SEQ ID NO: 1882550
acaaacagugugugaacau

SEQ ID NO: 2129865 - RNA, 19 nt, Artificial Sequence
  Description of Artificial Sequence: Synthetic oligonucleotide
  Antisense strand to SEQ ID NO: 2129864
auguucacacacuguuugu

SEQ ID NO: 2129866 - RNA, 19 nt, Artificial Sequence
  Description of Artificial Sequence: Synthetic oligonucleotide
  Sense strand starting at position 241 of SEQ ID NO: 1882550
gugagacacuaucugguuu

SEQ ID NO: 2129867 - RNA, 19 nt, Artificial Sequence
  Description of Artificial Sequence: Synthetic oligonucleotide
  Antisense strand to SEQ ID NO: 2129866
aaaccagauagugucucac

SEQ ID NO: 2129868 - RNA, 19 nt, Artificial Sequence
  Description of Artificial Sequence: Synthetic oligonucleotide
  Sense strand starting at position 274 of SEQ ID NO: 1882550
auccuauuaguauggauca

SEQ ID NO: 2129869 - RNA, 19 nt, Artificial Sequence
  Description of Artificial Sequence: Synthetic oligonucleotide
  Antisense strand to SEQ ID NO: 2129868
ugauccauacuaauaggau

SEQ ID NO: 2129870 - RNA, 19 nt, Artificial Sequence
  Description of Artificial Sequence: Synthetic oligonucleotide
  Sense strand starting at position 286 of SEQ ID NO: 1882550
uggaucaugugaccuaaga

SEQ ID NO: 2129871 - RNA, 19 nt, Artificial Sequence
  Description of Artificial Sequence: Synthetic oligonucleotide
  Antisense strand to SEQ ID NO: 2129870
ucuuaggucacaugaucca

SEQ ID NO: 2129872 - RNA, 19 nt, Artificial Sequence
  Description of Artificial Sequence: Synthetic oligonucleotide
  Sense strand starting at position 294 of SEQ ID NO: 1882550
gugaccuaagaaugaguau

SEQ ID NO: 2129873 - RNA, 19 nt, Artificial Sequence
  Description of Artificial Sequence: Synthetic oligonucleotide
  Antisense strand to SEQ ID NO: 2129872
auacucauucuuaggucac

SEQ ID NO: 2129874 - RNA, 19 nt, Artificial Sequence
  Description of Artificial Sequence: Synthetic oligonucleotide
  Sense strand starting at position 300 of SEQ ID NO: 1882550
uaagaaugaguaugagcuu

SEQ ID NO: 2129875 - RNA, 19 nt, Artificial Sequence
  Description of Artificial Sequence: Synthetic oligonucleotide
  Antisense strand to SEQ ID NO: 2129874
aagcucauacucauucuua

SEQ ID NO: 2129876 - RNA, 19 nt, Artificial Sequence
  Description of Artificial Sequence: Synthetic oligonucleotide
  Sense strand starting at position 388 of SEQ ID NO: 1882550
uuugcuuacugauuuguau

SEQ ID NO: 2129877 - RNA, 19 nt, Artificial Sequence
  Description of Artificial Sequence: Synthetic oligonucleotide
  Antisense strand to SEQ ID NO: 2129876
auacaaaucaguaagcaaa

SEQ ID NO: 2129878 - RNA, 19 nt, Artificial Sequence
  Description of Artificial Sequence: Synthetic oligonucleotide
  Sense strand starting at position 486 of SEQ ID NO: 1882550
uuugucucaguuuauagua

SEQ ID NO: 2129879 - RNA, 19 nt, Artificial Sequence
  Description of Artificial Sequence: Synthetic oligonucleotide
  Antisense strand to SEQ ID NO: 2129878
uacuauaaacugagacaaa

SEQ ID NO: 2129880 - RNA, 19 nt, Artificial Sequence
  Description of Artificial Sequence: Synthetic oligonucleotide
  Sense strand starting at position 520 of SEQ ID NO: 1882550
aggaauucuuugcuuagag

SEQ ID NO: 2129881 - RNA, 19 nt, Artificial Sequence
  Description of Artificial Sequence: Synthetic oligonucleotide
  Antisense strand to SEQ ID NO: 2129880
cucuaagcaaagaauuccu

SEQ ID NO: 2129882 - RNA, 19 nt, Artificial Sequence
  Description of Artificial Sequence: Synthetic oligonucleotide
  Sense strand starting at position 521 of SEQ ID NO: 1882550
ggaauucuuugcuuagagg

SEQ ID NO: 2129883 - RNA, 19 nt, Artificial Sequence
  Description of Artificial Sequence: Synthetic oligonucleotide
  Antisense strand to SEQ ID NO: 2129882
ccucuaagcaaagaauucc

SEQ ID NO: 2129884 - RNA, 19 nt, Artificial Sequence
  Description of Artificial Sequence: Synthetic oligonucleotide
  Sense strand starting at position 527 of SEQ ID NO: 1882550
cuuugcuuagagggaauaa

SEQ ID NO: 2129885 - RNA, 19 nt, Artificial Sequence
  Description of Artificial Sequence: Synthetic oligonucleotide
  Antisense strand to SEQ ID NO: 2129884
uuauucccucuaagcaaag

SEQ ID NO: 2129886 - RNA, 19 nt, Artificial Sequence
  Description of Artificial Sequence: Synthetic oligonucleotide
  Sense strand starting at position 537 of SEQ ID NO: 1882550
agggaauaaagcugaguca

SEQ ID NO: 2129887 - RNA, 19 nt, Artificial Sequence
  Description of Artificial Sequence: Synthetic oligonucleotide
  Antisense strand to SEQ ID NO: 2129886
ugacucagcuuuauucccu

SEQ ID NO: 2129888 - RNA, 19 nt, Artificial Sequence
  Description of Artificial Sequence: Synthetic oligonucleotide
  Sense strand starting at position 633 of SEQ ID NO: 1882550
guucuacuaguacacuuaa

SEQ ID NO: 2129889 - RNA, 19 nt, Artificial Sequence
  Description of Artificial Sequence: Synthetic oligonucleotide
  Antisense strand to SEQ ID NO: 2129888
uuaaguguacuaguagaac

SEQ ID NO: 2129890 - RNA, 19 nt, Artificial Sequence
  Description of Artificial Sequence: Synthetic oligonucleotide
  Sense strand starting at position 659 of SEQ ID NO: 1882550
uuacacaucuaggucuuua

SEQ ID NO: 2129891 - RNA, 19 nt, Artificial Sequence
  Description of Artificial Sequence: Synthetic oligonucleotide
  Antisense strand to SEQ ID NO: 2129890
uaaagaccuagauguguaa

SEQ ID NO: 2129892 - RNA, 19 nt, Artificial Sequence
  Description of Artificial Sequence: Synthetic oligonucleotide
  Sense strand starting at position 898 of SEQ ID NO: 1882550
aggugauucccacaccuca

SEQ ID NO: 2129893 - RNA, 19 nt, Artificial Sequence
  Description of Artificial Sequence: Synthetic oligonucleotide
  Antisense strand to SEQ ID NO: 2129892
ugaggugugggaaucaccu

SEQ ID NO: 2129894 - RNA, 19 nt, Artificial Sequence
  Description of Artificial Sequence: Synthetic oligonucleotide
  Sense strand starting at position 1188 of SEQ ID NO: 1882550
uccaguaauuuguuuguac

SEQ ID NO: 2129895 - RNA, 19 nt, Artificial Sequence
  Description of Artificial Sequence: Synthetic oligonucleotide
  Antisense strand to SEQ ID NO: 2129894
guacaaacaaauuacugga

SEQ ID NO: 2129896 - RNA, 19 nt, Artificial Sequence
  Description of Artificial Sequence: Synthetic oligonucleotide
  Sense strand starting at position 1223 of SEQ ID NO: 1882550
ugauuuaacuuauugcugu

SEQ ID NO: 2129897 - RNA, 19 nt, Artificial Sequence
  Description of Artificial Sequence: Synthetic oligonucleotide
  Antisense strand to SEQ ID NO: 2129896
acagcaauaaguuaaauca

SEQ ID NO: 2129898 - RNA, 19 nt, Artificial Sequence
  Description of Artificial Sequence: Synthetic oligonucleotide
  Sense strand starting at position 1279 of SEQ ID NO: 1882550
accaaaggugaaugguauu

SEQ ID NO: 2129899 - RNA, 19 nt, Artificial Sequence
  Description of Artificial Sequence: Synthetic oligonucleotide
  Antisense strand to SEQ ID NO: 2129898
aauaccauucaccuuuggu

SEQ ID NO: 2129900 - RNA, 19 nt, Artificial Sequence
  Description of Artificial Sequence: Synthetic oligonucleotide
  Sense strand starting at position 1597 of SEQ ID NO: 1882550
agagucuuauaguuauuac

SEQ ID NO: 2129901 - RNA, 19 nt, Artificial Sequence
  Description of Artificial Sequence: Synthetic oligonucleotide
  Antisense strand to SEQ ID NO: 2129900
guaauaacuauaagacucu

SEQ ID NO: 2129902 - RNA, 19 nt, Artificial Sequence
  Description of Artificial Sequence: Synthetic oligonucleotide
  Sense strand starting at position 1606 of SEQ ID NO: 1882550
uaguuauuacagggcaaag

SEQ ID NO: 2129903 - RNA, 19 nt, Artificial Sequence
  Description of Artificial Sequence: Synthetic oligonucleotide
  Antisense strand to SEQ ID NO: 2129902
cuuugcccuguaauaacua

SEQ ID NO: 2129904 - RNA, 19 nt, Artificial Sequence
  Description of Artificial Sequence: Synthetic oligonucleotide
  Sense strand starting at position 2060 of SEQ ID NO: 1882550
ccagaaucugauugucucu

SEQ ID NO: 2129905 - RNA, 19 nt, Artificial Sequence
  Description of Artificial Sequence: Synthetic oligonucleotide
  Antisense strand to SEQ ID NO: 2129904
agagacaaucagauucugg

SEQ ID NO: 2129906 - RNA, 19 nt, Artificial Sequence
  Description of Artificial Sequence: Synthetic oligonucleotide
  Sense strand starting at position 2066 of SEQ ID NO: 1882550
ucugauugucucuacauca

SEQ ID NO: 2129907 - RNA, 19 nt, Artificial Sequence
  Description of Artificial Sequence: Synthetic oligonucleotide
  Antisense strand to SEQ ID NO: 2129906
ugauguagagacaaucaga

SEQ ID NO: 2129908 - RNA, 19 nt, Artificial Sequence
  Description of Artificial Sequence: Synthetic oligonucleotide
  Sense strand starting at position 2154 of SEQ ID NO: 1882550
auguuaugggcccacucau

SEQ ID NO: 2129909 - RNA, 19 nt, Artificial Sequence
  Description of Artificial Sequence: Synthetic oligonucleotide
  Antisense strand to SEQ ID NO: 2129908
augagugggcccauaacau

SEQ ID NO: 2129910 - RNA, 19 nt, Artificial Sequence
  Description of Artificial Sequence: Synthetic oligonucleotide
  Sense strand starting at position 2612 of SEQ ID NO: 1882550
agaaaccaguguuugcaua

SEQ ID NO: 2129911 - RNA, 19 nt, Artificial Sequence
  Description of Artificial Sequence: Synthetic oligonucleotide
  Antisense strand to SEQ ID NO: 2129910
uaugcaaacacugguuucu

SEQ ID NO: 2129912 - RNA, 19 nt, Artificial Sequence
  Description of Artificial Sequence: Synthetic oligonucleotide
  Sense strand starting at position 2622 of SEQ ID NO: 1882550
guuugcauaucaucuagaa

SEQ ID NO: 2129913 - RNA, 19 nt, Artificial Sequence
  Description of Artificial Sequence: Synthetic oligonucleotide
  Antisense strand to SEQ ID NO: 2129912
uucuagaugauaugcaaac

SEQ ID NO: 2129914 - RNA, 19 nt, Artificial Sequence
  Description of Artificial Sequence: Synthetic oligonucleotide
  Sense strand starting at position 2866 of SEQ ID NO: 1882550
ccauacgugagguaccaau

SEQ ID NO: 2129915 - RNA, 19 nt, Artificial Sequence
  Description of Artificial Sequence: Synthetic oligonucleotide
  Antisense strand to SEQ ID NO: 2129914
auugguaccucacguaugg

SEQ ID NO: 2129916 - RNA, 19 nt, Artificial Sequence
  Description of Artificial Sequence: Synthetic oligonucleotide
  Sense strand starting at position 2915 of SEQ ID NO: 1882550
guaucuggaaagugagaua

SEQ ID NO: 2129917 - RNA, 19 nt, Artificial Sequence
  Description of Artificial Sequence: Synthetic oligonucleotide
  Antisense strand to SEQ ID NO: 2129916
uaucucacuuuccagauac

SEQ ID NO: 2129918 - RNA, 19 nt, Artificial Sequence
  Description of Artificial Sequence: Synthetic oligonucleotide
  Sense strand starting at position 3076 of SEQ ID NO: 1882550
ugaauuuacuuugaaguga

SEQ ID NO: 2129919 - RNA, 19 nt, Artificial Sequence
  Description of Artificial Sequence: Synthetic oligonucleotide
  Antisense strand to SEQ ID NO: 2129918
ucacuucaaaguaaauuca

SEQ ID NO: 2129920 - RNA, 19 nt, Artificial Sequence
  Description of Artificial Sequence: Synthetic oligonucleotide
  Sense strand starting at position 3081 of SEQ ID NO: 1882550
uuacuuugaagugaguuga

SEQ ID NO: 2129921 - RNA, 19 nt, Artificial Sequence
  Description of Artificial Sequence: Synthetic oligonucleotide
  Antisense strand to SEQ ID NO: 2129920
ucaacucacuucaaaguaa

SEQ ID NO: 2129922 - RNA, 19 nt, Artificial Sequence
  Description of Artificial Sequence: Synthetic oligonucleotide
  Sense strand starting at position 3085 of SEQ ID NO: 1882550
uuugaagugaguugauucu

SEQ ID NO: 2129923 - RNA, 19 nt, Artificial Sequence
  Description of Artificial Sequence: Synthetic oligonucleotide
  Antisense strand to SEQ ID NO: 2129922
agaaucaacucacuucaaa

SEQ ID NO: 2129924 - RNA, 19 nt, Artificial Sequence
  Description of Artificial Sequence: Synthetic oligonucleotide
  Sense strand starting at position 3091 of SEQ ID NO: 1882550
gugaguugauucuugacag

SEQ ID NO: 2129925 - RNA, 19 nt, Artificial Sequence
  Description of Artificial Sequence: Synthetic oligonucleotide
  Antisense strand to SEQ ID NO: 2129924
cugucaagaaucaacucac

SEQ ID NO: 2129926 - RNA, 19 nt, Artificial Sequence
  Description of Artificial Sequence: Synthetic oligonucleotide
  Sense strand starting at position 3115 of SEQ ID NO: 1882550
ugaauaugagugugaaagg

SEQ ID NO: 2129927 - RNA, 19 nt, Artificial Sequence
  Description of Artificial Sequence: Synthetic oligonucleotide
  Antisense strand to SEQ ID NO: 2129926
ccuuucacacucauauuca

SEQ ID NO: 2129928 - RNA, 19 nt, Artificial Sequence
  Description of Artificial Sequence: Synthetic oligonucleotide
  Sense strand starting at position 3625 of SEQ ID NO: 1882550
ggccaagaucuuuacucua

SEQ ID NO: 2129929 - RNA, 19 nt, Artificial Sequence
  Description of Artificial Sequence: Synthetic oligonucleotide
  Antisense strand to SEQ ID NO: 2129928
uagaguaaagaucuuggcc

SEQ ID NO: 2129930 - RNA, 19 nt, Artificial Sequence
  Description of Artificial Sequence: Synthetic oligonucleotide
  Sense strand starting at position 3630 of SEQ ID NO: 1882550
agaucuuuacucuauguua

SEQ ID NO: 2129931 - RNA, 19 nt, Artificial Sequence
  Description of Artificial Sequence: Synthetic oligonucleotide
  Antisense strand to SEQ ID NO: 2129930
uaacauagaguaaagaucu

SEQ ID NO: 2129932 - RNA, 19 nt, Artificial Sequence
  Description of Artificial Sequence: Synthetic oligonucleotide
  Sense strand starting at position 3821 of SEQ ID NO: 1882550
gugaauggcugaucaagga

SEQ ID NO: 2129933 - RNA, 19 nt, Artificial Sequence
  Description of Artificial Sequence: Synthetic oligonucleotide
  Antisense strand to SEQ ID NO: 2129932
uccuugaucagccauucac

SEQ ID NO: 2129934 - RNA, 19 nt, Artificial Sequence
  Description of Artificial Sequence: Synthetic oligonucleotide
  Sense strand starting at position 3870 of SEQ ID NO: 1882550
cuaccuauggccugaaagu

SEQ ID NO: 2129935 - RNA, 19 nt, Artificial Sequence
  Description of Artificial Sequence: Synthetic oligonucleotide
  Antisense strand to SEQ ID NO: 2129934
acuuucaggccauagguag

SEQ ID NO: 2129936 - RNA, 19 nt, Artificial Sequence
  Description of Artificial Sequence: Synthetic oligonucleotide
  Sense strand starting at position 3907 of SEQ ID NO: 1882550
accaauguuuggucacaua

SEQ ID NO: 2129937 - RNA, 19 nt, Artificial Sequence
  Description of Artificial Sequence: Synthetic oligonucleotide
  Antisense strand to SEQ ID NO: 2129936
uaugugaccaaacauuggu

SEQ ID NO: 2129938 - RNA, 19 nt, Artificial Sequence
  Description of Artificial Sequence: Synthetic oligonucleotide
  Sense strand starting at position 3918 of SEQ ID NO: 1882550
gucacauacugauugaugu

SEQ ID NO: 2129939 - RNA, 19 nt, Artificial Sequence
  Description of Artificial Sequence: Synthetic oligonucleotide
  Antisense strand to SEQ ID NO: 2129938
acaucaaucaguaugugac

SEQ ID NO: 2129940 - RNA, 19 nt, Artificial Sequence
  Description of Artificial Sequence: Synthetic oligonucleotide
  Sense strand starting at position 1 of SEQ ID NO: 1882551
auggaaauguucuuuggca

SEQ ID NO: 2129941 - RNA, 19 nt, Artificial Sequence
  Description of Artificial Sequence: Synthetic oligonucleotide
  Antisense strand to SEQ ID NO: 2129940
ugccaaagaacauuuccau

SEQ ID NO: 2129942 - RNA, 19 nt, Artificial Sequence
  Description of Artificial Sequence: Synthetic oligonucleotide
  Sense strand starting at position 2 of SEQ ID NO: 1882551
uggaaauguucuuuggcau

SEQ ID NO: 2129943 - RNA, 19 nt, Artificial Sequence
  Description of Artificial Sequence: Synthetic oligonucleotide
  Antisense strand to SEQ ID NO: 2129942
augccaaagaacauuucca

SEQ ID NO: 2129944 - RNA, 19 nt, Artificial Sequence
  Description of Artificial Sequence: Synthetic oligonucleotide
  Sense strand starting at position 52 of SEQ ID NO: 1882551
accuuuguaucauuugcau

SEQ ID NO: 2129945 - RNA, 19 nt, Artificial Sequence
  Description of Artificial Sequence: Synthetic oligonucleotide
  Antisense strand to SEQ ID NO: 2129944
augcaaaugauacaaaggu

SEQ ID NO: 2129946 - RNA, 19 nt, Artificial Sequence
  Description of Artificial Sequence: Synthetic oligonucleotide
  Sense strand starting at position 153 of SEQ ID NO: 1882551
cuauuacaugaauguguaa

SEQ ID NO: 2129947 - RNA, 19 nt, Artificial Sequence
  Description of Artificial Sequence: Synthetic oligonucleotide
  Antisense strand to SEQ ID NO: 2129946
uuacacauucauguaauag

SEQ ID NO: 2129948 - RNA, 19 nt, Artificial Sequence
  Description of Artificial Sequence: Synthetic oligonucleotide
  Sense strand starting at position 257 of SEQ ID NO: 1882551
cagugucugggugaguaau

SEQ ID NO: 2129949 - RNA, 19 nt, Artificial Sequence
  Description of Artificial Sequence: Synthetic oligonucleotide
  Antisense strand to SEQ ID NO: 2129948
auuacucacccagacacug

SEQ ID NO: 2129950 - RNA, 19 nt, Artificial Sequence
  Description of Artificial Sequence: Synthetic oligonucleotide
  Sense strand starting at position 356 of SEQ ID NO: 1882551
ggauaaauaugguuaugcu

SEQ ID NO: 2129951 - RNA, 19 nt, Artificial Sequence
  Description of Artificial Sequence: Synthetic oligonucleotide
  Antisense strand to SEQ ID NO: 2129950
agcauaaccauauuuaucc

SEQ ID NO: 2129952 - RNA, 19 nt, Artificial Sequence
  Description of Artificial Sequence: Synthetic oligonucleotide
  Sense strand starting at position 357 of SEQ ID NO: 1882551
gauaaauaugguuaugcua

SEQ ID NO: 2129953 - RNA, 19 nt, Artificial Sequence
  Description of Artificial Sequence: Synthetic oligonucleotide
  Antisense strand to SEQ ID NO: 2129952
uagcauaaccauauuuauc

SEQ ID NO: 2129954 - RNA, 19 nt, Artificial Sequence
  Description of Artificial Sequence: Synthetic oligonucleotide
  Sense strand starting at position 410 of SEQ ID NO: 1882551
uuuauuaauuaggucagga

SEQ ID NO: 2129955 - RNA, 19 nt, Artificial Sequence
  Description of Artificial Sequence: Synthetic oligonucleotide
  Antisense strand to SEQ ID NO: 2129954
uccugaccuaauuaauaaa

SEQ ID NO: 2129956 - RNA, 19 nt, Artificial Sequence
  Description of Artificial Sequence: Synthetic oligonucleotide
  Sense strand starting at position 563 of SEQ ID NO: 1882551
ggaggaguagaucgaaagu

SEQ ID NO: 2129957 - RNA, 19 nt, Artificial Sequence
  Description of Artificial Sequence: Synthetic oligonucleotide
  Antisense strand to SEQ ID NO: 2129956
acuuucgaucuacuccucc

SEQ ID NO: 2129958 - RNA, 19 nt, Artificial Sequence
  Description of Artificial Sequence: Synthetic oligonucleotide
  Sense strand starting at position 598 of SEQ ID NO: 1882551
auggguuucgaagauucuu

SEQ ID NO: 2129959 - RNA, 19 nt, Artificial Sequence
  Description of Artificial Sequence: Synthetic oligonucleotide
  Antisense strand to SEQ ID NO: 2129958
aagaaucuucgaaacccau

SEQ ID NO: 2129960 - RNA, 19 nt, Artificial Sequence
  Description of Artificial Sequence: Synthetic oligonucleotide
  Sense strand starting at position 604 of SEQ ID NO: 1882551
uucgaagauucuuccuacu

SEQ ID NO: 2129961 - RNA, 19 nt, Artificial Sequence
  Description of Artificial Sequence: Synthetic oligonucleotide
  Antisense strand to SEQ ID NO: 2129960
aguaggaagaaucuucgaa

SEQ ID NO: 2129962 - RNA, 19 nt, Artificial Sequence
  Description of Artificial Sequence: Synthetic oligonucleotide
  Sense strand starting at position 688 of SEQ ID NO: 1882551
cucugaacucgacauccua

SEQ ID NO: 2129963 - RNA, 19 nt, Artificial Sequence
  Description of Artificial Sequence: Synthetic oligonucleotide
  Antisense strand to SEQ ID NO: 2129962
uaggaugucgaguucagag

SEQ ID NO: 2129964 - RNA, 19 nt, Artificial Sequence
  Description of Artificial Sequence: Synthetic oligonucleotide
  Sense strand starting at position 719 of SEQ ID NO: 1882551
uuacuaauuccagagcuga

SEQ ID NO: 2129965 - RNA, 19 nt, Artificial Sequence
  Description of Artificial Sequence: Synthetic oligonucleotide
  Antisense strand to SEQ ID NO: 2129964
ucagcucuggaauuaguaa

SEQ ID NO: 2129966 - RNA, 19 nt, Artificial Sequence
  Description of Artificial Sequence: Synthetic oligonucleotide
  Sense strand starting at position 2532 of SEQ ID NO: 1882551
acgucucaguuguuauuua

SEQ ID NO: 2129967 - RNA, 19 nt, Artificial Sequence
  Description of Artificial Sequence: Synthetic oligonucleotide
  Antisense strand to SEQ ID NO: 2129966
uaaauaacaacugagacgu

SEQ ID NO: 2129968 - RNA, 19 nt, Artificial Sequence
  Description of Artificial Sequence: Synthetic oligonucleotide
  Sense strand starting at position 2554 of SEQ ID NO: 1882551
guauuaugaccucacuggu

SEQ ID NO: 2129969 - RNA, 19 nt, Artificial Sequence
  Description of Artificial Sequence: Synthetic oligonucleotide
  Antisense strand to SEQ ID NO: 2129968
accagugaggucauaauac

SEQ ID NO: 2129970 - RNA, 19 nt, Artificial Sequence
  Description of Artificial Sequence: Synthetic oligonucleotide
  Sense strand starting at position 2557 of SEQ ID NO: 1882551
uuaugaccucacugguuua

SEQ ID NO: 2129971 - RNA, 19 nt, Artificial Sequence
  Description of Artificial Sequence: Synthetic oligonucleotide
  Antisense strand to SEQ ID NO: 2129970
uaaaccagugaggucauaa

SEQ ID NO: 2129972 - RNA, 19 nt, Artificial Sequence
  Description of Artificial Sequence: Synthetic oligonucleotide
  Sense strand starting at position 2560 of SEQ ID NO: 1882551
ugaccucacugguuuacuu

SEQ ID NO: 2129973 - RNA, 19 nt, Artificial Sequence
  Description of Artificial Sequence: Synthetic oligonucleotide
  Antisense strand to SEQ ID NO: 2129972
aaguaaaccagugagguca

SEQ ID NO: 2129974 - RNA, 19 nt, Artificial Sequence
  Description of Artificial Sequence: Synthetic oligonucleotide
  Sense strand starting at position 2569 of SEQ ID NO: 1882551
ugguuuacuuaacuggaau

SEQ ID NO: 2129975 - RNA, 19 nt, Artificial Sequence
  Description of Artificial Sequence: Synthetic oligonucleotide
  Antisense strand to SEQ ID NO: 2129974
auuccaguuaaguaaacca

SEQ ID NO: 2129976 - RNA, 19 nt, Artificial Sequence
  Description of Artificial Sequence: Synthetic oligonucleotide
  Sense strand starting at position 2848 of SEQ ID NO: 1882551
auuuguauauuccaggaaa

SEQ ID NO: 2129977 - RNA, 19 nt, Artificial Sequence
  Description of Artificial Sequence: Synthetic oligonucleotide
  Antisense strand to SEQ ID NO: 2129976
uuuccuggaauauacaaau

SEQ ID NO: 2129978 - RNA, 19 nt, Artificial Sequence
  Description of Artificial Sequence: Synthetic oligonucleotide
  Sense strand starting at position 3025 of SEQ ID NO: 1882551
cuaagagguuucucagaac

SEQ ID NO: 2129979 - RNA, 19 nt, Artificial Sequence
  Description of Artificial Sequence: Synthetic oligonucleotide
  Antisense strand to SEQ ID NO: 2129978
guucugagaaaccucuuag

SEQ ID NO: 2129980 - RNA, 19 nt, Artificial Sequence
  Description of Artificial Sequence: Synthetic oligonucleotide
  Sense strand starting at position 3039 of SEQ ID NO: 1882551
agaacaagcacuggugaaa

SEQ ID NO: 2129981 - RNA, 19 nt, Artificial Sequence
  Description of Artificial Sequence: Synthetic oligonucleotide
  Antisense strand to SEQ ID NO: 2129980
uuucaccagugcuuguucu

SEQ ID NO: 2129982 - RNA, 19 nt, Artificial Sequence
  Description of Artificial Sequence: Synthetic oligonucleotide
  Sense strand starting at position 3051 of SEQ ID NO: 1882551
ggugaaacuuuccuccucu

SEQ ID NO: 2129983 - RNA, 19 nt, Artificial Sequence
  Description of Artificial Sequence: Synthetic oligonucleotide
  Antisense strand to SEQ ID NO: 2129982
agaggaggaaaguuucacc

SEQ ID NO: 2129984 - RNA, 19 nt, Artificial Sequence
  Description of Artificial Sequence: Synthetic oligonucleotide
  Sense strand starting at position 3142 of SEQ ID NO: 1882551
cggugaaugcguucuucca

SEQ ID NO: 2129985 - RNA, 19 nt, Artificial Sequence
  Description of Artificial Sequence: Synthetic oligonucleotide
  Antisense strand to SEQ ID NO: 2129984
uggaagaacgcauucaccg

SEQ ID NO: 2129986 - RNA, 19 nt, Artificial Sequence
  Description of Artificial Sequence: Synthetic oligonucleotide
  Sense strand starting at position 3149 of SEQ ID NO: 1882551
ugcguucuuccagcaguuu

SEQ ID NO: 2129987 - RNA, 19 nt, Artificial Sequence
  Description of Artificial Sequence: Synthetic oligonucleotide
  Antisense strand to SEQ ID NO: 2129986
aaacugcuggaagaacgca

SEQ ID NO: 2129988 - RNA, 19 nt, Artificial Sequence
  Description of Artificial Sequence: Synthetic oligonucleotide
  Sense strand starting at position 3389 of SEQ ID NO: 1882551
uuguuagacugucuggaca

SEQ ID NO: 2129989 - RNA, 19 nt, Artificial Sequence
  Description of Artificial Sequence: Synthetic oligonucleotide
  Antisense strand to SEQ ID NO: 2129988
uguccagacagucuaacaa

SEQ ID NO: 2129990 - RNA, 19 nt, Artificial Sequence
  Description of Artificial Sequence: Synthetic oligonucleotide
  Sense strand starting at position 3397 of SEQ ID NO: 1882551
cugucuggacaaugucuua

SEQ ID NO: 2129991 - RNA, 19 nt, Artificial Sequence
  Description of Artificial Sequence: Synthetic oligonucleotide
  Antisense strand to SEQ ID NO: 2129990
uaagacauuguccagacag

SEQ ID NO: 2129992 - RNA, 19 nt, Artificial Sequence
  Description of Artificial Sequence: Synthetic oligonucleotide
  Sense strand starting at position 3471 of SEQ ID NO: 1882551
auaacauuggcugggacaa

SEQ ID NO: 2129993 - RNA, 19 nt, Artificial Sequence
  Description of Artificial Sequence: Synthetic oligonucleotide
  Antisense strand to SEQ ID NO: 2129992
uugucccagccaauguuau

SEQ ID NO: 2129994 - RNA, 19 nt, Artificial Sequence
  Description of Artificial Sequence: Synthetic oligonucleotide
  Sense strand starting at position 3472 of SEQ ID NO: 1882551
uaacauuggcugggacaaa

SEQ ID NO: 2129995 - RNA, 19 nt, Artificial Sequence
  Description of Artificial Sequence: Synthetic oligonucleotide
  Antisense strand to SEQ ID NO: 2129994
uuugucccagccaauguua

SEQ ID NO: 2129996 - RNA, 19 nt, Artificial Sequence
  Description of Artificial Sequence: Synthetic oligonucleotide
  Sense strand starting at position 3510 of SEQ ID NO: 1882551
augugauuccucuauguuu

SEQ ID NO: 2129997 - RNA, 19 nt, Artificial Sequence
  Description of Artificial Sequence: Synthetic oligonucleotide
  Antisense strand to SEQ ID NO: 2129996
aaacauagaggaaucacau

SEQ ID NO: 2129998 - RNA, 19 nt, Artificial Sequence
  Description of Artificial Sequence: Synthetic oligonucleotide
  Sense strand starting at position 3537 of SEQ ID NO: 1882551
acucaugcuugggucuaga

SEQ ID NO: 2129999 - RNA, 19 nt, Artificial Sequence
  Description of Artificial Sequence: Synthetic oligonucleotide
  Antisense strand to SEQ ID NO: 2129998
ucuagacccaagcaugagu

SEQ ID NO: 2130000 - RNA, 19 nt, Artificial Sequence
  Description of Artificial Sequence: Synthetic oligonucleotide
  Sense strand starting at position 3545 of SEQ ID NO: 1882551
uugggucuagacugaaagu

SEQ ID NO: 2130001 - RNA, 19 nt, Artificial Sequence
  Description of Artificial Sequence: Synthetic oligonucleotide
  Antisense strand to SEQ ID NO: 2130000
acuuucagucuagacccaa

SEQ ID NO: 2130002 - RNA, 19 nt, Artificial Sequence
  Description of Artificial Sequence: Synthetic oligonucleotide
  Sense strand starting at position 3564 of SEQ ID NO: 1882551
guguacagucccuaacuaa

SEQ ID NO: 2130003 - RNA, 19 nt, Artificial Sequence
  Description of Artificial Sequence: Synthetic oligonucleotide
  Antisense strand to SEQ ID NO: 2130002
uuaguuagggacuguacac

SEQ ID NO: 2130004 - RNA, 19 nt, Artificial Sequence
  Description of Artificial Sequence: Synthetic oligonucleotide
  Sense strand starting at position 3605 of SEQ ID NO: 1882551
cgguauguuacauaaacag

SEQ ID NO: 2130005 - RNA, 19 nt, Artificial Sequence
  Description of Artificial Sequence: Synthetic oligonucleotide
  Antisense strand to SEQ ID NO: 2130004
cuguuuauguaacauaccg

SEQ ID NO: 2130006 - RNA, 19 nt, Artificial Sequence
  Description of Artificial Sequence: Synthetic oligonucleotide
  Sense strand starting at position 3683 of SEQ ID NO: 1882551
augcuuuaucuacagagau

SEQ ID NO: 2130007 - RNA, 19 nt, Artificial Sequence
  Description of Artificial Sequence: Synthetic oligonucleotide
  Antisense strand to SEQ ID NO: 2130006
aucucuguagauaaagcau

SEQ ID NO: 2130008 - RNA, 19 nt, Artificial Sequence
  Description of Artificial Sequence: Synthetic oligonucleotide
  Sense strand starting at position 3820 of SEQ ID NO: 1882551
cagggaagucacugugaga

SEQ ID NO: 2130009 - RNA, 19 nt, Artificial Sequence
  Description of Artificial Sequence: Synthetic oligonucleotide
  Antisense strand to SEQ ID NO: 2130008
ucucacagugacuucccug

SEQ ID NO: 2130010 - RNA, 19 nt, Artificial Sequence
  Description of Artificial Sequence: Synthetic oligonucleotide
  Sense strand starting at position 3835 of SEQ ID NO: 1882551
gagagcagauguguacaaa

SEQ ID NO: 2130011 - RNA, 19 nt, Artificial Sequence
  Description of Artificial Sequence: Synthetic oligonucleotide
  Antisense strand to SEQ ID NO: 2130010
uuuguacacaucugcucuc

SEQ ID NO: 2130012 - RNA, 19 nt, Artificial Sequence
  Description of Artificial Sequence: Synthetic oligonucleotide
  Sense strand starting at position 3893 of SEQ ID NO: 1882551
guaacaauuccagauagca

SEQ ID NO: 2130013 - RNA, 19 nt, Artificial Sequence
  Description of Artificial Sequence: Synthetic oligonucleotide
  Antisense strand to SEQ ID NO: 2130012
ugcuaucuggaauuguuac

SEQ ID NO: 2130014 - RNA, 19 nt, Artificial Sequence
  Description of Artificial Sequence: Synthetic oligonucleotide
  Sense strand starting at position 3916 of SEQ ID NO: 1882551
cuguuaaaugcuggauaca

SEQ ID NO: 2130015 - RNA, 19 nt, Artificial Sequence
  Description of Artificial Sequence: Synthetic oligonucleotide
  Antisense strand to SEQ ID NO: 2130014
uguauccagcauuuaacag

SEQ ID NO: 2130016 - RNA, 19 nt, Artificial Sequence
  Description of Artificial Sequence: Synthetic oligonucleotide
  Sense strand starting at position 3917 of SEQ ID NO: 1882551
uguuaaaugcuggauacac

SEQ ID NO: 2130017 - RNA, 19 nt, Artificial Sequence
  Description of Artificial Sequence: Synthetic oligonucleotide
  Antisense strand to SEQ ID NO: 2130016
guguauccagcauuuaaca

SEQ ID NO: 2130018 - RNA, 19 nt, Artificial Sequence
  Description of Artificial Sequence: Synthetic oligonucleotide
  Sense strand starting at position 3973 of SEQ ID NO: 1882551
ggguacuuuaccuagcagu

SEQ ID NO: 2130019 - RNA, 19 nt, Artificial Sequence
  Description of Artificial Sequence: Synthetic oligonucleotide
  Antisense strand to SEQ ID NO: 2130018
acugcuagguaaaguaccc

SEQ ID NO: 2130020 - RNA, 19 nt, Artificial Sequence
  Description of Artificial Sequence: Synthetic oligonucleotide
  Sense strand starting at position 16 of SEQ ID NO: 1882552
uguguaugcagggaucaga

SEQ ID NO: 2130021 - RNA, 19 nt, Artificial Sequence
  Description of Artificial Sequence: Synthetic oligonucleotide
  Antisense strand to SEQ ID NO: 2130020
ucugaucccugcauacaca

SEQ ID NO: 2130022 - RNA, 19 nt, Artificial Sequence
  Description of Artificial Sequence: Synthetic oligonucleotide
  Sense strand starting at position 27 of SEQ ID NO: 1882552
ggaucagauuaaguaaugu

SEQ ID NO: 2130023 - RNA, 19 nt, Artificial Sequence
  Description of Artificial Sequence: Synthetic oligonucleotide
  Antisense strand to SEQ ID NO: 2130022
acauuacuuaaucugaucc

SEQ ID NO: 2130024 - RNA, 19 nt, Artificial Sequence
  Description of Artificial Sequence: Synthetic oligonucleotide
  Sense strand starting at position 177 of SEQ ID NO: 1882552
agggaaagaucagugcuca

SEQ ID NO: 2130025 - RNA, 19 nt, Artificial Sequence
  Description of Artificial Sequence: Synthetic oligonucleotide
  Antisense strand to SEQ ID NO: 2130024
ugagcacugaucuuucccu

SEQ ID NO: 2130026 - RNA, 19 nt, Artificial Sequence
  Description of Artificial Sequence: Synthetic oligonucleotide
  Sense strand starting at position 178 of SEQ ID NO: 1882552
gggaaagaucagugcucaa

SEQ ID NO: 2130027 - RNA, 19 nt, Artificial Sequence
  Description of Artificial Sequence: Synthetic oligonucleotide
  Antisense strand to SEQ ID NO: 2130026
uugagcacugaucuuuccc

SEQ ID NO: 2130028 - RNA, 19 nt, Artificial Sequence
  Description of Artificial Sequence: Synthetic oligonucleotide
  Sense strand starting at position 182 of SEQ ID NO: 1882552
aagaucagugcucaagcua

SEQ ID NO: 2130029 - RNA, 19 nt, Artificial Sequence
  Description of Artificial Sequence: Synthetic oligonucleotide
  Antisense strand to SEQ ID NO: 2130028
uagcuugagcacugaucuu

SEQ ID NO: 2130030 - RNA, 19 nt, Artificial Sequence
  Description of Artificial Sequence: Synthetic oligonucleotide
  Sense strand starting at position 229 of SEQ ID NO: 1882552
aggcacuaauaccuggaua

SEQ ID NO: 2130031 - RNA, 19 nt, Artificial Sequence
  Description of Artificial Sequence: Synthetic oligonucleotide
  Antisense strand to SEQ ID NO: 2130030
uauccagguauuagugccu

SEQ ID NO: 2130032 - RNA, 19 nt, Artificial Sequence
  Description of Artificial Sequence: Synthetic oligonucleotide
  Sense strand starting at position 230 of SEQ ID NO: 1882552
ggcacuaauaccuggauag

SEQ ID NO: 2130033 - RNA, 19 nt, Artificial Sequence
  Description of Artificial Sequence: Synthetic oligonucleotide
  Antisense strand to SEQ ID NO: 2130032
cuauccagguauuagugcc

SEQ ID NO: 2130034 - RNA, 19 nt, Artificial Sequence
  Description of Artificial Sequence: Synthetic oligonucleotide
  Sense strand starting at position 231 of SEQ ID NO: 1882552
gcacuaauaccuggauaga

SEQ ID NO: 2130035 - RNA, 19 nt, Artificial Sequence
  Description of Artificial Sequence: Synthetic oligonucleotide
  Antisense strand to SEQ ID NO: 2130034
ucuauccagguauuagugc

SEQ ID NO: 2130036 - RNA, 19 nt, Artificial Sequence
  Description of Artificial Sequence: Synthetic oligonucleotide
  Sense strand starting at position 277 of SEQ ID NO: 1882552
cuugguguuccucaaacca

SEQ ID NO: 2130037 - RNA, 19 nt, Artificial Sequence
  Description of Artificial Sequence: Synthetic oligonucleotide
  Antisense strand to SEQ ID NO: 2130036
ugguuugaggaacaccaag

SEQ ID NO: 2130038 - RNA, 19 nt, Artificial Sequence
  Description of Artificial Sequence: Synthetic oligonucleotide
  Sense strand starting at position 334 of SEQ ID NO: 1882552
gcaauuaaauuugugccua

SEQ ID NO: 2130039 - RNA, 19 nt, Artificial Sequence
  Description of Artificial Sequence: Synthetic oligonucleotide
  Antisense strand to SEQ ID NO: 2130038
uaggcacaaauuuaauugc

SEQ ID NO: 2130040 - RNA, 19 nt, Artificial Sequence
  Description of Artificial Sequence: Synthetic oligonucleotide
  Sense strand starting at position 379 of SEQ ID NO: 1882552
gaacuacugcucugggaag

SEQ ID NO: 2130041 - RNA, 19 nt, Artificial Sequence
  Description of Artificial Sequence: Synthetic oligonucleotide
  Antisense strand to SEQ ID NO: 2130040
cuucccagagcaguaguuc

SEQ ID NO: 2130042 - RNA, 19 nt, Artificial Sequence
  Description of Artificial Sequence: Synthetic oligonucleotide
  Sense strand starting at position 381 of SEQ ID NO: 1882552
acuacugcucugggaagga

SEQ ID NO: 2130043 - RNA, 19 nt, Artificial Sequence
  Description of Artificial Sequence: Synthetic oligonucleotide
  Antisense strand to SEQ ID NO: 2130042
uccuucccagagcaguagu

SEQ ID NO: 2130044 - RNA, 19 nt, Artificial Sequence
  Description of Artificial Sequence: Synthetic oligonucleotide
  Sense strand starting at position 437 of SEQ ID NO: 1882552
ccauauggauguucuuuau

SEQ ID NO: 2130045 - RNA, 19 nt, Artificial Sequence
  Description of Artificial Sequence: Synthetic oligonucleotide
  Antisense strand to SEQ ID NO: 2130044
auaaagaacauccauaugg

SEQ ID NO: 2130046 - RNA, 19 nt, Artificial Sequence
  Description of Artificial Sequence: Synthetic oligonucleotide
  Sense strand starting at position 441 of SEQ ID NO: 1882552
auggauguucuuuauacga

SEQ ID NO: 2130047 - RNA, 19 nt, Artificial Sequence
  Description of Artificial Sequence: Synthetic oligonucleotide
  Antisense strand to SEQ ID NO: 2130046
ucguauaaagaacauccau

SEQ ID NO: 2130048 - RNA, 19 nt, Artificial Sequence
  Description of Artificial Sequence: Synthetic oligonucleotide
  Sense strand starting at position 503 of SEQ ID NO: 1882552
aaacucuucgagcgcagaa

SEQ ID NO: 2130049 - RNA, 19 nt, Artificial Sequence
  Description of Artificial Sequence: Synthetic oligonucleotide
  Antisense strand to SEQ ID NO: 2130048
uucugcgcucgaagaguuu

SEQ ID NO: 2130050 - RNA, 19 nt, Artificial Sequence
  Description of Artificial Sequence: Synthetic oligonucleotide
  Sense strand starting at position 505 of SEQ ID NO: 1882552
acucuucgagcgcagaaau

SEQ ID NO: 2130051 - RNA, 19 nt, Artificial Sequence
  Description of Artificial Sequence: Synthetic oligonucleotide
  Antisense strand to SEQ ID NO: 2130050
auuucugcgcucgaagagu

SEQ ID NO: 2130052 - RNA, 19 nt, Artificial Sequence
  Description of Artificial Sequence: Synthetic oligonucleotide
  Sense strand starting at position 591 of SEQ ID NO: 1882552
ggcaguacggcuuauagga

SEQ ID NO: 2130053 - RNA, 19 nt, Artificial Sequence
  Description of Artificial Sequence: Synthetic oligonucleotide
  Antisense strand to SEQ ID NO: 2130052
uccuauaagccguacugcc

SEQ ID NO: 2130054 - RNA, 19 nt, Artificial Sequence
  Description of Artificial Sequence: Synthetic oligonucleotide
  Sense strand starting at position 719 of SEQ ID NO: 1882552
cccaaaugguucccaguca

SEQ ID NO: 2130055 - RNA, 19 nt, Artificial Sequence
  Description of Artificial Sequence: Synthetic oligonucleotide
  Antisense strand to SEQ ID NO: 2130054
ugacugggaaccauuuggg

SEQ ID NO: 2130056 - RNA, 19 nt, Artificial Sequence
  Description of Artificial Sequence: Synthetic oligonucleotide
  Sense strand starting at position 1020 of SEQ ID NO: 1882552
gcccauguuccucagaguu

SEQ ID NO: 2130057 - RNA, 19 nt, Artificial Sequence
  Description of Artificial Sequence: Synthetic oligonucleotide
  Antisense strand to SEQ ID NO: 2130056
aacucugaggaacaugggc

SEQ ID NO: 2130058 - RNA, 19 nt, Artificial Sequence
  Description of Artificial Sequence: Synthetic oligonucleotide
  Sense strand starting at position 1047 of SEQ ID NO: 1882552
ggaagacauuucuacguga

SEQ ID NO: 2130059 - RNA, 19 nt, Artificial Sequence
  Description of Artificial Sequence: Synthetic oligonucleotide
  Antisense strand to SEQ ID NO: 2130058
ucacguagaaaugucuucc

SEQ ID NO: 2130060 - RNA, 19 nt, Artificial Sequence
  Description of Artificial Sequence: Synthetic oligonucleotide
  Sense strand starting at position 1062 of SEQ ID NO: 1882552
gugaaaguuugauugcuuu

SEQ ID NO: 2130061 - RNA, 19 nt, Artificial Sequence
  Description of Artificial Sequence: Synthetic oligonucleotide
  Antisense strand to SEQ ID NO: 2130060
aaagcaaucaaacuuucac

SEQ ID NO: 2130062 - RNA, 19 nt, Artificial Sequence
  Description of Artificial Sequence: Synthetic oligonucleotide
  Sense strand starting at position 1065 of SEQ ID NO: 1882552
aaaguuugauugcuuuaag

SEQ ID NO: 2130063 - RNA, 19 nt, Artificial Sequence
  Description of Artificial Sequence: Synthetic oligonucleotide
  Antisense strand to SEQ ID NO: 2130062
cuuaaagcaaucaaacuuu

SEQ ID NO: 2130064 - RNA, 19 nt, Artificial Sequence
  Description of Artificial Sequence: Synthetic oligonucleotide
  Sense strand starting at position 1068 of SEQ ID NO: 1882552
guuugauugcuuuaaggga

SEQ ID NO: 2130065 - RNA, 19 nt, Artificial Sequence
  Description of Artificial Sequence: Synthetic oligonucleotide
  Antisense strand to SEQ ID NO: 2130064
ucccuuaaagcaaucaaac

SEQ ID NO: 2130066 - RNA, 19 nt, Artificial Sequence
  Description of Artificial Sequence: Synthetic oligonucleotide
  Sense strand starting at position 1206 of SEQ ID NO: 1882552
gggcucugugcgcccuaaa

SEQ ID NO: 2130067 - RNA, 19 nt, Artificial Sequence
  Description of Artificial Sequence: Synthetic oligonucleotide
  Antisense strand to SEQ ID NO: 2130066
uuuagggcgcacagagccc

SEQ ID NO: 2130068 - RNA, 19 nt, Artificial Sequence
  Description of Artificial Sequence: Synthetic oligonucleotide
  Sense strand starting at position 2067 of SEQ ID NO: 1882552
gcgcgauucgagaggucuc

SEQ ID NO: 2130069 - RNA, 19 nt, Artificial Sequence
  Description of Artificial Sequence: Synthetic oligonucleotide
  Antisense strand to SEQ ID NO: 2130068
gagaccucucgaaucgcgc

SEQ ID NO: 2130070 - RNA, 19 nt, Artificial Sequence
  Description of Artificial Sequence: Synthetic oligonucleotide
  Sense strand starting at position 2078 of SEQ ID NO: 1882552
gaggucuccucgccucaca

SEQ ID NO: 2130071 - RNA, 19 nt, Artificial Sequence
  Description of Artificial Sequence: Synthetic oligonucleotide
  Antisense strand to SEQ ID NO: 2130070
ugugaggcgaggagaccuc

SEQ ID NO: 2130072 - RNA, 19 nt, Artificial Sequence
  Description of Artificial Sequence: Synthetic oligonucleotide
  Sense strand starting at position 2231 of SEQ ID NO: 1882552
ggauuuaagucugccuagu

SEQ ID NO: 2130073 - RNA, 19 nt, Artificial Sequence
  Description of Artificial Sequence: Synthetic oligonucleotide
  Antisense strand to SEQ ID NO: 2130072
acuaggcagacuuaaaucc

SEQ ID NO: 2130074 - RNA, 19 nt, Artificial Sequence
  Description of Artificial Sequence: Synthetic oligonucleotide
  Sense strand starting at position 2241 of SEQ ID NO: 1882552
cugccuagucuguugcuaa

SEQ ID NO: 2130075 - RNA, 19 nt, Artificial Sequence
  Description of Artificial Sequence: Synthetic oligonucleotide
  Antisense strand to SEQ ID NO: 2130074
uuagcaacagacuaggcag

SEQ ID NO: 2130076 - RNA, 19 nt, Artificial Sequence
  Description of Artificial Sequence: Synthetic oligonucleotide
  Sense strand starting at position 2244 of SEQ ID NO: 1882552
ccuagucuguugcuaaaua

SEQ ID NO: 2130077 - RNA, 19 nt, Artificial Sequence
  Description of Artificial Sequence: Synthetic oligonucleotide
  Antisense strand to SEQ ID NO: 2130076
uauuuagcaacagacuagg

SEQ ID NO: 2130078 - RNA, 19 nt, Artificial Sequence
  Description of Artificial Sequence: Synthetic oligonucleotide
  Sense strand starting at position 2252 of SEQ ID NO: 1882552
guugcuaaauagucucuau

SEQ ID NO: 2130079 - RNA, 19 nt, Artificial Sequence
  Description of Artificial Sequence: Synthetic oligonucleotide
  Antisense strand to SEQ ID NO: 2130078
auagagacuauuuagcaac

SEQ ID NO: 2130080 - RNA, 19 nt, Artificial Sequence
  Description of Artificial Sequence: Synthetic oligonucleotide
  Sense strand starting at position 2281 of SEQ ID NO: 1882552
cuacuuauauuaccgaagu

SEQ ID NO: 2130081 - RNA, 19 nt, Artificial Sequence
  Description of Artificial Sequence: Synthetic oligonucleotide
  Antisense strand to SEQ ID NO: 2130080
acuucgguaauauaaguag

SEQ ID NO: 2130082 - RNA, 19 nt, Artificial Sequence
  Description of Artificial Sequence: Synthetic oligonucleotide
  Sense strand starting at position 2368 of SEQ ID NO: 1882552
gcggguauugaaugcagau

SEQ ID NO: 2130083 - RNA, 19 nt, Artificial Sequence
  Description of Artificial Sequence: Synthetic oligonucleotide
  Antisense strand to SEQ ID NO: 2130082
aucugcauucaauacccgc

SEQ ID NO: 2130084 - RNA, 19 nt, Artificial Sequence
  Description of Artificial Sequence: Synthetic oligonucleotide
  Sense strand starting at position 2411 of SEQ ID NO: 1882552
cgguaauagaaauguucua

SEQ ID NO: 2130085 - RNA, 19 nt, Artificial Sequence
  Description of Artificial Sequence: Synthetic oligonucleotide
  Antisense strand to SEQ ID NO: 2130084
uagaacauuucuauuaccg

SEQ ID NO: 2130086 - RNA, 19 nt, Artificial Sequence
  Description of Artificial Sequence: Synthetic oligonucleotide
  Sense strand starting at position 2433 of SEQ ID NO: 1882552
guggauuguggugacaauu

SEQ ID NO: 2130087 - RNA, 19 nt, Artificial Sequence
  Description of Artificial Sequence: Synthetic oligonucleotide
  Antisense strand to SEQ ID NO: 2130086
aauugucaccacaauccac

SEQ ID NO: 2130088 - RNA, 19 nt, Artificial Sequence
  Description of Artificial Sequence: Synthetic oligonucleotide
  Sense strand starting at position 2439 of SEQ ID NO: 1882552
uguggugacaauuguacaa

SEQ ID NO: 2130089 - RNA, 19 nt, Artificial Sequence
  Description of Artificial Sequence: Synthetic oligonucleotide
  Antisense strand to SEQ ID NO: 2130088
uuguacaauugucaccaca

SEQ ID NO: 2130090 - RNA, 19 nt, Artificial Sequence
  Description of Artificial Sequence: Synthetic oligonucleotide
  Sense strand starting at position 2443 of SEQ ID NO: 1882552
gugacaauuguacaacugu

SEQ ID NO: 2130091 - RNA, 19 nt, Artificial Sequence
  Description of Artificial Sequence: Synthetic oligonucleotide
  Antisense strand to SEQ ID NO: 2130090
acaguuguacaauugucac

SEQ ID NO: 2130092 - RNA, 19 nt, Artificial Sequence
  Description of Artificial Sequence: Synthetic oligonucleotide
  Sense strand starting at position 2449 of SEQ ID NO: 1882552
auuguacaacuguauaagu

SEQ ID NO: 2130093 - RNA, 19 nt, Artificial Sequence
  Description of Artificial Sequence: Synthetic oligonucleotide
  Antisense strand to SEQ ID NO: 2130092
acuuauacaguuguacaau

SEQ ID NO: 2130094 - RNA, 19 nt, Artificial Sequence
  Description of Artificial Sequence: Synthetic oligonucleotide
  Sense strand starting at position 2451 of SEQ ID NO: 1882552
uguacaacuguauaaguuu

SEQ ID NO: 2130095 - RNA, 19 nt, Artificial Sequence
  Description of Artificial Sequence: Synthetic oligonucleotide
  Antisense strand to SEQ ID NO: 2130094
aaacuuauacaguuguaca

SEQ ID NO: 2130096 - RNA, 19 nt, Artificial Sequence
  Description of Artificial Sequence: Synthetic oligonucleotide
  Sense strand starting at position 2830 of SEQ ID NO: 1882552
guaaacuuccaguggguga

SEQ ID NO: 2130097 - RNA, 19 nt, Artificial Sequence
  Description of Artificial Sequence: Synthetic oligonucleotide
  Antisense strand to SEQ ID NO: 2130096
ucacccacuggaaguuuac

SEQ ID NO: 2130098 - RNA, 19 nt, Artificial Sequence
  Description of Artificial Sequence: Synthetic oligonucleotide
  Sense strand starting at position 2832 of SEQ ID NO: 1882552
aaacuuccagugggugaau

SEQ ID NO: 2130099 - RNA, 19 nt, Artificial Sequence
  Description of Artificial Sequence: Synthetic oligonucleotide
  Antisense strand to SEQ ID NO: 2130098
auucacccacuggaaguuu

SEQ ID NO: 2130100 - RNA, 19 nt, Artificial Sequence
  Description of Artificial Sequence: Synthetic oligonucleotide
  Sense strand starting at position 178 of SEQ ID NO: 1882553
augagauguaagcaaaguu

SEQ ID NO: 2130101 - RNA, 19 nt, Artificial Sequence
  Description of Artificial Sequence: Synthetic oligonucleotide
  Antisense strand to SEQ ID NO: 2130100
aacuuugcuuacaucucau

SEQ ID NO: 2130102 - RNA, 19 nt, Artificial Sequence
  Description of Artificial Sequence: Synthetic oligonucleotide
  Sense strand starting at position 295 of SEQ ID NO: 1882553
ccacacuaagccugacaga

SEQ ID NO: 2130103 - RNA, 19 nt, Artificial Sequence
  Description of Artificial Sequence: Synthetic oligonucleotide
  Antisense strand to SEQ ID NO: 2130102
ucugucaggcuuagugugg

SEQ ID NO: 2130104 - RNA, 19 nt, Artificial Sequence
  Description of Artificial Sequence: Synthetic oligonucleotide
  Sense strand starting at position 304 of SEQ ID NO: 1882553
gccugacagacguaugaug

SEQ ID NO: 2130105 - RNA, 19 nt, Artificial Sequence
  Description of Artificial Sequence: Synthetic oligonucleotide
  Antisense strand to SEQ ID NO: 2130104
caucauacgucugucaggc

SEQ ID NO: 2130106 - RNA, 19 nt, Artificial Sequence
  Description of Artificial Sequence: Synthetic oligonucleotide
  Sense strand starting at position 483 of SEQ ID NO: 1882553
auacccguaguauaauaau

SEQ ID NO: 2130107 - RNA, 19 nt, Artificial Sequence
  Description of Artificial Sequence: Synthetic oligonucleotide
  Antisense strand to SEQ ID NO: 2130106
auuauuauacuacggguau

SEQ ID NO: 2130108 - RNA, 19 nt, Artificial Sequence
  Description of Artificial Sequence: Synthetic oligonucleotide
  Sense strand starting at position 510 of SEQ ID NO: 1882553
uguugauucgaguauauac

SEQ ID NO: 2130109 - RNA, 19 nt, Artificial Sequence
  Description of Artificial Sequence: Synthetic oligonucleotide
  Antisense strand to SEQ ID NO: 2130108
guauauacucgaaucaaca

SEQ ID NO: 2130110 - RNA, 19 nt, Artificial Sequence
  Description of Artificial Sequence: Synthetic oligonucleotide
  Sense strand starting at position 517 of SEQ ID NO: 1882553
ucgaguauauaccucauaa

SEQ ID NO: 2130111 - RNA, 19 nt, Artificial Sequence
  Description of Artificial Sequence: Synthetic oligonucleotide
  Antisense strand to SEQ ID NO: 2130110
uuaugagguauauacucga

SEQ ID NO: 2130112 - RNA, 19 nt, Artificial Sequence
  Description of Artificial Sequence: Synthetic oligonucleotide
  Sense strand starting at position 581 of SEQ ID NO: 1882553
guccacauuccuuagcaga

SEQ ID NO: 2130113 - RNA, 19 nt, Artificial Sequence
  Description of Artificial Sequence: Synthetic oligonucleotide
  Antisense strand to SEQ ID NO: 2130112
ucugcuaaggaauguggac

SEQ ID NO: 2130114 - RNA, 19 nt, Artificial Sequence
  Description of Artificial Sequence: Synthetic oligonucleotide
  Sense strand starting at position 629 of SEQ ID NO: 1882553
guggguuuaagugaucaac

SEQ ID NO: 2130115 - RNA, 19 nt, Artificial Sequence
  Description of Artificial Sequence: Synthetic oligonucleotide
  Antisense strand to SEQ ID NO: 2130114
guugaucacuuaaacccac

SEQ ID NO: 2130116 - RNA, 19 nt, Artificial Sequence
  Description of Artificial Sequence: Synthetic oligonucleotide
  Sense strand starting at position 631 of SEQ ID NO: 1882553
ggguuuaagugaucaacaa

SEQ ID NO: 2130117 - RNA, 19 nt, Artificial Sequence
  Description of Artificial Sequence: Synthetic oligonucleotide
  Antisense strand to SEQ ID NO: 2130116
uuguugaucacuuaaaccc

SEQ ID NO: 2130118 - RNA, 19 nt, Artificial Sequence
  Description of Artificial Sequence: Synthetic oligonucleotide
  Sense strand starting at position 691 of SEQ ID NO: 1882553
acauguaugguguacuuua

SEQ ID NO: 2130119 - RNA, 19 nt, Artificial Sequence
  Description of Artificial Sequence: Synthetic oligonucleotide
  Antisense strand to SEQ ID NO: 2130118
uaaaguacaccauacaugu

SEQ ID NO: 2130120 - RNA, 19 nt, Artificial Sequence
  Description of Artificial Sequence: Synthetic oligonucleotide
  Sense strand starting at position 957 of SEQ ID NO: 1882553
acaccugggccugggaaau

SEQ ID NO: 2130121 - RNA, 19 nt, Artificial Sequence
  Description of Artificial Sequence: Synthetic oligonucleotide
  Antisense strand to SEQ ID NO: 2130120
auuucccaggcccaggugu

SEQ ID NO: 2130122 - RNA, 19 nt, Artificial Sequence
  Description of Artificial Sequence: Synthetic oligonucleotide
  Sense strand starting at position 1076 of SEQ ID NO: 1882553
gugccuagacaucaaaguu

SEQ ID NO: 2130123 - RNA, 19 nt, Artificial Sequence
  Description of Artificial Sequence: Synthetic oligonucleotide
  Antisense strand to SEQ ID NO: 2130122
aacuuugaugucuaggcac

SEQ ID NO: 2130124 - RNA, 19 nt, Artificial Sequence
  Description of Artificial Sequence: Synthetic oligonucleotide
  Sense strand starting at position 1122 of SEQ ID NO: 1882553
ccaccagacuggucuauca

SEQ ID NO: 2130125 - RNA, 19 nt, Artificial Sequence
  Description of Artificial Sequence: Synthetic oligonucleotide
  Antisense strand to SEQ ID NO: 2130124
ugauagaccagucuggugg

SEQ ID NO: 2130126 - RNA, 19 nt, Artificial Sequence
  Description of Artificial Sequence: Synthetic oligonucleotide
  Sense strand starting at position 1124 of SEQ ID NO: 1882553
accagacuggucuaucauu

SEQ ID NO: 2130127 - RNA, 19 nt, Artificial Sequence
  Description of Artificial Sequence: Synthetic oligonucleotide
  Antisense strand to SEQ ID NO: 2130126
aaugauagaccagucuggu

SEQ ID NO: 2130128 - RNA, 19 nt, Artificial Sequence
  Description of Artificial Sequence: Synthetic oligonucleotide
  Sense strand starting at position 1135 of SEQ ID NO: 1882553
cuaucauugguauauucua

SEQ ID NO: 2130129 - RNA, 19 nt, Artificial Sequence
  Description of Artificial Sequence: Synthetic oligonucleotide
  Antisense strand to SEQ ID NO: 2130128
uagaauauaccaaugauag

SEQ ID NO: 2130130 - RNA, 19 nt, Artificial Sequence
  Description of Artificial Sequence: Synthetic oligonucleotide
  Sense strand starting at position 1143 of SEQ ID NO: 1882553
gguauauucuaccugaaag

SEQ ID NO: 2130131 - RNA, 19 nt, Artificial Sequence
  Description of Artificial Sequence: Synthetic oligonucleotide
  Antisense strand to SEQ ID NO: 2130130
cuuucagguagaauauacc

SEQ ID NO: 2130132 - RNA, 19 nt, Artificial Sequence
  Description of Artificial Sequence: Synthetic oligonucleotide
  Sense strand starting at position 1167 of SEQ ID NO: 1882553
acagguaauaugcagguaa

SEQ ID NO: 2130133 - RNA, 19 nt, Artificial Sequence
  Description of Artificial Sequence: Synthetic oligonucleotide
  Antisense strand to SEQ ID NO: 2130132
uuaccugcauauuaccugu

SEQ ID NO: 2130134 - RNA, 19 nt, Artificial Sequence
  Description of Artificial Sequence: Synthetic oligonucleotide
  Sense strand starting at position 1171 of SEQ ID NO: 1882553
guaauaugcagguaagcaa

SEQ ID NO: 2130135 - RNA, 19 nt, Artificial Sequence
  Description of Artificial Sequence: Synthetic oligonucleotide
  Antisense strand to SEQ ID NO: 2130134
uugcuuaccugcauauuac

SEQ ID NO: 2130136 - RNA, 19 nt, Artificial Sequence
  Description of Artificial Sequence: Synthetic oligonucleotide
  Sense strand starting at position 1317 of SEQ ID NO: 1882553
ggcuuacugcuaugauuuc

SEQ ID NO: 2130137 - RNA, 19 nt, Artificial Sequence
  Description of Artificial Sequence: Synthetic oligonucleotide
  Antisense strand to SEQ ID NO: 2130136
gaaaucauagcaguaagcc

SEQ ID NO: 2130138 - RNA, 19 nt, Artificial Sequence
  Description of Artificial Sequence: Synthetic oligonucleotide
  Sense strand starting at position 1359 of SEQ ID NO: 1882553
gccugcaaauuucuuggau

SEQ ID NO: 2130139 - RNA, 19 nt, Artificial Sequence
  Description of Artificial Sequence: Synthetic oligonucleotide
  Antisense strand to SEQ ID NO: 2130138
auccaagaaauuugcaggc

SEQ ID NO: 2130140 - RNA, 19 nt, Artificial Sequence
  Description of Artificial Sequence: Synthetic oligonucleotide
  Sense strand starting at position 1912 of SEQ ID NO: 1882553
gugaaacauuauguauucu

SEQ ID NO: 2130141 - RNA, 19 nt, Artificial Sequence
  Description of Artificial Sequence: Synthetic oligonucleotide
  Antisense strand to SEQ ID NO: 2130140
agaauacauaauguuucac

SEQ ID NO: 2130142 - RNA, 19 nt, Artificial Sequence
  Description of Artificial Sequence: Synthetic oligonucleotide
  Sense strand starting at position 1924 of SEQ ID NO: 1882553
guauucucaggcuaucaag

SEQ ID NO: 2130143 - RNA, 19 nt, Artificial Sequence
  Description of Artificial Sequence: Synthetic oligonucleotide
  Antisense strand to SEQ ID NO: 2130142
cuugauagccugagaauac

SEQ ID NO: 2130144 - RNA, 19 nt, Artificial Sequence
  Description of Artificial Sequence: Synthetic oligonucleotide
  Sense strand starting at position 1973 of SEQ ID NO: 1882553
auauuauaggacugguuau

SEQ ID NO: 2130145 - RNA, 19 nt, Artificial Sequence
  Description of Artificial Sequence: Synthetic oligonucleotide
  Antisense strand to SEQ ID NO: 2130144
auaaccaguccuauaauau

SEQ ID NO: 2130146 - RNA, 19 nt, Artificial Sequence
  Description of Artificial Sequence: Synthetic oligonucleotide
  Sense strand starting at position 2039 of SEQ ID NO: 1882553
gcuagauaccuacacuaug

SEQ ID NO: 2130147 - RNA, 19 nt, Artificial Sequence
  Description of Artificial Sequence: Synthetic oligonucleotide
  Antisense strand to SEQ ID NO: 2130146
cauaguguagguaucuagc

SEQ ID NO: 2130148 - RNA, 19 nt, Artificial Sequence
  Description of Artificial Sequence: Synthetic oligonucleotide
  Sense strand starting at position 2059 of SEQ ID NO: 1882553
gccagauaaacauggcaga

SEQ ID NO: 2130149 - RNA, 19 nt, Artificial Sequence
  Description of Artificial Sequence: Synthetic oligonucleotide
  Antisense strand to SEQ ID NO: 2130148
ucugccauguuuaucuggc

SEQ ID NO: 2130150 - RNA, 19 nt, Artificial Sequence
  Description of Artificial Sequence: Synthetic oligonucleotide
  Sense strand starting at position 2158 of SEQ ID NO: 1882553
auuguaguuguccaggaag

SEQ ID NO: 2130151 - RNA, 19 nt, Artificial Sequence
  Description of Artificial Sequence: Synthetic oligonucleotide
  Antisense strand to SEQ ID NO: 2130150
cuuccuggacaacuacaau

SEQ ID NO: 2130152 - RNA, 19 nt, Artificial Sequence
  Description of Artificial Sequence: Synthetic oligonucleotide
  Sense strand starting at position 2161 of SEQ ID NO: 1882553
guaguuguccaggaaggau

SEQ ID NO: 2130153 - RNA, 19 nt, Artificial Sequence
  Description of Artificial Sequence: Synthetic oligonucleotide
  Antisense strand to SEQ ID NO: 2130152
auccuuccuggacaacuac

SEQ ID NO: 2130154 - RNA, 19 nt, Artificial Sequence
  Description of Artificial Sequence: Synthetic oligonucleotide
  Sense strand starting at position 2240 of SEQ ID NO: 1882553
gaguaugaaugaguaauac

SEQ ID NO: 2130155 - RNA, 19 nt, Artificial Sequence
  Description of Artificial Sequence: Synthetic oligonucleotide
  Antisense strand to SEQ ID NO: 2130154
guauuacucauucauacuc

SEQ ID NO: 2130156 - RNA, 19 nt, Artificial Sequence
  Description of Artificial Sequence: Synthetic oligonucleotide
  Sense strand starting at position 2248 of SEQ ID NO: 1882553
augaguaauacuuggugac

SEQ ID NO: 2130157 - RNA, 19 nt, Artificial Sequence
  Description of Artificial Sequence: Synthetic oligonucleotide
  Antisense strand to SEQ ID NO: 2130156
gucaccaaguauuacucau

SEQ ID NO: 2130158 - RNA, 19 nt, Artificial Sequence
  Description of Artificial Sequence: Synthetic oligonucleotide
  Sense strand starting at position 2249 of SEQ ID NO: 1882553
ugaguaauacuuggugacu

SEQ ID NO: 2130159 - RNA, 19 nt, Artificial Sequence
  Description of Artificial Sequence: Synthetic oligonucleotide
  Antisense strand to SEQ ID NO: 2130158
agucaccaaguauuacuca

SEQ ID NO: 2130160 - RNA, 19 nt, Artificial Sequence
  Description of Artificial Sequence: Synthetic oligonucleotide
  Sense strand starting at position 2250 of SEQ ID NO: 1882553
gaguaauacuuggugacug

SEQ ID NO: 2130161 - RNA, 19 nt, Artificial Sequence
  Description of Artificial Sequence: Synthetic oligonucleotide
  Antisense strand to SEQ ID NO: 2130160
cagucaccaaguauuacuc

SEQ ID NO: 2130162 - RNA, 19 nt, Artificial Sequence
  Description of Artificial Sequence: Synthetic oligonucleotide
  Sense strand starting at position 2255 of SEQ ID NO: 1882553
auacuuggugacugacagu

SEQ ID NO: 2130163 - RNA, 19 nt, Artificial Sequence
  Description of Artificial Sequence: Synthetic oligonucleotide
  Antisense strand to SEQ ID NO: 2130162
acugucagucaccaaguau

SEQ ID NO: 2130164 - RNA, 19 nt, Artificial Sequence
  Description of Artificial Sequence: Synthetic oligonucleotide
  Sense strand starting at position 2266 of SEQ ID NO: 1882553
cugacaguugagcaaaguu

SEQ ID NO: 2130165 - RNA, 19 nt, Artificial Sequence
  Description of Artificial Sequence: Synthetic oligonucleotide
  Antisense strand to SEQ ID NO: 2130164
aacuuugcucaacugucag

SEQ ID NO: 2130166 - RNA, 19 nt, Artificial Sequence
  Description of Artificial Sequence: Synthetic oligonucleotide
  Sense strand starting at position 2514 of SEQ ID NO: 1882553
gggcaaguagaucaugcaa

SEQ ID NO: 2130167 - RNA, 19 nt, Artificial Sequence
  Description of Artificial Sequence: Synthetic oligonucleotide
  Antisense strand to SEQ ID NO: 2130166
uugcaugaucuacuugccc

SEQ ID NO: 2130168 - RNA, 19 nt, Artificial Sequence
  Description of Artificial Sequence: Synthetic oligonucleotide
  Sense strand starting at position 2847 of SEQ ID NO: 1882553
cugggauaaugucuuuaug

SEQ ID NO: 2130169 - RNA, 19 nt, Artificial Sequence
  Description of Artificial Sequence: Synthetic oligonucleotide
  Antisense strand to SEQ ID NO: 2130168
cauaaagacauuaucccag

SEQ ID NO: 2130170 - RNA, 19 nt, Artificial Sequence
  Description of Artificial Sequence: Synthetic oligonucleotide
  Sense strand starting at position 2849 of SEQ ID NO: 1882553
gggauaaugucuuuauggg

SEQ ID NO: 2130171 - RNA, 19 nt, Artificial Sequence
  Description of Artificial Sequence: Synthetic oligonucleotide
  Antisense strand to SEQ ID NO: 2130170
cccauaaagacauuauccc

SEQ ID NO: 2130172 - RNA, 19 nt, Artificial Sequence
  Description of Artificial Sequence: Synthetic oligonucleotide
  Sense strand starting at position 2850 of SEQ ID NO: 1882553
ggauaaugucuuuaugggu

SEQ ID NO: 2130173 - RNA, 19 nt, Artificial Sequence
  Description of Artificial Sequence: Synthetic oligonucleotide
  Antisense strand to SEQ ID NO: 2130172
acccauaaagacauuaucc

SEQ ID NO: 2130174 - RNA, 19 nt, Artificial Sequence
  Description of Artificial Sequence: Synthetic oligonucleotide
  Sense strand starting at position 2992 of SEQ ID NO: 1882553
ucuaaugguucccuuaaag

SEQ ID NO: 2130175 - RNA, 19 nt, Artificial Sequence
  Description of Artificial Sequence: Synthetic oligonucleotide
  Antisense strand to SEQ ID NO: 2130174
cuuuaagggaaccauuaga

SEQ ID NO: 2130176 - RNA, 19 nt, Artificial Sequence
  Description of Artificial Sequence: Synthetic oligonucleotide
  Sense strand starting at position 3176 of SEQ ID NO: 1882553
ugaugugauuacuugaaua

SEQ ID NO: 2130177 - RNA, 19 nt, Artificial Sequence
  Description of Artificial Sequence: Synthetic oligonucleotide
  Antisense strand to SEQ ID NO: 2130176
uauucaaguaaucacauca

SEQ ID NO: 2130178 - RNA, 19 nt, Artificial Sequence
  Description of Artificial Sequence: Synthetic oligonucleotide
  Sense strand starting at position 3270 of SEQ ID NO: 1882553
gugauaccuuaagcugaaa

SEQ ID NO: 2130179 - RNA, 19 nt, Artificial Sequence
  Description of Artificial Sequence: Synthetic oligonucleotide
  Antisense strand to SEQ ID NO: 2130178
uuucagcuuaagguaucac

SEQ ID NO: 2130180 - RNA, 19 nt, Artificial Sequence
  Description of Artificial Sequence: Synthetic oligonucleotide
  Sense strand starting at position 56 of SEQ ID NO: 1882554
cucugugaugcuuauucuu

SEQ ID NO: 2130181 - RNA, 19 nt, Artificial Sequence
  Description of Artificial Sequence: Synthetic oligonucleotide
  Antisense strand to SEQ ID NO: 2130180
aagaauaagcaucacagag

SEQ ID NO: 2130182 - RNA, 19 nt, Artificial Sequence
  Description of Artificial Sequence: Synthetic oligonucleotide
  Sense strand starting at position 391 of SEQ ID NO: 1882554
ccuugauggcaaugagaag

SEQ ID NO: 2130183 - RNA, 19 nt, Artificial Sequence
  Description of Artificial Sequence: Synthetic oligonucleotide
  Antisense strand to SEQ ID NO: 2130182
cuucucauugccaucaagg

SEQ ID NO: 2130184 - RNA, 19 nt, Artificial Sequence
  Description of Artificial Sequence: Synthetic oligonucleotide
  Sense strand starting at position 439 of SEQ ID NO: 1882554
uccgaaaucuuuccaaaga

SEQ ID NO: 2130185 - RNA, 19 nt, Artificial Sequence
  Description of Artificial Sequence: Synthetic oligonucleotide
  Antisense strand to SEQ ID NO: 2130184
ucuuuggaaagauuucgga

SEQ ID NO: 2130186 - RNA, 19 nt, Artificial Sequence
  Description of Artificial Sequence: Synthetic oligonucleotide
  Sense strand starting at position 479 of SEQ ID NO: 1882554
uauggaggauuucgagaug

SEQ ID NO: 2130187 - RNA, 19 nt, Artificial Sequence
  Description of Artificial Sequence: Synthetic oligonucleotide
  Antisense strand to SEQ ID NO: 2130186
caucucgaaauccuccaua

SEQ ID NO: 2130188 - RNA, 19 nt, Artificial Sequence
  Description of Artificial Sequence: Synthetic oligonucleotide
  Sense strand starting at position 524 of SEQ ID NO: 1882554
gucugcugcagacauugaa

SEQ ID NO: 2130189 - RNA, 19 nt, Artificial Sequence
  Description of Artificial Sequence: Synthetic oligonucleotide
  Antisense strand to SEQ ID NO: 2130188
uucaaugucugcagcagac

SEQ ID NO: 2130190 - RNA, 19 nt, Artificial Sequence
  Description of Artificial Sequence: Synthetic oligonucleotide
  Sense strand starting at position 527 of SEQ ID NO: 1882554
ugcugcagacauugaaaga

SEQ ID NO: 2130191 - RNA, 19 nt, Artificial Sequence
  Description of Artificial Sequence: Synthetic oligonucleotide
  Antisense strand to SEQ ID NO: 2130190
ucuuucaaugucugcagca

SEQ ID NO: 2130192 - RNA, 19 nt, Artificial Sequence
  Description of Artificial Sequence: Synthetic oligonucleotide
  Sense strand starting at position 528 of SEQ ID NO: 1882554
gcugcagacauugaaagau

SEQ ID NO: 2130193 - RNA, 19 nt, Artificial Sequence
  Description of Artificial Sequence: Synthetic oligonucleotide
  Antisense strand to SEQ ID NO: 2130192
aucuuucaaugucugcagc

SEQ ID NO: 2130194 - RNA, 19 nt, Artificial Sequence
  Description of Artificial Sequence: Synthetic oligonucleotide
  Sense strand starting at position 537 of SEQ ID NO: 1882554
auugaaagauacgagaaau

SEQ ID NO: 2130195 - RNA, 19 nt, Artificial Sequence
  Description of Artificial Sequence: Synthetic oligonucleotide
  Antisense strand to SEQ ID NO: 2130194
auuucucguaucuuucaau

SEQ ID NO: 2130196 - RNA, 19 nt, Artificial Sequence
  Description of Artificial Sequence: Synthetic oligonucleotide
  Sense strand starting at position 562 of SEQ ID NO: 1882554
uugaguuuggaucaugcua

SEQ ID NO: 2130197 - RNA, 19 nt, Artificial Sequence
  Description of Artificial Sequence: Synthetic oligonucleotide
  Antisense strand to SEQ ID NO: 2130196
uagcaugauccaaacucaa

SEQ ID NO: 2130198 - RNA, 19 nt, Artificial Sequence
  Description of Artificial Sequence: Synthetic oligonucleotide
  Sense strand starting at position 588 of SEQ ID NO: 1882554
acauguaaacugugagaaa

SEQ ID NO: 2130199 - RNA, 19 nt, Artificial Sequence
  Description of Artificial Sequence: Synthetic oligonucleotide
  Antisense strand to SEQ ID NO: 2130198
uuucucacaguuuacaugu

SEQ ID NO: 2130200 - RNA, 19 nt, Artificial Sequence
  Description of Artificial Sequence: Synthetic oligonucleotide
  Sense strand starting at position 597 of SEQ ID NO: 1882554
cugugagaaaugugccuua

SEQ ID NO: 2130201 - RNA, 19 nt, Artificial Sequence
  Description of Artificial Sequence: Synthetic oligonucleotide
  Antisense strand to SEQ ID NO: 2130200
uaaggcacauuucucacag

SEQ ID NO: 2130202 - RNA, 19 nt, Artificial Sequence
  Description of Artificial Sequence: Synthetic oligonucleotide
  Sense strand starting at position 602 of SEQ ID NO: 1882554
agaaaugugccuuaagugu

SEQ ID NO: 2130203 - RNA, 19 nt, Artificial Sequence
  Description of Artificial Sequence: Synthetic oligonucleotide
  Antisense strand to SEQ ID NO: 2130202
acacuuaaggcacauuucu

SEQ ID NO: 2130204 - RNA, 19 nt, Artificial Sequence
  Description of Artificial Sequence: Synthetic oligonucleotide
  Sense strand starting at position 795 of SEQ ID NO: 1882554
aaauguuacuuagcuugga

SEQ ID NO: 2130205 - RNA, 19 nt, Artificial Sequence
  Description of Artificial Sequence: Synthetic oligonucleotide
  Antisense strand to SEQ ID NO: 2130204
uccaagcuaaguaacauuu

SEQ ID NO: 2130206 - RNA, 19 nt, Artificial Sequence
  Description of Artificial Sequence: Synthetic oligonucleotide
  Sense strand starting at position 796 of SEQ ID NO: 1882554
aauguuacuuagcuuggaa

SEQ ID NO: 2130207 - RNA, 19 nt, Artificial Sequence
  Description of Artificial Sequence: Synthetic oligonucleotide
  Antisense strand to SEQ ID NO: 2130206
uuccaagcuaaguaacauu

SEQ ID NO: 2130208 - RNA, 19 nt, Artificial Sequence
  Description of Artificial Sequence: Synthetic oligonucleotide
  Sense strand starting at position 798 of SEQ ID NO: 1882554
uguuacuuagcuuggaaag

SEQ ID NO: 2130209 - RNA, 19 nt, Artificial Sequence
  Description of Artificial Sequence: Synthetic oligonucleotide
  Antisense strand to SEQ ID NO: 2130208
cuuuccaagcuaaguaaca

SEQ ID NO: 2130210 - RNA, 19 nt, Artificial Sequence
  Description of Artificial Sequence: Synthetic oligonucleotide
  Sense strand starting at position 1994 of SEQ ID NO: 1882554
guauuaaugguaugaguua

SEQ ID NO: 2130211 - RNA, 19 nt, Artificial Sequence
  Description of Artificial Sequence: Synthetic oligonucleotide
  Antisense strand to SEQ ID NO: 2130210
uaacucauaccauuaauac

SEQ ID NO: 2130212 - RNA, 19 nt, Artificial Sequence
  Description of Artificial Sequence: Synthetic oligonucleotide
  Sense strand starting at position 2047 of SEQ ID NO: 1882554
agauaagauuuccaugugu

SEQ ID NO: 2130213 - RNA, 19 nt, Artificial Sequence
  Description of Artificial Sequence: Synthetic oligonucleotide
  Antisense strand to SEQ ID NO: 2130212
acacauggaaaucuuaucu

SEQ ID NO: 2130214 - RNA, 19 nt, Artificial Sequence
  Description of Artificial Sequence: Synthetic oligonucleotide
  Sense strand starting at position 2056 of SEQ ID NO: 1882554
uuccaugugugacuacuua

SEQ ID NO: 2130215 - RNA, 19 nt, Artificial Sequence
  Description of Artificial Sequence: Synthetic oligonucleotide
  Antisense strand to SEQ ID NO: 2130214
uaaguagucacacauggaa

SEQ ID NO: 2130216 - RNA, 19 nt, Artificial Sequence
  Description of Artificial Sequence: Synthetic oligonucleotide
  Sense strand starting at position 2060 of SEQ ID NO: 1882554
augugugacuacuuagaag

SEQ ID NO: 2130217 - RNA, 19 nt, Artificial Sequence
  Description of Artificial Sequence: Synthetic oligonucleotide
  Antisense strand to SEQ ID NO: 2130216
cuucuaaguagucacacau

SEQ ID NO: 2130218 - RNA, 19 nt, Artificial Sequence
  Description of Artificial Sequence: Synthetic oligonucleotide
  Sense strand starting at position 2147 of SEQ ID NO: 1882554
ucccaagucuuacugagaa

SEQ ID NO: 2130219 - RNA, 19 nt, Artificial Sequence
  Description of Artificial Sequence: Synthetic oligonucleotide
  Antisense strand to SEQ ID NO: 2130218
uucucaguaagacuuggga

SEQ ID NO: 2130220 - RNA, 19 nt, Artificial Sequence
  Description of Artificial Sequence: Synthetic oligonucleotide
  Sense strand starting at position 2183 of SEQ ID NO: 1882554
gggaucuucugacugcaga

SEQ ID NO: 2130221 - RNA, 19 nt, Artificial Sequence
  Description of Artificial Sequence: Synthetic oligonucleotide
  Antisense strand to SEQ ID NO: 2130220
ucugcagucagaagauccc

SEQ ID NO: 2130222 - RNA, 19 nt, Artificial Sequence
  Description of Artificial Sequence: Synthetic oligonucleotide
  Sense strand starting at position 2247 of SEQ ID NO: 1882554
ucacuagaaucuguaagcu

SEQ ID NO: 2130223 - RNA, 19 nt, Artificial Sequence
  Description of Artificial Sequence: Synthetic oligonucleotide
  Antisense strand to SEQ ID NO: 2130222
agcuuacagauucuaguga

SEQ ID NO: 2130224 - RNA, 19 nt, Artificial Sequence
  Description of Artificial Sequence: Synthetic oligonucleotide
  Sense strand starting at position 2259 of SEQ ID NO: 1882554
guaagcuuaugguuaauag

SEQ ID NO: 2130225 - RNA, 19 nt, Artificial Sequence
  Description of Artificial Sequence: Synthetic oligonucleotide
  Antisense strand to SEQ ID NO: 2130224
cuauuaaccauaagcuuac

SEQ ID NO: 2130226 - RNA, 19 nt, Artificial Sequence
  Description of Artificial Sequence: Synthetic oligonucleotide
  Sense strand starting at position 2260 of SEQ ID NO: 1882554
uaagcuuaugguuaauaga

SEQ ID NO: 2130227 - RNA, 19 nt, Artificial Sequence
  Description of Artificial Sequence: Synthetic oligonucleotide
  Antisense strand to SEQ ID NO: 2130226
ucuauuaaccauaagcuua

SEQ ID NO: 2130228 - RNA, 19 nt, Artificial Sequence
  Description of Artificial Sequence: Synthetic oligonucleotide
  Sense strand starting at position 2303 of SEQ ID NO: 1882554
ggaguuagaacuggugcuu

SEQ ID NO: 2130229 - RNA, 19 nt, Artificial Sequence
  Description of Artificial Sequence: Synthetic oligonucleotide
  Antisense strand to SEQ ID NO: 2130228
aagcaccaguucuaacucc

SEQ ID NO: 2130230 - RNA, 19 nt, Artificial Sequence
  Description of Artificial Sequence: Synthetic oligonucleotide
  Sense strand starting at position 2308 of SEQ ID NO: 1882554
uagaacuggugcuuucuaa

SEQ ID NO: 2130231 - RNA, 19 nt, Artificial Sequence
  Description of Artificial Sequence: Synthetic oligonucleotide
  Antisense strand to SEQ ID NO: 2130230
uuagaaagcaccaguucua

SEQ ID NO: 2130232 - RNA, 19 nt, Artificial Sequence
  Description of Artificial Sequence: Synthetic oligonucleotide
  Sense strand starting at position 2371 of SEQ ID NO: 1882554
uugguaacucaaggaucaa

SEQ ID NO: 2130233 - RNA, 19 nt, Artificial Sequence
  Description of Artificial Sequence: Synthetic oligonucleotide
  Antisense strand to SEQ ID NO: 2130232
uugauccuugaguuaccaa

SEQ ID NO: 2130234 - RNA, 19 nt, Artificial Sequence
  Description of Artificial Sequence: Synthetic oligonucleotide
  Sense strand starting at position 2417 of SEQ ID NO: 1882554
gcaguauggagagaguauu

SEQ ID NO: 2130235 - RNA, 19 nt, Artificial Sequence
  Description of Artificial Sequence: Synthetic oligonucleotide
  Antisense strand to SEQ ID NO: 2130234
aauacucucuccauacugc

SEQ ID NO: 2130236 - RNA, 19 nt, Artificial Sequence
  Description of Artificial Sequence: Synthetic oligonucleotide
  Sense strand starting at position 2438 of SEQ ID NO: 1882554
auaauagagcuccaugcaa

SEQ ID NO: 2130237 - RNA, 19 nt, Artificial Sequence
  Description of Artificial Sequence: Synthetic oligonucleotide
  Antisense strand to SEQ ID NO: 2130236
uugcauggagcucuauuau

SEQ ID NO: 2130238 - RNA, 19 nt, Artificial Sequence
  Description of Artificial Sequence: Synthetic oligonucleotide
  Sense strand starting at position 2892 of SEQ ID NO: 1882554
uacuuucuuggauaguguu

SEQ ID NO: 2130239 - RNA, 19 nt, Artificial Sequence
  Description of Artificial Sequence: Synthetic oligonucleotide
  Antisense strand to SEQ ID NO: 2130238
aacacuauccaagaaagua

SEQ ID NO: 2130240 - RNA, 19 nt, Artificial Sequence
  Description of Artificial Sequence: Synthetic oligonucleotide
  Sense strand starting at position 3602 of SEQ ID NO: 1882554
augaguuauauguacucgu

SEQ ID NO: 2130241 - RNA, 19 nt, Artificial Sequence
  Description of Artificial Sequence: Synthetic oligonucleotide
  Antisense strand to SEQ ID NO: 2130240
acgaguacauauaacucau

SEQ ID NO: 2130242 - RNA, 19 nt, Artificial Sequence
  Description of Artificial Sequence: Synthetic oligonucleotide
  Sense strand starting at position 3642 of SEQ ID NO: 1882554
ugucaauaugagugauggu

SEQ ID NO: 2130243 - RNA, 19 nt, Artificial Sequence
  Description of Artificial Sequence: Synthetic oligonucleotide
  Antisense strand to SEQ ID NO: 2130242
accaucacucauauugaca

SEQ ID NO: 2130244 - RNA, 19 nt, Artificial Sequence
  Description of Artificial Sequence: Synthetic oligonucleotide
  Sense strand starting at position 3643 of SEQ ID NO: 1882554
gucaauaugagugaugguu

SEQ ID NO: 2130245 - RNA, 19 nt, Artificial Sequence
  Description of Artificial Sequence: Synthetic oligonucleotide
  Antisense strand to SEQ ID NO: 2130244
aaccaucacucauauugac

SEQ ID NO: 2130246 - RNA, 19 nt, Artificial Sequence
  Description of Artificial Sequence: Synthetic oligonucleotide
  Sense strand starting at position 3687 of SEQ ID NO: 1882554
gguaaacagcacuauaucu

SEQ ID NO: 2130247 - RNA, 19 nt, Artificial Sequence
  Description of Artificial Sequence: Synthetic oligonucleotide
  Antisense strand to SEQ ID NO: 2130246
agauauagugcuguuuacc

SEQ ID NO: 2130248 - RNA, 19 nt, Artificial Sequence
  Description of Artificial Sequence: Synthetic oligonucleotide
  Sense strand starting at position 3778 of SEQ ID NO: 1882554
gccaguguaaaugaaagua

SEQ ID NO: 2130249 - RNA, 19 nt, Artificial Sequence
  Description of Artificial Sequence: Synthetic oligonucleotide
  Antisense strand to SEQ ID NO: 2130248
uacuuucauuuacacuggc

SEQ ID NO: 2130250 - RNA, 19 nt, Artificial Sequence
  Description of Artificial Sequence: Synthetic oligonucleotide
  Sense strand starting at position 3817 of SEQ ID NO: 1882554
ccauucuuaccugggcaaa

SEQ ID NO: 2130251 - RNA, 19 nt, Artificial Sequence
  Description of Artificial Sequence: Synthetic oligonucleotide
  Antisense strand to SEQ ID NO: 2130250
uuugcccagguaagaaugg

SEQ ID NO: 2130252 - RNA, 19 nt, Artificial Sequence
  Description of Artificial Sequence: Synthetic oligonucleotide
  Sense strand starting at position 3839 of SEQ ID NO: 1882554
uuuauaucaguguaaccaa

SEQ ID NO: 2130253 - RNA, 19 nt, Artificial Sequence
  Description of Artificial Sequence: Synthetic oligonucleotide
  Antisense strand to SEQ ID NO: 2130252
uugguuacacugauauaaa

SEQ ID NO: 2130254 - RNA, 19 nt, Artificial Sequence
  Description of Artificial Sequence: Synthetic oligonucleotide
  Sense strand starting at position 3938 of SEQ ID NO: 1882554
uggagcauucaagguaagu

SEQ ID NO: 2130255 - RNA, 19 nt, Artificial Sequence
  Description of Artificial Sequence: Synthetic oligonucleotide
  Antisense strand to SEQ ID NO: 2130254
acuuaccuugaaugcucca

SEQ ID NO: 2130256 - RNA, 19 nt, Artificial Sequence
  Description of Artificial Sequence: Synthetic oligonucleotide
  Sense strand starting at position 3955 of SEQ ID NO: 1882554
guagucuugguacaggaua

SEQ ID NO: 2130257 - RNA, 19 nt, Artificial Sequence
  Description of Artificial Sequence: Synthetic oligonucleotide
  Antisense strand to SEQ ID NO: 2130256
uauccuguaccaagacuac

SEQ ID NO: 2130258 - RNA, 19 nt, Artificial Sequence
  Description of Artificial Sequence: Synthetic oligonucleotide
  Sense strand starting at position 3957 of SEQ ID NO: 1882554
agucuugguacaggauaca

SEQ ID NO: 2130259 - RNA, 19 nt, Artificial Sequence
  Description of Artificial Sequence: Synthetic oligonucleotide
  Antisense strand to SEQ ID NO: 2130258
uguauccuguaccaagacu

SEQ ID NO: 2130260 - RNA, 19 nt, Artificial Sequence
  Description of Artificial Sequence: Synthetic oligonucleotide
  Sense strand starting at position 267 of SEQ ID NO: 1882555
cucugugguuuccagaaug

SEQ ID NO: 2130261 - RNA, 19 nt, Artificial Sequence
  Description of Artificial Sequence: Synthetic oligonucleotide
  Antisense strand to SEQ ID NO: 2130260
cauucuggaaaccacagag

SEQ ID NO: 2130262 - RNA, 19 nt, Artificial Sequence
  Description of Artificial Sequence: Synthetic oligonucleotide
  Sense strand starting at position 290 of SEQ ID NO: 1882555
aaacguaaauaucgcuaua

SEQ ID NO: 2130263 - RNA, 19 nt, Artificial Sequence
  Description of Artificial Sequence: Synthetic oligonucleotide
  Antisense strand to SEQ ID NO: 2130262
uauagcgauauuuacguuu

SEQ ID NO: 2130264 - RNA, 19 nt, Artificial Sequence
  Description of Artificial Sequence: Synthetic oligonucleotide
  Sense strand starting at position 292 of SEQ ID NO: 1882555
acguaaauaucgcuauaca

SEQ ID NO: 2130265 - RNA, 19 nt, Artificial Sequence
  Description of Artificial Sequence: Synthetic oligonucleotide
  Antisense strand to SEQ ID NO: 2130264
uguauagcgauauuuacgu

SEQ ID NO: 2130266 - RNA, 19 nt, Artificial Sequence
  Description of Artificial Sequence: Synthetic oligonucleotide
  Sense strand starting at position 293 of SEQ ID NO: 1882555
cguaaauaucgcuauacaa

SEQ ID NO: 2130267 - RNA, 19 nt, Artificial Sequence
  Description of Artificial Sequence: Synthetic oligonucleotide
  Antisense strand to SEQ ID NO: 2130266
uuguauagcgauauuuacg

SEQ ID NO: 2130268 - RNA, 19 nt, Artificial Sequence
  Description of Artificial Sequence: Synthetic oligonucleotide
  Sense strand starting at position 331 of SEQ ID NO: 1882555
caaagaaucucaggagguc

SEQ ID NO: 2130269 - RNA, 19 nt, Artificial Sequence
  Description of Artificial Sequence: Synthetic oligonucleotide
  Antisense strand to SEQ ID NO: 2130268
gaccuccugagauucuuug

SEQ ID NO: 2130270 - RNA, 19 nt, Artificial Sequence
  Description of Artificial Sequence: Synthetic oligonucleotide
  Sense strand starting at position 376 of SEQ ID NO: 1882555
ugcuguggauuccaugcaa

SEQ ID NO: 2130271 - RNA, 19 nt, Artificial Sequence
  Description of Artificial Sequence: Synthetic oligonucleotide
  Antisense strand to SEQ ID NO: 2130270
uugcauggaauccacagca

SEQ ID NO: 2130272 - RNA, 19 nt, Artificial Sequence
  Description of Artificial Sequence: Synthetic oligonucleotide
  Sense strand starting at position 431 of SEQ ID NO: 1882555
gcagaagccaugugagugu

SEQ ID NO: 2130273 - RNA, 19 nt, Artificial Sequence
  Description of Artificial Sequence: Synthetic oligonucleotide
  Antisense strand to SEQ ID NO: 2130272
acacucacauggcuucugc

SEQ ID NO: 2130274 - RNA, 19 nt, Artificial Sequence
  Description of Artificial Sequence: Synthetic oligonucleotide
  Sense strand starting at position 536 of SEQ ID NO: 1882555
caguaaaggcugugagcaa

SEQ ID NO: 2130275 - RNA, 19 nt, Artificial Sequence
  Description of Artificial Sequence: Synthetic oligonucleotide
  Antisense strand to SEQ ID NO: 2130274
uugcucacagccuuuacug

SEQ ID NO: 2130276 - RNA, 19 nt, Artificial Sequence
  Description of Artificial Sequence: Synthetic oligonucleotide
  Sense strand starting at position 537 of SEQ ID NO: 1882555
aguaaaggcugugagcaaa

SEQ ID NO: 2130277 - RNA, 19 nt, Artificial Sequence
  Description of Artificial Sequence: Synthetic oligonucleotide
  Antisense strand to SEQ ID NO: 2130276
uuugcucacagccuuuacu

SEQ ID NO: 2130278 - RNA, 19 nt, Artificial Sequence
  Description of Artificial Sequence: Synthetic oligonucleotide
  Sense strand starting at position 1429 of SEQ ID NO: 1882555
cgcagucuugcugcucaga

SEQ ID NO: 2130279 - RNA, 19 nt, Artificial Sequence
  Description of Artificial Sequence: Synthetic oligonucleotide
  Antisense strand to SEQ ID NO: 2130278
ucugagcagcaagacugcg

SEQ ID NO: 2130280 - RNA, 19 nt, Artificial Sequence
  Description of Artificial Sequence: Synthetic oligonucleotide
  Sense strand starting at position 1431 of SEQ ID NO: 1882555
cagucuugcugcucagagu

SEQ ID NO: 2130281 - RNA, 19 nt, Artificial Sequence
  Description of Artificial Sequence: Synthetic oligonucleotide
  Antisense strand to SEQ ID NO: 2130280
acucugagcagcaagacug

SEQ ID NO: 2130282 - RNA, 19 nt, Artificial Sequence
  Description of Artificial Sequence: Synthetic oligonucleotide
  Sense strand starting at position 1477 of SEQ ID NO: 1882555
gcugcaugccgugaagugu

SEQ ID NO: 2130283 - RNA, 19 nt, Artificial Sequence
  Description of Artificial Sequence: Synthetic oligonucleotide
  Antisense strand to SEQ ID NO: 2130282
acacuucacggcaugcagc

SEQ ID NO: 2130284 - RNA, 19 nt, Artificial Sequence
  Description of Artificial Sequence: Synthetic oligonucleotide
  Sense strand starting at position 1586 of SEQ ID NO: 1882555
ccaggcuuucccugcucua

SEQ ID NO: 2130285 - RNA, 19 nt, Artificial Sequence
  Description of Artificial Sequence: Synthetic oligonucleotide
  Antisense strand to SEQ ID NO: 2130284
uagagcagggaaagccugg

SEQ ID NO: 2130286 - RNA, 19 nt, Artificial Sequence
  Description of Artificial Sequence: Synthetic oligonucleotide
  Sense strand starting at position 1614 of SEQ ID NO: 1882555
ccaccauagucuuauugag

SEQ ID NO: 2130287 - RNA, 19 nt, Artificial Sequence
  Description of Artificial Sequence: Synthetic oligonucleotide
  Antisense strand to SEQ ID NO: 2130286
cucaauaagacuauggugg

SEQ ID NO: 2130288 - RNA, 19 nt, Artificial Sequence
  Description of Artificial Sequence: Synthetic oligonucleotide
  Sense strand starting at position 1616 of SEQ ID NO: 1882555
accauagucuuauugagau

SEQ ID NO: 2130289 - RNA, 19 nt, Artificial Sequence
  Description of Artificial Sequence: Synthetic oligonucleotide
  Antisense strand to SEQ ID NO: 2130288
aucucaauaagacuauggu

SEQ ID NO: 2130290 - RNA, 19 nt, Artificial Sequence
  Description of Artificial Sequence: Synthetic oligonucleotide
  Sense strand starting at position 1742 of SEQ ID NO: 1882555
ggaggaguguguccaugca

SEQ ID NO: 2130291 - RNA, 19 nt, Artificial Sequence
  Description of Artificial Sequence: Synthetic oligonucleotide
  Antisense strand to SEQ ID NO: 2130290
ugcauggacacacuccucc

SEQ ID NO: 2130292 - RNA, 19 nt, Artificial Sequence
  Description of Artificial Sequence: Synthetic oligonucleotide
  Sense strand starting at position 1811 of SEQ ID NO: 1882555
aguggucacugccugagaa

SEQ ID NO: 2130293 - RNA, 19 nt, Artificial Sequence
  Description of Artificial Sequence: Synthetic oligonucleotide
  Antisense strand to SEQ ID NO: 2130292
uucucaggcagugaccacu

SEQ ID NO: 2130294 - RNA, 19 nt, Artificial Sequence
  Description of Artificial Sequence: Synthetic oligonucleotide
  Sense strand starting at position 2171 of SEQ ID NO: 1882555
gcuugaggaaucugcugaa

SEQ ID NO: 2130295 - RNA, 19 nt, Artificial Sequence
  Description of Artificial Sequence: Synthetic oligonucleotide
  Antisense strand to SEQ ID NO: 2130294
uucagcagauuccucaagc

SEQ ID NO: 2130296 - RNA, 19 nt, Artificial Sequence
  Description of Artificial Sequence: Synthetic oligonucleotide
  Sense strand starting at position 2174 of SEQ ID NO: 1882555
ugaggaaucugcugaagga

SEQ ID NO: 2130297 - RNA, 19 nt, Artificial Sequence
  Description of Artificial Sequence: Synthetic oligonucleotide
  Antisense strand to SEQ ID NO: 2130296
uccuucagcagauuccuca

SEQ ID NO: 2130298 - RNA, 19 nt, Artificial Sequence
  Description of Artificial Sequence: Synthetic oligonucleotide
  Sense strand starting at position 2308 of SEQ ID NO: 1882555
ggcccaggcuugucuaauu

SEQ ID NO: 2130299 - RNA, 19 nt, Artificial Sequence
  Description of Artificial Sequence: Synthetic oligonucleotide
  Antisense strand to SEQ ID NO: 2130298
aauuagacaagccugggcc

SEQ ID NO: 2130300 - RNA, 19 nt, Artificial Sequence
  Description of Artificial Sequence: Synthetic oligonucleotide
  Sense strand starting at position 2368 of SEQ ID NO: 1882555
gcugguuaggaugaugcua

SEQ ID NO: 2130301 - RNA, 19 nt, Artificial Sequence
  Description of Artificial Sequence: Synthetic oligonucleotide
  Antisense strand to SEQ ID NO: 2130300
uagcaucauccuaaccagc

SEQ ID NO: 2130302 - RNA, 19 nt, Artificial Sequence
  Description of Artificial Sequence: Synthetic oligonucleotide
  Sense strand starting at position 2379 of SEQ ID NO: 1882555
ugaugcuagcccugugaua

SEQ ID NO: 2130303 - RNA, 19 nt, Artificial Sequence
  Description of Artificial Sequence: Synthetic oligonucleotide
  Antisense strand to SEQ ID NO: 2130302
uaucacagggcuagcauca

SEQ ID NO: 2130304 - RNA, 19 nt, Artificial Sequence
  Description of Artificial Sequence: Synthetic oligonucleotide
  Sense strand starting at position 2381 of SEQ ID NO: 1882555
augcuagcccugugauaaa

SEQ ID NO: 2130305 - RNA, 19 nt, Artificial Sequence
  Description of Artificial Sequence: Synthetic oligonucleotide
  Antisense strand to SEQ ID NO: 2130304
uuuaucacagggcuagcau

SEQ ID NO: 2130306 - RNA, 19 nt, Artificial Sequence
  Description of Artificial Sequence: Synthetic oligonucleotide
  Sense strand starting at position 2639 of SEQ ID NO: 1882555
guggccugauggucucaga

SEQ ID NO: 2130307 - RNA, 19 nt, Artificial Sequence
  Description of Artificial Sequence: Synthetic oligonucleotide
  Antisense strand to SEQ ID NO: 2130306
ucugagaccaucaggccac

SEQ ID NO: 2130308 - RNA, 19 nt, Artificial Sequence
  Description of Artificial Sequence: Synthetic oligonucleotide
  Sense strand starting at position 2642 of SEQ ID NO: 1882555
gccugauggucucagaaua

SEQ ID NO: 2130309 - RNA, 19 nt, Artificial Sequence
  Description of Artificial Sequence: Synthetic oligonucleotide
  Antisense strand to SEQ ID NO: 2130308
uauucugagaccaucaggc

SEQ ID NO: 2130310 - RNA, 19 nt, Artificial Sequence
  Description of Artificial Sequence: Synthetic oligonucleotide
  Sense strand starting at position 2775 of SEQ ID NO: 1882555
acucauaauugauggaaau

SEQ ID NO: 2130311 - RNA, 19 nt, Artificial Sequence
  Description of Artificial Sequence: Synthetic oligonucleotide
  Antisense strand to SEQ ID NO: 2130310
auuuccaucaauuaugagu

SEQ ID NO: 2130312 - RNA, 19 nt, Artificial Sequence
  Description of Artificial Sequence: Synthetic oligonucleotide
  Sense strand starting at position 2851 of SEQ ID NO: 1882555
gaaucuaacccuggguuua

SEQ ID NO: 2130313 - RNA, 19 nt, Artificial Sequence
  Description of Artificial Sequence: Synthetic oligonucleotide
  Antisense strand to SEQ ID NO: 2130312
uaaacccaggguuagauuc

SEQ ID NO: 2130314 - RNA, 19 nt, Artificial Sequence
  Description of Artificial Sequence: Synthetic oligonucleotide
  Sense strand starting at position 2877 of SEQ ID NO: 1882555
agccaagagucagggagaa

SEQ ID NO: 2130315 - RNA, 19 nt, Artificial Sequence
  Description of Artificial Sequence: Synthetic oligonucleotide
  Antisense strand to SEQ ID NO: 2130314
uucucccugacucuuggcu

SEQ ID NO: 2130316 - RNA, 19 nt, Artificial Sequence
  Description of Artificial Sequence: Synthetic oligonucleotide
  Sense strand starting at position 2996 of SEQ ID NO: 1882555
gugggugggccgugagaaa

SEQ ID NO: 2130317 - RNA, 19 nt, Artificial Sequence
  Description of Artificial Sequence: Synthetic oligonucleotide
  Antisense strand to SEQ ID NO: 2130316
uuucucacggcccacccac

SEQ ID NO: 2130318 - RNA, 19 nt, Artificial Sequence
  Description of Artificial Sequence: Synthetic oligonucleotide
  Sense strand starting at position 3045 of SEQ ID NO: 1882555
gcauguaauugagcaauaa

SEQ ID NO: 2130319 - RNA, 19 nt, Artificial Sequence
  Description of Artificial Sequence: Synthetic oligonucleotide
  Antisense strand to SEQ ID NO: 2130318
uuauugcucaauuacaugc

SEQ ID NO: 2130320 - RNA, 19 nt, Artificial Sequence
  Description of Artificial Sequence: Synthetic oligonucleotide
  Sense strand starting at position 3060 of SEQ ID NO: 1882555
auaaacaauuugcgaauca

SEQ ID NO: 2130321 - RNA, 19 nt, Artificial Sequence
  Description of Artificial Sequence: Synthetic oligonucleotide
  Antisense strand to SEQ ID NO: 2130320
ugauucgcaaauuguuuau

SEQ ID NO: 2130322 - RNA, 19 nt, Artificial Sequence
  Description of Artificial Sequence: Synthetic oligonucleotide
  Sense strand starting at position 3084 of SEQ ID NO: 1882555
ccuucuaagccagaguaga

SEQ ID NO: 2130323 - RNA, 19 nt, Artificial Sequence
  Description of Artificial Sequence: Synthetic oligonucleotide
  Antisense strand to SEQ ID NO: 2130322
ucuacucuggcuuagaagg

SEQ ID NO: 2130324 - RNA, 19 nt, Artificial Sequence
  Description of Artificial Sequence: Synthetic oligonucleotide
  Sense strand starting at position 3199 of SEQ ID NO: 1882555
uguguauuuacccggcguu

SEQ ID NO: 2130325 - RNA, 19 nt, Artificial Sequence
  Description of Artificial Sequence: Synthetic oligonucleotide
  Antisense strand to SEQ ID NO: 2130324
aacgccggguaaauacaca

SEQ ID NO: 2130326 - RNA, 19 nt, Artificial Sequence
  Description of Artificial Sequence: Synthetic oligonucleotide
  Sense strand starting at position 3227 of SEQ ID NO: 1882555
gugugaucgcccagcguuc

SEQ ID NO: 2130327 - RNA, 19 nt, Artificial Sequence
  Description of Artificial Sequence: Synthetic oligonucleotide
  Antisense strand to SEQ ID NO: 2130326
gaacgcugggcgaucacac

SEQ ID NO: 2130328 - RNA, 19 nt, Artificial Sequence
  Description of Artificial Sequence: Synthetic oligonucleotide
  Sense strand starting at position 3774 of SEQ ID NO: 1882555
guguguucacacggcguua

SEQ ID NO: 2130329 - RNA, 19 nt, Artificial Sequence
  Description of Artificial Sequence: Synthetic oligonucleotide
  Antisense strand to SEQ ID NO: 2130328
uaacgccgugugaacacac

SEQ ID NO: 2130330 - RNA, 19 nt, Artificial Sequence
  Description of Artificial Sequence: Synthetic oligonucleotide
  Sense strand starting at position 3776 of SEQ ID NO: 1882555
guguucacacggcguuauu

SEQ ID NO: 2130331 - RNA, 19 nt, Artificial Sequence
  Description of Artificial Sequence: Synthetic oligonucleotide
  Antisense strand to SEQ ID NO: 2130330
aauaacgccgugugaacac

SEQ ID NO: 2130332 - RNA, 19 nt, Artificial Sequence
  Description of Artificial Sequence: Synthetic oligonucleotide
  Sense strand starting at position 3857 of SEQ ID NO: 1882555
guguguucacgcgucguua

SEQ ID NO: 2130333 - RNA, 19 nt, Artificial Sequence
  Description of Artificial Sequence: Synthetic oligonucleotide
  Antisense strand to SEQ ID NO: 2130332
uaacgacgcgugaacacac

SEQ ID NO: 2130334 - RNA, 19 nt, Artificial Sequence
  Description of Artificial Sequence: Synthetic oligonucleotide
  Sense strand starting at position 3858 of SEQ ID NO: 1882555
uguguucacgcgucguuau

SEQ ID NO: 2130335 - RNA, 19 nt, Artificial Sequence
  Description of Artificial Sequence: Synthetic oligonucleotide
  Antisense strand to SEQ ID NO: 2130334
auaacgacgcgugaacaca

SEQ ID NO: 2130336 - RNA, 19 nt, Artificial Sequence
  Description of Artificial Sequence: Synthetic oligonucleotide
  Sense strand starting at position 3871 of SEQ ID NO: 1882555
cguuauuucccgcgugugu

SEQ ID NO: 2130337 - RNA, 19 nt, Artificial Sequence
  Description of Artificial Sequence: Synthetic oligonucleotide
  Antisense strand to SEQ ID NO: 2130336
acacacgcgggaaauaacg

SEQ ID NO: 2130338 - RNA, 19 nt, Artificial Sequence
  Description of Artificial Sequence: Synthetic oligonucleotide
  Sense strand starting at position 3873 of SEQ ID NO: 1882555
uuauuucccgcguguguua

SEQ ID NO: 2130339 - RNA, 19 nt, Artificial Sequence
  Description of Artificial Sequence: Synthetic oligonucleotide
  Antisense strand to SEQ ID NO: 2130338
uaacacacgcgggaaauaa

SEQ ID NO: 2130340 - RNA, 19 nt, Artificial Sequence
  Description of Artificial Sequence: Synthetic oligonucleotide
  Sense strand starting at position 341 of SEQ ID NO: 1882556
uggaauuaauacgcuccaa

SEQ ID NO: 2130341 - RNA, 19 nt, Artificial Sequence
  Description of Artificial Sequence: Synthetic oligonucleotide
  Antisense strand to SEQ ID NO: 2130340
uuggagcguauuaauucca

SEQ ID NO: 2130342 - RNA, 19 nt, Artificial Sequence
  Description of Artificial Sequence: Synthetic oligonucleotide
  Sense strand starting at position 345 of SEQ ID NO: 1882556
auuaauacgcuccaauaag

SEQ ID NO: 2130343 - RNA, 19 nt, Artificial Sequence
  Description of Artificial Sequence: Synthetic oligonucleotide
  Antisense strand to SEQ ID NO: 2130342
cuuauuggagcguauuaau

SEQ ID NO: 2130344 - RNA, 19 nt, Artificial Sequence
  Description of Artificial Sequence: Synthetic oligonucleotide
  Sense strand starting at position 368 of SEQ ID NO: 1882556
agggcacauuuauagauua

SEQ ID NO: 2130345 - RNA, 19 nt, Artificial Sequence
  Description of Artificial Sequence: Synthetic oligonucleotide
  Antisense strand to SEQ ID NO: 2130344
uaaucuauaaaugugcccu

SEQ ID NO: 2130346 - RNA, 19 nt, Artificial Sequence
  Description of Artificial Sequence: Synthetic oligonucleotide
  Sense strand starting at position 561 of SEQ ID NO: 1882556
gcaccugaagggugaugau

SEQ ID NO: 2130347 - RNA, 19 nt, Artificial Sequence
  Description of Artificial Sequence: Synthetic oligonucleotide
  Antisense strand to SEQ ID NO: 2130346
aucaucacccuucaggugc

SEQ ID NO: 2130348 - RNA, 19 nt, Artificial Sequence
  Description of Artificial Sequence: Synthetic oligonucleotide
  Sense strand starting at position 628 of SEQ ID NO: 1882556
guguauauaauguaggaau

SEQ ID NO: 2130349 - RNA, 19 nt, Artificial Sequence
  Description of Artificial Sequence: Synthetic oligonucleotide
  Antisense strand to SEQ ID NO: 2130348
auuccuacauuauauacac

SEQ ID NO: 2130350 - RNA, 19 nt, Artificial Sequence
  Description of Artificial Sequence: Synthetic oligonucleotide
  Sense strand starting at position 776 of SEQ ID NO: 1882556
cuccacuugugggcaagaa

SEQ ID NO: 2130351 - RNA, 19 nt, Artificial Sequence
  Description of Artificial Sequence: Synthetic oligonucleotide
  Antisense strand to SEQ ID NO: 2130350
uucuugcccacaaguggag

SEQ ID NO: 2130352 - RNA, 19 nt, Artificial Sequence
  Description of Artificial Sequence: Synthetic oligonucleotide
  Sense strand starting at position 923 of SEQ ID NO: 1882556
cucagucuccucuacaagu

SEQ ID NO: 2130353 - RNA, 19 nt, Artificial Sequence
  Description of Artificial Sequence: Synthetic oligonucleotide
  Antisense strand to SEQ ID NO: 2130352
acuuguagaggagacugag

SEQ ID NO: 2130354 - RNA, 19 nt, Artificial Sequence
  Description of Artificial Sequence: Synthetic oligonucleotide
  Sense strand starting at position 1054 of SEQ ID NO: 1882556
uaauaagagucagugcaau

SEQ ID NO: 2130355 - RNA, 19 nt, Artificial Sequence
  Description of Artificial Sequence: Synthetic oligonucleotide
  Antisense strand to SEQ ID NO: 2130354
auugcacugacucuuauua

SEQ ID NO: 2130356 - RNA, 19 nt, Artificial Sequence
  Description of Artificial Sequence: Synthetic oligonucleotide
  Sense strand starting at position 1060 of SEQ ID NO: 1882556
gagucagugcaauacuaag

SEQ ID NO: 2130357 - RNA, 19 nt, Artificial Sequence
  Description of Artificial Sequence: Synthetic oligonucleotide
  Antisense strand to SEQ ID NO: 2130356
cuuaguauugcacugacuc

SEQ ID NO: 2130358 - RNA, 19 nt, Artificial Sequence
  Description of Artificial Sequence: Synthetic oligonucleotide
  Sense strand starting at position 1244 of SEQ ID NO: 1882556
gucugcagugauuaacuuu

SEQ ID NO: 2130359 - RNA, 19 nt, Artificial Sequence
  Description of Artificial Sequence: Synthetic oligonucleotide
  Antisense strand to SEQ ID NO: 2130358
aaaguuaaucacugcagac

SEQ ID NO: 2130360 - RNA, 19 nt, Artificial Sequence
  Description of Artificial Sequence: Synthetic oligonucleotide
  Sense strand starting at position 1587 of SEQ ID NO: 1882556
gaugacagguguuuacuua

SEQ ID NO: 2130361 - RNA, 19 nt, Artificial Sequence
  Description of Artificial Sequence: Synthetic oligonucleotide
  Antisense strand to SEQ ID NO: 2130360
uaaguaaacaccugucauc

SEQ ID NO: 2130362 - RNA, 19 nt, Artificial Sequence
  Description of Artificial Sequence: Synthetic oligonucleotide
  Sense strand starting at position 1588 of SEQ ID NO: 1882556
augacagguguuuacuuaa

SEQ ID NO: 2130363 - RNA, 19 nt, Artificial Sequence
  Description of Artificial Sequence: Synthetic oligonucleotide
  Antisense strand to SEQ ID NO: 2130362
uuaaguaaacaccugucau

SEQ ID NO: 2130364 - RNA, 19 nt, Artificial Sequence
  Description of Artificial Sequence: Synthetic oligonucleotide
  Sense strand starting at position 1719 of SEQ ID NO: 1882556
caagccauugggugaagua

SEQ ID NO: 2130365 - RNA, 19 nt, Artificial Sequence
  Description of Artificial Sequence: Synthetic oligonucleotide
  Antisense strand to SEQ ID NO: 2130364
uacuucacccaauggcuug

SEQ ID NO: 2130366 - RNA, 19 nt, Artificial Sequence
  Description of Artificial Sequence: Synthetic oligonucleotide
  Sense strand starting at position 1746 of SEQ ID NO: 1882556
gaaaucuagugguuaggaa

SEQ ID NO: 2130367 - RNA, 19 nt, Artificial Sequence
  Description of Artificial Sequence: Synthetic oligonucleotide
  Antisense strand to SEQ ID NO: 2130366
uuccuaaccacuagauuuc

SEQ ID NO: 2130368 - RNA, 19 nt, Artificial Sequence
  Description of Artificial Sequence: Synthetic oligonucleotide
  Sense strand starting at position 1769 of SEQ ID NO: 1882556
cuucucauucgucauuaag

SEQ ID NO: 2130369 - RNA, 19 nt, Artificial Sequence
  Description of Artificial Sequence: Synthetic oligonucleotide
  Antisense strand to SEQ ID NO: 2130368
cuuaaugacgaaugagaag

SEQ ID NO: 2130370 - RNA, 19 nt, Artificial Sequence
  Description of Artificial Sequence: Synthetic oligonucleotide
  Sense strand starting at position 1771 of SEQ ID NO: 1882556
ucucauucgucauuaagga

SEQ ID NO: 2130371 - RNA, 19 nt, Artificial Sequence
  Description of Artificial Sequence: Synthetic oligonucleotide
  Antisense strand to SEQ ID NO: 2130370
uccuuaaugacgaaugaga

SEQ ID NO: 2130372 - RNA, 19 nt, Artificial Sequence
  Description of Artificial Sequence: Synthetic oligonucleotide
  Sense strand starting at position 1902 of SEQ ID NO: 1882556
caaauacaucacggaguaa

SEQ ID NO: 2130373 - RNA, 19 nt, Artificial Sequence
  Description of Artificial Sequence: Synthetic oligonucleotide
  Antisense strand to SEQ ID NO: 2130372
uuacuccgugauguauuug

SEQ ID NO: 2130374 - RNA, 19 nt, Artificial Sequence
  Description of Artificial Sequence: Synthetic oligonucleotide
  Sense strand starting at position 1972 of SEQ ID NO: 1882556
uucugaagaauggguugau

SEQ ID NO: 2130375 - RNA, 19 nt, Artificial Sequence
  Description of Artificial Sequence: Synthetic oligonucleotide
  Antisense strand to SEQ ID NO: 2130374
aucaacccauucuucagaa

SEQ ID NO: 2130376 - RNA, 19 nt, Artificial Sequence
  Description of Artificial Sequence: Synthetic oligonucleotide
  Sense strand starting at position 2015 of SEQ ID NO: 1882556
guuugagguuagccaugaa

SEQ ID NO: 2130377 - RNA, 19 nt, Artificial Sequence
  Description of Artificial Sequence: Synthetic oligonucleotide
  Antisense strand to SEQ ID NO: 2130376
uucauggcuaaccucaaac

SEQ ID NO: 2130378 - RNA, 19 nt, Artificial Sequence
  Description of Artificial Sequence: Synthetic oligonucleotide
  Sense strand starting at position 2018 of SEQ ID NO: 1882556
ugagguuagccaugaagac

SEQ ID NO: 2130379 - RNA, 19 nt, Artificial Sequence
  Description of Artificial Sequence: Synthetic oligonucleotide
  Antisense strand to SEQ ID NO: 2130378
gucuucauggcuaaccuca

SEQ ID NO: 2130380 - RNA, 19 nt, Artificial Sequence
  Description of Artificial Sequence: Synthetic oligonucleotide
  Sense strand starting at position 2078 of SEQ ID NO: 1882556
gggcaaacuugacucauga

SEQ ID NO: 2130381 - RNA, 19 nt, Artificial Sequence
  Description of Artificial Sequence: Synthetic oligonucleotide
  Antisense strand to SEQ ID NO: 2130380
ucaugagucaaguuugccc

SEQ ID NO: 2130382 - RNA, 19 nt, Artificial Sequence
  Description of Artificial Sequence: Synthetic oligonucleotide
  Sense strand starting at position 2225 of SEQ ID NO: 1882556
cuacacaucuuugcuggaa

SEQ ID NO: 2130383 - RNA, 19 nt, Artificial Sequence
  Description of Artificial Sequence: Synthetic oligonucleotide
  Antisense strand to SEQ ID NO: 2130382
uuccagcaaagauguguag

SEQ ID NO: 2130384 - RNA, 19 nt, Artificial Sequence
  Description of Artificial Sequence: Synthetic oligonucleotide
  Sense strand starting at position 2229 of SEQ ID NO: 1882556
acaucuuugcuggaagcau

SEQ ID NO: 2130385 - RNA, 19 nt, Artificial Sequence
  Description of Artificial Sequence: Synthetic oligonucleotide
  Antisense strand to SEQ ID NO: 2130384
augcuuccagcaaagaugu

SEQ ID NO: 2130386 - RNA, 19 nt, Artificial Sequence
  Description of Artificial Sequence: Synthetic oligonucleotide
  Sense strand starting at position 2363 of SEQ ID NO: 1882556
ggaugauggcguuauggga

SEQ ID NO: 2130387 - RNA, 19 nt, Artificial Sequence
  Description of Artificial Sequence: Synthetic oligonucleotide
  Antisense strand to SEQ ID NO: 2130386
ucccauaacgccaucaucc

SEQ ID NO: 2130388 - RNA, 19 nt, Artificial Sequence
  Description of Artificial Sequence: Synthetic oligonucleotide
  Sense strand starting at position 2370 of SEQ ID NO: 1882556
ggcguuaugggacagcaga

SEQ ID NO: 2130389 - RNA, 19 nt, Artificial Sequence
  Description of Artificial Sequence: Synthetic oligonucleotide
  Antisense strand to SEQ ID NO: 2130388
ucugcugucccauaacgcc

SEQ ID NO: 2130390 - RNA, 19 nt, Artificial Sequence
  Description of Artificial Sequence: Synthetic oligonucleotide
  Sense strand starting at position 2481 of SEQ ID NO: 1882556
agcaccaagcguuauuuau

SEQ ID NO: 2130391 - RNA, 19 nt, Artificial Sequence
  Description of Artificial Sequence: Synthetic oligonucleotide
  Antisense strand to SEQ ID NO: 2130390
auaaauaacgcuuggugcu

SEQ ID NO: 2130392 - RNA, 19 nt, Artificial Sequence
  Description of Artificial Sequence: Synthetic oligonucleotide
  Sense strand starting at position 2751 of SEQ ID NO: 1882556
cucugauucuagucugauu

SEQ ID NO: 2130393 - RNA, 19 nt, Artificial Sequence
  Description of Artificial Sequence: Synthetic oligonucleotide
  Antisense strand to SEQ ID NO: 2130392
aaucagacuagaaucagag

SEQ ID NO: 2130394 - RNA, 19 nt, Artificial Sequence
  Description of Artificial Sequence: Synthetic oligonucleotide
  Sense strand starting at position 2756 of SEQ ID NO: 1882556
auucuagucugauuccuuu

SEQ ID NO: 2130395 - RNA, 19 nt, Artificial Sequence
  Description of Artificial Sequence: Synthetic oligonucleotide
  Antisense strand to SEQ ID NO: 2130394
aaaggaaucagacuagaau

SEQ ID NO: 2130396 - RNA, 19 nt, Artificial Sequence
  Description of Artificial Sequence: Synthetic oligonucleotide
  Sense strand starting at position 2759 of SEQ ID NO: 1882556
cuagucugauuccuuugaa

SEQ ID NO: 2130397 - RNA, 19 nt, Artificial Sequence
  Description of Artificial Sequence: Synthetic oligonucleotide
  Antisense strand to SEQ ID NO: 2130396
uucaaaggaaucagacuag

SEQ ID NO: 2130398 - RNA, 19 nt, Artificial Sequence
  Description of Artificial Sequence: Synthetic oligonucleotide
  Sense strand starting at position 2762 of SEQ ID NO: 1882556
gucugauuccuuugaaauc

SEQ ID NO: 2130399 - RNA, 19 nt, Artificial Sequence
  Description of Artificial Sequence: Synthetic oligonucleotide
  Antisense strand to SEQ ID NO: 2130398
gauuucaaaggaaucagac

SEQ ID NO: 2130400 - RNA, 19 nt, Artificial Sequence
  Description of Artificial Sequence: Synthetic oligonucleotide
  Sense strand starting at position 2870 of SEQ ID NO: 1882556
cucuuauugccacaggaaa

SEQ ID NO: 2130401 - RNA, 19 nt, Artificial Sequence
  Description of Artificial Sequence: Synthetic oligonucleotide
  Antisense strand to SEQ ID NO: 2130400
uuuccuguggcaauaagag

SEQ ID NO: 2130402 - RNA, 19 nt, Artificial Sequence
  Description of Artificial Sequence: Synthetic oligonucleotide
  Sense strand starting at position 2922 of SEQ ID NO: 1882556
agcauucuggaaugcacau

SEQ ID NO: 2130403 - RNA, 19 nt, Artificial Sequence
  Description of Artificial Sequence: Synthetic oligonucleotide
  Antisense strand to SEQ ID NO: 2130402
augugcauuccagaaugcu

SEQ ID NO: 2130404 - RNA, 19 nt, Artificial Sequence
  Description of Artificial Sequence: Synthetic oligonucleotide
  Sense strand starting at position 2961 of SEQ ID NO: 1882556
uuccaaauccaucguauug

SEQ ID NO: 2130405 - RNA, 19 nt, Artificial Sequence
  Description of Artificial Sequence: Synthetic oligonucleotide
  Antisense strand to SEQ ID NO: 2130404
caauacgauggauuuggaa

SEQ ID NO: 2130406 - RNA, 19 nt, Artificial Sequence
  Description of Artificial Sequence: Synthetic oligonucleotide
  Sense strand starting at position 3070 of SEQ ID NO: 1882556
gagugcucuguguugcacu

SEQ ID NO: 2130407 - RNA, 19 nt, Artificial Sequence
  Description of Artificial Sequence: Synthetic oligonucleotide
  Antisense strand to SEQ ID NO: 2130406
agugcaacacagagcacuc

SEQ ID NO: 2130408 - RNA, 19 nt, Artificial Sequence
  Description of Artificial Sequence: Synthetic oligonucleotide
  Sense strand starting at position 3227 of SEQ ID NO: 1882556
aggcauggucucuggagga

SEQ ID NO: 2130409 - RNA, 19 nt, Artificial Sequence
  Description of Artificial Sequence: Synthetic oligonucleotide
  Antisense strand to SEQ ID NO: 2130408
uccuccagagaccaugccu

SEQ ID NO: 2130410 - RNA, 19 nt, Artificial Sequence
  Description of Artificial Sequence: Synthetic oligonucleotide
  Sense strand starting at position 3299 of SEQ ID NO: 1882556
ugugacuccugucuugaga

SEQ ID NO: 2130411 - RNA, 19 nt, Artificial Sequence
  Description of Artificial Sequence: Synthetic oligonucleotide
  Antisense strand to SEQ ID NO: 2130410
ucucaagacaggagucaca

SEQ ID NO: 2130412 - RNA, 19 nt, Artificial Sequence
  Description of Artificial Sequence: Synthetic oligonucleotide
  Sense strand starting at position 3312 of SEQ ID NO: 1882556
uugagagucucacucauuc

SEQ ID NO: 2130413 - RNA, 19 nt, Artificial Sequence
  Description of Artificial Sequence: Synthetic oligonucleotide
  Antisense strand to SEQ ID NO: 2130412
gaaugagugagacucucaa

SEQ ID NO: 2130414 - RNA, 19 nt, Artificial Sequence
  Description of Artificial Sequence: Synthetic oligonucleotide
  Sense strand starting at position 3548 of SEQ ID NO: 1882556
cuuguugacucacucauua

SEQ ID NO: 2130415 - RNA, 19 nt, Artificial Sequence
  Description of Artificial Sequence: Synthetic oligonucleotide
  Antisense strand to SEQ ID NO: 2130414
uaaugagugagucaacaag

SEQ ID NO: 2130416 - RNA, 19 nt, Artificial Sequence
  Description of Artificial Sequence: Synthetic oligonucleotide
  Sense strand starting at position 3920 of SEQ ID NO: 1882556
uuuagagcugugggauaca

SEQ ID NO: 2130417 - RNA, 19 nt, Artificial Sequence
  Description of Artificial Sequence: Synthetic oligonucleotide
  Antisense strand to SEQ ID NO: 2130416
uguaucccacagcucuaaa

SEQ ID NO: 2130418 - RNA, 19 nt, Artificial Sequence
  Description of Artificial Sequence: Synthetic oligonucleotide
  Sense strand starting at position 3949 of SEQ ID NO: 1882556
acagauuccugaucuugca

SEQ ID NO: 2130419 - RNA, 19 nt, Artificial Sequence
  Description of Artificial Sequence: Synthetic oligonucleotide
  Antisense strand to SEQ ID NO: 2130418
ugcaagaucaggaaucugu

SEQ ID NO: 2130420 - RNA, 19 nt, Artificial Sequence
  Description of Artificial Sequence: Synthetic oligonucleotide
  Sense strand starting at position 23 of SEQ ID NO: 1882557
uguagucuagcuguguuua

SEQ ID NO: 2130421 - RNA, 19 nt, Artificial Sequence
  Description of Artificial Sequence: Synthetic oligonucleotide
  Antisense strand to SEQ ID NO: 2130420
uaaacacagcuagacuaca

SEQ ID NO: 2130422 - RNA, 19 nt, Artificial Sequence
  Description of Artificial Sequence: Synthetic oligonucleotide
  Sense strand starting at position 26 of SEQ ID NO: 1882557
agucuagcuguguuuaugu

SEQ ID NO: 2130423 - RNA, 19 nt, Artificial Sequence
  Description of Artificial Sequence: Synthetic oligonucleotide
  Antisense strand to SEQ ID NO: 2130422
acauaaacacagcuagacu

SEQ ID NO: 2130424 - RNA, 19 nt, Artificial Sequence
  Description of Artificial Sequence: Synthetic oligonucleotide
  Sense strand starting at position 157 of SEQ ID NO: 1882557
acagcuauugagggaguca

SEQ ID NO: 2130425 - RNA, 19 nt, Artificial Sequence
  Description of Artificial Sequence: Synthetic oligonucleotide
  Antisense strand to SEQ ID NO: 2130424
ugacucccucaauagcugu

SEQ ID NO: 2130426 - RNA, 19 nt, Artificial Sequence
  Description of Artificial Sequence: Synthetic oligonucleotide
  Sense strand starting at position 219 of SEQ ID NO: 1882557
uuccucacccuguaagaga

SEQ ID NO: 2130427 - RNA, 19 nt, Artificial Sequence
  Description of Artificial Sequence: Synthetic oligonucleotide
  Antisense strand to SEQ ID NO: 2130426
ucucuuacagggugaggaa

SEQ ID NO: 2130428 - RNA, 19 nt, Artificial Sequence
  Description of Artificial Sequence: Synthetic oligonucleotide
  Sense strand starting at position 286 of SEQ ID NO: 1882557
ugagacugauccucuagua

SEQ ID NO: 2130429 - RNA, 19 nt, Artificial Sequence
  Description of Artificial Sequence: Synthetic oligonucleotide
  Antisense strand to SEQ ID NO: 2130428
uacuagaggaucagucuca

SEQ ID NO: 2130430 - RNA, 19 nt, Artificial Sequence
  Description of Artificial Sequence: Synthetic oligonucleotide
  Sense strand starting at position 586 of SEQ ID NO: 1882557
ggacaagauuaugccuacu

SEQ ID NO: 2130431 - RNA, 19 nt, Artificial Sequence
  Description of Artificial Sequence: Synthetic oligonucleotide
  Antisense strand to SEQ ID NO: 2130430
aguaggcauaaucuugucc

SEQ ID NO: 2130432 - RNA, 19 nt, Artificial Sequence
  Description of Artificial Sequence: Synthetic oligonucleotide
  Sense strand starting at position 713 of SEQ ID NO: 1882557
uagguccaagaaugugauu

SEQ ID NO: 2130433 - RNA, 19 nt, Artificial Sequence
  Description of Artificial Sequence: Synthetic oligonucleotide
  Antisense strand to SEQ ID NO: 2130432
aaucacauucuuggaccua

SEQ ID NO: 2130434 - RNA, 19 nt, Artificial Sequence
  Description of Artificial Sequence: Synthetic oligonucleotide
  Sense strand starting at position 715 of SEQ ID NO: 1882557
gguccaagaaugugauuaa

SEQ ID NO: 2130435 - RNA, 19 nt, Artificial Sequence
  Description of Artificial Sequence: Synthetic oligonucleotide
  Antisense strand to SEQ ID NO: 2130434
uuaaucacauucuuggacc

SEQ ID NO: 2130436 - RNA, 19 nt, Artificial Sequence
  Description of Artificial Sequence: Synthetic oligonucleotide
  Sense strand starting at position 783 of SEQ ID NO: 1882557
ggauaacaguguguagaug

SEQ ID NO: 2130437 - RNA, 19 nt, Artificial Sequence
  Description of Artificial Sequence: Synthetic oligonucleotide
  Antisense strand to SEQ ID NO: 2130436
caucuacacacuguuaucc

SEQ ID NO: 2130438 - RNA, 19 nt, Artificial Sequence
  Description of Artificial Sequence: Synthetic oligonucleotide
  Sense strand starting at position 866 of SEQ ID NO: 1882557
uuaauauccugggcaacua

SEQ ID NO: 2130439 - RNA, 19 nt, Artificial Sequence
  Description of Artificial Sequence: Synthetic oligonucleotide
  Antisense strand to SEQ ID NO: 2130438
uaguugcccaggauauuaa

SEQ ID NO: 2130440 - RNA, 19 nt, Artificial Sequence
  Description of Artificial Sequence: Synthetic oligonucleotide
  Sense strand starting at position 1049 of SEQ ID NO: 1882557
acagguuuauuucuguguu

SEQ ID NO: 2130441 - RNA, 19 nt, Artificial Sequence
  Description of Artificial Sequence: Synthetic oligonucleotide
  Antisense strand to SEQ ID NO: 2130440
aacacagaaauaaaccugu

SEQ ID NO: 2130442 - RNA, 19 nt, Artificial Sequence
  Description of Artificial Sequence: Synthetic oligonucleotide
  Sense strand starting at position 1051 of SEQ ID NO: 1882557
agguuuauuucuguguuau

SEQ ID NO: 2130443 - RNA, 19 nt, Artificial Sequence
  Description of Artificial Sequence: Synthetic oligonucleotide
  Antisense strand to SEQ ID NO: 2130442
auaacacagaaauaaaccu

SEQ ID NO: 2130444 - RNA, 19 nt, Artificial Sequence
  Description of Artificial Sequence: Synthetic oligonucleotide
  Sense strand starting at position 1052 of SEQ ID NO: 1882557
gguuuauuucuguguuaua

SEQ ID NO: 2130445 - RNA, 19 nt, Artificial Sequence
  Description of Artificial Sequence: Synthetic oligonucleotide
  Antisense strand to SEQ ID NO: 2130444
uauaacacagaaauaaacc

SEQ ID NO: 2130446 - RNA, 19 nt, Artificial Sequence
  Description of Artificial Sequence: Synthetic oligonucleotide
  Sense strand starting at position 1053 of SEQ ID NO: 1882557
guuuauuucuguguuauac

SEQ ID NO: 2130447 - RNA, 19 nt, Artificial Sequence
  Description of Artificial Sequence: Synthetic oligonucleotide
  Antisense strand to SEQ ID NO: 2130446
guauaacacagaaauaaac

SEQ ID NO: 2130448 - RNA, 19 nt, Artificial Sequence
  Description of Artificial Sequence: Synthetic oligonucleotide
  Sense strand starting at position 1071 of SEQ ID NO: 1882557
caugguagaccauaauguu

SEQ ID NO: 2130449 - RNA, 19 nt, Artificial Sequence
  Description of Artificial Sequence: Synthetic oligonucleotide
  Antisense strand to SEQ ID NO: 2130448
aacauuauggucuaccaug

SEQ ID NO: 2130450 - RNA, 19 nt, Artificial Sequence
  Description of Artificial Sequence: Synthetic oligonucleotide
  Sense strand starting at position 1153 of SEQ ID NO: 1882557
gggagcugccggagucaau

SEQ ID NO: 2130451 - RNA, 19 nt, Artificial Sequence
  Description of Artificial Sequence: Synthetic oligonucleotide
  Antisense strand to SEQ ID NO: 2130450
auugacuccggcagcuccc

SEQ ID NO: 2130452 - RNA, 19 nt, Artificial Sequence
  Description of Artificial Sequence: Synthetic oligonucleotide
  Sense strand starting at position 1186 of SEQ ID NO: 1882557
ugauuaauuuaggaucuga

SEQ ID NO: 2130453 - RNA, 19 nt, Artificial Sequence
  Description of Artificial Sequence: Synthetic oligonucleotide
  Antisense strand to SEQ ID NO: 2130452
ucagauccuaaauuaauca

SEQ ID NO: 2130454 - RNA, 19 nt, Artificial Sequence
  Description of Artificial Sequence: Synthetic oligonucleotide
  Sense strand starting at position 1697 of SEQ ID NO: 1882557
acaguaugccuggaguaca

SEQ ID NO: 2130455 - RNA, 19 nt, Artificial Sequence
  Description of Artificial Sequence: Synthetic oligonucleotide
  Antisense strand to SEQ ID NO: 2130454
uguacuccaggcauacugu

SEQ ID NO: 2130456 - RNA, 19 nt, Artificial Sequence
  Description of Artificial Sequence: Synthetic oligonucleotide
  Sense strand starting at position 2191 of SEQ ID NO: 1882557
uggcauccagaaggauaua

SEQ ID NO: 2130457 - RNA, 19 nt, Artificial Sequence
  Description of Artificial Sequence: Synthetic oligonucleotide
  Antisense strand to SEQ ID NO: 2130456
uauauccuucuggaugcca

SEQ ID NO: 2130458 - RNA, 19 nt, Artificial Sequence
  Description of Artificial Sequence: Synthetic oligonucleotide
  Sense strand starting at position 2229 of SEQ ID NO: 1882557
ucaugaggauuuggauaga

SEQ ID NO: 2130459 - RNA, 19 nt, Artificial Sequence
  Description of Artificial Sequence: Synthetic oligonucleotide
  Antisense strand to SEQ ID NO: 2130458
ucuauccaaauccucauga

SEQ ID NO: 2130460 - RNA, 19 nt, Artificial Sequence
  Description of Artificial Sequence: Synthetic oligonucleotide
  Sense strand starting at position 2266 of SEQ ID NO: 1882557
cccaaacuccuguaagguu

SEQ ID NO: 2130461 - RNA, 19 nt, Artificial Sequence
  Description of Artificial Sequence: Synthetic oligonucleotide
  Antisense strand to SEQ ID NO: 2130460
aaccuuacaggaguuuggg

SEQ ID NO: 2130462 - RNA, 19 nt, Artificial Sequence
  Description of Artificial Sequence: Synthetic oligonucleotide
  Sense strand starting at position 2428 of SEQ ID NO: 1882557
ucugaacaacagugaugau

SEQ ID NO: 2130463 - RNA, 19 nt, Artificial Sequence
  Description of Artificial Sequence: Synthetic oligonucleotide
  Antisense strand to SEQ ID NO: 2130462
aucaucacuguuguucaga

SEQ ID NO: 2130464 - RNA, 19 nt, Artificial Sequence
  Description of Artificial Sequence: Synthetic oligonucleotide
  Sense strand starting at position 2461 of SEQ ID NO: 1882557
aucuuuggacuguaucaca

SEQ ID NO: 2130465 - RNA, 19 nt, Artificial Sequence
  Description of Artificial Sequence: Synthetic oligonucleotide
  Antisense strand to SEQ ID NO: 2130464
ugugauacaguccaaagau

SEQ ID NO: 2130466 - RNA, 19 nt, Artificial Sequence
  Description of Artificial Sequence: Synthetic oligonucleotide
  Sense strand starting at position 2720 of SEQ ID NO: 1882557
cggccuuuacaauaaagau

SEQ ID NO: 2130467 - RNA, 19 nt, Artificial Sequence
  Description of Artificial Sequence: Synthetic oligonucleotide
  Antisense strand to SEQ ID NO: 2130466
aucuuuauuguaaaggccg

SEQ ID NO: 2130468 - RNA, 19 nt, Artificial Sequence
  Description of Artificial Sequence: Synthetic oligonucleotide
  Sense strand starting at position 2819 of SEQ ID NO: 1882557
uaguuuauuggaugaaucu

SEQ ID NO: 2130469 - RNA, 19 nt, Artificial Sequence
  Description of Artificial Sequence: Synthetic oligonucleotide
  Antisense strand to SEQ ID NO: 2130468
agauucauccaauaaacua

SEQ ID NO: 2130470 - RNA, 19 nt, Artificial Sequence
  Description of Artificial Sequence: Synthetic oligonucleotide
  Sense strand starting at position 2901 of SEQ ID NO: 1882557
cuuuaaguaguuuagacau

SEQ ID NO: 2130471 - RNA, 19 nt, Artificial Sequence
  Description of Artificial Sequence: Synthetic oligonucleotide
  Antisense strand to SEQ ID NO: 2130470
augucuaaacuacuuaaag

SEQ ID NO: 2130472 - RNA, 19 nt, Artificial Sequence
  Description of Artificial Sequence: Synthetic oligonucleotide
  Sense strand starting at position 2919 of SEQ ID NO: 1882557
uuaauagaguuucugauag

SEQ ID NO: 2130473 - RNA, 19 nt, Artificial Sequence
  Description of Artificial Sequence: Synthetic oligonucleotide
  Antisense strand to SEQ ID NO: 2130472
cuaucagaaacucuauuaa

SEQ ID NO: 2130474 - RNA, 19 nt, Artificial Sequence
  Description of Artificial Sequence: Synthetic oligonucleotide
  Sense strand starting at position 2937 of SEQ ID NO: 1882557
gcagaucuucuauaaagua

SEQ ID NO: 2130475 - RNA, 19 nt, Artificial Sequence
  Description of Artificial Sequence: Synthetic oligonucleotide
  Antisense strand to SEQ ID NO: 2130474
uacuuuauagaagaucugc

SEQ ID NO: 2130476 - RNA, 19 nt, Artificial Sequence
  Description of Artificial Sequence: Synthetic oligonucleotide
  Sense strand starting at position 2990 of SEQ ID NO: 1882557
uugauucuaugagcuuaga

SEQ ID NO: 2130477 - RNA, 19 nt, Artificial Sequence
  Description of Artificial Sequence: Synthetic oligonucleotide
  Antisense strand to SEQ ID NO: 2130476
ucuaagcucauagaaucaa

SEQ ID NO: 2130478 - RNA, 19 nt, Artificial Sequence
  Description of Artificial Sequence: Synthetic oligonucleotide
  Sense strand starting at position 3003 of SEQ ID NO: 1882557
cuuagaauagaguggguua

SEQ ID NO: 2130479 - RNA, 19 nt, Artificial Sequence
  Description of Artificial Sequence: Synthetic oligonucleotide
  Antisense strand to SEQ ID NO: 2130478
uaacccacucuauucuaag

SEQ ID NO: 2130480 - RNA, 19 nt, Artificial Sequence
  Description of Artificial Sequence: Synthetic oligonucleotide
  Sense strand starting at position 3004 of SEQ ID NO: 1882557
uuagaauagaguggguuaa

SEQ ID NO: 2130481 - RNA, 19 nt, Artificial Sequence
  Description of Artificial Sequence: Synthetic oligonucleotide
  Antisense strand to SEQ ID NO: 2130480
uuaacccacucuauucuaa

SEQ ID NO: 2130482 - RNA, 19 nt, Artificial Sequence
  Description of Artificial Sequence: Synthetic oligonucleotide
  Sense strand starting at position 3081 of SEQ ID NO: 1882557
guguguaguaaggaauaau

SEQ ID NO: 2130483 - RNA, 19 nt, Artificial Sequence
  Description of Artificial Sequence: Synthetic oligonucleotide
  Antisense strand to SEQ ID NO: 2130482
auuauuccuuacuacacac

SEQ ID NO: 2130484 - RNA, 19 nt, Artificial Sequence
  Description of Artificial Sequence: Synthetic oligonucleotide
  Sense strand starting at position 3114 of SEQ ID NO: 1882557
uauguuagucgucucgauu

SEQ ID NO: 2130485 - RNA, 19 nt, Artificial Sequence
  Description of Artificial Sequence: Synthetic oligonucleotide
  Antisense strand to SEQ ID NO: 2130484
aaucgagacgacuaacaua

SEQ ID NO: 2130486 - RNA, 19 nt, Artificial Sequence
  Description of Artificial Sequence: Synthetic oligonucleotide
  Sense strand starting at position 3127 of SEQ ID NO: 1882557
ucgauuugcuaauucugau

SEQ ID NO: 2130487 - RNA, 19 nt, Artificial Sequence
  Description of Artificial Sequence: Synthetic oligonucleotide
  Antisense strand to SEQ ID NO: 2130486
aucagaauuagcaaaucga

SEQ ID NO: 2130488 - RNA, 19 nt, Artificial Sequence
  Description of Artificial Sequence: Synthetic oligonucleotide
  Sense strand starting at position 3169 of SEQ ID NO: 1882557
uugggaaacuaucuccuuu

SEQ ID NO: 2130489 - RNA, 19 nt, Artificial Sequence
  Description of Artificial Sequence: Synthetic oligonucleotide
  Antisense strand to SEQ ID NO: 2130488
aaaggagauaguuucccaa

SEQ ID NO: 2130490 - RNA, 19 nt, Artificial Sequence
  Description of Artificial Sequence: Synthetic oligonucleotide
  Sense strand starting at position 3239 of SEQ ID NO: 1882557
uauauaucauaggcaguga

SEQ ID NO: 2130491 - RNA, 19 nt, Artificial Sequence
  Description of Artificial Sequence: Synthetic oligonucleotide
  Antisense strand to SEQ ID NO: 2130490
ucacugccuaugauauaua

SEQ ID NO: 2130492 - RNA, 19 nt, Artificial Sequence
  Description of Artificial Sequence: Synthetic oligonucleotide
  Sense strand starting at position 3296 of SEQ ID NO: 1882557
uugggagcgauggaguauu

SEQ ID NO: 2130493 - RNA, 19 nt, Artificial Sequence
  Description of Artificial Sequence: Synthetic oligonucleotide
  Antisense strand to SEQ ID NO: 2130492
aauacuccaucgcucccaa

SEQ ID NO: 2130494 - RNA, 19 nt, Artificial Sequence
  Description of Artificial Sequence: Synthetic oligonucleotide
  Sense strand starting at position 3425 of SEQ ID NO: 1882557
cuaggaguggcauaaagua

SEQ ID NO: 2130495 - RNA, 19 nt, Artificial Sequence
  Description of Artificial Sequence: Synthetic oligonucleotide
  Antisense strand to SEQ ID NO: 2130494
uacuuuaugccacuccuag

SEQ ID NO: 2130496 - RNA, 19 nt, Artificial Sequence
  Description of Artificial Sequence: Synthetic oligonucleotide
  Sense strand starting at position 3544 of SEQ ID NO: 1882557
guguucuuccuagugcuau

SEQ ID NO: 2130497 - RNA, 19 nt, Artificial Sequence
  Description of Artificial Sequence: Synthetic oligonucleotide
  Antisense strand to SEQ ID NO: 2130496
auagcacuaggaagaacac

SEQ ID NO: 2130498 - RNA, 19 nt, Artificial Sequence
  Description of Artificial Sequence: Synthetic oligonucleotide
  Sense strand starting at position 3661 of SEQ ID NO: 1882557
aggguaugggaaugauucu

SEQ ID NO: 2130499 - RNA, 19 nt, Artificial Sequence
  Description of Artificial Sequence: Synthetic oligonucleotide
  Antisense strand to SEQ ID NO: 2130498
agaaucauucccauacccu

SEQ ID NO: 2130500 - RNA, 19 nt, Artificial Sequence
  Description of Artificial Sequence: Synthetic oligonucleotide
  Sense strand starting at position 62 of SEQ ID NO: 1882558
gagaguuaauggucaggga

SEQ ID NO: 2130501 - RNA, 19 nt, Artificial Sequence
  Description of Artificial Sequence: Synthetic oligonucleotide
  Antisense strand to SEQ ID NO: 2130500
ucccugaccauuaacucuc

SEQ ID NO: 2130502 - RNA, 19 nt, Artificial Sequence
  Description of Artificial Sequence: Synthetic oligonucleotide
  Sense strand starting at position 66 of SEQ ID NO: 1882558
guuaauggucagggaucau

SEQ ID NO: 2130503 - RNA, 19 nt, Artificial Sequence
  Description of Artificial Sequence: Synthetic oligonucleotide
  Antisense strand to SEQ ID NO: 2130502
augaucccugaccauuaac

SEQ ID NO: 2130504 - RNA, 19 nt, Artificial Sequence
  Description of Artificial Sequence: Synthetic oligonucleotide
  Sense strand starting at position 78 of SEQ ID NO: 1882558
ggaucaugaguuggaggca

SEQ ID NO: 2130505 - RNA, 19 nt, Artificial Sequence
  Description of Artificial Sequence: Synthetic oligonucleotide
  Antisense strand to SEQ ID NO: 2130504
ugccuccaacucaugaucc

SEQ ID NO: 2130506 - RNA, 19 nt, Artificial Sequence
  Description of Artificial Sequence: Synthetic oligonucleotide
  Sense strand starting at position 126 of SEQ ID NO: 1882558
uuaaguugguguucauugu

SEQ ID NO: 2130507 - RNA, 19 nt, Artificial Sequence
  Description of Artificial Sequence: Synthetic oligonucleotide
  Antisense strand to SEQ ID NO: 2130506
acaaugaacaccaacuuaa

SEQ ID NO: 2130508 - RNA, 19 nt, Artificial Sequence
  Description of Artificial Sequence: Synthetic oligonucleotide
  Sense strand starting at position 152 of SEQ ID NO: 1882558
ggaggaagcuggucugcau

SEQ ID NO: 2130509 - RNA, 19 nt, Artificial Sequence
  Description of Artificial Sequence: Synthetic oligonucleotide
  Antisense strand to SEQ ID NO: 2130508
augcagaccagcuuccucc

SEQ ID NO: 2130510 - RNA, 19 nt, Artificial Sequence
  Description of Artificial Sequence: Synthetic oligonucleotide
  Sense strand starting at position 206 of SEQ ID NO: 1882558
gaggguguggccuggauua

SEQ ID NO: 2130511 - RNA, 19 nt, Artificial Sequence
  Description of Artificial Sequence: Synthetic oligonucleotide
  Antisense strand to SEQ ID NO: 2130510
uaauccaggccacacccuc

SEQ ID NO: 2130512 - RNA, 19 nt, Artificial Sequence
  Description of Artificial Sequence: Synthetic oligonucleotide
  Sense strand starting at position 208 of SEQ ID NO: 1882558
ggguguggccuggauuauu

SEQ ID NO: 2130513 - RNA, 19 nt, Artificial Sequence
  Description of Artificial Sequence: Synthetic oligonucleotide
  Antisense strand to SEQ ID NO: 2130512
aauaauccaggccacaccc

SEQ ID NO: 2130514 - RNA, 19 nt, Artificial Sequence
  Description of Artificial Sequence: Synthetic oligonucleotide
  Sense strand starting at position 213 of SEQ ID NO: 1882558
uggccuggauuauuccaau

SEQ ID NO: 2130515 - RNA, 19 nt, Artificial Sequence
  Description of Artificial Sequence: Synthetic oligonucleotide
  Antisense strand to SEQ ID NO: 2130514
auuggaauaauccaggcca

SEQ ID NO: 2130516 - RNA, 19 nt, Artificial Sequence
  Description of Artificial Sequence: Synthetic oligonucleotide
  Sense strand starting at position 282 of SEQ ID NO: 1882558
ugugcuauuugagggagau

SEQ ID NO: 2130517 - RNA, 19 nt, Artificial Sequence
  Description of Artificial Sequence: Synthetic oligonucleotide
  Antisense strand to SEQ ID NO: 2130516
aucucccucaaauagcaca

SEQ ID NO: 2130518 - RNA, 19 nt, Artificial Sequence
  Description of Artificial Sequence: Synthetic oligonucleotide
  Sense strand starting at position 329 of SEQ ID NO: 1882558
gguggagaguacuggauuu

SEQ ID NO: 2130519 - RNA, 19 nt, Artificial Sequence
  Description of Artificial Sequence: Synthetic oligonucleotide
  Antisense strand to SEQ ID NO: 2130518
aaauccaguacucuccacc

SEQ ID NO: 2130520 - RNA, 19 nt, Artificial Sequence
  Description of Artificial Sequence: Synthetic oligonucleotide
  Sense strand starting at position 564 of SEQ ID NO: 1882558
augagaaggugaguuuauu

SEQ ID NO: 2130521 - RNA, 19 nt, Artificial Sequence
  Description of Artificial Sequence: Synthetic oligonucleotide
  Antisense strand to SEQ ID NO: 2130520
aauaaacucaccuucucau

SEQ ID NO: 2130522 - RNA, 19 nt, Artificial Sequence
  Description of Artificial Sequence: Synthetic oligonucleotide
  Sense strand starting at position 831 of SEQ ID NO: 1882558
aucuguuucuccuccagga

SEQ ID NO: 2130523 - RNA, 19 nt, Artificial Sequence
  Description of Artificial Sequence: Synthetic oligonucleotide
  Antisense strand to SEQ ID NO: 2130522
uccuggaggagaaacagau

SEQ ID NO: 2130524 - RNA, 19 nt, Artificial Sequence
  Description of Artificial Sequence: Synthetic oligonucleotide
  Sense strand starting at position 833 of SEQ ID NO: 1882558
cuguuucuccuccaggagu

SEQ ID NO: 2130525 - RNA, 19 nt, Artificial Sequence
  Description of Artificial Sequence: Synthetic oligonucleotide
  Antisense strand to SEQ ID NO: 2130524
acuccuggaggagaaacag

SEQ ID NO: 2130526 - RNA, 19 nt, Artificial Sequence
  Description of Artificial Sequence: Synthetic oligonucleotide
  Sense strand starting at position 1260 of SEQ ID NO: 1882558
aaaugucuuugguuuguuu

SEQ ID NO: 2130527 - RNA, 19 nt, Artificial Sequence
  Description of Artificial Sequence: Synthetic oligonucleotide
  Antisense strand to SEQ ID NO: 2130526
aaacaaaccaaagacauuu

SEQ ID NO: 2130528 - RNA, 19 nt, Artificial Sequence
  Description of Artificial Sequence: Synthetic oligonucleotide
  Sense strand starting at position 1295 of SEQ ID NO: 1882558
aagugcauugugggaauau

SEQ ID NO: 2130529 - RNA, 19 nt, Artificial Sequence
  Description of Artificial Sequence: Synthetic oligonucleotide
  Antisense strand to SEQ ID NO: 2130528
auauucccacaaugcacuu

SEQ ID NO: 2130530 - RNA, 19 nt, Artificial Sequence
  Description of Artificial Sequence: Synthetic oligonucleotide
  Sense strand starting at position 1908 of SEQ ID NO: 1882558
gguccuaagaccuauguga

SEQ ID NO: 2130531 - RNA, 19 nt, Artificial Sequence
  Description of Artificial Sequence: Synthetic oligonucleotide
  Antisense strand to SEQ ID NO: 2130530
ucacauaggucuuaggacc

SEQ ID NO: 2130532 - RNA, 19 nt, Artificial Sequence
  Description of Artificial Sequence: Synthetic oligonucleotide
  Sense strand starting at position 1910 of SEQ ID NO: 1882558
uccuaagaccuaugugaca

SEQ ID NO: 2130533 - RNA, 19 nt, Artificial Sequence
  Description of Artificial Sequence: Synthetic oligonucleotide
  Antisense strand to SEQ ID NO: 2130532
ugucacauaggucuuagga

SEQ ID NO: 2130534 - RNA, 19 nt, Artificial Sequence
  Description of Artificial Sequence: Synthetic oligonucleotide
  Sense strand starting at position 1924 of SEQ ID NO: 1882558
ugacaaaugugucccaggu

SEQ ID NO: 2130535 - RNA, 19 nt, Artificial Sequence
  Description of Artificial Sequence: Synthetic oligonucleotide
  Antisense strand to SEQ ID NO: 2130534
accugggacacauuuguca

SEQ ID NO: 2130536 - RNA, 19 nt, Artificial Sequence
  Description of Artificial Sequence: Synthetic oligonucleotide
  Sense strand starting at position 1977 of SEQ ID NO: 1882558
ggagacccaucccuuuaga

SEQ ID NO: 2130537 - RNA, 19 nt, Artificial Sequence
  Description of Artificial Sequence: Synthetic oligonucleotide
  Antisense strand to SEQ ID NO: 2130536
ucuaaagggaugggucucc

SEQ ID NO: 2130538 - RNA, 19 nt, Artificial Sequence
  Description of Artificial Sequence: Synthetic oligonucleotide
  Sense strand starting at position 2092 of SEQ ID NO: 1882558
ugccuugagucaccaaugu

SEQ ID NO: 2130539 - RNA, 19 nt, Artificial Sequence
  Description of Artificial Sequence: Synthetic oligonucleotide
  Antisense strand to SEQ ID NO: 2130538
acauuggugacucaaggca

SEQ ID NO: 2130540 - RNA, 19 nt, Artificial Sequence
  Description of Artificial Sequence: Synthetic oligonucleotide
  Sense strand starting at position 2096 of SEQ ID NO: 1882558
uugagucaccaaugugaag

SEQ ID NO: 2130541 - RNA, 19 nt, Artificial Sequence
  Description of Artificial Sequence: Synthetic oligonucleotide
  Antisense strand to SEQ ID NO: 2130540
cuucacauuggugacucaa

SEQ ID NO: 2130542 - RNA, 19 nt, Artificial Sequence
  Description of Artificial Sequence: Synthetic oligonucleotide
  Sense strand starting at position 2213 of SEQ ID NO: 1882558
gugcuagagcuguacucaa

SEQ ID NO: 2130543 - RNA, 19 nt, Artificial Sequence
  Description of Artificial Sequence: Synthetic oligonucleotide
  Antisense strand to SEQ ID NO: 2130542
uugaguacagcucuagcac

SEQ ID NO: 2130544 - RNA, 19 nt, Artificial Sequence
  Description of Artificial Sequence: Synthetic oligonucleotide
  Sense strand starting at position 2556 of SEQ ID NO: 1882558
gaggauucugagggccagu

SEQ ID NO: 2130545 - RNA, 19 nt, Artificial Sequence
  Description of Artificial Sequence: Synthetic oligonucleotide
  Antisense strand to SEQ ID NO: 2130544
acuggcccucagaauccuc

SEQ ID NO: 2130546 - RNA, 19 nt, Artificial Sequence
  Description of Artificial Sequence: Synthetic oligonucleotide
  Sense strand starting at position 2604 of SEQ ID NO: 1882558
aagcauuggccgggcaaga

SEQ ID NO: 2130547 - RNA, 19 nt, Artificial Sequence
  Description of Artificial Sequence: Synthetic oligonucleotide
  Antisense strand to SEQ ID NO: 2130546
ucuugcccggccaaugcuu

SEQ ID NO: 2130548 - RNA, 19 nt, Artificial Sequence
  Description of Artificial Sequence: Synthetic oligonucleotide
  Sense strand starting at position 2949 of SEQ ID NO: 1882558
caaucagcuccagggagaa

SEQ ID NO: 2130549 - RNA, 19 nt, Artificial Sequence
  Description of Artificial Sequence: Synthetic oligonucleotide
  Antisense strand to SEQ ID NO: 2130548
uucucccuggagcugauug

SEQ ID NO: 2130550 - RNA, 19 nt, Artificial Sequence
  Description of Artificial Sequence: Synthetic oligonucleotide
  Sense strand starting at position 3098 of SEQ ID NO: 1882558
gagaaaugcggcugaggau

SEQ ID NO: 2130551 - RNA, 19 nt, Artificial Sequence
  Description of Artificial Sequence: Synthetic oligonucleotide
  Antisense strand to SEQ ID NO: 2130550
auccucagccgcauuucuc

SEQ ID NO: 2130552 - RNA, 19 nt, Artificial Sequence
  Description of Artificial Sequence: Synthetic oligonucleotide
  Sense strand starting at position 3197 of SEQ ID NO: 1882558
ggagaacauugugagauuc

SEQ ID NO: 2130553 - RNA, 19 nt, Artificial Sequence
  Description of Artificial Sequence: Synthetic oligonucleotide
  Antisense strand to SEQ ID NO: 2130552
gaaucucacaauguucucc

SEQ ID NO: 2130554 - RNA, 19 nt, Artificial Sequence
  Description of Artificial Sequence: Synthetic oligonucleotide
  Sense strand starting at position 3359 of SEQ ID NO: 1882558
cugaacuggguguauuaua

SEQ ID NO: 2130555 - RNA, 19 nt, Artificial Sequence
  Description of Artificial Sequence: Synthetic oligonucleotide
  Antisense strand to SEQ ID NO: 2130554
uauaauacacccaguucag

SEQ ID NO: 2130556 - RNA, 19 nt, Artificial Sequence
  Description of Artificial Sequence: Synthetic oligonucleotide
  Sense strand starting at position 3366 of SEQ ID NO: 1882558
ggguguauuauaugaaauc

SEQ ID NO: 2130557 - RNA, 19 nt, Artificial Sequence
  Description of Artificial Sequence: Synthetic oligonucleotide
  Antisense strand to SEQ ID NO: 2130556
gauuucauauaauacaccc

SEQ ID NO: 2130558 - RNA, 19 nt, Artificial Sequence
  Description of Artificial Sequence: Synthetic oligonucleotide
  Sense strand starting at position 3400 of SEQ ID NO: 1882558
uuuagugcacauuauguaa

SEQ ID NO: 2130559 - RNA, 19 nt, Artificial Sequence
  Description of Artificial Sequence: Synthetic oligonucleotide
  Antisense strand to SEQ ID NO: 2130558
uuacauaaugugcacuaaa

SEQ ID NO: 2130560 - RNA, 19 nt, Artificial Sequence
  Description of Artificial Sequence: Synthetic oligonucleotide
  Sense strand starting at position 3403 of SEQ ID NO: 1882558
agugcacauuauguaaauu

SEQ ID NO: 2130561 - RNA, 19 nt, Artificial Sequence
  Description of Artificial Sequence: Synthetic oligonucleotide
  Antisense strand to SEQ ID NO: 2130560
aauuuacauaaugugcacu

SEQ ID NO: 2130562 - RNA, 19 nt, Artificial Sequence
  Description of Artificial Sequence: Synthetic oligonucleotide
  Sense strand starting at position 3652 of SEQ ID NO: 1882558
ggaggucugggcugggaaa

SEQ ID NO: 2130563 - RNA, 19 nt, Artificial Sequence
  Description of Artificial Sequence: Synthetic oligonucleotide
  Antisense strand to SEQ ID NO: 2130562
uuucccagcccagaccucc

SEQ ID NO: 2130564 - RNA, 19 nt, Artificial Sequence
  Description of Artificial Sequence: Synthetic oligonucleotide
  Sense strand starting at position 3693 of SEQ ID NO: 1882558
uccugaaaggaaugugacu

SEQ ID NO: 2130565 - RNA, 19 nt, Artificial Sequence
  Description of Artificial Sequence: Synthetic oligonucleotide
  Antisense strand to SEQ ID NO: 2130564
agucacauuccuuucagga

SEQ ID NO: 2130566 - RNA, 19 nt, Artificial Sequence
  Description of Artificial Sequence: Synthetic oligonucleotide
  Sense strand starting at position 3699 of SEQ ID NO: 1882558
aaggaaugugacugaucgu

SEQ ID NO: 2130567 - RNA, 19 nt, Artificial Sequence
  Description of Artificial Sequence: Synthetic oligonucleotide
  Antisense strand to SEQ ID NO: 2130566
acgaucagucacauuccuu

SEQ ID NO: 2130568 - RNA, 19 nt, Artificial Sequence
  Description of Artificial Sequence: Synthetic oligonucleotide
  Sense strand starting at position 3702 of SEQ ID NO: 1882558
gaaugugacugaucguguu

SEQ ID NO: 2130569 - RNA, 19 nt, Artificial Sequence
  Description of Artificial Sequence: Synthetic oligonucleotide
  Antisense strand to SEQ ID NO: 2130568
aacacgaucagucacauuc

SEQ ID NO: 2130570 - RNA, 19 nt, Artificial Sequence
  Description of Artificial Sequence: Synthetic oligonucleotide
  Sense strand starting at position 3708 of SEQ ID NO: 1882558
gacugaucguguucucuga

SEQ ID NO: 2130571 - RNA, 19 nt, Artificial Sequence
  Description of Artificial Sequence: Synthetic oligonucleotide
  Antisense strand to SEQ ID NO: 2130570
ucagagaacacgaucaguc

SEQ ID NO: 2130572 - RNA, 19 nt, Artificial Sequence
  Description of Artificial Sequence: Synthetic oligonucleotide
  Sense strand starting at position 3877 of SEQ ID NO: 1882558
gcgagugugaccuagagga

SEQ ID NO: 2130573 - RNA, 19 nt, Artificial Sequence
  Description of Artificial Sequence: Synthetic oligonucleotide
  Antisense strand to SEQ ID NO: 2130572
uccucuaggucacacucgc

SEQ ID NO: 2130574 - RNA, 19 nt, Artificial Sequence
  Description of Artificial Sequence: Synthetic oligonucleotide
  Sense strand starting at position 3937 of SEQ ID NO: 1882558
ggaagagauugucacauga

SEQ ID NO: 2130575 - RNA, 19 nt, Artificial Sequence
  Description of Artificial Sequence: Synthetic oligonucleotide
  Antisense strand to SEQ ID NO: 2130574
ucaugugacaaucucuucc

SEQ ID NO: 2130576 - RNA, 19 nt, Artificial Sequence
  Description of Artificial Sequence: Synthetic oligonucleotide
  Sense strand starting at position 3939 of SEQ ID NO: 1882558
aagagauugucacaugaag

SEQ ID NO: 2130577 - RNA, 19 nt, Artificial Sequence
  Description of Artificial Sequence: Synthetic oligonucleotide
  Antisense strand to SEQ ID NO: 2130576
cuucaugugacaaucucuu

SEQ ID NO: 2130578 - RNA, 19 nt, Artificial Sequence
  Description of Artificial Sequence: Synthetic oligonucleotide
  Sense strand starting at position 3960 of SEQ ID NO: 1882558
cuugcucuccuugaguaca

SEQ ID NO: 2130579 - RNA, 19 nt, Artificial Sequence
  Description of Artificial Sequence: Synthetic oligonucleotide
  Antisense strand to SEQ ID NO: 2130578
uguacucaaggagagcaag

SEQ ID NO: 2130580 - RNA, 19 nt, Artificial Sequence
  Description of Artificial Sequence: Synthetic oligonucleotide
  Sense strand starting at position 27 of SEQ ID NO: 1882559
uaaugacagcccgaugcua

SEQ ID NO: 2130581 - RNA, 19 nt, Artificial Sequence
  Description of Artificial Sequence: Synthetic oligonucleotide
  Antisense strand to SEQ ID NO: 2130580
uagcaucgggcugucauua

SEQ ID NO: 2130582 - RNA, 19 nt, Artificial Sequence
  Description of Artificial Sequence: Synthetic oligonucleotide
  Sense strand starting at position 53 of SEQ ID NO: 1882559
caagaucuugugggucuga

SEQ ID NO: 2130583 - RNA, 19 nt, Artificial Sequence
  Description of Artificial Sequence: Synthetic oligonucleotide
  Antisense strand to SEQ ID NO: 2130582
ucagacccacaagaucuug

SEQ ID NO: 2130584 - RNA, 19 nt, Artificial Sequence
  Description of Artificial Sequence: Synthetic oligonucleotide
  Sense strand starting at position 54 of SEQ ID NO: 1882559
aagaucuugugggucugaa

SEQ ID NO: 2130585 - RNA, 19 nt, Artificial Sequence
  Description of Artificial Sequence: Synthetic oligonucleotide
  Antisense strand to SEQ ID NO: 2130584
uucagacccacaagaucuu

SEQ ID NO: 2130586 - RNA, 19 nt, Artificial Sequence
  Description of Artificial Sequence: Synthetic oligonucleotide
  Sense strand starting at position 224 of SEQ ID NO: 1882559
gauagaaauuguucuugga

SEQ ID NO: 2130587 - RNA, 19 nt, Artificial Sequence
  Description of Artificial Sequence: Synthetic oligonucleotide
  Antisense strand to SEQ ID NO: 2130586
uccaagaacaauuucuauc

SEQ ID NO: 2130588 - RNA, 19 nt, Artificial Sequence
  Description of Artificial Sequence: Synthetic oligonucleotide
  Sense strand starting at position 409 of SEQ ID NO: 1882559
uaaguugugccucaugauc

SEQ ID NO: 2130589 - RNA, 19 nt, Artificial Sequence
  Description of Artificial Sequence: Synthetic oligonucleotide
  Antisense strand to SEQ ID NO: 2130588
gaucaugaggcacaacuua

SEQ ID NO: 2130590 - RNA, 19 nt, Artificial Sequence
  Description of Artificial Sequence: Synthetic oligonucleotide
  Sense strand starting at position 480 of SEQ ID NO: 1882559
gaaggugguaaucaaugua

SEQ ID NO: 2130591 - RNA, 19 nt, Artificial Sequence
  Description of Artificial Sequence: Synthetic oligonucleotide
  Antisense strand to SEQ ID NO: 2130590
uacauugauuaccaccuuc

SEQ ID NO: 2130592 - RNA, 19 nt, Artificial Sequence
  Description of Artificial Sequence: Synthetic oligonucleotide
  Sense strand starting at position 592 of SEQ ID NO: 1882559
auagguaccaguuguuaaa

SEQ ID NO: 2130593 - RNA, 19 nt, Artificial Sequence
  Description of Artificial Sequence: Synthetic oligonucleotide
  Antisense strand to SEQ ID NO: 2130592
uuuaacaacugguaccuau

SEQ ID NO: 2130594 - RNA, 19 nt, Artificial Sequence
  Description of Artificial Sequence: Synthetic oligonucleotide
  Sense strand starting at position 594 of SEQ ID NO: 1882559
agguaccaguuguuaaaua

SEQ ID NO: 2130595 - RNA, 19 nt, Artificial Sequence
  Description of Artificial Sequence: Synthetic oligonucleotide
  Antisense strand to SEQ ID NO: 2130594
uauuuaacaacugguaccu

SEQ ID NO: 2130596 - RNA, 19 nt, Artificial Sequence
  Description of Artificial Sequence: Synthetic oligonucleotide
  Sense strand starting at position 1005 of SEQ ID NO: 1882559
ccucuuuggucucuuauuu

SEQ ID NO: 2130597 - RNA, 19 nt, Artificial Sequence
  Description of Artificial Sequence: Synthetic oligonucleotide
  Antisense strand to SEQ ID NO: 2130596
aaauaagagaccaaagagg

SEQ ID NO: 2130598 - RNA, 19 nt, Artificial Sequence
  Description of Artificial Sequence: Synthetic oligonucleotide
  Sense strand starting at position 1323 of SEQ ID NO: 1882559
agagauuagcacuggauuc

SEQ ID NO: 2130599 - RNA, 19 nt, Artificial Sequence
  Description of Artificial Sequence: Synthetic oligonucleotide
  Antisense strand to SEQ ID NO: 2130598
gaauccagugcuaaucucu

SEQ ID NO: 2130600 - RNA, 19 nt, Artificial Sequence
  Description of Artificial Sequence: Synthetic oligonucleotide
  Sense strand starting at position 1524 of SEQ ID NO: 1882559
ggaucauucuaagccauua

SEQ ID NO: 2130601 - RNA, 19 nt, Artificial Sequence
  Description of Artificial Sequence: Synthetic oligonucleotide
  Antisense strand to SEQ ID NO: 2130600
uaauggcuuagaaugaucc

SEQ ID NO: 2130602 - RNA, 19 nt, Artificial Sequence
  Description of Artificial Sequence: Synthetic oligonucleotide
  Sense strand starting at position 1623 of SEQ ID NO: 1882559
gagggauuauagcuugagu

SEQ ID NO: 2130603 - RNA, 19 nt, Artificial Sequence
  Description of Artificial Sequence: Synthetic oligonucleotide
  Antisense strand to SEQ ID NO: 2130602
acucaagcuauaaucccuc

SEQ ID NO: 2130604 - RNA, 19 nt, Artificial Sequence
  Description of Artificial Sequence: Synthetic oligonucleotide
  Sense strand starting at position 1625 of SEQ ID NO: 1882559
gggauuauagcuugaguag

SEQ ID NO: 2130605 - RNA, 19 nt, Artificial Sequence
  Description of Artificial Sequence: Synthetic oligonucleotide
  Antisense strand to SEQ ID NO: 2130604
cuacucaagcuauaauccc

SEQ ID NO: 2130606 - RNA, 19 nt, Artificial Sequence
  Description of Artificial Sequence: Synthetic oligonucleotide
  Sense strand starting at position 1626 of SEQ ID NO: 1882559
ggauuauagcuugaguagg

SEQ ID NO: 2130607 - RNA, 19 nt, Artificial Sequence
  Description of Artificial Sequence: Synthetic oligonucleotide
  Antisense strand to SEQ ID NO: 2130606
ccuacucaagcuauaaucc

SEQ ID NO: 2130608 - RNA, 19 nt, Artificial Sequence
  Description of Artificial Sequence: Synthetic oligonucleotide
  Sense strand starting at position 1663 of SEQ ID NO: 1882559
ugcauuauuacgguacguu

SEQ ID NO: 2130609 - RNA, 19 nt, Artificial Sequence
  Description of Artificial Sequence: Synthetic oligonucleotide
  Antisense strand to SEQ ID NO: 2130608
aacguaccguaauaaugca

SEQ ID NO: 2130610 - RNA, 19 nt, Artificial Sequence
  Description of Artificial Sequence: Synthetic oligonucleotide
  Sense strand starting at position 1710 of SEQ ID NO: 1882559
ccacuucuaugacugucau

SEQ ID NO: 2130611 - RNA, 19 nt, Artificial Sequence
  Description of Artificial Sequence: Synthetic oligonucleotide
  Antisense strand to SEQ ID NO: 2130610
augacagucauagaagugg

SEQ ID NO: 2130612 - RNA, 19 nt, Artificial Sequence
  Description of Artificial Sequence: Synthetic oligonucleotide
  Sense strand starting at position 1846 of SEQ ID NO: 1882559
cucuuauucuuggcaaaug

SEQ ID NO: 2130613 - RNA, 19 nt, Artificial Sequence
  Description of Artificial Sequence: Synthetic oligonucleotide
  Antisense strand to SEQ ID NO: 2130612
cauuugccaagaauaagag

SEQ ID NO: 2130614 - RNA, 19 nt, Artificial Sequence
  Description of Artificial Sequence: Synthetic oligonucleotide
  Sense strand starting at position 2288 of SEQ ID NO: 1882559
cuacacaugccaggaauua

SEQ ID NO: 2130615 - RNA, 19 nt, Artificial Sequence
  Description of Artificial Sequence: Synthetic oligonucleotide
  Antisense strand to SEQ ID NO: 2130614
uaauuccuggcauguguag

SEQ ID NO: 2130616 - RNA, 19 nt, Artificial Sequence
  Description of Artificial Sequence: Synthetic oligonucleotide
  Sense strand starting at position 2317 of SEQ ID NO: 1882559
ugguguuacaaauaugugu

SEQ ID NO: 2130617 - RNA, 19 nt, Artificial Sequence
  Description of Artificial Sequence: Synthetic oligonucleotide
  Antisense strand to SEQ ID NO: 2130616
acacauauuuguaacacca

SEQ ID NO: 2130618 - RNA, 19 nt, Artificial Sequence
  Description of Artificial Sequence: Synthetic oligonucleotide
  Sense strand starting at position 2359 of SEQ ID NO: 1882559
gcuuauaauuuagagagau

SEQ ID NO: 2130619 - RNA, 19 nt, Artificial Sequence
  Description of Artificial Sequence: Synthetic oligonucleotide
  Antisense strand to SEQ ID NO: 2130618
aucucucuaaauuauaagc

SEQ ID NO: 2130620 - RNA, 19 nt, Artificial Sequence
  Description of Artificial Sequence: Synthetic oligonucleotide
  Sense strand starting at position 2393 of SEQ ID NO: 1882559
guaagagugaaaugagcua

SEQ ID NO: 2130621 - RNA, 19 nt, Artificial Sequence
  Description of Artificial Sequence: Synthetic oligonucleotide
  Antisense strand to SEQ ID NO: 2130620
uagcucauuucacucuuac

SEQ ID NO: 2130622 - RNA, 19 nt, Artificial Sequence
  Description of Artificial Sequence: Synthetic oligonucleotide
  Sense strand starting at position 2482 of SEQ ID NO: 1882559
gagagaugcagccgaggaa

SEQ ID NO: 2130623 - RNA, 19 nt, Artificial Sequence
  Description of Artificial Sequence: Synthetic oligonucleotide
  Antisense strand to SEQ ID NO: 2130622
uuccucggcugcaucucuc

SEQ ID NO: 2130624 - RNA, 19 nt, Artificial Sequence
  Description of Artificial Sequence: Synthetic oligonucleotide
  Sense strand starting at position 2483 of SEQ ID NO: 1882559
agagaugcagccgaggaau

SEQ ID NO: 2130625 - RNA, 19 nt, Artificial Sequence
  Description of Artificial Sequence: Synthetic oligonucleotide
  Antisense strand to SEQ ID NO: 2130624
auuccucggcugcaucucu

SEQ ID NO: 2130626 - RNA, 19 nt, Artificial Sequence
  Description of Artificial Sequence: Synthetic oligonucleotide
  Sense strand starting at position 2582 of SEQ ID NO: 1882559
agaguaaugcaaggaugcu

SEQ ID NO: 2130627 - RNA, 19 nt, Artificial Sequence
  Description of Artificial Sequence: Synthetic oligonucleotide
  Antisense strand to SEQ ID NO: 2130626
agcauccuugcauuacucu

SEQ ID NO: 2130628 - RNA, 19 nt, Artificial Sequence
  Description of Artificial Sequence: Synthetic oligonucleotide
  Sense strand starting at position 2591 of SEQ ID NO: 1882559
caaggaugcuggguagaaa

SEQ ID NO: 2130629 - RNA, 19 nt, Artificial Sequence
  Description of Artificial Sequence: Synthetic oligonucleotide
  Antisense strand to SEQ ID NO: 2130628
uuucuacccagcauccuug

SEQ ID NO: 2130630 - RNA, 19 nt, Artificial Sequence
  Description of Artificial Sequence: Synthetic oligonucleotide
  Sense strand starting at position 2638 of SEQ ID NO: 1882559
acauguuguggcugagaga

SEQ ID NO: 2130631 - RNA, 19 nt, Artificial Sequence
  Description of Artificial Sequence: Synthetic oligonucleotide
  Antisense strand to SEQ ID NO: 2130630
ucucucagccacaacaugu

SEQ ID NO: 2130632 - RNA, 19 nt, Artificial Sequence
  Description of Artificial Sequence: Synthetic oligonucleotide
  Sense strand starting at position 2639 of SEQ ID NO: 1882559
cauguuguggcugagagaa

SEQ ID NO: 2130633 - RNA, 19 nt, Artificial Sequence
  Description of Artificial Sequence: Synthetic oligonucleotide
  Antisense strand to SEQ ID NO: 2130632
uucucucagccacaacaug

SEQ ID NO: 2130634 - RNA, 19 nt, Artificial Sequence
  Description of Artificial Sequence: Synthetic oligonucleotide
  Sense strand starting at position 2684 of SEQ ID NO: 1882559
gcaggagucagaugaauua

SEQ ID NO: 2130635 - RNA, 19 nt, Artificial Sequence
  Description of Artificial Sequence: Synthetic oligonucleotide
  Antisense strand to SEQ ID NO: 2130634
uaauucaucugacuccugc

SEQ ID NO: 2130636 - RNA, 19 nt, Artificial Sequence
  Description of Artificial Sequence: Synthetic oligonucleotide
  Sense strand starting at position 3113 of SEQ ID NO: 1882559
ccugucugaguugauuauu

SEQ ID NO: 2130637 - RNA, 19 nt, Artificial Sequence
  Description of Artificial Sequence: Synthetic oligonucleotide
  Antisense strand to SEQ ID NO: 2130636
aauaaucaacucagacagg

SEQ ID NO: 2130638 - RNA, 19 nt, Artificial Sequence
  Description of Artificial Sequence: Synthetic oligonucleotide
  Sense strand starting at position 3197 of SEQ ID NO: 1882559
aguccauccucuuuagaug

SEQ ID NO: 2130639 - RNA, 19 nt, Artificial Sequence
  Description of Artificial Sequence: Synthetic oligonucleotide
  Antisense strand to SEQ ID NO: 2130638
caucuaaagaggauggacu

SEQ ID NO: 2130640 - RNA, 19 nt, Artificial Sequence
  Description of Artificial Sequence: Synthetic oligonucleotide
  Sense strand starting at position 3198 of SEQ ID NO: 1882559
guccauccucuuuagauga

SEQ ID NO: 2130641 - RNA, 19 nt, Artificial Sequence
  Description of Artificial Sequence: Synthetic oligonucleotide
  Antisense strand to SEQ ID NO: 2130640
ucaucuaaagaggauggac

SEQ ID NO: 2130642 - RNA, 19 nt, Artificial Sequence
  Description of Artificial Sequence: Synthetic oligonucleotide
  Sense strand starting at position 3237 of SEQ ID NO: 1882559
gaacuugggcaaugucauu

SEQ ID NO: 2130643 - RNA, 19 nt, Artificial Sequence
  Description of Artificial Sequence: Synthetic oligonucleotide
  Antisense strand to SEQ ID NO: 2130642
aaugacauugcccaaguuc

SEQ ID NO: 2130644 - RNA, 19 nt, Artificial Sequence
  Description of Artificial Sequence: Synthetic oligonucleotide
  Sense strand starting at position 3242 of SEQ ID NO: 1882559
ugggcaaugucauuggauc

SEQ ID NO: 2130645 - RNA, 19 nt, Artificial Sequence
  Description of Artificial Sequence: Synthetic oligonucleotide
  Antisense strand to SEQ ID NO: 2130644
gauccaaugacauugccca

SEQ ID NO: 2130646 - RNA, 19 nt, Artificial Sequence
  Description of Artificial Sequence: Synthetic oligonucleotide
  Sense strand starting at position 3243 of SEQ ID NO: 1882559
gggcaaugucauuggauca

SEQ ID NO: 2130647 - RNA, 19 nt, Artificial Sequence
  Description of Artificial Sequence: Synthetic oligonucleotide
  Antisense strand to SEQ ID NO: 2130646
ugauccaaugacauugccc

SEQ ID NO: 2130648 - RNA, 19 nt, Artificial Sequence
  Description of Artificial Sequence: Synthetic oligonucleotide
  Sense strand starting at position 3244 of SEQ ID NO: 1882559
ggcaaugucauuggaucac

SEQ ID NO: 2130649 - RNA, 19 nt, Artificial Sequence
  Description of Artificial Sequence: Synthetic oligonucleotide
  Antisense strand to SEQ ID NO: 2130648
gugauccaaugacauugcc

SEQ ID NO: 2130650 - RNA, 19 nt, Artificial Sequence
  Description of Artificial Sequence: Synthetic oligonucleotide
  Sense strand starting at position 3307 of SEQ ID NO: 1882559
aucugauugacuggaugca

SEQ ID NO: 2130651 - RNA, 19 nt, Artificial Sequence
  Description of Artificial Sequence: Synthetic oligonucleotide
  Antisense strand to SEQ ID NO: 2130650
ugcauccagucaaucagau

SEQ ID NO: 2130652 - RNA, 19 nt, Artificial Sequence
  Description of Artificial Sequence: Synthetic oligonucleotide
  Sense strand starting at position 3563 of SEQ ID NO: 1882559
auuauuagugccuacccua

SEQ ID NO: 2130653 - RNA, 19 nt, Artificial Sequence
  Description of Artificial Sequence: Synthetic oligonucleotide
  Antisense strand to SEQ ID NO: 2130652
uaggguaggcacuaauaau

SEQ ID NO: 2130654 - RNA, 19 nt, Artificial Sequence
  Description of Artificial Sequence: Synthetic oligonucleotide
  Sense strand starting at position 3640 of SEQ ID NO: 1882559
agaacauagugaguaucau

SEQ ID NO: 2130655 - RNA, 19 nt, Artificial Sequence
  Description of Artificial Sequence: Synthetic oligonucleotide
  Antisense strand to SEQ ID NO: 2130654
augauacucacuauguucu

SEQ ID NO: 2130656 - RNA, 19 nt, Artificial Sequence
  Description of Artificial Sequence: Synthetic oligonucleotide
  Sense strand starting at position 3701 of SEQ ID NO: 1882559
guagguaguggacaagauu

SEQ ID NO: 2130657 - RNA, 19 nt, Artificial Sequence
  Description of Artificial Sequence: Synthetic oligonucleotide
  Antisense strand to SEQ ID NO: 2130656
aaucuuguccacuaccuac

SEQ ID NO: 2130658 - RNA, 19 nt, Artificial Sequence
  Description of Artificial Sequence: Synthetic oligonucleotide
  Sense strand starting at position 3796 of SEQ ID NO: 1882559
aggccagaugaauggugau

SEQ ID NO: 2130659 - RNA, 19 nt, Artificial Sequence
  Description of Artificial Sequence: Synthetic oligonucleotide
  Antisense strand to SEQ ID NO: 2130658
aucaccauucaucuggccu

SEQ ID NO: 2130660 - RNA, 19 nt, Artificial Sequence
  Description of Artificial Sequence: Synthetic oligonucleotide
  Sense strand starting at position 18 of SEQ ID NO: 1882560
acuaaacucccguauguaa

SEQ ID NO: 2130661 - RNA, 19 nt, Artificial Sequence
  Description of Artificial Sequence: Synthetic oligonucleotide
  Antisense strand to SEQ ID NO: 2130660
uuacauacgggaguuuagu

SEQ ID NO: 2130662 - RNA, 19 nt, Artificial Sequence
  Description of Artificial Sequence: Synthetic oligonucleotide
  Sense strand starting at position 26 of SEQ ID NO: 1882560
cccguauguaaauagguau

SEQ ID NO: 2130663 - RNA, 19 nt, Artificial Sequence
  Description of Artificial Sequence: Synthetic oligonucleotide
  Antisense strand to SEQ ID NO: 2130662
auaccuauuuacauacggg

SEQ ID NO: 2130664 - RNA, 19 nt, Artificial Sequence
  Description of Artificial Sequence: Synthetic oligonucleotide
  Sense strand starting at position 29 of SEQ ID NO: 1882560
guauguaaauagguauguu

SEQ ID NO: 2130665 - RNA, 19 nt, Artificial Sequence
  Description of Artificial Sequence: Synthetic oligonucleotide
  Antisense strand to SEQ ID NO: 2130664
aacauaccuauuuacauac

SEQ ID NO: 2130666 - RNA, 19 nt, Artificial Sequence
  Description of Artificial Sequence: Synthetic oligonucleotide
  Sense strand starting at position 32 of SEQ ID NO: 1882560
uguaaauagguauguuucu

SEQ ID NO: 2130667 - RNA, 19 nt, Artificial Sequence
  Description of Artificial Sequence: Synthetic oligonucleotide
  Antisense strand to SEQ ID NO: 2130666
agaaacauaccuauuuaca

SEQ ID NO: 2130668 - RNA, 19 nt, Artificial Sequence
  Description of Artificial Sequence: Synthetic oligonucleotide
  Sense strand starting at position 33 of SEQ ID NO: 1882560
guaaauagguauguuucua

SEQ ID NO: 2130669 - RNA, 19 nt, Artificial Sequence
  Description of Artificial Sequence: Synthetic oligonucleotide
  Antisense strand to SEQ ID NO: 2130668
uagaaacauaccuauuuac

SEQ ID NO: 2130670 - RNA, 19 nt, Artificial Sequence
  Description of Artificial Sequence: Synthetic oligonucleotide
  Sense strand starting at position 37 of SEQ ID NO: 1882560
auagguauguuucuagugu

SEQ ID NO: 2130671 - RNA, 19 nt, Artificial Sequence
  Description of Artificial Sequence: Synthetic oligonucleotide
  Antisense strand to SEQ ID NO: 2130670
acacuagaaacauaccuau

SEQ ID NO: 2130672 - RNA, 19 nt, Artificial Sequence
  Description of Artificial Sequence: Synthetic oligonucleotide
  Sense strand starting at position 316 of SEQ ID NO: 1882560
uuuguugagucuuuccauc

SEQ ID NO: 2130673 - RNA, 19 nt, Artificial Sequence
  Description of Artificial Sequence: Synthetic oligonucleotide
  Antisense strand to SEQ ID NO: 2130672
gauggaaagacucaacaaa

SEQ ID NO: 2130674 - RNA, 19 nt, Artificial Sequence
  Description of Artificial Sequence: Synthetic oligonucleotide
  Sense strand starting at position 318 of SEQ ID NO: 1882560
uguugagucuuuccaucua

SEQ ID NO: 2130675 - RNA, 19 nt, Artificial Sequence
  Description of Artificial Sequence: Synthetic oligonucleotide
  Antisense strand to SEQ ID NO: 2130674
uagauggaaagacucaaca

SEQ ID NO: 2130676 - RNA, 19 nt, Artificial Sequence
  Description of Artificial Sequence: Synthetic oligonucleotide
  Sense strand starting at position 334 of SEQ ID NO: 1882560
cuauuaauacgguauaucu

SEQ ID NO: 2130677 - RNA, 19 nt, Artificial Sequence
  Description of Artificial Sequence: Synthetic oligonucleotide
  Antisense strand to SEQ ID NO: 2130676
agauauaccguauuaauag

SEQ ID NO: 2130678 - RNA, 19 nt, Artificial Sequence
  Description of Artificial Sequence: Synthetic oligonucleotide
  Sense strand starting at position 456 of SEQ ID NO: 1882560
uuugaaugccauuaugaau

SEQ ID NO: 2130679 - RNA, 19 nt, Artificial Sequence
  Description of Artificial Sequence: Synthetic oligonucleotide
  Antisense strand to SEQ ID NO: 2130678
auucauaauggcauucaaa

SEQ ID NO: 2130680 - RNA, 19 nt, Artificial Sequence
  Description of Artificial Sequence: Synthetic oligonucleotide
  Sense strand starting at position 501 of SEQ ID NO: 1882560
aguuaauuguuacugguau

SEQ ID NO: 2130681 - RNA, 19 nt, Artificial Sequence
  Description of Artificial Sequence: Synthetic oligonucleotide
  Antisense strand to SEQ ID NO: 2130680
auaccaguaacaauuaacu

SEQ ID NO: 2130682 - RNA, 19 nt, Artificial Sequence
  Description of Artificial Sequence: Synthetic oligonucleotide
  Sense strand starting at position 509 of SEQ ID NO: 1882560
guuacugguauacagaagu

SEQ ID NO: 2130683 - RNA, 19 nt, Artificial Sequence
  Description of Artificial Sequence: Synthetic oligonucleotide
  Antisense strand to SEQ ID NO: 2130682
acuucuguauaccaguaac

SEQ ID NO: 2130684 - RNA, 19 nt, Artificial Sequence
  Description of Artificial Sequence: Synthetic oligonucleotide
  Sense strand starting at position 612 of SEQ ID NO: 1882560
gguacuuauuccuuaacug

SEQ ID NO: 2130685 - RNA, 19 nt, Artificial Sequence
  Description of Artificial Sequence: Synthetic oligonucleotide
  Antisense strand to SEQ ID NO: 2130684
caguuaaggaauaaguacc

SEQ ID NO: 2130686 - RNA, 19 nt, Artificial Sequence
  Description of Artificial Sequence: Synthetic oligonucleotide
  Sense strand starting at position 682 of SEQ ID NO: 1882560
aucccaagcgucuagaaua

SEQ ID NO: 2130687 - RNA, 19 nt, Artificial Sequence
  Description of Artificial Sequence: Synthetic oligonucleotide
  Antisense strand to SEQ ID NO: 2130686
uauucuagacgcuugggau

SEQ ID NO: 2130688 - RNA, 19 nt, Artificial Sequence
  Description of Artificial Sequence: Synthetic oligonucleotide
  Sense strand starting at position 750 of SEQ ID NO: 1882560
aagagaauguaugcaagau

SEQ ID NO: 2130689 - RNA, 19 nt, Artificial Sequence
  Description of Artificial Sequence: Synthetic oligonucleotide
  Antisense strand to SEQ ID NO: 2130688
aucuugcauacauucucuu

SEQ ID NO: 2130690 - RNA, 19 nt, Artificial Sequence
  Description of Artificial Sequence: Synthetic oligonucleotide
  Sense strand starting at position 906 of SEQ ID NO: 1882560
cuggguuccuuagcgauca

SEQ ID NO: 2130691 - RNA, 19 nt, Artificial Sequence
  Description of Artificial Sequence: Synthetic oligonucleotide
  Antisense strand to SEQ ID NO: 2130690
ugaucgcuaaggaacccag

SEQ ID NO: 2130692 - RNA, 19 nt, Artificial Sequence
  Description of Artificial Sequence: Synthetic oligonucleotide
  Sense strand starting at position 908 of SEQ ID NO: 1882560
ggguuccuuagcgaucaca

SEQ ID NO: 2130693 - RNA, 19 nt, Artificial Sequence
  Description of Artificial Sequence: Synthetic oligonucleotide
  Antisense strand to SEQ ID NO: 2130692
ugugaucgcuaaggaaccc

SEQ ID NO: 2130694 - RNA, 19 nt, Artificial Sequence
  Description of Artificial Sequence: Synthetic oligonucleotide
  Sense strand starting at position 911 of SEQ ID NO: 1882560
uuccuuagcgaucacauga

SEQ ID NO: 2130695 - RNA, 19 nt, Artificial Sequence
  Description of Artificial Sequence: Synthetic oligonucleotide
  Antisense strand to SEQ ID NO: 2130694
ucaugugaucgcuaaggaa

SEQ ID NO: 2130696 - RNA, 19 nt, Artificial Sequence
  Description of Artificial Sequence: Synthetic oligonucleotide
  Sense strand starting at position 1284 of SEQ ID NO: 1882560
gagcuuaaugcgggaagua

SEQ ID NO: 2130697 - RNA, 19 nt, Artificial Sequence
  Description of Artificial Sequence: Synthetic oligonucleotide
  Antisense strand to SEQ ID NO: 2130696
uacuucccgcauuaagcuc

SEQ ID NO: 2130698 - RNA, 19 nt, Artificial Sequence
  Description of Artificial Sequence: Synthetic oligonucleotide
  Sense strand starting at position 1358 of SEQ ID NO: 1882560
augacaguguuccuuuaga

SEQ ID NO: 2130699 - RNA, 19 nt, Artificial Sequence
  Description of Artificial Sequence: Synthetic oligonucleotide
  Antisense strand to SEQ ID NO: 2130698
ucuaaaggaacacugucau

SEQ ID NO: 2130700 - RNA, 19 nt, Artificial Sequence
  Description of Artificial Sequence: Synthetic oligonucleotide
  Sense strand starting at position 1564 of SEQ ID NO: 1882560
uccucaucucuccgugacu

SEQ ID NO: 2130701 - RNA, 19 nt, Artificial Sequence
  Description of Artificial Sequence: Synthetic oligonucleotide
  Antisense strand to SEQ ID NO: 2130700
agucacggagagaugagga

SEQ ID NO: 2130702 - RNA, 19 nt, Artificial Sequence
  Description of Artificial Sequence: Synthetic oligonucleotide
  Sense strand starting at position 1565 of SEQ ID NO: 1882560
ccucaucucuccgugacua

SEQ ID NO: 2130703 - RNA, 19 nt, Artificial Sequence
  Description of Artificial Sequence: Synthetic oligonucleotide
  Antisense strand to SEQ ID NO: 2130702
uagucacggagagaugagg

SEQ ID NO: 2130704 - RNA, 19 nt, Artificial Sequence
  Description of Artificial Sequence: Synthetic oligonucleotide
  Sense strand starting at position 2295 of SEQ ID NO: 1882560
ccucguuuaaucguggguu

SEQ ID NO: 2130705 - RNA, 19 nt, Artificial Sequence
  Description of Artificial Sequence: Synthetic oligonucleotide
  Antisense strand to SEQ ID NO: 2130704
aacccacgauuaaacgagg

SEQ ID NO: 2130706 - RNA, 19 nt, Artificial Sequence
  Description of Artificial Sequence: Synthetic oligonucleotide
  Sense strand starting at position 2351 of SEQ ID NO: 1882560
aguggaaguuaauuaaaug

SEQ ID NO: 2130707 - RNA, 19 nt, Artificial Sequence
  Description of Artificial Sequence: Synthetic oligonucleotide
  Antisense strand to SEQ ID NO: 2130706
cauuuaauuaacuuccacu

SEQ ID NO: 2130708 - RNA, 19 nt, Artificial Sequence
  Description of Artificial Sequence: Synthetic oligonucleotide
  Sense strand starting at position 2369 of SEQ ID NO: 1882560
gggcguacgcugagugguu

SEQ ID NO: 2130709 - RNA, 19 nt, Artificial Sequence
  Description of Artificial Sequence: Synthetic oligonucleotide
  Antisense strand to SEQ ID NO: 2130708
aaccacucagcguacgccc

SEQ ID NO: 2130710 - RNA, 19 nt, Artificial Sequence
  Description of Artificial Sequence: Synthetic oligonucleotide
  Sense strand starting at position 2433 of SEQ ID NO: 1882560
gggcacaagaucuggagau

SEQ ID NO: 2130711 - RNA, 19 nt, Artificial Sequence
  Description of Artificial Sequence: Synthetic oligonucleotide
  Antisense strand to SEQ ID NO: 2130710
aucuccagaucuugugccc

SEQ ID NO: 2130712 - RNA, 19 nt, Artificial Sequence
  Description of Artificial Sequence: Synthetic oligonucleotide
  Sense strand starting at position 2446 of SEQ ID NO: 1882560
ggagaucuggcuuguacuu

SEQ ID NO: 2130713 - RNA, 19 nt, Artificial Sequence
  Description of Artificial Sequence: Synthetic oligonucleotide
  Antisense strand to SEQ ID NO: 2130712
aaguacaagccagaucucc

SEQ ID NO: 2130714 - RNA, 19 nt, Artificial Sequence
  Description of Artificial Sequence: Synthetic oligonucleotide
  Sense strand starting at position 2467 of SEQ ID NO: 1882560
uuccuuuggccaggaacua

SEQ ID NO: 2130715 - RNA, 19 nt, Artificial Sequence
  Description of Artificial Sequence: Synthetic oligonucleotide
  Antisense strand to SEQ ID NO: 2130714
uaguuccuggccaaaggaa

SEQ ID NO: 2130716 - RNA, 19 nt, Artificial Sequence
  Description of Artificial Sequence: Synthetic oligonucleotide
  Sense strand starting at position 2487 of SEQ ID NO: 1882560
ggcuuaaucucuuccuuug

SEQ ID NO: 2130717 - RNA, 19 nt, Artificial Sequence
  Description of Artificial Sequence: Synthetic oligonucleotide
  Antisense strand to SEQ ID NO: 2130716
caaaggaagagauuaagcc

SEQ ID NO: 2130718 - RNA, 19 nt, Artificial Sequence
  Description of Artificial Sequence: Synthetic oligonucleotide
  Sense strand starting at position 2498 of SEQ ID NO: 1882560
uuccuuuggucuccucaua

SEQ ID NO: 2130719 - RNA, 19 nt, Artificial Sequence
  Description of Artificial Sequence: Synthetic oligonucleotide
  Antisense strand to SEQ ID NO: 2130718
uaugaggagaccaaaggaa

SEQ ID NO: 2130720 - RNA, 19 nt, Artificial Sequence
  Description of Artificial Sequence: Synthetic oligonucleotide
  Sense strand starting at position 2946 of SEQ ID NO: 1882560
ucugucucgaaguguauau

SEQ ID NO: 2130721 - RNA, 19 nt, Artificial Sequence
  Description of Artificial Sequence: Synthetic oligonucleotide
  Antisense strand to SEQ ID NO: 2130720
auauacacuucgagacaga

SEQ ID NO: 2130722 - RNA, 19 nt, Artificial Sequence
  Description of Artificial Sequence: Synthetic oligonucleotide
  Sense strand starting at position 2948 of SEQ ID NO: 1882560
ugucucgaaguguauauau

SEQ ID NO: 2130723 - RNA, 19 nt, Artificial Sequence
  Description of Artificial Sequence: Synthetic oligonucleotide
  Antisense strand to SEQ ID NO: 2130722
auauauacacuucgagaca

SEQ ID NO: 2130724 - RNA, 19 nt, Artificial Sequence
  Description of Artificial Sequence: Synthetic oligonucleotide
  Sense strand starting at position 3773 of SEQ ID NO: 1882560
uugggcucacuguauaauu

SEQ ID NO: 2130725 - RNA, 19 nt, Artificial Sequence
  Description of Artificial Sequence: Synthetic oligonucleotide
  Antisense strand to SEQ ID NO: 2130724
aauuauacagugagcccaa

SEQ ID NO: 2130726 - RNA, 19 nt, Artificial Sequence
  Description of Artificial Sequence: Synthetic oligonucleotide
  Sense strand starting at position 3826 of SEQ ID NO: 1882560
ccugucucccaggaucuua

SEQ ID NO: 2130727 - RNA, 19 nt, Artificial Sequence
  Description of Artificial Sequence: Synthetic oligonucleotide
  Antisense strand to SEQ ID NO: 2130726
uaagauccugggagacagg

SEQ ID NO: 2130728 - RNA, 19 nt, Artificial Sequence
  Description of Artificial Sequence: Synthetic oligonucleotide
  Sense strand starting at position 3881 of SEQ ID NO: 1882560
uugaauaauggacgguuua

SEQ ID NO: 2130729 - RNA, 19 nt, Artificial Sequence
  Description of Artificial Sequence: Synthetic oligonucleotide
  Antisense strand to SEQ ID NO: 2130728
uaaaccguccauuauucaa

SEQ ID NO: 2130730 - RNA, 19 nt, Artificial Sequence
  Description of Artificial Sequence: Synthetic oligonucleotide
  Sense strand starting at position 3882 of SEQ ID NO: 1882560
ugaauaauggacgguuuau

SEQ ID NO: 2130731 - RNA, 19 nt, Artificial Sequence
  Description of Artificial Sequence: Synthetic oligonucleotide
  Antisense strand to SEQ ID NO: 2130730
auaaaccguccauuauuca

SEQ ID NO: 2130732 - RNA, 19 nt, Artificial Sequence
  Description of Artificial Sequence: Synthetic oligonucleotide
  Sense strand starting at position 3911 of SEQ ID NO: 1882560
ggcacacugguguagaguu

SEQ ID NO: 2130733 - RNA, 19 nt, Artificial Sequence
  Description of Artificial Sequence: Synthetic oligonucleotide
  Antisense strand to SEQ ID NO: 2130732
aacucuacaccagugugcc

SEQ ID NO: 2130734 - RNA, 19 nt, Artificial Sequence
  Description of Artificial Sequence: Synthetic oligonucleotide
  Sense strand starting at position 3941 of SEQ ID NO: 1882560
uucuauuagggcuaauuga

SEQ ID NO: 2130735 - RNA, 19 nt, Artificial Sequence
  Description of Artificial Sequence: Synthetic oligonucleotide
  Antisense strand to SEQ ID NO: 2130734
ucaauuagcccuaauagaa

SEQ ID NO: 2130736 - RNA, 19 nt, Artificial Sequence
  Description of Artificial Sequence: Synthetic oligonucleotide
  Sense strand starting at position 3952 of SEQ ID NO: 1882560
cuaauugaccuuggguaga

SEQ ID NO: 2130737 - RNA, 19 nt, Artificial Sequence
  Description of Artificial Sequence: Synthetic oligonucleotide
  Antisense strand to SEQ ID NO: 2130736
ucuacccaaggucaauuag

SEQ ID NO: 2130738 - RNA, 19 nt, Artificial Sequence
  Description of Artificial Sequence: Synthetic oligonucleotide
  Sense strand starting at position 3954 of SEQ ID NO: 1882560
aauugaccuuggguagaau

SEQ ID NO: 2130739 - RNA, 19 nt, Artificial Sequence
  Description of Artificial Sequence: Synthetic oligonucleotide
  Antisense strand to SEQ ID NO: 2130738
auucuacccaaggucaauu

SEQ ID NO: 2130740 - RNA, 19 nt, Artificial Sequence
  Description of Artificial Sequence: Synthetic oligonucleotide
  Sense strand starting at position 28 of SEQ ID NO: 1882561
ggaagaugcuagcucagga

SEQ ID NO: 2130741 - RNA, 19 nt, Artificial Sequence
  Description of Artificial Sequence: Synthetic oligonucleotide
  Antisense strand to SEQ ID NO: 2130740
uccugagcuagcaucuucc

SEQ ID NO: 2130742 - RNA, 19 nt, Artificial Sequence
  Description of Artificial Sequence: Synthetic oligonucleotide
  Sense strand starting at position 141 of SEQ ID NO: 1882561
ucuccucagcaauacgaaa

SEQ ID NO: 2130743 - RNA, 19 nt, Artificial Sequence
  Description of Artificial Sequence: Synthetic oligonucleotide
  Antisense strand to SEQ ID NO: 2130742
uuucguauugcugaggaga

SEQ ID NO: 2130744 - RNA, 19 nt, Artificial Sequence
  Description of Artificial Sequence: Synthetic oligonucleotide
  Sense strand starting at position 174 of SEQ ID NO: 1882561
cgugguagguacuuaggaa

SEQ ID NO: 2130745 - RNA, 19 nt, Artificial Sequence
  Description of Artificial Sequence: Synthetic oligonucleotide
  Antisense strand to SEQ ID NO: 2130744
uuccuaaguaccuaccacg

SEQ ID NO: 2130746 - RNA, 19 nt, Artificial Sequence
  Description of Artificial Sequence: Synthetic oligonucleotide
  Sense strand starting at position 175 of SEQ ID NO: 1882561
gugguagguacuuaggaaa

SEQ ID NO: 2130747 - RNA, 19 nt, Artificial Sequence
  Description of Artificial Sequence: Synthetic oligonucleotide
  Antisense strand to SEQ ID NO: 2130746
uuuccuaaguaccuaccac

SEQ ID NO: 2130748 - RNA, 19 nt, Artificial Sequence
  Description of Artificial Sequence: Synthetic oligonucleotide
  Sense strand starting at position 216 of SEQ ID NO: 1882561
ugcauacaagugugacuuu

SEQ ID NO: 2130749 - RNA, 19 nt, Artificial Sequence
  Description of Artificial Sequence: Synthetic oligonucleotide
  Antisense strand to SEQ ID NO: 2130748
aaagucacacuuguaugca

SEQ ID NO: 2130750 - RNA, 19 nt, Artificial Sequence
  Description of Artificial Sequence: Synthetic oligonucleotide
  Sense strand starting at position 236 of SEQ ID NO: 1882561
cugaaagucugaucucaua

SEQ ID NO: 2130751 - RNA, 19 nt, Artificial Sequence
  Description of Artificial Sequence: Synthetic oligonucleotide
  Antisense strand to SEQ ID NO: 2130750
uaugagaucagacuuucag

SEQ ID NO: 2130752 - RNA, 19 nt, Artificial Sequence
  Description of Artificial Sequence: Synthetic oligonucleotide
  Sense strand starting at position 314 of SEQ ID NO: 1882561
uguccauucguagggagau

SEQ ID NO: 2130753 - RNA, 19 nt, Artificial Sequence
  Description of Artificial Sequence: Synthetic oligonucleotide
  Antisense strand to SEQ ID NO: 2130752
aucucccuacgaauggaca

SEQ ID NO: 2130754 - RNA, 19 nt, Artificial Sequence
  Description of Artificial Sequence: Synthetic oligonucleotide
  Sense strand starting at position 418 of SEQ ID NO: 1882561
ggccauagcagaugaaaug

SEQ ID NO: 2130755 - RNA, 19 nt, Artificial Sequence
  Description of Artificial Sequence: Synthetic oligonucleotide
  Antisense strand to SEQ ID NO: 2130754
cauuucaucugcuauggcc

SEQ ID NO: 2130756 - RNA, 19 nt, Artificial Sequence
  Description of Artificial Sequence: Synthetic oligonucleotide
  Sense strand starting at position 464 of SEQ ID NO: 1882561
gccggauuguucucacuca

SEQ ID NO: 2130757 - RNA, 19 nt, Artificial Sequence
  Description of Artificial Sequence: Synthetic oligonucleotide
  Antisense strand to SEQ ID NO: 2130756
ugagugagaacaauccggc

SEQ ID NO: 2130758 - RNA, 19 nt, Artificial Sequence
  Description of Artificial Sequence: Synthetic oligonucleotide
  Sense strand starting at position 525 of SEQ ID NO: 1882561
ucagcugcuccauggugaa

SEQ ID NO: 2130759 - RNA, 19 nt, Artificial Sequence
  Description of Artificial Sequence: Synthetic oligonucleotide
  Antisense strand to SEQ ID NO: 2130758
uucaccauggagcagcuga

SEQ ID NO: 2130760 - RNA, 19 nt, Artificial Sequence
  Description of Artificial Sequence: Synthetic oligonucleotide
  Sense strand starting at position 592 of SEQ ID NO: 1882561
cagauuaggcagcacuauu

SEQ ID NO: 2130761 - RNA, 19 nt, Artificial Sequence
  Description of Artificial Sequence: Synthetic oligonucleotide
  Antisense strand to SEQ ID NO: 2130760
aauagugcugccuaaucug

SEQ ID NO: 2130762 - RNA, 19 nt, Artificial Sequence
  Description of Artificial Sequence: Synthetic oligonucleotide
  Sense strand starting at position 727 of SEQ ID NO: 1882561
ggaccauucuggccaagga

SEQ ID NO: 2130763 - RNA, 19 nt, Artificial Sequence
  Description of Artificial Sequence: Synthetic oligonucleotide
  Antisense strand to SEQ ID NO: 2130762
uccuuggccagaauggucc

SEQ ID NO: 2130764 - RNA, 19 nt, Artificial Sequence
  Description of Artificial Sequence: Synthetic oligonucleotide
  Sense strand starting at position 1303 of SEQ ID NO: 1882561
gcugauuucuccuuguugu

SEQ ID NO: 2130765 - RNA, 19 nt, Artificial Sequence
  Description of Artificial Sequence: Synthetic oligonucleotide
  Antisense strand to SEQ ID NO: 2130764
acaacaaggagaaaucagc

SEQ ID NO: 2130766 - RNA, 19 nt, Artificial Sequence
  Description of Artificial Sequence: Synthetic oligonucleotide
  Sense strand starting at position 1304 of SEQ ID NO: 1882561
cugauuucuccuuguugug

SEQ ID NO: 2130767 - RNA, 19 nt, Artificial Sequence
  Description of Artificial Sequence: Synthetic oligonucleotide
  Antisense strand to SEQ ID NO: 2130766
cacaacaaggagaaaucag

SEQ ID NO: 2130768 - RNA, 19 nt, Artificial Sequence
  Description of Artificial Sequence: Synthetic oligonucleotide
  Sense strand starting at position 1320 of SEQ ID NO: 1882561
gugaaaucgucucuagaau

SEQ ID NO: 2130769 - RNA, 19 nt, Artificial Sequence
  Description of Artificial Sequence: Synthetic oligonucleotide
  Antisense strand to SEQ ID NO: 2130768
auucuagagacgauuucac

SEQ ID NO: 2130770 - RNA, 19 nt, Artificial Sequence
  Description of Artificial Sequence: Synthetic oligonucleotide
  Sense strand starting at position 1321 of SEQ ID NO: 1882561
ugaaaucgucucuagaauc

SEQ ID NO: 2130771 - RNA, 19 nt, Artificial Sequence
  Description of Artificial Sequence: Synthetic oligonucleotide
  Antisense strand to SEQ ID NO: 2130770
gauucuagagacgauuuca

SEQ ID NO: 2130772 - RNA, 19 nt, Artificial Sequence
  Description of Artificial Sequence: Synthetic oligonucleotide
  Sense strand starting at position 1454 of SEQ ID NO: 1882561
ggacaacauucugaucuca

SEQ ID NO: 2130773 - RNA, 19 nt, Artificial Sequence
  Description of Artificial Sequence: Synthetic oligonucleotide
  Antisense strand to SEQ ID NO: 2130772
ugagaucagaauguugucc

SEQ ID NO: 2130774 - RNA, 19 nt, Artificial Sequence
  Description of Artificial Sequence: Synthetic oligonucleotide
  Sense strand starting at position 1836 of SEQ ID NO: 1882561
gcucuuauagcaggcggaa

SEQ ID NO: 2130775 - RNA, 19 nt, Artificial Sequence
  Description of Artificial Sequence: Synthetic oligonucleotide
  Antisense strand to SEQ ID NO: 2130774
uuccgccugcuauaagagc

SEQ ID NO: 2130776 - RNA, 19 nt, Artificial Sequence
  Description of Artificial Sequence: Synthetic oligonucleotide
  Sense strand starting at position 2051 of SEQ ID NO: 1882561
cuuacuaaggugugaauga

SEQ ID NO: 2130777 - RNA, 19 nt, Artificial Sequence
  Description of Artificial Sequence: Synthetic oligonucleotide
  Antisense strand to SEQ ID NO: 2130776
ucauucacaccuuaguaag

SEQ ID NO: 2130778 - RNA, 19 nt, Artificial Sequence
  Description of Artificial Sequence: Synthetic oligonucleotide
  Sense strand starting at position 2060 of SEQ ID NO: 1882561
gugugaaugacugagacga

SEQ ID NO: 2130779 - RNA, 19 nt, Artificial Sequence
  Description of Artificial Sequence: Synthetic oligonucleotide
  Antisense strand to SEQ ID NO: 2130778
ucgucucagucauucacac

SEQ ID NO: 2130780 - RNA, 19 nt, Artificial Sequence
  Description of Artificial Sequence: Synthetic oligonucleotide
  Sense strand starting at position 2132 of SEQ ID NO: 1882561
uugggagcuuucuuugaga

SEQ ID NO: 2130781 - RNA, 19 nt, Artificial Sequence
  Description of Artificial Sequence: Synthetic oligonucleotide
  Antisense strand to SEQ ID NO: 2130780
ucucaaagaaagcucccaa

SEQ ID NO: 2130782 - RNA, 19 nt, Artificial Sequence
  Description of Artificial Sequence: Synthetic oligonucleotide
  Sense strand starting at position 2134 of SEQ ID NO: 1882561
gggagcuuucuuugagaga

SEQ ID NO: 2130783 - RNA, 19 nt, Artificial Sequence
  Description of Artificial Sequence: Synthetic oligonucleotide
  Antisense strand to SEQ ID NO: 2130782
ucucucaaagaaagcuccc

SEQ ID NO: 2130784 - RNA, 19 nt, Artificial Sequence
  Description of Artificial Sequence: Synthetic oligonucleotide
  Sense strand starting at position 2268 of SEQ ID NO: 1882561
guccucaaugguggaaagu

SEQ ID NO: 2130785 - RNA, 19 nt, Artificial Sequence
  Description of Artificial Sequence: Synthetic oligonucleotide
  Antisense strand to SEQ ID NO: 2130784
acuuuccaccauugaggac

SEQ ID NO: 2130786 - RNA, 19 nt, Artificial Sequence
  Description of Artificial Sequence: Synthetic oligonucleotide
  Sense strand starting at position 2349 of SEQ ID NO: 1882561
ugaggaaggugcccucaua

SEQ ID NO: 2130787 - RNA, 19 nt, Artificial Sequence
  Description of Artificial Sequence: Synthetic oligonucleotide
  Antisense strand to SEQ ID NO: 2130786
uaugagggcaccuuccuca

SEQ ID NO: 2130788 - RNA, 19 nt, Artificial Sequence
  Description of Artificial Sequence: Synthetic oligonucleotide
  Sense strand starting at position 2397 of SEQ ID NO: 1882561
uuaguauugcauugaggau

SEQ ID NO: 2130789 - RNA, 19 nt, Artificial Sequence
  Description of Artificial Sequence: Synthetic oligonucleotide
  Antisense strand to SEQ ID NO: 2130788
auccucaaugcaauacuaa

SEQ ID NO: 2130790 - RNA, 19 nt, Artificial Sequence
  Description of Artificial Sequence: Synthetic oligonucleotide
  Sense strand starting at position 2522 of SEQ ID NO: 1882561
cccaguggccuccaaaguu

SEQ ID NO: 2130791 - RNA, 19 nt, Artificial Sequence
  Description of Artificial Sequence: Synthetic oligonucleotide
  Antisense strand to SEQ ID NO: 2130790
aacuuuggaggccacuggg

SEQ ID NO: 2130792 - RNA, 19 nt, Artificial Sequence
  Description of Artificial Sequence: Synthetic oligonucleotide
  Sense strand starting at position 2646 of SEQ ID NO: 1882561
cagcuaugagcccgugaaa

SEQ ID NO: 2130793 - RNA, 19 nt, Artificial Sequence
  Description of Artificial Sequence: Synthetic oligonucleotide
  Antisense strand to SEQ ID NO: 2130792
uuucacgggcucauagcug

SEQ ID NO: 2130794 - RNA, 19 nt, Artificial Sequence
  Description of Artificial Sequence: Synthetic oligonucleotide
  Sense strand starting at position 2649 of SEQ ID NO: 1882561
cuaugagcccgugaaauca

SEQ ID NO: 2130795 - RNA, 19 nt, Artificial Sequence
  Description of Artificial Sequence: Synthetic oligonucleotide
  Antisense strand to SEQ ID NO: 2130794
ugauuucacgggcucauag

SEQ ID NO: 2130796 - RNA, 19 nt, Artificial Sequence
  Description of Artificial Sequence: Synthetic oligonucleotide
  Sense strand starting at position 2658 of SEQ ID NO: 1882561
cgugaaaucaaauagguua

SEQ ID NO: 2130797 - RNA, 19 nt, Artificial Sequence
  Description of Artificial Sequence: Synthetic oligonucleotide
  Antisense strand to SEQ ID NO: 2130796
uaaccuauuugauuucacg

SEQ ID NO: 2130798 - RNA, 19 nt, Artificial Sequence
  Description of Artificial Sequence: Synthetic oligonucleotide
  Sense strand starting at position 2755 of SEQ ID NO: 1882561
aggaguaucuggucccaag

SEQ ID NO: 2130799 - RNA, 19 nt, Artificial Sequence
  Description of Artificial Sequence: Synthetic oligonucleotide
  Antisense strand to SEQ ID NO: 2130798
cuugggaccagauacuccu

SEQ ID NO: 2130800 - RNA, 19 nt, Artificial Sequence
  Description of Artificial Sequence: Synthetic oligonucleotide
  Sense strand starting at position 2956 of SEQ ID NO: 1882561
uaggcucucccaggauaga

SEQ ID NO: 2130801 - RNA, 19 nt, Artificial Sequence
  Description of Artificial Sequence: Synthetic oligonucleotide
  Antisense strand to SEQ ID NO: 2130800
ucuauccugggagagccua

SEQ ID NO: 2130802 - RNA, 19 nt, Artificial Sequence
  Description of Artificial Sequence: Synthetic oligonucleotide
  Sense strand starting at position 3092 of SEQ ID NO: 1882561
uaaacauugcccuagugag

SEQ ID NO: 2130803 - RNA, 19 nt, Artificial Sequence
  Description of Artificial Sequence: Synthetic oligonucleotide
  Antisense strand to SEQ ID NO: 2130802
cucacuagggcaauguuua

SEQ ID NO: 2130804 - RNA, 19 nt, Artificial Sequence
  Description of Artificial Sequence: Synthetic oligonucleotide
  Sense strand starting at position 3125 of SEQ ID NO: 1882561
gccucaccucagugacaau

SEQ ID NO: 2130805 - RNA, 19 nt, Artificial Sequence
  Description of Artificial Sequence: Synthetic oligonucleotide
  Antisense strand to SEQ ID NO: 2130804
auugucacugaggugaggc

SEQ ID NO: 2130806 - RNA, 19 nt, Artificial Sequence
  Description of Artificial Sequence: Synthetic oligonucleotide
  Sense strand starting at position 3310 of SEQ ID NO: 1882561
gugggaugguggccaaaga

SEQ ID NO: 2130807 - RNA, 19 nt, Artificial Sequence
  Description of Artificial Sequence: Synthetic oligonucleotide
  Antisense strand to SEQ ID NO: 2130806
ucuuuggccaccaucccac

SEQ ID NO: 2130808 - RNA, 19 nt, Artificial Sequence
  Description of Artificial Sequence: Synthetic oligonucleotide
  Sense strand starting at position 3323 of SEQ ID NO: 1882561
caaagagugcugcaccaga

SEQ ID NO: 2130809 - RNA, 19 nt, Artificial Sequence
  Description of Artificial Sequence: Synthetic oligonucleotide
  Antisense strand to SEQ ID NO: 2130808
ucuggugcagcacucuuug

SEQ ID NO: 2130810 - RNA, 19 nt, Artificial Sequence
  Description of Artificial Sequence: Synthetic oligonucleotide
  Sense strand starting at position 3406 of SEQ ID NO: 1882561
uguccugaguccucccuua

SEQ ID NO: 2130811 - RNA, 19 nt, Artificial Sequence
  Description of Artificial Sequence: Synthetic oligonucleotide
  Antisense strand to SEQ ID NO: 2130810
uaagggaggacucaggaca

SEQ ID NO: 2130812 - RNA, 19 nt, Artificial Sequence
  Description of Artificial Sequence: Synthetic oligonucleotide
  Sense strand starting at position 3490 of SEQ ID NO: 1882561
cagaaaugccuuuggguuc

SEQ ID NO: 2130813 - RNA, 19 nt, Artificial Sequence
  Description of Artificial Sequence: Synthetic oligonucleotide
  Antisense strand to SEQ ID NO: 2130812
gaacccaaaggcauuucug

SEQ ID NO: 2130814 - RNA, 19 nt, Artificial Sequence
  Description of Artificial Sequence: Synthetic oligonucleotide
  Sense strand starting at position 3758 of SEQ ID NO: 1882561
caacgcuuugcucagagau

SEQ ID NO: 2130815 - RNA, 19 nt, Artificial Sequence
  Description of Artificial Sequence: Synthetic oligonucleotide
  Antisense strand to SEQ ID NO: 2130814
aucucugagcaaagcguug

SEQ ID NO: 2130816 - RNA, 19 nt, Artificial Sequence
  Description of Artificial Sequence: Synthetic oligonucleotide
  Sense strand starting at position 3797 of SEQ ID NO: 1882561
guuuauugccuuuaaguuc

SEQ ID NO: 2130817 - RNA, 19 nt, Artificial Sequence
  Description of Artificial Sequence: Synthetic oligonucleotide
  Antisense strand to SEQ ID NO: 2130816
gaacuuaaaggcaauaaac

SEQ ID NO: 2130818 - RNA, 19 nt, Artificial Sequence
  Description of Artificial Sequence: Synthetic oligonucleotide
  Sense strand starting at position 3946 of SEQ ID NO: 1882561
accgcauucugaucaagac

SEQ ID NO: 2130819 - RNA, 19 nt, Artificial Sequence
  Description of Artificial Sequence: Synthetic oligonucleotide
  Antisense strand to SEQ ID NO: 2130818
gucuugaucagaaugcggu

SEQ ID NO: 2130820 - RNA, 19 nt, Artificial Sequence
  Description of Artificial Sequence: Synthetic oligonucleotide
  Sense strand starting at position 219 of SEQ ID NO: 1882562
aagggugccuccuaggaga

SEQ ID NO: 2130821 - RNA, 19 nt, Artificial Sequence
  Description of Artificial Sequence: Synthetic oligonucleotide
  Antisense strand to SEQ ID NO: 2130820
ucuccuaggaggcacccuu

SEQ ID NO: 2130822 - RNA, 19 nt, Artificial Sequence
  Description of Artificial Sequence: Synthetic oligonucleotide
  Sense strand starting at position 296 of SEQ ID NO: 1882562
agaagaaacguuggugaua

SEQ ID NO: 2130823 - RNA, 19 nt, Artificial Sequence
  Description of Artificial Sequence: Synthetic oligonucleotide
  Antisense strand to SEQ ID NO: 2130822
uaucaccaacguuucuucu

SEQ ID NO: 2130824 - RNA, 19 nt, Artificial Sequence
  Description of Artificial Sequence: Synthetic oligonucleotide
  Sense strand starting at position 297 of SEQ ID NO: 1882562
gaagaaacguuggugauaa

SEQ ID NO: 2130825 - RNA, 19 nt, Artificial Sequence
  Description of Artificial Sequence: Synthetic oligonucleotide
  Antisense strand to SEQ ID NO: 2130824
uuaucaccaacguuucuuc

SEQ ID NO: 2130826 - RNA, 19 nt, Artificial Sequence
  Description of Artificial Sequence: Synthetic oligonucleotide
  Sense strand starting at position 298 of SEQ ID NO: 1882562
aagaaacguuggugauaac

SEQ ID NO: 2130827 - RNA, 19 nt, Artificial Sequence
  Description of Artificial Sequence: Synthetic oligonucleotide
  Antisense strand to SEQ ID NO: 2130826
guuaucaccaacguuucuu

SEQ ID NO: 2130828 - RNA, 19 nt, Artificial Sequence
  Description of Artificial Sequence: Synthetic oligonucleotide
  Sense strand starting at position 337 of SEQ ID NO: 1882562
ggugcauauuugugaaagg

SEQ ID NO: 2130829 - RNA, 19 nt, Artificial Sequence
  Description of Artificial Sequence: Synthetic oligonucleotide
  Antisense strand to SEQ ID NO: 2130828
ccuuucacaaauaugcacc

SEQ ID NO: 2130830 - RNA, 19 nt, Artificial Sequence
  Description of Artificial Sequence: Synthetic oligonucleotide
  Sense strand starting at position 398 of SEQ ID NO: 1882562
guaucaaagucacugcuca

SEQ ID NO: 2130831 - RNA, 19 nt, Artificial Sequence
  Description of Artificial Sequence: Synthetic oligonucleotide
  Antisense strand to SEQ ID NO: 2130830
ugagcagugacuuugauac

SEQ ID NO: 2130832 - RNA, 19 nt, Artificial Sequence
  Description of Artificial Sequence: Synthetic oligonucleotide
  Sense strand starting at position 492 of SEQ ID NO: 1882562
ggcgacugggcucaauaaa

SEQ ID NO: 2130833 - RNA, 19 nt, Artificial Sequence
  Description of Artificial Sequence: Synthetic oligonucleotide
  Antisense strand to SEQ ID NO: 2130832
uuuauugagcccagucgcc

SEQ ID NO: 2130834 - RNA, 19 nt, Artificial Sequence
  Description of Artificial Sequence: Synthetic oligonucleotide
  Sense strand starting at position 606 of SEQ ID NO: 1882562
cacucuguaucguuauugu

SEQ ID NO: 2130835 - RNA, 19 nt, Artificial Sequence
  Description of Artificial Sequence: Synthetic oligonucleotide
  Antisense strand to SEQ ID NO: 2130834
acaauaacgauacagagug

SEQ ID NO: 2130836 - RNA, 19 nt, Artificial Sequence
  Description of Artificial Sequence: Synthetic oligonucleotide
  Sense strand starting at position 609 of SEQ ID NO: 1882562
ucuguaucguuauugucua

SEQ ID NO: 2130837 - RNA, 19 nt, Artificial Sequence
  Description of Artificial Sequence: Synthetic oligonucleotide
  Antisense strand to SEQ ID NO: 2130836
uagacaauaacgauacaga

SEQ ID NO: 2130838 - RNA, 19 nt, Artificial Sequence
  Description of Artificial Sequence: Synthetic oligonucleotide
  Sense strand starting at position 614 of SEQ ID NO: 1882562
aucguuauugucuaaucuu

SEQ ID NO: 2130839 - RNA, 19 nt, Artificial Sequence
  Description of Artificial Sequence: Synthetic oligonucleotide
  Antisense strand to SEQ ID NO: 2130838
aagauuagacaauaacgau

SEQ ID NO: 2130840 - RNA, 19 nt, Artificial Sequence
  Description of Artificial Sequence: Synthetic oligonucleotide
  Sense strand starting at position 623 of SEQ ID NO: 1882562
gucuaaucuuaggcacaca

SEQ ID NO: 2130841 - RNA, 19 nt, Artificial Sequence
  Description of Artificial Sequence: Synthetic oligonucleotide
  Antisense strand to SEQ ID NO: 2130840
ugugugccuaagauuagac

SEQ ID NO: 2130842 - RNA, 19 nt, Artificial Sequence
  Description of Artificial Sequence: Synthetic oligonucleotide
  Sense strand starting at position 641 of SEQ ID NO: 1882562
acuguauuccuagacccau

SEQ ID NO: 2130843 - RNA, 19 nt, Artificial Sequence
  Description of Artificial Sequence: Synthetic oligonucleotide
  Antisense strand to SEQ ID NO: 2130842
augggucuaggaauacagu

SEQ ID NO: 2130844 - RNA, 19 nt, Artificial Sequence
  Description of Artificial Sequence: Synthetic oligonucleotide
  Sense strand starting at position 694 of SEQ ID NO: 1882562
cauuuagggucccagagau

SEQ ID NO: 2130845 - RNA, 19 nt, Artificial Sequence
  Description of Artificial Sequence: Synthetic oligonucleotide
  Antisense strand to SEQ ID NO: 2130844
aucucugggacccuaaaug

SEQ ID NO: 2130846 - RNA, 19 nt, Artificial Sequence
  Description of Artificial Sequence: Synthetic oligonucleotide
  Sense strand starting at position 1079 of SEQ ID NO: 1882562
guugcucgcgccugcaaua

SEQ ID NO: 2130847 - RNA, 19 nt, Artificial Sequence
  Description of Artificial Sequence: Synthetic oligonucleotide
  Antisense strand to SEQ ID NO: 2130846
uauugcaggcgcgagcaac

SEQ ID NO: 2130848 - RNA, 19 nt, Artificial Sequence
  Description of Artificial Sequence: Synthetic oligonucleotide
  Sense strand starting at position 1324 of SEQ ID NO: 1882562
acuagagcggcucaaauaa

SEQ ID NO: 2130849 - RNA, 19 nt, Artificial Sequence
  Description of Artificial Sequence: Synthetic oligonucleotide
  Antisense strand to SEQ ID NO: 2130848
uuauuugagccgcucuagu

SEQ ID NO: 2130850 - RNA, 19 nt, Artificial Sequence
  Description of Artificial Sequence: Synthetic oligonucleotide
  Sense strand starting at position 1523 of SEQ ID NO: 1882562
gggcgcauucguguuugaa

SEQ ID NO: 2130851 - RNA, 19 nt, Artificial Sequence
  Description of Artificial Sequence: Synthetic oligonucleotide
  Antisense strand to SEQ ID NO: 2130850
uucaaacacgaaugcgccc

SEQ ID NO: 2130852 - RNA, 19 nt, Artificial Sequence
  Description of Artificial Sequence: Synthetic oligonucleotide
  Sense strand starting at position 1524 of SEQ ID NO: 1882562
ggcgcauucguguuugaaa

SEQ ID NO: 2130853 - RNA, 19 nt, Artificial Sequence
  Description of Artificial Sequence: Synthetic oligonucleotide
  Antisense strand to SEQ ID NO: 2130852
uuucaaacacgaaugcgcc

SEQ ID NO: 2130854 - RNA, 19 nt, Artificial Sequence
  Description of Artificial Sequence: Synthetic oligonucleotide
  Sense strand starting at position 1863 of SEQ ID NO: 1882562
ucugaauccgcucaucuga

SEQ ID NO: 2130855 - RNA, 19 nt, Artificial Sequence
  Description of Artificial Sequence: Synthetic oligonucleotide
  Antisense strand to SEQ ID NO: 2130854
ucagaugagcggauucaga

SEQ ID NO: 2130856 - RNA, 19 nt, Artificial Sequence
  Description of Artificial Sequence: Synthetic oligonucleotide
  Sense strand starting at position 2236 of SEQ ID NO: 1882562
ccuggaaugucaggucaau

SEQ ID NO: 2130857 - RNA, 19 nt, Artificial Sequence
  Description of Artificial Sequence: Synthetic oligonucleotide
  Antisense strand to SEQ ID NO: 2130856
auugaccugacauuccagg

SEQ ID NO: 2130858 - RNA, 19 nt, Artificial Sequence
  Description of Artificial Sequence: Synthetic oligonucleotide
  Sense strand starting at position 2248 of SEQ ID NO: 1882562
ggucaaucgccuuggcuuu

SEQ ID NO: 2130859 - RNA, 19 nt, Artificial Sequence
  Description of Artificial Sequence: Synthetic oligonucleotide
  Antisense strand to SEQ ID NO: 2130858
aaagccaaggcgauugacc

SEQ ID NO: 2130860 - RNA, 19 nt, Artificial Sequence
  Description of Artificial Sequence: Synthetic oligonucleotide
  Sense strand starting at position 2264 of SEQ ID NO: 1882562
uuuguucuuucuguuauga

SEQ ID NO: 2130861 - RNA, 19 nt, Artificial Sequence
  Description of Artificial Sequence: Synthetic oligonucleotide
  Antisense strand to SEQ ID NO: 2130860
ucauaacagaaagaacaaa

SEQ ID NO: 2130862 - RNA, 19 nt, Artificial Sequence
  Description of Artificial Sequence: Synthetic oligonucleotide
  Sense strand starting at position 2266 of SEQ ID NO: 1882562
uguucuuucuguuaugaca

SEQ ID NO: 2130863 - RNA, 19 nt, Artificial Sequence
  Description of Artificial Sequence: Synthetic oligonucleotide
  Antisense strand to SEQ ID NO: 2130862
ugucauaacagaaagaaca

SEQ ID NO: 2130864 - RNA, 19 nt, Artificial Sequence
  Description of Artificial Sequence: Synthetic oligonucleotide
  Sense strand starting at position 2268 of SEQ ID NO: 1882562
uucuuucuguuaugacaca

SEQ ID NO: 2130865 - RNA, 19 nt, Artificial Sequence
  Description of Artificial Sequence: Synthetic oligonucleotide
  Antisense strand to SEQ ID NO: 2130864
ugugucauaacagaaagaa

SEQ ID NO: 2130866 - RNA, 19 nt, Artificial Sequence
  Description of Artificial Sequence: Synthetic oligonucleotide
  Sense strand starting at position 2269 of SEQ ID NO: 1882562
ucuuucuguuaugacacau

SEQ ID NO: 2130867 - RNA, 19 nt, Artificial Sequence
  Description of Artificial Sequence: Synthetic oligonucleotide
  Antisense strand to SEQ ID NO: 2130866
augugucauaacagaaaga

SEQ ID NO: 2130868 - RNA, 19 nt, Artificial Sequence
  Description of Artificial Sequence: Synthetic oligonucleotide
  Sense strand starting at position 2339 of SEQ ID NO: 1882562
acauccuguugugaggauu

SEQ ID NO: 2130869 - RNA, 19 nt, Artificial Sequence
  Description of Artificial Sequence: Synthetic oligonucleotide
  Antisense strand to SEQ ID NO: 2130868
aauccucacaacaggaugu

SEQ ID NO: 2130870 - RNA, 19 nt, Artificial Sequence
  Description of Artificial Sequence: Synthetic oligonucleotide
  Sense strand starting at position 2417 of SEQ ID NO: 1882562
agaggcucccacugugaau

SEQ ID NO: 2130871 - RNA, 19 nt, Artificial Sequence
  Description of Artificial Sequence: Synthetic oligonucleotide
  Antisense strand to SEQ ID NO: 2130870
auucacagugggagccucu

SEQ ID NO: 2130872 - RNA, 19 nt, Artificial Sequence
  Description of Artificial Sequence: Synthetic oligonucleotide
  Sense strand starting at position 2616 of SEQ ID NO: 1882562
gaaggucuguuugcggaga

SEQ ID NO: 2130873 - RNA, 19 nt, Artificial Sequence
  Description of Artificial Sequence: Synthetic oligonucleotide
  Antisense strand to SEQ ID NO: 2130872
ucuccgcaaacagaccuuc

SEQ ID NO: 2130874 - RNA, 19 nt, Artificial Sequence
  Description of Artificial Sequence: Synthetic oligonucleotide
  Sense strand starting at position 2617 of SEQ ID NO: 1882562
aaggucuguuugcggagaa

SEQ ID NO: 2130875 - RNA, 19 nt, Artificial Sequence
  Description of Artificial Sequence: Synthetic oligonucleotide
  Antisense strand to SEQ ID NO: 2130874
uucuccgcaaacagaccuu

SEQ ID NO: 2130876 - RNA, 19 nt, Artificial Sequence
  Description of Artificial Sequence: Synthetic oligonucleotide
  Sense strand starting at position 2619 of SEQ ID NO: 1882562
ggucuguuugcggagaagu

SEQ ID NO: 2130877 - RNA, 19 nt, Artificial Sequence
  Description of Artificial Sequence: Synthetic oligonucleotide
  Antisense strand to SEQ ID NO: 2130876
acuucuccgcaaacagacc

SEQ ID NO: 2130878 - RNA, 19 nt, Artificial Sequence
  Description of Artificial Sequence: Synthetic oligonucleotide
  Sense strand starting at position 2620 of SEQ ID NO: 1882562
gucuguuugcggagaaguu

SEQ ID NO: 2130879 - RNA, 19 nt, Artificial Sequence
  Description of Artificial Sequence: Synthetic oligonucleotide
  Antisense strand to SEQ ID NO: 2130878
aacuucuccgcaaacagac

SEQ ID NO: 2130880 - RNA, 19 nt, Artificial Sequence
  Description of Artificial Sequence: Synthetic oligonucleotide
  Sense strand starting at position 2621 of SEQ ID NO: 1882562
ucuguuugcggagaaguuu

SEQ ID NO: 2130881 - RNA, 19 nt, Artificial Sequence
  Description of Artificial Sequence: Synthetic oligonucleotide
  Antisense strand to SEQ ID NO: 2130880
aaacuucuccgcaaacaga

SEQ ID NO: 2130882 - RNA, 19 nt, Artificial Sequence
  Description of Artificial Sequence: Synthetic oligonucleotide
  Sense strand starting at position 2641 of SEQ ID NO: 1882562
cgacuuuaccuggagcaga

SEQ ID NO: 2130883 - RNA, 19 nt, Artificial Sequence
  Description of Artificial Sequence: Synthetic oligonucleotide
  Antisense strand to SEQ ID NO: 2130882
ucugcuccagguaaagucg

SEQ ID NO: 2130884 - RNA, 19 nt, Artificial Sequence
  Description of Artificial Sequence: Synthetic oligonucleotide
  Sense strand starting at position 2961 of SEQ ID NO: 1882562
gaaagccugcgacaaguuu

SEQ ID NO: 2130885 - RNA, 19 nt, Artificial Sequence
  Description of Artificial Sequence: Synthetic oligonucleotide
  Antisense strand to SEQ ID NO: 2130884
aaacuugucgcaggcuuuc

SEQ ID NO: 2130886 - RNA, 19 nt, Artificial Sequence
  Description of Artificial Sequence: Synthetic oligonucleotide
  Sense strand starting at position 3368 of SEQ ID NO: 1882562
gcugaugcuuucuagaaau

SEQ ID NO: 2130887 - RNA, 19 nt, Artificial Sequence
  Description of Artificial Sequence: Synthetic oligonucleotide
  Antisense strand to SEQ ID NO: 2130886
auuucuagaaagcaucagc

SEQ ID NO: 2130888 - RNA, 19 nt, Artificial Sequence
  Description of Artificial Sequence: Synthetic oligonucleotide
  Sense strand starting at position 3370 of SEQ ID NO: 1882562
ugaugcuuucuagaaauca

SEQ ID NO: 2130889 - RNA, 19 nt, Artificial Sequence
  Description of Artificial Sequence: Synthetic oligonucleotide
  Antisense strand to SEQ ID NO: 2130888
ugauuucuagaaagcauca

SEQ ID NO: 2130890 - RNA, 19 nt, Artificial Sequence
  Description of Artificial Sequence: Synthetic oligonucleotide
  Sense strand starting at position 3575 of SEQ ID NO: 1882562
agguuaacaucacaggaau

SEQ ID NO: 2130891 - RNA, 19 nt, Artificial Sequence
  Description of Artificial Sequence: Synthetic oligonucleotide
  Antisense strand to SEQ ID NO: 2130890
auuccugugauguuaaccu

SEQ ID NO: 2130892 - RNA, 19 nt, Artificial Sequence
  Description of Artificial Sequence: Synthetic oligonucleotide
  Sense strand starting at position 3712 of SEQ ID NO: 1882562
gcuggagaguacuacauca

SEQ ID NO: 2130893 - RNA, 19 nt, Artificial Sequence
  Description of Artificial Sequence: Synthetic oligonucleotide
  Antisense strand to SEQ ID NO: 2130892
ugauguaguacucuccagc

SEQ ID NO: 2130894 - RNA, 19 nt, Artificial Sequence
  Description of Artificial Sequence: Synthetic oligonucleotide
  Sense strand starting at position 3767 of SEQ ID NO: 1882562
agcugucagcccuagacuu

SEQ ID NO: 2130895 - RNA, 19 nt, Artificial Sequence
  Description of Artificial Sequence: Synthetic oligonucleotide
  Antisense strand to SEQ ID NO: 2130894
aagucuagggcugacagcu

SEQ ID NO: 2130896 - RNA, 19 nt, Artificial Sequence
  Description of Artificial Sequence: Synthetic oligonucleotide
  Sense strand starting at position 3952 of SEQ ID NO: 1882562
ggaggucaguuauuaaguu

SEQ ID NO: 2130897 - RNA, 19 nt, Artificial Sequence
  Description of Artificial Sequence: Synthetic oligonucleotide
  Antisense strand to SEQ ID NO: 2130896
aacuuaauaacugaccucc

SEQ ID NO: 2130898 - RNA, 19 nt, Artificial Sequence
  Description of Artificial Sequence: Synthetic oligonucleotide
  Sense strand starting at position 3953 of SEQ ID NO: 1882562
gaggucaguuauuaaguua

SEQ ID NO: 2130899 - RNA, 19 nt, Artificial Sequence
  Description of Artificial Sequence: Synthetic oligonucleotide
  Antisense strand to SEQ ID NO: 2130898
uaacuuaauaacugaccuc

SEQ ID NO: 2130900 - RNA, 19 nt, Artificial Sequence
  Description of Artificial Sequence: Synthetic oligonucleotide
  Sense strand starting at position 28 of SEQ ID NO: 1882563
ggaggccuuaucuaaguaa

SEQ ID NO: 2130901 - RNA, 19 nt, Artificial Sequence
  Description of Artificial Sequence: Synthetic oligonucleotide
  Antisense strand to SEQ ID NO: 2130900
uuacuuagauaaggccucc

SEQ ID NO: 2130902 - RNA, 19 nt, Artificial Sequence
  Description of Artificial Sequence: Synthetic oligonucleotide
  Sense strand starting at position 31 of SEQ ID NO: 1882563
ggccuuaucuaaguaauau

SEQ ID NO: 2130903 - RNA, 19 nt, Artificial Sequence
  Description of Artificial Sequence: Synthetic oligonucleotide
  Antisense strand to SEQ ID NO: 2130902
auauuacuuagauaaggcc

SEQ ID NO: 2130904 - RNA, 19 nt, Artificial Sequence
  Description of Artificial Sequence: Synthetic oligonucleotide
  Sense strand starting at position 162 of SEQ ID NO: 1882563
gguauuugcacuggucacu

SEQ ID NO: 2130905 - RNA, 19 nt, Artificial Sequence
  Description of Artificial Sequence: Synthetic oligonucleotide
  Antisense strand to SEQ ID NO: 2130904
agugaccagugcaaauacc

SEQ ID NO: 2130906 - RNA, 19 nt, Artificial Sequence
  Description of Artificial Sequence: Synthetic oligonucleotide
  Sense strand starting at position 343 of SEQ ID NO: 1882563
gugggcucaagauaaguga

SEQ ID NO: 2130907 - RNA, 19 nt, Artificial Sequence
  Description of Artificial Sequence: Synthetic oligonucleotide
  Antisense strand to SEQ ID NO: 2130906
ucacuuaucuugagcccac

SEQ ID NO: 2130908 - RNA, 19 nt, Artificial Sequence
  Description of Artificial Sequence: Synthetic oligonucleotide
  Sense strand starting at position 346 of SEQ ID NO: 1882563
ggcucaagauaagugauau

SEQ ID NO: 2130909 - RNA, 19 nt, Artificial Sequence
  Description of Artificial Sequence: Synthetic oligonucleotide
  Antisense strand to SEQ ID NO: 2130908
auaucacuuaucuugagcc

SEQ ID NO: 2130910 - RNA, 19 nt, Artificial Sequence
  Description of Artificial Sequence: Synthetic oligonucleotide
  Sense strand starting at position 379 of SEQ ID NO: 1882563
caaaguuuagaguagcacu

SEQ ID NO: 2130911 - RNA, 19 nt, Artificial Sequence
  Description of Artificial Sequence: Synthetic oligonucleotide
  Antisense strand to SEQ ID NO: 2130910
agugcuacucuaaacuuug

SEQ ID NO: 2130912 - RNA, 19 nt, Artificial Sequence
  Description of Artificial Sequence: Synthetic oligonucleotide
  Sense strand starting at position 428 of SEQ ID NO: 1882563
ucuguaucugcgcuguuua

SEQ ID NO: 2130913 - RNA, 19 nt, Artificial Sequence
  Description of Artificial Sequence: Synthetic oligonucleotide
  Antisense strand to SEQ ID NO: 2130912
uaaacagcgcagauacaga

SEQ ID NO: 2130914 - RNA, 19 nt, Artificial Sequence
  Description of Artificial Sequence: Synthetic oligonucleotide
  Sense strand starting at position 430 of SEQ ID NO: 1882563
uguaucugcgcuguuuaau

SEQ ID NO: 2130915 - RNA, 19 nt, Artificial Sequence
  Description of Artificial Sequence: Synthetic oligonucleotide
  Antisense strand to SEQ ID NO: 2130914
auuaaacagcgcagauaca

SEQ ID NO: 2130916 - RNA, 19 nt, Artificial Sequence
  Description of Artificial Sequence: Synthetic oligonucleotide
  Sense strand starting at position 431 of SEQ ID NO: 1882563
guaucugcgcuguuuaaua

SEQ ID NO: 2130917 - RNA, 19 nt, Artificial Sequence
  Description of Artificial Sequence: Synthetic oligonucleotide
  Antisense strand to SEQ ID NO: 2130916
uauuaaacagcgcagauac

SEQ ID NO: 2130918 - RNA, 19 nt, Artificial Sequence
  Description of Artificial Sequence: Synthetic oligonucleotide
  Sense strand starting at position 462 of SEQ ID NO: 1882563
accacaugugccuacugaa

SEQ ID NO: 2130919 - RNA, 19 nt, Artificial Sequence
  Description of Artificial Sequence: Synthetic oligonucleotide
  Antisense strand to SEQ ID NO: 2130918
uucaguaggcacauguggu

SEQ ID NO: 2130920 - RNA, 19 nt, Artificial Sequence
  Description of Artificial Sequence: Synthetic oligonucleotide
  Sense strand starting at position 478 of SEQ ID NO: 1882563
gaacaugugaaaugugguu

SEQ ID NO: 2130921 - RNA, 19 nt, Artificial Sequence
  Description of Artificial Sequence: Synthetic oligonucleotide
  Antisense strand to SEQ ID NO: 2130920
aaccacauuucacauguuc

SEQ ID NO: 2130922 - RNA, 19 nt, Artificial Sequence
  Description of Artificial Sequence: Synthetic oligonucleotide
  Sense strand starting at position 493 of SEQ ID NO: 1882563
gguugcugugacuaaggaa

SEQ ID NO: 2130923 - RNA, 19 nt, Artificial Sequence
  Description of Artificial Sequence: Synthetic oligonucleotide
  Antisense strand to SEQ ID NO: 2130922
uuccuuagucacagcaacc

SEQ ID NO: 2130924 - RNA, 19 nt, Artificial Sequence
  Description of Artificial Sequence: Synthetic oligonucleotide
  Sense strand starting at position 882 of SEQ ID NO: 1882563
ugugguaauauacagaguu

SEQ ID NO: 2130925 - RNA, 19 nt, Artificial Sequence
  Description of Artificial Sequence: Synthetic oligonucleotide
  Antisense strand to SEQ ID NO: 2130924
aacucuguauauuaccaca

SEQ ID NO: 2130926 - RNA, 19 nt, Artificial Sequence
  Description of Artificial Sequence: Synthetic oligonucleotide
  Sense strand starting at position 975 of SEQ ID NO: 1882563
ccaagugcugaguaaguau

SEQ ID NO: 2130927 - RNA, 19 nt, Artificial Sequence
  Description of Artificial Sequence: Synthetic oligonucleotide
  Antisense strand to SEQ ID NO: 2130926
auacuuacucagcacuugg

SEQ ID NO: 2130928 - RNA, 19 nt, Artificial Sequence
  Description of Artificial Sequence: Synthetic oligonucleotide
  Sense strand starting at position 1152 of SEQ ID NO: 1882563
aaccuucuugcuggaggaa

SEQ ID NO: 2130929 - RNA, 19 nt, Artificial Sequence
  Description of Artificial Sequence: Synthetic oligonucleotide
  Antisense strand to SEQ ID NO: 2130928
uuccuccagcaagaagguu

SEQ ID NO: 2130930 - RNA, 19 nt, Artificial Sequence
  Description of Artificial Sequence: Synthetic oligonucleotide
  Sense strand starting at position 1249 of SEQ ID NO: 1882563
ggcucacugccuuaacaga

SEQ ID NO: 2130931 - RNA, 19 nt, Artificial Sequence
  Description of Artificial Sequence: Synthetic oligonucleotide
  Antisense strand to SEQ ID NO: 2130930
ucuguuaaggcagugagcc

SEQ ID NO: 2130932 - RNA, 19 nt, Artificial Sequence
  Description of Artificial Sequence: Synthetic oligonucleotide
  Sense strand starting at position 1426 of SEQ ID NO: 1882563
ugcagcuugcaggauaaau

SEQ ID NO: 2130933 - RNA, 19 nt, Artificial Sequence
  Description of Artificial Sequence: Synthetic oligonucleotide
  Antisense strand to SEQ ID NO: 2130932
auuuauccugcaagcugca

SEQ ID NO: 2130934 - RNA, 19 nt, Artificial Sequence
  Description of Artificial Sequence: Synthetic oligonucleotide
  Sense strand starting at position 1437 of SEQ ID NO: 1882563
ggauaaaugcccugcauag

SEQ ID NO: 2130935 - RNA, 19 nt, Artificial Sequence
  Description of Artificial Sequence: Synthetic oligonucleotide
  Antisense strand to SEQ ID NO: 2130934
cuaugcagggcauuuaucc

SEQ ID NO: 2130936 - RNA, 19 nt, Artificial Sequence
  Description of Artificial Sequence: Synthetic oligonucleotide
  Sense strand starting at position 1515 of SEQ ID NO: 1882563
acgugggagcgauggauua

SEQ ID NO: 2130937 - RNA, 19 nt, Artificial Sequence
  Description of Artificial Sequence: Synthetic oligonucleotide
  Antisense strand to SEQ ID NO: 2130936
uaauccaucgcucccacgu

SEQ ID NO: 2130938 - RNA, 19 nt, Artificial Sequence
  Description of Artificial Sequence: Synthetic oligonucleotide
  Sense strand starting at position 1517 of SEQ ID NO: 1882563
gugggagcgauggauuauu

SEQ ID NO: 2130939 - RNA, 19 nt, Artificial Sequence
  Description of Artificial Sequence: Synthetic oligonucleotide
  Antisense strand to SEQ ID NO: 2130938
aauaauccaucgcucccac

SEQ ID NO: 2130940 - RNA, 19 nt, Artificial Sequence
  Description of Artificial Sequence: Synthetic oligonucleotide
  Sense strand starting at position 1525 of SEQ ID NO: 1882563
gauggauuauuugggaaag

SEQ ID NO: 2130941 - RNA, 19 nt, Artificial Sequence
  Description of Artificial Sequence: Synthetic oligonucleotide
  Antisense strand to SEQ ID NO: 2130940
cuuucccaaauaauccauc

SEQ ID NO: 2130942 - RNA, 19 nt, Artificial Sequence
  Description of Artificial Sequence: Synthetic oligonucleotide
  Sense strand starting at position 1559 of SEQ ID NO: 1882563
gcggauuccuaagucagaa

SEQ ID NO: 2130943 - RNA, 19 nt, Artificial Sequence
  Description of Artificial Sequence: Synthetic oligonucleotide
  Antisense strand to SEQ ID NO: 2130942
uucugacuuaggaauccgc

SEQ ID NO: 2130944 - RNA, 19 nt, Artificial Sequence
  Description of Artificial Sequence: Synthetic oligonucleotide
  Sense strand starting at position 1637 of SEQ ID NO: 1882563
acuggaaaguucucaaauu

SEQ ID NO: 2130945 - RNA, 19 nt, Artificial Sequence
  Description of Artificial Sequence: Synthetic oligonucleotide
  Antisense strand to SEQ ID NO: 2130944
aauuugagaacuuuccagu

SEQ ID NO: 2130946 - RNA, 19 nt, Artificial Sequence
  Description of Artificial Sequence: Synthetic oligonucleotide
  Sense strand starting at position 2548 of SEQ ID NO: 1882563
gcuauuucuuuacucaguu

SEQ ID NO: 2130947 - RNA, 19 nt, Artificial Sequence
  Description of Artificial Sequence: Synthetic oligonucleotide
  Antisense strand to SEQ ID NO: 2130946
aacugaguaaagaaauagc

SEQ ID NO: 2130948 - RNA, 19 nt, Artificial Sequence
  Description of Artificial Sequence: Synthetic oligonucleotide
  Sense strand starting at position 2574 of SEQ ID NO: 1882563
cagcuaggaguuugaaaga

SEQ ID NO: 2130949 - RNA, 19 nt, Artificial Sequence
  Description of Artificial Sequence: Synthetic oligonucleotide
  Antisense strand to SEQ ID NO: 2130948
ucuuucaaacuccuagcug

SEQ ID NO: 2130950 - RNA, 19 nt, Artificial Sequence
  Description of Artificial Sequence: Synthetic oligonucleotide
  Sense strand starting at position 2793 of SEQ ID NO: 1882563
cuaauauggucuccagaag

SEQ ID NO: 2130951 - RNA, 19 nt, Artificial Sequence
  Description of Artificial Sequence: Synthetic oligonucleotide
  Antisense strand to SEQ ID NO: 2130950
cuucuggagaccauauuag

SEQ ID NO: 2130952 - RNA, 19 nt, Artificial Sequence
  Description of Artificial Sequence: Synthetic oligonucleotide
  Sense strand starting at position 2794 of SEQ ID NO: 1882563
uaauauggucuccagaagu

SEQ ID NO: 2130953 - RNA, 19 nt, Artificial Sequence
  Description of Artificial Sequence: Synthetic oligonucleotide
  Antisense strand to SEQ ID NO: 2130952
acuucuggagaccauauua

SEQ ID NO: 2130954 - RNA, 19 nt, Artificial Sequence
  Description of Artificial Sequence: Synthetic oligonucleotide
  Sense strand starting at position 2807 of SEQ ID NO: 1882563
agaagucauuaagugauag

SEQ ID NO: 2130955 - RNA, 19 nt, Artificial Sequence
  Description of Artificial Sequence: Synthetic oligonucleotide
  Antisense strand to SEQ ID NO: 2130954
cuaucacuuaaugacuucu

SEQ ID NO: 2130956 - RNA, 19 nt, Artificial Sequence
  Description of Artificial Sequence: Synthetic oligonucleotide
  Sense strand starting at position 2844 of SEQ ID NO: 1882563
cuucuaggcuugguaagau

SEQ ID NO: 2130957 - RNA, 19 nt, Artificial Sequence
  Description of Artificial Sequence: Synthetic oligonucleotide
  Antisense strand to SEQ ID NO: 2130956
aucuuaccaagccuagaag

SEQ ID NO: 2130958 - RNA, 19 nt, Artificial Sequence
  Description of Artificial Sequence: Synthetic oligonucleotide
  Sense strand starting at position 2964 of SEQ ID NO: 1882563
ccuacugccucaguagaga

SEQ ID NO: 2130959 - RNA, 19 nt, Artificial Sequence
  Description of Artificial Sequence: Synthetic oligonucleotide
  Antisense strand to SEQ ID NO: 2130958
ucucuacugaggcaguagg

SEQ ID NO: 2130960 - RNA, 19 nt, Artificial Sequence
  Description of Artificial Sequence: Synthetic oligonucleotide
  Sense strand starting at position 3050 of SEQ ID NO: 1882563
uugugaugaaacgguccaa

SEQ ID NO: 2130961 - RNA, 19 nt, Artificial Sequence
  Description of Artificial Sequence: Synthetic oligonucleotide
  Antisense strand to SEQ ID NO: 2130960
uuggaccguuucaucacaa

SEQ ID NO: 2130962 - RNA, 19 nt, Artificial Sequence
  Description of Artificial Sequence: Synthetic oligonucleotide
  Sense strand starting at position 3129 of SEQ ID NO: 1882563
ugagaagucuuauccuuau

SEQ ID NO: 2130963 - RNA, 19 nt, Artificial Sequence
  Description of Artificial Sequence: Synthetic oligonucleotide
  Antisense strand to SEQ ID NO: 2130962
auaaggauaagacuucuca

SEQ ID NO: 2130964 - RNA, 19 nt, Artificial Sequence
  Description of Artificial Sequence: Synthetic oligonucleotide
  Sense strand starting at position 3201 of SEQ ID NO: 1882563
uauguuucuguugaauaag

SEQ ID NO: 2130965 - RNA, 19 nt, Artificial Sequence
  Description of Artificial Sequence: Synthetic oligonucleotide
  Antisense strand to SEQ ID NO: 2130964
cuuauucaacagaaacaua

SEQ ID NO: 2130966 - RNA, 19 nt, Artificial Sequence
  Description of Artificial Sequence: Synthetic oligonucleotide
  Sense strand starting at position 3231 of SEQ ID NO: 1882563
guaaguguuacgggaaagg

SEQ ID NO: 2130967 - RNA, 19 nt, Artificial Sequence
  Description of Artificial Sequence: Synthetic oligonucleotide
  Antisense strand to SEQ ID NO: 2130966
ccuuucccguaacacuuac

SEQ ID NO: 2130968 - RNA, 19 nt, Artificial Sequence
  Description of Artificial Sequence: Synthetic oligonucleotide
  Sense strand starting at position 3336 of SEQ ID NO: 1882563
agaggaacaucgguagucu

SEQ ID NO: 2130969 - RNA, 19 nt, Artificial Sequence
  Description of Artificial Sequence: Synthetic oligonucleotide
  Antisense strand to SEQ ID NO: 2130968
agacuaccgauguuccucu

SEQ ID NO: 2130970 - RNA, 19 nt, Artificial Sequence
  Description of Artificial Sequence: Synthetic oligonucleotide
  Sense strand starting at position 3347 of SEQ ID NO: 1882563
gguagucugaggcagagaa

SEQ ID NO: 2130971 - RNA, 19 nt, Artificial Sequence
  Description of Artificial Sequence: Synthetic oligonucleotide
  Antisense strand to SEQ ID NO: 2130970
uucucugccucagacuacc

SEQ ID NO: 2130972 - RNA, 19 nt, Artificial Sequence
  Description of Artificial Sequence: Synthetic oligonucleotide
  Sense strand starting at position 3610 of SEQ ID NO: 1882563
auaggcuaacuucgugaua

SEQ ID NO: 2130973 - RNA, 19 nt, Artificial Sequence
  Description of Artificial Sequence: Synthetic oligonucleotide
  Antisense strand to SEQ ID NO: 2130972
uaucacgaaguuagccuau

SEQ ID NO: 2130974 - RNA, 19 nt, Artificial Sequence
  Description of Artificial Sequence: Synthetic oligonucleotide
  Sense strand starting at position 3613 of SEQ ID NO: 1882563
ggcuaacuucgugauauug

SEQ ID NO: 2130975 - RNA, 19 nt, Artificial Sequence
  Description of Artificial Sequence: Synthetic oligonucleotide
  Antisense strand to SEQ ID NO: 2130974
caauaucacgaaguuagcc

SEQ ID NO: 2130976 - RNA, 19 nt, Artificial Sequence
  Description of Artificial Sequence: Synthetic oligonucleotide
  Sense strand starting at position 3804 of SEQ ID NO: 1882563
ugugucuuagaaugacuua

SEQ ID NO: 2130977 - RNA, 19 nt, Artificial Sequence
  Description of Artificial Sequence: Synthetic oligonucleotide
  Antisense strand to SEQ ID NO: 2130976
uaagucauucuaagacaca

SEQ ID NO: 2130978 - RNA, 19 nt, Artificial Sequence
  Description of Artificial Sequence: Synthetic oligonucleotide
  Sense strand starting at position 3807 of SEQ ID NO: 1882563
gucuuagaaugacuuaacu

SEQ ID NO: 2130979 - RNA, 19 nt, Artificial Sequence
  Description of Artificial Sequence: Synthetic oligonucleotide
  Antisense strand to SEQ ID NO: 2130978
aguuaagucauucuaagac

SEQ ID NO: 2130980 - RNA, 19 nt, Artificial Sequence
  Description of Artificial Sequence: Synthetic oligonucleotide
  Sense strand starting at position 19 of SEQ ID NO: 1882564
ugcucagggcucuguaaag

SEQ ID NO: 2130981 - RNA, 19 nt, Artificial Sequence
  Description of Artificial Sequence: Synthetic oligonucleotide
  Antisense strand to SEQ ID NO: 2130980
cuuuacagagcccugagca

SEQ ID NO: 2130982 - RNA, 19 nt, Artificial Sequence
  Description of Artificial Sequence: Synthetic oligonucleotide
  Sense strand starting at position 33 of SEQ ID NO: 1882564
uaaagcuguucccugggaa

SEQ ID NO: 2130983 - RNA, 19 nt, Artificial Sequence
  Description of Artificial Sequence: Synthetic oligonucleotide
  Antisense strand to SEQ ID NO: 2130982
uucccagggaacagcuuua

SEQ ID NO: 2130984 - RNA, 19 nt, Artificial Sequence
  Description of Artificial Sequence: Synthetic oligonucleotide
  Sense strand starting at position 34 of SEQ ID NO: 1882564
aaagcuguucccugggaaa

SEQ ID NO: 2130985 - RNA, 19 nt, Artificial Sequence
  Description of Artificial Sequence: Synthetic oligonucleotide
  Antisense strand to SEQ ID NO: 2130984
uuucccagggaacagcuuu

SEQ ID NO: 2130986 - RNA, 19 nt, Artificial Sequence
  Description of Artificial Sequence: Synthetic oligonucleotide
  Sense strand starting at position 134 of SEQ ID NO: 1882564
agaaguuacugagaaacaa

SEQ ID NO: 2130987 - RNA, 19 nt, Artificial Sequence
  Description of Artificial Sequence: Synthetic oligonucleotide
  Antisense strand to SEQ ID NO: 2130986
uuguuucucaguaacuucu

SEQ ID NO: 2130988 - RNA, 19 nt, Artificial Sequence
  Description of Artificial Sequence: Synthetic oligonucleotide
  Sense strand starting at position 287 of SEQ ID NO: 1882564
aagaaauguuuggaaagca

SEQ ID NO: 2130989 - RNA, 19 nt, Artificial Sequence
  Description of Artificial Sequence: Synthetic oligonucleotide
  Antisense strand to SEQ ID NO: 2130988
ugcuuuccaaacauuucuu

SEQ ID NO: 2130990 - RNA, 19 nt, Artificial Sequence
  Description of Artificial Sequence: Synthetic oligonucleotide
  Sense strand starting at position 356 of SEQ ID NO: 1882564
uguguuggugacuguccaa

SEQ ID NO: 2130991 - RNA, 19 nt, Artificial Sequence
  Description of Artificial Sequence: Synthetic oligonucleotide
  Antisense strand to SEQ ID NO: 2130990
uuggacagucaccaacaca

SEQ ID NO: 2130992 - RNA, 19 nt, Artificial Sequence
  Description of Artificial Sequence: Synthetic oligonucleotide
  Sense strand starting at position 382 of SEQ ID NO: 1882564
uuccaagaucccuggguga

SEQ ID NO: 2130993 - RNA, 19 nt, Artificial Sequence
  Description of Artificial Sequence: Synthetic oligonucleotide
  Antisense strand to SEQ ID NO: 2130992
ucacccagggaucuuggaa

SEQ ID NO: 2130994 - RNA, 19 nt, Artificial Sequence
  Description of Artificial Sequence: Synthetic oligonucleotide
  Sense strand starting at position 384 of SEQ ID NO: 1882564
ccaagaucccugggugauc

SEQ ID NO: 2130995 - RNA, 19 nt, Artificial Sequence
  Description of Artificial Sequence: Synthetic oligonucleotide
  Antisense strand to SEQ ID NO: 2130994
gaucacccagggaucuugg

SEQ ID NO: 2130996 - RNA, 19 nt, Artificial Sequence
  Description of Artificial Sequence: Synthetic oligonucleotide
  Sense strand starting at position 393 of SEQ ID NO: 1882564
cugggugaucuggagcuaa

SEQ ID NO: 2130997 - RNA, 19 nt, Artificial Sequence
  Description of Artificial Sequence: Synthetic oligonucleotide
  Antisense strand to SEQ ID NO: 2130996
uuagcuccagaucacccag

SEQ ID NO: 2130998 - RNA, 19 nt, Artificial Sequence
  Description of Artificial Sequence: Synthetic oligonucleotide
  Sense strand starting at position 397 of SEQ ID NO: 1882564
gugaucuggagcuaauauc

SEQ ID NO: 2130999 - RNA, 19 nt, Artificial Sequence
  Description of Artificial Sequence: Synthetic oligonucleotide
  Antisense strand to SEQ ID NO: 2130998
gauauuagcuccagaucac

SEQ ID NO: 2131000 - RNA, 19 nt, Artificial Sequence
  Description of Artificial Sequence: Synthetic oligonucleotide
  Sense strand starting at position 425 of SEQ ID NO: 1882564
guuuaauuauuccuagaag

SEQ ID NO: 2131001 - RNA, 19 nt, Artificial Sequence
  Description of Artificial Sequence: Synthetic oligonucleotide
  Antisense strand to SEQ ID NO: 2131000
cuucuaggaauaauuaaac

SEQ ID NO: 2131002 - RNA, 19 nt, Artificial Sequence
  Description of Artificial Sequence: Synthetic oligonucleotide
  Sense strand starting at position 454 of SEQ ID NO: 1882564
ggagguauguuccugcuaa

SEQ ID NO: 2131003 - RNA, 19 nt, Artificial Sequence
  Description of Artificial Sequence: Synthetic oligonucleotide
  Antisense strand to SEQ ID NO: 2131002
uuagcaggaacauaccucc

SEQ ID NO: 2131004 - RNA, 19 nt, Artificial Sequence
  Description of Artificial Sequence: Synthetic oligonucleotide
  Sense strand starting at position 503 of SEQ ID NO: 1882564
gaguuacauccugagucuc

SEQ ID NO: 2131005 - RNA, 19 nt, Artificial Sequence
  Description of Artificial Sequence: Synthetic oligonucleotide
  Antisense strand to SEQ ID NO: 2131004
gagacucaggauguaacuc

SEQ ID NO: 2131006 - RNA, 19 nt, Artificial Sequence
  Description of Artificial Sequence: Synthetic oligonucleotide
  Sense strand starting at position 557 of SEQ ID NO: 1882564
gugguuaaaucaucaauac

SEQ ID NO: 2131007 - RNA, 19 nt, Artificial Sequence
  Description of Artificial Sequence: Synthetic oligonucleotide
  Antisense strand to SEQ ID NO: 2131006
guauugaugauuuaaccac

SEQ ID NO: 2131008 - RNA, 19 nt, Artificial Sequence
  Description of Artificial Sequence: Synthetic oligonucleotide
  Sense strand starting at position 781 of SEQ ID NO: 1882564
gagagaugcugaccucugu

SEQ ID NO: 2131009 - RNA, 19 nt, Artificial Sequence
  Description of Artificial Sequence: Synthetic oligonucleotide
  Antisense strand to SEQ ID NO: 2131008
acagaggucagcaucucuc

SEQ ID NO: 2131010 - RNA, 19 nt, Artificial Sequence
  Description of Artificial Sequence: Synthetic oligonucleotide
  Sense strand starting at position 807 of SEQ ID NO: 1882564
guugcuugaccagggauca

SEQ ID NO: 2131011 - RNA, 19 nt, Artificial Sequence
  Description of Artificial Sequence: Synthetic oligonucleotide
  Antisense strand to SEQ ID NO: 2131010
ugaucccuggucaagcaac

SEQ ID NO: 2131012 - RNA, 19 nt, Artificial Sequence
  Description of Artificial Sequence: Synthetic oligonucleotide
  Sense strand starting at position 901 of SEQ ID NO: 1882564
auagcuucugaguguccua

SEQ ID NO: 2131013 - RNA, 19 nt, Artificial Sequence
  Description of Artificial Sequence: Synthetic oligonucleotide
  Antisense strand to SEQ ID NO: 2131012
uaggacacucagaagcuau

SEQ ID NO: 2131014 - RNA, 19 nt, Artificial Sequence
  Description of Artificial Sequence: Synthetic oligonucleotide
  Sense strand starting at position 1121 of SEQ ID NO: 1882564
cucucacagcaaugguuua

SEQ ID NO: 2131015 - RNA, 19 nt, Artificial Sequence
  Description of Artificial Sequence: Synthetic oligonucleotide
  Antisense strand to SEQ ID NO: 2131014
uaaaccauugcugugagag

SEQ ID NO: 2131016 - RNA, 19 nt, Artificial Sequence
  Description of Artificial Sequence: Synthetic oligonucleotide
  Sense strand starting at position 1189 of SEQ ID NO: 1882564
acaaauaggucccugucaa

SEQ ID NO: 2131017 - RNA, 19 nt, Artificial Sequence
  Description of Artificial Sequence: Synthetic oligonucleotide
  Antisense strand to SEQ ID NO: 2131016
uugacagggaccuauuugu

SEQ ID NO: 2131018 - RNA, 19 nt, Artificial Sequence
  Description of Artificial Sequence: Synthetic oligonucleotide
  Sense strand starting at position 1216 of SEQ ID NO: 1882564
ucacuuguguggagggaga

SEQ ID NO: 2131019 - RNA, 19 nt, Artificial Sequence
  Description of Artificial Sequence: Synthetic oligonucleotide
  Antisense strand to SEQ ID NO: 2131018
ucucccuccacacaaguga

SEQ ID NO: 2131020 - RNA, 19 nt, Artificial Sequence
  Description of Artificial Sequence: Synthetic oligonucleotide
  Sense strand starting at position 1232 of SEQ ID NO: 1882564
agaucugcucaucaauagu

SEQ ID NO: 2131021 - RNA, 19 nt, Artificial Sequence
  Description of Artificial Sequence: Synthetic oligonucleotide
  Antisense strand to SEQ ID NO: 2131020
acuauugaugagcagaucu

SEQ ID NO: 2131022 - RNA, 19 nt, Artificial Sequence
  Description of Artificial Sequence: Synthetic oligonucleotide
  Sense strand starting at position 1289 of SEQ ID NO: 1882564
agauuaagguuucuacaau

SEQ ID NO: 2131023 - RNA, 19 nt, Artificial Sequence
  Description of Artificial Sequence: Synthetic oligonucleotide
  Antisense strand to SEQ ID NO: 2131022
auuguagaaaccuuaaucu

SEQ ID NO: 2131024 - RNA, 19 nt, Artificial Sequence
  Description of Artificial Sequence: Synthetic oligonucleotide
  Sense strand starting at position 1539 of SEQ ID NO: 1882564
ggcauaaacucagauuucu

SEQ ID NO: 2131025 - RNA, 19 nt, Artificial Sequence
  Description of Artificial Sequence: Synthetic oligonucleotide
  Antisense strand to SEQ ID NO: 2131024
agaaaucugaguuuaugcc

SEQ ID NO: 2131026 - RNA, 19 nt, Artificial Sequence
  Description of Artificial Sequence: Synthetic oligonucleotide
  Sense strand starting at position 1561 of SEQ ID NO: 1882564
cugagaacuccaggaggca

SEQ ID NO: 2131027 - RNA, 19 nt, Artificial Sequence
  Description of Artificial Sequence: Synthetic oligonucleotide
  Antisense strand to SEQ ID NO: 2131026
ugccuccuggaguucucag

SEQ ID NO: 2131028 - RNA, 19 nt, Artificial Sequence
  Description of Artificial Sequence: Synthetic oligonucleotide
  Sense strand starting at position 1913 of SEQ ID NO: 1882564
gugcuucucagacgacuca

SEQ ID NO: 2131029 - RNA, 19 nt, Artificial Sequence
  Description of Artificial Sequence: Synthetic oligonucleotide
  Antisense strand to SEQ ID NO: 2131028
ugagucgucugagaagcac

SEQ ID NO: 2131030 - RNA, 19 nt, Artificial Sequence
  Description of Artificial Sequence: Synthetic oligonucleotide
  Sense strand starting at position 2084 of SEQ ID NO: 1882564
gcauucuaccauugaggaa

SEQ ID NO: 2131031 - RNA, 19 nt, Artificial Sequence
  Description of Artificial Sequence: Synthetic oligonucleotide
  Antisense strand to SEQ ID NO: 2131030
uuccucaaugguagaaugc

SEQ ID NO: 2131032 - RNA, 19 nt, Artificial Sequence
  Description of Artificial Sequence: Synthetic oligonucleotide
  Sense strand starting at position 2109 of SEQ ID NO: 1882564
gcaguaaugcucugggaga

SEQ ID NO: 2131033 - RNA, 19 nt, Artificial Sequence
  Description of Artificial Sequence: Synthetic oligonucleotide
  Antisense strand to SEQ ID NO: 2131032
ucucccagagcauuacugc

SEQ ID NO: 2131034 - RNA, 19 nt, Artificial Sequence
  Description of Artificial Sequence: Synthetic oligonucleotide
  Sense strand starting at position 2111 of SEQ ID NO: 1882564
aguaaugcucugggagaga

SEQ ID NO: 2131035 - RNA, 19 nt, Artificial Sequence
  Description of Artificial Sequence: Synthetic oligonucleotide
  Antisense strand to SEQ ID NO: 2131034
ucucucccagagcauuacu

SEQ ID NO: 2131036 - RNA, 19 nt, Artificial Sequence
  Description of Artificial Sequence: Synthetic oligonucleotide
  Sense strand starting at position 2535 of SEQ ID NO: 1882564
ugguguuaaccucauaaag

SEQ ID NO: 2131037 - RNA, 19 nt, Artificial Sequence
  Description of Artificial Sequence: Synthetic oligonucleotide
  Antisense strand to SEQ ID NO: 2131036
cuuuaugagguuaacacca

SEQ ID NO: 2131038 - RNA, 19 nt, Artificial Sequence
  Description of Artificial Sequence: Synthetic oligonucleotide
  Sense strand starting at position 2604 of SEQ ID NO: 1882564
cagugagggcuuggauaag

SEQ ID NO: 2131039 - RNA, 19 nt, Artificial Sequence
  Description of Artificial Sequence: Synthetic oligonucleotide
  Antisense strand to SEQ ID NO: 2131038
cuuauccaagcccucacug

SEQ ID NO: 2131040 - RNA, 19 nt, Artificial Sequence
  Description of Artificial Sequence: Synthetic oligonucleotide
  Sense strand starting at position 2720 of SEQ ID NO: 1882564
aguggaauagcaugagcaa

SEQ ID NO: 2131041 - RNA, 19 nt, Artificial Sequence
  Description of Artificial Sequence: Synthetic oligonucleotide
  Antisense strand to SEQ ID NO: 2131040
uugcucaugcuauuccacu

SEQ ID NO: 2131042 - RNA, 19 nt, Artificial Sequence
  Description of Artificial Sequence: Synthetic oligonucleotide
  Sense strand starting at position 2761 of SEQ ID NO: 1882564
cgggcugggaacuauuaau

SEQ ID NO: 2131043 - RNA, 19 nt, Artificial Sequence
  Description of Artificial Sequence: Synthetic oligonucleotide
  Antisense strand to SEQ ID NO: 2131042
auuaauaguucccagcccg

SEQ ID NO: 2131044 - RNA, 19 nt, Artificial Sequence
  Description of Artificial Sequence: Synthetic oligonucleotide
  Sense strand starting at position 2910 of SEQ ID NO: 1882564
aagugaugugggcagguuu

SEQ ID NO: 2131045 - RNA, 19 nt, Artificial Sequence
  Description of Artificial Sequence: Synthetic oligonucleotide
  Antisense strand to SEQ ID NO: 2131044
aaaccugcccacaucacuu

SEQ ID NO: 2131046 - RNA, 19 nt, Artificial Sequence
  Description of Artificial Sequence: Synthetic oligonucleotide
  Sense strand starting at position 3036 of SEQ ID NO: 1882564
agagguguucugcggaagu

SEQ ID NO: 2131047 - RNA, 19 nt, Artificial Sequence
  Description of Artificial Sequence: Synthetic oligonucleotide
  Antisense strand to SEQ ID NO: 2131046
acuuccgcagaacaccucu

SEQ ID NO: 2131048 - RNA, 19 nt, Artificial Sequence
  Description of Artificial Sequence: Synthetic oligonucleotide
  Sense strand starting at position 3073 of SEQ ID NO: 1882564
agcugaacuguccagaaac

SEQ ID NO: 2131049 - RNA, 19 nt, Artificial Sequence
  Description of Artificial Sequence: Synthetic oligonucleotide
  Antisense strand to SEQ ID NO: 2131048
guuucuggacaguucagcu

SEQ ID NO: 2131050 - RNA, 19 nt, Artificial Sequence
  Description of Artificial Sequence: Synthetic oligonucleotide
  Sense strand starting at position 3470 of SEQ ID NO: 1882564
guggaaacuuaauuagcau

SEQ ID NO: 2131051 - RNA, 19 nt, Artificial Sequence
  Description of Artificial Sequence: Synthetic oligonucleotide
  Antisense strand to SEQ ID NO: 2131050
augcuaauuaaguuuccac

SEQ ID NO: 2131052 - RNA, 19 nt, Artificial Sequence
  Description of Artificial Sequence: Synthetic oligonucleotide
  Sense strand starting at position 3596 of SEQ ID NO: 1882564
cugagcuuccaguaggacu

SEQ ID NO: 2131053 - RNA, 19 nt, Artificial Sequence
  Description of Artificial Sequence: Synthetic oligonucleotide
  Antisense strand to SEQ ID NO: 2131052
aguccuacuggaagcucag

SEQ ID NO: 2131054 - RNA, 19 nt, Artificial Sequence
  Description of Artificial Sequence: Synthetic oligonucleotide
  Sense strand starting at position 3671 of SEQ ID NO: 1882564
ggcccaguuuccuccagaa

SEQ ID NO: 2131055 - RNA, 19 nt, Artificial Sequence
  Description of Artificial Sequence: Synthetic oligonucleotide
  Antisense strand to SEQ ID NO: 2131054
uucuggaggaaacugggcc

SEQ ID NO: 2131056 - RNA, 19 nt, Artificial Sequence
  Description of Artificial Sequence: Synthetic oligonucleotide
  Sense strand starting at position 3877 of SEQ ID NO: 1882564
cugguaucucccgagagug

SEQ ID NO: 2131057 - RNA, 19 nt, Artificial Sequence
  Description of Artificial Sequence: Synthetic oligonucleotide
  Antisense strand to SEQ ID NO: 2131056
cacucucgggagauaccag

SEQ ID NO: 2131058 - RNA, 19 nt, Artificial Sequence
  Description of Artificial Sequence: Synthetic oligonucleotide
  Sense strand starting at position 3918 of SEQ ID NO: 1882564
gggaguuaucagcaucuuc

SEQ ID NO: 2131059 - RNA, 19 nt, Artificial Sequence
  Description of Artificial Sequence: Synthetic oligonucleotide
  Antisense strand to SEQ ID NO: 2131058
gaagaugcugauaacuccc

SEQ ID NO: 2131060 - RNA, 19 nt, Artificial Sequence
  Description of Artificial Sequence: Synthetic oligonucleotide
  Sense strand starting at position 1 of SEQ ID NO: 1882565
agcaauuuaucaugaaacg

SEQ ID NO: 2131061 - RNA, 19 nt, Artificial Sequence
  Description of Artificial Sequence: Synthetic oligonucleotide
  Antisense strand to SEQ ID NO: 2131060
cguuucaugauaaauugcu

SEQ ID NO: 2131062 - RNA, 19 nt, Artificial Sequence
  Description of Artificial Sequence: Synthetic oligonucleotide
  Sense strand starting at position 313 of SEQ ID NO: 1882565
uaaggcucuuagguaauga

SEQ ID NO: 2131063 - RNA, 19 nt, Artificial Sequence
  Description of Artificial Sequence: Synthetic oligonucleotide
  Antisense strand to SEQ ID NO: 2131062
ucauuaccuaagagccuua

SEQ ID NO: 2131064 - RNA, 19 nt, Artificial Sequence
  Description of Artificial Sequence: Synthetic oligonucleotide
  Sense strand starting at position 2115 of SEQ ID NO: 1882565
cuaauccucuuguugggaa

SEQ ID NO: 2131065 - RNA, 19 nt, Artificial Sequence
  Description of Artificial Sequence: Synthetic oligonucleotide
  Antisense strand to SEQ ID NO: 2131064
uucccaacaagaggauuag

SEQ ID NO: 2131066 - RNA, 19 nt, Artificial Sequence
  Description of Artificial Sequence: Synthetic oligonucleotide
  Sense strand starting at position 2176 of SEQ ID NO: 1882565
accuuucucucguugugaa

SEQ ID NO: 2131067 - RNA, 19 nt, Artificial Sequence
  Description of Artificial Sequence: Synthetic oligonucleotide
  Antisense strand to SEQ ID NO: 2131066
uucacaacgagagaaaggu

SEQ ID NO: 2131068 - RNA, 19 nt, Artificial Sequence
  Description of Artificial Sequence: Synthetic oligonucleotide
  Sense strand starting at position 2232 of SEQ ID NO: 1882565
uguuaaaugcuaggagaaa

SEQ ID NO: 2131069 - RNA, 19 nt, Artificial Sequence
  Description of Artificial Sequence: Synthetic oligonucleotide
  Antisense strand to SEQ ID NO: 2131068
uuucuccuagcauuuaaca

SEQ ID NO: 2131070 - RNA, 19 nt, Artificial Sequence
  Description of Artificial Sequence: Synthetic oligonucleotide
  Sense strand starting at position 2299 of SEQ ID NO: 1882565
agaucucauuaggauggaa

SEQ ID NO: 2131071 - RNA, 19 nt, Artificial Sequence
  Description of Artificial Sequence: Synthetic oligonucleotide
  Antisense strand to SEQ ID NO: 2131070
uuccauccuaaugagaucu

SEQ ID NO: 2131072 - RNA, 19 nt, Artificial Sequence
  Description of Artificial Sequence: Synthetic oligonucleotide
  Sense strand starting at position 2399 of SEQ ID NO: 1882565
uggagccucuaauuaagua

SEQ ID NO: 2131073 - RNA, 19 nt, Artificial Sequence
  Description of Artificial Sequence: Synthetic oligonucleotide
  Antisense strand to SEQ ID NO: 2131072
uacuuaauuagaggcucca

SEQ ID NO: 2131074 - RNA, 19 nt, Artificial Sequence
  Description of Artificial Sequence: Synthetic oligonucleotide
  Sense strand starting at position 2424 of SEQ ID NO: 1882565
gugaaaugcggucauaaug

SEQ ID NO: 2131075 - RNA, 19 nt, Artificial Sequence
  Description of Artificial Sequence: Synthetic oligonucleotide
  Antisense strand to SEQ ID NO: 2131074
cauuaugaccgcauuucac

SEQ ID NO: 2131076 - RNA, 19 nt, Artificial Sequence
  Description of Artificial Sequence: Synthetic oligonucleotide
  Sense strand starting at position 2432 of SEQ ID NO: 1882565
cggucauaauggucggacu

SEQ ID NO: 2131077 - RNA, 19 nt, Artificial Sequence
  Description of Artificial Sequence: Synthetic oligonucleotide
  Antisense strand to SEQ ID NO: 2131076
aguccgaccauuaugaccg

SEQ ID NO: 2131078 - RNA, 19 nt, Artificial Sequence
  Description of Artificial Sequence: Synthetic oligonucleotide
  Sense strand starting at position 2434 of SEQ ID NO: 1882565
gucauaauggucggacucu

SEQ ID NO: 2131079 - RNA, 19 nt, Artificial Sequence
  Description of Artificial Sequence: Synthetic oligonucleotide
  Antisense strand to SEQ ID NO: 2131078
agaguccgaccauuaugac

SEQ ID NO: 2131080 - RNA, 19 nt, Artificial Sequence
  Description of Artificial Sequence: Synthetic oligonucleotide
  Sense strand starting at position 2451 of SEQ ID NO: 1882565
cuguuucgacaagauuagu

SEQ ID NO: 2131081 - RNA, 19 nt, Artificial Sequence
  Description of Artificial Sequence: Synthetic oligonucleotide
  Antisense strand to SEQ ID NO: 2131080
acuaaucuugucgaaacag

SEQ ID NO: 2131082 - RNA, 19 nt, Artificial Sequence
  Description of Artificial Sequence: Synthetic oligonucleotide
  Sense strand starting at position 2655 of SEQ ID NO: 1882565
uguuguuuaggccauccaa

SEQ ID NO: 2131083 - RNA, 19 nt, Artificial Sequence
  Description of Artificial Sequence: Synthetic oligonucleotide
  Antisense strand to SEQ ID NO: 2131082
uuggauggccuaaacaaca

SEQ ID NO: 2131084 - RNA, 19 nt, Artificial Sequence
  Description of Artificial Sequence: Synthetic oligonucleotide
  Sense strand starting at position 2686 of SEQ ID NO: 1882565
uguuaugacugcccaagaa

SEQ ID NO: 2131085 - RNA, 19 nt, Artificial Sequence
  Description of Artificial Sequence: Synthetic oligonucleotide
  Antisense strand to SEQ ID NO: 2131084
uucuugggcagucauaaca

SEQ ID NO: 2131086 - RNA, 19 nt, Artificial Sequence
  Description of Artificial Sequence: Synthetic oligonucleotide
  Sense strand starting at position 2702 of SEQ ID NO: 1882565
gaagacuaauaggaucaga

SEQ ID NO: 2131087 - RNA, 19 nt, Artificial Sequence
  Description of Artificial Sequence: Synthetic oligonucleotide
  Antisense strand to SEQ ID NO: 2131086
ucugauccuauuagucuuc

SEQ ID NO: 2131088 - RNA, 19 nt, Artificial Sequence
  Description of Artificial Sequence: Synthetic oligonucleotide
  Sense strand starting at position 3021 of SEQ ID NO: 1882565
ugcucuuaccauggaguga

SEQ ID NO: 2131089 - RNA, 19 nt, Artificial Sequence
  Description of Artificial Sequence: Synthetic oligonucleotide
  Antisense strand to SEQ ID NO: 2131088
ucacuccaugguaagagca

SEQ ID NO: 2131090 - RNA, 19 nt, Artificial Sequence
  Description of Artificial Sequence: Synthetic oligonucleotide
  Sense strand starting at position 3071 of SEQ ID NO: 1882565
aagccuuguggauaucaca

SEQ ID NO: 2131091 - RNA, 19 nt, Artificial Sequence
  Description of Artificial Sequence: Synthetic oligonucleotide
  Antisense strand to SEQ ID NO: 2131090
ugugauauccacaaggcuu

SEQ ID NO: 2131092 - RNA, 19 nt, Artificial Sequence
  Description of Artificial Sequence: Synthetic oligonucleotide
  Sense strand starting at position 3095 of SEQ ID NO: 1882565
uugguaucaguacacauua

SEQ ID NO: 2131093 - RNA, 19 nt, Artificial Sequence
  Description of Artificial Sequence: Synthetic oligonucleotide
  Antisense strand to SEQ ID NO: 2131092
uaauguguacugauaccaa

SEQ ID NO: 2131094 - RNA, 19 nt, Artificial Sequence
  Description of Artificial Sequence: Synthetic oligonucleotide
  Sense strand starting at position 3260 of SEQ ID NO: 1882565
aggauuuccucauggaagu

SEQ ID NO: 2131095 - RNA, 19 nt, Artificial Sequence
  Description of Artificial Sequence: Synthetic oligonucleotide
  Antisense strand to SEQ ID NO: 2131094
acuuccaugaggaaauccu

SEQ ID NO: 2131096 - RNA, 19 nt, Artificial Sequence
  Description of Artificial Sequence: Synthetic oligonucleotide
  Sense strand starting at position 3337 of SEQ ID NO: 1882565
ggcagugcauuuccaaauu

SEQ ID NO: 2131097 - RNA, 19 nt, Artificial Sequence
  Description of Artificial Sequence: Synthetic oligonucleotide
  Antisense strand to SEQ ID NO: 2131096
aauuuggaaaugcacugcc

SEQ ID NO: 2131098 - RNA, 19 nt, Artificial Sequence
  Description of Artificial Sequence: Synthetic oligonucleotide
  Sense strand starting at position 3348 of SEQ ID NO: 1882565
uccaaauuguucuugguga

SEQ ID NO: 2131099 - RNA, 19 nt, Artificial Sequence
  Description of Artificial Sequence: Synthetic oligonucleotide
  Antisense strand to SEQ ID NO: 2131098
ucaccaagaacaauuugga

SEQ ID NO: 2131100 - RNA, 19 nt, Artificial Sequence
  Description of Artificial Sequence: Synthetic oligonucleotide
  Sense strand starting at position 3350 of SEQ ID NO: 1882565
caaauuguucuuggugaaa

SEQ ID NO: 2131101 - RNA, 19 nt, Artificial Sequence
  Description of Artificial Sequence: Synthetic oligonucleotide
  Antisense strand to SEQ ID NO: 2131100
uuucaccaagaacaauuug

SEQ ID NO: 2131102 - RNA, 19 nt, Artificial Sequence
  Description of Artificial Sequence: Synthetic oligonucleotide
  Sense strand starting at position 3353 of SEQ ID NO: 1882565
auuguucuuggugaaauug

SEQ ID NO: 2131103 - RNA, 19 nt, Artificial Sequence
  Description of Artificial Sequence: Synthetic oligonucleotide
  Antisense strand to SEQ ID NO: 2131102
caauuucaccaagaacaau

SEQ ID NO: 2131104 - RNA, 19 nt, Artificial Sequence
  Description of Artificial Sequence: Synthetic oligonucleotide
  Sense strand starting at position 3365 of SEQ ID NO: 1882565
gaaauugugucaguuagag

SEQ ID NO: 2131105 - RNA, 19 nt, Artificial Sequence
  Description of Artificial Sequence: Synthetic oligonucleotide
  Antisense strand to SEQ ID NO: 2131104
cucuaacugacacaauuuc

SEQ ID NO: 2131106 - RNA, 19 nt, Artificial Sequence
  Description of Artificial Sequence: Synthetic oligonucleotide
  Sense strand starting at position 3367 of SEQ ID NO: 1882565
aauugugucaguuagagag

SEQ ID NO: 2131107 - RNA, 19 nt, Artificial Sequence
  Description of Artificial Sequence: Synthetic oligonucleotide
  Antisense strand to SEQ ID NO: 2131106
cucucuaacugacacaauu

SEQ ID NO: 2131108 - RNA, 19 nt, Artificial Sequence
  Description of Artificial Sequence: Synthetic oligonucleotide
  Sense strand starting at position 3371 of SEQ ID NO: 1882565
gugucaguuagagagaugu

SEQ ID NO: 2131109 - RNA, 19 nt, Artificial Sequence
  Description of Artificial Sequence: Synthetic oligonucleotide
  Antisense strand to SEQ ID NO: 2131108
acaucucucuaacugacac

SEQ ID NO: 2131110 - RNA, 19 nt, Artificial Sequence
  Description of Artificial Sequence: Synthetic oligonucleotide
  Sense strand starting at position 3373 of SEQ ID NO: 1882565
gucaguuagagagauguau

SEQ ID NO: 2131111 - RNA, 19 nt, Artificial Sequence
  Description of Artificial Sequence: Synthetic oligonucleotide
  Antisense strand to SEQ ID NO: 2131110
auacaucucucuaacugac

SEQ ID NO: 2131112 - RNA, 19 nt, Artificial Sequence
  Description of Artificial Sequence: Synthetic oligonucleotide
  Sense strand starting at position 3426 of SEQ ID NO: 1882565
cggagagacuaauaagacu

SEQ ID NO: 2131113 - RNA, 19 nt, Artificial Sequence
  Description of Artificial Sequence: Synthetic oligonucleotide
  Antisense strand to SEQ ID NO: 2131112
agucuuauuagucucuccg

SEQ ID NO: 2131114 - RNA, 19 nt, Artificial Sequence
  Description of Artificial Sequence: Synthetic oligonucleotide
  Sense strand starting at position 3429 of SEQ ID NO: 1882565
agagacuaauaagacuuua

SEQ ID NO: 2131115 - RNA, 19 nt, Artificial Sequence
  Description of Artificial Sequence: Synthetic oligonucleotide
  Antisense strand to SEQ ID NO: 2131114
uaaagucuuauuagucucu

SEQ ID NO: 2131116 - RNA, 19 nt, Artificial Sequence
  Description of Artificial Sequence: Synthetic oligonucleotide
  Sense strand starting at position 3437 of SEQ ID NO: 1882565
auaagacuuuaagagaacu

SEQ ID NO: 2131117 - RNA, 19 nt, Artificial Sequence
  Description of Artificial Sequence: Synthetic oligonucleotide
  Antisense strand to SEQ ID NO: 2131116
aguucucuuaaagucuuau

SEQ ID NO: 2131118 - RNA, 19 nt, Artificial Sequence
  Description of Artificial Sequence: Synthetic oligonucleotide
  Sense strand starting at position 3600 of SEQ ID NO: 1882565
gugugacuuacaggccaua

SEQ ID NO: 2131119 - RNA, 19 nt, Artificial Sequence
  Description of Artificial Sequence: Synthetic oligonucleotide
  Antisense strand to SEQ ID NO: 2131118
uauggccuguaagucacac

SEQ ID NO: 2131120 - RNA, 19 nt, Artificial Sequence
  Description of Artificial Sequence: Synthetic oligonucleotide
  Sense strand starting at position 3603 of SEQ ID NO: 1882565
ugacuuacaggccauaauu

SEQ ID NO: 2131121 - RNA, 19 nt, Artificial Sequence
  Description of Artificial Sequence: Synthetic oligonucleotide
  Antisense strand to SEQ ID NO: 2131120
aauuauggccuguaaguca

SEQ ID NO: 2131122 - RNA, 19 nt, Artificial Sequence
  Description of Artificial Sequence: Synthetic oligonucleotide
  Sense strand starting at position 3612 of SEQ ID NO: 1882565
ggccauaauucggcaauuc

SEQ ID NO: 2131123 - RNA, 19 nt, Artificial Sequence
  Description of Artificial Sequence: Synthetic oligonucleotide
  Antisense strand to SEQ ID NO: 2131122
gaauugccgaauuauggcc

SEQ ID NO: 2131124 - RNA, 19 nt, Artificial Sequence
  Description of Artificial Sequence: Synthetic oligonucleotide
  Sense strand starting at position 3621 of SEQ ID NO: 1882565
ucggcaauuccugaucuag

SEQ ID NO: 2131125 - RNA, 19 nt, Artificial Sequence
  Description of Artificial Sequence: Synthetic oligonucleotide
  Antisense strand to SEQ ID NO: 2131124
cuagaucaggaauugccga

SEQ ID NO: 2131126 - RNA, 19 nt, Artificial Sequence
  Description of Artificial Sequence: Synthetic oligonucleotide
  Sense strand starting at position 3623 of SEQ ID NO: 1882565
ggcaauuccugaucuagac

SEQ ID NO: 2131127 - RNA, 19 nt, Artificial Sequence
  Description of Artificial Sequence: Synthetic oligonucleotide
  Antisense strand to SEQ ID NO: 2131126
gucuagaucaggaauugcc

SEQ ID NO: 2131128 - RNA, 19 nt, Artificial Sequence
  Description of Artificial Sequence: Synthetic oligonucleotide
  Sense strand starting at position 3770 of SEQ ID NO: 1882565
ggccaucuuaagggacaga

SEQ ID NO: 2131129 - RNA, 19 nt, Artificial Sequence
  Description of Artificial Sequence: Synthetic oligonucleotide
  Antisense strand to SEQ ID NO: 2131128
ucugucccuuaagauggcc

SEQ ID NO: 2131130 - RNA, 19 nt, Artificial Sequence
  Description of Artificial Sequence: Synthetic oligonucleotide
  Sense strand starting at position 3783 of SEQ ID NO: 1882565
gacagacuucuuggaucua

SEQ ID NO: 2131131 - RNA, 19 nt, Artificial Sequence
  Description of Artificial Sequence: Synthetic oligonucleotide
  Antisense strand to SEQ ID NO: 2131130
uagauccaagaagucuguc

SEQ ID NO: 2131132 - RNA, 19 nt, Artificial Sequence
  Description of Artificial Sequence: Synthetic oligonucleotide
  Sense strand starting at position 3794 of SEQ ID NO: 1882565
uggaucuaugcccacucua

SEQ ID NO: 2131133 - RNA, 19 nt, Artificial Sequence
  Description of Artificial Sequence: Synthetic oligonucleotide
  Antisense strand to SEQ ID NO: 2131132
uagagugggcauagaucca

SEQ ID NO: 2131134 - RNA, 19 nt, Artificial Sequence
  Description of Artificial Sequence: Synthetic oligonucleotide
  Sense strand starting at position 3875 of SEQ ID NO: 1882565
guuagaguguugcuacuga

SEQ ID NO: 2131135 - RNA, 19 nt, Artificial Sequence
  Description of Artificial Sequence: Synthetic oligonucleotide
  Antisense strand to SEQ ID NO: 2131134
ucaguagcaacacucuaac

SEQ ID NO: 2131136 - RNA, 19 nt, Artificial Sequence
  Description of Artificial Sequence: Synthetic oligonucleotide
  Sense strand starting at position 3939 of SEQ ID NO: 1882565
gcaaaugauuuauagagga

SEQ ID NO: 2131137 - RNA, 19 nt, Artificial Sequence
  Description of Artificial Sequence: Synthetic oligonucleotide
  Antisense strand to SEQ ID NO: 2131136
uccucuauaaaucauuugc

SEQ ID NO: 2131138 - RNA, 19 nt, Artificial Sequence
  Description of Artificial Sequence: Synthetic oligonucleotide
  Sense strand starting at position 3954 of SEQ ID NO: 1882565
aggagugauuccuccauuc

SEQ ID NO: 2131139 - RNA, 19 nt, Artificial Sequence
  Description of Artificial Sequence: Synthetic oligonucleotide
  Antisense strand to SEQ ID NO: 2131138
gaauggaggaaucacuccu

SEQ ID NO: 2131140 - RNA, 19 nt, Artificial Sequence
  Description of Artificial Sequence: Synthetic oligonucleotide
  Sense strand starting at position 16 of SEQ ID NO: 1882566
gccauaugugcagaaugaa

SEQ ID NO: 2131141 - RNA, 19 nt, Artificial Sequence
  Description of Artificial Sequence: Synthetic oligonucleotide
  Antisense strand to SEQ ID NO: 2131140
uucauucugcacauauggc

SEQ ID NO: 2131142 - RNA, 19 nt, Artificial Sequence
  Description of Artificial Sequence: Synthetic oligonucleotide
  Sense strand starting at position 19 of SEQ ID NO: 1882566
auaugugcagaaugaaauc

SEQ ID NO: 2131143 - RNA, 19 nt, Artificial Sequence
  Description of Artificial Sequence: Synthetic oligonucleotide
  Antisense strand to SEQ ID NO: 2131142
gauuucauucugcacauau

SEQ ID NO: 2131144 - RNA, 19 nt, Artificial Sequence
  Description of Artificial Sequence: Synthetic oligonucleotide
  Sense strand starting at position 359 of SEQ ID NO: 1882566
uugugaugcaaggagcaaa

SEQ ID NO: 2131145 - RNA, 19 nt, Artificial Sequence
  Description of Artificial Sequence: Synthetic oligonucleotide
  Antisense strand to SEQ ID NO: 2131144
uuugcuccuugcaucacaa

SEQ ID NO: 2131146 - RNA, 19 nt, Artificial Sequence
  Description of Artificial Sequence: Synthetic oligonucleotide
  Sense strand starting at position 488 of SEQ ID NO: 1882566
aaaucacagguguguauaa

SEQ ID NO: 2131147 - RNA, 19 nt, Artificial Sequence
  Description of Artificial Sequence: Synthetic oligonucleotide
  Antisense strand to SEQ ID NO: 2131146
uuauacacaccugugauuu

SEQ ID NO: 2131148 - RNA, 19 nt, Artificial Sequence
  Description of Artificial Sequence: Synthetic oligonucleotide
  Sense strand starting at position 489 of SEQ ID NO: 1882566
aaucacagguguguauaau

SEQ ID NO: 2131149 - RNA, 19 nt, Artificial Sequence
  Description of Artificial Sequence: Synthetic oligonucleotide
  Antisense strand to SEQ ID NO: 2131148
auuauacacaccugugauu

SEQ ID NO: 2131150 - RNA, 19 nt, Artificial Sequence
  Description of Artificial Sequence: Synthetic oligonucleotide
  Sense strand starting at position 490 of SEQ ID NO: 1882566
aucacagguguguauaauu

SEQ ID NO: 2131151 - RNA, 19 nt, Artificial Sequence
  Description of Artificial Sequence: Synthetic oligonucleotide
  Antisense strand to SEQ ID NO: 2131150
aauuauacacaccugugau

SEQ ID NO: 2131152 - RNA, 19 nt, Artificial Sequence
  Description of Artificial Sequence: Synthetic oligonucleotide
  Sense strand starting at position 618 of SEQ ID NO: 1882566
ugauaauguugaguuacaa

SEQ ID NO: 2131153 - RNA, 19 nt, Artificial Sequence
  Description of Artificial Sequence: Synthetic oligonucleotide
  Antisense strand to SEQ ID NO: 2131152
uuguaacucaacauuauca

SEQ ID NO: 2131154 - RNA, 19 nt, Artificial Sequence
  Description of Artificial Sequence: Synthetic oligonucleotide
  Sense strand starting at position 849 of SEQ ID NO: 1882566
ggaaucaaucauggccuau

SEQ ID NO: 2131155 - RNA, 19 nt, Artificial Sequence
  Description of Artificial Sequence: Synthetic oligonucleotide
  Antisense strand to SEQ ID NO: 2131154
auaggccaugauugauucc

SEQ ID NO: 2131156 - RNA, 19 nt, Artificial Sequence
  Description of Artificial Sequence: Synthetic oligonucleotide
  Sense strand starting at position 940 of SEQ ID NO: 1882566
ggagaaacccugugcuaau

SEQ ID NO: 2131157 - RNA, 19 nt, Artificial Sequence
  Description of Artificial Sequence: Synthetic oligonucleotide
  Antisense strand to SEQ ID NO: 2131156
auuagcacaggguuucucc

SEQ ID NO: 2131158 - RNA, 19 nt, Artificial Sequence
  Description of Artificial Sequence: Synthetic oligonucleotide
  Sense strand starting at position 941 of SEQ ID NO: 1882566
gagaaacccugugcuaaug

SEQ ID NO: 2131159 - RNA, 19 nt, Artificial Sequence
  Description of Artificial Sequence: Synthetic oligonucleotide
  Antisense strand to SEQ ID NO: 2131158
cauuagcacaggguuucuc

SEQ ID NO: 2131160 - RNA, 19 nt, Artificial Sequence
  Description of Artificial Sequence: Synthetic oligonucleotide
  Sense strand starting at position 957 of SEQ ID NO: 1882566
auguuugaagacuauucuu

SEQ ID NO: 2131161 - RNA, 19 nt, Artificial Sequence
  Description of Artificial Sequence: Synthetic oligonucleotide
  Antisense strand to SEQ ID NO: 2131160
aagaauagucuucaaacau

SEQ ID NO: 2131162 - RNA, 19 nt, Artificial Sequence
  Description of Artificial Sequence: Synthetic oligonucleotide
  Sense strand starting at position 1286 of SEQ ID NO: 1882566
agaacuucuaguggaaguu

SEQ ID NO: 2131163 - RNA, 19 nt, Artificial Sequence
  Description of Artificial Sequence: Synthetic oligonucleotide
  Antisense strand to SEQ ID NO: 2131162
aacuuccacuagaaguucu

SEQ ID NO: 2131164 - RNA, 19 nt, Artificial Sequence
  Description of Artificial Sequence: Synthetic oligonucleotide
  Sense strand starting at position 1287 of SEQ ID NO: 1882566
gaacuucuaguggaaguuu

SEQ ID NO: 2131165 - RNA, 19 nt, Artificial Sequence
  Description of Artificial Sequence: Synthetic oligonucleotide
  Antisense strand to SEQ ID NO: 2131164
aaacuuccacuagaaguuc

SEQ ID NO: 2131166 - RNA, 19 nt, Artificial Sequence
  Description of Artificial Sequence: Synthetic oligonucleotide
  Sense strand starting at position 1406 of SEQ ID NO: 1882566
cgaggaaacaguuaacugu

SEQ ID NO: 2131167 - RNA, 19 nt, Artificial Sequence
  Description of Artificial Sequence: Synthetic oligonucleotide
  Antisense strand to SEQ ID NO: 2131166
acaguuaacuguuuccucg

SEQ ID NO: 2131168 - RNA, 19 nt, Artificial Sequence
  Description of Artificial Sequence: Synthetic oligonucleotide
  Sense strand starting at position 1423 of SEQ ID NO: 1882566
guaaauacagucuagaggu

SEQ ID NO: 2131169 - RNA, 19 nt, Artificial Sequence
  Description of Artificial Sequence: Synthetic oligonucleotide
  Antisense strand to SEQ ID NO: 2131168
accucuagacuguauuuac

SEQ ID NO: 2131170 - RNA, 19 nt, Artificial Sequence
  Description of Artificial Sequence: Synthetic oligonucleotide
  Sense strand starting at position 1433 of SEQ ID NO: 1882566
ucuagagguauccagguga

SEQ ID NO: 2131171 - RNA, 19 nt, Artificial Sequence
  Description of Artificial Sequence: Synthetic oligonucleotide
  Antisense strand to SEQ ID NO: 2131170
ucaccuggauaccucuaga

SEQ ID NO: 2131172 - RNA, 19 nt, Artificial Sequence
  Description of Artificial Sequence: Synthetic oligonucleotide
  Sense strand starting at position 1437 of SEQ ID NO: 1882566
gagguauccaggugacuga

SEQ ID NO: 2131173 - RNA, 19 nt, Artificial Sequence
  Description of Artificial Sequence: Synthetic oligonucleotide
  Antisense strand to SEQ ID NO: 2131172
ucagucaccuggauaccuc

SEQ ID NO: 2131174 - RNA, 19 nt, Artificial Sequence
  Description of Artificial Sequence: Synthetic oligonucleotide
  Sense strand starting at position 1451 of SEQ ID NO: 1882566
acugacaguucuccagaga

SEQ ID NO: 2131175 - RNA, 19 nt, Artificial Sequence
  Description of Artificial Sequence: Synthetic oligonucleotide
  Antisense strand to SEQ ID NO: 2131174
ucucuggagaacugucagu

SEQ ID NO: 2131176 - RNA, 19 nt, Artificial Sequence
  Description of Artificial Sequence: Synthetic oligonucleotide
  Sense strand starting at position 1583 of SEQ ID NO: 1882566
agaugcuccucccuggaaa

SEQ ID NO: 2131177 - RNA, 19 nt, Artificial Sequence
  Description of Artificial Sequence: Synthetic oligonucleotide
  Antisense strand to SEQ ID NO: 2131176
uuuccagggaggagcaucu

SEQ ID NO: 2131178 - RNA, 19 nt, Artificial Sequence
  Description of Artificial Sequence: Synthetic oligonucleotide
  Sense strand starting at position 1609 of SEQ ID NO: 1882566
gccgguuuccgcucuuuca

SEQ ID NO: 2131179 - RNA, 19 nt, Artificial Sequence
  Description of Artificial Sequence: Synthetic oligonucleotide
  Antisense strand to SEQ ID NO: 2131178
ugaaagagcggaaaccggc

SEQ ID NO: 2131180 - RNA, 19 nt, Artificial Sequence
  Description of Artificial Sequence: Synthetic oligonucleotide
  Sense strand starting at position 1679 of SEQ ID NO: 1882566
gcuccuucuggaugaggaa

SEQ ID NO: 2131181 - RNA, 19 nt, Artificial Sequence
  Description of Artificial Sequence: Synthetic oligonucleotide
  Antisense strand to SEQ ID NO: 2131180
uuccucauccagaaggagc

SEQ ID NO: 2131182 - RNA, 19 nt, Artificial Sequence
  Description of Artificial Sequence: Synthetic oligonucleotide
  Sense strand starting at position 1786 of SEQ ID NO: 1882566
guaugucacccggaagggu

SEQ ID NO: 2131183 - RNA, 19 nt, Artificial Sequence
  Description of Artificial Sequence: Synthetic oligonucleotide
  Antisense strand to SEQ ID NO: 2131182
acccuuccgggugacauac

SEQ ID NO: 2131184 - RNA, 19 nt, Artificial Sequence
  Description of Artificial Sequence: Synthetic oligonucleotide
  Sense strand starting at position 2851 of SEQ ID NO: 1882566
gucaguuauggacaacuuu

SEQ ID NO: 2131185 - RNA, 19 nt, Artificial Sequence
  Description of Artificial Sequence: Synthetic oligonucleotide
  Antisense strand to SEQ ID NO: 2131184
aaaguuguccauaacugac

SEQ ID NO: 2131186 - RNA, 19 nt, Artificial Sequence
  Description of Artificial Sequence: Synthetic oligonucleotide
  Sense strand starting at position 2900 of SEQ ID NO: 1882566
uagcauuugugucuuguau

SEQ ID NO: 2131187 - RNA, 19 nt, Artificial Sequence
  Description of Artificial Sequence: Synthetic oligonucleotide
  Antisense strand to SEQ ID NO: 2131186
auacaagacacaaaugcua

SEQ ID NO: 2131188 - RNA, 19 nt, Artificial Sequence
  Description of Artificial Sequence: Synthetic oligonucleotide
  Sense strand starting at position 2921 of SEQ ID NO: 1882566
ggaucgaggguuuguaaga

SEQ ID NO: 2131189 - RNA, 19 nt, Artificial Sequence
  Description of Artificial Sequence: Synthetic oligonucleotide
  Antisense strand to SEQ ID NO: 2131188
ucuuacaaacccucgaucc

SEQ ID NO: 2131190 - RNA, 19 nt, Artificial Sequence
  Description of Artificial Sequence: Synthetic oligonucleotide
  Sense strand starting at position 2922 of SEQ ID NO: 1882566
gaucgaggguuuguaagaa

SEQ ID NO: 2131191 - RNA, 19 nt, Artificial Sequence
  Description of Artificial Sequence: Synthetic oligonucleotide
  Antisense strand to SEQ ID NO: 2131190
uucuuacaaacccucgauc

SEQ ID NO: 2131192 - RNA, 19 nt, Artificial Sequence
  Description of Artificial Sequence: Synthetic oligonucleotide
  Sense strand starting at position 2949 of SEQ ID NO: 1882566
accuacuuugguggugaga

SEQ ID NO: 2131193 - RNA, 19 nt, Artificial Sequence
  Description of Artificial Sequence: Synthetic oligonucleotide
  Antisense strand to SEQ ID NO: 2131192
ucucaccaccaaaguaggu

SEQ ID NO: 2131194 - RNA, 19 nt, Artificial Sequence
  Description of Artificial Sequence: Synthetic oligonucleotide
  Sense strand starting at position 3141 of SEQ ID NO: 1882566
guacuacuguuagccauuu

SEQ ID NO: 2131195 - RNA, 19 nt, Artificial Sequence
  Description of Artificial Sequence: Synthetic oligonucleotide
  Antisense strand to SEQ ID NO: 2131194
aaauggcuaacaguaguac

SEQ ID NO: 2131196 - RNA, 19 nt, Artificial Sequence
  Description of Artificial Sequence: Synthetic oligonucleotide
  Sense strand starting at position 3186 of SEQ ID NO: 1882566
auuaaaugggcauauguau

SEQ ID NO: 2131197 - RNA, 19 nt, Artificial Sequence
  Description of Artificial Sequence: Synthetic oligonucleotide
  Antisense strand to SEQ ID NO: 2131196
auacauaugcccauuuaau

SEQ ID NO: 2131198 - RNA, 19 nt, Artificial Sequence
  Description of Artificial Sequence: Synthetic oligonucleotide
  Sense strand starting at position 3232 of SEQ ID NO: 1882566
gcucccuguccugaagaaa

SEQ ID NO: 2131199 - RNA, 19 nt, Artificial Sequence
  Description of Artificial Sequence: Synthetic oligonucleotide
  Antisense strand to SEQ ID NO: 2131198
uuucuucaggacagggagc

SEQ ID NO: 2131200 - RNA, 19 nt, Artificial Sequence
  Description of Artificial Sequence: Synthetic oligonucleotide
  Sense strand starting at position 3296 of SEQ ID NO: 1882566
agguacaagagguguuaca

SEQ ID NO: 2131201 - RNA, 19 nt, Artificial Sequence
  Description of Artificial Sequence: Synthetic oligonucleotide
  Antisense strand to SEQ ID NO: 2131200
uguaacaccucuuguaccu

SEQ ID NO: 2131202 - RNA, 19 nt, Artificial Sequence
  Description of Artificial Sequence: Synthetic oligonucleotide
  Sense strand starting at position 3325 of SEQ ID NO: 1882566
ugcucaugccuggacaauu

SEQ ID NO: 2131203 - RNA, 19 nt, Artificial Sequence
  Description of Artificial Sequence: Synthetic oligonucleotide
  Antisense strand to SEQ ID NO: 2131202
aauuguccaggcaugagca

SEQ ID NO: 2131204 - RNA, 19 nt, Artificial Sequence
  Description of Artificial Sequence: Synthetic oligonucleotide
  Sense strand starting at position 3606 of SEQ ID NO: 1882566
gcuguuguuccuucugcau

SEQ ID NO: 2131205 - RNA, 19 nt, Artificial Sequence
  Description of Artificial Sequence: Synthetic oligonucleotide
  Antisense strand to SEQ ID NO: 2131204
augcagaaggaacaacagc

SEQ ID NO: 2131206 - RNA, 19 nt, Artificial Sequence
  Description of Artificial Sequence: Synthetic oligonucleotide
  Sense strand starting at position 3651 of SEQ ID NO: 1882566
agagcuugcuuccucauuu

SEQ ID NO: 2131207 - RNA, 19 nt, Artificial Sequence
  Description of Artificial Sequence: Synthetic oligonucleotide
  Antisense strand to SEQ ID NO: 2131206
aaaugaggaagcaagcucu

SEQ ID NO: 2131208 - RNA, 19 nt, Artificial Sequence
  Description of Artificial Sequence: Synthetic oligonucleotide
  Sense strand starting at position 3710 of SEQ ID NO: 1882566
acuaccaugucagugaaau

SEQ ID NO: 2131209 - RNA, 19 nt, Artificial Sequence
  Description of Artificial Sequence: Synthetic oligonucleotide
  Antisense strand to SEQ ID NO: 2131208
auuucacugacaugguagu

SEQ ID NO: 2131210 - RNA, 19 nt, Artificial Sequence
  Description of Artificial Sequence: Synthetic oligonucleotide
  Sense strand starting at position 3711 of SEQ ID NO: 1882566
cuaccaugucagugaaaua

SEQ ID NO: 2131211 - RNA, 19 nt, Artificial Sequence
  Description of Artificial Sequence: Synthetic oligonucleotide
  Antisense strand to SEQ ID NO: 2131210
uauuucacugacaugguag

SEQ ID NO: 2131212 - RNA, 19 nt, Artificial Sequence
  Description of Artificial Sequence: Synthetic oligonucleotide
  Sense strand starting at position 3740 of SEQ ID NO: 1882566
ucaaaugugaaauguagga

SEQ ID NO: 2131213 - RNA, 19 nt, Artificial Sequence
  Description of Artificial Sequence: Synthetic oligonucleotide
  Antisense strand to SEQ ID NO: 2131212
uccuacauuucacauuuga

SEQ ID NO: 2131214 - RNA, 19 nt, Artificial Sequence
  Description of Artificial Sequence: Synthetic oligonucleotide
  Sense strand starting at position 3761 of SEQ ID NO: 1882566
gacuaucuggaguaguacu

SEQ ID NO: 2131215 - RNA, 19 nt, Artificial Sequence
  Description of Artificial Sequence: Synthetic oligonucleotide
  Antisense strand to SEQ ID NO: 2131214
aguacuacuccagauaguc

SEQ ID NO: 2131216 - RNA, 19 nt, Artificial Sequence
  Description of Artificial Sequence: Synthetic oligonucleotide
  Sense strand starting at position 3778 of SEQ ID NO: 1882566
cuuauuauagaguaggugu

SEQ ID NO: 2131217 - RNA, 19 nt, Artificial Sequence
  Description of Artificial Sequence: Synthetic oligonucleotide
  Antisense strand to SEQ ID NO: 2131216
acaccuacucuauaauaag

SEQ ID NO: 2131218 - RNA, 19 nt, Artificial Sequence
  Description of Artificial Sequence: Synthetic oligonucleotide
  Sense strand starting at position 3781 of SEQ ID NO: 1882566
auuauagaguagguguuua

SEQ ID NO: 2131219 - RNA, 19 nt, Artificial Sequence
  Description of Artificial Sequence: Synthetic oligonucleotide
  Antisense strand to SEQ ID NO: 2131218
uaaacaccuacucuauaau

SEQ ID NO: 2131220 - RNA, 19 nt, Artificial Sequence
  Description of Artificial Sequence: Synthetic oligonucleotide
  Sense strand starting at position 143 of SEQ ID NO: 1882567
uuccaugauuugcuuagua

SEQ ID NO: 2131221 - RNA, 19 nt, Artificial Sequence
  Description of Artificial Sequence: Synthetic oligonucleotide
  Antisense strand to SEQ ID NO: 2131220
uacuaagcaaaucauggaa

SEQ ID NO: 2131222 - RNA, 19 nt, Artificial Sequence
  Description of Artificial Sequence: Synthetic oligonucleotide
  Sense strand starting at position 602 of SEQ ID NO: 1882567
gaaguucagguucgggaua

SEQ ID NO: 2131223 - RNA, 19 nt, Artificial Sequence
  Description of Artificial Sequence: Synthetic oligonucleotide
  Antisense strand to SEQ ID NO: 2131222
uaucccgaaccugaacuuc

SEQ ID NO: 2131224 - RNA, 19 nt, Artificial Sequence
  Description of Artificial Sequence: Synthetic oligonucleotide
  Sense strand starting at position 607 of SEQ ID NO: 1882567
ucagguucgggauaagauc

SEQ ID NO: 2131225 - RNA, 19 nt, Artificial Sequence
  Description of Artificial Sequence: Synthetic oligonucleotide
  Antisense strand to SEQ ID NO: 2131224
gaucuuaucccgaaccuga

SEQ ID NO: 2131226 - RNA, 19 nt, Artificial Sequence
  Description of Artificial Sequence: Synthetic oligonucleotide
  Sense strand starting at position 688 of SEQ ID NO: 1882567
uacagaaaucguugcaacu

SEQ ID NO: 2131227 - RNA, 19 nt, Artificial Sequence
  Description of Artificial Sequence: Synthetic oligonucleotide
  Antisense strand to SEQ ID NO: 2131226
aguugcaacgauuucugua

SEQ ID NO: 2131228 - RNA, 19 nt, Artificial Sequence
  Description of Artificial Sequence: Synthetic oligonucleotide
  Sense strand starting at position 754 of SEQ ID NO: 1882567
cccucacuguuggcagaaa

SEQ ID NO: 2131229 - RNA, 19 nt, Artificial Sequence
  Description of Artificial Sequence: Synthetic oligonucleotide
  Antisense strand to SEQ ID NO: 2131228
uuucugccaacagugaggg

SEQ ID NO: 2131230 - RNA, 19 nt, Artificial Sequence
  Description of Artificial Sequence: Synthetic oligonucleotide
  Sense strand starting at position 839 of SEQ ID NO: 1882567
cugaauuacuggucuuaau

SEQ ID NO: 2131231 - RNA, 19 nt, Artificial Sequence
  Description of Artificial Sequence: Synthetic oligonucleotide
  Antisense strand to SEQ ID NO: 2131230
auuaagaccaguaauucag

SEQ ID NO: 2131232 - RNA, 19 nt, Artificial Sequence
  Description of Artificial Sequence: Synthetic oligonucleotide
  Sense strand starting at position 896 of SEQ ID NO: 1882567
ucagcuucgggauagguuu

SEQ ID NO: 2131233 - RNA, 19 nt, Artificial Sequence
  Description of Artificial Sequence: Synthetic oligonucleotide
  Antisense strand to SEQ ID NO: 2131232
aaaccuaucccgaagcuga

SEQ ID NO: 2131234 - RNA, 19 nt, Artificial Sequence
  Description of Artificial Sequence: Synthetic oligonucleotide
  Sense strand starting at position 939 of SEQ ID NO: 1882567
cuuguauauguacacauaa

SEQ ID NO: 2131235 - RNA, 19 nt, Artificial Sequence
  Description of Artificial Sequence: Synthetic oligonucleotide
  Antisense strand to SEQ ID NO: 2131234
uuauguguacauauacaag

SEQ ID NO: 2131236 - RNA, 19 nt, Artificial Sequence
  Description of Artificial Sequence: Synthetic oligonucleotide
  Sense strand starting at position 975 of SEQ ID NO: 1882567
cugugacacugacuacaaa

SEQ ID NO: 2131237 - RNA, 19 nt, Artificial Sequence
  Description of Artificial Sequence: Synthetic oligonucleotide
  Antisense strand to SEQ ID NO: 2131236
uuuguagucagugucacag

SEQ ID NO: 2131238 - RNA, 19 nt, Artificial Sequence
  Description of Artificial Sequence: Synthetic oligonucleotide
  Sense strand starting at position 1164 of SEQ ID NO: 1882567
agucuagguguggauuaaa

SEQ ID NO: 2131239 - RNA, 19 nt, Artificial Sequence
  Description of Artificial Sequence: Synthetic oligonucleotide
  Antisense strand to SEQ ID NO: 2131238
uuuaauccacaccuagacu

SEQ ID NO: 2131240 - RNA, 19 nt, Artificial Sequence
  Description of Artificial Sequence: Synthetic oligonucleotide
  Sense strand starting at position 1271 of SEQ ID NO: 1882567
ccagauguucuggaaguuu

SEQ ID NO: 2131241 - RNA, 19 nt, Artificial Sequence
  Description of Artificial Sequence: Synthetic oligonucleotide
  Antisense strand to SEQ ID NO: 2131240
aaacuuccagaacaucugg

SEQ ID NO: 2131242 - RNA, 19 nt, Artificial Sequence
  Description of Artificial Sequence: Synthetic oligonucleotide
  Sense strand starting at position 1344 of SEQ ID NO: 1882567
ccuguaaaucaacagguuu

SEQ ID NO: 2131243 - RNA, 19 nt, Artificial Sequence
  Description of Artificial Sequence: Synthetic oligonucleotide
  Antisense strand to SEQ ID NO: 2131242
aaaccuguugauuuacagg

SEQ ID NO: 2131244 - RNA, 19 nt, Artificial Sequence
  Description of Artificial Sequence: Synthetic oligonucleotide
  Sense strand starting at position 1358 of SEQ ID NO: 1882567
gguuuacuccuuuaguuug

SEQ ID NO: 2131245 - RNA, 19 nt, Artificial Sequence
  Description of Artificial Sequence: Synthetic oligonucleotide
  Antisense strand to SEQ ID NO: 2131244
caaacuaaaggaguaaacc

SEQ ID NO: 2131246 - RNA, 19 nt, Artificial Sequence
  Description of Artificial Sequence: Synthetic oligonucleotide
  Sense strand starting at position 1471 of SEQ ID NO: 1882567
auuuaagcauucucgcaga

SEQ ID NO: 2131247 - RNA, 19 nt, Artificial Sequence
  Description of Artificial Sequence: Synthetic oligonucleotide
  Antisense strand to SEQ ID NO: 2131246
ucugcgagaaugcuuaaau

SEQ ID NO: 2131248 - RNA, 19 nt, Artificial Sequence
  Description of Artificial Sequence: Synthetic oligonucleotide
  Sense strand starting at position 2015 of SEQ ID NO: 1882567
ccaguagcuccuuauauag

SEQ ID NO: 2131249 - RNA, 19 nt, Artificial Sequence
  Description of Artificial Sequence: Synthetic oligonucleotide
  Antisense strand to SEQ ID NO: 2131248
cuauauaaggagcuacugg

SEQ ID NO: 2131250 - RNA, 19 nt, Artificial Sequence
  Description of Artificial Sequence: Synthetic oligonucleotide
  Sense strand starting at position 2072 of SEQ ID NO: 1882567
accuauuggacauggaagu

SEQ ID NO: 2131251 - RNA, 19 nt, Artificial Sequence
  Description of Artificial Sequence: Synthetic oligonucleotide
  Antisense strand to SEQ ID NO: 2131250
acuuccauguccaauaggu

SEQ ID NO: 2131252 - RNA, 19 nt, Artificial Sequence
  Description of Artificial Sequence: Synthetic oligonucleotide
  Sense strand starting at position 2073 of SEQ ID NO: 1882567
ccuauuggacauggaagua

SEQ ID NO: 2131253 - RNA, 19 nt, Artificial Sequence
  Description of Artificial Sequence: Synthetic oligonucleotide
  Antisense strand to SEQ ID NO: 2131252
uacuuccauguccaauagg

SEQ ID NO: 2131254 - RNA, 19 nt, Artificial Sequence
  Description of Artificial Sequence: Synthetic oligonucleotide
  Sense strand starting at position 2269 of SEQ ID NO: 1882567
gcggguguggcgccagaau

SEQ ID NO: 2131255 - RNA, 19 nt, Artificial Sequence
  Description of Artificial Sequence: Synthetic oligonucleotide
  Antisense strand to SEQ ID NO: 2131254
auucuggcgccacacccgc

SEQ ID NO: 2131256 - RNA, 19 nt, Artificial Sequence
  Description of Artificial Sequence: Synthetic oligonucleotide
  Sense strand starting at position 2271 of SEQ ID NO: 1882567
ggguguggcgccagaauuc

SEQ ID NO: 2131257 - RNA, 19 nt, Artificial Sequence
  Description of Artificial Sequence: Synthetic oligonucleotide
  Antisense strand to SEQ ID NO: 2131256
gaauucuggcgccacaccc

SEQ ID NO: 2131258 - RNA, 19 nt, Artificial Sequence
  Description of Artificial Sequence: Synthetic oligonucleotide
  Sense strand starting at position 2346 of SEQ ID NO: 1882567
acagauuggguccgagagu

SEQ ID NO: 2131259 - RNA, 19 nt, Artificial Sequence
  Description of Artificial Sequence: Synthetic oligonucleotide
  Antisense strand to SEQ ID NO: 2131258
acucucggacccaaucugu

SEQ ID NO: 2131260 - RNA, 19 nt, Artificial Sequence
  Description of Artificial Sequence: Synthetic oligonucleotide
  Sense strand starting at position 2653 of SEQ ID NO: 1882567
caggcauccgguuacacua

SEQ ID NO: 2131261 - RNA, 19 nt, Artificial Sequence
  Description of Artificial Sequence: Synthetic oligonucleotide
  Antisense strand to SEQ ID NO: 2131260
uaguguaaccggaugccug

SEQ ID NO: 2131262 - RNA, 19 nt, Artificial Sequence
  Description of Artificial Sequence: Synthetic oligonucleotide
  Sense strand starting at position 2857 of SEQ ID NO: 1882567
ugagaaguaucccugaaua

SEQ ID NO: 2131263 - RNA, 19 nt, Artificial Sequence
  Description of Artificial Sequence: Synthetic oligonucleotide
  Antisense strand to SEQ ID NO: 2131262
uauucagggauacuucuca

SEQ ID NO: 2131264 - RNA, 19 nt, Artificial Sequence
  Description of Artificial Sequence: Synthetic oligonucleotide
  Sense strand starting at position 2927 of SEQ ID NO: 1882567
gcauguucgagugaauaug

SEQ ID NO: 2131265 - RNA, 19 nt, Artificial Sequence
  Description of Artificial Sequence: Synthetic oligonucleotide
  Antisense strand to SEQ ID NO: 2131264
cauauucacucgaacaugc

SEQ ID NO: 2131266 - RNA, 19 nt, Artificial Sequence
  Description of Artificial Sequence: Synthetic oligonucleotide
  Sense strand starting at position 3045 of SEQ ID NO: 1882567
uguuuaugugugcauuuga

SEQ ID NO: 2131267 - RNA, 19 nt, Artificial Sequence
  Description of Artificial Sequence: Synthetic oligonucleotide
  Antisense strand to SEQ ID NO: 2131266
ucaaaugcacacauaaaca

SEQ ID NO: 2131268 - RNA, 19 nt, Artificial Sequence
  Description of Artificial Sequence: Synthetic oligonucleotide
  Sense strand starting at position 3106 of SEQ ID NO: 1882567
uuucgugcucugcuguuua

SEQ ID NO: 2131269 - RNA, 19 nt, Artificial Sequence
  Description of Artificial Sequence: Synthetic oligonucleotide
  Antisense strand to SEQ ID NO: 2131268
uaaacagcagagcacgaaa

SEQ ID NO: 2131270 - RNA, 19 nt, Artificial Sequence
  Description of Artificial Sequence: Synthetic oligonucleotide
  Sense strand starting at position 3108 of SEQ ID NO: 1882567
ucgugcucugcuguuuauu

SEQ ID NO: 2131271 - RNA, 19 nt, Artificial Sequence
  Description of Artificial Sequence: Synthetic oligonucleotide
  Antisense strand to SEQ ID NO: 2131270
aauaaacagcagagcacga

SEQ ID NO: 2131272 - RNA, 19 nt, Artificial Sequence
  Description of Artificial Sequence: Synthetic oligonucleotide
  Sense strand starting at position 3161 of SEQ ID NO: 1882567
gucgguaaugguuaaauga

SEQ ID NO: 2131273 - RNA, 19 nt, Artificial Sequence
  Description of Artificial Sequence: Synthetic oligonucleotide
  Antisense strand to SEQ ID NO: 2131272
ucauuuaaccauuaccgac

SEQ ID NO: 2131274 - RNA, 19 nt, Artificial Sequence
  Description of Artificial Sequence: Synthetic oligonucleotide
  Sense strand starting at position 3359 of SEQ ID NO: 1882567
uugcauauugcucauagua

SEQ ID NO: 2131275 - RNA, 19 nt, Artificial Sequence
  Description of Artificial Sequence: Synthetic oligonucleotide
  Antisense strand to SEQ ID NO: 2131274
uacuaugagcaauaugcaa

SEQ ID NO: 2131276 - RNA, 19 nt, Artificial Sequence
  Description of Artificial Sequence: Synthetic oligonucleotide
  Sense strand starting at position 3553 of SEQ ID NO: 1882567
gugaaaguaucuuuccaca

SEQ ID NO: 2131277 - RNA, 19 nt, Artificial Sequence
  Description of Artificial Sequence: Synthetic oligonucleotide
  Antisense strand to SEQ ID NO: 2131276
uguggaaagauacuuucac

SEQ ID NO: 2131278 - RNA, 19 nt, Artificial Sequence
  Description of Artificial Sequence: Synthetic oligonucleotide
  Sense strand starting at position 3564 of SEQ ID NO: 1882567
uuuccacaugccugggaau

SEQ ID NO: 2131279 - RNA, 19 nt, Artificial Sequence
  Description of Artificial Sequence: Synthetic oligonucleotide
  Antisense strand to SEQ ID NO: 2131278
auucccaggcauguggaaa

SEQ ID NO: 2131280 - RNA, 19 nt, Artificial Sequence
  Description of Artificial Sequence: Synthetic oligonucleotide
  Sense strand starting at position 3576 of SEQ ID NO: 1882567
ugggaaucuucucccuagu

SEQ ID NO: 2131281 - RNA, 19 nt, Artificial Sequence
  Description of Artificial Sequence: Synthetic oligonucleotide
  Antisense strand to SEQ ID NO: 2131280
acuagggagaagauuccca

SEQ ID NO: 2131282 - RNA, 19 nt, Artificial Sequence
  Description of Artificial Sequence: Synthetic oligonucleotide
  Sense strand starting at position 3629 of SEQ ID NO: 1882567
ugagacuuccuaugcaaau

SEQ ID NO: 2131283 - RNA, 19 nt, Artificial Sequence
  Description of Artificial Sequence: Synthetic oligonucleotide
  Antisense strand to SEQ ID NO: 2131282
auuugcauaggaagucuca

SEQ ID NO: 2131284 - RNA, 19 nt, Artificial Sequence
  Description of Artificial Sequence: Synthetic oligonucleotide
  Sense strand starting at position 3683 of SEQ ID NO: 1882567
ggaucuauauguucugcaa

SEQ ID NO: 2131285 - RNA, 19 nt, Artificial Sequence
  Description of Artificial Sequence: Synthetic oligonucleotide
  Antisense strand to SEQ ID NO: 2131284
uugcagaacauauagaucc

SEQ ID NO: 2131286 - RNA, 19 nt, Artificial Sequence
  Description of Artificial Sequence: Synthetic oligonucleotide
  Sense strand starting at position 3702 of SEQ ID NO: 1882567
cuuguuuguccgucuugua

SEQ ID NO: 2131287 - RNA, 19 nt, Artificial Sequence
  Description of Artificial Sequence: Synthetic oligonucleotide
  Antisense strand to SEQ ID NO: 2131286
uacaagacggacaaacaag

SEQ ID NO: 2131288 - RNA, 19 nt, Artificial Sequence
  Description of Artificial Sequence: Synthetic oligonucleotide
  Sense strand starting at position 3703 of SEQ ID NO: 1882567
uuguuuguccgucuuguaa

SEQ ID NO: 2131289 - RNA, 19 nt, Artificial Sequence
  Description of Artificial Sequence: Synthetic oligonucleotide
  Antisense strand to SEQ ID NO: 2131288
uuacaagacggacaaacaa

SEQ ID NO: 2131290 - RNA, 19 nt, Artificial Sequence
  Description of Artificial Sequence: Synthetic oligonucleotide
  Sense strand starting at position 3829 of SEQ ID NO: 1882567
cugcaaucucgggaucaag

SEQ ID NO: 2131291 - RNA, 19 nt, Artificial Sequence
  Description of Artificial Sequence: Synthetic oligonucleotide
  Antisense strand to SEQ ID NO: 2131290
cuugaucccgagauugcag

SEQ ID NO: 2131292 - RNA, 19 nt, Artificial Sequence
  Description of Artificial Sequence: Synthetic oligonucleotide
  Sense strand starting at position 3837 of SEQ ID NO: 1882567
ucgggaucaagugauccuu

SEQ ID NO: 2131293 - RNA, 19 nt, Artificial Sequence
  Description of Artificial Sequence: Synthetic oligonucleotide
  Antisense strand to SEQ ID NO: 2131292
aaggaucacuugaucccga

SEQ ID NO: 2131294 - RNA, 19 nt, Artificial Sequence
  Description of Artificial Sequence: Synthetic oligonucleotide
  Sense strand starting at position 3894 of SEQ ID NO: 1882567
cgccaucacgcccuguaau

SEQ ID NO: 2131295 - RNA, 19 nt, Artificial Sequence
  Description of Artificial Sequence: Synthetic oligonucleotide
  Antisense strand to SEQ ID NO: 2131294
auuacagggcgugauggcg

SEQ ID NO: 2131296 - RNA, 19 nt, Artificial Sequence
  Description of Artificial Sequence: Synthetic oligonucleotide
  Sense strand starting at position 3931 of SEQ ID NO: 1882567
gagauagaguuucugccau

SEQ ID NO: 2131297 - RNA, 19 nt, Artificial Sequence
  Description of Artificial Sequence: Synthetic oligonucleotide
  Antisense strand to SEQ ID NO: 2131296
auggcagaaacucuaucuc

SEQ ID NO: 2131298 - RNA, 19 nt, Artificial Sequence
  Description of Artificial Sequence: Synthetic oligonucleotide
  Sense strand starting at position 3933 of SEQ ID NO: 1882567
gauagaguuucugccauuc

SEQ ID NO: 2131299 - RNA, 19 nt, Artificial Sequence
  Description of Artificial Sequence: Synthetic oligonucleotide
  Antisense strand to SEQ ID NO: 2131298
gaauggcagaaacucuauc

SEQ ID NO: 2131300 - RNA, 19 nt, Artificial Sequence
  Description of Artificial Sequence: Synthetic oligonucleotide
  Sense strand starting at position 101 of SEQ ID NO: 1882568
guaagauaggcagggauga

SEQ ID NO: 2131301 - RNA, 19 nt, Artificial Sequence
  Description of Artificial Sequence: Synthetic oligonucleotide
  Antisense strand to SEQ ID NO: 2131300
ucaucccugccuaucuuac

SEQ ID NO: 2131302 - RNA, 19 nt, Artificial Sequence
  Description of Artificial Sequence: Synthetic oligonucleotide
  Sense strand starting at position 225 of SEQ ID NO: 1882568
uuaaacuguguccacagaa

SEQ ID NO: 2131303 - RNA, 19 nt, Artificial Sequence
  Description of Artificial Sequence: Synthetic oligonucleotide
  Antisense strand to SEQ ID NO: 2131302
uucuguggacacaguuuaa

SEQ ID NO: 2131304 - RNA, 19 nt, Artificial Sequence
  Description of Artificial Sequence: Synthetic oligonucleotide
  Sense strand starting at position 271 of SEQ ID NO: 1882568
ccguuaggucaauauugaa

SEQ ID NO: 2131305 - RNA, 19 nt, Artificial Sequence
  Description of Artificial Sequence: Synthetic oligonucleotide
  Antisense strand to SEQ ID NO: 2131304
uucaauauugaccuaacgg

SEQ ID NO: 2131306 - RNA, 19 nt, Artificial Sequence
  Description of Artificial Sequence: Synthetic oligonucleotide
  Sense strand starting at position 720 of SEQ ID NO: 1882568
cuuuacuuucuggauguaa

SEQ ID NO: 2131307 - RNA, 19 nt, Artificial Sequence
  Description of Artificial Sequence: Synthetic oligonucleotide
  Antisense strand to SEQ ID NO: 2131306
uuacauccagaaaguaaag

SEQ ID NO: 2131308 - RNA, 19 nt, Artificial Sequence
  Description of Artificial Sequence: Synthetic oligonucleotide
  Sense strand starting at position 1084 of SEQ ID NO: 1882568
cuugaauuacagugacuga

SEQ ID NO: 2131309 - RNA, 19 nt, Artificial Sequence
  Description of Artificial Sequence: Synthetic oligonucleotide
  Antisense strand to SEQ ID NO: 2131308
ucagucacuguaauucaag

SEQ ID NO: 2131310 - RNA, 19 nt, Artificial Sequence
  Description of Artificial Sequence: Synthetic oligonucleotide
  Sense strand starting at position 1166 of SEQ ID NO: 1882568
gcugacauguaauugacua

SEQ ID NO: 2131311 - RNA, 19 nt, Artificial Sequence
  Description of Artificial Sequence: Synthetic oligonucleotide
  Antisense strand to SEQ ID NO: 2131310
uagucaauuacaugucagc

SEQ ID NO: 2131312 - RNA, 19 nt, Artificial Sequence
  Description of Artificial Sequence: Synthetic oligonucleotide
  Sense strand starting at position 1202 of SEQ ID NO: 1882568
accuguucugcagagguua

SEQ ID NO: 2131313 - RNA, 19 nt, Artificial Sequence
  Description of Artificial Sequence: Synthetic oligonucleotide
  Antisense strand to SEQ ID NO: 2131312
uaaccucugcagaacaggu

SEQ ID NO: 2131314 - RNA, 19 nt, Artificial Sequence
  Description of Artificial Sequence: Synthetic oligonucleotide
  Sense strand starting at position 1207 of SEQ ID NO: 1882568
uucugcagagguuaacaaa

SEQ ID NO: 2131315 - RNA, 19 nt, Artificial Sequence
  Description of Artificial Sequence: Synthetic oligonucleotide
  Antisense strand to SEQ ID NO: 2131314
uuuguuaaccucugcagaa

SEQ ID NO: 2131316 - RNA, 19 nt, Artificial Sequence
  Description of Artificial Sequence: Synthetic oligonucleotide
  Sense strand starting at position 1230 of SEQ ID NO: 1882568
gggaaaccaugcuuaccau

SEQ ID NO: 2131317 - RNA, 19 nt, Artificial Sequence
  Description of Artificial Sequence: Synthetic oligonucleotide
  Antisense strand to SEQ ID NO: 2131316
augguaagcaugguuuccc

SEQ ID NO: 2131318 - RNA, 19 nt, Artificial Sequence
  Description of Artificial Sequence: Synthetic oligonucleotide
  Sense strand starting at position 1231 of SEQ ID NO: 1882568
ggaaaccaugcuuaccauu

SEQ ID NO: 2131319 - RNA, 19 nt, Artificial Sequence
  Description of Artificial Sequence: Synthetic oligonucleotide
  Antisense strand to SEQ ID NO: 2131318
aaugguaagcaugguuucc

SEQ ID NO: 2131320 - RNA, 19 nt, Artificial Sequence
  Description of Artificial Sequence: Synthetic oligonucleotide
  Sense strand starting at position 1477 of SEQ ID NO: 1882568
cucucaggccucuaagaca

SEQ ID NO: 2131321 - RNA, 19 nt, Artificial Sequence
  Description of Artificial Sequence: Synthetic oligonucleotide
  Antisense strand to SEQ ID NO: 2131320
ugucuuagaggccugagag

SEQ ID NO: 2131322 - RNA, 19 nt, Artificial Sequence
  Description of Artificial Sequence: Synthetic oligonucleotide
  Sense strand starting at position 1493 of SEQ ID NO: 1882568
acaagaaaugacuguucuu

SEQ ID NO: 2131323 - RNA, 19 nt, Artificial Sequence
  Description of Artificial Sequence: Synthetic oligonucleotide
  Antisense strand to SEQ ID NO: 2131322
aagaacagucauuucuugu

SEQ ID NO: 2131324 - RNA, 19 nt, Artificial Sequence
  Description of Artificial Sequence: Synthetic oligonucleotide
  Sense strand starting at position 1673 of SEQ ID NO: 1882568
uaagauaaucgaugcagac

SEQ ID NO: 2131325 - RNA, 19 nt, Artificial Sequence
  Description of Artificial Sequence: Synthetic oligonucleotide
  Antisense strand to SEQ ID NO: 2131324
gucugcaucgauuaucuua

SEQ ID NO: 2131326 - RNA, 19 nt, Artificial Sequence
  Description of Artificial Sequence: Synthetic oligonucleotide
  Sense strand starting at position 1812 of SEQ ID NO: 1882568
acauaaaguucccuuaagu

SEQ ID NO: 2131327 - RNA, 19 nt, Artificial Sequence
  Description of Artificial Sequence: Synthetic oligonucleotide
  Antisense strand to SEQ ID NO: 2131326
acuuaagggaacuuuaugu

SEQ ID NO: 2131328 - RNA, 19 nt, Artificial Sequence
  Description of Artificial Sequence: Synthetic oligonucleotide
  Sense strand starting at position 1840 of SEQ ID NO: 1882568
acaggauauuuagauauac

SEQ ID NO: 2131329 - RNA, 19 nt, Artificial Sequence
  Description of Artificial Sequence: Synthetic oligonucleotide
  Antisense strand to SEQ ID NO: 2131328
guauaucuaaauauccugu

SEQ ID NO: 2131330 - RNA, 19 nt, Artificial Sequence
  Description of Artificial Sequence: Synthetic oligonucleotide
  Sense strand starting at position 1946 of SEQ ID NO: 1882568
augcguauaacugcucgua

SEQ ID NO: 2131331 - RNA, 19 nt, Artificial Sequence
  Description of Artificial Sequence: Synthetic oligonucleotide
  Antisense strand to SEQ ID NO: 2131330
uacgagcaguuauacgcau

SEQ ID NO: 2131332 - RNA, 19 nt, Artificial Sequence
  Description of Artificial Sequence: Synthetic oligonucleotide
  Sense strand starting at position 1947 of SEQ ID NO: 1882568
ugcguauaacugcucguau

SEQ ID NO: 2131333 - RNA, 19 nt, Artificial Sequence
  Description of Artificial Sequence: Synthetic oligonucleotide
  Antisense strand to SEQ ID NO: 2131332
auacgagcaguuauacgca

SEQ ID NO: 2131334 - RNA, 19 nt, Artificial Sequence
  Description of Artificial Sequence: Synthetic oligonucleotide
  Sense strand starting at position 2025 of SEQ ID NO: 1882568
ucgguauaacuuuacaauu

SEQ ID NO: 2131335 - RNA, 19 nt, Artificial Sequence
  Description of Artificial Sequence: Synthetic oligonucleotide
  Antisense strand to SEQ ID NO: 2131334
aauuguaaaguuauaccga

SEQ ID NO: 2131336 - RNA, 19 nt, Artificial Sequence
  Description of Artificial Sequence: Synthetic oligonucleotide
  Sense strand starting at position 2171 of SEQ ID NO: 1882568
uugacagaauaguugcuaa

SEQ ID NO: 2131337 - RNA, 19 nt, Artificial Sequence
  Description of Artificial Sequence: Synthetic oligonucleotide
  Antisense strand to SEQ ID NO: 2131336
uuagcaacuauucugucaa

SEQ ID NO: 2131338 - RNA, 19 nt, Artificial Sequence
  Description of Artificial Sequence: Synthetic oligonucleotide
  Sense strand starting at position 2174 of SEQ ID NO: 1882568
acagaauaguugcuaauaa

SEQ ID NO: 2131339 - RNA, 19 nt, Artificial Sequence
  Description of Artificial Sequence: Synthetic oligonucleotide
  Antisense strand to SEQ ID NO: 2131338
uuauuagcaacuauucugu

SEQ ID NO: 2131340 - RNA, 19 nt, Artificial Sequence
  Description of Artificial Sequence: Synthetic oligonucleotide
  Sense strand starting at position 2249 of SEQ ID NO: 1882568
ucaguagcauuugugguaa

SEQ ID NO: 2131341 - RNA, 19 nt, Artificial Sequence
  Description of Artificial Sequence: Synthetic oligonucleotide
  Antisense strand to SEQ ID NO: 2131340
uuaccacaaaugcuacuga

SEQ ID NO: 2131342 - RNA, 19 nt, Artificial Sequence
  Description of Artificial Sequence: Synthetic oligonucleotide
  Sense strand starting at position 2653 of SEQ ID NO: 1882568
uuccaccagugguuagaau

SEQ ID NO: 2131343 - RNA, 19 nt, Artificial Sequence
  Description of Artificial Sequence: Synthetic oligonucleotide
  Antisense strand to SEQ ID NO: 2131342
auucuaaccacugguggaa

SEQ ID NO: 2131344 - RNA, 19 nt, Artificial Sequence
  Description of Artificial Sequence: Synthetic oligonucleotide
  Sense strand starting at position 2654 of SEQ ID NO: 1882568
uccaccagugguuagaaua

SEQ ID NO: 2131345 - RNA, 19 nt, Artificial Sequence
  Description of Artificial Sequence: Synthetic oligonucleotide
  Antisense strand to SEQ ID NO: 2131344
uauucuaaccacuggugga

SEQ ID NO: 2131346 - RNA, 19 nt, Artificial Sequence
  Description of Artificial Sequence: Synthetic oligonucleotide
  Sense strand starting at position 2686 of SEQ ID NO: 1882568
uugccaggaucuucugaau

SEQ ID NO: 2131347 - RNA, 19 nt, Artificial Sequence
  Description of Artificial Sequence: Synthetic oligonucleotide
  Antisense strand to SEQ ID NO: 2131346
auucagaagauccuggcaa

SEQ ID NO: 2131348 - RNA, 19 nt, Artificial Sequence
  Description of Artificial Sequence: Synthetic oligonucleotide
  Sense strand starting at position 2700 of SEQ ID NO: 1882568
ugaauucucuccuugguga

SEQ ID NO: 2131349 - RNA, 19 nt, Artificial Sequence
  Description of Artificial Sequence: Synthetic oligonucleotide
  Antisense strand to SEQ ID NO: 2131348
ucaccaaggagagaauuca

SEQ ID NO: 2131350 - RNA, 19 nt, Artificial Sequence
  Description of Artificial Sequence: Synthetic oligonucleotide
  Sense strand starting at position 2701 of SEQ ID NO: 1882568
gaauucucuccuuggugau

SEQ ID NO: 2131351 - RNA, 19 nt, Artificial Sequence
  Description of Artificial Sequence: Synthetic oligonucleotide
  Antisense strand to SEQ ID NO: 2131350
aucaccaaggagagaauuc

SEQ ID NO: 2131352 - RNA, 19 nt, Artificial Sequence
  Description of Artificial Sequence: Synthetic oligonucleotide
  Sense strand starting at position 2714 of SEQ ID NO: 1882568
ggugauaucugauucucug

SEQ ID NO: 2131353 - RNA, 19 nt, Artificial Sequence
  Description of Artificial Sequence: Synthetic oligonucleotide
  Antisense strand to SEQ ID NO: 2131352
cagagaaucagauaucacc

SEQ ID NO: 2131354 - RNA, 19 nt, Artificial Sequence
  Description of Artificial Sequence: Synthetic oligonucleotide
  Sense strand starting at position 2721 of SEQ ID NO: 1882568
ucugauucucugcaaagua

SEQ ID NO: 2131355 - RNA, 19 nt, Artificial Sequence
  Description of Artificial Sequence: Synthetic oligonucleotide
  Antisense strand to SEQ ID NO: 2131354
uacuuugcagagaaucaga

SEQ ID NO: 2131356 - RNA, 19 nt, Artificial Sequence
  Description of Artificial Sequence: Synthetic oligonucleotide
  Sense strand starting at position 2839 of SEQ ID NO: 1882568
uguuaucucugaccagaau

SEQ ID NO: 2131357 - RNA, 19 nt, Artificial Sequence
  Description of Artificial Sequence: Synthetic oligonucleotide
  Antisense strand to SEQ ID NO: 2131356
auucuggucagagauaaca

SEQ ID NO: 2131358 - RNA, 19 nt, Artificial Sequence
  Description of Artificial Sequence: Synthetic oligonucleotide
  Sense strand starting at position 2840 of SEQ ID NO: 1882568
guuaucucugaccagaauu

SEQ ID NO: 2131359 - RNA, 19 nt, Artificial Sequence
  Description of Artificial Sequence: Synthetic oligonucleotide
  Antisense strand to SEQ ID NO: 2131358
aauucuggucagagauaac

SEQ ID NO: 2131360 - RNA, 19 nt, Artificial Sequence
  Description of Artificial Sequence: Synthetic oligonucleotide
  Sense strand starting at position 3033 of SEQ ID NO: 1882568
uaaagugguaugcagagau

SEQ ID NO: 2131361 - RNA, 19 nt, Artificial Sequence
  Description of Artificial Sequence: Synthetic oligonucleotide
  Antisense strand to SEQ ID NO: 2131360
aucucugcauaccacuuua

SEQ ID NO: 2131362 - RNA, 19 nt, Artificial Sequence
  Description of Artificial Sequence: Synthetic oligonucleotide
  Sense strand starting at position 3037 of SEQ ID NO: 1882568
gugguaugcagagauuaca

SEQ ID NO: 2131363 - RNA, 19 nt, Artificial Sequence
  Description of Artificial Sequence: Synthetic oligonucleotide
  Antisense strand to SEQ ID NO: 2131362
uguaaucucugcauaccac

SEQ ID NO: 2131364 - RNA, 19 nt, Artificial Sequence
  Description of Artificial Sequence: Synthetic oligonucleotide
  Sense strand starting at position 3517 of SEQ ID NO: 1882568
gcaagacuaguauaucauc

SEQ ID NO: 2131365 - RNA, 19 nt, Artificial Sequence
  Description of Artificial Sequence: Synthetic oligonucleotide
  Antisense strand to SEQ ID NO: 2131364
gaugauauacuagucuugc

SEQ ID NO: 2131366 - RNA, 19 nt, Artificial Sequence
  Description of Artificial Sequence: Synthetic oligonucleotide
  Sense strand starting at position 3555 of SEQ ID NO: 1882568
ccugauuaucaauguggaa

SEQ ID NO: 2131367 - RNA, 19 nt, Artificial Sequence
  Description of Artificial Sequence: Synthetic oligonucleotide
  Antisense strand to SEQ ID NO: 2131366
uuccacauugauaaucagg

SEQ ID NO: 2131368 - RNA, 19 nt, Artificial Sequence
  Description of Artificial Sequence: Synthetic oligonucleotide
  Sense strand starting at position 3597 of SEQ ID NO: 1882568
agaagauaauaacaugaga

SEQ ID NO: 2131369 - RNA, 19 nt, Artificial Sequence
  Description of Artificial Sequence: Synthetic oligonucleotide
  Antisense strand to SEQ ID NO: 2131368
ucucauguuauuaucuucu

SEQ ID NO: 2131370 - RNA, 19 nt, Artificial Sequence
  Description of Artificial Sequence: Synthetic oligonucleotide
  Sense strand starting at position 3716 of SEQ ID NO: 1882568
augagaguuuaguugagga

SEQ ID NO: 2131371 - RNA, 19 nt, Artificial Sequence
  Description of Artificial Sequence: Synthetic oligonucleotide
  Antisense strand to SEQ ID NO: 2131370
uccucaacuaaacucucau

SEQ ID NO: 2131372 - RNA, 19 nt, Artificial Sequence
  Description of Artificial Sequence: Synthetic oligonucleotide
  Sense strand starting at position 3735 of SEQ ID NO: 1882568
caagauuaaguuugaaguc

SEQ ID NO: 2131373 - RNA, 19 nt, Artificial Sequence
  Description of Artificial Sequence: Synthetic oligonucleotide
  Antisense strand to SEQ ID NO: 2131372
gacuucaaacuuaaucuug

SEQ ID NO: 2131374 - RNA, 19 nt, Artificial Sequence
  Description of Artificial Sequence: Synthetic oligonucleotide
  Sense strand starting at position 3838 of SEQ ID NO: 1882568
gucaauaugagugaagcca

SEQ ID NO: 2131375 - RNA, 19 nt, Artificial Sequence
  Description of Artificial Sequence: Synthetic oligonucleotide
  Antisense strand to SEQ ID NO: 2131374
uggcuucacucauauugac

SEQ ID NO: 2131376 - RNA, 19 nt, Artificial Sequence
  Description of Artificial Sequence: Synthetic oligonucleotide
  Sense strand starting at position 3847 of SEQ ID NO: 1882568
agugaagccaugugaauag

SEQ ID NO: 2131377 - RNA, 19 nt, Artificial Sequence
  Description of Artificial Sequence: Synthetic oligonucleotide
  Antisense strand to SEQ ID NO: 2131376
cuauucacauggcuucacu

SEQ ID NO: 2131378 - RNA, 19 nt, Artificial Sequence
  Description of Artificial Sequence: Synthetic oligonucleotide
  Sense strand starting at position 3858 of SEQ ID NO: 1882568
gugaauagaucauucgaag

SEQ ID NO: 2131379 - RNA, 19 nt, Artificial Sequence
  Description of Artificial Sequence: Synthetic oligonucleotide
  Antisense strand to SEQ ID NO: 2131378
cuucgaaugaucuauucac

SEQ ID NO: 2131380 - RNA, 19 nt, Artificial Sequence
  Description of Artificial Sequence: Synthetic oligonucleotide
  Sense strand starting at position 129 of SEQ ID NO: 1882569
auaguuugacuuggcuaaa

SEQ ID NO: 2131381 - RNA, 19 nt, Artificial Sequence
  Description of Artificial Sequence: Synthetic oligonucleotide
  Antisense strand to SEQ ID NO: 2131380
uuuagccaagucaaacuau

SEQ ID NO: 2131382 - RNA, 19 nt, Artificial Sequence
  Description of Artificial Sequence: Synthetic oligonucleotide
  Sense strand starting at position 149 of SEQ ID NO: 1882569
auguuaaaguccuccaaga

SEQ ID NO: 2131383 - RNA, 19 nt, Artificial Sequence
  Description of Artificial Sequence: Synthetic oligonucleotide
  Antisense strand to SEQ ID NO: 2131382
ucuuggaggacuuuaacau

SEQ ID NO: 2131384 - RNA, 19 nt, Artificial Sequence
  Description of Artificial Sequence: Synthetic oligonucleotide
  Sense strand starting at position 151 of SEQ ID NO: 1882569
guuaaaguccuccaagaca

SEQ ID NO: 2131385 - RNA, 19 nt, Artificial Sequence
  Description of Artificial Sequence: Synthetic oligonucleotide
  Antisense strand to SEQ ID NO: 2131384
ugucuuggaggacuuuaac

SEQ ID NO: 2131386 - RNA, 19 nt, Artificial Sequence
  Description of Artificial Sequence: Synthetic oligonucleotide
  Sense strand starting at position 326 of SEQ ID NO: 1882569
ugggcaugccuacaauuga

SEQ ID NO: 2131387 - RNA, 19 nt, Artificial Sequence
  Description of Artificial Sequence: Synthetic oligonucleotide
  Antisense strand to SEQ ID NO: 2131386
ucaauuguaggcaugccca

SEQ ID NO: 2131388 - RNA, 19 nt, Artificial Sequence
  Description of Artificial Sequence: Synthetic oligonucleotide
  Sense strand starting at position 356 of SEQ ID NO: 1882569
aguuaauacgucuauccuu

SEQ ID NO: 2131389 - RNA, 19 nt, Artificial Sequence
  Description of Artificial Sequence: Synthetic oligonucleotide
  Antisense strand to SEQ ID NO: 2131388
aaggauagacguauuaacu

SEQ ID NO: 2131390 - RNA, 19 nt, Artificial Sequence
  Description of Artificial Sequence: Synthetic oligonucleotide
  Sense strand starting at position 399 of SEQ ID NO: 1882569
aaucgauuguauguaaaca

SEQ ID NO: 2131391 - RNA, 19 nt, Artificial Sequence
  Description of Artificial Sequence: Synthetic oligonucleotide
  Antisense strand to SEQ ID NO: 2131390
uguuuacauacaaucgauu

SEQ ID NO: 2131392 - RNA, 19 nt, Artificial Sequence
  Description of Artificial Sequence: Synthetic oligonucleotide
  Sense strand starting at position 537 of SEQ ID NO: 1882569
agauguacugcacauaauc

SEQ ID NO: 2131393 - RNA, 19 nt, Artificial Sequence
  Description of Artificial Sequence: Synthetic oligonucleotide
  Antisense strand to SEQ ID NO: 2131392
gauuaugugcaguacaucu

SEQ ID NO: 2131394 - RNA, 19 nt, Artificial Sequence
  Description of Artificial Sequence: Synthetic oligonucleotide
  Sense strand starting at position 989 of SEQ ID NO: 1882569
ugacuucucccaugggcuu

SEQ ID NO: 2131395 - RNA, 19 nt, Artificial Sequence
  Description of Artificial Sequence: Synthetic oligonucleotide
  Antisense strand to SEQ ID NO: 2131394
aagcccaugggagaaguca

SEQ ID NO: 2131396 - RNA, 19 nt, Artificial Sequence
  Description of Artificial Sequence: Synthetic oligonucleotide
  Sense strand starting at position 1047 of SEQ ID NO: 1882569
cucuuaugucuguguauuu

SEQ ID NO: 2131397 - RNA, 19 nt, Artificial Sequence
  Description of Artificial Sequence: Synthetic oligonucleotide
  Antisense strand to SEQ ID NO: 2131396
aaauacacagacauaagag

SEQ ID NO: 2131398 - RNA, 19 nt, Artificial Sequence
  Description of Artificial Sequence: Synthetic oligonucleotide
  Sense strand starting at position 1048 of SEQ ID NO: 1882569
ucuuaugucuguguauuua

SEQ ID NO: 2131399 - RNA, 19 nt, Artificial Sequence
  Description of Artificial Sequence: Synthetic oligonucleotide
  Antisense strand to SEQ ID NO: 2131398
uaaauacacagacauaaga

SEQ ID NO: 2131400 - RNA, 19 nt, Artificial Sequence
  Description of Artificial Sequence: Synthetic oligonucleotide
  Sense strand starting at position 1670 of SEQ ID NO: 1882569
agacauggaugucuuagca

SEQ ID NO: 2131401 - RNA, 19 nt, Artificial Sequence
  Description of Artificial Sequence: Synthetic oligonucleotide
  Antisense strand to SEQ ID NO: 2131400
ugcuaagacauccaugucu

SEQ ID NO: 2131402 - RNA, 19 nt, Artificial Sequence
  Description of Artificial Sequence: Synthetic oligonucleotide
  Sense strand starting at position 1678 of SEQ ID NO: 1882569
augucuuagcagcauuaau

SEQ ID NO: 2131403 - RNA, 19 nt, Artificial Sequence
  Description of Artificial Sequence: Synthetic oligonucleotide
  Antisense strand to SEQ ID NO: 2131402
auuaaugcugcuaagacau

SEQ ID NO: 2131404 - RNA, 19 nt, Artificial Sequence
  Description of Artificial Sequence: Synthetic oligonucleotide
  Sense strand starting at position 1982 of SEQ ID NO: 1882569
gugguagucaaaugagaaa

SEQ ID NO: 2131405 - RNA, 19 nt, Artificial Sequence
  Description of Artificial Sequence: Synthetic oligonucleotide
  Antisense strand to SEQ ID NO: 2131404
uuucucauuugacuaccac

SEQ ID NO: 2131406 - RNA, 19 nt, Artificial Sequence
  Description of Artificial Sequence: Synthetic oligonucleotide
  Sense strand starting at position 2002 of SEQ ID NO: 1882569
aagauacugguccaaguuu

SEQ ID NO: 2131407 - RNA, 19 nt, Artificial Sequence
  Description of Artificial Sequence: Synthetic oligonucleotide
  Antisense strand to SEQ ID NO: 2131406
aaacuuggaccaguaucuu

SEQ ID NO: 2131408 - RNA, 19 nt, Artificial Sequence
  Description of Artificial Sequence: Synthetic oligonucleotide
  Sense strand starting at position 2177 of SEQ ID NO: 1882569
gucgauagccacuaauaac

SEQ ID NO: 2131409 - RNA, 19 nt, Artificial Sequence
  Description of Artificial Sequence: Synthetic oligonucleotide
  Antisense strand to SEQ ID NO: 2131408
guuauuaguggcuaucgac

SEQ ID NO: 2131410 - RNA, 19 nt, Artificial Sequence
  Description of Artificial Sequence: Synthetic oligonucleotide
  Sense strand starting at position 2243 of SEQ ID NO: 1882569
ggaguucugcugcaauaau

SEQ ID NO: 2131411 - RNA, 19 nt, Artificial Sequence
  Description of Artificial Sequence: Synthetic oligonucleotide
  Antisense strand to SEQ ID NO: 2131410
auuauugcagcagaacucc

SEQ ID NO: 2131412 - RNA, 19 nt, Artificial Sequence
  Description of Artificial Sequence: Synthetic oligonucleotide
  Sense strand starting at position 2312 of SEQ ID NO: 1882569
gugcaauacauauggaaug

SEQ ID NO: 2131413 - RNA, 19 nt, Artificial Sequence
  Description of Artificial Sequence: Synthetic oligonucleotide
  Antisense strand to SEQ ID NO: 2131412
cauuccauauguauugcac

SEQ ID NO: 2131414 - RNA, 19 nt, Artificial Sequence
  Description of Artificial Sequence: Synthetic oligonucleotide
  Sense strand starting at position 2377 of SEQ ID NO: 1882569
ugaauuaacugguuauuag

SEQ ID NO: 2131415 - RNA, 19 nt, Artificial Sequence
  Description of Artificial Sequence: Synthetic oligonucleotide
  Antisense strand to SEQ ID NO: 2131414
cuaauaaccaguuaauuca

SEQ ID NO: 2131416 - RNA, 19 nt, Artificial Sequence
  Description of Artificial Sequence: Synthetic oligonucleotide
  Sense strand starting at position 2433 of SEQ ID NO: 1882569
cuccaaguccuccacguua

SEQ ID NO: 2131417 - RNA, 19 nt, Artificial Sequence
  Description of Artificial Sequence: Synthetic oligonucleotide
  Antisense strand to SEQ ID NO: 2131416
uaacguggaggacuuggag

SEQ ID NO: 2131418 - RNA, 19 nt, Artificial Sequence
  Description of Artificial Sequence: Synthetic oligonucleotide
  Sense strand starting at position 2581 of SEQ ID NO: 1882569
gucaguuuccaugaagcca

SEQ ID NO: 2131419 - RNA, 19 nt, Artificial Sequence
  Description of Artificial Sequence: Synthetic oligonucleotide
  Antisense strand to SEQ ID NO: 2131418
uggcuucauggaaacugac

SEQ ID NO: 2131420 - RNA, 19 nt, Artificial Sequence
  Description of Artificial Sequence: Synthetic oligonucleotide
  Sense strand starting at position 2589 of SEQ ID NO: 1882569
ccaugaagccacuguggau

SEQ ID NO: 2131421 - RNA, 19 nt, Artificial Sequence
  Description of Artificial Sequence: Synthetic oligonucleotide
  Antisense strand to SEQ ID NO: 2131420
auccacaguggcuucaugg

SEQ ID NO: 2131422 - RNA, 19 nt, Artificial Sequence
  Description of Artificial Sequence: Synthetic oligonucleotide
  Sense strand starting at position 2878 of SEQ ID NO: 1882569
acugucagcuucuuaugga

SEQ ID NO: 2131423 - RNA, 19 nt, Artificial Sequence
  Description of Artificial Sequence: Synthetic oligonucleotide
  Antisense strand to SEQ ID NO: 2131422
uccauaagaagcugacagu

SEQ ID NO: 2131424 - RNA, 19 nt, Artificial Sequence
  Description of Artificial Sequence: Synthetic oligonucleotide
  Sense strand starting at position 2912 of SEQ ID NO: 1882569
guuaaaucacauuaucgua

SEQ ID NO: 2131425 - RNA, 19 nt, Artificial Sequence
  Description of Artificial Sequence: Synthetic oligonucleotide
  Antisense strand to SEQ ID NO: 2131424
uacgauaaugugauuuaac

SEQ ID NO: 2131426 - RNA, 19 nt, Artificial Sequence
  Description of Artificial Sequence: Synthetic oligonucleotide
  Sense strand starting at position 2920 of SEQ ID NO: 1882569
acauuaucguaaguuagac

SEQ ID NO: 2131427 - RNA, 19 nt, Artificial Sequence
  Description of Artificial Sequence: Synthetic oligonucleotide
  Antisense strand to SEQ ID NO: 2131426
gucuaacuuacgauaaugu

SEQ ID NO: 2131428 - RNA, 19 nt, Artificial Sequence
  Description of Artificial Sequence: Synthetic oligonucleotide
  Sense strand starting at position 2926 of SEQ ID NO: 1882569
ucguaaguuagacaaagau

SEQ ID NO: 2131429 - RNA, 19 nt, Artificial Sequence
  Description of Artificial Sequence: Synthetic oligonucleotide
  Antisense strand to SEQ ID NO: 2131428
aucuuugucuaacuuacga

SEQ ID NO: 2131430 - RNA, 19 nt, Artificial Sequence
  Description of Artificial Sequence: Synthetic oligonucleotide
  Sense strand starting at position 2980 of SEQ ID NO: 1882569
auggcuaaaguuuaaucua

SEQ ID NO: 2131431 - RNA, 19 nt, Artificial Sequence
  Description of Artificial Sequence: Synthetic oligonucleotide
  Antisense strand to SEQ ID NO: 2131430
uagauuaaacuuuagccau

SEQ ID NO: 2131432 - RNA, 19 nt, Artificial Sequence
  Description of Artificial Sequence: Synthetic oligonucleotide
  Sense strand starting at position 2983 of SEQ ID NO: 1882569
gcuaaaguuuaaucuagaa

SEQ ID NO: 2131433 - RNA, 19 nt, Artificial Sequence
  Description of Artificial Sequence: Synthetic oligonucleotide
  Antisense strand to SEQ ID NO: 2131432
uucuagauuaaacuuuagc

SEQ ID NO: 2131434 - RNA, 19 nt, Artificial Sequence
  Description of Artificial Sequence: Synthetic oligonucleotide
  Sense strand starting at position 3058 of SEQ ID NO: 1882569
acaauaguguuucuacuau

SEQ ID NO: 2131435 - RNA, 19 nt, Artificial Sequence
  Description of Artificial Sequence: Synthetic oligonucleotide
  Antisense strand to SEQ ID NO: 2131434
auaguagaaacacuauugu

SEQ ID NO: 2131436 - RNA, 19 nt, Artificial Sequence
  Description of Artificial Sequence: Synthetic oligonucleotide
  Sense strand starting at position 3079 of SEQ ID NO: 1882569
cagcaugcuggaugaucua

SEQ ID NO: 2131437 - RNA, 19 nt, Artificial Sequence
  Description of Artificial Sequence: Synthetic oligonucleotide
  Antisense strand to SEQ ID NO: 2131436
uagaucauccagcaugcug

SEQ ID NO: 2131438 - RNA, 19 nt, Artificial Sequence
  Description of Artificial Sequence: Synthetic oligonucleotide
  Sense strand starting at position 3102 of SEQ ID NO: 1882569
gaguuuauacuguguauca

SEQ ID NO: 2131439 - RNA, 19 nt, Artificial Sequence
  Description of Artificial Sequence: Synthetic oligonucleotide
  Antisense strand to SEQ ID NO: 2131438
ugauacacaguauaaacuc

SEQ ID NO: 2131440 - RNA, 19 nt, Artificial Sequence
  Description of Artificial Sequence: Synthetic oligonucleotide
  Sense strand starting at position 3104 of SEQ ID NO: 1882569
guuuauacuguguaucaca

SEQ ID NO: 2131441 - RNA, 19 nt, Artificial Sequence
  Description of Artificial Sequence: Synthetic oligonucleotide
  Antisense strand to SEQ ID NO: 2131440
ugugauacacaguauaaac

SEQ ID NO: 2131442 - RNA, 19 nt, Artificial Sequence
  Description of Artificial Sequence: Synthetic oligonucleotide
  Sense strand starting at position 3123 of SEQ ID NO: 1882569
uuuacugacucgguaagau

SEQ ID NO: 2131443 - RNA, 19 nt, Artificial Sequence
  Description of Artificial Sequence: Synthetic oligonucleotide
  Antisense strand to SEQ ID NO: 2131442
aucuuaccgagucaguaaa

SEQ ID NO: 2131444 - RNA, 19 nt, Artificial Sequence
  Description of Artificial Sequence: Synthetic oligonucleotide
  Sense strand starting at position 3135 of SEQ ID NO: 1882569
guaagaucacacugucaua

SEQ ID NO: 2131445 - RNA, 19 nt, Artificial Sequence
  Description of Artificial Sequence: Synthetic oligonucleotide
  Antisense strand to SEQ ID NO: 2131444
uaugacagugugaucuuac

SEQ ID NO: 2131446 - RNA, 19 nt, Artificial Sequence
  Description of Artificial Sequence: Synthetic oligonucleotide
  Sense strand starting at position 3146 of SEQ ID NO: 1882569
cugucauaucaugauguau

SEQ ID NO: 2131447 - RNA, 19 nt, Artificial Sequence
  Description of Artificial Sequence: Synthetic oligonucleotide
  Antisense strand to SEQ ID NO: 2131446
auacaucaugauaugacag

SEQ ID NO: 2131448 - RNA, 19 nt, Artificial Sequence
  Description of Artificial Sequence: Synthetic oligonucleotide
  Sense strand starting at position 3457 of SEQ ID NO: 1882569
gcugcagugagauaugaca

SEQ ID NO: 2131449 - RNA, 19 nt, Artificial Sequence
  Description of Artificial Sequence: Synthetic oligonucleotide
  Antisense strand to SEQ ID NO: 2131448
ugucauaucucacugcagc

SEQ ID NO: 2131450 - RNA, 19 nt, Artificial Sequence
  Description of Artificial Sequence: Synthetic oligonucleotide
  Sense strand starting at position 3497 of SEQ ID NO: 1882569
ugcuacagauggucucuua

SEQ ID NO: 2131451 - RNA, 19 nt, Artificial Sequence
  Description of Artificial Sequence: Synthetic oligonucleotide
  Antisense strand to SEQ ID NO: 2131450
uaagagaccaucuguagca

SEQ ID NO: 2131452 - RNA, 19 nt, Artificial Sequence
  Description of Artificial Sequence: Synthetic oligonucleotide
  Sense strand starting at position 3656 of SEQ ID NO: 1882569
cugugugaugucugaauac

SEQ ID NO: 2131453 - RNA, 19 nt, Artificial Sequence
  Description of Artificial Sequence: Synthetic oligonucleotide
  Antisense strand to SEQ ID NO: 2131452
guauucagacaucacacag

SEQ ID NO: 2131454 - RNA, 19 nt, Artificial Sequence
  Description of Artificial Sequence: Synthetic oligonucleotide
  Sense strand starting at position 3810 of SEQ ID NO: 1882569
guuucugaaucuguaccua

SEQ ID NO: 2131455 - RNA, 19 nt, Artificial Sequence
  Description of Artificial Sequence: Synthetic oligonucleotide
  Antisense strand to SEQ ID NO: 2131454
uagguacagauucagaaac

SEQ ID NO: 2131456 - RNA, 19 nt, Artificial Sequence
  Description of Artificial Sequence: Synthetic oligonucleotide
  Sense strand starting at position 3814 of SEQ ID NO: 1882569
cugaaucuguaccuaagaa

SEQ ID NO: 2131457 - RNA, 19 nt, Artificial Sequence
  Description of Artificial Sequence: Synthetic oligonucleotide
  Antisense strand to SEQ ID NO: 2131456
uucuuagguacagauucag

SEQ ID NO: 2131458 - RNA, 19 nt, Artificial Sequence
  Description of Artificial Sequence: Synthetic oligonucleotide
  Sense strand starting at position 3843 of SEQ ID NO: 1882569
ccucuuaaauguguaacuu

SEQ ID NO: 2131459 - RNA, 19 nt, Artificial Sequence
  Description of Artificial Sequence: Synthetic oligonucleotide
  Antisense strand to SEQ ID NO: 2131458
aaguuacacauuuaagagg

SEQ ID NO: 2131460 - RNA, 19 nt, Artificial Sequence
  Description of Artificial Sequence: Synthetic oligonucleotide
  Sense strand starting at position 64 of SEQ ID NO: 1882570
ugcagaguucaagguuaga

SEQ ID NO: 2131461 - RNA, 19 nt, Artificial Sequence
  Description of Artificial Sequence: Synthetic oligonucleotide
  Antisense strand to SEQ ID NO: 2131460
ucuaaccuugaacucugca

SEQ ID NO: 2131462 - RNA, 19 nt, Artificial Sequence
  Description of Artificial Sequence: Synthetic oligonucleotide
  Sense strand starting at position 511 of SEQ ID NO: 1882570
gucuacauagauuggucau

SEQ ID NO: 2131463 - RNA, 19 nt, Artificial Sequence
  Description of Artificial Sequence: Synthetic oligonucleotide
  Antisense strand to SEQ ID NO: 2131462
augaccaaucuauguagac

SEQ ID NO: 2131464 - RNA, 19 nt, Artificial Sequence
  Description of Artificial Sequence: Synthetic oligonucleotide
  Sense strand starting at position 550 of SEQ ID NO: 1882570
agugaacuuuccucagaaa

SEQ ID NO: 2131465 - RNA, 19 nt, Artificial Sequence
  Description of Artificial Sequence: Synthetic oligonucleotide
  Antisense strand to SEQ ID NO: 2131464
uuucugaggaaaguucacu

SEQ ID NO: 2131466 - RNA, 19 nt, Artificial Sequence
  Description of Artificial Sequence: Synthetic oligonucleotide
  Sense strand starting at position 575 of SEQ ID NO: 1882570
aguacaugagguugacaau

SEQ ID NO: 2131467 - RNA, 19 nt, Artificial Sequence
  Description of Artificial Sequence: Synthetic oligonucleotide
  Antisense strand to SEQ ID NO: 2131466
auugucaaccucauguacu

SEQ ID NO: 2131468 - RNA, 19 nt, Artificial Sequence
  Description of Artificial Sequence: Synthetic oligonucleotide
  Sense strand starting at position 653 of SEQ ID NO: 1882570
cuugcuuuccaugagggua

SEQ ID NO: 2131469 - RNA, 19 nt, Artificial Sequence
  Description of Artificial Sequence: Synthetic oligonucleotide
  Antisense strand to SEQ ID NO: 2131468
uacccucauggaaagcaag

SEQ ID NO: 2131470 - RNA, 19 nt, Artificial Sequence
  Description of Artificial Sequence: Synthetic oligonucleotide
  Sense strand starting at position 661 of SEQ ID NO: 1882570
ccaugaggguacucaaugu

SEQ ID NO: 2131471 - RNA, 19 nt, Artificial Sequence
  Description of Artificial Sequence: Synthetic oligonucleotide
  Antisense strand to SEQ ID NO: 2131470
acauugaguacccucaugg

SEQ ID NO: 2131472 - RNA, 19 nt, Artificial Sequence
  Description of Artificial Sequence: Synthetic oligonucleotide
  Sense strand starting at position 665 of SEQ ID NO: 1882570
gaggguacucaaugucacu

SEQ ID NO: 2131473 - RNA, 19 nt, Artificial Sequence
  Description of Artificial Sequence: Synthetic oligonucleotide
  Antisense strand to SEQ ID NO: 2131472
agugacauugaguacccuc

SEQ ID NO: 2131474 - RNA, 19 nt, Artificial Sequence
  Description of Artificial Sequence: Synthetic oligonucleotide
  Sense strand starting at position 816 of SEQ ID NO: 1882570
ccaaguauauggccucaca

SEQ ID NO: 2131475 - RNA, 19 nt, Artificial Sequence
  Description of Artificial Sequence: Synthetic oligonucleotide
  Antisense strand to SEQ ID NO: 2131474
ugugaggccauauacuugg

SEQ ID NO: 2131476 - RNA, 19 nt, Artificial Sequence
  Description of Artificial Sequence: Synthetic oligonucleotide
  Sense strand starting at position 819 of SEQ ID NO: 1882570
aguauauggccucacaaca

SEQ ID NO: 2131477 - RNA, 19 nt, Artificial Sequence
  Description of Artificial Sequence: Synthetic oligonucleotide
  Antisense strand to SEQ ID NO: 2131476
uguugugaggccauauacu

SEQ ID NO: 2131478 - RNA, 19 nt, Artificial Sequence
  Description of Artificial Sequence: Synthetic oligonucleotide
  Sense strand starting at position 1024 of SEQ ID NO: 1882570
gucuaaguucuagaccauc

SEQ ID NO: 2131479 - RNA, 19 nt, Artificial Sequence
  Description of Artificial Sequence: Synthetic oligonucleotide
  Antisense strand to SEQ ID NO: 2131478
gauggucuagaacuuagac

SEQ ID NO: 2131480 - RNA, 19 nt, Artificial Sequence
  Description of Artificial Sequence: Synthetic oligonucleotide
  Sense strand starting at position 1255 of SEQ ID NO: 1882570
aagcauuccuggguaucau

SEQ ID NO: 2131481 - RNA, 19 nt, Artificial Sequence
  Description of Artificial Sequence: Synthetic oligonucleotide
  Antisense strand to SEQ ID NO: 2131480
augauacccaggaaugcuu

SEQ ID NO: 2131482 - RNA, 19 nt, Artificial Sequence
  Description of Artificial Sequence: Synthetic oligonucleotide
  Sense strand starting at position 1256 of SEQ ID NO: 1882570
agcauuccuggguaucaua

SEQ ID NO: 2131483 - RNA, 19 nt, Artificial Sequence
  Description of Artificial Sequence: Synthetic oligonucleotide
  Antisense strand to SEQ ID NO: 2131482
uaugauacccaggaaugcu

SEQ ID NO: 2131484 - RNA, 19 nt, Artificial Sequence
  Description of Artificial Sequence: Synthetic oligonucleotide
  Sense strand starting at position 1293 of SEQ ID NO: 1882570
agauaugauccuggcccaa

SEQ ID NO: 2131485 - RNA, 19 nt, Artificial Sequence
  Description of Artificial Sequence: Synthetic oligonucleotide
  Antisense strand to SEQ ID NO: 2131484
uugggccaggaucauaucu

SEQ ID NO: 2131486 - RNA, 19 nt, Artificial Sequence
  Description of Artificial Sequence: Synthetic oligonucleotide
  Sense strand starting at position 1295 of SEQ ID NO: 1882570
auaugauccuggcccaacu

SEQ ID NO: 2131487 - RNA, 19 nt, Artificial Sequence
  Description of Artificial Sequence: Synthetic oligonucleotide
  Antisense strand to SEQ ID NO: 2131486
aguugggccaggaucauau

SEQ ID NO: 2131488 - RNA, 19 nt, Artificial Sequence
  Description of Artificial Sequence: Synthetic oligonucleotide
  Sense strand starting at position 1410 of SEQ ID NO: 1882570
uagucuagugagggauaaa

SEQ ID NO: 2131489 - RNA, 19 nt, Artificial Sequence
  Description of Artificial Sequence: Synthetic oligonucleotide
  Antisense strand to SEQ ID NO: 2131488
uuuaucccucacuagacua

SEQ ID NO: 2131490 - RNA, 19 nt, Artificial Sequence
  Description of Artificial Sequence: Synthetic oligonucleotide
  Sense strand starting at position 1421 of SEQ ID NO: 1882570
gggauaaaugcccauagcu

SEQ ID NO: 2131491 - RNA, 19 nt, Artificial Sequence
  Description of Artificial Sequence: Synthetic oligonucleotide
  Antisense strand to SEQ ID NO: 2131490
agcuaugggcauuuauccc

SEQ ID NO: 2131492 - RNA, 19 nt, Artificial Sequence
  Description of Artificial Sequence: Synthetic oligonucleotide
  Sense strand starting at position 1539 of SEQ ID NO: 1882570
agacuuugagagcaaguuu

SEQ ID NO: 2131493 - RNA, 19 nt, Artificial Sequence
  Description of Artificial Sequence: Synthetic oligonucleotide
  Antisense strand to SEQ ID NO: 2131492
aaacuugcucucaaagucu

SEQ ID NO: 2131494 - RNA, 19 nt, Artificial Sequence
  Description of Artificial Sequence: Synthetic oligonucleotide
  Sense strand starting at position 1546 of SEQ ID NO: 1882570
gagagcaaguuuccaguua

SEQ ID NO: 2131495 - RNA, 19 nt, Artificial Sequence
  Description of Artificial Sequence: Synthetic oligonucleotide
  Antisense strand to SEQ ID NO: 2131494
uaacuggaaacuugcucuc

SEQ ID NO: 2131496 - RNA, 19 nt, Artificial Sequence
  Description of Artificial Sequence: Synthetic oligonucleotide
  Sense strand starting at position 1558 of SEQ ID NO: 1882570
ccaguuaaucuguagcaau

SEQ ID NO: 2131497 - RNA, 19 nt, Artificial Sequence
  Description of Artificial Sequence: Synthetic oligonucleotide
  Antisense strand to SEQ ID NO: 2131496
auugcuacagauuaacugg

SEQ ID NO: 2131498 - RNA, 19 nt, Artificial Sequence
  Description of Artificial Sequence: Synthetic oligonucleotide
  Sense strand starting at position 1576 of SEQ ID NO: 1882570
ucacuuugcgaugauuaca

SEQ ID NO: 2131499 - RNA, 19 nt, Artificial Sequence
  Description of Artificial Sequence: Synthetic oligonucleotide
  Antisense strand to SEQ ID NO: 2131498
uguaaucaucgcaaaguga

SEQ ID NO: 2131500 - RNA, 19 nt, Artificial Sequence
  Description of Artificial Sequence: Synthetic oligonucleotide
  Sense strand starting at position 1760 of SEQ ID NO: 1882570
gcaugcaauuucuuguuaa

SEQ ID NO: 2131501 - RNA, 19 nt, Artificial Sequence
  Description of Artificial Sequence: Synthetic oligonucleotide
  Antisense strand to SEQ ID NO: 2131500
uuaacaagaaauugcaugc

SEQ ID NO: 2131502 - RNA, 19 nt, Artificial Sequence
  Description of Artificial Sequence: Synthetic oligonucleotide
  Sense strand starting at position 2139 of SEQ ID NO: 1882570
uagaauaaacggugacuua

SEQ ID NO: 2131503 - RNA, 19 nt, Artificial Sequence
  Description of Artificial Sequence: Synthetic oligonucleotide
  Antisense strand to SEQ ID NO: 2131502
uaagucaccguuuauucua

SEQ ID NO: 2131504 - RNA, 19 nt, Artificial Sequence
  Description of Artificial Sequence: Synthetic oligonucleotide
  Sense strand starting at position 2149 of SEQ ID NO: 1882570
ggugacuuaccuuaacuac

SEQ ID NO: 2131505 - RNA, 19 nt, Artificial Sequence
  Description of Artificial Sequence: Synthetic oligonucleotide
  Antisense strand to SEQ ID NO: 2131504
guaguuaagguaagucacc

SEQ ID NO: 2131506 - RNA, 19 nt, Artificial Sequence
  Description of Artificial Sequence: Synthetic oligonucleotide
  Sense strand starting at position 2880 of SEQ ID NO: 1882570
acacauaaaugcguacaaa

SEQ ID NO: 2131507 - RNA, 19 nt, Artificial Sequence
  Description of Artificial Sequence: Synthetic oligonucleotide
  Antisense strand to SEQ ID NO: 2131506
uuuguacgcauuuaugugu

SEQ ID NO: 2131508 - RNA, 19 nt, Artificial Sequence
  Description of Artificial Sequence: Synthetic oligonucleotide
  Sense strand starting at position 2899 of SEQ ID NO: 1882570
auugcuugagucugaagaa

SEQ ID NO: 2131509 - RNA, 19 nt, Artificial Sequence
  Description of Artificial Sequence: Synthetic oligonucleotide
  Antisense strand to SEQ ID NO: 2131508
uucuucagacucaagcaau

SEQ ID NO: 2131510 - RNA, 19 nt, Artificial Sequence
  Description of Artificial Sequence: Synthetic oligonucleotide
  Sense strand starting at position 2988 of SEQ ID NO: 1882570
acugaauugguguaaguca

SEQ ID NO: 2131511 - RNA, 19 nt, Artificial Sequence
  Description of Artificial Sequence: Synthetic oligonucleotide
  Antisense strand to SEQ ID NO: 2131510
ugacuuacaccaauucagu

SEQ ID NO: 2131512 - RNA, 19 nt, Artificial Sequence
  Description of Artificial Sequence: Synthetic oligonucleotide
  Sense strand starting at position 3036 of SEQ ID NO: 1882570
auaauagcuuucuuguaag

SEQ ID NO: 2131513 - RNA, 19 nt, Artificial Sequence
  Description of Artificial Sequence: Synthetic oligonucleotide
  Antisense strand to SEQ ID NO: 2131512
cuuacaagaaagcuauuau

SEQ ID NO: 2131514 - RNA, 19 nt, Artificial Sequence
  Description of Artificial Sequence: Synthetic oligonucleotide
  Sense strand starting at position 3396 of SEQ ID NO: 1882570
guggcauuaauggaacagu

SEQ ID NO: 2131515 - RNA, 19 nt, Artificial Sequence
  Description of Artificial Sequence: Synthetic oligonucleotide
  Antisense strand to SEQ ID NO: 2131514
acuguuccauuaaugccac

SEQ ID NO: 2131516 - RNA, 19 nt, Artificial Sequence
  Description of Artificial Sequence: Synthetic oligonucleotide
  Sense strand starting at position 3399 of SEQ ID NO: 1882570
gcauuaauggaacaguuau

SEQ ID NO: 2131517 - RNA, 19 nt, Artificial Sequence
  Description of Artificial Sequence: Synthetic oligonucleotide
  Antisense strand to SEQ ID NO: 2131516
auaacuguuccauuaaugc

SEQ ID NO: 2131518 - RNA, 19 nt, Artificial Sequence
  Description of Artificial Sequence: Synthetic oligonucleotide
  Sense strand starting at position 3427 of SEQ ID NO: 1882570
ugcaauaaugccgaaauag

SEQ ID NO: 2131519 - RNA, 19 nt, Artificial Sequence
  Description of Artificial Sequence: Synthetic oligonucleotide
  Antisense strand to SEQ ID NO: 2131518
cuauuucggcauuauugca

SEQ ID NO: 2131520 - RNA, 19 nt, Artificial Sequence
  Description of Artificial Sequence: Synthetic oligonucleotide
  Sense strand starting at position 3505 of SEQ ID NO: 1882570
ucggauugaacuggcuaga

SEQ ID NO: 2131521 - RNA, 19 nt, Artificial Sequence
  Description of Artificial Sequence: Synthetic oligonucleotide
  Antisense strand to SEQ ID NO: 2131520
ucuagccaguucaauccga

SEQ ID NO: 2131522 - RNA, 19 nt, Artificial Sequence
  Description of Artificial Sequence: Synthetic oligonucleotide
  Sense strand starting at position 3532 of SEQ ID NO: 1882570
aaacgaacuuguccuguaa

SEQ ID NO: 2131523 - RNA, 19 nt, Artificial Sequence
  Description of Artificial Sequence: Synthetic oligonucleotide
  Antisense strand to SEQ ID NO: 2131522
uuacaggacaaguucguuu

SEQ ID NO: 2131524 - RNA, 19 nt, Artificial Sequence
  Description of Artificial Sequence: Synthetic oligonucleotide
  Sense strand starting at position 3715 of SEQ ID NO: 1882570
ucugaaaccugaguuugaa

SEQ ID NO: 2131525 - RNA, 19 nt, Artificial Sequence
  Description of Artificial Sequence: Synthetic oligonucleotide
  Antisense strand to SEQ ID NO: 2131524
uucaaacucagguuucaga

SEQ ID NO: 2131526 - RNA, 19 nt, Artificial Sequence
  Description of Artificial Sequence: Synthetic oligonucleotide
  Sense strand starting at position 3718 of SEQ ID NO: 1882570
gaaaccugaguuugaaauu

SEQ ID NO: 2131527 - RNA, 19 nt, Artificial Sequence
  Description of Artificial Sequence: Synthetic oligonucleotide
  Antisense strand to SEQ ID NO: 2131526
aauuucaaacucagguuuc

SEQ ID NO: 2131528 - RNA, 19 nt, Artificial Sequence
  Description of Artificial Sequence: Synthetic oligonucleotide
  Sense strand starting at position 3758 of SEQ ID NO: 1882570
ugcaaacuaccagauguaa

SEQ ID NO: 2131529 - RNA, 19 nt, Artificial Sequence
  Description of Artificial Sequence: Synthetic oligonucleotide
  Antisense strand to SEQ ID NO: 2131528
uuacaucugguaguuugca

SEQ ID NO: 2131530 - RNA, 19 nt, Artificial Sequence
  Description of Artificial Sequence: Synthetic oligonucleotide
  Sense strand starting at position 3793 of SEQ ID NO: 1882570
aucuaucugccagauaagu

SEQ ID NO: 2131531 - RNA, 19 nt, Artificial Sequence
  Description of Artificial Sequence: Synthetic oligonucleotide
  Antisense strand to SEQ ID NO: 2131530
acuuaucuggcagauagau

SEQ ID NO: 2131532 - RNA, 19 nt, Artificial Sequence
  Description of Artificial Sequence: Synthetic oligonucleotide
  Sense strand starting at position 3832 of SEQ ID NO: 1882570
aaccuacagguuugucaga

SEQ ID NO: 2131533 - RNA, 19 nt, Artificial Sequence
  Description of Artificial Sequence: Synthetic oligonucleotide
  Antisense strand to SEQ ID NO: 2131532
ucugacaaaccuguagguu

SEQ ID NO: 2131534 - RNA, 19 nt, Artificial Sequence
  Description of Artificial Sequence: Synthetic oligonucleotide
  Sense strand starting at position 3834 of SEQ ID NO: 1882570
ccuacagguuugucagacu

SEQ ID NO: 2131535 - RNA, 19 nt, Artificial Sequence
  Description of Artificial Sequence: Synthetic oligonucleotide
  Antisense strand to SEQ ID NO: 2131534
agucugacaaaccuguagg

SEQ ID NO: 2131536 - RNA, 19 nt, Artificial Sequence
  Description of Artificial Sequence: Synthetic oligonucleotide
  Sense strand starting at position 3963 of SEQ ID NO: 1882570
uuaagugggcuuuauagau

SEQ ID NO: 2131537 - RNA, 19 nt, Artificial Sequence
  Description of Artificial Sequence: Synthetic oligonucleotide
  Antisense strand to SEQ ID NO: 2131536
aucuauaaagcccacuuaa

SEQ ID NO: 2131538 - RNA, 19 nt, Artificial Sequence
  Description of Artificial Sequence: Synthetic oligonucleotide
  Sense strand starting at position 3967 of SEQ ID NO: 1882570
gugggcuuuauagaucuga

SEQ ID NO: 2131539 - RNA, 19 nt, Artificial Sequence
  Description of Artificial Sequence: Synthetic oligonucleotide
  Antisense strand to SEQ ID NO: 2131538
ucagaucuauaaagcccac

SEQ ID NO: 2131540 - RNA, 19 nt, Artificial Sequence
  Description of Artificial Sequence: Synthetic oligonucleotide
  Sense strand starting at position 392 of SEQ ID NO: 1882571
auauaagacugagacuuaa

SEQ ID NO: 2131541 - RNA, 19 nt, Artificial Sequence
  Description of Artificial Sequence: Synthetic oligonucleotide
  Antisense strand to SEQ ID NO: 2131540
uuaagucucagucuuauau

SEQ ID NO: 2131542 - RNA, 19 nt, Artificial Sequence
  Description of Artificial Sequence: Synthetic oligonucleotide
  Sense strand starting at position 437 of SEQ ID NO: 1882571
gaauaugggugguccuuga

SEQ ID NO: 2131543 - RNA, 19 nt, Artificial Sequence
  Description of Artificial Sequence: Synthetic oligonucleotide
  Antisense strand to SEQ ID NO: 2131542
ucaaggaccacccauauuc

SEQ ID NO: 2131544 - RNA, 19 nt, Artificial Sequence
  Description of Artificial Sequence: Synthetic oligonucleotide
  Sense strand starting at position 472 of SEQ ID NO: 1882571
caaggucacuuggcugaaa

SEQ ID NO: 2131545 - RNA, 19 nt, Artificial Sequence
  Description of Artificial Sequence: Synthetic oligonucleotide
  Antisense strand to SEQ ID NO: 2131544
uuucagccaagugaccuug

SEQ ID NO: 2131546 - RNA, 19 nt, Artificial Sequence
  Description of Artificial Sequence: Synthetic oligonucleotide
  Sense strand starting at position 643 of SEQ ID NO: 1882571
ucagaaagaugauaaauga

SEQ ID NO: 2131547 - RNA, 19 nt, Artificial Sequence
  Description of Artificial Sequence: Synthetic oligonucleotide
  Antisense strand to SEQ ID NO: 2131546
ucauuuaucaucuuucuga

SEQ ID NO: 2131548 - RNA, 19 nt, Artificial Sequence
  Description of Artificial Sequence: Synthetic oligonucleotide
  Sense strand starting at position 853 of SEQ ID NO: 1882571
ugagaugccucccugacuu

SEQ ID NO: 2131549 - RNA, 19 nt, Artificial Sequence
  Description of Artificial Sequence: Synthetic oligonucleotide
  Antisense strand to SEQ ID NO: 2131548
aagucagggaggcaucuca

SEQ ID NO: 2131550 - RNA, 19 nt, Artificial Sequence
  Description of Artificial Sequence: Synthetic oligonucleotide
  Sense strand starting at position 1012 of SEQ ID NO: 1882571
aguaccauuccuuagucau

SEQ ID NO: 2131551 - RNA, 19 nt, Artificial Sequence
  Description of Artificial Sequence: Synthetic oligonucleotide
  Antisense strand to SEQ ID NO: 2131550
augacuaaggaaugguacu

SEQ ID NO: 2131552 - RNA, 19 nt, Artificial Sequence
  Description of Artificial Sequence: Synthetic oligonucleotide
  Sense strand starting at position 1023 of SEQ ID NO: 1882571
uuagucauuuaacaaggaa

SEQ ID NO: 2131553 - RNA, 19 nt, Artificial Sequence
  Description of Artificial Sequence: Synthetic oligonucleotide
  Antisense strand to SEQ ID NO: 2131552
uuccuuguuaaaugacuaa

SEQ ID NO: 2131554 - RNA, 19 nt, Artificial Sequence
  Description of Artificial Sequence: Synthetic oligonucleotide
  Sense strand starting at position 1404 of SEQ ID NO: 1882571
ccuccuauccugggacaca

SEQ ID NO: 2131555 - RNA, 19 nt, Artificial Sequence
  Description of Artificial Sequence: Synthetic oligonucleotide
  Antisense strand to SEQ ID NO: 2131554
ugugucccaggauaggagg

SEQ ID NO: 2131556 - RNA, 19 nt, Artificial Sequence
  Description of Artificial Sequence: Synthetic oligonucleotide
  Sense strand starting at position 1415 of SEQ ID NO: 1882571
gggacacauuuauacaugu

SEQ ID NO: 2131557 - RNA, 19 nt, Artificial Sequence
  Description of Artificial Sequence: Synthetic oligonucleotide
  Antisense strand to SEQ ID NO: 2131556
acauguauaaauguguccc

SEQ ID NO: 2131558 - RNA, 19 nt, Artificial Sequence
  Description of Artificial Sequence: Synthetic oligonucleotide
  Sense strand starting at position 1734 of SEQ ID NO: 1882571
gugguaagucaagaucaca

SEQ ID NO: 2131559 - RNA, 19 nt, Artificial Sequence
  Description of Artificial Sequence: Synthetic oligonucleotide
  Antisense strand to SEQ ID NO: 2131558
ugugaucuugacuuaccac

SEQ ID NO: 2131560 - RNA, 19 nt, Artificial Sequence
  Description of Artificial Sequence: Synthetic oligonucleotide
  Sense strand starting at position 1778 of SEQ ID NO: 1882571
ggagcuaaacuuggucuca

SEQ ID NO: 2131561 - RNA, 19 nt, Artificial Sequence
  Description of Artificial Sequence: Synthetic oligonucleotide
  Antisense strand to SEQ ID NO: 2131560
ugagaccaaguuuagcucc

SEQ ID NO: 2131562 - RNA, 19 nt, Artificial Sequence
  Description of Artificial Sequence: Synthetic oligonucleotide
  Sense strand starting at position 1779 of SEQ ID NO: 1882571
gagcuaaacuuggucucaa

SEQ ID NO: 2131563 - RNA, 19 nt, Artificial Sequence
  Description of Artificial Sequence: Synthetic oligonucleotide
  Antisense strand to SEQ ID NO: 2131562
uugagaccaaguuuagcuc

SEQ ID NO: 2131564 - RNA, 19 nt, Artificial Sequence
  Description of Artificial Sequence: Synthetic oligonucleotide
  Sense strand starting at position 1780 of SEQ ID NO: 1882571
agcuaaacuuggucucaaa

SEQ ID NO: 2131565 - RNA, 19 nt, Artificial Sequence
  Description of Artificial Sequence: Synthetic oligonucleotide
  Antisense strand to SEQ ID NO: 2131564
uuugagaccaaguuuagcu

SEQ ID NO: 2131566 - RNA, 19 nt, Artificial Sequence
  Description of Artificial Sequence: Synthetic oligonucleotide
  Sense strand starting at position 1843 of SEQ ID NO: 1882571
ggcugagauauguaacauu

SEQ ID NO: 2131567 - RNA, 19 nt, Artificial Sequence
  Description of Artificial Sequence: Synthetic oligonucleotide
  Antisense strand to SEQ ID NO: 2131566
aauguuacauaucucagcc

SEQ ID NO: 2131568 - RNA, 19 nt, Artificial Sequence
  Description of Artificial Sequence: Synthetic oligonucleotide
  Sense strand starting at position 2044 of SEQ ID NO: 1882571
caguguaaaguugggaaau

SEQ ID NO: 2131569 - RNA, 19 nt, Artificial Sequence
  Description of Artificial Sequence: Synthetic oligonucleotide
  Antisense strand to SEQ ID NO: 2131568
auuucccaacuuuacacug

SEQ ID NO: 2131570 - RNA, 19 nt, Artificial Sequence
  Description of Artificial Sequence: Synthetic oligonucleotide
  Sense strand starting at position 2055 of SEQ ID NO: 1882571
ugggaaaucuccucuaguc

SEQ ID NO: 2131571 - RNA, 19 nt, Artificial Sequence
  Description of Artificial Sequence: Synthetic oligonucleotide
  Antisense strand to SEQ ID NO: 2131570
gacuagaggagauuuccca

SEQ ID NO: 2131572 - RNA, 19 nt, Artificial Sequence
  Description of Artificial Sequence: Synthetic oligonucleotide
  Sense strand starting at position 2057 of SEQ ID NO: 1882571
ggaaaucuccucuagucuu

SEQ ID NO: 2131573 - RNA, 19 nt, Artificial Sequence
  Description of Artificial Sequence: Synthetic oligonucleotide
  Antisense strand to SEQ ID NO: 2131572
aagacuagaggagauuucc

SEQ ID NO: 2131574 - RNA, 19 nt, Artificial Sequence
  Description of Artificial Sequence: Synthetic oligonucleotide
  Sense strand starting at position 2093 of SEQ ID NO: 1882571
gccacuucccuuuaaagag

SEQ ID NO: 2131575 - RNA, 19 nt, Artificial Sequence
  Description of Artificial Sequence: Synthetic oligonucleotide
  Antisense strand to SEQ ID NO: 2131574
cucuuuaaagggaaguggc

SEQ ID NO: 2131576 - RNA, 19 nt, Artificial Sequence
  Description of Artificial Sequence: Synthetic oligonucleotide
  Sense strand starting at position 2424 of SEQ ID NO: 1882571
auugcauuaucauuaggga

SEQ ID NO: 2131577 - RNA, 19 nt, Artificial Sequence
  Description of Artificial Sequence: Synthetic oligonucleotide
  Antisense strand to SEQ ID NO: 2131576
ucccuaaugauaaugcaau

SEQ ID NO: 2131578 - RNA, 19 nt, Artificial Sequence
  Description of Artificial Sequence: Synthetic oligonucleotide
  Sense strand starting at position 2425 of SEQ ID NO: 1882571
uugcauuaucauuagggac

SEQ ID NO: 2131579 - RNA, 19 nt, Artificial Sequence
  Description of Artificial Sequence: Synthetic oligonucleotide
  Antisense strand to SEQ ID NO: 2131578
gucccuaaugauaaugcaa

SEQ ID NO: 2131580 - RNA, 19 nt, Artificial Sequence
  Description of Artificial Sequence: Synthetic oligonucleotide
  Sense strand starting at position 2472 of SEQ ID NO: 1882571
ccuccagucuauguaaacu

SEQ ID NO: 2131581 - RNA, 19 nt, Artificial Sequence
  Description of Artificial Sequence: Synthetic oligonucleotide
  Antisense strand to SEQ ID NO: 2131580
aguuuacauagacuggagg

SEQ ID NO: 2131582 - RNA, 19 nt, Artificial Sequence
  Description of Artificial Sequence: Synthetic oligonucleotide
  Sense strand starting at position 2562 of SEQ ID NO: 1882571
cccagacaccuuugucaag

SEQ ID NO: 2131583 - RNA, 19 nt, Artificial Sequence
  Description of Artificial Sequence: Synthetic oligonucleotide
  Antisense strand to SEQ ID NO: 2131582
cuugacaaaggugucuggg

SEQ ID NO: 2131584 - RNA, 19 nt, Artificial Sequence
  Description of Artificial Sequence: Synthetic oligonucleotide
  Sense strand starting at position 2646 of SEQ ID NO: 1882571
agaguaauucccuacaagu

SEQ ID NO: 2131585 - RNA, 19 nt, Artificial Sequence
  Description of Artificial Sequence: Synthetic oligonucleotide
  Antisense strand to SEQ ID NO: 2131584
acuuguagggaauuacucu

SEQ ID NO: 2131586 - RNA, 19 nt, Artificial Sequence
  Description of Artificial Sequence: Synthetic oligonucleotide
  Sense strand starting at position 2778 of SEQ ID NO: 1882571
acuuuagauucccuguuua

SEQ ID NO: 2131587 - RNA, 19 nt, Artificial Sequence
  Description of Artificial Sequence: Synthetic oligonucleotide
  Antisense strand to SEQ ID NO: 2131586
uaaacagggaaucuaaagu

SEQ ID NO: 2131588 - RNA, 19 nt, Artificial Sequence
  Description of Artificial Sequence: Synthetic oligonucleotide
  Sense strand starting at position 2875 of SEQ ID NO: 1882571
gaagguuugcaggaaggua

SEQ ID NO: 2131589 - RNA, 19 nt, Artificial Sequence
  Description of Artificial Sequence: Synthetic oligonucleotide
  Antisense strand to SEQ ID NO: 2131588
uaccuuccugcaaaccuuc

SEQ ID NO: 2131590 - RNA, 19 nt, Artificial Sequence
  Description of Artificial Sequence: Synthetic oligonucleotide
  Sense strand starting at position 2886 of SEQ ID NO: 1882571
ggaagguaugcugggaguu

SEQ ID NO: 2131591 - RNA, 19 nt, Artificial Sequence
  Description of Artificial Sequence: Synthetic oligonucleotide
  Antisense strand to SEQ ID NO: 2131590
aacucccagcauaccuucc

SEQ ID NO: 2131592 - RNA, 19 nt, Artificial Sequence
  Description of Artificial Sequence: Synthetic oligonucleotide
  Sense strand starting at position 2887 of SEQ ID NO: 1882571
gaagguaugcugggaguuu

SEQ ID NO: 2131593 - RNA, 19 nt, Artificial Sequence
  Description of Artificial Sequence: Synthetic oligonucleotide
  Antisense strand to SEQ ID NO: 2131592
aaacucccagcauaccuuc

SEQ ID NO: 2131594 - RNA, 19 nt, Artificial Sequence
  Description of Artificial Sequence: Synthetic oligonucleotide
  Sense strand starting at position 3171 of SEQ ID NO: 1882571
gccagagccaucuucguuu

SEQ ID NO: 2131595 - RNA, 19 nt, Artificial Sequence
  Description of Artificial Sequence: Synthetic oligonucleotide
  Antisense strand to SEQ ID NO: 2131594
aaacgaagauggcucuggc

SEQ ID NO: 2131596 - RNA, 19 nt, Artificial Sequence
  Description of Artificial Sequence: Synthetic oligonucleotide
  Sense strand starting at position 3222 of SEQ ID NO: 1882571
guuucuuuacucgauaccu

SEQ ID NO: 2131597 - RNA, 19 nt, Artificial Sequence
  Description of Artificial Sequence: Synthetic oligonucleotide
  Antisense strand to SEQ ID NO: 2131596
agguaucgaguaaagaaac

SEQ ID NO: 2131598 - RNA, 19 nt, Artificial Sequence
  Description of Artificial Sequence: Synthetic oligonucleotide
  Sense strand starting at position 3265 of SEQ ID NO: 1882571
acaggucucucaguccauu

SEQ ID NO: 2131599 - RNA, 19 nt, Artificial Sequence
  Description of Artificial Sequence: Synthetic oligonucleotide
  Antisense strand to SEQ ID NO: 2131598
aauggacugagagaccugu

SEQ ID NO: 2131600 - RNA, 19 nt, Artificial Sequence
  Description of Artificial Sequence: Synthetic oligonucleotide
  Sense strand starting at position 3294 of SEQ ID NO: 1882571
caggcauucguuuauggac

SEQ ID NO: 2131601 - RNA, 19 nt, Artificial Sequence
  Description of Artificial Sequence: Synthetic oligonucleotide
  Antisense strand to SEQ ID NO: 2131600
guccauaaacgaaugccug

SEQ ID NO: 2131602 - RNA, 19 nt, Artificial Sequence
  Description of Artificial Sequence: Synthetic oligonucleotide
  Sense strand starting at position 3301 of SEQ ID NO: 1882571
ucguuuauggacgggaaca

SEQ ID NO: 2131603 - RNA, 19 nt, Artificial Sequence
  Description of Artificial Sequence: Synthetic oligonucleotide
  Antisense strand to SEQ ID NO: 2131602
uguucccguccauaaacga

SEQ ID NO: 2131604 - RNA, 19 nt, Artificial Sequence
  Description of Artificial Sequence: Synthetic oligonucleotide
  Sense strand starting at position 3444 of SEQ ID NO: 1882571
gguguuugaggaggccaau

SEQ ID NO: 2131605 - RNA, 19 nt, Artificial Sequence
  Description of Artificial Sequence: Synthetic oligonucleotide
  Antisense strand to SEQ ID NO: 2131604
auuggccuccucaaacacc

SEQ ID NO: 2131606 - RNA, 19 nt, Artificial Sequence
  Description of Artificial Sequence: Synthetic oligonucleotide
  Sense strand starting at position 3454 of SEQ ID NO: 1882571
gaggccaaucugugaagau

SEQ ID NO: 2131607 - RNA, 19 nt, Artificial Sequence
  Description of Artificial Sequence: Synthetic oligonucleotide
  Antisense strand to SEQ ID NO: 2131606
aucuucacagauuggccuc

SEQ ID NO: 2131608 - RNA, 19 nt, Artificial Sequence
  Description of Artificial Sequence: Synthetic oligonucleotide
  Sense strand starting at position 3469 of SEQ ID NO: 1882571
agauaaauauaugaaggga

SEQ ID NO: 2131609 - RNA, 19 nt, Artificial Sequence
  Description of Artificial Sequence: Synthetic oligonucleotide
  Antisense strand to SEQ ID NO: 2131608
ucccuucauauauuuaucu

SEQ ID NO: 2131610 - RNA, 19 nt, Artificial Sequence
  Description of Artificial Sequence: Synthetic oligonucleotide
  Sense strand starting at position 3496 of SEQ ID NO: 1882571
acaagagucauguagcgaa

SEQ ID NO: 2131611 - RNA, 19 nt, Artificial Sequence
  Description of Artificial Sequence: Synthetic oligonucleotide
  Antisense strand to SEQ ID NO: 2131610
uucgcuacaugacucuugu

SEQ ID NO: 2131612 - RNA, 19 nt, Artificial Sequence
  Description of Artificial Sequence: Synthetic oligonucleotide
  Sense strand starting at position 3500 of SEQ ID NO: 1882571
gagucauguagcgaauaga

SEQ ID NO: 2131613 - RNA, 19 nt, Artificial Sequence
  Description of Artificial Sequence: Synthetic oligonucleotide
  Antisense strand to SEQ ID NO: 2131612
ucuauucgcuacaugacuc

SEQ ID NO: 2131614 - RNA, 19 nt, Artificial Sequence
  Description of Artificial Sequence: Synthetic oligonucleotide
  Sense strand starting at position 3694 of SEQ ID NO: 1882571
gcgacugagcaacauagaa

SEQ ID NO: 2131615 - RNA, 19 nt, Artificial Sequence
  Description of Artificial Sequence: Synthetic oligonucleotide
  Antisense strand to SEQ ID NO: 2131614
uucuauguugcucagucgc

SEQ ID NO: 2131616 - RNA, 19 nt, Artificial Sequence
  Description of Artificial Sequence: Synthetic oligonucleotide
  Sense strand starting at position 3713 of SEQ ID NO: 1882571
agcaaagaugcugggauaa

SEQ ID NO: 2131617 - RNA, 19 nt, Artificial Sequence
  Description of Artificial Sequence: Synthetic oligonucleotide
  Antisense strand to SEQ ID NO: 2131616
uuaucccagcaucuuugcu

SEQ ID NO: 2131618 - RNA, 19 nt, Artificial Sequence
  Description of Artificial Sequence: Synthetic oligonucleotide
  Sense strand starting at position 3736 of SEQ ID NO: 1882571
aggauucuagagugggagu

SEQ ID NO: 2131619 - RNA, 19 nt, Artificial Sequence
  Description of Artificial Sequence: Synthetic oligonucleotide
  Antisense strand to SEQ ID NO: 2131618
acucccacucuagaauccu

SEQ ID NO: 2131620 - RNA, 19 nt, Artificial Sequence
  Description of Artificial Sequence: Synthetic oligonucleotide
  Sense strand starting at position 94 of SEQ ID NO: 1882572
gucuacauagauuggucau

SEQ ID NO: 2131621 - RNA, 19 nt, Artificial Sequence
  Description of Artificial Sequence: Synthetic oligonucleotide
  Antisense strand to SEQ ID NO: 2131620
augaccaaucuauguagac

SEQ ID NO: 2131622 - RNA, 19 nt, Artificial Sequence
  Description of Artificial Sequence: Synthetic oligonucleotide
  Sense strand starting at position 133 of SEQ ID NO: 1882572
agugaacuuuccucagaaa

SEQ ID NO: 2131623 - RNA, 19 nt, Artificial Sequence
  Description of Artificial Sequence: Synthetic oligonucleotide
  Antisense strand to SEQ ID NO: 2131622
uuucugaggaaaguucacu

SEQ ID NO: 2131624 - RNA, 19 nt, Artificial Sequence
  Description of Artificial Sequence: Synthetic oligonucleotide
  Sense strand starting at position 158 of SEQ ID NO: 1882572
aguacaugagguugacaau

SEQ ID NO: 2131625 - RNA, 19 nt, Artificial Sequence
  Description of Artificial Sequence: Synthetic oligonucleotide
  Antisense strand to SEQ ID NO: 2131624
auugucaaccucauguacu

SEQ ID NO: 2131626 - RNA, 19 nt, Artificial Sequence
  Description of Artificial Sequence: Synthetic oligonucleotide
  Sense strand starting at position 236 of SEQ ID NO: 1882572
cuugcuuuccaugagggua

SEQ ID NO: 2131627 - RNA, 19 nt, Artificial Sequence
  Description of Artificial Sequence: Synthetic oligonucleotide
  Antisense strand to SEQ ID NO: 2131626
uacccucauggaaagcaag

SEQ ID NO: 2131628 - RNA, 19 nt, Artificial Sequence
  Description of Artificial Sequence: Synthetic oligonucleotide
  Sense strand starting at position 244 of SEQ ID NO: 1882572
ccaugaggguacucaaugu

SEQ ID NO: 2131629 - RNA, 19 nt, Artificial Sequence
  Description of Artificial Sequence: Synthetic oligonucleotide
  Antisense strand to SEQ ID NO: 2131628
acauugaguacccucaugg

SEQ ID NO: 2131630 - RNA, 19 nt, Artificial Sequence
  Description of Artificial Sequence: Synthetic oligonucleotide
  Sense strand starting at position 248 of SEQ ID NO: 1882572
gaggguacucaaugucacu

SEQ ID NO: 2131631 - RNA, 19 nt, Artificial Sequence
  Description of Artificial Sequence: Synthetic oligonucleotide
  Antisense strand to SEQ ID NO: 2131630
agugacauugaguacccuc

SEQ ID NO: 2131632 - RNA, 19 nt, Artificial Sequence
  Description of Artificial Sequence: Synthetic oligonucleotide
  Sense strand starting at position 399 of SEQ ID NO: 1882572
ccaaguauauggccucaca

SEQ ID NO: 2131633 - RNA, 19 nt, Artificial Sequence
  Description of Artificial Sequence: Synthetic oligonucleotide
  Antisense strand to SEQ ID NO: 2131632
ugugaggccauauacuugg

SEQ ID NO: 2131634 - RNA, 19 nt, Artificial Sequence
  Description of Artificial Sequence: Synthetic oligonucleotide
  Sense strand starting at position 402 of SEQ ID NO: 1882572
aguauauggccucacaaca

SEQ ID NO: 2131635 - RNA, 19 nt, Artificial Sequence
  Description of Artificial Sequence: Synthetic oligonucleotide
  Antisense strand to SEQ ID NO: 2131634
uguugugaggccauauacu

SEQ ID NO: 2131636 - RNA, 19 nt, Artificial Sequence
  Description of Artificial Sequence: Synthetic oligonucleotide
  Sense strand starting at position 607 of SEQ ID NO: 1882572
gucuaaguucuagaccauc

SEQ ID NO: 2131637 - RNA, 19 nt, Artificial Sequence
  Description of Artificial Sequence: Synthetic oligonucleotide
  Antisense strand to SEQ ID NO: 2131636
gauggucuagaacuuagac

SEQ ID NO: 2131638 - RNA, 19 nt, Artificial Sequence
  Description of Artificial Sequence: Synthetic oligonucleotide
  Sense strand starting at position 838 of SEQ ID NO: 1882572
aagcauuccuggguaucau

SEQ ID NO: 2131639 - RNA, 19 nt, Artificial Sequence
  Description of Artificial Sequence: Synthetic oligonucleotide
  Antisense strand to SEQ ID NO: 2131638
augauacccaggaaugcuu

SEQ ID NO: 2131640 - RNA, 19 nt, Artificial Sequence
  Description of Artificial Sequence: Synthetic oligonucleotide
  Sense strand starting at position 839 of SEQ ID NO: 1882572
agcauuccuggguaucaua

SEQ ID NO: 2131641 - RNA, 19 nt, Artificial Sequence
  Description of Artificial Sequence: Synthetic oligonucleotide
  Antisense strand to SEQ ID NO: 2131640
uaugauacccaggaaugcu

SEQ ID NO: 2131642 - RNA, 19 nt, Artificial Sequence
  Description of Artificial Sequence: Synthetic oligonucleotide
  Sense strand starting at position 876 of SEQ ID NO: 1882572
agauaugauccuggcccaa

SEQ ID NO: 2131643 - RNA, 19 nt, Artificial Sequence
  Description of Artificial Sequence: Synthetic oligonucleotide
  Antisense strand to SEQ ID NO: 2131642
uugggccaggaucauaucu

SEQ ID NO: 2131644 - RNA, 19 nt, Artificial Sequence
  Description of Artificial Sequence: Synthetic oligonucleotide
  Sense strand starting at position 878 of SEQ ID NO: 1882572
auaugauccuggcccaacu

SEQ ID NO: 2131645 - RNA, 19 nt, Artificial Sequence
  Description of Artificial Sequence: Synthetic oligonucleotide
  Antisense strand to SEQ ID NO: 2131644
aguugggccaggaucauau

SEQ ID NO: 2131646 - RNA, 19 nt, Artificial Sequence
  Description of Artificial Sequence: Synthetic oligonucleotide
  Sense strand starting at position 993 of SEQ ID NO: 1882572
uagucuagugagggauaaa

SEQ ID NO: 2131647 - RNA, 19 nt, Artificial Sequence
  Description of Artificial Sequence: Synthetic oligonucleotide
  Antisense strand to SEQ ID NO: 2131646
uuuaucccucacuagacua

SEQ ID NO: 2131648 - RNA, 19 nt, Artificial Sequence
  Description of Artificial Sequence: Synthetic oligonucleotide
  Sense strand starting at position 1004 of SEQ ID NO: 1882572
gggauaaaugcccauagcu

SEQ ID NO: 2131649 - RNA, 19 nt, Artificial Sequence
  Description of Artificial Sequence: Synthetic oligonucleotide
  Antisense strand to SEQ ID NO: 2131648
agcuaugggcauuuauccc

SEQ ID NO: 2131650 - RNA, 19 nt, Artificial Sequence
  Description of Artificial Sequence: Synthetic oligonucleotide
  Sense strand starting at position 1122 of SEQ ID NO: 1882572
agacuuugagagcaaguuu

SEQ ID NO: 2131651 - RNA, 19 nt, Artificial Sequence
  Description of Artificial Sequence: Synthetic oligonucleotide
  Antisense strand to SEQ ID NO: 2131650
aaacuugcucucaaagucu

SEQ ID NO: 2131652 - RNA, 19 nt, Artificial Sequence
  Description of Artificial Sequence: Synthetic oligonucleotide
  Sense strand starting at position 1141 of SEQ ID NO: 1882572
ccaguuaaucuguagcaau

SEQ ID NO: 2131653 - RNA, 19 nt, Artificial Sequence
  Description of Artificial Sequence: Synthetic oligonucleotide
  Antisense strand to SEQ ID NO: 2131652
auugcuacagauuaacugg

SEQ ID NO: 2131654 - RNA, 19 nt, Artificial Sequence
  Description of Artificial Sequence: Synthetic oligonucleotide
  Sense strand starting at position 1159 of SEQ ID NO: 1882572
ucacuuugcgaugauuaca

SEQ ID NO: 2131655 - RNA, 19 nt, Artificial Sequence
  Description of Artificial Sequence: Synthetic oligonucleotide
  Antisense strand to SEQ ID NO: 2131654
uguaaucaucgcaaaguga

SEQ ID NO: 2131656 - RNA, 19 nt, Artificial Sequence
  Description of Artificial Sequence: Synthetic oligonucleotide
  Sense strand starting at position 1343 of SEQ ID NO: 1882572
gcaugcaauuucuuguuaa

SEQ ID NO: 2131657 - RNA, 19 nt, Artificial Sequence
  Description of Artificial Sequence: Synthetic oligonucleotide
  Antisense strand to SEQ ID NO: 2131656
uuaacaagaaauugcaugc

SEQ ID NO: 2131658 - RNA, 19 nt, Artificial Sequence
  Description of Artificial Sequence: Synthetic oligonucleotide
  Sense strand starting at position 1722 of SEQ ID NO: 1882572
uagaauaaacggugacuua

SEQ ID NO: 2131659 - RNA, 19 nt, Artificial Sequence
  Description of Artificial Sequence: Synthetic oligonucleotide
  Antisense strand to SEQ ID NO: 2131658
uaagucaccguuuauucua

SEQ ID NO: 2131660 - RNA, 19 nt, Artificial Sequence
  Description of Artificial Sequence: Synthetic oligonucleotide
  Sense strand starting at position 1732 of SEQ ID NO: 1882572
ggugacuuaccuuaacuac

SEQ ID NO: 2131661 - RNA, 19 nt, Artificial Sequence
  Description of Artificial Sequence: Synthetic oligonucleotide
  Antisense strand to SEQ ID NO: 2131660
guaguuaagguaagucacc

SEQ ID NO: 2131662 - RNA, 19 nt, Artificial Sequence
  Description of Artificial Sequence: Synthetic oligonucleotide
  Sense strand starting at position 2463 of SEQ ID NO: 1882572
acacauaaaugcguacaaa

SEQ ID NO: 2131663 - RNA, 19 nt, Artificial Sequence
  Description of Artificial Sequence: Synthetic oligonucleotide
  Antisense strand to SEQ ID NO: 2131662
uuuguacgcauuuaugugu

SEQ ID NO: 2131664 - RNA, 19 nt, Artificial Sequence
  Description of Artificial Sequence: Synthetic oligonucleotide
  Sense strand starting at position 2482 of SEQ ID NO: 1882572
auugcuugagucugaagaa

SEQ ID NO: 2131665 - RNA, 19 nt, Artificial Sequence
  Description of Artificial Sequence: Synthetic oligonucleotide
  Antisense strand to SEQ ID NO: 2131664
uucuucagacucaagcaau

SEQ ID NO: 2131666 - RNA, 19 nt, Artificial Sequence
  Description of Artificial Sequence: Synthetic oligonucleotide
  Sense strand starting at position 2571 of SEQ ID NO: 1882572
acugaauugguguaaguca

SEQ ID NO: 2131667 - RNA, 19 nt, Artificial Sequence
  Description of Artificial Sequence: Synthetic oligonucleotide
  Antisense strand to SEQ ID NO: 2131666
ugacuuacaccaauucagu

SEQ ID NO: 2131668 - RNA, 19 nt, Artificial Sequence
  Description of Artificial Sequence: Synthetic oligonucleotide
  Sense strand starting at position 2619 of SEQ ID NO: 1882572
auaauagcuuucuuguaag

SEQ ID NO: 2131669 - RNA, 19 nt, Artificial Sequence
  Description of Artificial Sequence: Synthetic oligonucleotide
  Antisense strand to SEQ ID NO: 2131668
cuuacaagaaagcuauuau

SEQ ID NO: 2131670 - RNA, 19 nt, Artificial Sequence
  Description of Artificial Sequence: Synthetic oligonucleotide
  Sense strand starting at position 2979 of SEQ ID NO: 1882572
guggcauuaauggaacagu

SEQ ID NO: 2131671 - RNA, 19 nt, Artificial Sequence
  Description of Artificial Sequence: Synthetic oligonucleotide
  Antisense strand to SEQ ID NO: 2131670
acuguuccauuaaugccac

SEQ ID NO: 2131672 - RNA, 19 nt, Artificial Sequence
  Description of Artificial Sequence: Synthetic oligonucleotide
  Sense strand starting at position 2982 of SEQ ID NO: 1882572
gcauuaauggaacaguuau

SEQ ID NO: 2131673 - RNA, 19 nt, Artificial Sequence
  Description of Artificial Sequence: Synthetic oligonucleotide
  Antisense strand to SEQ ID NO: 2131672
auaacuguuccauuaaugc

SEQ ID NO: 2131674 - RNA, 19 nt, Artificial Sequence
  Description of Artificial Sequence: Synthetic oligonucleotide
  Sense strand starting at position 3010 of SEQ ID NO: 1882572
ugcaauaaugccgaaauag

SEQ ID NO: 2131675 - RNA, 19 nt, Artificial Sequence
  Description of Artificial Sequence: Synthetic oligonucleotide
  Antisense strand to SEQ ID NO: 2131674
cuauuucggcauuauugca

SEQ ID NO: 2131676 - RNA, 19 nt, Artificial Sequence
  Description of Artificial Sequence: Synthetic oligonucleotide
  Sense strand starting at position 3088 of SEQ ID NO: 1882572
ucggauugaacuggcuaga

SEQ ID NO: 2131677 - RNA, 19 nt, Artificial Sequence
  Description of Artificial Sequence: Synthetic oligonucleotide
  Antisense strand to SEQ ID NO: 2131676
ucuagccaguucaauccga

SEQ ID NO: 2131678 - RNA, 19 nt, Artificial Sequence
  Description of Artificial Sequence: Synthetic oligonucleotide
  Sense strand starting at position 3115 of SEQ ID NO: 1882572
aaacgaacuuguccuguaa

SEQ ID NO: 2131679 - RNA, 19 nt, Artificial Sequence
  Description of Artificial Sequence: Synthetic oligonucleotide
  Antisense strand to SEQ ID NO: 2131678
uuacaggacaaguucguuu

SEQ ID NO: 2131680 - RNA, 19 nt, Artificial Sequence
  Description of Artificial Sequence: Synthetic oligonucleotide
  Sense strand starting at position 3298 of SEQ ID NO: 1882572
ucugaaaccugaguuugaa

SEQ ID NO: 2131681 - RNA, 19 nt, Artificial Sequence
  Description of Artificial Sequence: Synthetic oligonucleotide
  Antisense strand to SEQ ID NO: 2131680
uucaaacucagguuucaga

SEQ ID NO: 2131682 - RNA, 19 nt, Artificial Sequence
  Description of Artificial Sequence: Synthetic oligonucleotide
  Sense strand starting at position 3301 of SEQ ID NO: 1882572
gaaaccugaguuugaaauu

SEQ ID NO: 2131683 - RNA, 19 nt, Artificial Sequence
  Description of Artificial Sequence: Synthetic oligonucleotide
  Antisense strand to SEQ ID NO: 2131682
aauuucaaacucagguuuc

SEQ ID NO: 2131684 - RNA, 19 nt, Artificial Sequence
  Description of Artificial Sequence: Synthetic oligonucleotide
  Sense strand starting at position 3341 of SEQ ID NO: 1882572
ugcaaacuaccagauguaa

SEQ ID NO: 2131685 - RNA, 19 nt, Artificial Sequence
  Description of Artificial Sequence: Synthetic oligonucleotide
  Antisense strand to SEQ ID NO: 2131684
uuacaucugguaguuugca

SEQ ID NO: 2131686 - RNA, 19 nt, Artificial Sequence
  Description of Artificial Sequence: Synthetic oligonucleotide
  Sense strand starting at position 3376 of SEQ ID NO: 1882572
aucuaucugccagauaagu

SEQ ID NO: 2131687 - RNA, 19 nt, Artificial Sequence
  Description of Artificial Sequence: Synthetic oligonucleotide
  Antisense strand to SEQ ID NO: 2131686
acuuaucuggcagauagau

SEQ ID NO: 2131688 - RNA, 19 nt, Artificial Sequence
  Description of Artificial Sequence: Synthetic oligonucleotide
  Sense strand starting at position 3415 of SEQ ID NO: 1882572
aaccuacagguuugucaga

SEQ ID NO: 2131689 - RNA, 19 nt, Artificial Sequence
  Description of Artificial Sequence: Synthetic oligonucleotide
  Antisense strand to SEQ ID NO: 2131688
ucugacaaaccuguagguu

SEQ ID NO: 2131690 - RNA, 19 nt, Artificial Sequence
  Description of Artificial Sequence: Synthetic oligonucleotide
  Sense strand starting at position 3417 of SEQ ID NO: 1882572
ccuacagguuugucagacu

SEQ ID NO: 2131691 - RNA, 19 nt, Artificial Sequence
  Description of Artificial Sequence: Synthetic oligonucleotide
  Antisense strand to SEQ ID NO: 2131690
agucugacaaaccuguagg

SEQ ID NO: 2131692 - RNA, 19 nt, Artificial Sequence
  Description of Artificial Sequence: Synthetic oligonucleotide
  Sense strand starting at position 3546 of SEQ ID NO: 1882572
uuaagugggcuuuauagau

SEQ ID NO: 2131693 - RNA, 19 nt, Artificial Sequence
  Description of Artificial Sequence: Synthetic oligonucleotide
  Antisense strand to SEQ ID NO: 2131692
aucuauaaagcccacuuaa

SEQ ID NO: 2131694 - RNA, 19 nt, Artificial Sequence
  Description of Artificial Sequence: Synthetic oligonucleotide
  Sense strand starting at position 3550 of SEQ ID NO: 1882572
gugggcuuuauagaucuga

SEQ ID NO: 2131695 - RNA, 19 nt, Artificial Sequence
  Description of Artificial Sequence: Synthetic oligonucleotide
  Antisense strand to SEQ ID NO: 2131694
ucagaucuauaaagcccac

SEQ ID NO: 2131696 - RNA, 19 nt, Artificial Sequence
  Description of Artificial Sequence: Synthetic oligonucleotide
  Sense strand starting at position 3691 of SEQ ID NO: 1882572
caguauugagacugauaca

SEQ ID NO: 2131697 - RNA, 19 nt, Artificial Sequence
  Description of Artificial Sequence: Synthetic oligonucleotide
  Antisense strand to SEQ ID NO: 2131696
uguaucagucucaauacug

SEQ ID NO: 2131698 - RNA, 19 nt, Artificial Sequence
  Description of Artificial Sequence: Synthetic oligonucleotide
  Sense strand starting at position 3899 of SEQ ID NO: 1882572
aagcuaaguguacaacaga

SEQ ID NO: 2131699 - RNA, 19 nt, Artificial Sequence
  Description of Artificial Sequence: Synthetic oligonucleotide
  Antisense strand to SEQ ID NO: 2131698
ucuguuguacacuuagcuu

SEQ ID NO: 2131700 - RNA, 19 nt, Artificial Sequence
  Description of Artificial Sequence: Synthetic oligonucleotide
  Sense strand starting at position 227 of SEQ ID NO: 1882573
uagaauaaacggugacuua

SEQ ID NO: 2131701 - RNA, 19 nt, Artificial Sequence
  Description of Artificial Sequence: Synthetic oligonucleotide
  Antisense strand to SEQ ID NO: 2131700
uaagucaccguuuauucua

SEQ ID NO: 2131702 - RNA, 19 nt, Artificial Sequence
  Description of Artificial Sequence: Synthetic oligonucleotide
  Sense strand starting at position 237 of SEQ ID NO: 1882573
ggugacuuaccuuaacuac

SEQ ID NO: 2131703 - RNA, 19 nt, Artificial Sequence
  Description of Artificial Sequence: Synthetic oligonucleotide
  Antisense strand to SEQ ID NO: 2131702
guaguuaagguaagucacc

SEQ ID NO: 2131704 - RNA, 19 nt, Artificial Sequence
  Description of Artificial Sequence: Synthetic oligonucleotide
  Sense strand starting at position 489 of SEQ ID NO: 1882573
guugucaucauguacagca

SEQ ID NO: 2131705 - RNA, 19 nt, Artificial Sequence
  Description of Artificial Sequence: Synthetic oligonucleotide
  Antisense strand to SEQ ID NO: 2131704
ugcuguacaugaugacaac

SEQ ID NO: 2131706 - RNA, 19 nt, Artificial Sequence
  Description of Artificial Sequence: Synthetic oligonucleotide
  Sense strand starting at position 529 of SEQ ID NO: 1882573
cuacuaaucuuuguuguau

SEQ ID NO: 2131707 - RNA, 19 nt, Artificial Sequence
  Description of Artificial Sequence: Synthetic oligonucleotide
  Antisense strand to SEQ ID NO: 2131706
auacaacaaagauuaguag

SEQ ID NO: 2131708 - RNA, 19 nt, Artificial Sequence
  Description of Artificial Sequence: Synthetic oligonucleotide
  Sense strand starting at position 541 of SEQ ID NO: 1882573
guuguauaccaacgucaaa

SEQ ID NO: 2131709 - RNA, 19 nt, Artificial Sequence
  Description of Artificial Sequence: Synthetic oligonucleotide
  Antisense strand to SEQ ID NO: 2131708
uuugacguugguauacaac

SEQ ID NO: 2131710 - RNA, 19 nt, Artificial Sequence
  Description of Artificial Sequence: Synthetic oligonucleotide
  Sense strand starting at position 738 of SEQ ID NO: 1882573
gccuuaccuuaauuagguu

SEQ ID NO: 2131711 - RNA, 19 nt, Artificial Sequence
  Description of Artificial Sequence: Synthetic oligonucleotide
  Antisense strand to SEQ ID NO: 2131710
aaccuaauuaagguaaggc

SEQ ID NO: 2131712 - RNA, 19 nt, Artificial Sequence
  Description of Artificial Sequence: Synthetic oligonucleotide
  Sense strand starting at position 916 of SEQ ID NO: 1882573
gaggguuaucuuugcacua

SEQ ID NO: 2131713 - RNA, 19 nt, Artificial Sequence
  Description of Artificial Sequence: Synthetic oligonucleotide
  Antisense strand to SEQ ID NO: 2131712
uagugcaaagauaacccuc

SEQ ID NO: 2131714 - RNA, 19 nt, Artificial Sequence
  Description of Artificial Sequence: Synthetic oligonucleotide
  Sense strand starting at position 968 of SEQ ID NO: 1882573
acacauaaaugcguacaaa

SEQ ID NO: 2131715 - RNA, 19 nt, Artificial Sequence
  Description of Artificial Sequence: Synthetic oligonucleotide
  Antisense strand to SEQ ID NO: 2131714
uuuguacgcauuuaugugu

SEQ ID NO: 2131716 - RNA, 19 nt, Artificial Sequence
  Description of Artificial Sequence: Synthetic oligonucleotide
  Sense strand starting at position 987 of SEQ ID NO: 1882573
auugcuugagucugaagaa

SEQ ID NO: 2131717 - RNA, 19 nt, Artificial Sequence
  Description of Artificial Sequence: Synthetic oligonucleotide
  Antisense strand to SEQ ID NO: 2131716
uucuucagacucaagcaau

SEQ ID NO: 2131718 - RNA, 19 nt, Artificial Sequence
  Description of Artificial Sequence: Synthetic oligonucleotide
  Sense strand starting at position 1076 of SEQ ID NO: 1882573
acugaauugguguaaguca

SEQ ID NO: 2131719 - RNA, 19 nt, Artificial Sequence
  Description of Artificial Sequence: Synthetic oligonucleotide
  Antisense strand to SEQ ID NO: 2131718
ugacuuacaccaauucagu

SEQ ID NO: 2131720 - RNA, 19 nt, Artificial Sequence
  Description of Artificial Sequence: Synthetic oligonucleotide
  Sense strand starting at position 1124 of SEQ ID NO: 1882573
auaauagcuuucuuguaag

SEQ ID NO: 2131721 - RNA, 19 nt, Artificial Sequence
  Description of Artificial Sequence: Synthetic oligonucleotide
  Antisense strand to SEQ ID NO: 2131720
cuuacaagaaagcuauuau

SEQ ID NO: 2131722 - RNA, 19 nt, Artificial Sequence
  Description of Artificial Sequence: Synthetic oligonucleotide
  Sense strand starting at position 1484 of SEQ ID NO: 1882573
guggcauuaauggaacagu

SEQ ID NO: 2131723 - RNA, 19 nt, Artificial Sequence
  Description of Artificial Sequence: Synthetic oligonucleotide
  Antisense strand to SEQ ID NO: 2131722
acuguuccauuaaugccac

SEQ ID NO: 2131724 - RNA, 19 nt, Artificial Sequence
  Description of Artificial Sequence: Synthetic oligonucleotide
  Sense strand starting at position 1487 of SEQ ID NO: 1882573
gcauuaauggaacaguuau

SEQ ID NO: 2131725 - RNA, 19 nt, Artificial Sequence
  Description of Artificial Sequence: Synthetic oligonucleotide
  Antisense strand to SEQ ID NO: 2131724
auaacuguuccauuaaugc

SEQ ID NO: 2131726 - RNA, 19 nt, Artificial Sequence
  Description of Artificial Sequence: Synthetic oligonucleotide
  Sense strand starting at position 1515 of SEQ ID NO: 1882573
ugcaauaaugccgaaauag

SEQ ID NO: 2131727 - RNA, 19 nt, Artificial Sequence
  Description of Artificial Sequence: Synthetic oligonucleotide
  Antisense strand to SEQ ID NO: 2131726
cuauuucggcauuauugca

SEQ ID NO: 2131728 - RNA, 19 nt, Artificial Sequence
  Description of Artificial Sequence: Synthetic oligonucleotide
  Sense strand starting at position 1593 of SEQ ID NO: 1882573
ucggauugaacuggcuaga

SEQ ID NO: 2131729 - RNA, 19 nt, Artificial Sequence
  Description of Artificial Sequence: Synthetic oligonucleotide
  Antisense strand to SEQ ID NO: 2131728
ucuagccaguucaauccga

SEQ ID NO: 2131730 - RNA, 19 nt, Artificial Sequence
  Description of Artificial Sequence: Synthetic oligonucleotide
  Sense strand starting at position 1620 of SEQ ID NO: 1882573
aaacgaacuuguccuguaa

SEQ ID NO: 2131731 - RNA, 19 nt, Artificial Sequence
  Description of Artificial Sequence: Synthetic oligonucleotide
  Antisense strand to SEQ ID NO: 2131730
uuacaggacaaguucguuu

SEQ ID NO: 2131732 - RNA, 19 nt, Artificial Sequence
  Description of Artificial Sequence: Synthetic oligonucleotide
  Sense strand starting at position 1664 of SEQ ID NO: 1882573
gcucaagaguagguugauu

SEQ ID NO: 2131733 - RNA, 19 nt, Artificial Sequence
  Description of Artificial Sequence: Synthetic oligonucleotide
  Antisense strand to SEQ ID NO: 2131732
aaucaaccuacucuugagc

SEQ ID NO: 2131734 - RNA, 19 nt, Artificial Sequence
  Description of Artificial Sequence: Synthetic oligonucleotide
  Sense strand starting at position 1803 of SEQ ID NO: 1882573
ucugaaaccugaguuugaa

SEQ ID NO: 2131735 - RNA, 19 nt, Artificial Sequence
  Description of Artificial Sequence: Synthetic oligonucleotide
  Antisense strand to SEQ ID NO: 2131734
uucaaacucagguuucaga

SEQ ID NO: 2131736 - RNA, 19 nt, Artificial Sequence
  Description of Artificial Sequence: Synthetic oligonucleotide
  Sense strand starting at position 1806 of SEQ ID NO: 1882573
gaaaccugaguuugaaauu

SEQ ID NO: 2131737 - RNA, 19 nt, Artificial Sequence
  Description of Artificial Sequence: Synthetic oligonucleotide
  Antisense strand to SEQ ID NO: 2131736
aauuucaaacucagguuuc

SEQ ID NO: 2131738 - RNA, 19 nt, Artificial Sequence
  Description of Artificial Sequence: Synthetic oligonucleotide
  Sense strand starting at position 1846 of SEQ ID NO: 1882573
ugcaaacuaccagauguaa

SEQ ID NO: 2131739 - RNA, 19 nt, Artificial Sequence
  Description of Artificial Sequence: Synthetic oligonucleotide
  Antisense strand to SEQ ID NO: 2131738
uuacaucugguaguuugca

SEQ ID NO: 2131740 - RNA, 19 nt, Artificial Sequence
  Description of Artificial Sequence: Synthetic oligonucleotide
  Sense strand starting at position 1858 of SEQ ID NO: 1882573
gauguaauguggcucucca

SEQ ID NO: 2131741 - RNA, 19 nt, Artificial Sequence
  Description of Artificial Sequence: Synthetic oligonucleotide
  Antisense strand to SEQ ID NO: 2131740
uggagagccacauuacauc

SEQ ID NO: 2131742 - RNA, 19 nt, Artificial Sequence
  Description of Artificial Sequence: Synthetic oligonucleotide
  Sense strand starting at position 1881 of SEQ ID NO: 1882573
aucuaucugccagauaagu

SEQ ID NO: 2131743 - RNA, 19 nt, Artificial Sequence
  Description of Artificial Sequence: Synthetic oligonucleotide
  Antisense strand to SEQ ID NO: 2131742
acuuaucuggcagauagau

SEQ ID NO: 2131744 - RNA, 19 nt, Artificial Sequence
  Description of Artificial Sequence: Synthetic oligonucleotide
  Sense strand starting at position 1920 of SEQ ID NO: 1882573
aaccuacagguuugucaga

SEQ ID NO: 2131745 - RNA, 19 nt, Artificial Sequence
  Description of Artificial Sequence: Synthetic oligonucleotide
  Antisense strand to SEQ ID NO: 2131744
ucugacaaaccuguagguu

SEQ ID NO: 2131746 - RNA, 19 nt, Artificial Sequence
  Description of Artificial Sequence: Synthetic oligonucleotide
  Sense strand starting at position 1922 of SEQ ID NO: 1882573
ccuacagguuugucagacu

SEQ ID NO: 2131747 - RNA, 19 nt, Artificial Sequence
  Description of Artificial Sequence: Synthetic oligonucleotide
  Antisense strand to SEQ ID NO: 2131746
agucugacaaaccuguagg

SEQ ID NO: 2131748 - RNA, 19 nt, Artificial Sequence
  Description of Artificial Sequence: Synthetic oligonucleotide
  Sense strand starting at position 2051 of SEQ ID NO: 1882573
uuaagugggcuuuauagau

SEQ ID NO: 2131749 - RNA, 19 nt, Artificial Sequence
  Description of Artificial Sequence: Synthetic oligonucleotide
  Antisense strand to SEQ ID NO: 2131748
aucuauaaagcccacuuaa

SEQ ID NO: 2131750 - RNA, 19 nt, Artificial Sequence
  Description of Artificial Sequence: Synthetic oligonucleotide
  Sense strand starting at position 2055 of SEQ ID NO: 1882573
gugggcuuuauagaucuga

SEQ ID NO: 2131751 - RNA, 19 nt, Artificial Sequence
  Description of Artificial Sequence: Synthetic oligonucleotide
  Antisense strand to SEQ ID NO: 2131750
ucagaucuauaaagcccac

SEQ ID NO: 2131752 - RNA, 19 nt, Artificial Sequence
  Description of Artificial Sequence: Synthetic oligonucleotide
  Sense strand starting at position 2196 of SEQ ID NO: 1882573
caguauugagacugauaca

SEQ ID NO: 2131753 - RNA, 19 nt, Artificial Sequence
  Description of Artificial Sequence: Synthetic oligonucleotide
  Antisense strand to SEQ ID NO: 2131752
uguaucagucucaauacug

SEQ ID NO: 2131754 - RNA, 19 nt, Artificial Sequence
  Description of Artificial Sequence: Synthetic oligonucleotide
  Sense strand starting at position 2334 of SEQ ID NO: 1882573
augcuuaaacgcgacacau

SEQ ID NO: 2131755 - RNA, 19 nt, Artificial Sequence
  Description of Artificial Sequence: Synthetic oligonucleotide
  Antisense strand to SEQ ID NO: 2131754
augugucgcguuuaagcau

SEQ ID NO: 2131756 - RNA, 19 nt, Artificial Sequence
  Description of Artificial Sequence: Synthetic oligonucleotide
  Sense strand starting at position 2336 of SEQ ID NO: 1882573
gcuuaaacgcgacacauca

SEQ ID NO: 2131757 - RNA, 19 nt, Artificial Sequence
  Description of Artificial Sequence: Synthetic oligonucleotide
  Antisense strand to SEQ ID NO: 2131756
ugaugugucgcguuuaagc

SEQ ID NO: 2131758 - RNA, 19 nt, Artificial Sequence
  Description of Artificial Sequence: Synthetic oligonucleotide
  Sense strand starting at position 2404 of SEQ ID NO: 1882573
aagcuaaguguacaacaga

SEQ ID NO: 2131759 - RNA, 19 nt, Artificial Sequence
  Description of Artificial Sequence: Synthetic oligonucleotide
  Antisense strand to SEQ ID NO: 2131758
ucuguuguacacuuagcuu

SEQ ID NO: 2131760 - RNA, 19 nt, Artificial Sequence
  Description of Artificial Sequence: Synthetic oligonucleotide
  Sense strand starting at position 2561 of SEQ ID NO: 1882573
uugaaucuugaacgcacua

SEQ ID NO: 2131761 - RNA, 19 nt, Artificial Sequence
  Description of Artificial Sequence: Synthetic oligonucleotide
  Antisense strand to SEQ ID NO: 2131760
uagugcguucaagauucaa

SEQ ID NO: 2131762 - RNA, 19 nt, Artificial Sequence
  Description of Artificial Sequence: Synthetic oligonucleotide
  Sense strand starting at position 2589 of SEQ ID NO: 1882573
agcauugacuuguuaaaga

SEQ ID NO: 2131763 - RNA, 19 nt, Artificial Sequence
  Description of Artificial Sequence: Synthetic oligonucleotide
  Antisense strand to SEQ ID NO: 2131762
ucuuuaacaagucaaugcu

SEQ ID NO: 2131764 - RNA, 19 nt, Artificial Sequence
  Description of Artificial Sequence: Synthetic oligonucleotide
  Sense strand starting at position 2608 of SEQ ID NO: 1882573
accagauacucgucacgaa

SEQ ID NO: 2131765 - RNA, 19 nt, Artificial Sequence
  Description of Artificial Sequence: Synthetic oligonucleotide
  Antisense strand to SEQ ID NO: 2131764
uucgugacgaguaucuggu

SEQ ID NO: 2131766 - RNA, 19 nt, Artificial Sequence
  Description of Artificial Sequence: Synthetic oligonucleotide
  Sense strand starting at position 2609 of SEQ ID NO: 1882573
ccagauacucgucacgaau

SEQ ID NO: 2131767 - RNA, 19 nt, Artificial Sequence
  Description of Artificial Sequence: Synthetic oligonucleotide
  Antisense strand to SEQ ID NO: 2131766
auucgugacgaguaucugg

SEQ ID NO: 2131768 - RNA, 19 nt, Artificial Sequence
  Description of Artificial Sequence: Synthetic oligonucleotide
  Sense strand starting at position 2750 of SEQ ID NO: 1882573
cacgcaugccgguauuuaa

SEQ ID NO: 2131769 - RNA, 19 nt, Artificial Sequence
  Description of Artificial Sequence: Synthetic oligonucleotide
  Antisense strand to SEQ ID NO: 2131768
uuaaauaccggcaugcgug

SEQ ID NO: 2131770 - RNA, 19 nt, Artificial Sequence
  Description of Artificial Sequence: Synthetic oligonucleotide
  Sense strand starting at position 2842 of SEQ ID NO: 1882573
gggaguuucuguuuccgga

SEQ ID NO: 2131771 - RNA, 19 nt, Artificial Sequence
  Description of Artificial Sequence: Synthetic oligonucleotide
  Antisense strand to SEQ ID NO: 2131770
uccggaaacagaaacuccc

SEQ ID NO: 2131772 - RNA, 19 nt, Artificial Sequence
  Description of Artificial Sequence: Synthetic oligonucleotide
  Sense strand starting at position 3210 of SEQ ID NO: 1882573
gggugugauccucaucuuu

SEQ ID NO: 2131773 - RNA, 19 nt, Artificial Sequence
  Description of Artificial Sequence: Synthetic oligonucleotide
  Antisense strand to SEQ ID NO: 2131772
aaagaugaggaucacaccc

SEQ ID NO: 2131774 - RNA, 19 nt, Artificial Sequence
  Description of Artificial Sequence: Synthetic oligonucleotide
  Sense strand starting at position 3774 of SEQ ID NO: 1882573
aauauccagucuuugagga

SEQ ID NO: 2131775 - RNA, 19 nt, Artificial Sequence
  Description of Artificial Sequence: Synthetic oligonucleotide
  Antisense strand to SEQ ID NO: 2131774
uccucaaagacuggauauu

SEQ ID NO: 2131776 - RNA, 19 nt, Artificial Sequence
  Description of Artificial Sequence: Synthetic oligonucleotide
  Sense strand starting at position 3900 of SEQ ID NO: 1882573
cugccuuuguguuuaauuu

SEQ ID NO: 2131777 - RNA, 19 nt, Artificial Sequence
  Description of Artificial Sequence: Synthetic oligonucleotide
  Antisense strand to SEQ ID NO: 2131776
aaauuaaacacaaaggcag

SEQ ID NO: 2131778 - RNA, 19 nt, Artificial Sequence
  Description of Artificial Sequence: Synthetic oligonucleotide
  Sense strand starting at position 3938 of SEQ ID NO: 1882573
cgccaaaccagugagcaau

SEQ ID NO: 2131779 - RNA, 19 nt, Artificial Sequence
  Description of Artificial Sequence: Synthetic oligonucleotide
  Antisense strand to SEQ ID NO: 2131778
auugcucacugguuuggcg

SEQ ID NO: 2131780 - RNA, 19 nt, Artificial Sequence
  Description of Artificial Sequence: Synthetic oligonucleotide
  Sense strand starting at position 46 of SEQ ID NO: 1882574
gucccucuccucugaguau

SEQ ID NO: 2131781 - RNA, 19 nt, Artificial Sequence
  Description of Artificial Sequence: Synthetic oligonucleotide
  Antisense strand to SEQ ID NO: 2131780
auacucagaggagagggac

SEQ ID NO: 2131782 - RNA, 19 nt, Artificial Sequence
  Description of Artificial Sequence: Synthetic oligonucleotide
  Sense strand starting at position 201 of SEQ ID NO: 1882574
cugguuugguccucagcuu

SEQ ID NO: 2131783 - RNA, 19 nt, Artificial Sequence
  Description of Artificial Sequence: Synthetic oligonucleotide
  Antisense strand to SEQ ID NO: 2131782
aagcugaggaccaaaccag

SEQ ID NO: 2131784 - RNA, 19 nt, Artificial Sequence
  Description of Artificial Sequence: Synthetic oligonucleotide
  Sense strand starting at position 783 of SEQ ID NO: 1882574
aggagucauuacucccagu

SEQ ID NO: 2131785 - RNA, 19 nt, Artificial Sequence
  Description of Artificial Sequence: Synthetic oligonucleotide
  Antisense strand to SEQ ID NO: 2131784
acugggaguaaugacuccu

SEQ ID NO: 2131786 - RNA, 19 nt, Artificial Sequence
  Description of Artificial Sequence: Synthetic oligonucleotide
  Sense strand starting at position 910 of SEQ ID NO: 1882574
guauuuacaucuugcauga

SEQ ID NO: 2131787 - RNA, 19 nt, Artificial Sequence
  Description of Artificial Sequence: Synthetic oligonucleotide
  Antisense strand to SEQ ID NO: 2131786
ucaugcaagauguaaauac

SEQ ID NO: 2131788 - RNA, 19 nt, Artificial Sequence
  Description of Artificial Sequence: Synthetic oligonucleotide
  Sense strand starting at position 1028 of SEQ ID NO: 1882574
gacgcaugucuacaagaac

SEQ ID NO: 2131789 - RNA, 19 nt, Artificial Sequence
  Description of Artificial Sequence: Synthetic oligonucleotide
  Antisense strand to SEQ ID NO: 2131788
guucuuguagacaugcguc

SEQ ID NO: 2131790 - RNA, 19 nt, Artificial Sequence
  Description of Artificial Sequence: Synthetic oligonucleotide
  Sense strand starting at position 1097 of SEQ ID NO: 1882574
gagguagacuucccaguga

SEQ ID NO: 2131791 - RNA, 19 nt, Artificial Sequence
  Description of Artificial Sequence: Synthetic oligonucleotide
  Antisense strand to SEQ ID NO: 2131790
ucacugggaagucuaccuc

SEQ ID NO: 2131792 - RNA, 19 nt, Artificial Sequence
  Description of Artificial Sequence: Synthetic oligonucleotide
  Sense strand starting at position 1106 of SEQ ID NO: 1882574
uucccagugaggugaagau

SEQ ID NO: 2131793 - RNA, 19 nt, Artificial Sequence
  Description of Artificial Sequence: Synthetic oligonucleotide
  Antisense strand to SEQ ID NO: 2131792
aucuucaccucacugggaa

SEQ ID NO: 2131794 - RNA, 19 nt, Artificial Sequence
  Description of Artificial Sequence: Synthetic oligonucleotide
  Sense strand starting at position 1115 of SEQ ID NO: 1882574
aggugaagauugcuggaaa

SEQ ID NO: 2131795 - RNA, 19 nt, Artificial Sequence
  Description of Artificial Sequence: Synthetic oligonucleotide
  Antisense strand to SEQ ID NO: 2131794
uuuccagcaaucuucaccu

SEQ ID NO: 2131796 - RNA, 19 nt, Artificial Sequence
  Description of Artificial Sequence: Synthetic oligonucleotide
  Sense strand starting at position 1116 of SEQ ID NO: 1882574
ggugaagauugcuggaaau

SEQ ID NO: 2131797 - RNA, 19 nt, Artificial Sequence
  Description of Artificial Sequence: Synthetic oligonucleotide
  Antisense strand to SEQ ID NO: 2131796
auuuccagcaaucuucacc

SEQ ID NO: 2131798 - RNA, 19 nt, Artificial Sequence
  Description of Artificial Sequence: Synthetic oligonucleotide
  Sense strand starting at position 1128 of SEQ ID NO: 1882574
uggaaauaguaacaacaca

SEQ ID NO: 2131799 - RNA, 19 nt, Artificial Sequence
  Description of Artificial Sequence: Synthetic oligonucleotide
  Antisense strand to SEQ ID NO: 2131798
uguguuguuacuauuucca

SEQ ID NO: 2131800 - RNA, 19 nt, Artificial Sequence
  Description of Artificial Sequence: Synthetic oligonucleotide
  Sense strand starting at position 1400 of SEQ ID NO: 1882574
aucuaugacucucuggauu

SEQ ID NO: 2131801 - RNA, 19 nt, Artificial Sequence
  Description of Artificial Sequence: Synthetic oligonucleotide
  Antisense strand to SEQ ID NO: 2131800
aauccagagagucauagau

SEQ ID NO: 2131802 - RNA, 19 nt, Artificial Sequence
  Description of Artificial Sequence: Synthetic oligonucleotide
  Sense strand starting at position 1402 of SEQ ID NO: 1882574
cuaugacucucuggauuac

SEQ ID NO: 2131803 - RNA, 19 nt, Artificial Sequence
  Description of Artificial Sequence: Synthetic oligonucleotide
  Antisense strand to SEQ ID NO: 2131802
guaauccagagagucauag

SEQ ID NO: 2131804 - RNA, 19 nt, Artificial Sequence
  Description of Artificial Sequence: Synthetic oligonucleotide
  Sense strand starting at position 1424 of SEQ ID NO: 1882574
ucuaucaagucaggcaaau

SEQ ID NO: 2131805 - RNA, 19 nt, Artificial Sequence
  Description of Artificial Sequence: Synthetic oligonucleotide
  Antisense strand to SEQ ID NO: 2131804
auuugccugacuugauaga

SEQ ID NO: 2131806 - RNA, 19 nt, Artificial Sequence
  Description of Artificial Sequence: Synthetic oligonucleotide
  Sense strand starting at position 1673 of SEQ ID NO: 1882574
gcuauaaauucugacugua

SEQ ID NO: 2131807 - RNA, 19 nt, Artificial Sequence
  Description of Artificial Sequence: Synthetic oligonucleotide
  Antisense strand to SEQ ID NO: 2131806
uacagucagaauuuauagc

SEQ ID NO: 2131808 - RNA, 19 nt, Artificial Sequence
  Description of Artificial Sequence: Synthetic oligonucleotide
  Sense strand starting at position 1687 of SEQ ID NO: 1882574
cuguaaaugcugugcugga

SEQ ID NO: 2131809 - RNA, 19 nt, Artificial Sequence
  Description of Artificial Sequence: Synthetic oligonucleotide
  Antisense strand to SEQ ID NO: 2131808
uccagcacagcauuuacag

SEQ ID NO: 2131810 - RNA, 19 nt, Artificial Sequence
  Description of Artificial Sequence: Synthetic oligonucleotide
  Sense strand starting at position 1735 of SEQ ID NO: 1882574
aguuuagaaucuccgcuau

SEQ ID NO: 2131811 - RNA, 19 nt, Artificial Sequence
  Description of Artificial Sequence: Synthetic oligonucleotide
  Antisense strand to SEQ ID NO: 2131810
auagcggagauucuaaacu

SEQ ID NO: 2131812 - RNA, 19 nt, Artificial Sequence
  Description of Artificial Sequence: Synthetic oligonucleotide
  Sense strand starting at position 1737 of SEQ ID NO: 1882574
uuuagaaucuccgcuauga

SEQ ID NO: 2131813 - RNA, 19 nt, Artificial Sequence
  Description of Artificial Sequence: Synthetic oligonucleotide
  Antisense strand to SEQ ID NO: 2131812
ucauagcggagauucuaaa

SEQ ID NO: 2131814 - RNA, 19 nt, Artificial Sequence
  Description of Artificial Sequence: Synthetic oligonucleotide
  Sense strand starting at position 1788 of SEQ ID NO: 1882574
ggugguggugaugacuuau

SEQ ID NO: 2131815 - RNA, 19 nt, Artificial Sequence
  Description of Artificial Sequence: Synthetic oligonucleotide
  Antisense strand to SEQ ID NO: 2131814
auaagucaucaccaccacc

SEQ ID NO: 2131816 - RNA, 19 nt, Artificial Sequence
  Description of Artificial Sequence: Synthetic oligonucleotide
  Sense strand starting at position 1926 of SEQ ID NO: 1882574
gccaucagucaugggugau

SEQ ID NO: 2131817 - RNA, 19 nt, Artificial Sequence
  Description of Artificial Sequence: Synthetic oligonucleotide
  Antisense strand to SEQ ID NO: 2131816
aucacccaugacugauggc

SEQ ID NO: 2131818 - RNA, 19 nt, Artificial Sequence
  Description of Artificial Sequence: Synthetic oligonucleotide
  Sense strand starting at position 1927 of SEQ ID NO: 1882574
ccaucagucaugggugaua

SEQ ID NO: 2131819 - RNA, 19 nt, Artificial Sequence
  Description of Artificial Sequence: Synthetic oligonucleotide
  Antisense strand to SEQ ID NO: 2131818
uaucacccaugacugaugg

SEQ ID NO: 2131820 - RNA, 19 nt, Artificial Sequence
  Description of Artificial Sequence: Synthetic oligonucleotide
  Sense strand starting at position 1929 of SEQ ID NO: 1882574
aucagucaugggugauaga

SEQ ID NO: 2131821 - RNA, 19 nt, Artificial Sequence
  Description of Artificial Sequence: Synthetic oligonucleotide
  Antisense strand to SEQ ID NO: 2131820
ucuaucacccaugacugau

SEQ ID NO: 2131822 - RNA, 19 nt, Artificial Sequence
  Description of Artificial Sequence: Synthetic oligonucleotide
  Sense strand starting at position 1930 of SEQ ID NO: 1882574
ucagucaugggugauagau

SEQ ID NO: 2131823 - RNA, 19 nt, Artificial Sequence
  Description of Artificial Sequence: Synthetic oligonucleotide
  Antisense strand to SEQ ID NO: 2131822
aucuaucacccaugacuga

SEQ ID NO: 2131824 - RNA, 19 nt, Artificial Sequence
  Description of Artificial Sequence: Synthetic oligonucleotide
  Sense strand starting at position 1932 of SEQ ID NO: 1882574
agucaugggugauagauaa

SEQ ID NO: 2131825 - RNA, 19 nt, Artificial Sequence
  Description of Artificial Sequence: Synthetic oligonucleotide
  Antisense strand to SEQ ID NO: 2131824
uuaucuaucacccaugacu

SEQ ID NO: 2131826 - RNA, 19 nt, Artificial Sequence
  Description of Artificial Sequence: Synthetic oligonucleotide
  Sense strand starting at position 1943 of SEQ ID NO: 1882574
auagauaagagucguccuu

SEQ ID NO: 2131827 - RNA, 19 nt, Artificial Sequence
  Description of Artificial Sequence: Synthetic oligonucleotide
  Antisense strand to SEQ ID NO: 2131826
aaggacgacucuuaucuau

SEQ ID NO: 2131828 - RNA, 19 nt, Artificial Sequence
  Description of Artificial Sequence: Synthetic oligonucleotide
  Sense strand starting at position 2092 of SEQ ID NO: 1882574
uguuuaauguguuugaggu

SEQ ID NO: 2131829 - RNA, 19 nt, Artificial Sequence
  Description of Artificial Sequence: Synthetic oligonucleotide
  Antisense strand to SEQ ID NO: 2131828
accucaaacacauuaaaca

SEQ ID NO: 2131830 - RNA, 19 nt, Artificial Sequence
  Description of Artificial Sequence: Synthetic oligonucleotide
  Sense strand starting at position 2093 of SEQ ID NO: 1882574
guuuaauguguuugagguu

SEQ ID NO: 2131831 - RNA, 19 nt, Artificial Sequence
  Description of Artificial Sequence: Synthetic oligonucleotide
  Antisense strand to SEQ ID NO: 2131830
aaccucaaacacauuaaac

SEQ ID NO: 2131832 - RNA, 19 nt, Artificial Sequence
  Description of Artificial Sequence: Synthetic oligonucleotide
  Sense strand starting at position 2402 of SEQ ID NO: 1882574
gagggugauugccuaaagu

SEQ ID NO: 2131833 - RNA, 19 nt, Artificial Sequence
  Description of Artificial Sequence: Synthetic oligonucleotide
  Antisense strand to SEQ ID NO: 2131832
acuuuaggcaaucacccuc

SEQ ID NO: 2131834 - RNA, 19 nt, Artificial Sequence
  Description of Artificial Sequence: Synthetic oligonucleotide
  Sense strand starting at position 2433 of SEQ ID NO: 1882574
cggagcagucaggacaaua

SEQ ID NO: 2131835 - RNA, 19 nt, Artificial Sequence
  Description of Artificial Sequence: Synthetic oligonucleotide
  Antisense strand to SEQ ID NO: 2131834
uauuguccugacugcuccg

SEQ ID NO: 2131836 - RNA, 19 nt, Artificial Sequence
  Description of Artificial Sequence: Synthetic oligonucleotide
  Sense strand starting at position 2609 of SEQ ID NO: 1882574
ccaagaucccaccguugua

SEQ ID NO: 2131837 - RNA, 19 nt, Artificial Sequence
  Description of Artificial Sequence: Synthetic oligonucleotide
  Antisense strand to SEQ ID NO: 2131836
uacaacggugggaucuugg

SEQ ID NO: 2131838 - RNA, 19 nt, Artificial Sequence
  Description of Artificial Sequence: Synthetic oligonucleotide
  Sense strand starting at position 3015 of SEQ ID NO: 1882574
ucaccagauuaguguaaag

SEQ ID NO: 2131839 - RNA, 19 nt, Artificial Sequence
  Description of Artificial Sequence: Synthetic oligonucleotide
  Antisense strand to SEQ ID NO: 2131838
cuuuacacuaaucugguga

SEQ ID NO: 2131840 - RNA, 19 nt, Artificial Sequence
  Description of Artificial Sequence: Synthetic oligonucleotide
  Sense strand starting at position 3017 of SEQ ID NO: 1882574
accagauuaguguaaagua

SEQ ID NO: 2131841 - RNA, 19 nt, Artificial Sequence
  Description of Artificial Sequence: Synthetic oligonucleotide
  Antisense strand to SEQ ID NO: 2131840
uacuuuacacuaaucuggu

SEQ ID NO: 2131842 - RNA, 19 nt, Artificial Sequence
  Description of Artificial Sequence: Synthetic oligonucleotide
  Sense strand starting at position 3112 of SEQ ID NO: 1882574
aaauuacugcuucgggcua

SEQ ID NO: 2131843 - RNA, 19 nt, Artificial Sequence
  Description of Artificial Sequence: Synthetic oligonucleotide
  Antisense strand to SEQ ID NO: 2131842
uagcccgaagcaguaauuu

SEQ ID NO: 2131844 - RNA, 19 nt, Artificial Sequence
  Description of Artificial Sequence: Synthetic oligonucleotide
  Sense strand starting at position 3117 of SEQ ID NO: 1882574
acugcuucgggcuaaauau

SEQ ID NO: 2131845 - RNA, 19 nt, Artificial Sequence
  Description of Artificial Sequence: Synthetic oligonucleotide
  Antisense strand to SEQ ID NO: 2131844
auauuuagcccgaagcagu

SEQ ID NO: 2131846 - RNA, 19 nt, Artificial Sequence
  Description of Artificial Sequence: Synthetic oligonucleotide
  Sense strand starting at position 3124 of SEQ ID NO: 1882574
cgggcuaaauauuaucauu

SEQ ID NO: 2131847 - RNA, 19 nt, Artificial Sequence
  Description of Artificial Sequence: Synthetic oligonucleotide
  Antisense strand to SEQ ID NO: 2131846
aaugauaauauuuagcccg

SEQ ID NO: 2131848 - RNA, 19 nt, Artificial Sequence
  Description of Artificial Sequence: Synthetic oligonucleotide
  Sense strand starting at position 3188 of SEQ ID NO: 1882574
uugguacaguaucaaauaa

SEQ ID NO: 2131849 - RNA, 19 nt, Artificial Sequence
  Description of Artificial Sequence: Synthetic oligonucleotide
  Antisense strand to SEQ ID NO: 2131848
uuauuugauacuguaccaa

SEQ ID NO: 2131850 - RNA, 19 nt, Artificial Sequence
  Description of Artificial Sequence: Synthetic oligonucleotide
  Sense strand starting at position 3269 of SEQ ID NO: 1882574
acgcuaauccuaugguaaa

SEQ ID NO: 2131851 - RNA, 19 nt, Artificial Sequence
  Description of Artificial Sequence: Synthetic oligonucleotide
  Antisense strand to SEQ ID NO: 2131850
uuuaccauaggauuagcgu

SEQ ID NO: 2131852 - RNA, 19 nt, Artificial Sequence
  Description of Artificial Sequence: Synthetic oligonucleotide
  Sense strand starting at position 3629 of SEQ ID NO: 1882574
cgaccagauuuguggcaua

SEQ ID NO: 2131853 - RNA, 19 nt, Artificial Sequence
  Description of Artificial Sequence: Synthetic oligonucleotide
  Antisense strand to SEQ ID NO: 2131852
uaugccacaaaucuggucg

SEQ ID NO: 2131854 - RNA, 19 nt, Artificial Sequence
  Description of Artificial Sequence: Synthetic oligonucleotide
  Sense strand starting at position 3632 of SEQ ID NO: 1882574
ccagauuuguggcauaaca

SEQ ID NO: 2131855 - RNA, 19 nt, Artificial Sequence
  Description of Artificial Sequence: Synthetic oligonucleotide
  Antisense strand to SEQ ID NO: 2131854
uguuaugccacaaaucugg

SEQ ID NO: 2131856 - RNA, 19 nt, Artificial Sequence
  Description of Artificial Sequence: Synthetic oligonucleotide
  Sense strand starting at position 3658 of SEQ ID NO: 1882574
caguaucaccuaugaagga

SEQ ID NO: 2131857 - RNA, 19 nt, Artificial Sequence
  Description of Artificial Sequence: Synthetic oligonucleotide
  Antisense strand to SEQ ID NO: 2131856
uccuucauaggugauacug

SEQ ID NO: 2131858 - RNA, 19 nt, Artificial Sequence
  Description of Artificial Sequence: Synthetic oligonucleotide
  Sense strand starting at position 3659 of SEQ ID NO: 1882574
aguaucaccuaugaaggau

SEQ ID NO: 2131859 - RNA, 19 nt, Artificial Sequence
  Description of Artificial Sequence: Synthetic oligonucleotide
  Antisense strand to SEQ ID NO: 2131858
auccuucauaggugauacu

SEQ ID NO: 2131860 - RNA, 19 nt, Artificial Sequence
  Description of Artificial Sequence: Synthetic oligonucleotide
  Sense strand starting at position 29 of SEQ ID NO: 1882575
uuuggagaguacuuagaac

SEQ ID NO: 2131861 - RNA, 19 nt, Artificial Sequence
  Description of Artificial Sequence: Synthetic oligonucleotide
  Antisense strand to SEQ ID NO: 2131860
guucuaaguacucuccaaa

SEQ ID NO: 2131862 - RNA, 19 nt, Artificial Sequence
  Description of Artificial Sequence: Synthetic oligonucleotide
  Sense strand starting at position 103 of SEQ ID NO: 1882575
agccuaugagaucagcuaa

SEQ ID NO: 2131863 - RNA, 19 nt, Artificial Sequence
  Description of Artificial Sequence: Synthetic oligonucleotide
  Antisense strand to SEQ ID NO: 2131862
uuagcugaucucauaggcu

SEQ ID NO: 2131864 - RNA, 19 nt, Artificial Sequence
  Description of Artificial Sequence: Synthetic oligonucleotide
  Sense strand starting at position 145 of SEQ ID NO: 1882575
ggaucuacccaguagucau

SEQ ID NO: 2131865 - RNA, 19 nt, Artificial Sequence
  Description of Artificial Sequence: Synthetic oligonucleotide
  Antisense strand to SEQ ID NO: 2131864
augacuacuggguagaucc

SEQ ID NO: 2131866 - RNA, 19 nt, Artificial Sequence
  Description of Artificial Sequence: Synthetic oligonucleotide
  Sense strand starting at position 156 of SEQ ID NO: 1882575
guagucauuucugcagucu

SEQ ID NO: 2131867 - RNA, 19 nt, Artificial Sequence
  Description of Artificial Sequence: Synthetic oligonucleotide
  Antisense strand to SEQ ID NO: 2131866
agacugcagaaaugacuac

SEQ ID NO: 2131868 - RNA, 19 nt, Artificial Sequence
  Description of Artificial Sequence: Synthetic oligonucleotide
  Sense strand starting at position 175 of SEQ ID NO: 1882575
cuaaaucuguaacuggaau

SEQ ID NO: 2131869 - RNA, 19 nt, Artificial Sequence
  Description of Artificial Sequence: Synthetic oligonucleotide
  Antisense strand to SEQ ID NO: 2131868
auuccaguuacagauuuag

SEQ ID NO: 2131870 - RNA, 19 nt, Artificial Sequence
  Description of Artificial Sequence: Synthetic oligonucleotide
  Sense strand starting at position 241 of SEQ ID NO: 1882575
uggaguacgagcuacagau

SEQ ID NO: 2131871 - RNA, 19 nt, Artificial Sequence
  Description of Artificial Sequence: Synthetic oligonucleotide
  Antisense strand to SEQ ID NO: 2131870
aucuguagcucguacucca

SEQ ID NO: 2131872 - RNA, 19 nt, Artificial Sequence
  Description of Artificial Sequence: Synthetic oligonucleotide
  Sense strand starting at position 245 of SEQ ID NO: 1882575
guacgagcuacagauugaa

SEQ ID NO: 2131873 - RNA, 19 nt, Artificial Sequence
  Description of Artificial Sequence: Synthetic oligonucleotide
  Antisense strand to SEQ ID NO: 2131872
uucaaucuguagcucguac

SEQ ID NO: 2131874 - RNA, 19 nt, Artificial Sequence
  Description of Artificial Sequence: Synthetic oligonucleotide
  Sense strand starting at position 263 of SEQ ID NO: 1882575
aguggaagcccugaaucua

SEQ ID NO: 2131875 - RNA, 19 nt, Artificial Sequence
  Description of Artificial Sequence: Synthetic oligonucleotide
  Antisense strand to SEQ ID NO: 2131874
uagauucagggcuuccacu

SEQ ID NO: 2131876 - RNA, 19 nt, Artificial Sequence
  Description of Artificial Sequence: Synthetic oligonucleotide
  Sense strand starting at position 402 of SEQ ID NO: 1882575
ccagucuggucacuacaaa

SEQ ID NO: 2131877 - RNA, 19 nt, Artificial Sequence
  Description of Artificial Sequence: Synthetic oligonucleotide
  Antisense strand to SEQ ID NO: 2131876
uuuguagugaccagacugg

SEQ ID NO: 2131878 - RNA, 19 nt, Artificial Sequence
  Description of Artificial Sequence: Synthetic oligonucleotide
  Sense strand starting at position 528 of SEQ ID NO: 1882575
uggcuauuaaucuggugaa

SEQ ID NO: 2131879 - RNA, 19 nt, Artificial Sequence
  Description of Artificial Sequence: Synthetic oligonucleotide
  Antisense strand to SEQ ID NO: 2131878
uucaccagauuaauagcca

SEQ ID NO: 2131880 - RNA, 19 nt, Artificial Sequence
  Description of Artificial Sequence: Synthetic oligonucleotide
  Sense strand starting at position 756 of SEQ ID NO: 1882575
ugaucagacuggucuuuaa

SEQ ID NO: 2131881 - RNA, 19 nt, Artificial Sequence
  Description of Artificial Sequence: Synthetic oligonucleotide
  Antisense strand to SEQ ID NO: 2131880
uuaaagaccagucugauca

SEQ ID NO: 2131882 - RNA, 19 nt, Artificial Sequence
  Description of Artificial Sequence: Synthetic oligonucleotide
  Sense strand starting at position 906 of SEQ ID NO: 1882575
cagguauggauauaagugu

SEQ ID NO: 2131883 - RNA, 19 nt, Artificial Sequence
  Description of Artificial Sequence: Synthetic oligonucleotide
  Antisense strand to SEQ ID NO: 2131882
acacuuauauccauaccug

SEQ ID NO: 2131884 - RNA, 19 nt, Artificial Sequence
  Description of Artificial Sequence: Synthetic oligonucleotide
  Sense strand starting at position 1083 of SEQ ID NO: 1882575
uuaaacugucaaugugaga

SEQ ID NO: 2131885 - RNA, 19 nt, Artificial Sequence
  Description of Artificial Sequence: Synthetic oligonucleotide
  Antisense strand to SEQ ID NO: 2131884
ucucacauugacaguuuaa

SEQ ID NO: 2131886 - RNA, 19 nt, Artificial Sequence
  Description of Artificial Sequence: Synthetic oligonucleotide
  Sense strand starting at position 1112 of SEQ ID NO: 1882575
ugcagaguuguagagaaau

SEQ ID NO: 2131887 - RNA, 19 nt, Artificial Sequence
  Description of Artificial Sequence: Synthetic oligonucleotide
  Antisense strand to SEQ ID NO: 2131886
auuucucuacaacucugca

SEQ ID NO: 2131888 - RNA, 19 nt, Artificial Sequence
  Description of Artificial Sequence: Synthetic oligonucleotide
  Sense strand starting at position 1114 of SEQ ID NO: 1882575
cagaguuguagagaaaugu

SEQ ID NO: 2131889 - RNA, 19 nt, Artificial Sequence
  Description of Artificial Sequence: Synthetic oligonucleotide
  Antisense strand to SEQ ID NO: 2131888
acauuucucuacaacucug

SEQ ID NO: 2131890 - RNA, 19 nt, Artificial Sequence
  Description of Artificial Sequence: Synthetic oligonucleotide
  Sense strand starting at position 1120 of SEQ ID NO: 1882575
uguagagaaauguauggua

SEQ ID NO: 2131891 - RNA, 19 nt, Artificial Sequence
  Description of Artificial Sequence: Synthetic oligonucleotide
  Antisense strand to SEQ ID NO: 2131890
uaccauacauuucucuaca

SEQ ID NO: 2131892 - RNA, 19 nt, Artificial Sequence
  Description of Artificial Sequence: Synthetic oligonucleotide
  Sense strand starting at position 1122 of SEQ ID NO: 1882575
uagagaaauguaugguaac

SEQ ID NO: 2131893 - RNA, 19 nt, Artificial Sequence
  Description of Artificial Sequence: Synthetic oligonucleotide
  Antisense strand to SEQ ID NO: 2131892
guuaccauacauuucucua

SEQ ID NO: 2131894 - RNA, 19 nt, Artificial Sequence
  Description of Artificial Sequence: Synthetic oligonucleotide
  Sense strand starting at position 1232 of SEQ ID NO: 1882575
accagaaguccauggaucu

SEQ ID NO: 2131895 - RNA, 19 nt, Artificial Sequence
  Description of Artificial Sequence: Synthetic oligonucleotide
  Antisense strand to SEQ ID NO: 2131894
agauccauggacuucuggu

SEQ ID NO: 2131896 - RNA, 19 nt, Artificial Sequence
  Description of Artificial Sequence: Synthetic oligonucleotide
  Sense strand starting at position 1233 of SEQ ID NO: 1882575
ccagaaguccauggaucuu

SEQ ID NO: 2131897 - RNA, 19 nt, Artificial Sequence
  Description of Artificial Sequence: Synthetic oligonucleotide
  Antisense strand to SEQ ID NO: 2131896
aagauccauggacuucugg

SEQ ID NO: 2131898 - RNA, 19 nt, Artificial Sequence
  Description of Artificial Sequence: Synthetic oligonucleotide
  Sense strand starting at position 1302 of SEQ ID NO: 1882575
cuauuucuguagccucaua

SEQ ID NO: 2131899 - RNA, 19 nt, Artificial Sequence
  Description of Artificial Sequence: Synthetic oligonucleotide
  Antisense strand to SEQ ID NO: 2131898
uaugaggcuacagaaauag

SEQ ID NO: 2131900 - RNA, 19 nt, Artificial Sequence
  Description of Artificial Sequence: Synthetic oligonucleotide
  Sense strand starting at position 1655 of SEQ ID NO: 1882575
ggagaaagcccagguacuu

SEQ ID NO: 2131901 - RNA, 19 nt, Artificial Sequence
  Description of Artificial Sequence: Synthetic oligonucleotide
  Antisense strand to SEQ ID NO: 2131900
aaguaccugggcuuucucc

SEQ ID NO: 2131902 - RNA, 19 nt, Artificial Sequence
  Description of Artificial Sequence: Synthetic oligonucleotide
  Sense strand starting at position 2134 of SEQ ID NO: 1882575
auuuguuaccuaugccuua

SEQ ID NO: 2131903 - RNA, 19 nt, Artificial Sequence
  Description of Artificial Sequence: Synthetic oligonucleotide
  Antisense strand to SEQ ID NO: 2131902
uaaggcauagguaacaaau

SEQ ID NO: 2131904 - RNA, 19 nt, Artificial Sequence
  Description of Artificial Sequence: Synthetic oligonucleotide
  Sense strand starting at position 2482 of SEQ ID NO: 1882575
guaagaacacauuauugca

SEQ ID NO: 2131905 - RNA, 19 nt, Artificial Sequence
  Description of Artificial Sequence: Synthetic oligonucleotide
  Antisense strand to SEQ ID NO: 2131904
ugcaauaauguguucuuac

SEQ ID NO: 2131906 - RNA, 19 nt, Artificial Sequence
  Description of Artificial Sequence: Synthetic oligonucleotide
  Sense strand starting at position 2639 of SEQ ID NO: 1882575
ugaggagaacuguguguau

SEQ ID NO: 2131907 - RNA, 19 nt, Artificial Sequence
  Description of Artificial Sequence: Synthetic oligonucleotide
  Antisense strand to SEQ ID NO: 2131906
auacacacaguucuccuca

SEQ ID NO: 2131908 - RNA, 19 nt, Artificial Sequence
  Description of Artificial Sequence: Synthetic oligonucleotide
  Sense strand starting at position 2809 of SEQ ID NO: 1882575
uuccacacucaugggaaua

SEQ ID NO: 2131909 - RNA, 19 nt, Artificial Sequence
  Description of Artificial Sequence: Synthetic oligonucleotide
  Antisense strand to SEQ ID NO: 2131908
uauucccaugaguguggaa

SEQ ID NO: 2131910 - RNA, 19 nt, Artificial Sequence
  Description of Artificial Sequence: Synthetic oligonucleotide
  Sense strand starting at position 2912 of SEQ ID NO: 1882575
ugugguagugcuuugguca

SEQ ID NO: 2131911 - RNA, 19 nt, Artificial Sequence
  Description of Artificial Sequence: Synthetic oligonucleotide
  Antisense strand to SEQ ID NO: 2131910
ugaccaaagcacuaccaca

SEQ ID NO: 2131912 - RNA, 19 nt, Artificial Sequence
  Description of Artificial Sequence: Synthetic oligonucleotide
  Sense strand starting at position 2924 of SEQ ID NO: 1882575
uuggucaugugacucaaua

SEQ ID NO: 2131913 - RNA, 19 nt, Artificial Sequence
  Description of Artificial Sequence: Synthetic oligonucleotide
  Antisense strand to SEQ ID NO: 2131912
uauugagucacaugaccaa

SEQ ID NO: 2131914 - RNA, 19 nt, Artificial Sequence
  Description of Artificial Sequence: Synthetic oligonucleotide
  Sense strand starting at position 2950 of SEQ ID NO: 1882575
gggcacuaaagguaucagu

SEQ ID NO: 2131915 - RNA, 19 nt, Artificial Sequence
  Description of Artificial Sequence: Synthetic oligonucleotide
  Antisense strand to SEQ ID NO: 2131914
acugauaccuuuagugccc

SEQ ID NO: 2131916 - RNA, 19 nt, Artificial Sequence
  Description of Artificial Sequence: Synthetic oligonucleotide
  Sense strand starting at position 2957 of SEQ ID NO: 1882575
aaagguaucagugguggga

SEQ ID NO: 2131917 - RNA, 19 nt, Artificial Sequence
  Description of Artificial Sequence: Synthetic oligonucleotide
  Antisense strand to SEQ ID NO: 2131916
ucccaccacugauaccuuu

SEQ ID NO: 2131918 - RNA, 19 nt, Artificial Sequence
  Description of Artificial Sequence: Synthetic oligonucleotide
  Sense strand starting at position 3105 of SEQ ID NO: 1882575
gcucuugggccuuacuaga

SEQ ID NO: 2131919 - RNA, 19 nt, Artificial Sequence
  Description of Artificial Sequence: Synthetic oligonucleotide
  Antisense strand to SEQ ID NO: 2131918
ucuaguaaggcccaagagc

SEQ ID NO: 2131920 - RNA, 19 nt, Artificial Sequence
  Description of Artificial Sequence: Synthetic oligonucleotide
  Sense strand starting at position 3130 of SEQ ID NO: 1882575
gcuccugaucaugagacau

SEQ ID NO: 2131921 - RNA, 19 nt, Artificial Sequence
  Description of Artificial Sequence: Synthetic oligonucleotide
  Antisense strand to SEQ ID NO: 2131920
augucucaugaucaggagc

SEQ ID NO: 2131922 - RNA, 19 nt, Artificial Sequence
  Description of Artificial Sequence: Synthetic oligonucleotide
  Sense strand starting at position 3153 of SEQ ID NO: 1882575
uggcuauuaggcuacaacu

SEQ ID NO: 2131923 - RNA, 19 nt, Artificial Sequence
  Description of Artificial Sequence: Synthetic oligonucleotide
  Antisense strand to SEQ ID NO: 2131922
aguuguagccuaauagcca

SEQ ID NO: 2131924 - RNA, 19 nt, Artificial Sequence
  Description of Artificial Sequence: Synthetic oligonucleotide
  Sense strand starting at position 3235 of SEQ ID NO: 1882575
ucaguuguaagagagaagu

SEQ ID NO: 2131925 - RNA, 19 nt, Artificial Sequence
  Description of Artificial Sequence: Synthetic oligonucleotide
  Antisense strand to SEQ ID NO: 2131924
acuucucucuuacaacuga

SEQ ID NO: 2131926 - RNA, 19 nt, Artificial Sequence
  Description of Artificial Sequence: Synthetic oligonucleotide
  Sense strand starting at position 3246 of SEQ ID NO: 1882575
agagaagucguauauccug

SEQ ID NO: 2131927 - RNA, 19 nt, Artificial Sequence
  Description of Artificial Sequence: Synthetic oligonucleotide
  Antisense strand to SEQ ID NO: 2131926
caggauauacgacuucucu

SEQ ID NO: 2131928 - RNA, 19 nt, Artificial Sequence
  Description of Artificial Sequence: Synthetic oligonucleotide
  Sense strand starting at position 3277 of SEQ ID NO: 1882575
gcagaacuggaggguaaau

SEQ ID NO: 2131929 - RNA, 19 nt, Artificial Sequence
  Description of Artificial Sequence: Synthetic oligonucleotide
  Antisense strand to SEQ ID NO: 2131928
auuuacccuccaguucugc

SEQ ID NO: 2131930 - RNA, 19 nt, Artificial Sequence
  Description of Artificial Sequence: Synthetic oligonucleotide
  Sense strand starting at position 3388 of SEQ ID NO: 1882575
guguucuaguuauuuauug

SEQ ID NO: 2131931 - RNA, 19 nt, Artificial Sequence
  Description of Artificial Sequence: Synthetic oligonucleotide
  Antisense strand to SEQ ID NO: 2131930
caauaaauaacuagaacac

SEQ ID NO: 2131932 - RNA, 19 nt, Artificial Sequence
  Description of Artificial Sequence: Synthetic oligonucleotide
  Sense strand starting at position 3469 of SEQ ID NO: 1882575
cauguugugggccaagaau

SEQ ID NO: 2131933 - RNA, 19 nt, Artificial Sequence
  Description of Artificial Sequence: Synthetic oligonucleotide
  Antisense strand to SEQ ID NO: 2131932
auucuuggcccacaacaug

SEQ ID NO: 2131934 - RNA, 19 nt, Artificial Sequence
  Description of Artificial Sequence: Synthetic oligonucleotide
  Sense strand starting at position 3534 of SEQ ID NO: 1882575
cugggaucccuuggaagua

SEQ ID NO: 2131935 - RNA, 19 nt, Artificial Sequence
  Description of Artificial Sequence: Synthetic oligonucleotide
  Antisense strand to SEQ ID NO: 2131934
uacuuccaagggaucccag

SEQ ID NO: 2131936 - RNA, 19 nt, Artificial Sequence
  Description of Artificial Sequence: Synthetic oligonucleotide
  Sense strand starting at position 3874 of SEQ ID NO: 1882575
augauuguccgauaguuug

SEQ ID NO: 2131937 - RNA, 19 nt, Artificial Sequence
  Description of Artificial Sequence: Synthetic oligonucleotide
  Antisense strand to SEQ ID NO: 2131936
caaacuaucggacaaucau

SEQ ID NO: 2131938 - RNA, 19 nt, Artificial Sequence
  Description of Artificial Sequence: Synthetic oligonucleotide
  Sense strand starting at position 3928 of SEQ ID NO: 1882575
acuuuaugauuggcuaaug

SEQ ID NO: 2131939 - RNA, 19 nt, Artificial Sequence
  Description of Artificial Sequence: Synthetic oligonucleotide
  Antisense strand to SEQ ID NO: 2131938
cauuagccaaucauaaagu

SEQ ID NO: 2131940 - RNA, 19 nt, Artificial Sequence
  Description of Artificial Sequence: Synthetic oligonucleotide
  Sense strand starting at position 103 of SEQ ID NO: 1882576
aguauccaguucccuaaau

SEQ ID NO: 2131941 - RNA, 19 nt, Artificial Sequence
  Description of Artificial Sequence: Synthetic oligonucleotide
  Antisense strand to SEQ ID NO: 2131940
auuuagggaacuggauacu

SEQ ID NO: 2131942 - RNA, 19 nt, Artificial Sequence
  Description of Artificial Sequence: Synthetic oligonucleotide
  Sense strand starting at position 112 of SEQ ID NO: 1882576
uucccuaaaugagucagaa

SEQ ID NO: 2131943 - RNA, 19 nt, Artificial Sequence
  Description of Artificial Sequence: Synthetic oligonucleotide
  Antisense strand to SEQ ID NO: 2131942
uucugacucauuuagggaa

SEQ ID NO: 2131944 - RNA, 19 nt, Artificial Sequence
  Description of Artificial Sequence: Synthetic oligonucleotide
  Sense strand starting at position 116 of SEQ ID NO: 1882576
cuaaaugagucagaacuua

SEQ ID NO: 2131945 - RNA, 19 nt, Artificial Sequence
  Description of Artificial Sequence: Synthetic oligonucleotide
  Antisense strand to SEQ ID NO: 2131944
uaaguucugacucauuuag

SEQ ID NO: 2131946 - RNA, 19 nt, Artificial Sequence
  Description of Artificial Sequence: Synthetic oligonucleotide
  Sense strand starting at position 208 of SEQ ID NO: 1882576
aagggaagcucuucuggaa

SEQ ID NO: 2131947 - RNA, 19 nt, Artificial Sequence
  Description of Artificial Sequence: Synthetic oligonucleotide
  Antisense strand to SEQ ID NO: 2131946
uuccagaagagcuucccuu

SEQ ID NO: 2131948 - RNA, 19 nt, Artificial Sequence
  Description of Artificial Sequence: Synthetic oligonucleotide
  Sense strand starting at position 553 of SEQ ID NO: 1882576
caacaugagugagacucau

SEQ ID NO: 2131949 - RNA, 19 nt, Artificial Sequence
  Description of Artificial Sequence: Synthetic oligonucleotide
  Antisense strand to SEQ ID NO: 2131948
augagucucacucauguug

SEQ ID NO: 2131950 - RNA, 19 nt, Artificial Sequence
  Description of Artificial Sequence: Synthetic oligonucleotide
  Sense strand starting at position 599 of SEQ ID NO: 1882576
auagaauagucacaaggaa

SEQ ID NO: 2131951 - RNA, 19 nt, Artificial Sequence
  Description of Artificial Sequence: Synthetic oligonucleotide
  Antisense strand to SEQ ID NO: 2131950
uuccuugugacuauucuau

SEQ ID NO: 2131952 - RNA, 19 nt, Artificial Sequence
  Description of Artificial Sequence: Synthetic oligonucleotide
  Sense strand starting at position 933 of SEQ ID NO: 1882576
guggauguugcagggagau

SEQ ID NO: 2131953 - RNA, 19 nt, Artificial Sequence
  Description of Artificial Sequence: Synthetic oligonucleotide
  Antisense strand to SEQ ID NO: 2131952
aucucccugcaacauccac

SEQ ID NO: 2131954 - RNA, 19 nt, Artificial Sequence
  Description of Artificial Sequence: Synthetic oligonucleotide
  Sense strand starting at position 1011 of SEQ ID NO: 1882576
accugugguacauggauua

SEQ ID NO: 2131955 - RNA, 19 nt, Artificial Sequence
  Description of Artificial Sequence: Synthetic oligonucleotide
  Antisense strand to SEQ ID NO: 2131954
uaauccauguaccacaggu

SEQ ID NO: 2131956 - RNA, 19 nt, Artificial Sequence
  Description of Artificial Sequence: Synthetic oligonucleotide
  Sense strand starting at position 1312 of SEQ ID NO: 1882576
gugggagaaucgguuaaac

SEQ ID NO: 2131957 - RNA, 19 nt, Artificial Sequence
  Description of Artificial Sequence: Synthetic oligonucleotide
  Antisense strand to SEQ ID NO: 2131956
guuuaaccgauucucccac

SEQ ID NO: 2131958 - RNA, 19 nt, Artificial Sequence
  Description of Artificial Sequence: Synthetic oligonucleotide
  Sense strand starting at position 1323 of SEQ ID NO: 1882576
gguuaaacccgggaguuga

SEQ ID NO: 2131959 - RNA, 19 nt, Artificial Sequence
  Description of Artificial Sequence: Synthetic oligonucleotide
  Antisense strand to SEQ ID NO: 2131958
ucaacucccggguuuaacc

SEQ ID NO: 2131960 - RNA, 19 nt, Artificial Sequence
  Description of Artificial Sequence: Synthetic oligonucleotide
  Sense strand starting at position 1730 of SEQ ID NO: 1882576
gcauaaugcccaugaacga

SEQ ID NO: 2131961 - RNA, 19 nt, Artificial Sequence
  Description of Artificial Sequence: Synthetic oligonucleotide
  Antisense strand to SEQ ID NO: 2131960
ucguucaugggcauuaugc

SEQ ID NO: 2131962 - RNA, 19 nt, Artificial Sequence
  Description of Artificial Sequence: Synthetic oligonucleotide
  Sense strand starting at position 1745 of SEQ ID NO: 1882576
acgaaagcuugcuugggaa

SEQ ID NO: 2131963 - RNA, 19 nt, Artificial Sequence
  Description of Artificial Sequence: Synthetic oligonucleotide
  Antisense strand to SEQ ID NO: 2131962
uucccaagcaagcuuucgu

SEQ ID NO: 2131964 - RNA, 19 nt, Artificial Sequence
  Description of Artificial Sequence: Synthetic oligonucleotide
  Sense strand starting at position 1747 of SEQ ID NO: 1882576
gaaagcuugcuugggaaca

SEQ ID NO: 2131965 - RNA, 19 nt, Artificial Sequence
  Description of Artificial Sequence: Synthetic oligonucleotide
  Antisense strand to SEQ ID NO: 2131964
uguucccaagcaagcuuuc

SEQ ID NO: 2131966 - RNA, 19 nt, Artificial Sequence
  Description of Artificial Sequence: Synthetic oligonucleotide
  Sense strand starting at position 1761 of SEQ ID NO: 1882576
gaacaaagcuuuccgaaga

SEQ ID NO: 2131967 - RNA, 19 nt, Artificial Sequence
  Description of Artificial Sequence: Synthetic oligonucleotide
  Antisense strand to SEQ ID NO: 2131966
ucuucggaaagcuuuguuc

SEQ ID NO: 2131968 - RNA, 19 nt, Artificial Sequence
  Description of Artificial Sequence: Synthetic oligonucleotide
  Sense strand starting at position 1766 of SEQ ID NO: 1882576
aagcuuuccgaagaggcau

SEQ ID NO: 2131969 - RNA, 19 nt, Artificial Sequence
  Description of Artificial Sequence: Synthetic oligonucleotide
  Antisense strand to SEQ ID NO: 2131968
augccucuucggaaagcuu

SEQ ID NO: 2131970 - RNA, 19 nt, Artificial Sequence
  Description of Artificial Sequence: Synthetic oligonucleotide
  Sense strand starting at position 1883 of SEQ ID NO: 1882576
uuaggaaucuuggccauga

SEQ ID NO: 2131971 - RNA, 19 nt, Artificial Sequence
  Description of Artificial Sequence: Synthetic oligonucleotide
  Antisense strand to SEQ ID NO: 2131970
ucauggccaagauuccuaa

SEQ ID NO: 2131972 - RNA, 19 nt, Artificial Sequence
  Description of Artificial Sequence: Synthetic oligonucleotide
  Sense strand starting at position 1884 of SEQ ID NO: 1882576
uaggaaucuuggccaugaa

SEQ ID NO: 2131973 - RNA, 19 nt, Artificial Sequence
  Description of Artificial Sequence: Synthetic oligonucleotide
  Antisense strand to SEQ ID NO: 2131972
uucauggccaagauuccua

SEQ ID NO: 2131974 - RNA, 19 nt, Artificial Sequence
  Description of Artificial Sequence: Synthetic oligonucleotide
  Sense strand starting at position 1896 of SEQ ID NO: 1882576
ccaugaacucguugagccu

SEQ ID NO: 2131975 - RNA, 19 nt, Artificial Sequence
  Description of Artificial Sequence: Synthetic oligonucleotide
  Antisense strand to SEQ ID NO: 2131974
aggcucaacgaguucaugg

SEQ ID NO: 2131976 - RNA, 19 nt, Artificial Sequence
  Description of Artificial Sequence: Synthetic oligonucleotide
  Sense strand starting at position 1902 of SEQ ID NO: 1882576
acucguugagccugagaaa

SEQ ID NO: 2131977 - RNA, 19 nt, Artificial Sequence
  Description of Artificial Sequence: Synthetic oligonucleotide
  Antisense strand to SEQ ID NO: 2131976
uuucucaggcucaacgagu

SEQ ID NO: 2131978 - RNA, 19 nt, Artificial Sequence
  Description of Artificial Sequence: Synthetic oligonucleotide
  Sense strand starting at position 1903 of SEQ ID NO: 1882576
cucguugagccugagaaau

SEQ ID NO: 2131979 - RNA, 19 nt, Artificial Sequence
  Description of Artificial Sequence: Synthetic oligonucleotide
  Antisense strand to SEQ ID NO: 2131978
auuucucaggcucaacgag

SEQ ID NO: 2131980 - RNA, 19 nt, Artificial Sequence
  Description of Artificial Sequence: Synthetic oligonucleotide
  Sense strand starting at position 1913 of SEQ ID NO: 1882576
cugagaaaugcuggaccga

SEQ ID NO: 2131981 - RNA, 19 nt, Artificial Sequence
  Description of Artificial Sequence: Synthetic oligonucleotide
  Antisense strand to SEQ ID NO: 2131980
ucgguccagcauuucucag

SEQ ID NO: 2131982 - RNA, 19 nt, Artificial Sequence
  Description of Artificial Sequence: Synthetic oligonucleotide
  Sense strand starting at position 2395 of SEQ ID NO: 1882576
gggccugacggguauaguu

SEQ ID NO: 2131983 - RNA, 19 nt, Artificial Sequence
  Description of Artificial Sequence: Synthetic oligonucleotide
  Antisense strand to SEQ ID NO: 2131982
aacuauacccgucaggccc

SEQ ID NO: 2131984 - RNA, 19 nt, Artificial Sequence
  Description of Artificial Sequence: Synthetic oligonucleotide
  Sense strand starting at position 2416 of SEQ ID NO: 1882576
uuucuuaucugccuggcua

SEQ ID NO: 2131985 - RNA, 19 nt, Artificial Sequence
  Description of Artificial Sequence: Synthetic oligonucleotide
  Antisense strand to SEQ ID NO: 2131984
uagccaggcagauaagaaa

SEQ ID NO: 2131986 - RNA, 19 nt, Artificial Sequence
  Description of Artificial Sequence: Synthetic oligonucleotide
  Sense strand starting at position 2418 of SEQ ID NO: 1882576
ucuuaucugccuggcuaga

SEQ ID NO: 2131987 - RNA, 19 nt, Artificial Sequence
  Description of Artificial Sequence: Synthetic oligonucleotide
  Antisense strand to SEQ ID NO: 2131986
ucuagccaggcagauaaga

SEQ ID NO: 2131988 - RNA, 19 nt, Artificial Sequence
  Description of Artificial Sequence: Synthetic oligonucleotide
  Sense strand starting at position 2451 of SEQ ID NO: 1882576
cccauuguuuguccacaca

SEQ ID NO: 2131989 - RNA, 19 nt, Artificial Sequence
  Description of Artificial Sequence: Synthetic oligonucleotide
  Antisense strand to SEQ ID NO: 2131988
uguguggacaaacaauggg

SEQ ID NO: 2131990 - RNA, 19 nt, Artificial Sequence
  Description of Artificial Sequence: Synthetic oligonucleotide
  Sense strand starting at position 2454 of SEQ ID NO: 1882576
auuguuuguccacacagaa

SEQ ID NO: 2131991 - RNA, 19 nt, Artificial Sequence
  Description of Artificial Sequence: Synthetic oligonucleotide
  Antisense strand to SEQ ID NO: 2131990
uucuguguggacaaacaau

SEQ ID NO: 2131992 - RNA, 19 nt, Artificial Sequence
  Description of Artificial Sequence: Synthetic oligonucleotide
  Sense strand starting at position 2512 of SEQ ID NO: 1882576
acacuccucugggcaaaua

SEQ ID NO: 2131993 - RNA, 19 nt, Artificial Sequence
  Description of Artificial Sequence: Synthetic oligonucleotide
  Antisense strand to SEQ ID NO: 2131992
uauuugcccagaggagugu

SEQ ID NO: 2131994 - RNA, 19 nt, Artificial Sequence
  Description of Artificial Sequence: Synthetic oligonucleotide
  Sense strand starting at position 2521 of SEQ ID NO: 1882576
ugggcaaauauucggagau

SEQ ID NO: 2131995 - RNA, 19 nt, Artificial Sequence
  Description of Artificial Sequence: Synthetic oligonucleotide
  Antisense strand to SEQ ID NO: 2131994
aucuccgaauauuugccca

SEQ ID NO: 2131996 - RNA, 19 nt, Artificial Sequence
  Description of Artificial Sequence: Synthetic oligonucleotide
  Sense strand starting at position 2525 of SEQ ID NO: 1882576
caaauauucggagaugcuu

SEQ ID NO: 2131997 - RNA, 19 nt, Artificial Sequence
  Description of Artificial Sequence: Synthetic oligonucleotide
  Antisense strand to SEQ ID NO: 2131996
aagcaucuccgaauauuug

SEQ ID NO: 2131998 - RNA, 19 nt, Artificial Sequence
  Description of Artificial Sequence: Synthetic oligonucleotide
  Sense strand starting at position 2533 of SEQ ID NO: 1882576
cggagaugcuuucugaauu

SEQ ID NO: 2131999 - RNA, 19 nt, Artificial Sequence
  Description of Artificial Sequence: Synthetic oligonucleotide
  Antisense strand to SEQ ID NO: 2131998
aauucagaaagcaucuccg

SEQ ID NO: 2132000 - RNA, 19 nt, Artificial Sequence
  Description of Artificial Sequence: Synthetic oligonucleotide
  Sense strand starting at position 2534 of SEQ ID NO: 1882576
ggagaugcuuucugaauuu

SEQ ID NO: 2132001 - RNA, 19 nt, Artificial Sequence
  Description of Artificial Sequence: Synthetic oligonucleotide
  Antisense strand to SEQ ID NO: 2132000
aaauucagaaagcaucucc

SEQ ID NO: 2132002 - RNA, 19 nt, Artificial Sequence
  Description of Artificial Sequence: Synthetic oligonucleotide
  Sense strand starting at position 2665 of SEQ ID NO: 1882576
cguuaaugacccugggacu

SEQ ID NO: 2132003 - RNA, 19 nt, Artificial Sequence
  Description of Artificial Sequence: Synthetic oligonucleotide
  Antisense strand to SEQ ID NO: 2132002
agucccagggucauuaacg

SEQ ID NO: 2132004 - RNA, 19 nt, Artificial Sequence
  Description of Artificial Sequence: Synthetic oligonucleotide
  Sense strand starting at position 2717 of SEQ ID NO: 1882576
ccaguuuagcguccagcua

SEQ ID NO: 2132005 - RNA, 19 nt, Artificial Sequence
  Description of Artificial Sequence: Synthetic oligonucleotide
  Antisense strand to SEQ ID NO: 2132004
uagcuggacgcuaaacugg

SEQ ID NO: 2132006 - RNA, 19 nt, Artificial Sequence
  Description of Artificial Sequence: Synthetic oligonucleotide
  Sense strand starting at position 2859 of SEQ ID NO: 1882576
aggcaggucggacguaaua

SEQ ID NO: 2132007 - RNA, 19 nt, Artificial Sequence
  Description of Artificial Sequence: Synthetic oligonucleotide
  Antisense strand to SEQ ID NO: 2132006
uauuacguccgaccugccu

SEQ ID NO: 2132008 - RNA, 19 nt, Artificial Sequence
  Description of Artificial Sequence: Synthetic oligonucleotide
  Sense strand starting at position 3347 of SEQ ID NO: 1882576
uuuauaaacgcguaugaug

SEQ ID NO: 2132009 - RNA, 19 nt, Artificial Sequence
  Description of Artificial Sequence: Synthetic oligonucleotide
  Antisense strand to SEQ ID NO: 2132008
caucauacgcguuuauaaa

SEQ ID NO: 2132010 - RNA, 19 nt, Artificial Sequence
  Description of Artificial Sequence: Synthetic oligonucleotide
  Sense strand starting at position 3349 of SEQ ID NO: 1882576
uauaaacgcguaugauguu

SEQ ID NO: 2132011 - RNA, 19 nt, Artificial Sequence
  Description of Artificial Sequence: Synthetic oligonucleotide
  Antisense strand to SEQ ID NO: 2132010
aacaucauacgcguuuaua

SEQ ID NO: 2132012 - RNA, 19 nt, Artificial Sequence
  Description of Artificial Sequence: Synthetic oligonucleotide
  Sense strand starting at position 3358 of SEQ ID NO: 1882576
guaugauguuuggugaugu

SEQ ID NO: 2132013 - RNA, 19 nt, Artificial Sequence
  Description of Artificial Sequence: Synthetic oligonucleotide
  Antisense strand to SEQ ID NO: 2132012
acaucaccaaacaucauac

SEQ ID NO: 2132014 - RNA, 19 nt, Artificial Sequence
  Description of Artificial Sequence: Synthetic oligonucleotide
  Sense strand starting at position 3514 of SEQ ID NO: 1882576
cgaaguagcaaggauuaca

SEQ ID NO: 2132015 - RNA, 19 nt, Artificial Sequence
  Description of Artificial Sequence: Synthetic oligonucleotide
  Antisense strand to SEQ ID NO: 2132014
uguaauccuugcuacuucg

SEQ ID NO: 2132016 - RNA, 19 nt, Artificial Sequence
  Description of Artificial Sequence: Synthetic oligonucleotide
  Sense strand starting at position 3941 of SEQ ID NO: 1882576
acuggugaaccucagugau

SEQ ID NO: 2132017 - RNA, 19 nt, Artificial Sequence
  Description of Artificial Sequence: Synthetic oligonucleotide
  Antisense strand to SEQ ID NO: 2132016
aucacugagguucaccagu

SEQ ID NO: 2132018 - RNA, 19 nt, Artificial Sequence
  Description of Artificial Sequence: Synthetic oligonucleotide
  Sense strand starting at position 3944 of SEQ ID NO: 1882576
ggugaaccucagugauccu

SEQ ID NO: 2132019 - RNA, 19 nt, Artificial Sequence
  Description of Artificial Sequence: Synthetic oligonucleotide
  Antisense strand to SEQ ID NO: 2132018
aggaucacugagguucacc

SEQ ID NO: 2132020 - RNA, 19 nt, Artificial Sequence
  Description of Artificial Sequence: Synthetic oligonucleotide
  Sense strand starting at position 14 of SEQ ID NO: 1882577
uagucaagcuccuuaagga

SEQ ID NO: 2132021 - RNA, 19 nt, Artificial Sequence
  Description of Artificial Sequence: Synthetic oligonucleotide
  Antisense strand to SEQ ID NO: 2132020
uccuuaaggagcuugacua

SEQ ID NO: 2132022 - RNA, 19 nt, Artificial Sequence
  Description of Artificial Sequence: Synthetic oligonucleotide
  Sense strand starting at position 15 of SEQ ID NO: 1882577
agucaagcuccuuaaggau

SEQ ID NO: 2132023 - RNA, 19 nt, Artificial Sequence
  Description of Artificial Sequence: Synthetic oligonucleotide
  Antisense strand to SEQ ID NO: 2132022
auccuuaaggagcuugacu

SEQ ID NO: 2132024 - RNA, 19 nt, Artificial Sequence
  Description of Artificial Sequence: Synthetic oligonucleotide
  Sense strand starting at position 293 of SEQ ID NO: 1882577
agcuaugcucuggagggua

SEQ ID NO: 2132025 - RNA, 19 nt, Artificial Sequence
  Description of Artificial Sequence: Synthetic oligonucleotide
  Antisense strand to SEQ ID NO: 2132024
uacccuccagagcauagcu

SEQ ID NO: 2132026 - RNA, 19 nt, Artificial Sequence
  Description of Artificial Sequence: Synthetic oligonucleotide
  Sense strand starting at position 295 of SEQ ID NO: 1882577
cuaugcucuggaggguaaa

SEQ ID NO: 2132027 - RNA, 19 nt, Artificial Sequence
  Description of Artificial Sequence: Synthetic oligonucleotide
  Antisense strand to SEQ ID NO: 2132026
uuuacccuccagagcauag

SEQ ID NO: 2132028 - RNA, 19 nt, Artificial Sequence
  Description of Artificial Sequence: Synthetic oligonucleotide
  Sense strand starting at position 332 of SEQ ID NO: 1882577
accaauaucgccugagauu

SEQ ID NO: 2132029 - RNA, 19 nt, Artificial Sequence
  Description of Artificial Sequence: Synthetic oligonucleotide
  Antisense strand to SEQ ID NO: 2132028
aaucucaggcgauauuggu

SEQ ID NO: 2132030 - RNA, 19 nt, Artificial Sequence
  Description of Artificial Sequence: Synthetic oligonucleotide
  Sense strand starting at position 376 of SEQ ID NO: 1882577
ccuccugugugauuagaaa

SEQ ID NO: 2132031 - RNA, 19 nt, Artificial Sequence
  Description of Artificial Sequence: Synthetic oligonucleotide
  Antisense strand to SEQ ID NO: 2132030
uuucuaaucacacaggagg

SEQ ID NO: 2132032 - RNA, 19 nt, Artificial Sequence
  Description of Artificial Sequence: Synthetic oligonucleotide
  Sense strand starting at position 404 of SEQ ID NO: 1882577
aggagucaguaauugaaac

SEQ ID NO: 2132033 - RNA, 19 nt, Artificial Sequence
  Description of Artificial Sequence: Synthetic oligonucleotide
  Antisense strand to SEQ ID NO: 2132032
guuucaauuacugacuccu

SEQ ID NO: 2132034 - RNA, 19 nt, Artificial Sequence
  Description of Artificial Sequence: Synthetic oligonucleotide
  Sense strand starting at position 405 of SEQ ID NO: 1882577
ggagucaguaauugaaacu

SEQ ID NO: 2132035 - RNA, 19 nt, Artificial Sequence
  Description of Artificial Sequence: Synthetic oligonucleotide
  Antisense strand to SEQ ID NO: 2132034
aguuucaauuacugacucc

SEQ ID NO: 2132036 - RNA, 19 nt, Artificial Sequence
  Description of Artificial Sequence: Synthetic oligonucleotide
  Sense strand starting at position 615 of SEQ ID NO: 1882577
ugucuuugcucaguuauuu

SEQ ID NO: 2132037 - RNA, 19 nt, Artificial Sequence
  Description of Artificial Sequence: Synthetic oligonucleotide
  Antisense strand to SEQ ID NO: 2132036
aaauaacugagcaaagaca

SEQ ID NO: 2132038 - RNA, 19 nt, Artificial Sequence
  Description of Artificial Sequence: Synthetic oligonucleotide
  Sense strand starting at position 619 of SEQ ID NO: 1882577
uuugcucaguuauuucuua

SEQ ID NO: 2132039 - RNA, 19 nt, Artificial Sequence
  Description of Artificial Sequence: Synthetic oligonucleotide
  Antisense strand to SEQ ID NO: 2132038
uaagaaauaacugagcaaa

SEQ ID NO: 2132040 - RNA, 19 nt, Artificial Sequence
  Description of Artificial Sequence: Synthetic oligonucleotide
  Sense strand starting at position 627 of SEQ ID NO: 1882577
guuauuucuuaggccuauu

SEQ ID NO: 2132041 - RNA, 19 nt, Artificial Sequence
  Description of Artificial Sequence: Synthetic oligonucleotide
  Antisense strand to SEQ ID NO: 2132040
aauaggccuaagaaauaac

SEQ ID NO: 2132042 - RNA, 19 nt, Artificial Sequence
  Description of Artificial Sequence: Synthetic oligonucleotide
  Sense strand starting at position 763 of SEQ ID NO: 1882577
ggagucuuggcagagccua

SEQ ID NO: 2132043 - RNA, 19 nt, Artificial Sequence
  Description of Artificial Sequence: Synthetic oligonucleotide
  Antisense strand to SEQ ID NO: 2132042
uaggcucugccaagacucc

SEQ ID NO: 2132044 - RNA, 19 nt, Artificial Sequence
  Description of Artificial Sequence: Synthetic oligonucleotide
  Sense strand starting at position 793 of SEQ ID NO: 1882577
ugcauauaaauguggagua

SEQ ID NO: 2132045 - RNA, 19 nt, Artificial Sequence
  Description of Artificial Sequence: Synthetic oligonucleotide
  Antisense strand to SEQ ID NO: 2132044
uacuccacauuuauaugca

SEQ ID NO: 2132046 - RNA, 19 nt, Artificial Sequence
  Description of Artificial Sequence: Synthetic oligonucleotide
  Sense strand starting at position 935 of SEQ ID NO: 1882577
guuugccagcuuuaacaaa

SEQ ID NO: 2132047 - RNA, 19 nt, Artificial Sequence
  Description of Artificial Sequence: Synthetic oligonucleotide
  Antisense strand to SEQ ID NO: 2132046
uuuguuaaagcuggcaaac

SEQ ID NO: 2132048 - RNA, 19 nt, Artificial Sequence
  Description of Artificial Sequence: Synthetic oligonucleotide
  Sense strand starting at position 960 of SEQ ID NO: 1882577
auggcacucuuccuugaaa

SEQ ID NO: 2132049 - RNA, 19 nt, Artificial Sequence
  Description of Artificial Sequence: Synthetic oligonucleotide
  Antisense strand to SEQ ID NO: 2132048
uuucaaggaagagugccau

SEQ ID NO: 2132050 - RNA, 19 nt, Artificial Sequence
  Description of Artificial Sequence: Synthetic oligonucleotide
  Sense strand starting at position 980 of SEQ ID NO: 1882577
cuggaaucucaauagucuu

SEQ ID NO: 2132051 - RNA, 19 nt, Artificial Sequence
  Description of Artificial Sequence: Synthetic oligonucleotide
  Antisense strand to SEQ ID NO: 2132050
aagacuauugagauuccag

SEQ ID NO: 2132052 - RNA, 19 nt, Artificial Sequence
  Description of Artificial Sequence: Synthetic oligonucleotide
  Sense strand starting at position 1002 of SEQ ID NO: 1882577
ccacauacuguauaacagu

SEQ ID NO: 2132053 - RNA, 19 nt, Artificial Sequence
  Description of Artificial Sequence: Synthetic oligonucleotide
  Antisense strand to SEQ ID NO: 2132052
acuguuauacaguaugugg

SEQ ID NO: 2132054 - RNA, 19 nt, Artificial Sequence
  Description of Artificial Sequence: Synthetic oligonucleotide
  Sense strand starting at position 1034 of SEQ ID NO: 1882577
cuaggcacucuugaacuaa

SEQ ID NO: 2132055 - RNA, 19 nt, Artificial Sequence
  Description of Artificial Sequence: Synthetic oligonucleotide
  Antisense strand to SEQ ID NO: 2132054
uuaguucaagagugccuag

SEQ ID NO: 2132056 - RNA, 19 nt, Artificial Sequence
  Description of Artificial Sequence: Synthetic oligonucleotide
  Sense strand starting at position 1277 of SEQ ID NO: 1882577
gguaguaucagauagcauu

SEQ ID NO: 2132057 - RNA, 19 nt, Artificial Sequence
  Description of Artificial Sequence: Synthetic oligonucleotide
  Antisense strand to SEQ ID NO: 2132056
aaugcuaucugauacuacc

SEQ ID NO: 2132058 - RNA, 19 nt, Artificial Sequence
  Description of Artificial Sequence: Synthetic oligonucleotide
  Sense strand starting at position 1283 of SEQ ID NO: 1882577
aucagauagcauuauguaa

SEQ ID NO: 2132059 - RNA, 19 nt, Artificial Sequence
  Description of Artificial Sequence: Synthetic oligonucleotide
  Antisense strand to SEQ ID NO: 2132058
uuacauaaugcuaucugau

SEQ ID NO: 2132060 - RNA, 19 nt, Artificial Sequence
  Description of Artificial Sequence: Synthetic oligonucleotide
  Sense strand starting at position 1341 of SEQ ID NO: 1882577
ccugaaugucuuuaccaga

SEQ ID NO: 2132061 - RNA, 19 nt, Artificial Sequence
  Description of Artificial Sequence: Synthetic oligonucleotide
  Antisense strand to SEQ ID NO: 2132060
ucugguaaagacauucagg

SEQ ID NO: 2132062 - RNA, 19 nt, Artificial Sequence
  Description of Artificial Sequence: Synthetic oligonucleotide
  Sense strand starting at position 1346 of SEQ ID NO: 1882577
augucuuuaccagauuguu

SEQ ID NO: 2132063 - RNA, 19 nt, Artificial Sequence
  Description of Artificial Sequence: Synthetic oligonucleotide
  Antisense strand to SEQ ID NO: 2132062
aacaaucugguaaagacau

SEQ ID NO: 2132064 - RNA, 19 nt, Artificial Sequence
  Description of Artificial Sequence: Synthetic oligonucleotide
  Sense strand starting at position 1508 of SEQ ID NO: 1882577
uuccaugauuugcuuagua

SEQ ID NO: 2132065 - RNA, 19 nt, Artificial Sequence
  Description of Artificial Sequence: Synthetic oligonucleotide
  Antisense strand to SEQ ID NO: 2132064
uacuaagcaaaucauggaa

SEQ ID NO: 2132066 - RNA, 19 nt, Artificial Sequence
  Description of Artificial Sequence: Synthetic oligonucleotide
  Sense strand starting at position 1967 of SEQ ID NO: 1882577
gaaguucagguucgggaua

SEQ ID NO: 2132067 - RNA, 19 nt, Artificial Sequence
  Description of Artificial Sequence: Synthetic oligonucleotide
  Antisense strand to SEQ ID NO: 2132066
uaucccgaaccugaacuuc

SEQ ID NO: 2132068 - RNA, 19 nt, Artificial Sequence
  Description of Artificial Sequence: Synthetic oligonucleotide
  Sense strand starting at position 1972 of SEQ ID NO: 1882577
ucagguucgggauaagauc

SEQ ID NO: 2132069 - RNA, 19 nt, Artificial Sequence
  Description of Artificial Sequence: Synthetic oligonucleotide
  Antisense strand to SEQ ID NO: 2132068
gaucuuaucccgaaccuga

SEQ ID NO: 2132070 - RNA, 19 nt, Artificial Sequence
  Description of Artificial Sequence: Synthetic oligonucleotide
  Sense strand starting at position 2119 of SEQ ID NO: 1882577
cccucacuguuggcagaaa

SEQ ID NO: 2132071 - RNA, 19 nt, Artificial Sequence
  Description of Artificial Sequence: Synthetic oligonucleotide
  Antisense strand to SEQ ID NO: 2132070
uuucugccaacagugaggg

SEQ ID NO: 2132072 - RNA, 19 nt, Artificial Sequence
  Description of Artificial Sequence: Synthetic oligonucleotide
  Sense strand starting at position 2204 of SEQ ID NO: 1882577
cugaauuacuggucuuaau

SEQ ID NO: 2132073 - RNA, 19 nt, Artificial Sequence
  Description of Artificial Sequence: Synthetic oligonucleotide
  Antisense strand to SEQ ID NO: 2132072
auuaagaccaguaauucag

SEQ ID NO: 2132074 - RNA, 19 nt, Artificial Sequence
  Description of Artificial Sequence: Synthetic oligonucleotide
  Sense strand starting at position 2304 of SEQ ID NO: 1882577
cuuguauauguacacauaa

SEQ ID NO: 2132075 - RNA, 19 nt, Artificial Sequence
  Description of Artificial Sequence: Synthetic oligonucleotide
  Antisense strand to SEQ ID NO: 2132074
uuauguguacauauacaag

SEQ ID NO: 2132076 - RNA, 19 nt, Artificial Sequence
  Description of Artificial Sequence: Synthetic oligonucleotide
  Sense strand starting at position 2340 of SEQ ID NO: 1882577
cugugacacugacuacaaa

SEQ ID NO: 2132077 - RNA, 19 nt, Artificial Sequence
  Description of Artificial Sequence: Synthetic oligonucleotide
  Antisense strand to SEQ ID NO: 2132076
uuuguagucagugucacag

SEQ ID NO: 2132078 - RNA, 19 nt, Artificial Sequence
  Description of Artificial Sequence: Synthetic oligonucleotide
  Sense strand starting at position 2529 of SEQ ID NO: 1882577
agucuagguguggauuaaa

SEQ ID NO: 2132079 - RNA, 19 nt, Artificial Sequence
  Description of Artificial Sequence: Synthetic oligonucleotide
  Antisense strand to SEQ ID NO: 2132078
uuuaauccacaccuagacu

SEQ ID NO: 2132080 - RNA, 19 nt, Artificial Sequence
  Description of Artificial Sequence: Synthetic oligonucleotide
  Sense strand starting at position 2636 of SEQ ID NO: 1882577
ccagauguucuggaaguuu

SEQ ID NO: 2132081 - RNA, 19 nt, Artificial Sequence
  Description of Artificial Sequence: Synthetic oligonucleotide
  Antisense strand to SEQ ID NO: 2132080
aaacuuccagaacaucugg

SEQ ID NO: 2132082 - RNA, 19 nt, Artificial Sequence
  Description of Artificial Sequence: Synthetic oligonucleotide
  Sense strand starting at position 2709 of SEQ ID NO: 1882577
ccuguaaaucaacagguuu

SEQ ID NO: 2132083 - RNA, 19 nt, Artificial Sequence
  Description of Artificial Sequence: Synthetic oligonucleotide
  Antisense strand to SEQ ID NO: 2132082
aaaccuguugauuuacagg

SEQ ID NO: 2132084 - RNA, 19 nt, Artificial Sequence
  Description of Artificial Sequence: Synthetic oligonucleotide
  Sense strand starting at position 2723 of SEQ ID NO: 1882577
gguuuacuccuuuaguuug

SEQ ID NO: 2132085 - RNA, 19 nt, Artificial Sequence
  Description of Artificial Sequence: Synthetic oligonucleotide
  Antisense strand to SEQ ID NO: 2132084
caaacuaaaggaguaaacc

SEQ ID NO: 2132086 - RNA, 19 nt, Artificial Sequence
  Description of Artificial Sequence: Synthetic oligonucleotide
  Sense strand starting at position 2836 of SEQ ID NO: 1882577
auuuaagcauucucgcaga

SEQ ID NO: 2132087 - RNA, 19 nt, Artificial Sequence
  Description of Artificial Sequence: Synthetic oligonucleotide
  Antisense strand to SEQ ID NO: 2132086
ucugcgagaaugcuuaaau

SEQ ID NO: 2132088 - RNA, 19 nt, Artificial Sequence
  Description of Artificial Sequence: Synthetic oligonucleotide
  Sense strand starting at position 3380 of SEQ ID NO: 1882577
ccaguagcuccuuauauag

SEQ ID NO: 2132089 - RNA, 19 nt, Artificial Sequence
  Description of Artificial Sequence: Synthetic oligonucleotide
  Antisense strand to SEQ ID NO: 2132088
cuauauaaggagcuacugg

SEQ ID NO: 2132090 - RNA, 19 nt, Artificial Sequence
  Description of Artificial Sequence: Synthetic oligonucleotide
  Sense strand starting at position 3437 of SEQ ID NO: 1882577
accuauuggacauggaagu

SEQ ID NO: 2132091 - RNA, 19 nt, Artificial Sequence
  Description of Artificial Sequence: Synthetic oligonucleotide
  Antisense strand to SEQ ID NO: 2132090
acuuccauguccaauaggu

SEQ ID NO: 2132092 - RNA, 19 nt, Artificial Sequence
  Description of Artificial Sequence: Synthetic oligonucleotide
  Sense strand starting at position 3438 of SEQ ID NO: 1882577
ccuauuggacauggaagua

SEQ ID NO: 2132093 - RNA, 19 nt, Artificial Sequence
  Description of Artificial Sequence: Synthetic oligonucleotide
  Antisense strand to SEQ ID NO: 2132092
uacuuccauguccaauagg

SEQ ID NO: 2132094 - RNA, 19 nt, Artificial Sequence
  Description of Artificial Sequence: Synthetic oligonucleotide
  Sense strand starting at position 3634 of SEQ ID NO: 1882577
gcggguguggcgccagaau

SEQ ID NO: 2132095 - RNA, 19 nt, Artificial Sequence
  Description of Artificial Sequence: Synthetic oligonucleotide
  Antisense strand to SEQ ID NO: 2132094
auucuggcgccacacccgc

SEQ ID NO: 2132096 - RNA, 19 nt, Artificial Sequence
  Description of Artificial Sequence: Synthetic oligonucleotide
  Sense strand starting at position 3636 of SEQ ID NO: 1882577
ggguguggcgccagaauuc

SEQ ID NO: 2132097 - RNA, 19 nt, Artificial Sequence
  Description of Artificial Sequence: Synthetic oligonucleotide
  Antisense strand to SEQ ID NO: 2132096
gaauucuggcgccacaccc

SEQ ID NO: 2132098 - RNA, 19 nt, Artificial Sequence
  Description of Artificial Sequence: Synthetic oligonucleotide
  Sense strand starting at position 3711 of SEQ ID NO: 1882577
acagauuggguccgagagu

SEQ ID NO: 2132099 - RNA, 19 nt, Artificial Sequence
  Description of Artificial Sequence: Synthetic oligonucleotide
  Antisense strand to SEQ ID NO: 2132098
acucucggacccaaucugu

SEQ ID NO: 2132100 - RNA, 19 nt, Artificial Sequence
  Description of Artificial Sequence: Synthetic oligonucleotide
  Sense strand starting at position 2 of SEQ ID NO: 1882578
agcuaugcucuggagggua

SEQ ID NO: 2132101 - RNA, 19 nt, Artificial Sequence
  Description of Artificial Sequence: Synthetic oligonucleotide
  Antisense strand to SEQ ID NO: 2132100
uacccuccagagcauagcu

SEQ ID NO: 2132102 - RNA, 19 nt, Artificial Sequence
  Description of Artificial Sequence: Synthetic oligonucleotide
  Sense strand starting at position 4 of SEQ ID NO: 1882578
cuaugcucuggaggguaaa

SEQ ID NO: 2132103 - RNA, 19 nt, Artificial Sequence
  Description of Artificial Sequence: Synthetic oligonucleotide
  Antisense strand to SEQ ID NO: 2132102
uuuacccuccagagcauag

SEQ ID NO: 2132104 - RNA, 19 nt, Artificial Sequence
  Description of Artificial Sequence: Synthetic oligonucleotide
  Sense strand starting at position 41 of SEQ ID NO: 1882578
accaauaucgccugagauu

SEQ ID NO: 2132105 - RNA, 19 nt, Artificial Sequence
  Description of Artificial Sequence: Synthetic oligonucleotide
  Antisense strand to SEQ ID NO: 2132104
aaucucaggcgauauuggu

SEQ ID NO: 2132106 - RNA, 19 nt, Artificial Sequence
  Description of Artificial Sequence: Synthetic oligonucleotide
  Sense strand starting at position 85 of SEQ ID NO: 1882578
ccuccugugugauuagaaa

SEQ ID NO: 2132107 - RNA, 19 nt, Artificial Sequence
  Description of Artificial Sequence: Synthetic oligonucleotide
  Antisense strand to SEQ ID NO: 2132106
uuucuaaucacacaggagg

SEQ ID NO: 2132108 - RNA, 19 nt, Artificial Sequence
  Description of Artificial Sequence: Synthetic oligonucleotide
  Sense strand starting at position 113 of SEQ ID NO: 1882578
aggagucaguaauugaaac

SEQ ID NO: 2132109 - RNA, 19 nt, Artificial Sequence
  Description of Artificial Sequence: Synthetic oligonucleotide
  Antisense strand to SEQ ID NO: 2132108
guuucaauuacugacuccu

SEQ ID NO: 2132110 - RNA, 19 nt, Artificial Sequence
  Description of Artificial Sequence: Synthetic oligonucleotide
  Sense strand starting at position 114 of SEQ ID NO: 1882578
ggagucaguaauugaaacu

SEQ ID NO: 2132111 - RNA, 19 nt, Artificial Sequence
  Description of Artificial Sequence: Synthetic oligonucleotide
  Antisense strand to SEQ ID NO: 2132110
aguuucaauuacugacucc

SEQ ID NO: 2132112 - RNA, 19 nt, Artificial Sequence
  Description of Artificial Sequence: Synthetic oligonucleotide
  Sense strand starting at position 324 of SEQ ID NO: 1882578
ugucuuugcucaguuauuu

SEQ ID NO: 2132113 - RNA, 19 nt, Artificial Sequence
  Description of Artificial Sequence: Synthetic oligonucleotide
  Antisense strand to SEQ ID NO: 2132112
aaauaacugagcaaagaca

SEQ ID NO: 2132114 - RNA, 19 nt, Artificial Sequence
  Description of Artificial Sequence: Synthetic oligonucleotide
  Sense strand starting at position 328 of SEQ ID NO: 1882578
uuugcucaguuauuucuua

SEQ ID NO: 2132115 - RNA, 19 nt, Artificial Sequence
  Description of Artificial Sequence: Synthetic oligonucleotide
  Antisense strand to SEQ ID NO: 2132114
uaagaaauaacugagcaaa

SEQ ID NO: 2132116 - RNA, 19 nt, Artificial Sequence
  Description of Artificial Sequence: Synthetic oligonucleotide
  Sense strand starting at position 336 of SEQ ID NO: 1882578
guuauuucuuaggccuauu

SEQ ID NO: 2132117 - RNA, 19 nt, Artificial Sequence
  Description of Artificial Sequence: Synthetic oligonucleotide
  Antisense strand to SEQ ID NO: 2132116
aauaggccuaagaaauaac

SEQ ID NO: 2132118 - RNA, 19 nt, Artificial Sequence
  Description of Artificial Sequence: Synthetic oligonucleotide
  Sense strand starting at position 472 of SEQ ID NO: 1882578
ggagucuuggcagagccua

SEQ ID NO: 2132119 - RNA, 19 nt, Artificial Sequence
  Description of Artificial Sequence: Synthetic oligonucleotide
  Antisense strand to SEQ ID NO: 2132118
uaggcucugccaagacucc

SEQ ID NO: 2132120 - RNA, 19 nt, Artificial Sequence
  Description of Artificial Sequence: Synthetic oligonucleotide
  Sense strand starting at position 502 of SEQ ID NO: 1882578
ugcauauaaauguggagua

SEQ ID NO: 2132121 - RNA, 19 nt, Artificial Sequence
  Description of Artificial Sequence: Synthetic oligonucleotide
  Antisense strand to SEQ ID NO: 2132120
uacuccacauuuauaugca

SEQ ID NO: 2132122 - RNA, 19 nt, Artificial Sequence
  Description of Artificial Sequence: Synthetic oligonucleotide
  Sense strand starting at position 644 of SEQ ID NO: 1882578
guuugccagcuuuaacaaa

SEQ ID NO: 2132123 - RNA, 19 nt, Artificial Sequence
  Description of Artificial Sequence: Synthetic oligonucleotide
  Antisense strand to SEQ ID NO: 2132122
uuuguuaaagcuggcaaac

SEQ ID NO: 2132124 - RNA, 19 nt, Artificial Sequence
  Description of Artificial Sequence: Synthetic oligonucleotide
  Sense strand starting at position 669 of SEQ ID NO: 1882578
auggcacucuuccuugaaa

SEQ ID NO: 2132125 - RNA, 19 nt, Artificial Sequence
  Description of Artificial Sequence: Synthetic oligonucleotide
  Antisense strand to SEQ ID NO: 2132124
uuucaaggaagagugccau

SEQ ID NO: 2132126 - RNA, 19 nt, Artificial Sequence
  Description of Artificial Sequence: Synthetic oligonucleotide
  Sense strand starting at position 689 of SEQ ID NO: 1882578
cuggaaucucaauagucuu

SEQ ID NO: 2132127 - RNA, 19 nt, Artificial Sequence
  Description of Artificial Sequence: Synthetic oligonucleotide
  Antisense strand to SEQ ID NO: 2132126
aagacuauugagauuccag

SEQ ID NO: 2132128 - RNA, 19 nt, Artificial Sequence
  Description of Artificial Sequence: Synthetic oligonucleotide
  Sense strand starting at position 711 of SEQ ID NO: 1882578
ccacauacuguauaacagu

SEQ ID NO: 2132129 - RNA, 19 nt, Artificial Sequence
  Description of Artificial Sequence: Synthetic oligonucleotide
  Antisense strand to SEQ ID NO: 2132128
acuguuauacaguaugugg

SEQ ID NO: 2132130 - RNA, 19 nt, Artificial Sequence
  Description of Artificial Sequence: Synthetic oligonucleotide
  Sense strand starting at position 743 of SEQ ID NO: 1882578
cuaggcacucuugaacuaa

SEQ ID NO: 2132131 - RNA, 19 nt, Artificial Sequence
  Description of Artificial Sequence: Synthetic oligonucleotide
  Antisense strand to SEQ ID NO: 2132130
uuaguucaagagugccuag

SEQ ID NO: 2132132 - RNA, 19 nt, Artificial Sequence
  Description of Artificial Sequence: Synthetic oligonucleotide
  Sense strand starting at position 986 of SEQ ID NO: 1882578
gguaguaucagauagcauu

SEQ ID NO: 2132133 - RNA, 19 nt, Artificial Sequence
  Description of Artificial Sequence: Synthetic oligonucleotide
  Antisense strand to SEQ ID NO: 2132132
aaugcuaucugauacuacc

SEQ ID NO: 2132134 - RNA, 19 nt, Artificial Sequence
  Description of Artificial Sequence: Synthetic oligonucleotide
  Sense strand starting at position 992 of SEQ ID NO: 1882578
aucagauagcauuauguaa

SEQ ID NO: 2132135 - RNA, 19 nt, Artificial Sequence
  Description of Artificial Sequence: Synthetic oligonucleotide
  Antisense strand to SEQ ID NO: 2132134
uuacauaaugcuaucugau

SEQ ID NO: 2132136 - RNA, 19 nt, Artificial Sequence
  Description of Artificial Sequence: Synthetic oligonucleotide
  Sense strand starting at position 1050 of SEQ ID NO: 1882578
ccugaaugucuuuaccaga

SEQ ID NO: 2132137 - RNA, 19 nt, Artificial Sequence
  Description of Artificial Sequence: Synthetic oligonucleotide
  Antisense strand to SEQ ID NO: 2132136
ucugguaaagacauucagg

SEQ ID NO: 2132138 - RNA, 19 nt, Artificial Sequence
  Description of Artificial Sequence: Synthetic oligonucleotide
  Sense strand starting at position 1055 of SEQ ID NO: 1882578
augucuuuaccagauuguu

SEQ ID NO: 2132139 - RNA, 19 nt, Artificial Sequence
  Description of Artificial Sequence: Synthetic oligonucleotide
  Antisense strand to SEQ ID NO: 2132138
aacaaucugguaaagacau

SEQ ID NO: 2132140 - RNA, 19 nt, Artificial Sequence
  Description of Artificial Sequence: Synthetic oligonucleotide
  Sense strand starting at position 1217 of SEQ ID NO: 1882578
uuccaugauuugcuuagua

SEQ ID NO: 2132141 - RNA, 19 nt, Artificial Sequence
  Description of Artificial Sequence: Synthetic oligonucleotide
  Antisense strand to SEQ ID NO: 2132140
uacuaagcaaaucauggaa

SEQ ID NO: 2132142 - RNA, 19 nt, Artificial Sequence
  Description of Artificial Sequence: Synthetic oligonucleotide
  Sense strand starting at position 1676 of SEQ ID NO: 1882578
gaaguucagguucgggaua

SEQ ID NO: 2132143 - RNA, 19 nt, Artificial Sequence
  Description of Artificial Sequence: Synthetic oligonucleotide
  Antisense strand to SEQ ID NO: 2132142
uaucccgaaccugaacuuc

SEQ ID NO: 2132144 - RNA, 19 nt, Artificial Sequence
  Description of Artificial Sequence: Synthetic oligonucleotide
  Sense strand starting at position 1681 of SEQ ID NO: 1882578
ucagguucgggauaagauc

SEQ ID NO: 2132145 - RNA, 19 nt, Artificial Sequence
  Description of Artificial Sequence: Synthetic oligonucleotide
  Antisense strand to SEQ ID NO: 2132144
gaucuuaucccgaaccuga

SEQ ID NO: 2132146 - RNA, 19 nt, Artificial Sequence
  Description of Artificial Sequence: Synthetic oligonucleotide
  Sense strand starting at position 1828 of SEQ ID NO: 1882578
cccucacuguuggcagaaa

SEQ ID NO: 2132147 - RNA, 19 nt, Artificial Sequence
  Description of Artificial Sequence: Synthetic oligonucleotide
  Antisense strand to SEQ ID NO: 2132146
uuucugccaacagugaggg

SEQ ID NO: 2132148 - RNA, 19 nt, Artificial Sequence
  Description of Artificial Sequence: Synthetic oligonucleotide
  Sense strand starting at position 1913 of SEQ ID NO: 1882578
cugaauuacuggucuuaau

SEQ ID NO: 2132149 - RNA, 19 nt, Artificial Sequence
  Description of Artificial Sequence: Synthetic oligonucleotide
  Antisense strand to SEQ ID NO: 2132148
auuaagaccaguaauucag

SEQ ID NO: 2132150 - RNA, 19 nt, Artificial Sequence
  Description of Artificial Sequence: Synthetic oligonucleotide
  Sense strand starting at position 2013 of SEQ ID NO: 1882578
cuuguauauguacacauaa

SEQ ID NO: 2132151 - RNA, 19 nt, Artificial Sequence
  Description of Artificial Sequence: Synthetic oligonucleotide
  Antisense strand to SEQ ID NO: 2132150
uuauguguacauauacaag

SEQ ID NO: 2132152 - RNA, 19 nt, Artificial Sequence
  Description of Artificial Sequence: Synthetic oligonucleotide
  Sense strand starting at position 2049 of SEQ ID NO: 1882578
cugugacacugacuacaaa

SEQ ID NO: 2132153 - RNA, 19 nt, Artificial Sequence
  Description of Artificial Sequence: Synthetic oligonucleotide
  Antisense strand to SEQ ID NO: 2132152
uuuguagucagugucacag

SEQ ID NO: 2132154 - RNA, 19 nt, Artificial Sequence
  Description of Artificial Sequence: Synthetic oligonucleotide
  Sense strand starting at position 2238 of SEQ ID NO: 1882578
agucuagguguggauuaaa

SEQ ID NO: 2132155 - RNA, 19 nt, Artificial Sequence
  Description of Artificial Sequence: Synthetic oligonucleotide
  Antisense strand to SEQ ID NO: 2132154
uuuaauccacaccuagacu

SEQ ID NO: 2132156 - RNA, 19 nt, Artificial Sequence
  Description of Artificial Sequence: Synthetic oligonucleotide
  Sense strand starting at position 2345 of SEQ ID NO: 1882578
ccagauguucuggaaguuu

SEQ ID NO: 2132157 - RNA, 19 nt, Artificial Sequence
  Description of Artificial Sequence: Synthetic oligonucleotide
  Antisense strand to SEQ ID NO: 2132156
aaacuuccagaacaucugg

SEQ ID NO: 2132158 - RNA, 19 nt, Artificial Sequence
  Description of Artificial Sequence: Synthetic oligonucleotide
  Sense strand starting at position 2418 of SEQ ID NO: 1882578
ccuguaaaucaacagguuu

SEQ ID NO: 2132159 - RNA, 19 nt, Artificial Sequence
  Description of Artificial Sequence: Synthetic oligonucleotide
  Antisense strand to SEQ ID NO: 2132158
aaaccuguugauuuacagg

SEQ ID NO: 2132160 - RNA, 19 nt, Artificial Sequence
  Description of Artificial Sequence: Synthetic oligonucleotide
  Sense strand starting at position 2432 of SEQ ID NO: 1882578
gguuuacuccuuuaguuug

SEQ ID NO: 2132161 - RNA, 19 nt, Artificial Sequence
  Description of Artificial Sequence: Synthetic oligonucleotide
  Antisense strand to SEQ ID NO: 2132160
caaacuaaaggaguaaacc

SEQ ID NO: 2132162 - RNA, 19 nt, Artificial Sequence
  Description of Artificial Sequence: Synthetic oligonucleotide
  Sense strand starting at position 2545 of SEQ ID NO: 1882578
auuuaagcauucucgcaga

SEQ ID NO: 2132163 - RNA, 19 nt, Artificial Sequence
  Description of Artificial Sequence: Synthetic oligonucleotide
  Antisense strand to SEQ ID NO: 2132162
ucugcgagaaugcuuaaau

SEQ ID NO: 2132164 - RNA, 19 nt, Artificial Sequence
  Description of Artificial Sequence: Synthetic oligonucleotide
  Sense strand starting at position 3089 of SEQ ID NO: 1882578
ccaguagcuccuuauauag

SEQ ID NO: 2132165 - RNA, 19 nt, Artificial Sequence
  Description of Artificial Sequence: Synthetic oligonucleotide
  Antisense strand to SEQ ID NO: 2132164
cuauauaaggagcuacugg

SEQ ID NO: 2132166 - RNA, 19 nt, Artificial Sequence
  Description of Artificial Sequence: Synthetic oligonucleotide
  Sense strand starting at position 3146 of SEQ ID NO: 1882578
accuauuggacauggaagu

SEQ ID NO: 2132167 - RNA, 19 nt, Artificial Sequence
  Description of Artificial Sequence: Synthetic oligonucleotide
  Antisense strand to SEQ ID NO: 2132166
acuuccauguccaauaggu

SEQ ID NO: 2132168 - RNA, 19 nt, Artificial Sequence
  Description of Artificial Sequence: Synthetic oligonucleotide
  Sense strand starting at position 3147 of SEQ ID NO: 1882578
ccuauuggacauggaagua

SEQ ID NO: 2132169 - RNA, 19 nt, Artificial Sequence
  Description of Artificial Sequence: Synthetic oligonucleotide
  Antisense strand to SEQ ID NO: 2132168
uacuuccauguccaauagg

SEQ ID NO: 2132170 - RNA, 19 nt, Artificial Sequence
  Description of Artificial Sequence: Synthetic oligonucleotide
  Sense strand starting at position 3343 of SEQ ID NO: 1882578
gcggguguggcgccagaau

SEQ ID NO: 2132171 - RNA, 19 nt, Artificial Sequence
  Description of Artificial Sequence: Synthetic oligonucleotide
  Antisense strand to SEQ ID NO: 2132170
auucuggcgccacacccgc

SEQ ID NO: 2132172 - RNA, 19 nt, Artificial Sequence
  Description of Artificial Sequence: Synthetic oligonucleotide
  Sense strand starting at position 3345 of SEQ ID NO: 1882578
ggguguggcgccagaauuc

SEQ ID NO: 2132173 - RNA, 19 nt, Artificial Sequence
  Description of Artificial Sequence: Synthetic oligonucleotide
  Antisense strand to SEQ ID NO: 2132172
gaauucuggcgccacaccc

SEQ ID NO: 2132174 - RNA, 19 nt, Artificial Sequence
  Description of Artificial Sequence: Synthetic oligonucleotide
  Sense strand starting at position 3420 of SEQ ID NO: 1882578
acagauuggguccgagagu

SEQ ID NO: 2132175 - RNA, 19 nt, Artificial Sequence
  Description of Artificial Sequence: Synthetic oligonucleotide
  Antisense strand to SEQ ID NO: 2132174
acucucggacccaaucugu

SEQ ID NO: 2132176 - RNA, 19 nt, Artificial Sequence
  Description of Artificial Sequence: Synthetic oligonucleotide
  Sense strand starting at position 3727 of SEQ ID NO: 1882578
caggcauccgguuacacua

SEQ ID NO: 2132177 - RNA, 19 nt, Artificial Sequence
  Description of Artificial Sequence: Synthetic oligonucleotide
  Antisense strand to SEQ ID NO: 2132176
uaguguaaccggaugccug

SEQ ID NO: 2132178 - RNA, 19 nt, Artificial Sequence
  Description of Artificial Sequence: Synthetic oligonucleotide
  Sense strand starting at position 3931 of SEQ ID NO: 1882578
ugagaaguaucccugaaua

SEQ ID NO: 2132179 - RNA, 19 nt, Artificial Sequence
  Description of Artificial Sequence: Synthetic oligonucleotide
  Antisense strand to SEQ ID NO: 2132178
uauucagggauacuucuca

SEQ ID NO: 2132180 - RNA, 19 nt, Artificial Sequence
  Description of Artificial Sequence: Synthetic oligonucleotide
  Sense strand starting at position 385 of SEQ ID NO: 1882579
ggugcaugccuguaaguca

SEQ ID NO: 2132181 - RNA, 19 nt, Artificial Sequence
  Description of Artificial Sequence: Synthetic oligonucleotide
  Antisense strand to SEQ ID NO: 2132180
ugacuuacaggcaugcacc

SEQ ID NO: 2132182 - RNA, 19 nt, Artificial Sequence
  Description of Artificial Sequence: Synthetic oligonucleotide
  Sense strand starting at position 388 of SEQ ID NO: 1882579
gcaugccuguaagucauua

SEQ ID NO: 2132183 - RNA, 19 nt, Artificial Sequence
  Description of Artificial Sequence: Synthetic oligonucleotide
  Antisense strand to SEQ ID NO: 2132182
uaaugacuuacaggcaugc

SEQ ID NO: 2132184 - RNA, 19 nt, Artificial Sequence
  Description of Artificial Sequence: Synthetic oligonucleotide
  Sense strand starting at position 392 of SEQ ID NO: 1882579
gccuguaagucauuagcua

SEQ ID NO: 2132185 - RNA, 19 nt, Artificial Sequence
  Description of Artificial Sequence: Synthetic oligonucleotide
  Antisense strand to SEQ ID NO: 2132184
uagcuaaugacuuacaggc

SEQ ID NO: 2132186 - RNA, 19 nt, Artificial Sequence
  Description of Artificial Sequence: Synthetic oligonucleotide
  Sense strand starting at position 393 of SEQ ID NO: 1882579
ccuguaagucauuagcuac

SEQ ID NO: 2132187 - RNA, 19 nt, Artificial Sequence
  Description of Artificial Sequence: Synthetic oligonucleotide
  Antisense strand to SEQ ID NO: 2132186
guagcuaaugacuuacagg

SEQ ID NO: 2132188 - RNA, 19 nt, Artificial Sequence
  Description of Artificial Sequence: Synthetic oligonucleotide
  Sense strand starting at position 713 of SEQ ID NO: 1882579
guuacaaugagcugagaau

SEQ ID NO: 2132189 - RNA, 19 nt, Artificial Sequence
  Description of Artificial Sequence: Synthetic oligonucleotide
  Antisense strand to SEQ ID NO: 2132188
auucucagcucauuguaac

SEQ ID NO: 2132190 - RNA, 19 nt, Artificial Sequence
  Description of Artificial Sequence: Synthetic oligonucleotide
  Sense strand starting at position 821 of SEQ ID NO: 1882579
ggcuaauaccuguaaucug

SEQ ID NO: 2132191 - RNA, 19 nt, Artificial Sequence
  Description of Artificial Sequence: Synthetic oligonucleotide
  Antisense strand to SEQ ID NO: 2132190
cagauuacagguauuagcc

SEQ ID NO: 2132192 - RNA, 19 nt, Artificial Sequence
  Description of Artificial Sequence: Synthetic oligonucleotide
  Sense strand starting at position 863 of SEQ ID NO: 1882579
gcagaucucuuggucagga

SEQ ID NO: 2132193 - RNA, 19 nt, Artificial Sequence
  Description of Artificial Sequence: Synthetic oligonucleotide
  Antisense strand to SEQ ID NO: 2132192
uccugaccaagagaucugc

SEQ ID NO: 2132194 - RNA, 19 nt, Artificial Sequence
  Description of Artificial Sequence: Synthetic oligonucleotide
  Sense strand starting at position 865 of SEQ ID NO: 1882579
agaucucuuggucaggagu

SEQ ID NO: 2132195 - RNA, 19 nt, Artificial Sequence
  Description of Artificial Sequence: Synthetic oligonucleotide
  Antisense strand to SEQ ID NO: 2132194
acuccugaccaagagaucu

SEQ ID NO: 2132196 - RNA, 19 nt, Artificial Sequence
  Description of Artificial Sequence: Synthetic oligonucleotide
  Sense strand starting at position 1165 of SEQ ID NO: 1882579
uguaauacaguuuagaucu

SEQ ID NO: 2132197 - RNA, 19 nt, Artificial Sequence
  Description of Artificial Sequence: Synthetic oligonucleotide
  Antisense strand to SEQ ID NO: 2132196
agaucuaaacuguauuaca

SEQ ID NO: 2132198 - RNA, 19 nt, Artificial Sequence
  Description of Artificial Sequence: Synthetic oligonucleotide
  Sense strand starting at position 1201 of SEQ ID NO: 1882579
cauauugaauuguaaugga

SEQ ID NO: 2132199 - RNA, 19 nt, Artificial Sequence
  Description of Artificial Sequence: Synthetic oligonucleotide
  Antisense strand to SEQ ID NO: 2132198
uccauuacaauucaauaug

SEQ ID NO: 2132200 - RNA, 19 nt, Artificial Sequence
  Description of Artificial Sequence: Synthetic oligonucleotide
  Sense strand starting at position 1204 of SEQ ID NO: 1882579
auugaauuguaauggauca

SEQ ID NO: 2132201 - RNA, 19 nt, Artificial Sequence
  Description of Artificial Sequence: Synthetic oligonucleotide
  Antisense strand to SEQ ID NO: 2132200
ugauccauuacaauucaau

SEQ ID NO: 2132202 - RNA, 19 nt, Artificial Sequence
  Description of Artificial Sequence: Synthetic oligonucleotide
  Sense strand starting at position 1265 of SEQ ID NO: 1882579
ugaugcugugcucaugaca

SEQ ID NO: 2132203 - RNA, 19 nt, Artificial Sequence
  Description of Artificial Sequence: Synthetic oligonucleotide
  Antisense strand to SEQ ID NO: 2132202
ugucaugagcacagcauca

SEQ ID NO: 2132204 - RNA, 19 nt, Artificial Sequence
  Description of Artificial Sequence: Synthetic oligonucleotide
  Sense strand starting at position 1280 of SEQ ID NO: 1882579
gacagucaguucucuagag

SEQ ID NO: 2132205 - RNA, 19 nt, Artificial Sequence
  Description of Artificial Sequence: Synthetic oligonucleotide
  Antisense strand to SEQ ID NO: 2132204
cucuagagaacugacuguc

SEQ ID NO: 2132206 - RNA, 19 nt, Artificial Sequence
  Description of Artificial Sequence: Synthetic oligonucleotide
  Sense strand starting at position 1281 of SEQ ID NO: 1882579
acagucaguucucuagaga

SEQ ID NO: 2132207 - RNA, 19 nt, Artificial Sequence
  Description of Artificial Sequence: Synthetic oligonucleotide
  Antisense strand to SEQ ID NO: 2132206
ucucuagagaacugacugu

SEQ ID NO: 2132208 - RNA, 19 nt, Artificial Sequence
  Description of Artificial Sequence: Synthetic oligonucleotide
  Sense strand starting at position 1282 of SEQ ID NO: 1882579
cagucaguucucuagagau

SEQ ID NO: 2132209 - RNA, 19 nt, Artificial Sequence
  Description of Artificial Sequence: Synthetic oligonucleotide
  Antisense strand to SEQ ID NO: 2132208
aucucuagagaacugacug

SEQ ID NO: 2132210 - RNA, 19 nt, Artificial Sequence
  Description of Artificial Sequence: Synthetic oligonucleotide
  Sense strand starting at position 1284 of SEQ ID NO: 1882579
gucaguucucuagagauca

SEQ ID NO: 2132211 - RNA, 19 nt, Artificial Sequence
  Description of Artificial Sequence: Synthetic oligonucleotide
  Antisense strand to SEQ ID NO: 2132210
ugaucucuagagaacugac

SEQ ID NO: 2132212 - RNA, 19 nt, Artificial Sequence
  Description of Artificial Sequence: Synthetic oligonucleotide
  Sense strand starting at position 1483 of SEQ ID NO: 1882579
guaaguaacuggccauaaa

SEQ ID NO: 2132213 - RNA, 19 nt, Artificial Sequence
  Description of Artificial Sequence: Synthetic oligonucleotide
  Antisense strand to SEQ ID NO: 2132212
uuuauggccaguuacuuac

SEQ ID NO: 2132214 - RNA, 19 nt, Artificial Sequence
  Description of Artificial Sequence: Synthetic oligonucleotide
  Sense strand starting at position 1916 of SEQ ID NO: 1882579
aguauccaguucccuaaau

SEQ ID NO: 2132215 - RNA, 19 nt, Artificial Sequence
  Description of Artificial Sequence: Synthetic oligonucleotide
  Antisense strand to SEQ ID NO: 2132214
auuuagggaacuggauacu

SEQ ID NO: 2132216 - RNA, 19 nt, Artificial Sequence
  Description of Artificial Sequence: Synthetic oligonucleotide
  Sense strand starting at position 1925 of SEQ ID NO: 1882579
uucccuaaaugagucagaa

SEQ ID NO: 2132217 - RNA, 19 nt, Artificial Sequence
  Description of Artificial Sequence: Synthetic oligonucleotide
  Antisense strand to SEQ ID NO: 2132216
uucugacucauuuagggaa

SEQ ID NO: 2132218 - RNA, 19 nt, Artificial Sequence
  Description of Artificial Sequence: Synthetic oligonucleotide
  Sense strand starting at position 1929 of SEQ ID NO: 1882579
cuaaaugagucagaacuua

SEQ ID NO: 2132219 - RNA, 19 nt, Artificial Sequence
  Description of Artificial Sequence: Synthetic oligonucleotide
  Antisense strand to SEQ ID NO: 2132218
uaaguucugacucauuuag

SEQ ID NO: 2132220 - RNA, 19 nt, Artificial Sequence
  Description of Artificial Sequence: Synthetic oligonucleotide
  Sense strand starting at position 2021 of SEQ ID NO: 1882579
aagggaagcucuucuggaa

SEQ ID NO: 2132221 - RNA, 19 nt, Artificial Sequence
  Description of Artificial Sequence: Synthetic oligonucleotide
  Antisense strand to SEQ ID NO: 2132220
uuccagaagagcuucccuu

SEQ ID NO: 2132222 - RNA, 19 nt, Artificial Sequence
  Description of Artificial Sequence: Synthetic oligonucleotide
  Sense strand starting at position 2064 of SEQ ID NO: 1882579
acacaacagucccaguaua

SEQ ID NO: 2132223 - RNA, 19 nt, Artificial Sequence
  Description of Artificial Sequence: Synthetic oligonucleotide
  Antisense strand to SEQ ID NO: 2132222
uauacugggacuguugugu

SEQ ID NO: 2132224 - RNA, 19 nt, Artificial Sequence
  Description of Artificial Sequence: Synthetic oligonucleotide
  Sense strand starting at position 2366 of SEQ ID NO: 1882579
caacaugagugagacucau

SEQ ID NO: 2132225 - RNA, 19 nt, Artificial Sequence
  Description of Artificial Sequence: Synthetic oligonucleotide
  Antisense strand to SEQ ID NO: 2132224
augagucucacucauguug

SEQ ID NO: 2132226 - RNA, 19 nt, Artificial Sequence
  Description of Artificial Sequence: Synthetic oligonucleotide
  Sense strand starting at position 2412 of SEQ ID NO: 1882579
auagaauagucacaaggaa

SEQ ID NO: 2132227 - RNA, 19 nt, Artificial Sequence
  Description of Artificial Sequence: Synthetic oligonucleotide
  Antisense strand to SEQ ID NO: 2132226
uuccuugugacuauucuau

SEQ ID NO: 2132228 - RNA, 19 nt, Artificial Sequence
  Description of Artificial Sequence: Synthetic oligonucleotide
  Sense strand starting at position 2746 of SEQ ID NO: 1882579
guggauguugcagggagau

SEQ ID NO: 2132229 - RNA, 19 nt, Artificial Sequence
  Description of Artificial Sequence: Synthetic oligonucleotide
  Antisense strand to SEQ ID NO: 2132228
aucucccugcaacauccac

SEQ ID NO: 2132230 - RNA, 19 nt, Artificial Sequence
  Description of Artificial Sequence: Synthetic oligonucleotide
  Sense strand starting at position 2824 of SEQ ID NO: 1882579
accugugguacauggauua

SEQ ID NO: 2132231 - RNA, 19 nt, Artificial Sequence
  Description of Artificial Sequence: Synthetic oligonucleotide
  Antisense strand to SEQ ID NO: 2132230
uaauccauguaccacaggu

SEQ ID NO: 2132232 - RNA, 19 nt, Artificial Sequence
  Description of Artificial Sequence: Synthetic oligonucleotide
  Sense strand starting at position 3125 of SEQ ID NO: 1882579
gugggagaaucgguuaaac

SEQ ID NO: 2132233 - RNA, 19 nt, Artificial Sequence
  Description of Artificial Sequence: Synthetic oligonucleotide
  Antisense strand to SEQ ID NO: 2132232
guuuaaccgauucucccac

SEQ ID NO: 2132234 - RNA, 19 nt, Artificial Sequence
  Description of Artificial Sequence: Synthetic oligonucleotide
  Sense strand starting at position 3136 of SEQ ID NO: 1882579
gguuaaacccgggaguuga

SEQ ID NO: 2132235 - RNA, 19 nt, Artificial Sequence
  Description of Artificial Sequence: Synthetic oligonucleotide
  Antisense strand to SEQ ID NO: 2132234
ucaacucccggguuuaacc

SEQ ID NO: 2132236 - RNA, 19 nt, Artificial Sequence
  Description of Artificial Sequence: Synthetic oligonucleotide
  Sense strand starting at position 3543 of SEQ ID NO: 1882579
gcauaaugcccaugaacga

SEQ ID NO: 2132237 - RNA, 19 nt, Artificial Sequence
  Description of Artificial Sequence: Synthetic oligonucleotide
  Antisense strand to SEQ ID NO: 2132236
ucguucaugggcauuaugc

SEQ ID NO: 2132238 - RNA, 19 nt, Artificial Sequence
  Description of Artificial Sequence: Synthetic oligonucleotide
  Sense strand starting at position 3558 of SEQ ID NO: 1882579
acgaaagcuugcuugggaa

SEQ ID NO: 2132239 - RNA, 19 nt, Artificial Sequence
  Description of Artificial Sequence: Synthetic oligonucleotide
  Antisense strand to SEQ ID NO: 2132238
uucccaagcaagcuuucgu

SEQ ID NO: 2132240 - RNA, 19 nt, Artificial Sequence
  Description of Artificial Sequence: Synthetic oligonucleotide
  Sense strand starting at position 3560 of SEQ ID NO: 1882579
gaaagcuugcuugggaaca

SEQ ID NO: 2132241 - RNA, 19 nt, Artificial Sequence
  Description of Artificial Sequence: Synthetic oligonucleotide
  Antisense strand to SEQ ID NO: 2132240
uguucccaagcaagcuuuc

SEQ ID NO: 2132242 - RNA, 19 nt, Artificial Sequence
  Description of Artificial Sequence: Synthetic oligonucleotide
  Sense strand starting at position 3562 of SEQ ID NO: 1882579
aagcuugcuugggaacaaa

SEQ ID NO: 2132243 - RNA, 19 nt, Artificial Sequence
  Description of Artificial Sequence: Synthetic oligonucleotide
  Antisense strand to SEQ ID NO: 2132242
uuuguucccaagcaagcuu

SEQ ID NO: 2132244 - RNA, 19 nt, Artificial Sequence
  Description of Artificial Sequence: Synthetic oligonucleotide
  Sense strand starting at position 3574 of SEQ ID NO: 1882579
gaacaaagcuuuccgaaga

SEQ ID NO: 2132245 - RNA, 19 nt, Artificial Sequence
  Description of Artificial Sequence: Synthetic oligonucleotide
  Antisense strand to SEQ ID NO: 2132244
ucuucggaaagcuuuguuc

SEQ ID NO: 2132246 - RNA, 19 nt, Artificial Sequence
  Description of Artificial Sequence: Synthetic oligonucleotide
  Sense strand starting at position 3579 of SEQ ID NO: 1882579
aagcuuuccgaagaggcau

SEQ ID NO: 2132247 - RNA, 19 nt, Artificial Sequence
  Description of Artificial Sequence: Synthetic oligonucleotide
  Antisense strand to SEQ ID NO: 2132246
augccucuucggaaagcuu

SEQ ID NO: 2132248 - RNA, 19 nt, Artificial Sequence
  Description of Artificial Sequence: Synthetic oligonucleotide
  Sense strand starting at position 3696 of SEQ ID NO: 1882579
uuaggaaucuuggccauga

SEQ ID NO: 2132249 - RNA, 19 nt, Artificial Sequence
  Description of Artificial Sequence: Synthetic oligonucleotide
  Antisense strand to SEQ ID NO: 2132248
ucauggccaagauuccuaa

SEQ ID NO: 2132250 - RNA, 19 nt, Artificial Sequence
  Description of Artificial Sequence: Synthetic oligonucleotide
  Sense strand starting at position 3697 of SEQ ID NO: 1882579
uaggaaucuuggccaugaa

SEQ ID NO: 2132251 - RNA, 19 nt, Artificial Sequence
  Description of Artificial Sequence: Synthetic oligonucleotide
  Antisense strand to SEQ ID NO: 2132250
uucauggccaagauuccua

SEQ ID NO: 2132252 - RNA, 19 nt, Artificial Sequence
  Description of Artificial Sequence: Synthetic oligonucleotide
  Sense strand starting at position 3709 of SEQ ID NO: 1882579
ccaugaacucguugagccu

SEQ ID NO: 2132253 - RNA, 19 nt, Artificial Sequence
  Description of Artificial Sequence: Synthetic oligonucleotide
  Antisense strand to SEQ ID NO: 2132252
aggcucaacgaguucaugg

SEQ ID NO: 2132254 - RNA, 19 nt, Artificial Sequence
  Description of Artificial Sequence: Synthetic oligonucleotide
  Sense strand starting at position 3715 of SEQ ID NO: 1882579
acucguugagccugagaaa

SEQ ID NO: 2132255 - RNA, 19 nt, Artificial Sequence
  Description of Artificial Sequence: Synthetic oligonucleotide
  Antisense strand to SEQ ID NO: 2132254
uuucucaggcucaacgagu

SEQ ID NO: 2132256 - RNA, 19 nt, Artificial Sequence
  Description of Artificial Sequence: Synthetic oligonucleotide
  Sense strand starting at position 3716 of SEQ ID NO: 1882579
cucguugagccugagaaau

SEQ ID NO: 2132257 - RNA, 19 nt, Artificial Sequence
  Description of Artificial Sequence: Synthetic oligonucleotide
  Antisense strand to SEQ ID NO: 2132256
auuucucaggcucaacgag

SEQ ID NO: 2132258 - RNA, 19 nt, Artificial Sequence
  Description of Artificial Sequence: Synthetic oligonucleotide
  Sense strand starting at position 3726 of SEQ ID NO: 1882579
cugagaaaugcuggaccga

SEQ ID NO: 2132259 - RNA, 19 nt, Artificial Sequence
  Description of Artificial Sequence: Synthetic oligonucleotide
  Antisense strand to SEQ ID NO: 2132258
ucgguccagcauuucucag

SEQ ID NO: 2132260 - RNA, 19 nt, Artificial Sequence
  Description of Artificial Sequence: Synthetic oligonucleotide
  Sense strand starting at position 72 of SEQ ID NO: 1882580
gccugagggaugcacucau

SEQ ID NO: 2132261 - RNA, 19 nt, Artificial Sequence
  Description of Artificial Sequence: Synthetic oligonucleotide
  Antisense strand to SEQ ID NO: 2132260
augagugcaucccucaggc

SEQ ID NO: 2132262 - RNA, 19 nt, Artificial Sequence
  Description of Artificial Sequence: Synthetic oligonucleotide
  Sense strand starting at position 82 of SEQ ID NO: 1882580
ugcacucaugcuggacuaa

SEQ ID NO: 2132263 - RNA, 19 nt, Artificial Sequence
  Description of Artificial Sequence: Synthetic oligonucleotide
  Antisense strand to SEQ ID NO: 2132262
uuaguccagcaugagugca

SEQ ID NO: 2132264 - RNA, 19 nt, Artificial Sequence
  Description of Artificial Sequence: Synthetic oligonucleotide
  Sense strand starting at position 83 of SEQ ID NO: 1882580
gcacucaugcuggacuaaa

SEQ ID NO: 2132265 - RNA, 19 nt, Artificial Sequence
  Description of Artificial Sequence: Synthetic oligonucleotide
  Antisense strand to SEQ ID NO: 2132264
uuuaguccagcaugagugc

SEQ ID NO: 2132266 - RNA, 19 nt, Artificial Sequence
  Description of Artificial Sequence: Synthetic oligonucleotide
  Sense strand starting at position 189 of SEQ ID NO: 1882580
auucucaaagucuaguauu

SEQ ID NO: 2132267 - RNA, 19 nt, Artificial Sequence
  Description of Artificial Sequence: Synthetic oligonucleotide
  Antisense strand to SEQ ID NO: 2132266
aauacuagacuuugagaau

SEQ ID NO: 2132268 - RNA, 19 nt, Artificial Sequence
  Description of Artificial Sequence: Synthetic oligonucleotide
  Sense strand starting at position 192 of SEQ ID NO: 1882580
cucaaagucuaguauuuac

SEQ ID NO: 2132269 - RNA, 19 nt, Artificial Sequence
  Description of Artificial Sequence: Synthetic oligonucleotide
  Antisense strand to SEQ ID NO: 2132268
guaaauacuagacuuugag

SEQ ID NO: 2132270 - RNA, 19 nt, Artificial Sequence
  Description of Artificial Sequence: Synthetic oligonucleotide
  Sense strand starting at position 297 of SEQ ID NO: 1882580
gcuuuagccuccuccagau

SEQ ID NO: 2132271 - RNA, 19 nt, Artificial Sequence
  Description of Artificial Sequence: Synthetic oligonucleotide
  Antisense strand to SEQ ID NO: 2132270
aucuggaggaggcuaaagc

SEQ ID NO: 2132272 - RNA, 19 nt, Artificial Sequence
  Description of Artificial Sequence: Synthetic oligonucleotide
  Sense strand starting at position 464 of SEQ ID NO: 1882580
uauacuucgggucacguaa

SEQ ID NO: 2132273 - RNA, 19 nt, Artificial Sequence
  Description of Artificial Sequence: Synthetic oligonucleotide
  Antisense strand to SEQ ID NO: 2132272
uuacgugacccgaaguaua

SEQ ID NO: 2132274 - RNA, 19 nt, Artificial Sequence
  Description of Artificial Sequence: Synthetic oligonucleotide
  Sense strand starting at position 526 of SEQ ID NO: 1882580
agaagccagucaucucuaa

SEQ ID NO: 2132275 - RNA, 19 nt, Artificial Sequence
  Description of Artificial Sequence: Synthetic oligonucleotide
  Antisense strand to SEQ ID NO: 2132274
uuagagaugacuggcuucu

SEQ ID NO: 2132276 - RNA, 19 nt, Artificial Sequence
  Description of Artificial Sequence: Synthetic oligonucleotide
  Sense strand starting at position 735 of SEQ ID NO: 1882580
uggugcuaucacgaaagaa

SEQ ID NO: 2132277 - RNA, 19 nt, Artificial Sequence
  Description of Artificial Sequence: Synthetic oligonucleotide
  Antisense strand to SEQ ID NO: 2132276
uucuuucgugauagcacca

SEQ ID NO: 2132278 - RNA, 19 nt, Artificial Sequence
  Description of Artificial Sequence: Synthetic oligonucleotide
  Sense strand starting at position 754 of SEQ ID NO: 1882580
agaauaagccuguauaagc

SEQ ID NO: 2132279 - RNA, 19 nt, Artificial Sequence
  Description of Artificial Sequence: Synthetic oligonucleotide
  Antisense strand to SEQ ID NO: 2132278
gcuuauacaggcuuauucu

SEQ ID NO: 2132280 - RNA, 19 nt, Artificial Sequence
  Description of Artificial Sequence: Synthetic oligonucleotide
  Sense strand starting at position 1031 of SEQ ID NO: 1882580
cugaucuagccuuaaguau

SEQ ID NO: 2132281 - RNA, 19 nt, Artificial Sequence
  Description of Artificial Sequence: Synthetic oligonucleotide
  Antisense strand to SEQ ID NO: 2132280
auacuuaaggcuagaucag

SEQ ID NO: 2132282 - RNA, 19 nt, Artificial Sequence
  Description of Artificial Sequence: Synthetic oligonucleotide
  Sense strand starting at position 1087 of SEQ ID NO: 1882580
uuuguauuguacccuuaaa

SEQ ID NO: 2132283 - RNA, 19 nt, Artificial Sequence
  Description of Artificial Sequence: Synthetic oligonucleotide
  Antisense strand to SEQ ID NO: 2132282
uuuaaggguacaauacaaa

SEQ ID NO: 2132284 - RNA, 19 nt, Artificial Sequence
  Description of Artificial Sequence: Synthetic oligonucleotide
  Sense strand starting at position 1327 of SEQ ID NO: 1882580
gcucauuguccacaucguu

SEQ ID NO: 2132285 - RNA, 19 nt, Artificial Sequence
  Description of Artificial Sequence: Synthetic oligonucleotide
  Antisense strand to SEQ ID NO: 2132284
aacgauguggacaaugagc

SEQ ID NO: 2132286 - RNA, 19 nt, Artificial Sequence
  Description of Artificial Sequence: Synthetic oligonucleotide
  Sense strand starting at position 1389 of SEQ ID NO: 1882580
cuggauggguucucgcaaa

SEQ ID NO: 2132287 - RNA, 19 nt, Artificial Sequence
  Description of Artificial Sequence: Synthetic oligonucleotide
  Antisense strand to SEQ ID NO: 2132286
uuugcgagaacccauccag

SEQ ID NO: 2132288 - RNA, 19 nt, Artificial Sequence
  Description of Artificial Sequence: Synthetic oligonucleotide
  Sense strand starting at position 1511 of SEQ ID NO: 1882580
agacuuaaucacgagcaca

SEQ ID NO: 2132289 - RNA, 19 nt, Artificial Sequence
  Description of Artificial Sequence: Synthetic oligonucleotide
  Antisense strand to SEQ ID NO: 2132288
ugugcucgugauuaagucu

SEQ ID NO: 2132290 - RNA, 19 nt, Artificial Sequence
  Description of Artificial Sequence: Synthetic oligonucleotide
  Sense strand starting at position 1674 of SEQ ID NO: 1882580
gacagagguucccaacaag

SEQ ID NO: 2132291 - RNA, 19 nt, Artificial Sequence
  Description of Artificial Sequence: Synthetic oligonucleotide
  Antisense strand to SEQ ID NO: 2132290
cuuguugggaaccucuguc

SEQ ID NO: 2132292 - RNA, 19 nt, Artificial Sequence
  Description of Artificial Sequence: Synthetic oligonucleotide
  Sense strand starting at position 1889 of SEQ ID NO: 1882580
uuauaaucccaccguuaug

SEQ ID NO: 2132293 - RNA, 19 nt, Artificial Sequence
  Description of Artificial Sequence: Synthetic oligonucleotide
  Antisense strand to SEQ ID NO: 2132292
cauaacggugggauuauaa

SEQ ID NO: 2132294 - RNA, 19 nt, Artificial Sequence
  Description of Artificial Sequence: Synthetic oligonucleotide
  Sense strand starting at position 1898 of SEQ ID NO: 1882580
caccguuauggaugccuaa

SEQ ID NO: 2132295 - RNA, 19 nt, Artificial Sequence
  Description of Artificial Sequence: Synthetic oligonucleotide
  Antisense strand to SEQ ID NO: 2132294
uuaggcauccauaacggug

SEQ ID NO: 2132296 - RNA, 19 nt, Artificial Sequence
  Description of Artificial Sequence: Synthetic oligonucleotide
  Sense strand starting at position 1924 of SEQ ID NO: 1882580
gccaucagucaagggugau

SEQ ID NO: 2132297 - RNA, 19 nt, Artificial Sequence
  Description of Artificial Sequence: Synthetic oligonucleotide
  Antisense strand to SEQ ID NO: 2132296
aucacccuugacugauggc

SEQ ID NO: 2132298 - RNA, 19 nt, Artificial Sequence
  Description of Artificial Sequence: Synthetic oligonucleotide
  Sense strand starting at position 1925 of SEQ ID NO: 1882580
ccaucagucaagggugaua

SEQ ID NO: 2132299 - RNA, 19 nt, Artificial Sequence
  Description of Artificial Sequence: Synthetic oligonucleotide
  Antisense strand to SEQ ID NO: 2132298
uaucacccuugacugaugg

SEQ ID NO: 2132300 - RNA, 19 nt, Artificial Sequence
  Description of Artificial Sequence: Synthetic oligonucleotide
  Sense strand starting at position 1927 of SEQ ID NO: 1882580
aucagucaagggugauaga

SEQ ID NO: 2132301 - RNA, 19 nt, Artificial Sequence
  Description of Artificial Sequence: Synthetic oligonucleotide
  Antisense strand to SEQ ID NO: 2132300
ucuaucacccuugacugau

SEQ ID NO: 2132302 - RNA, 19 nt, Artificial Sequence
  Description of Artificial Sequence: Synthetic oligonucleotide
  Sense strand starting at position 1930 of SEQ ID NO: 1882580
agucaagggugauagauga

SEQ ID NO: 2132303 - RNA, 19 nt, Artificial Sequence
  Description of Artificial Sequence: Synthetic oligonucleotide
  Antisense strand to SEQ ID NO: 2132302
ucaucuaucacccuugacu

SEQ ID NO: 2132304 - RNA, 19 nt, Artificial Sequence
  Description of Artificial Sequence: Synthetic oligonucleotide
  Sense strand starting at position 1938 of SEQ ID NO: 1882580
gugauagaugagggucauc

SEQ ID NO: 2132305 - RNA, 19 nt, Artificial Sequence
  Description of Artificial Sequence: Synthetic oligonucleotide
  Antisense strand to SEQ ID NO: 2132304
gaugacccucaucuaucac

SEQ ID NO: 2132306 - RNA, 19 nt, Artificial Sequence
  Description of Artificial Sequence: Synthetic oligonucleotide
  Sense strand starting at position 1947 of SEQ ID NO: 1882580
gagggucaucacugcgcaa

SEQ ID NO: 2132307 - RNA, 19 nt, Artificial Sequence
  Description of Artificial Sequence: Synthetic oligonucleotide
  Antisense strand to SEQ ID NO: 2132306
uugcgcagugaugacccuc

SEQ ID NO: 2132308 - RNA, 19 nt, Artificial Sequence
  Description of Artificial Sequence: Synthetic oligonucleotide
  Sense strand starting at position 1949 of SEQ ID NO: 1882580
gggucaucacugcgcaaag

SEQ ID NO: 2132309 - RNA, 19 nt, Artificial Sequence
  Description of Artificial Sequence: Synthetic oligonucleotide
  Antisense strand to SEQ ID NO: 2132308
cuuugcgcagugaugaccc

SEQ ID NO: 2132310 - RNA, 19 nt, Artificial Sequence
  Description of Artificial Sequence: Synthetic oligonucleotide
  Sense strand starting at position 2060 of SEQ ID NO: 1882580
uuaagcaagccuuguguaa

SEQ ID NO: 2132311 - RNA, 19 nt, Artificial Sequence
  Description of Artificial Sequence: Synthetic oligonucleotide
  Antisense strand to SEQ ID NO: 2132310
uuacacaaggcuugcuuaa

SEQ ID NO: 2132312 - RNA, 19 nt, Artificial Sequence
  Description of Artificial Sequence: Synthetic oligonucleotide
  Sense strand starting at position 2106 of SEQ ID NO: 1882580
gacaaauggcucggccaca

SEQ ID NO: 2132313 - RNA, 19 nt, Artificial Sequence
  Description of Artificial Sequence: Synthetic oligonucleotide
  Antisense strand to SEQ ID NO: 2132312
uguggccgagccauuuguc

SEQ ID NO: 2132314 - RNA, 19 nt, Artificial Sequence
  Description of Artificial Sequence: Synthetic oligonucleotide
  Sense strand starting at position 2197 of SEQ ID NO: 1882580
aggcuuuaacaggaucuuu

SEQ ID NO: 2132315 - RNA, 19 nt, Artificial Sequence
  Description of Artificial Sequence: Synthetic oligonucleotide
  Antisense strand to SEQ ID NO: 2132314
aaagauccuguuaaagccu

SEQ ID NO: 2132316 - RNA, 19 nt, Artificial Sequence
  Description of Artificial Sequence: Synthetic oligonucleotide
  Sense strand starting at position 2492 of SEQ ID NO: 1882580
ugcugaggccuccaauaug

SEQ ID NO: 2132317 - RNA, 19 nt, Artificial Sequence
  Description of Artificial Sequence: Synthetic oligonucleotide
  Antisense strand to SEQ ID NO: 2132316
cauauuggaggccucagca

SEQ ID NO: 2132318 - RNA, 19 nt, Artificial Sequence
  Description of Artificial Sequence: Synthetic oligonucleotide
  Sense strand starting at position 2608 of SEQ ID NO: 1882580
ggagcucuuugcucucgaa

SEQ ID NO: 2132319 - RNA, 19 nt, Artificial Sequence
  Description of Artificial Sequence: Synthetic oligonucleotide
  Antisense strand to SEQ ID NO: 2132318
uucgagagcaaagagcucc

SEQ ID NO: 2132320 - RNA, 19 nt, Artificial Sequence
  Description of Artificial Sequence: Synthetic oligonucleotide
  Sense strand starting at position 2673 of SEQ ID NO: 1882580
cagaccaucgccugugaaa

SEQ ID NO: 2132321 - RNA, 19 nt, Artificial Sequence
  Description of Artificial Sequence: Synthetic oligonucleotide
  Antisense strand to SEQ ID NO: 2132320
uuucacaggcgauggucug

SEQ ID NO: 2132322 - RNA, 19 nt, Artificial Sequence
  Description of Artificial Sequence: Synthetic oligonucleotide
  Sense strand starting at position 2913 of SEQ ID NO: 1882580
ggccuuccgcgguuauaca

SEQ ID NO: 2132323 - RNA, 19 nt, Artificial Sequence
  Description of Artificial Sequence: Synthetic oligonucleotide
  Antisense strand to SEQ ID NO: 2132322
uguauaaccgcggaaggcc

SEQ ID NO: 2132324 - RNA, 19 nt, Artificial Sequence
  Description of Artificial Sequence: Synthetic oligonucleotide
  Sense strand starting at position 3365 of SEQ ID NO: 1882580
aaggaugcuguccgaggua

SEQ ID NO: 2132325 - RNA, 19 nt, Artificial Sequence
  Description of Artificial Sequence: Synthetic oligonucleotide
  Antisense strand to SEQ ID NO: 2132324
uaccucggacagcauccuu

SEQ ID NO: 2132326 - RNA, 19 nt, Artificial Sequence
  Description of Artificial Sequence: Synthetic oligonucleotide
  Sense strand starting at position 3407 of SEQ ID NO: 1882580
ucaggaagguguucugaau

SEQ ID NO: 2132327 - RNA, 19 nt, Artificial Sequence
  Description of Artificial Sequence: Synthetic oligonucleotide
  Antisense strand to SEQ ID NO: 2132326
auucagaacaccuuccuga

SEQ ID NO: 2132328 - RNA, 19 nt, Artificial Sequence
  Description of Artificial Sequence: Synthetic oligonucleotide
  Sense strand starting at position 3473 of SEQ ID NO: 1882580
gggcuugaggguuauacua

SEQ ID NO: 2132329 - RNA, 19 nt, Artificial Sequence
  Description of Artificial Sequence: Synthetic oligonucleotide
  Antisense strand to SEQ ID NO: 2132328
uaguauaacccucaagccc

SEQ ID NO: 2132330 - RNA, 19 nt, Artificial Sequence
  Description of Artificial Sequence: Synthetic oligonucleotide
  Sense strand starting at position 3706 of SEQ ID NO: 1882580
cauguaugaccucagguga

SEQ ID NO: 2132331 - RNA, 19 nt, Artificial Sequence
  Description of Artificial Sequence: Synthetic oligonucleotide
  Antisense strand to SEQ ID NO: 2132330
ucaccugaggucauacaug

SEQ ID NO: 2132332 - RNA, 19 nt, Artificial Sequence
  Description of Artificial Sequence: Synthetic oligonucleotide
  Sense strand starting at position 3794 of SEQ ID NO: 1882580
uguuaauucgagcagaaug

SEQ ID NO: 2132333 - RNA, 19 nt, Artificial Sequence
  Description of Artificial Sequence: Synthetic oligonucleotide
  Antisense strand to SEQ ID NO: 2132332
cauucugcucgaauuaaca

SEQ ID NO: 2132334 - RNA, 19 nt, Artificial Sequence
  Description of Artificial Sequence: Synthetic oligonucleotide
  Sense strand starting at position 3796 of SEQ ID NO: 1882580
uuaauucgagcagaauguu

SEQ ID NO: 2132335 - RNA, 19 nt, Artificial Sequence
  Description of Artificial Sequence: Synthetic oligonucleotide
  Antisense strand to SEQ ID NO: 2132334
aacauucugcucgaauuaa

SEQ ID NO: 2132336 - RNA, 19 nt, Artificial Sequence
  Description of Artificial Sequence: Synthetic oligonucleotide
  Sense strand starting at position 3920 of SEQ ID NO: 1882580
auguccugcuguguaauaa

SEQ ID NO: 2132337 - RNA, 19 nt, Artificial Sequence
  Description of Artificial Sequence: Synthetic oligonucleotide
  Antisense strand to SEQ ID NO: 2132336
uuauuacacagcaggacau

SEQ ID NO: 2132338 - RNA, 19 nt, Artificial Sequence
  Description of Artificial Sequence: Synthetic oligonucleotide
  Sense strand starting at position 3921 of SEQ ID NO: 1882580
uguccugcuguguaauaaa

SEQ ID NO: 2132339 - RNA, 19 nt, Artificial Sequence
  Description of Artificial Sequence: Synthetic oligonucleotide
  Antisense strand to SEQ ID NO: 2132338
uuuauuacacagcaggaca

SEQ ID NO: 2132340 - RNA, 19 nt, Artificial Sequence
  Description of Artificial Sequence: Synthetic oligonucleotide
  Sense strand starting at position 2 of SEQ ID NO: 1882581
ggugguucugauuagauug

SEQ ID NO: 2132341 - RNA, 19 nt, Artificial Sequence
  Description of Artificial Sequence: Synthetic oligonucleotide
  Antisense strand to SEQ ID NO: 2132340
caaucuaaucagaaccacc

SEQ ID NO: 2132342 - RNA, 19 nt, Artificial Sequence
  Description of Artificial Sequence: Synthetic oligonucleotide
  Sense strand starting at position 7 of SEQ ID NO: 1882581
uucugauuagauugugaca

SEQ ID NO: 2132343 - RNA, 19 nt, Artificial Sequence
  Description of Artificial Sequence: Synthetic oligonucleotide
  Antisense strand to SEQ ID NO: 2132342
ugucacaaucuaaucagaa

SEQ ID NO: 2132344 - RNA, 19 nt, Artificial Sequence
  Description of Artificial Sequence: Synthetic oligonucleotide
  Sense strand starting at position 10 of SEQ ID NO: 1882581
ugauuagauugugacauua

SEQ ID NO: 2132345 - RNA, 19 nt, Artificial Sequence
  Description of Artificial Sequence: Synthetic oligonucleotide
  Antisense strand to SEQ ID NO: 2132344
uaaugucacaaucuaauca

SEQ ID NO: 2132346 - RNA, 19 nt, Artificial Sequence
  Description of Artificial Sequence: Synthetic oligonucleotide
  Sense strand starting at position 18 of SEQ ID NO: 1882581
uugugacauuaauuaacgu

SEQ ID NO: 2132347 - RNA, 19 nt, Artificial Sequence
  Description of Artificial Sequence: Synthetic oligonucleotide
  Antisense strand to SEQ ID NO: 2132346
acguuaauuaaugucacaa

SEQ ID NO: 2132348 - RNA, 19 nt, Artificial Sequence
  Description of Artificial Sequence: Synthetic oligonucleotide
  Sense strand starting at position 805 of SEQ ID NO: 1882581
guuauuauuugacaagcag

SEQ ID NO: 2132349 - RNA, 19 nt, Artificial Sequence
  Description of Artificial Sequence: Synthetic oligonucleotide
  Antisense strand to SEQ ID NO: 2132348
cugcuugucaaauaauaac

SEQ ID NO: 2132350 - RNA, 19 nt, Artificial Sequence
  Description of Artificial Sequence: Synthetic oligonucleotide
  Sense strand starting at position 945 of SEQ ID NO: 1882581
augccugacuuguuaagca

SEQ ID NO: 2132351 - RNA, 19 nt, Artificial Sequence
  Description of Artificial Sequence: Synthetic oligonucleotide
  Antisense strand to SEQ ID NO: 2132350
ugcuuaacaagucaggcau

SEQ ID NO: 2132352 - RNA, 19 nt, Artificial Sequence
  Description of Artificial Sequence: Synthetic oligonucleotide
  Sense strand starting at position 1243 of SEQ ID NO: 1882581
agcgcuguucauggaagau

SEQ ID NO: 2132353 - RNA, 19 nt, Artificial Sequence
  Description of Artificial Sequence: Synthetic oligonucleotide
  Antisense strand to SEQ ID NO: 2132352
aucuuccaugaacagcgcu

SEQ ID NO: 2132354 - RNA, 19 nt, Artificial Sequence
  Description of Artificial Sequence: Synthetic oligonucleotide
  Sense strand starting at position 1315 of SEQ ID NO: 1882581
gcaucaaagcgucgacaca

SEQ ID NO: 2132355 - RNA, 19 nt, Artificial Sequence
  Description of Artificial Sequence: Synthetic oligonucleotide
  Antisense strand to SEQ ID NO: 2132354
ugugucgacgcuuugaugc

SEQ ID NO: 2132356 - RNA, 19 nt, Artificial Sequence
  Description of Artificial Sequence: Synthetic oligonucleotide
  Sense strand starting at position 1354 of SEQ ID NO: 1882581
ugccuuaagcgggauccau

SEQ ID NO: 2132357 - RNA, 19 nt, Artificial Sequence
  Description of Artificial Sequence: Synthetic oligonucleotide
  Antisense strand to SEQ ID NO: 2132356
auggaucccgcuuaaggca

SEQ ID NO: 2132358 - RNA, 19 nt, Artificial Sequence
  Description of Artificial Sequence: Synthetic oligonucleotide
  Sense strand starting at position 1440 of SEQ ID NO: 1882581
cucccaucccucgagguuu

SEQ ID NO: 2132359 - RNA, 19 nt, Artificial Sequence
  Description of Artificial Sequence: Synthetic oligonucleotide
  Antisense strand to SEQ ID NO: 2132358
aaaccucgagggaugggag

SEQ ID NO: 2132360 - RNA, 19 nt, Artificial Sequence
  Description of Artificial Sequence: Synthetic oligonucleotide
  Sense strand starting at position 2066 of SEQ ID NO: 1882581
cgaaacucuugucucuaca

SEQ ID NO: 2132361 - RNA, 19 nt, Artificial Sequence
  Description of Artificial Sequence: Synthetic oligonucleotide
  Antisense strand to SEQ ID NO: 2132360
uguagagacaagaguuucg

SEQ ID NO: 2132362 - RNA, 19 nt, Artificial Sequence
  Description of Artificial Sequence: Synthetic oligonucleotide
  Sense strand starting at position 2482 of SEQ ID NO: 1882581
ccaggaggucguggcuaua

SEQ ID NO: 2132363 - RNA, 19 nt, Artificial Sequence
  Description of Artificial Sequence: Synthetic oligonucleotide
  Antisense strand to SEQ ID NO: 2132362
uauagccacgaccuccugg

SEQ ID NO: 2132364 - RNA, 19 nt, Artificial Sequence
  Description of Artificial Sequence: Synthetic oligonucleotide
  Sense strand starting at position 2484 of SEQ ID NO: 1882581
aggaggucguggcuauagu

SEQ ID NO: 2132365 - RNA, 19 nt, Artificial Sequence
  Description of Artificial Sequence: Synthetic oligonucleotide
  Antisense strand to SEQ ID NO: 2132364
acuauagccacgaccuccu

SEQ ID NO: 2132366 - RNA, 19 nt, Artificial Sequence
  Description of Artificial Sequence: Synthetic oligonucleotide
  Sense strand starting at position 2493 of SEQ ID NO: 1882581
uggcuauagugagucguga

SEQ ID NO: 2132367 - RNA, 19 nt, Artificial Sequence
  Description of Artificial Sequence: Synthetic oligonucleotide
  Antisense strand to SEQ ID NO: 2132366
ucacgacucacuauagcca

SEQ ID NO: 2132368 - RNA, 19 nt, Artificial Sequence
  Description of Artificial Sequence: Synthetic oligonucleotide
  Sense strand starting at position 2573 of SEQ ID NO: 1882581
uauuuauaguaguggguua

SEQ ID NO: 2132369 - RNA, 19 nt, Artificial Sequence
  Description of Artificial Sequence: Synthetic oligonucleotide
  Antisense strand to SEQ ID NO: 2132368
uaacccacuacuauaaaua

SEQ ID NO: 2132370 - RNA, 19 nt, Artificial Sequence
  Description of Artificial Sequence: Synthetic oligonucleotide
  Sense strand starting at position 2584 of SEQ ID NO: 1882581
guggguuagguggagcaaa

SEQ ID NO: 2132371 - RNA, 19 nt, Artificial Sequence
  Description of Artificial Sequence: Synthetic oligonucleotide
  Antisense strand to SEQ ID NO: 2132370
uuugcuccaccuaacccac

SEQ ID NO: 2132372 - RNA, 19 nt, Artificial Sequence
  Description of Artificial Sequence: Synthetic oligonucleotide
  Sense strand starting at position 2643 of SEQ ID NO: 1882581
gagaaagguuaucucgucu

SEQ ID NO: 2132373 - RNA, 19 nt, Artificial Sequence
  Description of Artificial Sequence: Synthetic oligonucleotide
  Antisense strand to SEQ ID NO: 2132372
agacgagauaaccuuucuc

SEQ ID NO: 2132374 - RNA, 19 nt, Artificial Sequence
  Description of Artificial Sequence: Synthetic oligonucleotide
  Sense strand starting at position 2986 of SEQ ID NO: 1882581
gguaauaauuauuguagga

SEQ ID NO: 2132375 - RNA, 19 nt, Artificial Sequence
  Description of Artificial Sequence: Synthetic oligonucleotide
  Antisense strand to SEQ ID NO: 2132374
uccuacaauaauuauuacc

SEQ ID NO: 2132376 - RNA, 19 nt, Artificial Sequence
  Description of Artificial Sequence: Synthetic oligonucleotide
  Sense strand starting at position 3013 of SEQ ID NO: 1882581
agaauuacaugugaagauc

SEQ ID NO: 2132377 - RNA, 19 nt, Artificial Sequence
  Description of Artificial Sequence: Synthetic oligonucleotide
  Antisense strand to SEQ ID NO: 2132376
gaucuucacauguaauucu

SEQ ID NO: 2132378 - RNA, 19 nt, Artificial Sequence
  Description of Artificial Sequence: Synthetic oligonucleotide
  Sense strand starting at position 3021 of SEQ ID NO: 1882581
augugaagauccuuguaag

SEQ ID NO: 2132379 - RNA, 19 nt, Artificial Sequence
  Description of Artificial Sequence: Synthetic oligonucleotide
  Antisense strand to SEQ ID NO: 2132378
cuuacaaggaucuucacau

SEQ ID NO: 2132380 - RNA, 19 nt, Artificial Sequence
  Description of Artificial Sequence: Synthetic oligonucleotide
  Sense strand starting at position 3022 of SEQ ID NO: 1882581
ugugaagauccuuguaagu

SEQ ID NO: 2132381 - RNA, 19 nt, Artificial Sequence
  Description of Artificial Sequence: Synthetic oligonucleotide
  Antisense strand to SEQ ID NO: 2132380
acuuacaaggaucuucaca

SEQ ID NO: 2132382 - RNA, 19 nt, Artificial Sequence
  Description of Artificial Sequence: Synthetic oligonucleotide
  Sense strand starting at position 3027 of SEQ ID NO: 1882581
agauccuuguaaguguuua

SEQ ID NO: 2132383 - RNA, 19 nt, Artificial Sequence
  Description of Artificial Sequence: Synthetic oligonucleotide
  Antisense strand to SEQ ID NO: 2132382
uaaacacuuacaaggaucu

SEQ ID NO: 2132384 - RNA, 19 nt, Artificial Sequence
  Description of Artificial Sequence: Synthetic oligonucleotide
  Sense strand starting at position 3031 of SEQ ID NO: 1882581
ccuuguaaguguuuaauac

SEQ ID NO: 2132385 - RNA, 19 nt, Artificial Sequence
  Description of Artificial Sequence: Synthetic oligonucleotide
  Antisense strand to SEQ ID NO: 2132384
guauuaaacacuuacaagg

SEQ ID NO: 2132386 - RNA, 19 nt, Artificial Sequence
  Description of Artificial Sequence: Synthetic oligonucleotide
  Sense strand starting at position 3076 of SEQ ID NO: 1882581
agguaauuauuacauagga

SEQ ID NO: 2132387 - RNA, 19 nt, Artificial Sequence
  Description of Artificial Sequence: Synthetic oligonucleotide
  Antisense strand to SEQ ID NO: 2132386
uccuauguaauaauuaccu

SEQ ID NO: 2132388 - RNA, 19 nt, Artificial Sequence
  Description of Artificial Sequence: Synthetic oligonucleotide
  Sense strand starting at position 3105 of SEQ ID NO: 1882581
agaaguaacuuguccacag

SEQ ID NO: 2132389 - RNA, 19 nt, Artificial Sequence
  Description of Artificial Sequence: Synthetic oligonucleotide
  Antisense strand to SEQ ID NO: 2132388
cuguggacaaguuacuucu

SEQ ID NO: 2132390 - RNA, 19 nt, Artificial Sequence
  Description of Artificial Sequence: Synthetic oligonucleotide
  Sense strand starting at position 3106 of SEQ ID NO: 1882581
gaaguaacuuguccacaga

SEQ ID NO: 2132391 - RNA, 19 nt, Artificial Sequence
  Description of Artificial Sequence: Synthetic oligonucleotide
  Antisense strand to SEQ ID NO: 2132390
ucuguggacaaguuacuuc

SEQ ID NO: 2132392 - RNA, 19 nt, Artificial Sequence
  Description of Artificial Sequence: Synthetic oligonucleotide
  Sense strand starting at position 3109 of SEQ ID NO: 1882581
guaacuuguccacagauau

SEQ ID NO: 2132393 - RNA, 19 nt, Artificial Sequence
  Description of Artificial Sequence: Synthetic oligonucleotide
  Antisense strand to SEQ ID NO: 2132392
auaucuguggacaaguuac

SEQ ID NO: 2132394 - RNA, 19 nt, Artificial Sequence
  Description of Artificial Sequence: Synthetic oligonucleotide
  Sense strand starting at position 3263 of SEQ ID NO: 1882581
cccuauguucucugauggu

SEQ ID NO: 2132395 - RNA, 19 nt, Artificial Sequence
  Description of Artificial Sequence: Synthetic oligonucleotide
  Antisense strand to SEQ ID NO: 2132394
accaucagagaacauaggg

SEQ ID NO: 2132396 - RNA, 19 nt, Artificial Sequence
  Description of Artificial Sequence: Synthetic oligonucleotide
  Sense strand starting at position 3267 of SEQ ID NO: 1882581
auguucucugaugguagaa

SEQ ID NO: 2132397 - RNA, 19 nt, Artificial Sequence
  Description of Artificial Sequence: Synthetic oligonucleotide
  Antisense strand to SEQ ID NO: 2132396
uucuaccaucagagaacau

SEQ ID NO: 2132398 - RNA, 19 nt, Artificial Sequence
  Description of Artificial Sequence: Synthetic oligonucleotide
  Sense strand starting at position 3311 of SEQ ID NO: 1882581
gcuaguuuauuugaauguu

SEQ ID NO: 2132399 - RNA, 19 nt, Artificial Sequence
  Description of Artificial Sequence: Synthetic oligonucleotide
  Antisense strand to SEQ ID NO: 2132398
aacauucaaauaaacuagc

SEQ ID NO: 2132400 - RNA, 19 nt, Artificial Sequence
  Description of Artificial Sequence: Synthetic oligonucleotide
  Sense strand starting at position 3336 of SEQ ID NO: 1882581
gucauagguucuuuaaaug

SEQ ID NO: 2132401 - RNA, 19 nt, Artificial Sequence
  Description of Artificial Sequence: Synthetic oligonucleotide
  Antisense strand to SEQ ID NO: 2132400
cauuuaaagaaccuaugac

SEQ ID NO: 2132402 - RNA, 19 nt, Artificial Sequence
  Description of Artificial Sequence: Synthetic oligonucleotide
  Sense strand starting at position 3441 of SEQ ID NO: 1882581
agauuacuuccugguccua

SEQ ID NO: 2132403 - RNA, 19 nt, Artificial Sequence
  Description of Artificial Sequence: Synthetic oligonucleotide
  Antisense strand to SEQ ID NO: 2132402
uaggaccaggaaguaaucu

SEQ ID NO: 2132404 - RNA, 19 nt, Artificial Sequence
  Description of Artificial Sequence: Synthetic oligonucleotide
  Sense strand starting at position 3492 of SEQ ID NO: 1882581
accauaacaccgugguaaa

SEQ ID NO: 2132405 - RNA, 19 nt, Artificial Sequence
  Description of Artificial Sequence: Synthetic oligonucleotide
  Antisense strand to SEQ ID NO: 2132404
uuuaccacgguguuauggu

SEQ ID NO: 2132406 - RNA, 19 nt, Artificial Sequence
  Description of Artificial Sequence: Synthetic oligonucleotide
  Sense strand starting at position 3493 of SEQ ID NO: 1882581
ccauaacaccgugguaaau

SEQ ID NO: 2132407 - RNA, 19 nt, Artificial Sequence
  Description of Artificial Sequence: Synthetic oligonucleotide
  Antisense strand to SEQ ID NO: 2132406
auuuaccacgguguuaugg

SEQ ID NO: 2132408 - RNA, 19 nt, Artificial Sequence
  Description of Artificial Sequence: Synthetic oligonucleotide
  Sense strand starting at position 3505 of SEQ ID NO: 1882581
gguaaaucuuaacauaaug

SEQ ID NO: 2132409 - RNA, 19 nt, Artificial Sequence
  Description of Artificial Sequence: Synthetic oligonucleotide
  Antisense strand to SEQ ID NO: 2132408
cauuauguuaagauuuacc

SEQ ID NO: 2132410 - RNA, 19 nt, Artificial Sequence
  Description of Artificial Sequence: Synthetic oligonucleotide
  Sense strand starting at position 3560 of SEQ ID NO: 1882581
ugacaauauuaaguagcua

SEQ ID NO: 2132411 - RNA, 19 nt, Artificial Sequence
  Description of Artificial Sequence: Synthetic oligonucleotide
  Antisense strand to SEQ ID NO: 2132410
uagcuacuuaauauuguca

SEQ ID NO: 2132412 - RNA, 19 nt, Artificial Sequence
  Description of Artificial Sequence: Synthetic oligonucleotide
  Sense strand starting at position 3838 of SEQ ID NO: 1882581
gggauuacauguguuaguu

SEQ ID NO: 2132413 - RNA, 19 nt, Artificial Sequence
  Description of Artificial Sequence: Synthetic oligonucleotide
  Antisense strand to SEQ ID NO: 2132412
aacuaacacauguaauccc

SEQ ID NO: 2132414 - RNA, 19 nt, Artificial Sequence
  Description of Artificial Sequence: Synthetic oligonucleotide
  Sense strand starting at position 3846 of SEQ ID NO: 1882581
auguguuaguuagccucua

SEQ ID NO: 2132415 - RNA, 19 nt, Artificial Sequence
  Description of Artificial Sequence: Synthetic oligonucleotide
  Antisense strand to SEQ ID NO: 2132414
uagaggcuaacuaacacau

SEQ ID NO: 2132416 - RNA, 19 nt, Artificial Sequence
  Description of Artificial Sequence: Synthetic oligonucleotide
  Sense strand starting at position 3847 of SEQ ID NO: 1882581
uguguuaguuagccucuau

SEQ ID NO: 2132417 - RNA, 19 nt, Artificial Sequence
  Description of Artificial Sequence: Synthetic oligonucleotide
  Antisense strand to SEQ ID NO: 2132416
auagaggcuaacuaacaca

SEQ ID NO: 2132418 - RNA, 19 nt, Artificial Sequence
  Description of Artificial Sequence: Synthetic oligonucleotide
  Sense strand starting at position 3968 of SEQ ID NO: 1882581
agucuauaggaucagcuaa

SEQ ID NO: 2132419 - RNA, 19 nt, Artificial Sequence
  Description of Artificial Sequence: Synthetic oligonucleotide
  Antisense strand to SEQ ID NO: 2132418
uuagcugauccuauagacu

SEQ ID NO: 2132420 - RNA, 19 nt, Artificial Sequence
  Description of Artificial Sequence: Synthetic oligonucleotide
  Sense strand starting at position 54 of SEQ ID NO: 1882582
agagcacacuucucaguaa

SEQ ID NO: 2132421 - RNA, 19 nt, Artificial Sequence
  Description of Artificial Sequence: Synthetic oligonucleotide
  Antisense strand to SEQ ID NO: 2132420
uuacugagaagugugcucu

SEQ ID NO: 2132422 - RNA, 19 nt, Artificial Sequence
  Description of Artificial Sequence: Synthetic oligonucleotide
  Sense strand starting at position 228 of SEQ ID NO: 1882582
uguugcuauccuugggaau

SEQ ID NO: 2132423 - RNA, 19 nt, Artificial Sequence
  Description of Artificial Sequence: Synthetic oligonucleotide
  Antisense strand to SEQ ID NO: 2132422
auucccaaggauagcaaca

SEQ ID NO: 2132424 - RNA, 19 nt, Artificial Sequence
  Description of Artificial Sequence: Synthetic oligonucleotide
  Sense strand starting at position 229 of SEQ ID NO: 1882582
guugcuauccuugggaauc

SEQ ID NO: 2132425 - RNA, 19 nt, Artificial Sequence
  Description of Artificial Sequence: Synthetic oligonucleotide
  Antisense strand to SEQ ID NO: 2132424
gauucccaaggauagcaac

SEQ ID NO: 2132426 - RNA, 19 nt, Artificial Sequence
  Description of Artificial Sequence: Synthetic oligonucleotide
  Sense strand starting at position 311 of SEQ ID NO: 1882582
ggaugcugucaaugagaac

SEQ ID NO: 2132427 - RNA, 19 nt, Artificial Sequence
  Description of Artificial Sequence: Synthetic oligonucleotide
  Antisense strand to SEQ ID NO: 2132426
guucucauugacagcaucc

SEQ ID NO: 2132428 - RNA, 19 nt, Artificial Sequence
  Description of Artificial Sequence: Synthetic oligonucleotide
  Sense strand starting at position 323 of SEQ ID NO: 1882582
ugagaacuaucucagauuu

SEQ ID NO: 2132429 - RNA, 19 nt, Artificial Sequence
  Description of Artificial Sequence: Synthetic oligonucleotide
  Antisense strand to SEQ ID NO: 2132428
aaaucugagauaguucuca

SEQ ID NO: 2132430 - RNA, 19 nt, Artificial Sequence
  Description of Artificial Sequence: Synthetic oligonucleotide
  Sense strand starting at position 541 of SEQ ID NO: 1882582
ggcaucaaguccucuuaag

SEQ ID NO: 2132431 - RNA, 19 nt, Artificial Sequence
  Description of Artificial Sequence: Synthetic oligonucleotide
  Antisense strand to SEQ ID NO: 2132430
cuuaagaggacuugaugcc

SEQ ID NO: 2132432 - RNA, 19 nt, Artificial Sequence
  Description of Artificial Sequence: Synthetic oligonucleotide
  Sense strand starting at position 970 of SEQ ID NO: 1882582
ucaacaauacugcgggaaa

SEQ ID NO: 2132433 - RNA, 19 nt, Artificial Sequence
  Description of Artificial Sequence: Synthetic oligonucleotide
  Antisense strand to SEQ ID NO: 2132432
uuucccgcaguauuguuga

SEQ ID NO: 2132434 - RNA, 19 nt, Artificial Sequence
  Description of Artificial Sequence: Synthetic oligonucleotide
  Sense strand starting at position 1107 of SEQ ID NO: 1882582
ugacuugacugccugugua

SEQ ID NO: 2132435 - RNA, 19 nt, Artificial Sequence
  Description of Artificial Sequence: Synthetic oligonucleotide
  Antisense strand to SEQ ID NO: 2132434
uacacaggcagucaaguca

SEQ ID NO: 2132436 - RNA, 19 nt, Artificial Sequence
  Description of Artificial Sequence: Synthetic oligonucleotide
  Sense strand starting at position 1886 of SEQ ID NO: 1882582
cagucuuccguggaaacuc

SEQ ID NO: 2132437 - RNA, 19 nt, Artificial Sequence
  Description of Artificial Sequence: Synthetic oligonucleotide
  Antisense strand to SEQ ID NO: 2132436
gaguuuccacggaagacug

SEQ ID NO: 2132438 - RNA, 19 nt, Artificial Sequence
  Description of Artificial Sequence: Synthetic oligonucleotide
  Sense strand starting at position 1896 of SEQ ID NO: 1882582
uggaaacucugacaacacu

SEQ ID NO: 2132439 - RNA, 19 nt, Artificial Sequence
  Description of Artificial Sequence: Synthetic oligonucleotide
  Antisense strand to SEQ ID NO: 2132438
aguguugucagaguuucca

SEQ ID NO: 2132440 - RNA, 19 nt, Artificial Sequence
  Description of Artificial Sequence: Synthetic oligonucleotide
  Sense strand starting at position 1966 of SEQ ID NO: 1882582
gccuguauugcggaggaga

SEQ ID NO: 2132441 - RNA, 19 nt, Artificial Sequence
  Description of Artificial Sequence: Synthetic oligonucleotide
  Antisense strand to SEQ ID NO: 2132440
ucuccuccgcaauacaggc

SEQ ID NO: 2132442 - RNA, 19 nt, Artificial Sequence
  Description of Artificial Sequence: Synthetic oligonucleotide
  Sense strand starting at position 2085 of SEQ ID NO: 1882582
uguagucuucgugacacga

SEQ ID NO: 2132443 - RNA, 19 nt, Artificial Sequence
  Description of Artificial Sequence: Synthetic oligonucleotide
  Antisense strand to SEQ ID NO: 2132442
ucgugucacgaagacuaca

SEQ ID NO: 2132444 - RNA, 19 nt, Artificial Sequence
  Description of Artificial Sequence: Synthetic oligonucleotide
  Sense strand starting at position 2237 of SEQ ID NO: 1882582
cgccuuugagucgguauuu

SEQ ID NO: 2132445 - RNA, 19 nt, Artificial Sequence
  Description of Artificial Sequence: Synthetic oligonucleotide
  Antisense strand to SEQ ID NO: 2132444
aaauaccgacucaaaggcg

SEQ ID NO: 2132446 - RNA, 19 nt, Artificial Sequence
  Description of Artificial Sequence: Synthetic oligonucleotide
  Sense strand starting at position 2522 of SEQ ID NO: 1882582
cuguauuguccgcuacagu

SEQ ID NO: 2132447 - RNA, 19 nt, Artificial Sequence
  Description of Artificial Sequence: Synthetic oligonucleotide
  Antisense strand to SEQ ID NO: 2132446
acuguagcggacaauacag

SEQ ID NO: 2132448 - RNA, 19 nt, Artificial Sequence
  Description of Artificial Sequence: Synthetic oligonucleotide
  Sense strand starting at position 2529 of SEQ ID NO: 1882582
guccgcuacagugagagau

SEQ ID NO: 2132449 - RNA, 19 nt, Artificial Sequence
  Description of Artificial Sequence: Synthetic oligonucleotide
  Antisense strand to SEQ ID NO: 2132448
aucucucacuguagcggac

SEQ ID NO: 2132450 - RNA, 19 nt, Artificial Sequence
  Description of Artificial Sequence: Synthetic oligonucleotide
  Sense strand starting at position 2551 of SEQ ID NO: 1882582
ggaagacuauuaucgcgaa

SEQ ID NO: 2132451 - RNA, 19 nt, Artificial Sequence
  Description of Artificial Sequence: Synthetic oligonucleotide
  Antisense strand to SEQ ID NO: 2132450
uucgcgauaauagucuucc

SEQ ID NO: 2132452 - RNA, 19 nt, Artificial Sequence
  Description of Artificial Sequence: Synthetic oligonucleotide
  Sense strand starting at position 2669 of SEQ ID NO: 1882582
gcaaauuacugagacagaa

SEQ ID NO: 2132453 - RNA, 19 nt, Artificial Sequence
  Description of Artificial Sequence: Synthetic oligonucleotide
  Antisense strand to SEQ ID NO: 2132452
uucugucucaguaauuugc

SEQ ID NO: 2132454 - RNA, 19 nt, Artificial Sequence
  Description of Artificial Sequence: Synthetic oligonucleotide
  Sense strand starting at position 2895 of SEQ ID NO: 1882582
guaccauccuguuccauua

SEQ ID NO: 2132455 - RNA, 19 nt, Artificial Sequence
  Description of Artificial Sequence: Synthetic oligonucleotide
  Antisense strand to SEQ ID NO: 2132454
uaauggaacaggaugguac

SEQ ID NO: 2132456 - RNA, 19 nt, Artificial Sequence
  Description of Artificial Sequence: Synthetic oligonucleotide
  Sense strand starting at position 2997 of SEQ ID NO: 1882582
uacaauuacugggucaaag

SEQ ID NO: 2132457 - RNA, 19 nt, Artificial Sequence
  Description of Artificial Sequence: Synthetic oligonucleotide
  Antisense strand to SEQ ID NO: 2132456
cuuugacccaguaauugua

SEQ ID NO: 2132458 - RNA, 19 nt, Artificial Sequence
  Description of Artificial Sequence: Synthetic oligonucleotide
  Sense strand starting at position 3041 of SEQ ID NO: 1882582
gucaaacugcuuuguagaa

SEQ ID NO: 2132459 - RNA, 19 nt, Artificial Sequence
  Description of Artificial Sequence: Synthetic oligonucleotide
  Antisense strand to SEQ ID NO: 2132458
uucuacaaagcaguuugac

SEQ ID NO: 2132460 - RNA, 19 nt, Artificial Sequence
  Description of Artificial Sequence: Synthetic oligonucleotide
  Sense strand starting at position 3042 of SEQ ID NO: 1882582
ucaaacugcuuuguagaau

SEQ ID NO: 2132461 - RNA, 19 nt, Artificial Sequence
  Description of Artificial Sequence: Synthetic oligonucleotide
  Antisense strand to SEQ ID NO: 2132460
auucuacaaagcaguuuga

SEQ ID NO: 2132462 - RNA, 19 nt, Artificial Sequence
  Description of Artificial Sequence: Synthetic oligonucleotide
  Sense strand starting at position 3107 of SEQ ID NO: 1882582
gauccucacgauuagcuau

SEQ ID NO: 2132463 - RNA, 19 nt, Artificial Sequence
  Description of Artificial Sequence: Synthetic oligonucleotide
  Antisense strand to SEQ ID NO: 2132462
auagcuaaucgugaggauc

SEQ ID NO: 2132464 - RNA, 19 nt, Artificial Sequence
  Description of Artificial Sequence: Synthetic oligonucleotide
  Sense strand starting at position 3154 of SEQ ID NO: 1882582
ucuguuugugacuaaacca

SEQ ID NO: 2132465 - RNA, 19 nt, Artificial Sequence
  Description of Artificial Sequence: Synthetic oligonucleotide
  Antisense strand to SEQ ID NO: 2132464
ugguuuagucacaaacaga

SEQ ID NO: 2132466 - RNA, 19 nt, Artificial Sequence
  Description of Artificial Sequence: Synthetic oligonucleotide
  Sense strand starting at position 3186 of SEQ ID NO: 1882582
aguguaacaucauuggaaa

SEQ ID NO: 2132467 - RNA, 19 nt, Artificial Sequence
  Description of Artificial Sequence: Synthetic oligonucleotide
  Antisense strand to SEQ ID NO: 2132466
uuuccaaugauguuacacu

SEQ ID NO: 2132468 - RNA, 19 nt, Artificial Sequence
  Description of Artificial Sequence: Synthetic oligonucleotide
  Sense strand starting at position 3187 of SEQ ID NO: 1882582
guguaacaucauuggaaag

SEQ ID NO: 2132469 - RNA, 19 nt, Artificial Sequence
  Description of Artificial Sequence: Synthetic oligonucleotide
  Antisense strand to SEQ ID NO: 2132468
cuuuccaaugauguuacac

SEQ ID NO: 2132470 - RNA, 19 nt, Artificial Sequence
  Description of Artificial Sequence: Synthetic oligonucleotide
  Sense strand starting at position 3301 of SEQ ID NO: 1882582
gguguauguugaguggauc

SEQ ID NO: 2132471 - RNA, 19 nt, Artificial Sequence
  Description of Artificial Sequence: Synthetic oligonucleotide
  Antisense strand to SEQ ID NO: 2132470
gauccacucaacauacacc

SEQ ID NO: 2132472 - RNA, 19 nt, Artificial Sequence
  Description of Artificial Sequence: Synthetic oligonucleotide
  Sense strand starting at position 3302 of SEQ ID NO: 1882582
guguauguugaguggaucu

SEQ ID NO: 2132473 - RNA, 19 nt, Artificial Sequence
  Description of Artificial Sequence: Synthetic oligonucleotide
  Antisense strand to SEQ ID NO: 2132472
agauccacucaacauacac

SEQ ID NO: 2132474 - RNA, 19 nt, Artificial Sequence
  Description of Artificial Sequence: Synthetic oligonucleotide
  Sense strand starting at position 3340 of SEQ ID NO: 1882582
uauggacuugagugcuuua

SEQ ID NO: 2132475 - RNA, 19 nt, Artificial Sequence
  Description of Artificial Sequence: Synthetic oligonucleotide
  Antisense strand to SEQ ID NO: 2132474
uaaagcacucaaguccaua

SEQ ID NO: 2132476 - RNA, 19 nt, Artificial Sequence
  Description of Artificial Sequence: Synthetic oligonucleotide
  Sense strand starting at position 3343 of SEQ ID NO: 1882582
ggacuugagugcuuuacac

SEQ ID NO: 2132477 - RNA, 19 nt, Artificial Sequence
  Description of Artificial Sequence: Synthetic oligonucleotide
  Antisense strand to SEQ ID NO: 2132476
guguaaagcacucaagucc

SEQ ID NO: 2132478 - RNA, 19 nt, Artificial Sequence
  Description of Artificial Sequence: Synthetic oligonucleotide
  Sense strand starting at position 3345 of SEQ ID NO: 1882582
acuugagugcuuuacacuu

SEQ ID NO: 2132479 - RNA, 19 nt, Artificial Sequence
  Description of Artificial Sequence: Synthetic oligonucleotide
  Antisense strand to SEQ ID NO: 2132478
aaguguaaagcacucaagu

SEQ ID NO: 2132480 - RNA, 19 nt, Artificial Sequence
  Description of Artificial Sequence: Synthetic oligonucleotide
  Sense strand starting at position 3411 of SEQ ID NO: 1882582
uuauuaaccugccugguaa

SEQ ID NO: 2132481 - RNA, 19 nt, Artificial Sequence
  Description of Artificial Sequence: Synthetic oligonucleotide
  Antisense strand to SEQ ID NO: 2132480
uuaccaggcagguuaauaa

SEQ ID NO: 2132482 - RNA, 19 nt, Artificial Sequence
  Description of Artificial Sequence: Synthetic oligonucleotide
  Sense strand starting at position 3413 of SEQ ID NO: 1882582
auuaaccugccugguaaau

SEQ ID NO: 2132483 - RNA, 19 nt, Artificial Sequence
  Description of Artificial Sequence: Synthetic oligonucleotide
  Antisense strand to SEQ ID NO: 2132482
auuuaccaggcagguuaau

SEQ ID NO: 2132484 - RNA, 19 nt, Artificial Sequence
  Description of Artificial Sequence: Synthetic oligonucleotide
  Sense strand starting at position 3588 of SEQ ID NO: 1882582
ucugauuucuuagaggcaa

SEQ ID NO: 2132485 - RNA, 19 nt, Artificial Sequence
  Description of Artificial Sequence: Synthetic oligonucleotide
  Antisense strand to SEQ ID NO: 2132484
uugccucuaagaaaucaga

SEQ ID NO: 2132486 - RNA, 19 nt, Artificial Sequence
  Description of Artificial Sequence: Synthetic oligonucleotide
  Sense strand starting at position 3650 of SEQ ID NO: 1882582
uugcucuuaugauuagaaa

SEQ ID NO: 2132487 - RNA, 19 nt, Artificial Sequence
  Description of Artificial Sequence: Synthetic oligonucleotide
  Antisense strand to SEQ ID NO: 2132486
uuucuaaucauaagagcaa

SEQ ID NO: 2132488 - RNA, 19 nt, Artificial Sequence
  Description of Artificial Sequence: Synthetic oligonucleotide
  Sense strand starting at position 3706 of SEQ ID NO: 1882582
uucuuuauggcagagaauu

SEQ ID NO: 2132489 - RNA, 19 nt, Artificial Sequence
  Description of Artificial Sequence: Synthetic oligonucleotide
  Antisense strand to SEQ ID NO: 2132488
aauucucugccauaaagaa

SEQ ID NO: 2132490 - RNA, 19 nt, Artificial Sequence
  Description of Artificial Sequence: Synthetic oligonucleotide
  Sense strand starting at position 3799 of SEQ ID NO: 1882582
auuacaugucuuuagccua

SEQ ID NO: 2132491 - RNA, 19 nt, Artificial Sequence
  Description of Artificial Sequence: Synthetic oligonucleotide
  Antisense strand to SEQ ID NO: 2132490
uaggcuaaagacauguaau

SEQ ID NO: 2132492 - RNA, 19 nt, Artificial Sequence
  Description of Artificial Sequence: Synthetic oligonucleotide
  Sense strand starting at position 3809 of SEQ ID NO: 1882582
uuuagccuauggucuagaa

SEQ ID NO: 2132493 - RNA, 19 nt, Artificial Sequence
  Description of Artificial Sequence: Synthetic oligonucleotide
  Antisense strand to SEQ ID NO: 2132492
uucuagaccauaggcuaaa

SEQ ID NO: 2132494 - RNA, 19 nt, Artificial Sequence
  Description of Artificial Sequence: Synthetic oligonucleotide
  Sense strand starting at position 3839 of SEQ ID NO: 1882582
acgcacagagcucgaaauu

SEQ ID NO: 2132495 - RNA, 19 nt, Artificial Sequence
  Description of Artificial Sequence: Synthetic oligonucleotide
  Antisense strand to SEQ ID NO: 2132494
aauuucgagcucugugcgu

SEQ ID NO: 2132496 - RNA, 19 nt, Artificial Sequence
  Description of Artificial Sequence: Synthetic oligonucleotide
  Sense strand starting at position 3955 of SEQ ID NO: 1882582
agcaacauguuagcaagau

SEQ ID NO: 2132497 - RNA, 19 nt, Artificial Sequence
  Description of Artificial Sequence: Synthetic oligonucleotide
  Antisense strand to SEQ ID NO: 2132496
aucuugcuaacauguugcu

SEQ ID NO: 2132498 - RNA, 19 nt, Artificial Sequence
  Description of Artificial Sequence: Synthetic oligonucleotide
  Sense strand starting at position 3959 of SEQ ID NO: 1882582
acauguuagcaagauuaac

SEQ ID NO: 2132499 - RNA, 19 nt, Artificial Sequence
  Description of Artificial Sequence: Synthetic oligonucleotide
  Antisense strand to SEQ ID NO: 2132498
guuaaucuugcuaacaugu

SEQ ID NO: 2132500 - RNA, 19 nt, Artificial Sequence
  Description of Artificial Sequence: Synthetic oligonucleotide
  Sense strand starting at position 29 of SEQ ID NO: 1882583
acaagacuucgucaccaag

SEQ ID NO: 2132501 - RNA, 19 nt, Artificial Sequence
  Description of Artificial Sequence: Synthetic oligonucleotide
  Antisense strand to SEQ ID NO: 2132500
cuuggugacgaagucuugu

SEQ ID NO: 2132502 - RNA, 19 nt, Artificial Sequence
  Description of Artificial Sequence: Synthetic oligonucleotide
  Sense strand starting at position 31 of SEQ ID NO: 1882583
aagacuucgucaccaagca

SEQ ID NO: 2132503 - RNA, 19 nt, Artificial Sequence
  Description of Artificial Sequence: Synthetic oligonucleotide
  Antisense strand to SEQ ID NO: 2132502
ugcuuggugacgaagucuu

SEQ ID NO: 2132504 - RNA, 19 nt, Artificial Sequence
  Description of Artificial Sequence: Synthetic oligonucleotide
  Sense strand starting at position 129 of SEQ ID NO: 1882583
gagagaagucauuaugugc

SEQ ID NO: 2132505 - RNA, 19 nt, Artificial Sequence
  Description of Artificial Sequence: Synthetic oligonucleotide
  Antisense strand to SEQ ID NO: 2132504
gcacauaaugacuucucuc

SEQ ID NO: 2132506 - RNA, 19 nt, Artificial Sequence
  Description of Artificial Sequence: Synthetic oligonucleotide
  Sense strand starting at position 232 of SEQ ID NO: 1882583
uaggaaggccuuugaaaug

SEQ ID NO: 2132507 - RNA, 19 nt, Artificial Sequence
  Description of Artificial Sequence: Synthetic oligonucleotide
  Antisense strand to SEQ ID NO: 2132506
cauuucaaaggccuuccua

SEQ ID NO: 2132508 - RNA, 19 nt, Artificial Sequence
  Description of Artificial Sequence: Synthetic oligonucleotide
  Sense strand starting at position 269 of SEQ ID NO: 1882583
ggaauuagaccgcauacga

SEQ ID NO: 2132509 - RNA, 19 nt, Artificial Sequence
  Description of Artificial Sequence: Synthetic oligonucleotide
  Antisense strand to SEQ ID NO: 2132508
ucguaugcggucuaauucc

SEQ ID NO: 2132510 - RNA, 19 nt, Artificial Sequence
  Description of Artificial Sequence: Synthetic oligonucleotide
  Sense strand starting at position 377 of SEQ ID NO: 1882583
gaauacaaaguguguaaga

SEQ ID NO: 2132511 - RNA, 19 nt, Artificial Sequence
  Description of Artificial Sequence: Synthetic oligonucleotide
  Antisense strand to SEQ ID NO: 2132510
ucuuacacacuuuguauuc

SEQ ID NO: 2132512 - RNA, 19 nt, Artificial Sequence
  Description of Artificial Sequence: Synthetic oligonucleotide
  Sense strand starting at position 393 of SEQ ID NO: 1882583
agagcugauuuccaagauc

SEQ ID NO: 2132513 - RNA, 19 nt, Artificial Sequence
  Description of Artificial Sequence: Synthetic oligonucleotide
  Antisense strand to SEQ ID NO: 2132512
gaucuuggaaaucagcucu

SEQ ID NO: 2132514 - RNA, 19 nt, Artificial Sequence
  Description of Artificial Sequence: Synthetic oligonucleotide
  Sense strand starting at position 416 of SEQ ID NO: 1882583
gcaauuaaacguuaguaca

SEQ ID NO: 2132515 - RNA, 19 nt, Artificial Sequence
  Description of Artificial Sequence: Synthetic oligonucleotide
  Antisense strand to SEQ ID NO: 2132514
uguacuaacguuuaauugc

SEQ ID NO: 2132516 - RNA, 19 nt, Artificial Sequence
  Description of Artificial Sequence: Synthetic oligonucleotide
  Sense strand starting at position 424 of SEQ ID NO: 1882583
acguuaguacaugaugaaa

SEQ ID NO: 2132517 - RNA, 19 nt, Artificial Sequence
  Description of Artificial Sequence: Synthetic oligonucleotide
  Antisense strand to SEQ ID NO: 2132516
uuucaucauguacuaacgu

SEQ ID NO: 2132518 - RNA, 19 nt, Artificial Sequence
  Description of Artificial Sequence: Synthetic oligonucleotide
  Sense strand starting at position 521 of SEQ ID NO: 1882583
ccacgauagcacuaaacua

SEQ ID NO: 2132519 - RNA, 19 nt, Artificial Sequence
  Description of Artificial Sequence: Synthetic oligonucleotide
  Antisense strand to SEQ ID NO: 2132518
uaguuuagugcuaucgugg

SEQ ID NO: 2132520 - RNA, 19 nt, Artificial Sequence
  Description of Artificial Sequence: Synthetic oligonucleotide
  Sense strand starting at position 598 of SEQ ID NO: 1882583
ucaucaauguuuguuaaag

SEQ ID NO: 2132521 - RNA, 19 nt, Artificial Sequence
  Description of Artificial Sequence: Synthetic oligonucleotide
  Antisense strand to SEQ ID NO: 2132520
cuuuaacaaacauugauga

SEQ ID NO: 2132522 - RNA, 19 nt, Artificial Sequence
  Description of Artificial Sequence: Synthetic oligonucleotide
  Sense strand starting at position 636 of SEQ ID NO: 1882583
ugauguccacuccggaaga

SEQ ID NO: 2132523 - RNA, 19 nt, Artificial Sequence
  Description of Artificial Sequence: Synthetic oligonucleotide
  Antisense strand to SEQ ID NO: 2132522
ucuuccggaguggacauca

SEQ ID NO: 2132524 - RNA, 19 nt, Artificial Sequence
  Description of Artificial Sequence: Synthetic oligonucleotide
  Sense strand starting at position 638 of SEQ ID NO: 1882583
auguccacuccggaagauu

SEQ ID NO: 2132525 - RNA, 19 nt, Artificial Sequence
  Description of Artificial Sequence: Synthetic oligonucleotide
  Antisense strand to SEQ ID NO: 2132524
aaucuuccggaguggacau

SEQ ID NO: 2132526 - RNA, 19 nt, Artificial Sequence
  Description of Artificial Sequence: Synthetic oligonucleotide
  Sense strand starting at position 646 of SEQ ID NO: 1882583
uccggaagauuaucugcau

SEQ ID NO: 2132527 - RNA, 19 nt, Artificial Sequence
  Description of Artificial Sequence: Synthetic oligonucleotide
  Antisense strand to SEQ ID NO: 2132526
augcagauaaucuuccgga

SEQ ID NO: 2132528 - RNA, 19 nt, Artificial Sequence
  Description of Artificial Sequence: Synthetic oligonucleotide
  Sense strand starting at position 649 of SEQ ID NO: 1882583
ggaagauuaucugcaucug

SEQ ID NO: 2132529 - RNA, 19 nt, Artificial Sequence
  Description of Artificial Sequence: Synthetic oligonucleotide
  Antisense strand to SEQ ID NO: 2132528
cagaugcagauaaucuucc

SEQ ID NO: 2132530 - RNA, 19 nt, Artificial Sequence
  Description of Artificial Sequence: Synthetic oligonucleotide
  Sense strand starting at position 826 of SEQ ID NO: 1882583
guugguagaacccaaagua

SEQ ID NO: 2132531 - RNA, 19 nt, Artificial Sequence
  Description of Artificial Sequence: Synthetic oligonucleotide
  Antisense strand to SEQ ID NO: 2132530
uacuuuggguucuaccaac

SEQ ID NO: 2132532 - RNA, 19 nt, Artificial Sequence
  Description of Artificial Sequence: Synthetic oligonucleotide
  Sense strand starting at position 1874 of SEQ ID NO: 1882583
cauggugagaccgguaauc

SEQ ID NO: 2132533 - RNA, 19 nt, Artificial Sequence
  Description of Artificial Sequence: Synthetic oligonucleotide
  Antisense strand to SEQ ID NO: 2132532
gauuaccggucucaccaug

SEQ ID NO: 2132534 - RNA, 19 nt, Artificial Sequence
  Description of Artificial Sequence: Synthetic oligonucleotide
  Sense strand starting at position 2095 of SEQ ID NO: 1882583
gggugaacguugaaggagu

SEQ ID NO: 2132535 - RNA, 19 nt, Artificial Sequence
  Description of Artificial Sequence: Synthetic oligonucleotide
  Antisense strand to SEQ ID NO: 2132534
acuccuucaacguucaccc

SEQ ID NO: 2132536 - RNA, 19 nt, Artificial Sequence
  Description of Artificial Sequence: Synthetic oligonucleotide
  Sense strand starting at position 2112 of SEQ ID NO: 1882583
guguuagagauccaagcuu

SEQ ID NO: 2132537 - RNA, 19 nt, Artificial Sequence
  Description of Artificial Sequence: Synthetic oligonucleotide
  Antisense strand to SEQ ID NO: 2132536
aagcuuggaucucuaacac

SEQ ID NO: 2132538 - RNA, 19 nt, Artificial Sequence
  Description of Artificial Sequence: Synthetic oligonucleotide
  Sense strand starting at position 2472 of SEQ ID NO: 1882583
uuaagugaaagcuguaaag

SEQ ID NO: 2132539 - RNA, 19 nt, Artificial Sequence
  Description of Artificial Sequence: Synthetic oligonucleotide
  Antisense strand to SEQ ID NO: 2132538
cuuuacagcuuucacuuaa

SEQ ID NO: 2132540 - RNA, 19 nt, Artificial Sequence
  Description of Artificial Sequence: Synthetic oligonucleotide
  Sense strand starting at position 2731 of SEQ ID NO: 1882583
ucaugaagcccuuauugua

SEQ ID NO: 2132541 - RNA, 19 nt, Artificial Sequence
  Description of Artificial Sequence: Synthetic oligonucleotide
  Antisense strand to SEQ ID NO: 2132540
uacaauaagggcuucauga

SEQ ID NO: 2132542 - RNA, 19 nt, Artificial Sequence
  Description of Artificial Sequence: Synthetic oligonucleotide
  Sense strand starting at position 2797 of SEQ ID NO: 1882583
ggcuuuguggaccauaaga

SEQ ID NO: 2132543 - RNA, 19 nt, Artificial Sequence
  Description of Artificial Sequence: Synthetic oligonucleotide
  Antisense strand to SEQ ID NO: 2132542
ucuuaugguccacaaagcc

SEQ ID NO: 2132544 - RNA, 19 nt, Artificial Sequence
  Description of Artificial Sequence: Synthetic oligonucleotide
  Sense strand starting at position 2962 of SEQ ID NO: 1882583
uaaacauggucuuuguuag

SEQ ID NO: 2132545 - RNA, 19 nt, Artificial Sequence
  Description of Artificial Sequence: Synthetic oligonucleotide
  Antisense strand to SEQ ID NO: 2132544
cuaacaaagaccauguuua

SEQ ID NO: 2132546 - RNA, 19 nt, Artificial Sequence
  Description of Artificial Sequence: Synthetic oligonucleotide
  Sense strand starting at position 3264 of SEQ ID NO: 1882583
ugaagaccuuugcucugaa

SEQ ID NO: 2132547 - RNA, 19 nt, Artificial Sequence
  Description of Artificial Sequence: Synthetic oligonucleotide
  Antisense strand to SEQ ID NO: 2132546
uucagagcaaaggucuuca

SEQ ID NO: 2132548 - RNA, 19 nt, Artificial Sequence
  Description of Artificial Sequence: Synthetic oligonucleotide
  Sense strand starting at position 3267 of SEQ ID NO: 1882583
agaccuuugcucugaacaa

SEQ ID NO: 2132549 - RNA, 19 nt, Artificial Sequence
  Description of Artificial Sequence: Synthetic oligonucleotide
  Antisense strand to SEQ ID NO: 2132548
uuguucagagcaaaggucu

SEQ ID NO: 2132550 - RNA, 19 nt, Artificial Sequence
  Description of Artificial Sequence: Synthetic oligonucleotide
  Sense strand starting at position 3271 of SEQ ID NO: 1882583
cuuugcucugaacaaguaa

SEQ ID NO: 2132551 - RNA, 19 nt, Artificial Sequence
  Description of Artificial Sequence: Synthetic oligonucleotide
  Antisense strand to SEQ ID NO: 2132550
uuacuuguucagagcaaag

SEQ ID NO: 2132552 - RNA, 19 nt, Artificial Sequence
  Description of Artificial Sequence: Synthetic oligonucleotide
  Sense strand starting at position 3349 of SEQ ID NO: 1882583
agaacuuauugagcaaagu

SEQ ID NO: 2132553 - RNA, 19 nt, Artificial Sequence
  Description of Artificial Sequence: Synthetic oligonucleotide
  Antisense strand to SEQ ID NO: 2132552
acuuugcucaauaaguucu

SEQ ID NO: 2132554 - RNA, 19 nt, Artificial Sequence
  Description of Artificial Sequence: Synthetic oligonucleotide
  Sense strand starting at position 3358 of SEQ ID NO: 1882583
ugagcaaaguaaguaauua

SEQ ID NO: 2132555 - RNA, 19 nt, Artificial Sequence
  Description of Artificial Sequence: Synthetic oligonucleotide
  Antisense strand to SEQ ID NO: 2132554
uaauuacuuacuuugcuca

SEQ ID NO: 2132556 - RNA, 19 nt, Artificial Sequence
  Description of Artificial Sequence: Synthetic oligonucleotide
  Sense strand starting at position 3415 of SEQ ID NO: 1882583
ggaaauauguaagauuucu

SEQ ID NO: 2132557 - RNA, 19 nt, Artificial Sequence
  Description of Artificial Sequence: Synthetic oligonucleotide
  Antisense strand to SEQ ID NO: 2132556
agaaaucuuacauauuucc

SEQ ID NO: 2132558 - RNA, 19 nt, Artificial Sequence
  Description of Artificial Sequence: Synthetic oligonucleotide
  Sense strand starting at position 3421 of SEQ ID NO: 1882583
auguaagauuucuauaggu

SEQ ID NO: 2132559 - RNA, 19 nt, Artificial Sequence
  Description of Artificial Sequence: Synthetic oligonucleotide
  Antisense strand to SEQ ID NO: 2132558
accuauagaaaucuuacau

SEQ ID NO: 2132560 - RNA, 19 nt, Artificial Sequence
  Description of Artificial Sequence: Synthetic oligonucleotide
  Sense strand starting at position 3446 of SEQ ID NO: 1882583
ggagaugucaggcauuccu

SEQ ID NO: 2132561 - RNA, 19 nt, Artificial Sequence
  Description of Artificial Sequence: Synthetic oligonucleotide
  Antisense strand to SEQ ID NO: 2132560
aggaaugccugacaucucc

SEQ ID NO: 2132562 - RNA, 19 nt, Artificial Sequence
  Description of Artificial Sequence: Synthetic oligonucleotide
  Sense strand starting at position 3456 of SEQ ID NO: 1882583
ggcauuccugaaugagaaa

SEQ ID NO: 2132563 - RNA, 19 nt, Artificial Sequence
  Description of Artificial Sequence: Synthetic oligonucleotide
  Antisense strand to SEQ ID NO: 2132562
uuucucauucaggaaugcc

SEQ ID NO: 2132564 - RNA, 19 nt, Artificial Sequence
  Description of Artificial Sequence: Synthetic oligonucleotide
  Sense strand starting at position 3632 of SEQ ID NO: 1882583
augauagcaugucugagua

SEQ ID NO: 2132565 - RNA, 19 nt, Artificial Sequence
  Description of Artificial Sequence: Synthetic oligonucleotide
  Antisense strand to SEQ ID NO: 2132564
uacucagacaugcuaucau

SEQ ID NO: 2132566 - RNA, 19 nt, Artificial Sequence
  Description of Artificial Sequence: Synthetic oligonucleotide
  Sense strand starting at position 3668 of SEQ ID NO: 1882583
guaccuguuggccaaggaa

SEQ ID NO: 2132567 - RNA, 19 nt, Artificial Sequence
  Description of Artificial Sequence: Synthetic oligonucleotide
  Antisense strand to SEQ ID NO: 2132566
uuccuuggccaacagguac

SEQ ID NO: 2132568 - RNA, 19 nt, Artificial Sequence
  Description of Artificial Sequence: Synthetic oligonucleotide
  Sense strand starting at position 3760 of SEQ ID NO: 1882583
gacucugaggguuguguga

SEQ ID NO: 2132569 - RNA, 19 nt, Artificial Sequence
  Description of Artificial Sequence: Synthetic oligonucleotide
  Antisense strand to SEQ ID NO: 2132568
ucacacaacccucagaguc

SEQ ID NO: 2132570 - RNA, 19 nt, Artificial Sequence
  Description of Artificial Sequence: Synthetic oligonucleotide
  Sense strand starting at position 3784 of SEQ ID NO: 1882583
ggauaaccgcgugugguuu

SEQ ID NO: 2132571 - RNA, 19 nt, Artificial Sequence
  Description of Artificial Sequence: Synthetic oligonucleotide
  Antisense strand to SEQ ID NO: 2132570
aaaccacacgcgguuaucc

SEQ ID NO: 2132572 - RNA, 19 nt, Artificial Sequence
  Description of Artificial Sequence: Synthetic oligonucleotide
  Sense strand starting at position 3869 of SEQ ID NO: 1882583
aaaguaaacuguuugagug

SEQ ID NO: 2132573 - RNA, 19 nt, Artificial Sequence
  Description of Artificial Sequence: Synthetic oligonucleotide
  Antisense strand to SEQ ID NO: 2132572
cacucaaacaguuuacuuu

SEQ ID NO: 2132574 - RNA, 19 nt, Artificial Sequence
  Description of Artificial Sequence: Synthetic oligonucleotide
  Sense strand starting at position 3873 of SEQ ID NO: 1882583
uaaacuguuugaguguaga

SEQ ID NO: 2132575 - RNA, 19 nt, Artificial Sequence
  Description of Artificial Sequence: Synthetic oligonucleotide
  Antisense strand to SEQ ID NO: 2132574
ucuacacucaaacaguuua

SEQ ID NO: 2132576 - RNA, 19 nt, Artificial Sequence
  Description of Artificial Sequence: Synthetic oligonucleotide
  Sense strand starting at position 3947 of SEQ ID NO: 1882583
uuaguaggugcucauauau

SEQ ID NO: 2132577 - RNA, 19 nt, Artificial Sequence
  Description of Artificial Sequence: Synthetic oligonucleotide
  Antisense strand to SEQ ID NO: 2132576
auauaugagcaccuacuaa

SEQ ID NO: 2132578 - RNA, 19 nt, Artificial Sequence
  Description of Artificial Sequence: Synthetic oligonucleotide
  Sense strand starting at position 3954 of SEQ ID NO: 1882583
gugcucauauauuugucua

SEQ ID NO: 2132579 - RNA, 19 nt, Artificial Sequence
  Description of Artificial Sequence: Synthetic oligonucleotide
  Antisense strand to SEQ ID NO: 2132578
uagacaaauauaugagcac

SEQ ID NO: 2132580 - RNA, 19 nt, Artificial Sequence
  Description of Artificial Sequence: Synthetic oligonucleotide
  Sense strand starting at position 412 of SEQ ID NO: 1882584
uuuggucauuuggaacuau

SEQ ID NO: 2132581 - RNA, 19 nt, Artificial Sequence
  Description of Artificial Sequence: Synthetic oligonucleotide
  Antisense strand to SEQ ID NO: 2132580
auaguuccaaaugaccaaa

SEQ ID NO: 2132582 - RNA, 19 nt, Artificial Sequence
  Description of Artificial Sequence: Synthetic oligonucleotide
  Sense strand starting at position 652 of SEQ ID NO: 1882584
ugacaaauccuccaacguu

SEQ ID NO: 2132583 - RNA, 19 nt, Artificial Sequence
  Description of Artificial Sequence: Synthetic oligonucleotide
  Antisense strand to SEQ ID NO: 2132582
aacguuggaggauuuguca

SEQ ID NO: 2132584 - RNA, 19 nt, Artificial Sequence
  Description of Artificial Sequence: Synthetic oligonucleotide
  Sense strand starting at position 773 of SEQ ID NO: 1882584
gaagauuagugguugcuag

SEQ ID NO: 2132585 - RNA, 19 nt, Artificial Sequence
  Description of Artificial Sequence: Synthetic oligonucleotide
  Antisense strand to SEQ ID NO: 2132584
cuagcaaccacuaaucuuc

SEQ ID NO: 2132586 - RNA, 19 nt, Artificial Sequence
  Description of Artificial Sequence: Synthetic oligonucleotide
  Sense strand starting at position 826 of SEQ ID NO: 1882584
aagugcucaauggguagua

SEQ ID NO: 2132587 - RNA, 19 nt, Artificial Sequence
  Description of Artificial Sequence: Synthetic oligonucleotide
  Antisense strand to SEQ ID NO: 2132586
uacuacccauugagcacuu

SEQ ID NO: 2132588 - RNA, 19 nt, Artificial Sequence
  Description of Artificial Sequence: Synthetic oligonucleotide
  Sense strand starting at position 877 of SEQ ID NO: 1882584
uggaacuacguguaaguga

SEQ ID NO: 2132589 - RNA, 19 nt, Artificial Sequence
  Description of Artificial Sequence: Synthetic oligonucleotide
  Antisense strand to SEQ ID NO: 2132588
ucacuuacacguaguucca

SEQ ID NO: 2132590 - RNA, 19 nt, Artificial Sequence
  Description of Artificial Sequence: Synthetic oligonucleotide
  Sense strand starting at position 882 of SEQ ID NO: 1882584
cuacguguaagugaugauu

SEQ ID NO: 2132591 - RNA, 19 nt, Artificial Sequence
  Description of Artificial Sequence: Synthetic oligonucleotide
  Antisense strand to SEQ ID NO: 2132590
aaucaucacuuacacguag

SEQ ID NO: 2132592 - RNA, 19 nt, Artificial Sequence
  Description of Artificial Sequence: Synthetic oligonucleotide
  Sense strand starting at position 885 of SEQ ID NO: 1882584
cguguaagugaugauuaca

SEQ ID NO: 2132593 - RNA, 19 nt, Artificial Sequence
  Description of Artificial Sequence: Synthetic oligonucleotide
  Antisense strand to SEQ ID NO: 2132592
uguaaucaucacuuacacg

SEQ ID NO: 2132594 - RNA, 19 nt, Artificial Sequence
  Description of Artificial Sequence: Synthetic oligonucleotide
  Sense strand starting at position 963 of SEQ ID NO: 1882584
agagauauuugcuacuaaa

SEQ ID NO: 2132595 - RNA, 19 nt, Artificial Sequence
  Description of Artificial Sequence: Synthetic oligonucleotide
  Antisense strand to SEQ ID NO: 2132594
uuuaguagcaaauaucucu

SEQ ID NO: 2132596 - RNA, 19 nt, Artificial Sequence
  Description of Artificial Sequence: Synthetic oligonucleotide
  Sense strand starting at position 1027 of SEQ ID NO: 1882584
ggacuuguauuugauaaag

SEQ ID NO: 2132597 - RNA, 19 nt, Artificial Sequence
  Description of Artificial Sequence: Synthetic oligonucleotide
  Antisense strand to SEQ ID NO: 2132596
cuuuaucaaauacaagucc

SEQ ID NO: 2132598 - RNA, 19 nt, Artificial Sequence
  Description of Artificial Sequence: Synthetic oligonucleotide
  Sense strand starting at position 1029 of SEQ ID NO: 1882584
acuuguauuugauaaagcu

SEQ ID NO: 2132599 - RNA, 19 nt, Artificial Sequence
  Description of Artificial Sequence: Synthetic oligonucleotide
  Antisense strand to SEQ ID NO: 2132598
agcuuuaucaaauacaagu

SEQ ID NO: 2132600 - RNA, 19 nt, Artificial Sequence
  Description of Artificial Sequence: Synthetic oligonucleotide
  Sense strand starting at position 1046 of SEQ ID NO: 1882584
cuuuauuacugagucacuu

SEQ ID NO: 2132601 - RNA, 19 nt, Artificial Sequence
  Description of Artificial Sequence: Synthetic oligonucleotide
  Antisense strand to SEQ ID NO: 2132600
aagugacucaguaauaaag

SEQ ID NO: 2132602 - RNA, 19 nt, Artificial Sequence
  Description of Artificial Sequence: Synthetic oligonucleotide
  Sense strand starting at position 1056 of SEQ ID NO: 1882584
gagucacuucgacgaugaa

SEQ ID NO: 2132603 - RNA, 19 nt, Artificial Sequence
  Description of Artificial Sequence: Synthetic oligonucleotide
  Antisense strand to SEQ ID NO: 2132602
uucaucgucgaagugacuc

SEQ ID NO: 2132604 - RNA, 19 nt, Artificial Sequence
  Description of Artificial Sequence: Synthetic oligonucleotide
  Sense strand starting at position 1057 of SEQ ID NO: 1882584
agucacuucgacgaugaau

SEQ ID NO: 2132605 - RNA, 19 nt, Artificial Sequence
  Description of Artificial Sequence: Synthetic oligonucleotide
  Antisense strand to SEQ ID NO: 2132604
auucaucgucgaagugacu

SEQ ID NO: 2132606 - RNA, 19 nt, Artificial Sequence
  Description of Artificial Sequence: Synthetic oligonucleotide
  Sense strand starting at position 1059 of SEQ ID NO: 1882584
ucacuucgacgaugaaucu

SEQ ID NO: 2132607 - RNA, 19 nt, Artificial Sequence
  Description of Artificial Sequence: Synthetic oligonucleotide
  Antisense strand to SEQ ID NO: 2132606
agauucaucgucgaaguga

SEQ ID NO: 2132608 - RNA, 19 nt, Artificial Sequence
  Description of Artificial Sequence: Synthetic oligonucleotide
  Sense strand starting at position 1065 of SEQ ID NO: 1882584
cgacgaugaaucugauaaa

SEQ ID NO: 2132609 - RNA, 19 nt, Artificial Sequence
  Description of Artificial Sequence: Synthetic oligonucleotide
  Antisense strand to SEQ ID NO: 2132608
uuuaucagauucaucgucg

SEQ ID NO: 2132610 - RNA, 19 nt, Artificial Sequence
  Description of Artificial Sequence: Synthetic oligonucleotide
  Sense strand starting at position 1351 of SEQ ID NO: 1882584
gaagaucuuucggucuuag

SEQ ID NO: 2132611 - RNA, 19 nt, Artificial Sequence
  Description of Artificial Sequence: Synthetic oligonucleotide
  Antisense strand to SEQ ID NO: 2132610
cuaagaccgaaagaucuuc

SEQ ID NO: 2132612 - RNA, 19 nt, Artificial Sequence
  Description of Artificial Sequence: Synthetic oligonucleotide
  Sense strand starting at position 1433 of SEQ ID NO: 1882584
gccauuuaauaugaacuga

SEQ ID NO: 2132613 - RNA, 19 nt, Artificial Sequence
  Description of Artificial Sequence: Synthetic oligonucleotide
  Antisense strand to SEQ ID NO: 2132612
ucaguucauauuaaauggc

SEQ ID NO: 2132614 - RNA, 19 nt, Artificial Sequence
  Description of Artificial Sequence: Synthetic oligonucleotide
  Sense strand starting at position 1446 of SEQ ID NO: 1882584
aacugaaagguccggucuu

SEQ ID NO: 2132615 - RNA, 19 nt, Artificial Sequence
  Description of Artificial Sequence: Synthetic oligonucleotide
  Antisense strand to SEQ ID NO: 2132614
aagaccggaccuuucaguu

SEQ ID NO: 2132616 - RNA, 19 nt, Artificial Sequence
  Description of Artificial Sequence: Synthetic oligonucleotide
  Sense strand starting at position 1462 of SEQ ID NO: 1882584
cuugguuagugacuuuaca

SEQ ID NO: 2132617 - RNA, 19 nt, Artificial Sequence
  Description of Artificial Sequence: Synthetic oligonucleotide
  Antisense strand to SEQ ID NO: 2132616
uguaaagucacuaaccaag

SEQ ID NO: 2132618 - RNA, 19 nt, Artificial Sequence
  Description of Artificial Sequence: Synthetic oligonucleotide
  Sense strand starting at position 1548 of SEQ ID NO: 1882584
aaggccgugaccuggaaua

SEQ ID NO: 2132619 - RNA, 19 nt, Artificial Sequence
  Description of Artificial Sequence: Synthetic oligonucleotide
  Antisense strand to SEQ ID NO: 2132618
uauuccaggucacggccuu

SEQ ID NO: 2132620 - RNA, 19 nt, Artificial Sequence
  Description of Artificial Sequence: Synthetic oligonucleotide
  Sense strand starting at position 1550 of SEQ ID NO: 1882584
ggccgugaccuggaauaca

SEQ ID NO: 2132621 - RNA, 19 nt, Artificial Sequence
  Description of Artificial Sequence: Synthetic oligonucleotide
  Antisense strand to SEQ ID NO: 2132620
uguauuccaggucacggcc

SEQ ID NO: 2132622 - RNA, 19 nt, Artificial Sequence
  Description of Artificial Sequence: Synthetic oligonucleotide
  Sense strand starting at position 1822 of SEQ ID NO: 1882584
uggucucuuaccgagaucu

SEQ ID NO: 2132623 - RNA, 19 nt, Artificial Sequence
  Description of Artificial Sequence: Synthetic oligonucleotide
  Antisense strand to SEQ ID NO: 2132622
agaucucgguaagagacca

SEQ ID NO: 2132624 - RNA, 19 nt, Artificial Sequence
  Description of Artificial Sequence: Synthetic oligonucleotide
  Sense strand starting at position 1824 of SEQ ID NO: 1882584
gucucuuaccgagaucuag

SEQ ID NO: 2132625 - RNA, 19 nt, Artificial Sequence
  Description of Artificial Sequence: Synthetic oligonucleotide
  Antisense strand to SEQ ID NO: 2132624
cuagaucucgguaagagac

SEQ ID NO: 2132626 - RNA, 19 nt, Artificial Sequence
  Description of Artificial Sequence: Synthetic oligonucleotide
  Sense strand starting at position 1830 of SEQ ID NO: 1882584
uaccgagaucuaggguuaa

SEQ ID NO: 2132627 - RNA, 19 nt, Artificial Sequence
  Description of Artificial Sequence: Synthetic oligonucleotide
  Antisense strand to SEQ ID NO: 2132626
uuaacccuagaucucggua

SEQ ID NO: 2132628 - RNA, 19 nt, Artificial Sequence
  Description of Artificial Sequence: Synthetic oligonucleotide
  Sense strand starting at position 2030 of SEQ ID NO: 1882584
agaagaggccgugacguau

SEQ ID NO: 2132629 - RNA, 19 nt, Artificial Sequence
  Description of Artificial Sequence: Synthetic oligonucleotide
  Antisense strand to SEQ ID NO: 2132628
auacgucacggccucuucu

SEQ ID NO: 2132630 - RNA, 19 nt, Artificial Sequence
  Description of Artificial Sequence: Synthetic oligonucleotide
  Sense strand starting at position 2329 of SEQ ID NO: 1882584
ccuugugagcgguuagucu

SEQ ID NO: 2132631 - RNA, 19 nt, Artificial Sequence
  Description of Artificial Sequence: Synthetic oligonucleotide
  Antisense strand to SEQ ID NO: 2132630
agacuaaccgcucacaagg

SEQ ID NO: 2132632 - RNA, 19 nt, Artificial Sequence
  Description of Artificial Sequence: Synthetic oligonucleotide
  Sense strand starting at position 2337 of SEQ ID NO: 1882584
gcgguuagucuggaacuaa

SEQ ID NO: 2132633 - RNA, 19 nt, Artificial Sequence
  Description of Artificial Sequence: Synthetic oligonucleotide
  Antisense strand to SEQ ID NO: 2132632
uuaguuccagacuaaccgc

SEQ ID NO: 2132634 - RNA, 19 nt, Artificial Sequence
  Description of Artificial Sequence: Synthetic oligonucleotide
  Sense strand starting at position 2452 of SEQ ID NO: 1882584
uuggaaaguuugcccaacu

SEQ ID NO: 2132635 - RNA, 19 nt, Artificial Sequence
  Description of Artificial Sequence: Synthetic oligonucleotide
  Antisense strand to SEQ ID NO: 2132634
aguugggcaaacuuuccaa

SEQ ID NO: 2132636 - RNA, 19 nt, Artificial Sequence
  Description of Artificial Sequence: Synthetic oligonucleotide
  Sense strand starting at position 2577 of SEQ ID NO: 1882584
agggaaguuucugaagaag

SEQ ID NO: 2132637 - RNA, 19 nt, Artificial Sequence
  Description of Artificial Sequence: Synthetic oligonucleotide
  Antisense strand to SEQ ID NO: 2132636
cuucuucagaaacuucccu

SEQ ID NO: 2132638 - RNA, 19 nt, Artificial Sequence
  Description of Artificial Sequence: Synthetic oligonucleotide
  Sense strand starting at position 2739 of SEQ ID NO: 1882584
gagagacugugauuggguu

SEQ ID NO: 2132639 - RNA, 19 nt, Artificial Sequence
  Description of Artificial Sequence: Synthetic oligonucleotide
  Antisense strand to SEQ ID NO: 2132638
aacccaaucacagucucuc

SEQ ID NO: 2132640 - RNA, 19 nt, Artificial Sequence
  Description of Artificial Sequence: Synthetic oligonucleotide
  Sense strand starting at position 2740 of SEQ ID NO: 1882584
agagacugugauuggguua

SEQ ID NO: 2132641 - RNA, 19 nt, Artificial Sequence
  Description of Artificial Sequence: Synthetic oligonucleotide
  Antisense strand to SEQ ID NO: 2132640
uaacccaaucacagucucu

SEQ ID NO: 2132642 - RNA, 19 nt, Artificial Sequence
  Description of Artificial Sequence: Synthetic oligonucleotide
  Sense strand starting at position 2743 of SEQ ID NO: 1882584
gacugugauuggguuagaa

SEQ ID NO: 2132643 - RNA, 19 nt, Artificial Sequence
  Description of Artificial Sequence: Synthetic oligonucleotide
  Antisense strand to SEQ ID NO: 2132642
uucuaacccaaucacaguc

SEQ ID NO: 2132644 - RNA, 19 nt, Artificial Sequence
  Description of Artificial Sequence: Synthetic oligonucleotide
  Sense strand starting at position 3061 of SEQ ID NO: 1882584
ucccucuuagcugaaagau

SEQ ID NO: 2132645 - RNA, 19 nt, Artificial Sequence
  Description of Artificial Sequence: Synthetic oligonucleotide
  Antisense strand to SEQ ID NO: 2132644
aucuuucagcuaagaggga

SEQ ID NO: 2132646 - RNA, 19 nt, Artificial Sequence
  Description of Artificial Sequence: Synthetic oligonucleotide
  Sense strand starting at position 3070 of SEQ ID NO: 1882584
gcugaaagauaugccaauu

SEQ ID NO: 2132647 - RNA, 19 nt, Artificial Sequence
  Description of Artificial Sequence: Synthetic oligonucleotide
  Antisense strand to SEQ ID NO: 2132646
aauuggcauaucuuucagc

SEQ ID NO: 2132648 - RNA, 19 nt, Artificial Sequence
  Description of Artificial Sequence: Synthetic oligonucleotide
  Sense strand starting at position 3464 of SEQ ID NO: 1882584
cucuuauugugguucuaaa

SEQ ID NO: 2132649 - RNA, 19 nt, Artificial Sequence
  Description of Artificial Sequence: Synthetic oligonucleotide
  Antisense strand to SEQ ID NO: 2132648
uuuagaaccacaauaagag

SEQ ID NO: 2132650 - RNA, 19 nt, Artificial Sequence
  Description of Artificial Sequence: Synthetic oligonucleotide
  Sense strand starting at position 3482 of SEQ ID NO: 1882584
aagguuuaucuguagugga

SEQ ID NO: 2132651 - RNA, 19 nt, Artificial Sequence
  Description of Artificial Sequence: Synthetic oligonucleotide
  Antisense strand to SEQ ID NO: 2132650
uccacuacagauaaaccuu

SEQ ID NO: 2132652 - RNA, 19 nt, Artificial Sequence
  Description of Artificial Sequence: Synthetic oligonucleotide
  Sense strand starting at position 3486 of SEQ ID NO: 1882584
uuuaucuguaguggaggaa

SEQ ID NO: 2132653 - RNA, 19 nt, Artificial Sequence
  Description of Artificial Sequence: Synthetic oligonucleotide
  Antisense strand to SEQ ID NO: 2132652
uuccuccacuacagauaaa

SEQ ID NO: 2132654 - RNA, 19 nt, Artificial Sequence
  Description of Artificial Sequence: Synthetic oligonucleotide
  Sense strand starting at position 3748 of SEQ ID NO: 1882584
uaguuacuggcugaagcau

SEQ ID NO: 2132655 - RNA, 19 nt, Artificial Sequence
  Description of Artificial Sequence: Synthetic oligonucleotide
  Antisense strand to SEQ ID NO: 2132654
augcuucagccaguaacua

SEQ ID NO: 2132656 - RNA, 19 nt, Artificial Sequence
  Description of Artificial Sequence: Synthetic oligonucleotide
  Sense strand starting at position 3766 of SEQ ID NO: 1882584
uccugagaagaacguuuaa

SEQ ID NO: 2132657 - RNA, 19 nt, Artificial Sequence
  Description of Artificial Sequence: Synthetic oligonucleotide
  Antisense strand to SEQ ID NO: 2132656
uuaaacguucuucucagga

SEQ ID NO: 2132658 - RNA, 19 nt, Artificial Sequence
  Description of Artificial Sequence: Synthetic oligonucleotide
  Sense strand starting at position 3901 of SEQ ID NO: 1882584
gcagucaagcaauacauau

SEQ ID NO: 2132659 - RNA, 19 nt, Artificial Sequence
  Description of Artificial Sequence: Synthetic oligonucleotide
  Antisense strand to SEQ ID NO: 2132658
auauguauugcuugacugc

SEQ ID NO: 2132660 - RNA, 19 nt, Artificial Sequence
  Description of Artificial Sequence: Synthetic oligonucleotide
  Sense strand starting at position 36 of SEQ ID NO: 1882585
guggcaauucuguggauaa

SEQ ID NO: 2132661 - RNA, 19 nt, Artificial Sequence
  Description of Artificial Sequence: Synthetic oligonucleotide
  Antisense strand to SEQ ID NO: 2132660
uuauccacagaauugccac

SEQ ID NO: 2132662 - RNA, 19 nt, Artificial Sequence
  Description of Artificial Sequence: Synthetic oligonucleotide
  Sense strand starting at position 121 of SEQ ID NO: 1882585
uuuccaugucuuuaaguuc

SEQ ID NO: 2132663 - RNA, 19 nt, Artificial Sequence
  Description of Artificial Sequence: Synthetic oligonucleotide
  Antisense strand to SEQ ID NO: 2132662
gaacuuaaagacauggaaa

SEQ ID NO: 2132664 - RNA, 19 nt, Artificial Sequence
  Description of Artificial Sequence: Synthetic oligonucleotide
  Sense strand starting at position 301 of SEQ ID NO: 1882585
guaauuuaaagucgugguu

SEQ ID NO: 2132665 - RNA, 19 nt, Artificial Sequence
  Description of Artificial Sequence: Synthetic oligonucleotide
  Antisense strand to SEQ ID NO: 2132664
aaccacgacuuuaaauuac

SEQ ID NO: 2132666 - RNA, 19 nt, Artificial Sequence
  Description of Artificial Sequence: Synthetic oligonucleotide
  Sense strand starting at position 637 of SEQ ID NO: 1882585
uuguuaaaccugcagauua

SEQ ID NO: 2132667 - RNA, 19 nt, Artificial Sequence
  Description of Artificial Sequence: Synthetic oligonucleotide
  Antisense strand to SEQ ID NO: 2132666
uaaucugcagguuuaacaa

SEQ ID NO: 2132668 - RNA, 19 nt, Artificial Sequence
  Description of Artificial Sequence: Synthetic oligonucleotide
  Sense strand starting at position 639 of SEQ ID NO: 1882585
guuaaaccugcagauuaac

SEQ ID NO: 2132669 - RNA, 19 nt, Artificial Sequence
  Description of Artificial Sequence: Synthetic oligonucleotide
  Antisense strand to SEQ ID NO: 2132668
guuaaucugcagguuuaac

SEQ ID NO: 2132670 - RNA, 19 nt, Artificial Sequence
  Description of Artificial Sequence: Synthetic oligonucleotide
  Sense strand starting at position 753 of SEQ ID NO: 1882585
ugucacuaccguuaagaca

SEQ ID NO: 2132671 - RNA, 19 nt, Artificial Sequence
  Description of Artificial Sequence: Synthetic oligonucleotide
  Antisense strand to SEQ ID NO: 2132670
ugucuuaacgguagugaca

SEQ ID NO: 2132672 - RNA, 19 nt, Artificial Sequence
  Description of Artificial Sequence: Synthetic oligonucleotide
  Sense strand starting at position 800 of SEQ ID NO: 1882585
agggaugcuuagucagacu

SEQ ID NO: 2132673 - RNA, 19 nt, Artificial Sequence
  Description of Artificial Sequence: Synthetic oligonucleotide
  Antisense strand to SEQ ID NO: 2132672
agucugacuaagcaucccu

SEQ ID NO: 2132674 - RNA, 19 nt, Artificial Sequence
  Description of Artificial Sequence: Synthetic oligonucleotide
  Sense strand starting at position 873 of SEQ ID NO: 1882585
gaagucaaguugccauauu

SEQ ID NO: 2132675 - RNA, 19 nt, Artificial Sequence
  Description of Artificial Sequence: Synthetic oligonucleotide
  Antisense strand to SEQ ID NO: 2132674
aauauggcaacuugacuuc

SEQ ID NO: 2132676 - RNA, 19 nt, Artificial Sequence
  Description of Artificial Sequence: Synthetic oligonucleotide
  Sense strand starting at position 917 of SEQ ID NO: 1882585
cacuuaauugcuggguuaa

SEQ ID NO: 2132677 - RNA, 19 nt, Artificial Sequence
  Description of Artificial Sequence: Synthetic oligonucleotide
  Antisense strand to SEQ ID NO: 2132676
uuaacccagcaauuaagug

SEQ ID NO: 2132678 - RNA, 19 nt, Artificial Sequence
  Description of Artificial Sequence: Synthetic oligonucleotide
  Sense strand starting at position 918 of SEQ ID NO: 1882585
acuuaauugcuggguuaau

SEQ ID NO: 2132679 - RNA, 19 nt, Artificial Sequence
  Description of Artificial Sequence: Synthetic oligonucleotide
  Antisense strand to SEQ ID NO: 2132678
auuaacccagcaauuaagu

SEQ ID NO: 2132680 - RNA, 19 nt, Artificial Sequence
  Description of Artificial Sequence: Synthetic oligonucleotide
  Sense strand starting at position 919 of SEQ ID NO: 1882585
cuuaauugcuggguuaauu

SEQ ID NO: 2132681 - RNA, 19 nt, Artificial Sequence
  Description of Artificial Sequence: Synthetic oligonucleotide
  Antisense strand to SEQ ID NO: 2132680
aauuaacccagcaauuaag

SEQ ID NO: 2132682 - RNA, 19 nt, Artificial Sequence
  Description of Artificial Sequence: Synthetic oligonucleotide
  Sense strand starting at position 1190 of SEQ ID NO: 1882585
gcagaugaccauugaacaa

SEQ ID NO: 2132683 - RNA, 19 nt, Artificial Sequence
  Description of Artificial Sequence: Synthetic oligonucleotide
  Antisense strand to SEQ ID NO: 2132682
uuguucaauggucaucugc

SEQ ID NO: 2132684 - RNA, 19 nt, Artificial Sequence
  Description of Artificial Sequence: Synthetic oligonucleotide
  Sense strand starting at position 1210 of SEQ ID NO: 1882585
acacucugauggcuuagau

SEQ ID NO: 2132685 - RNA, 19 nt, Artificial Sequence
  Description of Artificial Sequence: Synthetic oligonucleotide
  Antisense strand to SEQ ID NO: 2132684
aucuaagccaucagagugu

SEQ ID NO: 2132686 - RNA, 19 nt, Artificial Sequence
  Description of Artificial Sequence: Synthetic oligonucleotide
  Sense strand starting at position 1218 of SEQ ID NO: 1882585
auggcuuagauguguagaa

SEQ ID NO: 2132687 - RNA, 19 nt, Artificial Sequence
  Description of Artificial Sequence: Synthetic oligonucleotide
  Antisense strand to SEQ ID NO: 2132686
uucuacacaucuaagccau

SEQ ID NO: 2132688 - RNA, 19 nt, Artificial Sequence
  Description of Artificial Sequence: Synthetic oligonucleotide
  Sense strand starting at position 1219 of SEQ ID NO: 1882585
uggcuuagauguguagaaa

SEQ ID NO: 2132689 - RNA, 19 nt, Artificial Sequence
  Description of Artificial Sequence: Synthetic oligonucleotide
  Antisense strand to SEQ ID NO: 2132688
uuucuacacaucuaagcca

SEQ ID NO: 2132690 - RNA, 19 nt, Artificial Sequence
  Description of Artificial Sequence: Synthetic oligonucleotide
  Sense strand starting at position 1861 of SEQ ID NO: 1882585
gcgguaauggcguuacucu

SEQ ID NO: 2132691 - RNA, 19 nt, Artificial Sequence
  Description of Artificial Sequence: Synthetic oligonucleotide
  Antisense strand to SEQ ID NO: 2132690
agaguaacgccauuaccgc

SEQ ID NO: 2132692 - RNA, 19 nt, Artificial Sequence
  Description of Artificial Sequence: Synthetic oligonucleotide
  Sense strand starting at position 2138 of SEQ ID NO: 1882585
auugucagugguuacuuua

SEQ ID NO: 2132693 - RNA, 19 nt, Artificial Sequence
  Description of Artificial Sequence: Synthetic oligonucleotide
  Antisense strand to SEQ ID NO: 2132692
uaaaguaaccacugacaau

SEQ ID NO: 2132694 - RNA, 19 nt, Artificial Sequence
  Description of Artificial Sequence: Synthetic oligonucleotide
  Sense strand starting at position 2141 of SEQ ID NO: 1882585
gucagugguuacuuuauuu

SEQ ID NO: 2132695 - RNA, 19 nt, Artificial Sequence
  Description of Artificial Sequence: Synthetic oligonucleotide
  Antisense strand to SEQ ID NO: 2132694
aaauaaaguaaccacugac

SEQ ID NO: 2132696 - RNA, 19 nt, Artificial Sequence
  Description of Artificial Sequence: Synthetic oligonucleotide
  Sense strand starting at position 2160 of SEQ ID NO: 1882585
gaaugacgauccucuugau

SEQ ID NO: 2132697 - RNA, 19 nt, Artificial Sequence
  Description of Artificial Sequence: Synthetic oligonucleotide
  Antisense strand to SEQ ID NO: 2132696
aucaagaggaucgucauuc

SEQ ID NO: 2132698 - RNA, 19 nt, Artificial Sequence
  Description of Artificial Sequence: Synthetic oligonucleotide
  Sense strand starting at position 2173 of SEQ ID NO: 1882585
cuugauaacggcgauguaa

SEQ ID NO: 2132699 - RNA, 19 nt, Artificial Sequence
  Description of Artificial Sequence: Synthetic oligonucleotide
  Antisense strand to SEQ ID NO: 2132698
uuacaucgccguuaucaag

SEQ ID NO: 2132700 - RNA, 19 nt, Artificial Sequence
  Description of Artificial Sequence: Synthetic oligonucleotide
  Sense strand starting at position 2320 of SEQ ID NO: 1882585
ucccaugguuaaguaauga

SEQ ID NO: 2132701 - RNA, 19 nt, Artificial Sequence
  Description of Artificial Sequence: Synthetic oligonucleotide
  Antisense strand to SEQ ID NO: 2132700
ucauuacuuaaccauggga

SEQ ID NO: 2132702 - RNA, 19 nt, Artificial Sequence
  Description of Artificial Sequence: Synthetic oligonucleotide
  Sense strand starting at position 2652 of SEQ ID NO: 1882585
uuaaauucguaugugacau

SEQ ID NO: 2132703 - RNA, 19 nt, Artificial Sequence
  Description of Artificial Sequence: Synthetic oligonucleotide
  Antisense strand to SEQ ID NO: 2132702
augucacauacgaauuuaa

SEQ ID NO: 2132704 - RNA, 19 nt, Artificial Sequence
  Description of Artificial Sequence: Synthetic oligonucleotide
  Sense strand starting at position 2704 of SEQ ID NO: 1882585
guauguagucagcauuugu

SEQ ID NO: 2132705 - RNA, 19 nt, Artificial Sequence
  Description of Artificial Sequence: Synthetic oligonucleotide
  Antisense strand to SEQ ID NO: 2132704
acaaaugcugacuacauac

SEQ ID NO: 2132706 - RNA, 19 nt, Artificial Sequence
  Description of Artificial Sequence: Synthetic oligonucleotide
  Sense strand starting at position 2708 of SEQ ID NO: 1882585
guagucagcauuuguaacu

SEQ ID NO: 2132707 - RNA, 19 nt, Artificial Sequence
  Description of Artificial Sequence: Synthetic oligonucleotide
  Antisense strand to SEQ ID NO: 2132706
aguuacaaaugcugacuac

SEQ ID NO: 2132708 - RNA, 19 nt, Artificial Sequence
  Description of Artificial Sequence: Synthetic oligonucleotide
  Sense strand starting at position 2796 of SEQ ID NO: 1882585
gcuggaguaauauagcagu

SEQ ID NO: 2132709 - RNA, 19 nt, Artificial Sequence
  Description of Artificial Sequence: Synthetic oligonucleotide
  Antisense strand to SEQ ID NO: 2132708
acugcuauauuacuccagc

SEQ ID NO: 2132710 - RNA, 19 nt, Artificial Sequence
  Description of Artificial Sequence: Synthetic oligonucleotide
  Sense strand starting at position 2836 of SEQ ID NO: 1882585
uaaguaaucuuggucugga

SEQ ID NO: 2132711 - RNA, 19 nt, Artificial Sequence
  Description of Artificial Sequence: Synthetic oligonucleotide
  Antisense strand to SEQ ID NO: 2132710
uccagaccaagauuacuua

SEQ ID NO: 2132712 - RNA, 19 nt, Artificial Sequence
  Description of Artificial Sequence: Synthetic oligonucleotide
  Sense strand starting at position 2837 of SEQ ID NO: 1882585
aaguaaucuuggucuggac

SEQ ID NO: 2132713 - RNA, 19 nt, Artificial Sequence
  Description of Artificial Sequence: Synthetic oligonucleotide
  Antisense strand to SEQ ID NO: 2132712
guccagaccaagauuacuu

SEQ ID NO: 2132714 - RNA, 19 nt, Artificial Sequence
  Description of Artificial Sequence: Synthetic oligonucleotide
  Sense strand starting at position 2839 of SEQ ID NO: 1882585
guaaucuuggucuggacca

SEQ ID NO: 2132715 - RNA, 19 nt, Artificial Sequence
  Description of Artificial Sequence: Synthetic oligonucleotide
  Antisense strand to SEQ ID NO: 2132714
ugguccagaccaagauuac

SEQ ID NO: 2132716 - RNA, 19 nt, Artificial Sequence
  Description of Artificial Sequence: Synthetic oligonucleotide
  Sense strand starting at position 2854 of SEQ ID NO: 1882585
accagagugagaugucaua

SEQ ID NO: 2132717 - RNA, 19 nt, Artificial Sequence
  Description of Artificial Sequence: Synthetic oligonucleotide
  Antisense strand to SEQ ID NO: 2132716
uaugacaucucacucuggu

SEQ ID NO: 2132718 - RNA, 19 nt, Artificial Sequence
  Description of Artificial Sequence: Synthetic oligonucleotide
  Sense strand starting at position 2953 of SEQ ID NO: 1882585
ucucuaugagcuggauauu

SEQ ID NO: 2132719 - RNA, 19 nt, Artificial Sequence
  Description of Artificial Sequence: Synthetic oligonucleotide
  Antisense strand to SEQ ID NO: 2132718
aauauccagcucauagaga

SEQ ID NO: 2132720 - RNA, 19 nt, Artificial Sequence
  Description of Artificial Sequence: Synthetic oligonucleotide
  Sense strand starting at position 2954 of SEQ ID NO: 1882585
cucuaugagcuggauauua

SEQ ID NO: 2132721 - RNA, 19 nt, Artificial Sequence
  Description of Artificial Sequence: Synthetic oligonucleotide
  Antisense strand to SEQ ID NO: 2132720
uaauauccagcucauagag

SEQ ID NO: 2132722 - RNA, 19 nt, Artificial Sequence
  Description of Artificial Sequence: Synthetic oligonucleotide
  Sense strand starting at position 2966 of SEQ ID NO: 1882585
gauauuauuuacugaggag

SEQ ID NO: 2132723 - RNA, 19 nt, Artificial Sequence
  Description of Artificial Sequence: Synthetic oligonucleotide
  Antisense strand to SEQ ID NO: 2132722
cuccucaguaaauaauauc

SEQ ID NO: 2132724 - RNA, 19 nt, Artificial Sequence
  Description of Artificial Sequence: Synthetic oligonucleotide
  Sense strand starting at position 2969 of SEQ ID NO: 1882585
auuauuuacugaggagaaa

SEQ ID NO: 2132725 - RNA, 19 nt, Artificial Sequence
  Description of Artificial Sequence: Synthetic oligonucleotide
  Antisense strand to SEQ ID NO: 2132724
uuucuccucaguaaauaau

SEQ ID NO: 2132726 - RNA, 19 nt, Artificial Sequence
  Description of Artificial Sequence: Synthetic oligonucleotide
  Sense strand starting at position 2995 of SEQ ID NO: 1882585
cagagagguuaguaauuua

SEQ ID NO: 2132727 - RNA, 19 nt, Artificial Sequence
  Description of Artificial Sequence: Synthetic oligonucleotide
  Antisense strand to SEQ ID NO: 2132726
uaaauuacuaaccucucug

SEQ ID NO: 2132728 - RNA, 19 nt, Artificial Sequence
  Description of Artificial Sequence: Synthetic oligonucleotide
  Sense strand starting at position 3044 of SEQ ID NO: 1882585
gaugcaagauuugaacaag

SEQ ID NO: 2132729 - RNA, 19 nt, Artificial Sequence
  Description of Artificial Sequence: Synthetic oligonucleotide
  Antisense strand to SEQ ID NO: 2132728
cuuguucaaaucuugcauc

SEQ ID NO: 2132730 - RNA, 19 nt, Artificial Sequence
  Description of Artificial Sequence: Synthetic oligonucleotide
  Sense strand starting at position 3060 of SEQ ID NO: 1882585
aaggcuaucugguuccaga

SEQ ID NO: 2132731 - RNA, 19 nt, Artificial Sequence
  Description of Artificial Sequence: Synthetic oligonucleotide
  Antisense strand to SEQ ID NO: 2132730
ucuggaaccagauagccuu

SEQ ID NO: 2132732 - RNA, 19 nt, Artificial Sequence
  Description of Artificial Sequence: Synthetic oligonucleotide
  Sense strand starting at position 3087 of SEQ ID NO: 1882585
acuacugaccuaggacauu

SEQ ID NO: 2132733 - RNA, 19 nt, Artificial Sequence
  Description of Artificial Sequence: Synthetic oligonucleotide
  Antisense strand to SEQ ID NO: 2132732
aauguccuaggucaguagu

SEQ ID NO: 2132734 - RNA, 19 nt, Artificial Sequence
  Description of Artificial Sequence: Synthetic oligonucleotide
  Sense strand starting at position 3381 of SEQ ID NO: 1882585
cagagcugugucuggaaua

SEQ ID NO: 2132735 - RNA, 19 nt, Artificial Sequence
  Description of Artificial Sequence: Synthetic oligonucleotide
  Antisense strand to SEQ ID NO: 2132734
uauuccagacacagcucug

SEQ ID NO: 2132736 - RNA, 19 nt, Artificial Sequence
  Description of Artificial Sequence: Synthetic oligonucleotide
  Sense strand starting at position 3394 of SEQ ID NO: 1882585
ggaauaggguucuuggucu

SEQ ID NO: 2132737 - RNA, 19 nt, Artificial Sequence
  Description of Artificial Sequence: Synthetic oligonucleotide
  Antisense strand to SEQ ID NO: 2132736
agaccaagaacccuauucc

SEQ ID NO: 2132738 - RNA, 19 nt, Artificial Sequence
  Description of Artificial Sequence: Synthetic oligonucleotide
  Sense strand starting at position 3460 of SEQ ID NO: 1882585
guucuuaaaguccagaguu

SEQ ID NO: 2132739 - RNA, 19 nt, Artificial Sequence
  Description of Artificial Sequence: Synthetic oligonucleotide
  Antisense strand to SEQ ID NO: 2132738
aacucuggacuuuaagaac

SEQ ID NO: 2132740 - RNA, 19 nt, Artificial Sequence
  Description of Artificial Sequence: Synthetic oligonucleotide
  Sense strand starting at position 10 of SEQ ID NO: 1882586
gcaguaucuucuuagcuga

SEQ ID NO: 2132741 - RNA, 19 nt, Artificial Sequence
  Description of Artificial Sequence: Synthetic oligonucleotide
  Antisense strand to SEQ ID NO: 2132740
ucagcuaagaagauacugc

SEQ ID NO: 2132742 - RNA, 19 nt, Artificial Sequence
  Description of Artificial Sequence: Synthetic oligonucleotide
  Sense strand starting at position 98 of SEQ ID NO: 1882586
gccucaguguaagauggaa

SEQ ID NO: 2132743 - RNA, 19 nt, Artificial Sequence
  Description of Artificial Sequence: Synthetic oligonucleotide
  Antisense strand to SEQ ID NO: 2132742
uuccaucuuacacugaggc

SEQ ID NO: 2132744 - RNA, 19 nt, Artificial Sequence
  Description of Artificial Sequence: Synthetic oligonucleotide
  Sense strand starting at position 170 of SEQ ID NO: 1882586
cgcuguauguucgaaccau

SEQ ID NO: 2132745 - RNA, 19 nt, Artificial Sequence
  Description of Artificial Sequence: Synthetic oligonucleotide
  Antisense strand to SEQ ID NO: 2132744
augguucgaacauacagcg

SEQ ID NO: 2132746 - RNA, 19 nt, Artificial Sequence
  Description of Artificial Sequence: Synthetic oligonucleotide
  Sense strand starting at position 237 of SEQ ID NO: 1882586
uuugaaaugcccuguacua

SEQ ID NO: 2132747 - RNA, 19 nt, Artificial Sequence
  Description of Artificial Sequence: Synthetic oligonucleotide
  Antisense strand to SEQ ID NO: 2132746
uaguacagggcauuucaaa

SEQ ID NO: 2132748 - RNA, 19 nt, Artificial Sequence
  Description of Artificial Sequence: Synthetic oligonucleotide
  Sense strand starting at position 313 of SEQ ID NO: 1882586
gccugaaaggccuaaugcu

SEQ ID NO: 2132749 - RNA, 19 nt, Artificial Sequence
  Description of Artificial Sequence: Synthetic oligonucleotide
  Antisense strand to SEQ ID NO: 2132748
agcauuaggccuuucaggc

SEQ ID NO: 2132750 - RNA, 19 nt, Artificial Sequence
  Description of Artificial Sequence: Synthetic oligonucleotide
  Sense strand starting at position 320 of SEQ ID NO: 1882586
aggccuaaugcuugcugaa

SEQ ID NO: 2132751 - RNA, 19 nt, Artificial Sequence
  Description of Artificial Sequence: Synthetic oligonucleotide
  Antisense strand to SEQ ID NO: 2132750
uucagcaagcauuaggccu

SEQ ID NO: 2132752 - RNA, 19 nt, Artificial Sequence
  Description of Artificial Sequence: Synthetic oligonucleotide
  Sense strand starting at position 551 of SEQ ID NO: 1882586
cgacccugggcagauaaau

SEQ ID NO: 2132753 - RNA, 19 nt, Artificial Sequence
  Description of Artificial Sequence: Synthetic oligonucleotide
  Antisense strand to SEQ ID NO: 2132752
auuuaucugcccagggucg

SEQ ID NO: 2132754 - RNA, 19 nt, Artificial Sequence
  Description of Artificial Sequence: Synthetic oligonucleotide
  Sense strand starting at position 1414 of SEQ ID NO: 1882586
uggcucgcuuaguccuaaa

SEQ ID NO: 2132755 - RNA, 19 nt, Artificial Sequence
  Description of Artificial Sequence: Synthetic oligonucleotide
  Antisense strand to SEQ ID NO: 2132754
uuuaggacuaagcgagcca

SEQ ID NO: 2132756 - RNA, 19 nt, Artificial Sequence
  Description of Artificial Sequence: Synthetic oligonucleotide
  Sense strand starting at position 1417 of SEQ ID NO: 1882586
cucgcuuaguccuaaacca

SEQ ID NO: 2132757 - RNA, 19 nt, Artificial Sequence
  Description of Artificial Sequence: Synthetic oligonucleotide
  Antisense strand to SEQ ID NO: 2132756
ugguuuaggacuaagcgag

SEQ ID NO: 2132758 - RNA, 19 nt, Artificial Sequence
  Description of Artificial Sequence: Synthetic oligonucleotide
  Sense strand starting at position 1447 of SEQ ID NO: 1882586
ccaggccuccucuguagaa

SEQ ID NO: 2132759 - RNA, 19 nt, Artificial Sequence
  Description of Artificial Sequence: Synthetic oligonucleotide
  Antisense strand to SEQ ID NO: 2132758
uucuacagaggaggccugg

SEQ ID NO: 2132760 - RNA, 19 nt, Artificial Sequence
  Description of Artificial Sequence: Synthetic oligonucleotide
  Sense strand starting at position 1448 of SEQ ID NO: 1882586
caggccuccucuguagaau

SEQ ID NO: 2132761 - RNA, 19 nt, Artificial Sequence
  Description of Artificial Sequence: Synthetic oligonucleotide
  Antisense strand to SEQ ID NO: 2132760
auucuacagaggaggccug

SEQ ID NO: 2132762 - RNA, 19 nt, Artificial Sequence
  Description of Artificial Sequence: Synthetic oligonucleotide
  Sense strand starting at position 1545 of SEQ ID NO: 1882586
agcugagccucggaacaaa

SEQ ID NO: 2132763 - RNA, 19 nt, Artificial Sequence
  Description of Artificial Sequence: Synthetic oligonucleotide
  Antisense strand to SEQ ID NO: 2132762
uuuguuccgaggcucagcu

SEQ ID NO: 2132764 - RNA, 19 nt, Artificial Sequence
  Description of Artificial Sequence: Synthetic oligonucleotide
  Sense strand starting at position 1671 of SEQ ID NO: 1882586
acgccaguaccauggagau

SEQ ID NO: 2132765 - RNA, 19 nt, Artificial Sequence
  Description of Artificial Sequence: Synthetic oligonucleotide
  Antisense strand to SEQ ID NO: 2132764
aucuccaugguacuggcgu

SEQ ID NO: 2132766 - RNA, 19 nt, Artificial Sequence
  Description of Artificial Sequence: Synthetic oligonucleotide
  Sense strand starting at position 1756 of SEQ ID NO: 1882586
gacggauacccggaucgau

SEQ ID NO: 2132767 - RNA, 19 nt, Artificial Sequence
  Description of Artificial Sequence: Synthetic oligonucleotide
  Antisense strand to SEQ ID NO: 2132766
aucgauccggguauccguc

SEQ ID NO: 2132768 - RNA, 19 nt, Artificial Sequence
  Description of Artificial Sequence: Synthetic oligonucleotide
  Sense strand starting at position 2148 of SEQ ID NO: 1882586
cacuauaccugagugaagu

SEQ ID NO: 2132769 - RNA, 19 nt, Artificial Sequence
  Description of Artificial Sequence: Synthetic oligonucleotide
  Antisense strand to SEQ ID NO: 2132768
acuucacucagguauagug

SEQ ID NO: 2132770 - RNA, 19 nt, Artificial Sequence
  Description of Artificial Sequence: Synthetic oligonucleotide
  Sense strand starting at position 2220 of SEQ ID NO: 1882586
agcuuauguacaugggaua

SEQ ID NO: 2132771 - RNA, 19 nt, Artificial Sequence
  Description of Artificial Sequence: Synthetic oligonucleotide
  Antisense strand to SEQ ID NO: 2132770
uaucccauguacauaagcu

SEQ ID NO: 2132772 - RNA, 19 nt, Artificial Sequence
  Description of Artificial Sequence: Synthetic oligonucleotide
  Sense strand starting at position 2223 of SEQ ID NO: 1882586
uuauguacaugggauacaa

SEQ ID NO: 2132773 - RNA, 19 nt, Artificial Sequence
  Description of Artificial Sequence: Synthetic oligonucleotide
  Antisense strand to SEQ ID NO: 2132772
uuguaucccauguacauaa

SEQ ID NO: 2132774 - RNA, 19 nt, Artificial Sequence
  Description of Artificial Sequence: Synthetic oligonucleotide
  Sense strand starting at position 2400 of SEQ ID NO: 1882586
ggccuucugcucugugcua

SEQ ID NO: 2132775 - RNA, 19 nt, Artificial Sequence
  Description of Artificial Sequence: Synthetic oligonucleotide
  Antisense strand to SEQ ID NO: 2132774
uagcacagagcagaaggcc

SEQ ID NO: 2132776 - RNA, 19 nt, Artificial Sequence
  Description of Artificial Sequence: Synthetic oligonucleotide
  Sense strand starting at position 2593 of SEQ ID NO: 1882586
gcgagagcuuaggcuugaa

SEQ ID NO: 2132777 - RNA, 19 nt, Artificial Sequence
  Description of Artificial Sequence: Synthetic oligonucleotide
  Antisense strand to SEQ ID NO: 2132776
uucaagccuaagcucucgc

SEQ ID NO: 2132778 - RNA, 19 nt, Artificial Sequence
  Description of Artificial Sequence: Synthetic oligonucleotide
  Sense strand starting at position 2603 of SEQ ID NO: 1882586
aggcuugaaggcugggaaa

SEQ ID NO: 2132779 - RNA, 19 nt, Artificial Sequence
  Description of Artificial Sequence: Synthetic oligonucleotide
  Antisense strand to SEQ ID NO: 2132778
uuucccagccuucaagccu

SEQ ID NO: 2132780 - RNA, 19 nt, Artificial Sequence
  Description of Artificial Sequence: Synthetic oligonucleotide
  Sense strand starting at position 2708 of SEQ ID NO: 1882586
cugaaauggugggcucagu

SEQ ID NO: 2132781 - RNA, 19 nt, Artificial Sequence
  Description of Artificial Sequence: Synthetic oligonucleotide
  Antisense strand to SEQ ID NO: 2132780
acugagcccaccauuucag

SEQ ID NO: 2132782 - RNA, 19 nt, Artificial Sequence
  Description of Artificial Sequence: Synthetic oligonucleotide
  Sense strand starting at position 2808 of SEQ ID NO: 1882586
ccaugaagauguuugaaua

SEQ ID NO: 2132783 - RNA, 19 nt, Artificial Sequence
  Description of Artificial Sequence: Synthetic oligonucleotide
  Antisense strand to SEQ ID NO: 2132782
uauucaaacaucuucaugg

SEQ ID NO: 2132784 - RNA, 19 nt, Artificial Sequence
  Description of Artificial Sequence: Synthetic oligonucleotide
  Sense strand starting at position 2809 of SEQ ID NO: 1882586
caugaagauguuugaauau

SEQ ID NO: 2132785 - RNA, 19 nt, Artificial Sequence
  Description of Artificial Sequence: Synthetic oligonucleotide
  Antisense strand to SEQ ID NO: 2132784
auauucaaacaucuucaug

SEQ ID NO: 2132786 - RNA, 19 nt, Artificial Sequence
  Description of Artificial Sequence: Synthetic oligonucleotide
  Sense strand starting at position 2818 of SEQ ID NO: 1882586
guuugaauaugucagggua

SEQ ID NO: 2132787 - RNA, 19 nt, Artificial Sequence
  Description of Artificial Sequence: Synthetic oligonucleotide
  Antisense strand to SEQ ID NO: 2132786
uacccugacauauucaaac

SEQ ID NO: 2132788 - RNA, 19 nt, Artificial Sequence
  Description of Artificial Sequence: Synthetic oligonucleotide
  Sense strand starting at position 2820 of SEQ ID NO: 1882586
uugaauaugucaggguaag

SEQ ID NO: 2132789 - RNA, 19 nt, Artificial Sequence
  Description of Artificial Sequence: Synthetic oligonucleotide
  Antisense strand to SEQ ID NO: 2132788
cuuacccugacauauucaa

SEQ ID NO: 2132790 - RNA, 19 nt, Artificial Sequence
  Description of Artificial Sequence: Synthetic oligonucleotide
  Sense strand starting at position 2821 of SEQ ID NO: 1882586
ugaauaugucaggguaagg

SEQ ID NO: 2132791 - RNA, 19 nt, Artificial Sequence
  Description of Artificial Sequence: Synthetic oligonucleotide
  Antisense strand to SEQ ID NO: 2132790
ccuuacccugacauauuca

SEQ ID NO: 2132792 - RNA, 19 nt, Artificial Sequence
  Description of Artificial Sequence: Synthetic oligonucleotide
  Sense strand starting at position 3230 of SEQ ID NO: 1882586
gcccauaugguauguggaa

SEQ ID NO: 2132793 - RNA, 19 nt, Artificial Sequence
  Description of Artificial Sequence: Synthetic oligonucleotide
  Antisense strand to SEQ ID NO: 2132792
uuccacauaccauaugggc

SEQ ID NO: 2132794 - RNA, 19 nt, Artificial Sequence
  Description of Artificial Sequence: Synthetic oligonucleotide
  Sense strand starting at position 3239 of SEQ ID NO: 1882586
guauguggaagcuaugacu

SEQ ID NO: 2132795 - RNA, 19 nt, Artificial Sequence
  Description of Artificial Sequence: Synthetic oligonucleotide
  Antisense strand to SEQ ID NO: 2132794
agucauagcuuccacauac

SEQ ID NO: 2132796 - RNA, 19 nt, Artificial Sequence
  Description of Artificial Sequence: Synthetic oligonucleotide
  Sense strand starting at position 3310 of SEQ ID NO: 1882586
gagggaggcagucauaucu

SEQ ID NO: 2132797 - RNA, 19 nt, Artificial Sequence
  Description of Artificial Sequence: Synthetic oligonucleotide
  Antisense strand to SEQ ID NO: 2132796
agauaugacugccucccuc

SEQ ID NO: 2132798 - RNA, 19 nt, Artificial Sequence
  Description of Artificial Sequence: Synthetic oligonucleotide
  Sense strand starting at position 3319 of SEQ ID NO: 1882586
agucauaucucugugugca

SEQ ID NO: 2132799 - RNA, 19 nt, Artificial Sequence
  Description of Artificial Sequence: Synthetic oligonucleotide
  Antisense strand to SEQ ID NO: 2132798
ugcacacagagauaugacu

SEQ ID NO: 2132800 - RNA, 19 nt, Artificial Sequence
  Description of Artificial Sequence: Synthetic oligonucleotide
  Sense strand starting at position 3320 of SEQ ID NO: 1882586
gucauaucucugugugcag

SEQ ID NO: 2132801 - RNA, 19 nt, Artificial Sequence
  Description of Artificial Sequence: Synthetic oligonucleotide
  Antisense strand to SEQ ID NO: 2132800
cugcacacagagauaugac

SEQ ID NO: 2132802 - RNA, 19 nt, Artificial Sequence
  Description of Artificial Sequence: Synthetic oligonucleotide
  Sense strand starting at position 3321 of SEQ ID NO: 1882586
ucauaucucugugugcaga

SEQ ID NO: 2132803 - RNA, 19 nt, Artificial Sequence
  Description of Artificial Sequence: Synthetic oligonucleotide
  Antisense strand to SEQ ID NO: 2132802
ucugcacacagagauauga

SEQ ID NO: 2132804 - RNA, 19 nt, Artificial Sequence
  Description of Artificial Sequence: Synthetic oligonucleotide
  Sense strand starting at position 3322 of SEQ ID NO: 1882586
cauaucucugugugcagau

SEQ ID NO: 2132805 - RNA, 19 nt, Artificial Sequence
  Description of Artificial Sequence: Synthetic oligonucleotide
  Antisense strand to SEQ ID NO: 2132804
aucugcacacagagauaug

SEQ ID NO: 2132806 - RNA, 19 nt, Artificial Sequence
  Description of Artificial Sequence: Synthetic oligonucleotide
  Sense strand starting at position 3323 of SEQ ID NO: 1882586
auaucucugugugcagaua

SEQ ID NO: 2132807 - RNA, 19 nt, Artificial Sequence
  Description of Artificial Sequence: Synthetic oligonucleotide
  Antisense strand to SEQ ID NO: 2132806
uaucugcacacagagauau

SEQ ID NO: 2132808 - RNA, 19 nt, Artificial Sequence
  Description of Artificial Sequence: Synthetic oligonucleotide
  Sense strand starting at position 3348 of SEQ ID NO: 1882586
gcauauuucuaagagguuc

SEQ ID NO: 2132809 - RNA, 19 nt, Artificial Sequence
  Description of Artificial Sequence: Synthetic oligonucleotide
  Antisense strand to SEQ ID NO: 2132808
gaaccucuuagaaauaugc

SEQ ID NO: 2132810 - RNA, 19 nt, Artificial Sequence
  Description of Artificial Sequence: Synthetic oligonucleotide
  Sense strand starting at position 3371 of SEQ ID NO: 1882586
gcugucuucuuagcugagu

SEQ ID NO: 2132811 - RNA, 19 nt, Artificial Sequence
  Description of Artificial Sequence: Synthetic oligonucleotide
  Antisense strand to SEQ ID NO: 2132810
acucagcuaagaagacagc

SEQ ID NO: 2132812 - RNA, 19 nt, Artificial Sequence
  Description of Artificial Sequence: Synthetic oligonucleotide
  Sense strand starting at position 3374 of SEQ ID NO: 1882586
gucuucuuagcugagucau

SEQ ID NO: 2132813 - RNA, 19 nt, Artificial Sequence
  Description of Artificial Sequence: Synthetic oligonucleotide
  Antisense strand to SEQ ID NO: 2132812
augacucagcuaagaagac

SEQ ID NO: 2132814 - RNA, 19 nt, Artificial Sequence
  Description of Artificial Sequence: Synthetic oligonucleotide
  Sense strand starting at position 3384 of SEQ ID NO: 1882586
cugagucaucccuguccag

SEQ ID NO: 2132815 - RNA, 19 nt, Artificial Sequence
  Description of Artificial Sequence: Synthetic oligonucleotide
  Antisense strand to SEQ ID NO: 2132814
cuggacagggaugacucag

SEQ ID NO: 2132816 - RNA, 19 nt, Artificial Sequence
  Description of Artificial Sequence: Synthetic oligonucleotide
  Sense strand starting at position 3886 of SEQ ID NO: 1882586
cguucuauucccugcagga

SEQ ID NO: 2132817 - RNA, 19 nt, Artificial Sequence
  Description of Artificial Sequence: Synthetic oligonucleotide
  Antisense strand to SEQ ID NO: 2132816
uccugcagggaauagaacg

SEQ ID NO: 2132818 - RNA, 19 nt, Artificial Sequence
  Description of Artificial Sequence: Synthetic oligonucleotide
  Sense strand starting at position 3888 of SEQ ID NO: 1882586
uucuauucccugcaggaaa

SEQ ID NO: 2132819 - RNA, 19 nt, Artificial Sequence
  Description of Artificial Sequence: Synthetic oligonucleotide
  Antisense strand to SEQ ID NO: 2132818
uuuccugcagggaauagaa

SEQ ID NO: 2132820 - RNA, 19 nt, Artificial Sequence
  Description of Artificial Sequence: Synthetic oligonucleotide
  Sense strand starting at position 2001 of SEQ ID NO: 1882587
gugcauuuggucugaagac

SEQ ID NO: 2132821 - RNA, 19 nt, Artificial Sequence
  Description of Artificial Sequence: Synthetic oligonucleotide
  Antisense strand to SEQ ID NO: 2132820
gucuucagaccaaaugcac

SEQ ID NO: 2132822 - RNA, 19 nt, Artificial Sequence
  Description of Artificial Sequence: Synthetic oligonucleotide
  Sense strand starting at position 2002 of SEQ ID NO: 1882587
ugcauuuggucugaagaca

SEQ ID NO: 2132823 - RNA, 19 nt, Artificial Sequence
  Description of Artificial Sequence: Synthetic oligonucleotide
  Antisense strand to SEQ ID NO: 2132822
ugucuucagaccaaaugca

SEQ ID NO: 2132824 - RNA, 19 nt, Artificial Sequence
  Description of Artificial Sequence: Synthetic oligonucleotide
  Sense strand starting at position 90 of SEQ ID NO: 1882588
aggagucauucgcuaggaa

SEQ ID NO: 2132825 - RNA, 19 nt, Artificial Sequence
  Description of Artificial Sequence: Synthetic oligonucleotide
  Antisense strand to SEQ ID NO: 2132824
uuccuagcgaaugacuccu

SEQ ID NO: 2132826 - RNA, 19 nt, Artificial Sequence
  Description of Artificial Sequence: Synthetic oligonucleotide
  Sense strand starting at position 91 of SEQ ID NO: 1882588
ggagucauucgcuaggaac

SEQ ID NO: 2132827 - RNA, 19 nt, Artificial Sequence
  Description of Artificial Sequence: Synthetic oligonucleotide
  Antisense strand to SEQ ID NO: 2132826
guuccuagcgaaugacucc

SEQ ID NO: 2132828 - RNA, 19 nt, Artificial Sequence
  Description of Artificial Sequence: Synthetic oligonucleotide
  Sense strand starting at position 124 of SEQ ID NO: 1882588
ccgaauuaggauuagucuu

SEQ ID NO: 2132829 - RNA, 19 nt, Artificial Sequence
  Description of Artificial Sequence: Synthetic oligonucleotide
  Antisense strand to SEQ ID NO: 2132828
aagacuaauccuaauucgg

SEQ ID NO: 2132830 - RNA, 19 nt, Artificial Sequence
  Description of Artificial Sequence: Synthetic oligonucleotide
  Sense strand starting at position 130 of SEQ ID NO: 1882588
uaggauuagucuuccugca

SEQ ID NO: 2132831 - RNA, 19 nt, Artificial Sequence
  Description of Artificial Sequence: Synthetic oligonucleotide
  Antisense strand to SEQ ID NO: 2132830
ugcaggaagacuaauccua

SEQ ID NO: 2132832 - RNA, 19 nt, Artificial Sequence
  Description of Artificial Sequence: Synthetic oligonucleotide
  Sense strand starting at position 165 of SEQ ID NO: 1882588
cgucuuuccuauuuccaca

SEQ ID NO: 2132833 - RNA, 19 nt, Artificial Sequence
  Description of Artificial Sequence: Synthetic oligonucleotide
  Antisense strand to SEQ ID NO: 2132832
uguggaaauaggaaagacg

SEQ ID NO: 2132834 - RNA, 19 nt, Artificial Sequence
  Description of Artificial Sequence: Synthetic oligonucleotide
  Sense strand starting at position 333 of SEQ ID NO: 1882588
cucggaaagaucugagcaa

SEQ ID NO: 2132835 - RNA, 19 nt, Artificial Sequence
  Description of Artificial Sequence: Synthetic oligonucleotide
  Antisense strand to SEQ ID NO: 2132834
uugcucagaucuuuccgag

SEQ ID NO: 2132836 - RNA, 19 nt, Artificial Sequence
  Description of Artificial Sequence: Synthetic oligonucleotide
  Sense strand starting at position 853 of SEQ ID NO: 1882588
augacugaauuggaaagaa

SEQ ID NO: 2132837 - RNA, 19 nt, Artificial Sequence
  Description of Artificial Sequence: Synthetic oligonucleotide
  Antisense strand to SEQ ID NO: 2132836
uucuuuccaauucagucau

SEQ ID NO: 2132838 - RNA, 19 nt, Artificial Sequence
  Description of Artificial Sequence: Synthetic oligonucleotide
  Sense strand starting at position 961 of SEQ ID NO: 1882588
ggagaaauuuagccagcgu

SEQ ID NO: 2132839 - RNA, 19 nt, Artificial Sequence
  Description of Artificial Sequence: Synthetic oligonucleotide
  Antisense strand to SEQ ID NO: 2132838
acgcuggcuaaauuucucc

SEQ ID NO: 2132840 - RNA, 19 nt, Artificial Sequence
  Description of Artificial Sequence: Synthetic oligonucleotide
  Sense strand starting at position 2134 of SEQ ID NO: 1882588
ucgggcuuuacaugggaau

SEQ ID NO: 2132841 - RNA, 19 nt, Artificial Sequence
  Description of Artificial Sequence: Synthetic oligonucleotide
  Antisense strand to SEQ ID NO: 2132840
auucccauguaaagcccga

SEQ ID NO: 2132842 - RNA, 19 nt, Artificial Sequence
  Description of Artificial Sequence: Synthetic oligonucleotide
  Sense strand starting at position 2337 of SEQ ID NO: 1882588
cuuuaaucguauucugaca

SEQ ID NO: 2132843 - RNA, 19 nt, Artificial Sequence
  Description of Artificial Sequence: Synthetic oligonucleotide
  Antisense strand to SEQ ID NO: 2132842
ugucagaauacgauuaaag

SEQ ID NO: 2132844 - RNA, 19 nt, Artificial Sequence
  Description of Artificial Sequence: Synthetic oligonucleotide
  Sense strand starting at position 2351 of SEQ ID NO: 1882588
ugacacugccaguaauaac

SEQ ID NO: 2132845 - RNA, 19 nt, Artificial Sequence
  Description of Artificial Sequence: Synthetic oligonucleotide
  Antisense strand to SEQ ID NO: 2132844
guuauuacuggcaguguca

SEQ ID NO: 2132846 - RNA, 19 nt, Artificial Sequence
  Description of Artificial Sequence: Synthetic oligonucleotide
  Sense strand starting at position 2361 of SEQ ID NO: 1882588
aguaauaaccuggaagcuu

SEQ ID NO: 2132847 - RNA, 19 nt, Artificial Sequence
  Description of Artificial Sequence: Synthetic oligonucleotide
  Antisense strand to SEQ ID NO: 2132846
aagcuuccagguuauuacu

SEQ ID NO: 2132848 - RNA, 19 nt, Artificial Sequence
  Description of Artificial Sequence: Synthetic oligonucleotide
  Sense strand starting at position 2413 of SEQ ID NO: 1882588
uucgaaguuuccuuuggaa

SEQ ID NO: 2132849 - RNA, 19 nt, Artificial Sequence
  Description of Artificial Sequence: Synthetic oligonucleotide
  Antisense strand to SEQ ID NO: 2132848
uuccaaaggaaacuucgaa

SEQ ID NO: 2132850 - RNA, 19 nt, Artificial Sequence
  Description of Artificial Sequence: Synthetic oligonucleotide
  Sense strand starting at position 2415 of SEQ ID NO: 1882588
cgaaguuuccuuuggaaac

SEQ ID NO: 2132851 - RNA, 19 nt, Artificial Sequence
  Description of Artificial Sequence: Synthetic oligonucleotide
  Antisense strand to SEQ ID NO: 2132850
guuuccaaaggaaacuucg

SEQ ID NO: 2132852 - RNA, 19 nt, Artificial Sequence
  Description of Artificial Sequence: Synthetic oligonucleotide
  Sense strand starting at position 2427 of SEQ ID NO: 1882588
uggaaacggugucuaauga

SEQ ID NO: 2132853 - RNA, 19 nt, Artificial Sequence
  Description of Artificial Sequence: Synthetic oligonucleotide
  Antisense strand to SEQ ID NO: 2132852
ucauuagacaccguuucca

SEQ ID NO: 2132854 - RNA, 19 nt, Artificial Sequence
  Description of Artificial Sequence: Synthetic oligonucleotide
  Sense strand starting at position 2428 of SEQ ID NO: 1882588
ggaaacggugucuaaugaa

SEQ ID NO: 2132855 - RNA, 19 nt, Artificial Sequence
  Description of Artificial Sequence: Synthetic oligonucleotide
  Antisense strand to SEQ ID NO: 2132854
uucauuagacaccguuucc

SEQ ID NO: 2132856 - RNA, 19 nt, Artificial Sequence
  Description of Artificial Sequence: Synthetic oligonucleotide
  Sense strand starting at position 2519 of SEQ ID NO: 1882588
aguggcuuacgauaugaaa

SEQ ID NO: 2132857 - RNA, 19 nt, Artificial Sequence
  Description of Artificial Sequence: Synthetic oligonucleotide
  Antisense strand to SEQ ID NO: 2132856
uuucauaucguaagccacu

SEQ ID NO: 2132858 - RNA, 19 nt, Artificial Sequence
  Description of Artificial Sequence: Synthetic oligonucleotide
  Sense strand starting at position 2521 of SEQ ID NO: 1882588
uggcuuacgauaugaaauc

SEQ ID NO: 2132859 - RNA, 19 nt, Artificial Sequence
  Description of Artificial Sequence: Synthetic oligonucleotide
  Antisense strand to SEQ ID NO: 2132858
gauuucauaucguaagcca

SEQ ID NO: 2132860 - RNA, 19 nt, Artificial Sequence
  Description of Artificial Sequence: Synthetic oligonucleotide
  Sense strand starting at position 2532 of SEQ ID NO: 1882588
augaaaucacaggguucuu

SEQ ID NO: 2132861 - RNA, 19 nt, Artificial Sequence
  Description of Artificial Sequence: Synthetic oligonucleotide
  Antisense strand to SEQ ID NO: 2132860
aagaacccugugauuucau

SEQ ID NO: 2132862 - RNA, 19 nt, Artificial Sequence
  Description of Artificial Sequence: Synthetic oligonucleotide
  Sense strand starting at position 2591 of SEQ ID NO: 1882588
uguuaauggcacgauaauu

SEQ ID NO: 2132863 - RNA, 19 nt, Artificial Sequence
  Description of Artificial Sequence: Synthetic oligonucleotide
  Antisense strand to SEQ ID NO: 2132862
aauuaucgugccauuaaca

SEQ ID NO: 2132864 - RNA, 19 nt, Artificial Sequence
  Description of Artificial Sequence: Synthetic oligonucleotide
  Sense strand starting at position 2608 of SEQ ID NO: 1882588
uugccauagcguucuguaa

SEQ ID NO: 2132865 - RNA, 19 nt, Artificial Sequence
  Description of Artificial Sequence: Synthetic oligonucleotide
  Antisense strand to SEQ ID NO: 2132864
uuacagaacgcuauggcaa

SEQ ID NO: 2132866 - RNA, 19 nt, Artificial Sequence
  Description of Artificial Sequence: Synthetic oligonucleotide
  Sense strand starting at position 2609 of SEQ ID NO: 1882588
ugccauagcguucuguaau

SEQ ID NO: 2132867 - RNA, 19 nt, Artificial Sequence
  Description of Artificial Sequence: Synthetic oligonucleotide
  Antisense strand to SEQ ID NO: 2132866
auuacagaacgcuauggca

SEQ ID NO: 2132868 - RNA, 19 nt, Artificial Sequence
  Description of Artificial Sequence: Synthetic oligonucleotide
  Sense strand starting at position 2802 of SEQ ID NO: 1882588
ugauuauggccuuaauagu

SEQ ID NO: 2132869 - RNA, 19 nt, Artificial Sequence
  Description of Artificial Sequence: Synthetic oligonucleotide
  Antisense strand to SEQ ID NO: 2132868
acuauuaaggccauaauca

SEQ ID NO: 2132870 - RNA, 19 nt, Artificial Sequence
  Description of Artificial Sequence: Synthetic oligonucleotide
  Sense strand starting at position 2877 of SEQ ID NO: 1882588
gggauagagguuugauuau

SEQ ID NO: 2132871 - RNA, 19 nt, Artificial Sequence
  Description of Artificial Sequence: Synthetic oligonucleotide
  Antisense strand to SEQ ID NO: 2132870
auaaucaaaccucuauccc

SEQ ID NO: 2132872 - RNA, 19 nt, Artificial Sequence
  Description of Artificial Sequence: Synthetic oligonucleotide
  Sense strand starting at position 2889 of SEQ ID NO: 1882588
ugauuauugcucuacugaa

SEQ ID NO: 2132873 - RNA, 19 nt, Artificial Sequence
  Description of Artificial Sequence: Synthetic oligonucleotide
  Antisense strand to SEQ ID NO: 2132872
uucaguagagcaauaauca

SEQ ID NO: 2132874 - RNA, 19 nt, Artificial Sequence
  Description of Artificial Sequence: Synthetic oligonucleotide
  Sense strand starting at position 2899 of SEQ ID NO: 1882588
ucuacugaaugcuugacua

SEQ ID NO: 2132875 - RNA, 19 nt, Artificial Sequence
  Description of Artificial Sequence: Synthetic oligonucleotide
  Antisense strand to SEQ ID NO: 2132874
uagucaagcauucaguaga

SEQ ID NO: 2132876 - RNA, 19 nt, Artificial Sequence
  Description of Artificial Sequence: Synthetic oligonucleotide
  Sense strand starting at position 2903 of SEQ ID NO: 1882588
cugaaugcuugacuaaagu

SEQ ID NO: 2132877 - RNA, 19 nt, Artificial Sequence
  Description of Artificial Sequence: Synthetic oligonucleotide
  Antisense strand to SEQ ID NO: 2132876
acuuuagucaagcauucag

SEQ ID NO: 2132878 - RNA, 19 nt, Artificial Sequence
  Description of Artificial Sequence: Synthetic oligonucleotide
  Sense strand starting at position 3178 of SEQ ID NO: 1882588
guucuaugugaauaacuuu

SEQ ID NO: 2132879 - RNA, 19 nt, Artificial Sequence
  Description of Artificial Sequence: Synthetic oligonucleotide
  Antisense strand to SEQ ID NO: 2132878
aaaguuauucacauagaac

SEQ ID NO: 2132880 - RNA, 19 nt, Artificial Sequence
  Description of Artificial Sequence: Synthetic oligonucleotide
  Sense strand starting at position 3185 of SEQ ID NO: 1882588
gugaauaacuuuguuaaug

SEQ ID NO: 2132881 - RNA, 19 nt, Artificial Sequence
  Description of Artificial Sequence: Synthetic oligonucleotide
  Antisense strand to SEQ ID NO: 2132880
cauuaacaaaguuauucac

SEQ ID NO: 2132882 - RNA, 19 nt, Artificial Sequence
  Description of Artificial Sequence: Synthetic oligonucleotide
  Sense strand starting at position 3575 of SEQ ID NO: 1882588
gagaaaucauguguuggcu

SEQ ID NO: 2132883 - RNA, 19 nt, Artificial Sequence
  Description of Artificial Sequence: Synthetic oligonucleotide
  Antisense strand to SEQ ID NO: 2132882
agccaacacaugauuucuc

SEQ ID NO: 2132884 - RNA, 19 nt, Artificial Sequence
  Description of Artificial Sequence: Synthetic oligonucleotide
  Sense strand starting at position 3647 of SEQ ID NO: 1882588
aguuuauaguagcuaaaca

SEQ ID NO: 2132885 - RNA, 19 nt, Artificial Sequence
  Description of Artificial Sequence: Synthetic oligonucleotide
  Antisense strand to SEQ ID NO: 2132884
uguuuagcuacuauaaacu

SEQ ID NO: 2132886 - RNA, 19 nt, Artificial Sequence
  Description of Artificial Sequence: Synthetic oligonucleotide
  Sense strand starting at position 3753 of SEQ ID NO: 1882588
ucuauacuauuggugugau

SEQ ID NO: 2132887 - RNA, 19 nt, Artificial Sequence
  Description of Artificial Sequence: Synthetic oligonucleotide
  Antisense strand to SEQ ID NO: 2132886
aucacaccaauaguauaga

SEQ ID NO: 2132888 - RNA, 19 nt, Artificial Sequence
  Description of Artificial Sequence: Synthetic oligonucleotide
  Sense strand starting at position 3756 of SEQ ID NO: 1882588
auacuauuggugugaugaa

SEQ ID NO: 2132889 - RNA, 19 nt, Artificial Sequence
  Description of Artificial Sequence: Synthetic oligonucleotide
  Antisense strand to SEQ ID NO: 2132888
uucaucacaccaauaguau

SEQ ID NO: 2132890 - RNA, 19 nt, Artificial Sequence
  Description of Artificial Sequence: Synthetic oligonucleotide
  Sense strand starting at position 3763 of SEQ ID NO: 1882588
uggugugaugaaugaggua

SEQ ID NO: 2132891 - RNA, 19 nt, Artificial Sequence
  Description of Artificial Sequence: Synthetic oligonucleotide
  Antisense strand to SEQ ID NO: 2132890
uaccucauucaucacacca

SEQ ID NO: 2132892 - RNA, 19 nt, Artificial Sequence
  Description of Artificial Sequence: Synthetic oligonucleotide
  Sense strand starting at position 3770 of SEQ ID NO: 1882588
augaaugagguauguuaag

SEQ ID NO: 2132893 - RNA, 19 nt, Artificial Sequence
  Description of Artificial Sequence: Synthetic oligonucleotide
  Antisense strand to SEQ ID NO: 2132892
cuuaacauaccucauucau

SEQ ID NO: 2132894 - RNA, 19 nt, Artificial Sequence
  Description of Artificial Sequence: Synthetic oligonucleotide
  Sense strand starting at position 3779 of SEQ ID NO: 1882588
guauguuaaggaugagguu

SEQ ID NO: 2132895 - RNA, 19 nt, Artificial Sequence
  Description of Artificial Sequence: Synthetic oligonucleotide
  Antisense strand to SEQ ID NO: 2132894
aaccucauccuuaacauac

SEQ ID NO: 2132896 - RNA, 19 nt, Artificial Sequence
  Description of Artificial Sequence: Synthetic oligonucleotide
  Sense strand starting at position 3817 of SEQ ID NO: 1882588
aaauauuaugcaugguaga

SEQ ID NO: 2132897 - RNA, 19 nt, Artificial Sequence
  Description of Artificial Sequence: Synthetic oligonucleotide
  Antisense strand to SEQ ID NO: 2132896
ucuaccaugcauaauauuu

SEQ ID NO: 2132898 - RNA, 19 nt, Artificial Sequence
  Description of Artificial Sequence: Synthetic oligonucleotide
  Sense strand starting at position 3818 of SEQ ID NO: 1882588
aauauuaugcaugguagau

SEQ ID NO: 2132899 - RNA, 19 nt, Artificial Sequence
  Description of Artificial Sequence: Synthetic oligonucleotide
  Antisense strand to SEQ ID NO: 2132898
aucuaccaugcauaauauu

SEQ ID NO: 2132900 - RNA, 19 nt, Artificial Sequence
  Description of Artificial Sequence: Synthetic oligonucleotide
  Sense strand starting at position 3918 of SEQ ID NO: 1882588
aaacaauuagcagaagugu

SEQ ID NO: 2132901 - RNA, 19 nt, Artificial Sequence
  Description of Artificial Sequence: Synthetic oligonucleotide
  Antisense strand to SEQ ID NO: 2132900
acacuucugcuaauuguuu

SEQ ID NO: 2132902 - RNA, 19 nt, Artificial Sequence
  Description of Artificial Sequence: Synthetic oligonucleotide
  Sense strand starting at position 3924 of SEQ ID NO: 1882588
uuagcagaaguguagcaaa

SEQ ID NO: 2132903 - RNA, 19 nt, Artificial Sequence
  Description of Artificial Sequence: Synthetic oligonucleotide
  Antisense strand to SEQ ID NO: 2132902
uuugcuacacuucugcuaa

SEQ ID NO: 2132904 - RNA, 19 nt, Artificial Sequence
  Description of Artificial Sequence: Synthetic oligonucleotide
  Sense strand starting at position 44 of SEQ ID NO: 1882589
ggcucuauuguauauaauu

SEQ ID NO: 2132905 - RNA, 19 nt, Artificial Sequence
  Description of Artificial Sequence: Synthetic oligonucleotide
  Antisense strand to SEQ ID NO: 2132904
aauuauauacaauagagcc

SEQ ID NO: 2132906 - RNA, 19 nt, Artificial Sequence
  Description of Artificial Sequence: Synthetic oligonucleotide
  Sense strand starting at position 307 of SEQ ID NO: 1882589
ugccuuuagcaauagauau

SEQ ID NO: 2132907 - RNA, 19 nt, Artificial Sequence
  Description of Artificial Sequence: Synthetic oligonucleotide
  Antisense strand to SEQ ID NO: 2132906
auaucuauugcuaaaggca

SEQ ID NO: 2132908 - RNA, 19 nt, Artificial Sequence
  Description of Artificial Sequence: Synthetic oligonucleotide
  Sense strand starting at position 388 of SEQ ID NO: 1882589
ucagaaaugcugcaauuau

SEQ ID NO: 2132909 - RNA, 19 nt, Artificial Sequence
  Description of Artificial Sequence: Synthetic oligonucleotide
  Antisense strand to SEQ ID NO: 2132908
auaauugcagcauuucuga

SEQ ID NO: 2132910 - RNA, 19 nt, Artificial Sequence
  Description of Artificial Sequence: Synthetic oligonucleotide
  Sense strand starting at position 452 of SEQ ID NO: 1882589
guauuugugugcuuuaaga

SEQ ID NO: 2132911 - RNA, 19 nt, Artificial Sequence
  Description of Artificial Sequence: Synthetic oligonucleotide
  Antisense strand to SEQ ID NO: 2132910
ucuuaaagcacacaaauac

SEQ ID NO: 2132912 - RNA, 19 nt, Artificial Sequence
  Description of Artificial Sequence: Synthetic oligonucleotide
  Sense strand starting at position 484 of SEQ ID NO: 1882589
uuaacuuggcuauagcuaa

SEQ ID NO: 2132913 - RNA, 19 nt, Artificial Sequence
  Description of Artificial Sequence: Synthetic oligonucleotide
  Antisense strand to SEQ ID NO: 2132912
uuagcuauagccaaguuaa

SEQ ID NO: 2132914 - RNA, 19 nt, Artificial Sequence
  Description of Artificial Sequence: Synthetic oligonucleotide
  Sense strand starting at position 552 of SEQ ID NO: 1882589
guacucagucuagagguua

SEQ ID NO: 2132915 - RNA, 19 nt, Artificial Sequence
  Description of Artificial Sequence: Synthetic oligonucleotide
  Antisense strand to SEQ ID NO: 2132914
uaaccucuagacugaguac

SEQ ID NO: 2132916 - RNA, 19 nt, Artificial Sequence
  Description of Artificial Sequence: Synthetic oligonucleotide
  Sense strand starting at position 557 of SEQ ID NO: 1882589
cagucuagagguuacuuua

SEQ ID NO: 2132917 - RNA, 19 nt, Artificial Sequence
  Description of Artificial Sequence: Synthetic oligonucleotide
  Antisense strand to SEQ ID NO: 2132916
uaaaguaaccucuagacug

SEQ ID NO: 2132918 - RNA, 19 nt, Artificial Sequence
  Description of Artificial Sequence: Synthetic oligonucleotide
  Sense strand starting at position 560 of SEQ ID NO: 1882589
ucuagagguuacuuuaaac

SEQ ID NO: 2132919 - RNA, 19 nt, Artificial Sequence
  Description of Artificial Sequence: Synthetic oligonucleotide
  Antisense strand to SEQ ID NO: 2132918
guuuaaaguaaccucuaga

SEQ ID NO: 2132920 - RNA, 19 nt, Artificial Sequence
  Description of Artificial Sequence: Synthetic oligonucleotide
  Sense strand starting at position 586 of SEQ ID NO: 1882589
uaagucagucuaugaauga

SEQ ID NO: 2132921 - RNA, 19 nt, Artificial Sequence
  Description of Artificial Sequence: Synthetic oligonucleotide
  Antisense strand to SEQ ID NO: 2132920
ucauucauagacugacuua

SEQ ID NO: 2132922 - RNA, 19 nt, Artificial Sequence
  Description of Artificial Sequence: Synthetic oligonucleotide
  Sense strand starting at position 590 of SEQ ID NO: 1882589
ucagucuaugaaugaauua

SEQ ID NO: 2132923 - RNA, 19 nt, Artificial Sequence
  Description of Artificial Sequence: Synthetic oligonucleotide
  Antisense strand to SEQ ID NO: 2132922
uaauucauucauagacuga

SEQ ID NO: 2132924 - RNA, 19 nt, Artificial Sequence
  Description of Artificial Sequence: Synthetic oligonucleotide
  Sense strand starting at position 706 of SEQ ID NO: 1882589
guagaauggaagugugauu

SEQ ID NO: 2132925 - RNA, 19 nt, Artificial Sequence
  Description of Artificial Sequence: Synthetic oligonucleotide
  Antisense strand to SEQ ID NO: 2132924
aaucacacuuccauucuac

SEQ ID NO: 2132926 - RNA, 19 nt, Artificial Sequence
  Description of Artificial Sequence: Synthetic oligonucleotide
  Sense strand starting at position 786 of SEQ ID NO: 1882589
cugccacgaucuuuauuua

SEQ ID NO: 2132927 - RNA, 19 nt, Artificial Sequence
  Description of Artificial Sequence: Synthetic oligonucleotide
  Antisense strand to SEQ ID NO: 2132926
uaaauaaagaucguggcag

SEQ ID NO: 2132928 - RNA, 19 nt, Artificial Sequence
  Description of Artificial Sequence: Synthetic oligonucleotide
  Sense strand starting at position 1664 of SEQ ID NO: 1882589
agcaaagucugauuuguuu

SEQ ID NO: 2132929 - RNA, 19 nt, Artificial Sequence
  Description of Artificial Sequence: Synthetic oligonucleotide
  Antisense strand to SEQ ID NO: 2132928
aaacaaaucagacuuugcu

SEQ ID NO: 2132930 - RNA, 19 nt, Artificial Sequence
  Description of Artificial Sequence: Synthetic oligonucleotide
  Sense strand starting at position 1722 of SEQ ID NO: 1882589
uggguuauuauuugcggua

SEQ ID NO: 2132931 - RNA, 19 nt, Artificial Sequence
  Description of Artificial Sequence: Synthetic oligonucleotide
  Antisense strand to SEQ ID NO: 2132930
uaccgcaaauaauaaccca

SEQ ID NO: 2132932 - RNA, 19 nt, Artificial Sequence
  Description of Artificial Sequence: Synthetic oligonucleotide
  Sense strand starting at position 1777 of SEQ ID NO: 1882589
auuccuaugguguaagagu

SEQ ID NO: 2132933 - RNA, 19 nt, Artificial Sequence
  Description of Artificial Sequence: Synthetic oligonucleotide
  Antisense strand to SEQ ID NO: 2132932
acucuuacaccauaggaau

SEQ ID NO: 2132934 - RNA, 19 nt, Artificial Sequence
  Description of Artificial Sequence: Synthetic oligonucleotide
  Sense strand starting at position 2180 of SEQ ID NO: 1882589
acuguuaaacaguaucuuu

SEQ ID NO: 2132935 - RNA, 19 nt, Artificial Sequence
  Description of Artificial Sequence: Synthetic oligonucleotide
  Antisense strand to SEQ ID NO: 2132934
aaagauacuguuuaacagu

SEQ ID NO: 2132936 - RNA, 19 nt, Artificial Sequence
  Description of Artificial Sequence: Synthetic oligonucleotide
  Sense strand starting at position 2183 of SEQ ID NO: 1882589
guuaaacaguaucuuugaa

SEQ ID NO: 2132937 - RNA, 19 nt, Artificial Sequence
  Description of Artificial Sequence: Synthetic oligonucleotide
  Antisense strand to SEQ ID NO: 2132936
uucaaagauacuguuuaac

SEQ ID NO: 2132938 - RNA, 19 nt, Artificial Sequence
  Description of Artificial Sequence: Synthetic oligonucleotide
  Sense strand starting at position 2309 of SEQ ID NO: 1882589
agcuccugccaguaagaaa

SEQ ID NO: 2132939 - RNA, 19 nt, Artificial Sequence
  Description of Artificial Sequence: Synthetic oligonucleotide
  Antisense strand to SEQ ID NO: 2132938
uuucuuacuggcaggagcu

SEQ ID NO: 2132940 - RNA, 19 nt, Artificial Sequence
  Description of Artificial Sequence: Synthetic oligonucleotide
  Sense strand starting at position 2460 of SEQ ID NO: 1882589
uuguuauucuguuccauuu

SEQ ID NO: 2132941 - RNA, 19 nt, Artificial Sequence
  Description of Artificial Sequence: Synthetic oligonucleotide
  Antisense strand to SEQ ID NO: 2132940
aaauggaacagaauaacaa

SEQ ID NO: 2132942 - RNA, 19 nt, Artificial Sequence
  Description of Artificial Sequence: Synthetic oligonucleotide
  Sense strand starting at position 2489 of SEQ ID NO: 1882589
agauuuauguaccagaaua

SEQ ID NO: 2132943 - RNA, 19 nt, Artificial Sequence
  Description of Artificial Sequence: Synthetic oligonucleotide
  Antisense strand to SEQ ID NO: 2132942
uauucugguacauaaaucu

SEQ ID NO: 2132944 - RNA, 19 nt, Artificial Sequence
  Description of Artificial Sequence: Synthetic oligonucleotide
  Sense strand starting at position 2550 of SEQ ID NO: 1882589
auaauugcucuacauggua

SEQ ID NO: 2132945 - RNA, 19 nt, Artificial Sequence
  Description of Artificial Sequence: Synthetic oligonucleotide
  Antisense strand to SEQ ID NO: 2132944
uaccauguagagcaauuau

SEQ ID NO: 2132946 - RNA, 19 nt, Artificial Sequence
  Description of Artificial Sequence: Synthetic oligonucleotide
  Sense strand starting at position 2628 of SEQ ID NO: 1882589
ccagucacagagugaaauu

SEQ ID NO: 2132947 - RNA, 19 nt, Artificial Sequence
  Description of Artificial Sequence: Synthetic oligonucleotide
  Antisense strand to SEQ ID NO: 2132946
aauuucacucugugacugg

SEQ ID NO: 2132948 - RNA, 19 nt, Artificial Sequence
  Description of Artificial Sequence: Synthetic oligonucleotide
  Sense strand starting at position 2659 of SEQ ID NO: 1882589
agauuuggcugugccuaga

SEQ ID NO: 2132949 - RNA, 19 nt, Artificial Sequence
  Description of Artificial Sequence: Synthetic oligonucleotide
  Antisense strand to SEQ ID NO: 2132948
ucuaggcacagccaaaucu

SEQ ID NO: 2132950 - RNA, 19 nt, Artificial Sequence
  Description of Artificial Sequence: Synthetic oligonucleotide
  Sense strand starting at position 2750 of SEQ ID NO: 1882589
uauacaugagaaugcagua

SEQ ID NO: 2132951 - RNA, 19 nt, Artificial Sequence
  Description of Artificial Sequence: Synthetic oligonucleotide
  Antisense strand to SEQ ID NO: 2132950
uacugcauucucauguaua

SEQ ID NO: 2132952 - RNA, 19 nt, Artificial Sequence
  Description of Artificial Sequence: Synthetic oligonucleotide
  Sense strand starting at position 2935 of SEQ ID NO: 1882589
uggagauauuucuaucaca

SEQ ID NO: 2132953 - RNA, 19 nt, Artificial Sequence
  Description of Artificial Sequence: Synthetic oligonucleotide
  Antisense strand to SEQ ID NO: 2132952
ugugauagaaauaucucca

SEQ ID NO: 2132954 - RNA, 19 nt, Artificial Sequence
  Description of Artificial Sequence: Synthetic oligonucleotide
  Sense strand starting at position 3034 of SEQ ID NO: 1882589
gucauuguugaugaucaca

SEQ ID NO: 2132955 - RNA, 19 nt, Artificial Sequence
  Description of Artificial Sequence: Synthetic oligonucleotide
  Antisense strand to SEQ ID NO: 2132954
ugugaucaucaacaaugac

SEQ ID NO: 2132956 - RNA, 19 nt, Artificial Sequence
  Description of Artificial Sequence: Synthetic oligonucleotide
  Sense strand starting at position 3167 of SEQ ID NO: 1882589
uauuuacuauguuugcgaa

SEQ ID NO: 2132957 - RNA, 19 nt, Artificial Sequence
  Description of Artificial Sequence: Synthetic oligonucleotide
  Antisense strand to SEQ ID NO: 2132956
uucgcaaacauaguaaaua

SEQ ID NO: 2132958 - RNA, 19 nt, Artificial Sequence
  Description of Artificial Sequence: Synthetic oligonucleotide
  Sense strand starting at position 3168 of SEQ ID NO: 1882589
auuuacuauguuugcgaaa

SEQ ID NO: 2132959 - RNA, 19 nt, Artificial Sequence
  Description of Artificial Sequence: Synthetic oligonucleotide
  Antisense strand to SEQ ID NO: 2132958
uuucgcaaacauaguaaau

SEQ ID NO: 2132960 - RNA, 19 nt, Artificial Sequence
  Description of Artificial Sequence: Synthetic oligonucleotide
  Sense strand starting at position 3196 of SEQ ID NO: 1882589
cuuaauauccuuugggaua

SEQ ID NO: 2132961 - RNA, 19 nt, Artificial Sequence
  Description of Artificial Sequence: Synthetic oligonucleotide
  Antisense strand to SEQ ID NO: 2132960
uaucccaaaggauauuaag

SEQ ID NO: 2132962 - RNA, 19 nt, Artificial Sequence
  Description of Artificial Sequence: Synthetic oligonucleotide
  Sense strand starting at position 3207 of SEQ ID NO: 1882589
uugggauauuagcuuugga

SEQ ID NO: 2132963 - RNA, 19 nt, Artificial Sequence
  Description of Artificial Sequence: Synthetic oligonucleotide
  Antisense strand to SEQ ID NO: 2132962
uccaaagcuaauaucccaa

SEQ ID NO: 2132964 - RNA, 19 nt, Artificial Sequence
  Description of Artificial Sequence: Synthetic oligonucleotide
  Sense strand starting at position 3210 of SEQ ID NO: 1882589
ggauauuagcuuuggaaau

SEQ ID NO: 2132965 - RNA, 19 nt, Artificial Sequence
  Description of Artificial Sequence: Synthetic oligonucleotide
  Antisense strand to SEQ ID NO: 2132964
auuuccaaagcuaauaucc

SEQ ID NO: 2132966 - RNA, 19 nt, Artificial Sequence
  Description of Artificial Sequence: Synthetic oligonucleotide
  Sense strand starting at position 3240 of SEQ ID NO: 1882589
gcuguauaagguggaaaga

SEQ ID NO: 2132967 - RNA, 19 nt, Artificial Sequence
  Description of Artificial Sequence: Synthetic oligonucleotide
  Antisense strand to SEQ ID NO: 2132966
ucuuuccaccuuauacagc

SEQ ID NO: 2132968 - RNA, 19 nt, Artificial Sequence
  Description of Artificial Sequence: Synthetic oligonucleotide
  Sense strand starting at position 3323 of SEQ ID NO: 1882589
cauacuuuaggaugaaguu

SEQ ID NO: 2132969 - RNA, 19 nt, Artificial Sequence
  Description of Artificial Sequence: Synthetic oligonucleotide
  Antisense strand to SEQ ID NO: 2132968
aacuucauccuaaaguaug

SEQ ID NO: 2132970 - RNA, 19 nt, Artificial Sequence
  Description of Artificial Sequence: Synthetic oligonucleotide
  Sense strand starting at position 3414 of SEQ ID NO: 1882589
ugacuugaaucuccaguau

SEQ ID NO: 2132971 - RNA, 19 nt, Artificial Sequence
  Description of Artificial Sequence: Synthetic oligonucleotide
  Antisense strand to SEQ ID NO: 2132970
auacuggagauucaaguca

SEQ ID NO: 2132972 - RNA, 19 nt, Artificial Sequence
  Description of Artificial Sequence: Synthetic oligonucleotide
  Sense strand starting at position 3547 of SEQ ID NO: 1882589
agagaaauuguuuaguugu

SEQ ID NO: 2132973 - RNA, 19 nt, Artificial Sequence
  Description of Artificial Sequence: Synthetic oligonucleotide
  Antisense strand to SEQ ID NO: 2132972
acaacuaaacaauuucucu

SEQ ID NO: 2132974 - RNA, 19 nt, Artificial Sequence
  Description of Artificial Sequence: Synthetic oligonucleotide
  Sense strand starting at position 3724 of SEQ ID NO: 1882589
gaugaaugucugcaagguc

SEQ ID NO: 2132975 - RNA, 19 nt, Artificial Sequence
  Description of Artificial Sequence: Synthetic oligonucleotide
  Antisense strand to SEQ ID NO: 2132974
gaccuugcagacauucauc

SEQ ID NO: 2132976 - RNA, 19 nt, Artificial Sequence
  Description of Artificial Sequence: Synthetic oligonucleotide
  Sense strand starting at position 3805 of SEQ ID NO: 1882589
guuguuauuugaguugagu

SEQ ID NO: 2132977 - RNA, 19 nt, Artificial Sequence
  Description of Artificial Sequence: Synthetic oligonucleotide
  Antisense strand to SEQ ID NO: 2132976
acucaacucaaauaacaac

SEQ ID NO: 2132978 - RNA, 19 nt, Artificial Sequence
  Description of Artificial Sequence: Synthetic oligonucleotide
  Sense strand starting at position 3807 of SEQ ID NO: 1882589
uguuauuugaguugagucu

SEQ ID NO: 2132979 - RNA, 19 nt, Artificial Sequence
  Description of Artificial Sequence: Synthetic oligonucleotide
  Antisense strand to SEQ ID NO: 2132978
agacucaacucaaauaaca

SEQ ID NO: 2132980 - RNA, 19 nt, Artificial Sequence
  Description of Artificial Sequence: Synthetic oligonucleotide
  Sense strand starting at position 3819 of SEQ ID NO: 1882589
ugagucuugagguauaauu

SEQ ID NO: 2132981 - RNA, 19 nt, Artificial Sequence
  Description of Artificial Sequence: Synthetic oligonucleotide
  Antisense strand to SEQ ID NO: 2132980
aauuauaccucaagacuca

SEQ ID NO: 2132982 - RNA, 19 nt, Artificial Sequence
  Description of Artificial Sequence: Synthetic oligonucleotide
  Sense strand starting at position 3844 of SEQ ID NO: 1882589
ugaccugacaggugaggua

SEQ ID NO: 2132983 - RNA, 19 nt, Artificial Sequence
  Description of Artificial Sequence: Synthetic oligonucleotide
  Antisense strand to SEQ ID NO: 2132982
uaccucaccugucagguca

SEQ ID NO: 2132984 - RNA, 19 nt, Artificial Sequence
  Description of Artificial Sequence: Synthetic oligonucleotide
  Sense strand starting at position 161 of SEQ ID NO: 1882590
cacugagucuuuguaguug

SEQ ID NO: 2132985 - RNA, 19 nt, Artificial Sequence
  Description of Artificial Sequence: Synthetic oligonucleotide
  Antisense strand to SEQ ID NO: 2132984
caacuacaaagacucagug

SEQ ID NO: 2132986 - RNA, 19 nt, Artificial Sequence
  Description of Artificial Sequence: Synthetic oligonucleotide
  Sense strand starting at position 165 of SEQ ID NO: 1882590
gagucuuuguaguugaguu

SEQ ID NO: 2132987 - RNA, 19 nt, Artificial Sequence
  Description of Artificial Sequence: Synthetic oligonucleotide
  Antisense strand to SEQ ID NO: 2132986
aacucaacuacaaagacuc

SEQ ID NO: 2132988 - RNA, 19 nt, Artificial Sequence
  Description of Artificial Sequence: Synthetic oligonucleotide
  Sense strand starting at position 166 of SEQ ID NO: 1882590
agucuuuguaguugaguuu

SEQ ID NO: 2132989 - RNA, 19 nt, Artificial Sequence
  Description of Artificial Sequence: Synthetic oligonucleotide
  Antisense strand to SEQ ID NO: 2132988
aaacucaacuacaaagacu

SEQ ID NO: 2132990 - RNA, 19 nt, Artificial Sequence
  Description of Artificial Sequence: Synthetic oligonucleotide
  Sense strand starting at position 247 of SEQ ID NO: 1882590
cacauaugccucgggcaga

SEQ ID NO: 2132991 - RNA, 19 nt, Artificial Sequence
  Description of Artificial Sequence: Synthetic oligonucleotide
  Antisense strand to SEQ ID NO: 2132990
ucugcccgaggcauaugug

SEQ ID NO: 2132992 - RNA, 19 nt, Artificial Sequence
  Description of Artificial Sequence: Synthetic oligonucleotide
  Sense strand starting at position 289 of SEQ ID NO: 1882590
ugggcaguuccuuacacuu

SEQ ID NO: 2132993 - RNA, 19 nt, Artificial Sequence
  Description of Artificial Sequence: Synthetic oligonucleotide
  Antisense strand to SEQ ID NO: 2132992
aaguguaaggaacugccca

SEQ ID NO: 2132994 - RNA, 19 nt, Artificial Sequence
  Description of Artificial Sequence: Synthetic oligonucleotide
  Sense strand starting at position 460 of SEQ ID NO: 1882590
gagcaauguuuccuagcca

SEQ ID NO: 2132995 - RNA, 19 nt, Artificial Sequence
  Description of Artificial Sequence: Synthetic oligonucleotide
  Antisense strand to SEQ ID NO: 2132994
uggcuaggaaacauugcuc

SEQ ID NO: 2132996 - RNA, 19 nt, Artificial Sequence
  Description of Artificial Sequence: Synthetic oligonucleotide
  Sense strand starting at position 571 of SEQ ID NO: 1882590
gguucugauccuggcuacu

SEQ ID NO: 2132997 - RNA, 19 nt, Artificial Sequence
  Description of Artificial Sequence: Synthetic oligonucleotide
  Antisense strand to SEQ ID NO: 2132996
aguagccaggaucagaacc

SEQ ID NO: 2132998 - RNA, 19 nt, Artificial Sequence
  Description of Artificial Sequence: Synthetic oligonucleotide
  Sense strand starting at position 573 of SEQ ID NO: 1882590
uucugauccuggcuacuuu

SEQ ID NO: 2132999 - RNA, 19 nt, Artificial Sequence
  Description of Artificial Sequence: Synthetic oligonucleotide
  Antisense strand to SEQ ID NO: 2132998
aaaguagccaggaucagaa

SEQ ID NO: 2133000 - RNA, 19 nt, Artificial Sequence
  Description of Artificial Sequence: Synthetic oligonucleotide
  Sense strand starting at position 924 of SEQ ID NO: 1882590
gguucuaggcucuggagaa

SEQ ID NO: 2133001 - RNA, 19 nt, Artificial Sequence
  Description of Artificial Sequence: Synthetic oligonucleotide
  Antisense strand to SEQ ID NO: 2133000
uucuccagagccuagaacc

SEQ ID NO: 2133002 - RNA, 19 nt, Artificial Sequence
  Description of Artificial Sequence: Synthetic oligonucleotide
  Sense strand starting at position 960 of SEQ ID NO: 1882590
gcaauaugaugagaacaga

SEQ ID NO: 2133003 - RNA, 19 nt, Artificial Sequence
  Description of Artificial Sequence: Synthetic oligonucleotide
  Antisense strand to SEQ ID NO: 2133002
ucuguucucaucauauugc

SEQ ID NO: 2133004 - RNA, 19 nt, Artificial Sequence
  Description of Artificial Sequence: Synthetic oligonucleotide
  Sense strand starting at position 1004 of SEQ ID NO: 1882590
augcuucaucugugggaug

SEQ ID NO: 2133005 - RNA, 19 nt, Artificial Sequence
  Description of Artificial Sequence: Synthetic oligonucleotide
  Antisense strand to SEQ ID NO: 2133004
caucccacagaugaagcau

SEQ ID NO: 2133006 - RNA, 19 nt, Artificial Sequence
  Description of Artificial Sequence: Synthetic oligonucleotide
  Sense strand starting at position 1019 of SEQ ID NO: 1882590
gaugcuguuggauggaaga

SEQ ID NO: 2133007 - RNA, 19 nt, Artificial Sequence
  Description of Artificial Sequence: Synthetic oligonucleotide
  Antisense strand to SEQ ID NO: 2133006
ucuuccauccaacagcauc

SEQ ID NO: 2133008 - RNA, 19 nt, Artificial Sequence
  Description of Artificial Sequence: Synthetic oligonucleotide
  Sense strand starting at position 1205 of SEQ ID NO: 1882590
gguuucuuaaugugagcua

SEQ ID NO: 2133009 - RNA, 19 nt, Artificial Sequence
  Description of Artificial Sequence: Synthetic oligonucleotide
  Antisense strand to SEQ ID NO: 2133008
uagcucacauuaagaaacc

SEQ ID NO: 2133010 - RNA, 19 nt, Artificial Sequence
  Description of Artificial Sequence: Synthetic oligonucleotide
  Sense strand starting at position 1208 of SEQ ID NO: 1882590
uucuuaaugugagcuaaga

SEQ ID NO: 2133011 - RNA, 19 nt, Artificial Sequence
  Description of Artificial Sequence: Synthetic oligonucleotide
  Antisense strand to SEQ ID NO: 2133010
ucuuagcucacauuaagaa

SEQ ID NO: 2133012 - RNA, 19 nt, Artificial Sequence
  Description of Artificial Sequence: Synthetic oligonucleotide
  Sense strand starting at position 1225 of SEQ ID NO: 1882590
gacagccuguugguauaau

SEQ ID NO: 2133013 - RNA, 19 nt, Artificial Sequence
  Description of Artificial Sequence: Synthetic oligonucleotide
  Antisense strand to SEQ ID NO: 2133012
auuauaccaacaggcuguc

SEQ ID NO: 2133014 - RNA, 19 nt, Artificial Sequence
  Description of Artificial Sequence: Synthetic oligonucleotide
  Sense strand starting at position 1236 of SEQ ID NO: 1882590
gguauaauggugcaaauga

SEQ ID NO: 2133015 - RNA, 19 nt, Artificial Sequence
  Description of Artificial Sequence: Synthetic oligonucleotide
  Antisense strand to SEQ ID NO: 2133014
ucauuugcaccauuauacc

SEQ ID NO: 2133016 - RNA, 19 nt, Artificial Sequence
  Description of Artificial Sequence: Synthetic oligonucleotide
  Sense strand starting at position 1244 of SEQ ID NO: 1882590
ggugcaaaugaccgaguua

SEQ ID NO: 2133017 - RNA, 19 nt, Artificial Sequence
  Description of Artificial Sequence: Synthetic oligonucleotide
  Antisense strand to SEQ ID NO: 2133016
uaacucggucauuugcacc

SEQ ID NO: 2133018 - RNA, 19 nt, Artificial Sequence
  Description of Artificial Sequence: Synthetic oligonucleotide
  Sense strand starting at position 1245 of SEQ ID NO: 1882590
gugcaaaugaccgaguuag

SEQ ID NO: 2133019 - RNA, 19 nt, Artificial Sequence
  Description of Artificial Sequence: Synthetic oligonucleotide
  Antisense strand to SEQ ID NO: 2133018
cuaacucggucauuugcac

SEQ ID NO: 2133020 - RNA, 19 nt, Artificial Sequence
  Description of Artificial Sequence: Synthetic oligonucleotide
  Sense strand starting at position 1387 of SEQ ID NO: 1882590
uguugaaaguucuuagcua

SEQ ID NO: 2133021 - RNA, 19 nt, Artificial Sequence
  Description of Artificial Sequence: Synthetic oligonucleotide
  Antisense strand to SEQ ID NO: 2133020
uagcuaagaacuuucaaca

SEQ ID NO: 2133022 - RNA, 19 nt, Artificial Sequence
  Description of Artificial Sequence: Synthetic oligonucleotide
  Sense strand starting at position 2140 of SEQ ID NO: 1882590
agggaacucugcuccuuaa

SEQ ID NO: 2133023 - RNA, 19 nt, Artificial Sequence
  Description of Artificial Sequence: Synthetic oligonucleotide
  Antisense strand to SEQ ID NO: 2133022
uuaaggagcagaguucccu

SEQ ID NO: 2133024 - RNA, 19 nt, Artificial Sequence
  Description of Artificial Sequence: Synthetic oligonucleotide
  Sense strand starting at position 2161 of SEQ ID NO: 1882590
aauggagagguguggucaa

SEQ ID NO: 2133025 - RNA, 19 nt, Artificial Sequence
  Description of Artificial Sequence: Synthetic oligonucleotide
  Antisense strand to SEQ ID NO: 2133024
uugaccacaccucuccauu

SEQ ID NO: 2133026 - RNA, 19 nt, Artificial Sequence
  Description of Artificial Sequence: Synthetic oligonucleotide
  Sense strand starting at position 2164 of SEQ ID NO: 1882590
ggagagguguggucaagga

SEQ ID NO: 2133027 - RNA, 19 nt, Artificial Sequence
  Description of Artificial Sequence: Synthetic oligonucleotide
  Antisense strand to SEQ ID NO: 2133026
uccuugaccacaccucucc

SEQ ID NO: 2133028 - RNA, 19 nt, Artificial Sequence
  Description of Artificial Sequence: Synthetic oligonucleotide
  Sense strand starting at position 2168 of SEQ ID NO: 1882590
agguguggucaaggaggaa

SEQ ID NO: 2133029 - RNA, 19 nt, Artificial Sequence
  Description of Artificial Sequence: Synthetic oligonucleotide
  Antisense strand to SEQ ID NO: 2133028
uuccuccuugaccacaccu

SEQ ID NO: 2133030 - RNA, 19 nt, Artificial Sequence
  Description of Artificial Sequence: Synthetic oligonucleotide
  Sense strand starting at position 2223 of SEQ ID NO: 1882590
ggagcuguggcccaaagga

SEQ ID NO: 2133031 - RNA, 19 nt, Artificial Sequence
  Description of Artificial Sequence: Synthetic oligonucleotide
  Antisense strand to SEQ ID NO: 2133030
uccuuugggccacagcucc

SEQ ID NO: 2133032 - RNA, 19 nt, Artificial Sequence
  Description of Artificial Sequence: Synthetic oligonucleotide
  Sense strand starting at position 2413 of SEQ ID NO: 1882590
guguuuacugaagacaguu

SEQ ID NO: 2133033 - RNA, 19 nt, Artificial Sequence
  Description of Artificial Sequence: Synthetic oligonucleotide
  Antisense strand to SEQ ID NO: 2133032
aacugucuucaguaaacac

SEQ ID NO: 2133034 - RNA, 19 nt, Artificial Sequence
  Description of Artificial Sequence: Synthetic oligonucleotide
  Sense strand starting at position 2557 of SEQ ID NO: 1882590
uguuguuguuuggugagaa

SEQ ID NO: 2133035 - RNA, 19 nt, Artificial Sequence
  Description of Artificial Sequence: Synthetic oligonucleotide
  Antisense strand to SEQ ID NO: 2133034
uucucaccaaacaacaaca

SEQ ID NO: 2133036 - RNA, 19 nt, Artificial Sequence
  Description of Artificial Sequence: Synthetic oligonucleotide
  Sense strand starting at position 2680 of SEQ ID NO: 1882590
caggacaugugguccaaga

SEQ ID NO: 2133037 - RNA, 19 nt, Artificial Sequence
  Description of Artificial Sequence: Synthetic oligonucleotide
  Antisense strand to SEQ ID NO: 2133036
ucuuggaccacauguccug

SEQ ID NO: 2133038 - RNA, 19 nt, Artificial Sequence
  Description of Artificial Sequence: Synthetic oligonucleotide
  Sense strand starting at position 2789 of SEQ ID NO: 1882590
gcacauaugguuugugacu

SEQ ID NO: 2133039 - RNA, 19 nt, Artificial Sequence
  Description of Artificial Sequence: Synthetic oligonucleotide
  Antisense strand to SEQ ID NO: 2133038
agucacaaaccauaugugc

SEQ ID NO: 2133040 - RNA, 19 nt, Artificial Sequence
  Description of Artificial Sequence: Synthetic oligonucleotide
  Sense strand starting at position 2811 of SEQ ID NO: 1882590
cggccuucuccauacaugu

SEQ ID NO: 2133041 - RNA, 19 nt, Artificial Sequence
  Description of Artificial Sequence: Synthetic oligonucleotide
  Antisense strand to SEQ ID NO: 2133040
acauguauggagaaggccg

SEQ ID NO: 2133042 - RNA, 19 nt, Artificial Sequence
  Description of Artificial Sequence: Synthetic oligonucleotide
  Sense strand starting at position 2820 of SEQ ID NO: 1882590
ccauacaugucugcucuua

SEQ ID NO: 2133043 - RNA, 19 nt, Artificial Sequence
  Description of Artificial Sequence: Synthetic oligonucleotide
  Antisense strand to SEQ ID NO: 2133042
uaagagcagacauguaugg

SEQ ID NO: 2133044 - RNA, 19 nt, Artificial Sequence
  Description of Artificial Sequence: Synthetic oligonucleotide
  Sense strand starting at position 2828 of SEQ ID NO: 1882590
gucugcucuuacguacaga

SEQ ID NO: 2133045 - RNA, 19 nt, Artificial Sequence
  Description of Artificial Sequence: Synthetic oligonucleotide
  Antisense strand to SEQ ID NO: 2133044
ucuguacguaagagcagac

SEQ ID NO: 2133046 - RNA, 19 nt, Artificial Sequence
  Description of Artificial Sequence: Synthetic oligonucleotide
  Sense strand starting at position 2850 of SEQ ID NO: 1882590
ccugucugucucuaggaga

SEQ ID NO: 2133047 - RNA, 19 nt, Artificial Sequence
  Description of Artificial Sequence: Synthetic oligonucleotide
  Antisense strand to SEQ ID NO: 2133046
ucuccuagagacagacagg

SEQ ID NO: 2133048 - RNA, 19 nt, Artificial Sequence
  Description of Artificial Sequence: Synthetic oligonucleotide
  Sense strand starting at position 3083 of SEQ ID NO: 1882590
ucacaucaucgccaggauu

SEQ ID NO: 2133049 - RNA, 19 nt, Artificial Sequence
  Description of Artificial Sequence: Synthetic oligonucleotide
  Antisense strand to SEQ ID NO: 2133048
aauccuggcgaugauguga

SEQ ID NO: 2133050 - RNA, 19 nt, Artificial Sequence
  Description of Artificial Sequence: Synthetic oligonucleotide
  Sense strand starting at position 3119 of SEQ ID NO: 1882590
ggugcacuccuggaccaua

SEQ ID NO: 2133051 - RNA, 19 nt, Artificial Sequence
  Description of Artificial Sequence: Synthetic oligonucleotide
  Antisense strand to SEQ ID NO: 2133050
uaugguccaggagugcacc

SEQ ID NO: 2133052 - RNA, 19 nt, Artificial Sequence
  Description of Artificial Sequence: Synthetic oligonucleotide
  Sense strand starting at position 3146 of SEQ ID NO: 1882590
ugcugugugcugucaacca

SEQ ID NO: 2133053 - RNA, 19 nt, Artificial Sequence
  Description of Artificial Sequence: Synthetic oligonucleotide
  Antisense strand to SEQ ID NO: 2133052
ugguugacagcacacagca

SEQ ID NO: 2133054 - RNA, 19 nt, Artificial Sequence
  Description of Artificial Sequence: Synthetic oligonucleotide
  Sense strand starting at position 3166 of SEQ ID NO: 1882590
aggucaaacaugugugaaa

SEQ ID NO: 2133055 - RNA, 19 nt, Artificial Sequence
  Description of Artificial Sequence: Synthetic oligonucleotide
  Antisense strand to SEQ ID NO: 2133054
uuucacacauguuugaccu

SEQ ID NO: 2133056 - RNA, 19 nt, Artificial Sequence
  Description of Artificial Sequence: Synthetic oligonucleotide
  Sense strand starting at position 3201 of SEQ ID NO: 1882590
gggcuugaaaucugucauc

SEQ ID NO: 2133057 - RNA, 19 nt, Artificial Sequence
  Description of Artificial Sequence: Synthetic oligonucleotide
  Antisense strand to SEQ ID NO: 2133056
gaugacagauuucaagccc

SEQ ID NO: 2133058 - RNA, 19 nt, Artificial Sequence
  Description of Artificial Sequence: Synthetic oligonucleotide
  Sense strand starting at position 3973 of SEQ ID NO: 1882590
uugccaauuucucuguuga

SEQ ID NO: 2133059 - RNA, 19 nt, Artificial Sequence
  Description of Artificial Sequence: Synthetic oligonucleotide
  Antisense strand to SEQ ID NO: 2133058
ucaacagagaaauuggcaa

SEQ ID NO: 2133060 - RNA, 19 nt, Artificial Sequence
  Description of Artificial Sequence: Synthetic oligonucleotide
  Sense strand starting at position 3974 of SEQ ID NO: 1882590
ugccaauuucucuguugaa

SEQ ID NO: 2133061 - RNA, 19 nt, Artificial Sequence
  Description of Artificial Sequence: Synthetic oligonucleotide
  Antisense strand to SEQ ID NO: 2133060
uucaacagagaaauuggca

SEQ ID NO: 2133062 - RNA, 19 nt, Artificial Sequence
  Description of Artificial Sequence: Synthetic oligonucleotide
  Sense strand starting at position 3975 of SEQ ID NO: 1882590
gccaauuucucuguugaac

SEQ ID NO: 2133063 - RNA, 19 nt, Artificial Sequence
  Description of Artificial Sequence: Synthetic oligonucleotide
  Antisense strand to SEQ ID NO: 2133062
guucaacagagaaauuggc

SEQ ID NO: 2133064 - RNA, 19 nt, Artificial Sequence
  Description of Artificial Sequence: Synthetic oligonucleotide
  Sense strand starting at position 36 of SEQ ID NO: 1882591
gugcucauguauuucccaa

SEQ ID NO: 2133065 - RNA, 19 nt, Artificial Sequence
  Description of Artificial Sequence: Synthetic oligonucleotide
  Antisense strand to SEQ ID NO: 2133064
uugggaaauacaugagcac

SEQ ID NO: 2133066 - RNA, 19 nt, Artificial Sequence
  Description of Artificial Sequence: Synthetic oligonucleotide
  Sense strand starting at position 125 of SEQ ID NO: 1882591
ugaucugauuuagaucaua

SEQ ID NO: 2133067 - RNA, 19 nt, Artificial Sequence
  Description of Artificial Sequence: Synthetic oligonucleotide
  Antisense strand to SEQ ID NO: 2133066
uaugaucuaaaucagauca

SEQ ID NO: 2133068 - RNA, 19 nt, Artificial Sequence
  Description of Artificial Sequence: Synthetic oligonucleotide
  Sense strand starting at position 446 of SEQ ID NO: 1882591
gguuaaugauucucccaaa

SEQ ID NO: 2133069 - RNA, 19 nt, Artificial Sequence
  Description of Artificial Sequence: Synthetic oligonucleotide
  Antisense strand to SEQ ID NO: 2133068
uuugggagaaucauuaacc

SEQ ID NO: 2133070 - RNA, 19 nt, Artificial Sequence
  Description of Artificial Sequence: Synthetic oligonucleotide
  Sense strand starting at position 491 of SEQ ID NO: 1882591
guuaauagaggucaaccuu

SEQ ID NO: 2133071 - RNA, 19 nt, Artificial Sequence
  Description of Artificial Sequence: Synthetic oligonucleotide
  Antisense strand to SEQ ID NO: 2133070
aagguugaccucuauuaac

SEQ ID NO: 2133072 - RNA, 19 nt, Artificial Sequence
  Description of Artificial Sequence: Synthetic oligonucleotide
  Sense strand starting at position 644 of SEQ ID NO: 1882591
guaaaucuaggccaaccua

SEQ ID NO: 2133073 - RNA, 19 nt, Artificial Sequence
  Description of Artificial Sequence: Synthetic oligonucleotide
  Antisense strand to SEQ ID NO: 2133072
uagguuggccuagauuuac

SEQ ID NO: 2133074 - RNA, 19 nt, Artificial Sequence
  Description of Artificial Sequence: Synthetic oligonucleotide
  Sense strand starting at position 794 of SEQ ID NO: 1882591
ucuuguguaggugauagaa

SEQ ID NO: 2133075 - RNA, 19 nt, Artificial Sequence
  Description of Artificial Sequence: Synthetic oligonucleotide
  Antisense strand to SEQ ID NO: 2133074
uucuaucaccuacacaaga

SEQ ID NO: 2133076 - RNA, 19 nt, Artificial Sequence
  Description of Artificial Sequence: Synthetic oligonucleotide
  Sense strand starting at position 812 of SEQ ID NO: 1882591
acacuuaacguugauuacu

SEQ ID NO: 2133077 - RNA, 19 nt, Artificial Sequence
  Description of Artificial Sequence: Synthetic oligonucleotide
  Antisense strand to SEQ ID NO: 2133076
aguaaucaacguuaagugu

SEQ ID NO: 2133078 - RNA, 19 nt, Artificial Sequence
  Description of Artificial Sequence: Synthetic oligonucleotide
  Sense strand starting at position 817 of SEQ ID NO: 1882591
uaacguugauuacugaaau

SEQ ID NO: 2133079 - RNA, 19 nt, Artificial Sequence
  Description of Artificial Sequence: Synthetic oligonucleotide
  Antisense strand to SEQ ID NO: 2133078
auuucaguaaucaacguua

SEQ ID NO: 2133080 - RNA, 19 nt, Artificial Sequence
  Description of Artificial Sequence: Synthetic oligonucleotide
  Sense strand starting at position 1003 of SEQ ID NO: 1882591
gacacuauguacuugaaug

SEQ ID NO: 2133081 - RNA, 19 nt, Artificial Sequence
  Description of Artificial Sequence: Synthetic oligonucleotide
  Antisense strand to SEQ ID NO: 2133080
cauucaaguacauaguguc

SEQ ID NO: 2133082 - RNA, 19 nt, Artificial Sequence
  Description of Artificial Sequence: Synthetic oligonucleotide
  Sense strand starting at position 1052 of SEQ ID NO: 1882591
gaauaagaggguugcaagu

SEQ ID NO: 2133083 - RNA, 19 nt, Artificial Sequence
  Description of Artificial Sequence: Synthetic oligonucleotide
  Antisense strand to SEQ ID NO: 2133082
acuugcaacccucuuauuc

SEQ ID NO: 2133084 - RNA, 19 nt, Artificial Sequence
  Description of Artificial Sequence: Synthetic oligonucleotide
  Sense strand starting at position 1103 of SEQ ID NO: 1882591
ccaauauuaguaugggagu

SEQ ID NO: 2133085 - RNA, 19 nt, Artificial Sequence
  Description of Artificial Sequence: Synthetic oligonucleotide
  Antisense strand to SEQ ID NO: 2133084
acucccauacuaauauugg

SEQ ID NO: 2133086 - RNA, 19 nt, Artificial Sequence
  Description of Artificial Sequence: Synthetic oligonucleotide
  Sense strand starting at position 1114 of SEQ ID NO: 1882591
augggaguggaguagucua

SEQ ID NO: 2133087 - RNA, 19 nt, Artificial Sequence
  Description of Artificial Sequence: Synthetic oligonucleotide
  Antisense strand to SEQ ID NO: 2133086
uagacuacuccacucccau

SEQ ID NO: 2133088 - RNA, 19 nt, Artificial Sequence
  Description of Artificial Sequence: Synthetic oligonucleotide
  Sense strand starting at position 1444 of SEQ ID NO: 1882591
cucugcauaccggaaacau

SEQ ID NO: 2133089 - RNA, 19 nt, Artificial Sequence
  Description of Artificial Sequence: Synthetic oligonucleotide
  Antisense strand to SEQ ID NO: 2133088
auguuuccgguaugcagag

SEQ ID NO: 2133090 - RNA, 19 nt, Artificial Sequence
  Description of Artificial Sequence: Synthetic oligonucleotide
  Sense strand starting at position 1559 of SEQ ID NO: 1882591
uguaauguaaaggguaaca

SEQ ID NO: 2133091 - RNA, 19 nt, Artificial Sequence
  Description of Artificial Sequence: Synthetic oligonucleotide
  Antisense strand to SEQ ID NO: 2133090
uguuacccuuuacauuaca

SEQ ID NO: 2133092 - RNA, 19 nt, Artificial Sequence
  Description of Artificial Sequence: Synthetic oligonucleotide
  Sense strand starting at position 1592 of SEQ ID NO: 1882591
ggucaauagcaauggaaca

SEQ ID NO: 2133093 - RNA, 19 nt, Artificial Sequence
  Description of Artificial Sequence: Synthetic oligonucleotide
  Antisense strand to SEQ ID NO: 2133092
uguuccauugcuauugacc

SEQ ID NO: 2133094 - RNA, 19 nt, Artificial Sequence
  Description of Artificial Sequence: Synthetic oligonucleotide
  Sense strand starting at position 1822 of SEQ ID NO: 1882591
auaaccaaguuuccgaaua

SEQ ID NO: 2133095 - RNA, 19 nt, Artificial Sequence
  Description of Artificial Sequence: Synthetic oligonucleotide
  Antisense strand to SEQ ID NO: 2133094
uauucggaaacuugguuau

SEQ ID NO: 2133096 - RNA, 19 nt, Artificial Sequence
  Description of Artificial Sequence: Synthetic oligonucleotide
  Sense strand starting at position 1827 of SEQ ID NO: 1882591
caaguuuccgaauagugau

SEQ ID NO: 2133097 - RNA, 19 nt, Artificial Sequence
  Description of Artificial Sequence: Synthetic oligonucleotide
  Antisense strand to SEQ ID NO: 2133096
aucacuauucggaaacuug

SEQ ID NO: 2133098 - RNA, 19 nt, Artificial Sequence
  Description of Artificial Sequence: Synthetic oligonucleotide
  Sense strand starting at position 1872 of SEQ ID NO: 1882591
acauuaucaccuggacaug

SEQ ID NO: 2133099 - RNA, 19 nt, Artificial Sequence
  Description of Artificial Sequence: Synthetic oligonucleotide
  Antisense strand to SEQ ID NO: 2133098
cauguccaggugauaaugu

SEQ ID NO: 2133100 - RNA, 19 nt, Artificial Sequence
  Description of Artificial Sequence: Synthetic oligonucleotide
  Sense strand starting at position 1947 of SEQ ID NO: 1882591
ggucuucgggaauauaagu

SEQ ID NO: 2133101 - RNA, 19 nt, Artificial Sequence
  Description of Artificial Sequence: Synthetic oligonucleotide
  Antisense strand to SEQ ID NO: 2133100
acuuauauucccgaagacc

SEQ ID NO: 2133102 - RNA, 19 nt, Artificial Sequence
  Description of Artificial Sequence: Synthetic oligonucleotide
  Sense strand starting at position 1952 of SEQ ID NO: 1882591
ucgggaauauaaguuagau

SEQ ID NO: 2133103 - RNA, 19 nt, Artificial Sequence
  Description of Artificial Sequence: Synthetic oligonucleotide
  Antisense strand to SEQ ID NO: 2133102
aucuaacuuauauucccga

SEQ ID NO: 2133104 - RNA, 19 nt, Artificial Sequence
  Description of Artificial Sequence: Synthetic oligonucleotide
  Sense strand starting at position 2060 of SEQ ID NO: 1882591
cuaauaguacaagauuguu

SEQ ID NO: 2133105 - RNA, 19 nt, Artificial Sequence
  Description of Artificial Sequence: Synthetic oligonucleotide
  Antisense strand to SEQ ID NO: 2133104
aacaaucuuguacuauuag

SEQ ID NO: 2133106 - RNA, 19 nt, Artificial Sequence
  Description of Artificial Sequence: Synthetic oligonucleotide
  Sense strand starting at position 2142 of SEQ ID NO: 1882591
cuguguuugcuuucugagu

SEQ ID NO: 2133107 - RNA, 19 nt, Artificial Sequence
  Description of Artificial Sequence: Synthetic oligonucleotide
  Antisense strand to SEQ ID NO: 2133106
acucagaaagcaaacacag

SEQ ID NO: 2133108 - RNA, 19 nt, Artificial Sequence
  Description of Artificial Sequence: Synthetic oligonucleotide
  Sense strand starting at position 2477 of SEQ ID NO: 1882591
auuuguaaacagugugcaa

SEQ ID NO: 2133109 - RNA, 19 nt, Artificial Sequence
  Description of Artificial Sequence: Synthetic oligonucleotide
  Antisense strand to SEQ ID NO: 2133108
uugcacacuguuuacaaau

SEQ ID NO: 2133110 - RNA, 19 nt, Artificial Sequence
  Description of Artificial Sequence: Synthetic oligonucleotide
  Sense strand starting at position 2545 of SEQ ID NO: 1882591
augaaacauggcuguugaa

SEQ ID NO: 2133111 - RNA, 19 nt, Artificial Sequence
  Description of Artificial Sequence: Synthetic oligonucleotide
  Antisense strand to SEQ ID NO: 2133110
uucaacagccauguuucau

SEQ ID NO: 2133112 - RNA, 19 nt, Artificial Sequence
  Description of Artificial Sequence: Synthetic oligonucleotide
  Sense strand starting at position 2710 of SEQ ID NO: 1882591
cugagauucuaacuaguga

SEQ ID NO: 2133113 - RNA, 19 nt, Artificial Sequence
  Description of Artificial Sequence: Synthetic oligonucleotide
  Antisense strand to SEQ ID NO: 2133112
ucacuaguuagaaucucag

SEQ ID NO: 2133114 - RNA, 19 nt, Artificial Sequence
  Description of Artificial Sequence: Synthetic oligonucleotide
  Sense strand starting at position 2740 of SEQ ID NO: 1882591
auguuccaucccugagaga

SEQ ID NO: 2133115 - RNA, 19 nt, Artificial Sequence
  Description of Artificial Sequence: Synthetic oligonucleotide
  Antisense strand to SEQ ID NO: 2133114
ucucucagggauggaacau

SEQ ID NO: 2133116 - RNA, 19 nt, Artificial Sequence
  Description of Artificial Sequence: Synthetic oligonucleotide
  Sense strand starting at position 2899 of SEQ ID NO: 1882591
ugcuauuugcuucggaaua

SEQ ID NO: 2133117 - RNA, 19 nt, Artificial Sequence
  Description of Artificial Sequence: Synthetic oligonucleotide
  Antisense strand to SEQ ID NO: 2133116
uauuccgaagcaaauagca

SEQ ID NO: 2133118 - RNA, 19 nt, Artificial Sequence
  Description of Artificial Sequence: Synthetic oligonucleotide
  Sense strand starting at position 2951 of SEQ ID NO: 1882591
ucaagagaagcuugacauu

SEQ ID NO: 2133119 - RNA, 19 nt, Artificial Sequence
  Description of Artificial Sequence: Synthetic oligonucleotide
  Antisense strand to SEQ ID NO: 2133118
aaugucaagcuucucuuga

SEQ ID NO: 2133120 - RNA, 19 nt, Artificial Sequence
  Description of Artificial Sequence: Synthetic oligonucleotide
  Sense strand starting at position 2963 of SEQ ID NO: 1882591
ugacauugugccuauaaca

SEQ ID NO: 2133121 - RNA, 19 nt, Artificial Sequence
  Description of Artificial Sequence: Synthetic oligonucleotide
  Antisense strand to SEQ ID NO: 2133120
uguuauaggcacaauguca

SEQ ID NO: 2133122 - RNA, 19 nt, Artificial Sequence
  Description of Artificial Sequence: Synthetic oligonucleotide
  Sense strand starting at position 3017 of SEQ ID NO: 1882591
aggcccaaucuugagugaa

SEQ ID NO: 2133123 - RNA, 19 nt, Artificial Sequence
  Description of Artificial Sequence: Synthetic oligonucleotide
  Antisense strand to SEQ ID NO: 2133122
uucacucaagauugggccu

SEQ ID NO: 2133124 - RNA, 19 nt, Artificial Sequence
  Description of Artificial Sequence: Synthetic oligonucleotide
  Sense strand starting at position 3020 of SEQ ID NO: 1882591
cccaaucuugagugaauca

SEQ ID NO: 2133125 - RNA, 19 nt, Artificial Sequence
  Description of Artificial Sequence: Synthetic oligonucleotide
  Antisense strand to SEQ ID NO: 2133124
ugauucacucaagauuggg

SEQ ID NO: 2133126 - RNA, 19 nt, Artificial Sequence
  Description of Artificial Sequence: Synthetic oligonucleotide
  Sense strand starting at position 3709 of SEQ ID NO: 1882591
acucaaugcggagauucua

SEQ ID NO: 2133127 - RNA, 19 nt, Artificial Sequence
  Description of Artificial Sequence: Synthetic oligonucleotide
  Antisense strand to SEQ ID NO: 2133126
uagaaucuccgcauugagu

SEQ ID NO: 2133128 - RNA, 19 nt, Artificial Sequence
  Description of Artificial Sequence: Synthetic oligonucleotide
  Sense strand starting at position 3720 of SEQ ID NO: 1882591
agauucuaugaaugguacu

SEQ ID NO: 2133129 - RNA, 19 nt, Artificial Sequence
  Description of Artificial Sequence: Synthetic oligonucleotide
  Antisense strand to SEQ ID NO: 2133128
aguaccauucauagaaucu

SEQ ID NO: 2133130 - RNA, 19 nt, Artificial Sequence
  Description of Artificial Sequence: Synthetic oligonucleotide
  Sense strand starting at position 3746 of SEQ ID NO: 1882591
cugggacaugccugaucaa

SEQ ID NO: 2133131 - RNA, 19 nt, Artificial Sequence
  Description of Artificial Sequence: Synthetic oligonucleotide
  Antisense strand to SEQ ID NO: 2133130
uugaucaggcaugucccag

SEQ ID NO: 2133132 - RNA, 19 nt, Artificial Sequence
  Description of Artificial Sequence: Synthetic oligonucleotide
  Sense strand starting at position 3749 of SEQ ID NO: 1882591
ggacaugccugaucaauau

SEQ ID NO: 2133133 - RNA, 19 nt, Artificial Sequence
  Description of Artificial Sequence: Synthetic oligonucleotide
  Antisense strand to SEQ ID NO: 2133132
auauugaucaggcaugucc

SEQ ID NO: 2133134 - RNA, 19 nt, Artificial Sequence
  Description of Artificial Sequence: Synthetic oligonucleotide
  Sense strand starting at position 3753 of SEQ ID NO: 1882591
augccugaucaauauuagu

SEQ ID NO: 2133135 - RNA, 19 nt, Artificial Sequence
  Description of Artificial Sequence: Synthetic oligonucleotide
  Antisense strand to SEQ ID NO: 2133134
acuaauauugaucaggcau

SEQ ID NO: 2133136 - RNA, 19 nt, Artificial Sequence
  Description of Artificial Sequence: Synthetic oligonucleotide
  Sense strand starting at position 3831 of SEQ ID NO: 1882591
ggaggacaauauguuaguu

SEQ ID NO: 2133137 - RNA, 19 nt, Artificial Sequence
  Description of Artificial Sequence: Synthetic oligonucleotide
  Antisense strand to SEQ ID NO: 2133136
aacuaacauauuguccucc

SEQ ID NO: 2133138 - RNA, 19 nt, Artificial Sequence
  Description of Artificial Sequence: Synthetic oligonucleotide
  Sense strand starting at position 3850 of SEQ ID NO: 1882591
guaauagccaggcauagaa

SEQ ID NO: 2133139 - RNA, 19 nt, Artificial Sequence
  Description of Artificial Sequence: Synthetic oligonucleotide
  Antisense strand to SEQ ID NO: 2133138
uucuaugccuggcuauuac

SEQ ID NO: 2133140 - RNA, 19 nt, Artificial Sequence
  Description of Artificial Sequence: Synthetic oligonucleotide
  Sense strand starting at position 3952 of SEQ ID NO: 1882591
cagcaugaugguuaucaga

SEQ ID NO: 2133141 - RNA, 19 nt, Artificial Sequence
  Description of Artificial Sequence: Synthetic oligonucleotide
  Antisense strand to SEQ ID NO: 2133140
ucugauaaccaucaugcug

SEQ ID NO: 2133142 - RNA, 19 nt, Artificial Sequence
  Description of Artificial Sequence: Synthetic oligonucleotide
  Sense strand starting at position 3954 of SEQ ID NO: 1882591
gcaugaugguuaucagagg

SEQ ID NO: 2133143 - RNA, 19 nt, Artificial Sequence
  Description of Artificial Sequence: Synthetic oligonucleotide
  Antisense strand to SEQ ID NO: 2133142
ccucugauaaccaucaugc

SEQ ID NO: 2133144 - RNA, 19 nt, Artificial Sequence
  Description of Artificial Sequence: Synthetic oligonucleotide
  Sense strand starting at position 72 of SEQ ID NO: 1882592
gagaauugcuugucuacag

SEQ ID NO: 2133145 - RNA, 19 nt, Artificial Sequence
  Description of Artificial Sequence: Synthetic oligonucleotide
  Antisense strand to SEQ ID NO: 2133144
cuguagacaagcaauucuc

SEQ ID NO: 2133146 - RNA, 19 nt, Artificial Sequence
  Description of Artificial Sequence: Synthetic oligonucleotide
  Sense strand starting at position 73 of SEQ ID NO: 1882592
agaauugcuugucuacaga

SEQ ID NO: 2133147 - RNA, 19 nt, Artificial Sequence
  Description of Artificial Sequence: Synthetic oligonucleotide
  Antisense strand to SEQ ID NO: 2133146
ucuguagacaagcaauucu

SEQ ID NO: 2133148 - RNA, 19 nt, Artificial Sequence
  Description of Artificial Sequence: Synthetic oligonucleotide
  Sense strand starting at position 207 of SEQ ID NO: 1882592
aguaaacuguuucuaggau

SEQ ID NO: 2133149 - RNA, 19 nt, Artificial Sequence
  Description of Artificial Sequence: Synthetic oligonucleotide
  Antisense strand to SEQ ID NO: 2133148
auccuagaaacaguuuacu

SEQ ID NO: 2133150 - RNA, 19 nt, Artificial Sequence
  Description of Artificial Sequence: Synthetic oligonucleotide
  Sense strand starting at position 253 of SEQ ID NO: 1882592
gugaaucagagccacugau

SEQ ID NO: 2133151 - RNA, 19 nt, Artificial Sequence
  Description of Artificial Sequence: Synthetic oligonucleotide
  Antisense strand to SEQ ID NO: 2133150
aucaguggcucugauucac

SEQ ID NO: 2133152 - RNA, 19 nt, Artificial Sequence
  Description of Artificial Sequence: Synthetic oligonucleotide
  Sense strand starting at position 289 of SEQ ID NO: 1882592
uaaaguacuggguaacuuu

SEQ ID NO: 2133153 - RNA, 19 nt, Artificial Sequence
  Description of Artificial Sequence: Synthetic oligonucleotide
  Antisense strand to SEQ ID NO: 2133152
aaaguuacccaguacuuua

SEQ ID NO: 2133154 - RNA, 19 nt, Artificial Sequence
  Description of Artificial Sequence: Synthetic oligonucleotide
  Sense strand starting at position 333 of SEQ ID NO: 1882592
ugacuuuaguuggucauaa

SEQ ID NO: 2133155 - RNA, 19 nt, Artificial Sequence
  Description of Artificial Sequence: Synthetic oligonucleotide
  Antisense strand to SEQ ID NO: 2133154
uuaugaccaacuaaaguca

SEQ ID NO: 2133156 - RNA, 19 nt, Artificial Sequence
  Description of Artificial Sequence: Synthetic oligonucleotide
  Sense strand starting at position 334 of SEQ ID NO: 1882592
gacuuuaguuggucauaag

SEQ ID NO: 2133157 - RNA, 19 nt, Artificial Sequence
  Description of Artificial Sequence: Synthetic oligonucleotide
  Antisense strand to SEQ ID NO: 2133156
cuuaugaccaacuaaaguc

SEQ ID NO: 2133158 - RNA, 19 nt, Artificial Sequence
  Description of Artificial Sequence: Synthetic oligonucleotide
  Sense strand starting at position 335 of SEQ ID NO: 1882592
acuuuaguuggucauaaga

SEQ ID NO: 2133159 - RNA, 19 nt, Artificial Sequence
  Description of Artificial Sequence: Synthetic oligonucleotide
  Antisense strand to SEQ ID NO: 2133158
ucuuaugaccaacuaaagu

SEQ ID NO: 2133160 - RNA, 19 nt, Artificial Sequence
  Description of Artificial Sequence: Synthetic oligonucleotide
  Sense strand starting at position 457 of SEQ ID NO: 1882592
gggcaaucugggcaaacua

SEQ ID NO: 2133161 - RNA, 19 nt, Artificial Sequence
  Description of Artificial Sequence: Synthetic oligonucleotide
  Antisense strand to SEQ ID NO: 2133160
uaguuugcccagauugccc

SEQ ID NO: 2133162 - RNA, 19 nt, Artificial Sequence
  Description of Artificial Sequence: Synthetic oligonucleotide
  Sense strand starting at position 530 of SEQ ID NO: 1882592
acaguuguuaguuauaaag

SEQ ID NO: 2133163 - RNA, 19 nt, Artificial Sequence
  Description of Artificial Sequence: Synthetic oligonucleotide
  Antisense strand to SEQ ID NO: 2133162
cuuuauaacuaacaacugu

SEQ ID NO: 2133164 - RNA, 19 nt, Artificial Sequence
  Description of Artificial Sequence: Synthetic oligonucleotide
  Sense strand starting at position 549 of SEQ ID NO: 1882592
ugugacacuguuuacuuau

SEQ ID NO: 2133165 - RNA, 19 nt, Artificial Sequence
  Description of Artificial Sequence: Synthetic oligonucleotide
  Antisense strand to SEQ ID NO: 2133164
auaaguaaacagugucaca

SEQ ID NO: 2133166 - RNA, 19 nt, Artificial Sequence
  Description of Artificial Sequence: Synthetic oligonucleotide
  Sense strand starting at position 551 of SEQ ID NO: 1882592
ugacacuguuuacuuauau

SEQ ID NO: 2133167 - RNA, 19 nt, Artificial Sequence
  Description of Artificial Sequence: Synthetic oligonucleotide
  Antisense strand to SEQ ID NO: 2133166
auauaaguaaacaguguca

SEQ ID NO: 2133168 - RNA, 19 nt, Artificial Sequence
  Description of Artificial Sequence: Synthetic oligonucleotide
  Sense strand starting at position 774 of SEQ ID NO: 1882592
cuguauguccuuuaacuau

SEQ ID NO: 2133169 - RNA, 19 nt, Artificial Sequence
  Description of Artificial Sequence: Synthetic oligonucleotide
  Antisense strand to SEQ ID NO: 2133168
auaguuaaaggacauacag

SEQ ID NO: 2133170 - RNA, 19 nt, Artificial Sequence
  Description of Artificial Sequence: Synthetic oligonucleotide
  Sense strand starting at position 839 of SEQ ID NO: 1882592
uguaauuaguaacugagua

SEQ ID NO: 2133171 - RNA, 19 nt, Artificial Sequence
  Description of Artificial Sequence: Synthetic oligonucleotide
  Antisense strand to SEQ ID NO: 2133170
uacucaguuacuaauuaca

SEQ ID NO: 2133172 - RNA, 19 nt, Artificial Sequence
  Description of Artificial Sequence: Synthetic oligonucleotide
  Sense strand starting at position 844 of SEQ ID NO: 1882592
uuaguaacugaguaaguga

SEQ ID NO: 2133173 - RNA, 19 nt, Artificial Sequence
  Description of Artificial Sequence: Synthetic oligonucleotide
  Antisense strand to SEQ ID NO: 2133172
ucacuuacucaguuacuaa

SEQ ID NO: 2133174 - RNA, 19 nt, Artificial Sequence
  Description of Artificial Sequence: Synthetic oligonucleotide
  Sense strand starting at position 1308 of SEQ ID NO: 1882592
agaauauaagagugucuuu

SEQ ID NO: 2133175 - RNA, 19 nt, Artificial Sequence
  Description of Artificial Sequence: Synthetic oligonucleotide
  Antisense strand to SEQ ID NO: 2133174
aaagacacucuuauauucu

SEQ ID NO: 2133176 - RNA, 19 nt, Artificial Sequence
  Description of Artificial Sequence: Synthetic oligonucleotide
  Sense strand starting at position 1556 of SEQ ID NO: 1882592
uuccuugaaugaguauuaa

SEQ ID NO: 2133177 - RNA, 19 nt, Artificial Sequence
  Description of Artificial Sequence: Synthetic oligonucleotide
  Antisense strand to SEQ ID NO: 2133176
uuaauacucauucaaggaa

SEQ ID NO: 2133178 - RNA, 19 nt, Artificial Sequence
  Description of Artificial Sequence: Synthetic oligonucleotide
  Sense strand starting at position 1615 of SEQ ID NO: 1882592
uuuggccuucugcaagaau

SEQ ID NO: 2133179 - RNA, 19 nt, Artificial Sequence
  Description of Artificial Sequence: Synthetic oligonucleotide
  Antisense strand to SEQ ID NO: 2133178
auucuugcagaaggccaaa

SEQ ID NO: 2133180 - RNA, 19 nt, Artificial Sequence
  Description of Artificial Sequence: Synthetic oligonucleotide
  Sense strand starting at position 1618 of SEQ ID NO: 1882592
ggccuucugcaagaauaca

SEQ ID NO: 2133181 - RNA, 19 nt, Artificial Sequence
  Description of Artificial Sequence: Synthetic oligonucleotide
  Antisense strand to SEQ ID NO: 2133180
uguauucuugcagaaggcc

SEQ ID NO: 2133182 - RNA, 19 nt, Artificial Sequence
  Description of Artificial Sequence: Synthetic oligonucleotide
  Sense strand starting at position 1626 of SEQ ID NO: 1882592
gcaagaauacauuguucug

SEQ ID NO: 2133183 - RNA, 19 nt, Artificial Sequence
  Description of Artificial Sequence: Synthetic oligonucleotide
  Antisense strand to SEQ ID NO: 2133182
cagaacaauguauucuugc

SEQ ID NO: 2133184 - RNA, 19 nt, Artificial Sequence
  Description of Artificial Sequence: Synthetic oligonucleotide
  Sense strand starting at position 1654 of SEQ ID NO: 1882592
gaaccaaccuauccgagua

SEQ ID NO: 2133185 - RNA, 19 nt, Artificial Sequence
  Description of Artificial Sequence: Synthetic oligonucleotide
  Antisense strand to SEQ ID NO: 2133184
uacucggauagguugguuc

SEQ ID NO: 2133186 - RNA, 19 nt, Artificial Sequence
  Description of Artificial Sequence: Synthetic oligonucleotide
  Sense strand starting at position 1715 of SEQ ID NO: 1882592
gccauugagggcuaacuaa

SEQ ID NO: 2133187 - RNA, 19 nt, Artificial Sequence
  Description of Artificial Sequence: Synthetic oligonucleotide
  Antisense strand to SEQ ID NO: 2133186
uuaguuagcccucaauggc

SEQ ID NO: 2133188 - RNA, 19 nt, Artificial Sequence
  Description of Artificial Sequence: Synthetic oligonucleotide
  Sense strand starting at position 1791 of SEQ ID NO: 1882592
aaucaucacugagugcaga

SEQ ID NO: 2133189 - RNA, 19 nt, Artificial Sequence
  Description of Artificial Sequence: Synthetic oligonucleotide
  Antisense strand to SEQ ID NO: 2133188
ucugcacucagugaugauu

SEQ ID NO: 2133190 - RNA, 19 nt, Artificial Sequence
  Description of Artificial Sequence: Synthetic oligonucleotide
  Sense strand starting at position 1844 of SEQ ID NO: 1882592
guuaguaugcaguucugca

SEQ ID NO: 2133191 - RNA, 19 nt, Artificial Sequence
  Description of Artificial Sequence: Synthetic oligonucleotide
  Antisense strand to SEQ ID NO: 2133190
ugcagaacugcauacuaac

SEQ ID NO: 2133192 - RNA, 19 nt, Artificial Sequence
  Description of Artificial Sequence: Synthetic oligonucleotide
  Sense strand starting at position 2405 of SEQ ID NO: 1882592
augcauugacaauauguaa

SEQ ID NO: 2133193 - RNA, 19 nt, Artificial Sequence
  Description of Artificial Sequence: Synthetic oligonucleotide
  Antisense strand to SEQ ID NO: 2133192
uuacauauugucaaugcau

SEQ ID NO: 2133194 - RNA, 19 nt, Artificial Sequence
  Description of Artificial Sequence: Synthetic oligonucleotide
  Sense strand starting at position 2474 of SEQ ID NO: 1882592
ugagcuaaacaguaauacu

SEQ ID NO: 2133195 - RNA, 19 nt, Artificial Sequence
  Description of Artificial Sequence: Synthetic oligonucleotide
  Antisense strand to SEQ ID NO: 2133194
aguauuacuguuuagcuca

SEQ ID NO: 2133196 - RNA, 19 nt, Artificial Sequence
  Description of Artificial Sequence: Synthetic oligonucleotide
  Sense strand starting at position 2525 of SEQ ID NO: 1882592
ugugaaugugcgaggcacu

SEQ ID NO: 2133197 - RNA, 19 nt, Artificial Sequence
  Description of Artificial Sequence: Synthetic oligonucleotide
  Antisense strand to SEQ ID NO: 2133196
agugccucgcacauucaca

SEQ ID NO: 2133198 - RNA, 19 nt, Artificial Sequence
  Description of Artificial Sequence: Synthetic oligonucleotide
  Sense strand starting at position 2594 of SEQ ID NO: 1882592
cugugauguagguaacauc

SEQ ID NO: 2133199 - RNA, 19 nt, Artificial Sequence
  Description of Artificial Sequence: Synthetic oligonucleotide
  Antisense strand to SEQ ID NO: 2133198
gauguuaccuacaucacag

SEQ ID NO: 2133200 - RNA, 19 nt, Artificial Sequence
  Description of Artificial Sequence: Synthetic oligonucleotide
  Sense strand starting at position 2614 of SEQ ID NO: 1882592
ucaugaucaucaccaguuu

SEQ ID NO: 2133201 - RNA, 19 nt, Artificial Sequence
  Description of Artificial Sequence: Synthetic oligonucleotide
  Antisense strand to SEQ ID NO: 2133200
aaacuggugaugaucauga

SEQ ID NO: 2133202 - RNA, 19 nt, Artificial Sequence
  Description of Artificial Sequence: Synthetic oligonucleotide
  Sense strand starting at position 2677 of SEQ ID NO: 1882592
gaaggucaauaguuuguaa

SEQ ID NO: 2133203 - RNA, 19 nt, Artificial Sequence
  Description of Artificial Sequence: Synthetic oligonucleotide
  Antisense strand to SEQ ID NO: 2133202
uuacaaacuauugaccuuc

SEQ ID NO: 2133204 - RNA, 19 nt, Artificial Sequence
  Description of Artificial Sequence: Synthetic oligonucleotide
  Sense strand starting at position 2804 of SEQ ID NO: 1882592
gcuccaaggcagugaauuu

SEQ ID NO: 2133205 - RNA, 19 nt, Artificial Sequence
  Description of Artificial Sequence: Synthetic oligonucleotide
  Antisense strand to SEQ ID NO: 2133204
aaauucacugccuuggagc

SEQ ID NO: 2133206 - RNA, 19 nt, Artificial Sequence
  Description of Artificial Sequence: Synthetic oligonucleotide
  Sense strand starting at position 2975 of SEQ ID NO: 1882592
uucugagaaccuuaauguc

SEQ ID NO: 2133207 - RNA, 19 nt, Artificial Sequence
  Description of Artificial Sequence: Synthetic oligonucleotide
  Antisense strand to SEQ ID NO: 2133206
gacauuaagguucucagaa

SEQ ID NO: 2133208 - RNA, 19 nt, Artificial Sequence
  Description of Artificial Sequence: Synthetic oligonucleotide
  Sense strand starting at position 3091 of SEQ ID NO: 1882592
acuagcaugugacuaugaa

SEQ ID NO: 2133209 - RNA, 19 nt, Artificial Sequence
  Description of Artificial Sequence: Synthetic oligonucleotide
  Antisense strand to SEQ ID NO: 2133208
uucauagucacaugcuagu

SEQ ID NO: 2133210 - RNA, 19 nt, Artificial Sequence
  Description of Artificial Sequence: Synthetic oligonucleotide
  Sense strand starting at position 3092 of SEQ ID NO: 1882592
cuagcaugugacuaugaag

SEQ ID NO: 2133211 - RNA, 19 nt, Artificial Sequence
  Description of Artificial Sequence: Synthetic oligonucleotide
  Antisense strand to SEQ ID NO: 2133210
cuucauagucacaugcuag

SEQ ID NO: 2133212 - RNA, 19 nt, Artificial Sequence
  Description of Artificial Sequence: Synthetic oligonucleotide
  Sense strand starting at position 3115 of SEQ ID NO: 1882592
caggaagugacauguguag

SEQ ID NO: 2133213 - RNA, 19 nt, Artificial Sequence
  Description of Artificial Sequence: Synthetic oligonucleotide
  Antisense strand to SEQ ID NO: 2133212
cuacacaugucacuuccug

SEQ ID NO: 2133214 - RNA, 19 nt, Artificial Sequence
  Description of Artificial Sequence: Synthetic oligonucleotide
  Sense strand starting at position 3149 of SEQ ID NO: 1882592
caggucacggucugaauuu

SEQ ID NO: 2133215 - RNA, 19 nt, Artificial Sequence
  Description of Artificial Sequence: Synthetic oligonucleotide
  Antisense strand to SEQ ID NO: 2133214
aaauucagaccgugaccug

SEQ ID NO: 2133216 - RNA, 19 nt, Artificial Sequence
  Description of Artificial Sequence: Synthetic oligonucleotide
  Sense strand starting at position 3565 of SEQ ID NO: 1882592
acauuugauucggaggaga

SEQ ID NO: 2133217 - RNA, 19 nt, Artificial Sequence
  Description of Artificial Sequence: Synthetic oligonucleotide
  Antisense strand to SEQ ID NO: 2133216
ucuccuccgaaucaaaugu

SEQ ID NO: 2133218 - RNA, 19 nt, Artificial Sequence
  Description of Artificial Sequence: Synthetic oligonucleotide
  Sense strand starting at position 3618 of SEQ ID NO: 1882592
agaguaaugcuugaaccca

SEQ ID NO: 2133219 - RNA, 19 nt, Artificial Sequence
  Description of Artificial Sequence: Synthetic oligonucleotide
  Antisense strand to SEQ ID NO: 2133218
uggguucaagcauuacucu

SEQ ID NO: 2133220 - RNA, 19 nt, Artificial Sequence
  Description of Artificial Sequence: Synthetic oligonucleotide
  Sense strand starting at position 3646 of SEQ ID NO: 1882592
ccuccuucucuguaggaaa

SEQ ID NO: 2133221 - RNA, 19 nt, Artificial Sequence
  Description of Artificial Sequence: Synthetic oligonucleotide
  Antisense strand to SEQ ID NO: 2133220
uuuccuacagagaaggagg

SEQ ID NO: 2133222 - RNA, 19 nt, Artificial Sequence
  Description of Artificial Sequence: Synthetic oligonucleotide
  Sense strand starting at position 3691 of SEQ ID NO: 1882592
agcaaccuuguaugacaua

SEQ ID NO: 2133223 - RNA, 19 nt, Artificial Sequence
  Description of Artificial Sequence: Synthetic oligonucleotide
  Antisense strand to SEQ ID NO: 2133222
uaugucauacaagguugcu

SEQ ID NO: 2133224 - RNA, 19 nt, Artificial Sequence
  Description of Artificial Sequence: Synthetic oligonucleotide
  Sense strand starting at position 93 of SEQ ID NO: 1882593
gccugagcaguccauuaac

SEQ ID NO: 2133225 - RNA, 19 nt, Artificial Sequence
  Description of Artificial Sequence: Synthetic oligonucleotide
  Antisense strand to SEQ ID NO: 2133224
guuaauggacugcucaggc

SEQ ID NO: 2133226 - RNA, 19 nt, Artificial Sequence
  Description of Artificial Sequence: Synthetic oligonucleotide
  Sense strand starting at position 96 of SEQ ID NO: 1882593
ugagcaguccauuaacuaa

SEQ ID NO: 2133227 - RNA, 19 nt, Artificial Sequence
  Description of Artificial Sequence: Synthetic oligonucleotide
  Antisense strand to SEQ ID NO: 2133226
uuaguuaauggacugcuca

SEQ ID NO: 2133228 - RNA, 19 nt, Artificial Sequence
  Description of Artificial Sequence: Synthetic oligonucleotide
  Sense strand starting at position 175 of SEQ ID NO: 1882593
gcuuaauguaugcaguaag

SEQ ID NO: 2133229 - RNA, 19 nt, Artificial Sequence
  Description of Artificial Sequence: Synthetic oligonucleotide
  Antisense strand to SEQ ID NO: 2133228
cuuacugcauacauuaagc

SEQ ID NO: 2133230 - RNA, 19 nt, Artificial Sequence
  Description of Artificial Sequence: Synthetic oligonucleotide
  Sense strand starting at position 186 of SEQ ID NO: 1882593
gcaguaaggccauaguuug

SEQ ID NO: 2133231 - RNA, 19 nt, Artificial Sequence
  Description of Artificial Sequence: Synthetic oligonucleotide
  Antisense strand to SEQ ID NO: 2133230
caaacuauggccuuacugc

SEQ ID NO: 2133232 - RNA, 19 nt, Artificial Sequence
  Description of Artificial Sequence: Synthetic oligonucleotide
  Sense strand starting at position 476 of SEQ ID NO: 1882593
ugucuugaaccucagauua

SEQ ID NO: 2133233 - RNA, 19 nt, Artificial Sequence
  Description of Artificial Sequence: Synthetic oligonucleotide
  Antisense strand to SEQ ID NO: 2133232
uaaucugagguucaagaca

SEQ ID NO: 2133234 - RNA, 19 nt, Artificial Sequence
  Description of Artificial Sequence: Synthetic oligonucleotide
  Sense strand starting at position 705 of SEQ ID NO: 1882593
cuacacuggugauuaacaa

SEQ ID NO: 2133235 - RNA, 19 nt, Artificial Sequence
  Description of Artificial Sequence: Synthetic oligonucleotide
  Antisense strand to SEQ ID NO: 2133234
uuguuaaucaccaguguag

SEQ ID NO: 2133236 - RNA, 19 nt, Artificial Sequence
  Description of Artificial Sequence: Synthetic oligonucleotide
  Sense strand starting at position 726 of SEQ ID NO: 1882593
uuuggauccucagcgaaga

SEQ ID NO: 2133237 - RNA, 19 nt, Artificial Sequence
  Description of Artificial Sequence: Synthetic oligonucleotide
  Antisense strand to SEQ ID NO: 2133236
ucuucgcugaggauccaaa

SEQ ID NO: 2133238 - RNA, 19 nt, Artificial Sequence
  Description of Artificial Sequence: Synthetic oligonucleotide
  Sense strand starting at position 727 of SEQ ID NO: 1882593
uuggauccucagcgaagau

SEQ ID NO: 2133239 - RNA, 19 nt, Artificial Sequence
  Description of Artificial Sequence: Synthetic oligonucleotide
  Antisense strand to SEQ ID NO: 2133238
aucuucgcugaggauccaa

SEQ ID NO: 2133240 - RNA, 19 nt, Artificial Sequence
  Description of Artificial Sequence: Synthetic oligonucleotide
  Sense strand starting at position 728 of SEQ ID NO: 1882593
uggauccucagcgaagaua

SEQ ID NO: 2133241 - RNA, 19 nt, Artificial Sequence
  Description of Artificial Sequence: Synthetic oligonucleotide
  Antisense strand to SEQ ID NO: 2133240
uaucuucgcugaggaucca

SEQ ID NO: 2133242 - RNA, 19 nt, Artificial Sequence
  Description of Artificial Sequence: Synthetic oligonucleotide
  Sense strand starting at position 731 of SEQ ID NO: 1882593
auccucagcgaagauauua

SEQ ID NO: 2133243 - RNA, 19 nt, Artificial Sequence
  Description of Artificial Sequence: Synthetic oligonucleotide
  Antisense strand to SEQ ID NO: 2133242
uaauaucuucgcugaggau

SEQ ID NO: 2133244 - RNA, 19 nt, Artificial Sequence
  Description of Artificial Sequence: Synthetic oligonucleotide
  Sense strand starting at position 790 of SEQ ID NO: 1882593
cugacaaccuguuuaguuu

SEQ ID NO: 2133245 - RNA, 19 nt, Artificial Sequence
  Description of Artificial Sequence: Synthetic oligonucleotide
  Antisense strand to SEQ ID NO: 2133244
aaacuaaacagguugucag

SEQ ID NO: 2133246 - RNA, 19 nt, Artificial Sequence
  Description of Artificial Sequence: Synthetic oligonucleotide
  Sense strand starting at position 791 of SEQ ID NO: 1882593
ugacaaccuguuuaguuua

SEQ ID NO: 2133247 - RNA, 19 nt, Artificial Sequence
  Description of Artificial Sequence: Synthetic oligonucleotide
  Antisense strand to SEQ ID NO: 2133246
uaaacuaaacagguuguca

SEQ ID NO: 2133248 - RNA, 19 nt, Artificial Sequence
  Description of Artificial Sequence: Synthetic oligonucleotide
  Sense strand starting at position 852 of SEQ ID NO: 1882593
aacguuagagguuagugaa

SEQ ID NO: 2133249 - RNA, 19 nt, Artificial Sequence
  Description of Artificial Sequence: Synthetic oligonucleotide
  Antisense strand to SEQ ID NO: 2133248
uucacuaaccucuaacguu

SEQ ID NO: 2133250 - RNA, 19 nt, Artificial Sequence
  Description of Artificial Sequence: Synthetic oligonucleotide
  Sense strand starting at position 1012 of SEQ ID NO: 1882593
uggcaaagaaauuguaaga

SEQ ID NO: 2133251 - RNA, 19 nt, Artificial Sequence
  Description of Artificial Sequence: Synthetic oligonucleotide
  Antisense strand to SEQ ID NO: 2133250
ucuuacaauuucuuugcca

SEQ ID NO: 2133252 - RNA, 19 nt, Artificial Sequence
  Description of Artificial Sequence: Synthetic oligonucleotide
  Sense strand starting at position 1112 of SEQ ID NO: 1882593
accuacuucccaggagacu

SEQ ID NO: 2133253 - RNA, 19 nt, Artificial Sequence
  Description of Artificial Sequence: Synthetic oligonucleotide
  Antisense strand to SEQ ID NO: 2133252
agucuccugggaaguaggu

SEQ ID NO: 2133254 - RNA, 19 nt, Artificial Sequence
  Description of Artificial Sequence: Synthetic oligonucleotide
  Sense strand starting at position 1121 of SEQ ID NO: 1882593
ccaggagacuuucuuauuc

SEQ ID NO: 2133255 - RNA, 19 nt, Artificial Sequence
  Description of Artificial Sequence: Synthetic oligonucleotide
  Antisense strand to SEQ ID NO: 2133254
gaauaagaaagucuccugg

SEQ ID NO: 2133256 - RNA, 19 nt, Artificial Sequence
  Description of Artificial Sequence: Synthetic oligonucleotide
  Sense strand starting at position 1211 of SEQ ID NO: 1882593
uguuguguaaugucagcuu

SEQ ID NO: 2133257 - RNA, 19 nt, Artificial Sequence
  Description of Artificial Sequence: Synthetic oligonucleotide
  Antisense strand to SEQ ID NO: 2133256
aagcugacauuacacaaca

SEQ ID NO: 2133258 - RNA, 19 nt, Artificial Sequence
  Description of Artificial Sequence: Synthetic oligonucleotide
  Sense strand starting at position 1545 of SEQ ID NO: 1882593
guccuuugaugucuugaaa

SEQ ID NO: 2133259 - RNA, 19 nt, Artificial Sequence
  Description of Artificial Sequence: Synthetic oligonucleotide
  Antisense strand to SEQ ID NO: 2133258
uuucaagacaucaaaggac

SEQ ID NO: 2133260 - RNA, 19 nt, Artificial Sequence
  Description of Artificial Sequence: Synthetic oligonucleotide
  Sense strand starting at position 1654 of SEQ ID NO: 1882593
guggaagaucucgguaaag

SEQ ID NO: 2133261 - RNA, 19 nt, Artificial Sequence
  Description of Artificial Sequence: Synthetic oligonucleotide
  Antisense strand to SEQ ID NO: 2133260
cuuuaccgagaucuuccac

SEQ ID NO: 2133262 - RNA, 19 nt, Artificial Sequence
  Description of Artificial Sequence: Synthetic oligonucleotide
  Sense strand starting at position 1656 of SEQ ID NO: 1882593
ggaagaucucgguaaagcc

SEQ ID NO: 2133263 - RNA, 19 nt, Artificial Sequence
  Description of Artificial Sequence: Synthetic oligonucleotide
  Antisense strand to SEQ ID NO: 2133262
ggcuuuaccgagaucuucc

SEQ ID NO: 2133264 - RNA, 19 nt, Artificial Sequence
  Description of Artificial Sequence: Synthetic oligonucleotide
  Sense strand starting at position 1706 of SEQ ID NO: 1882593
guugauacucccuguauuu

SEQ ID NO: 2133265 - RNA, 19 nt, Artificial Sequence
  Description of Artificial Sequence: Synthetic oligonucleotide
  Antisense strand to SEQ ID NO: 2133264
aaauacagggaguaucaac

SEQ ID NO: 2133266 - RNA, 19 nt, Artificial Sequence
  Description of Artificial Sequence: Synthetic oligonucleotide
  Sense strand starting at position 1927 of SEQ ID NO: 1882593
acaugaugcaguugaguug

SEQ ID NO: 2133267 - RNA, 19 nt, Artificial Sequence
  Description of Artificial Sequence: Synthetic oligonucleotide
  Antisense strand to SEQ ID NO: 2133266
caacucaacugcaucaugu

SEQ ID NO: 2133268 - RNA, 19 nt, Artificial Sequence
  Description of Artificial Sequence: Synthetic oligonucleotide
  Sense strand starting at position 1939 of SEQ ID NO: 1882593
ugaguugauuuacauuaca

SEQ ID NO: 2133269 - RNA, 19 nt, Artificial Sequence
  Description of Artificial Sequence: Synthetic oligonucleotide
  Antisense strand to SEQ ID NO: 2133268
uguaauguaaaucaacuca

SEQ ID NO: 2133270 - RNA, 19 nt, Artificial Sequence
  Description of Artificial Sequence: Synthetic oligonucleotide
  Sense strand starting at position 2074 of SEQ ID NO: 1882593
ccagauaaauuccuagugu

SEQ ID NO: 2133271 - RNA, 19 nt, Artificial Sequence
  Description of Artificial Sequence: Synthetic oligonucleotide
  Antisense strand to SEQ ID NO: 2133270
acacuaggaauuuaucugg

SEQ ID NO: 2133272 - RNA, 19 nt, Artificial Sequence
  Description of Artificial Sequence: Synthetic oligonucleotide
  Sense strand starting at position 3046 of SEQ ID NO: 1882593
gcgggagugauuuaugcga

SEQ ID NO: 2133273 - RNA, 19 nt, Artificial Sequence
  Description of Artificial Sequence: Synthetic oligonucleotide
  Antisense strand to SEQ ID NO: 2133272
ucgcauaaaucacucccgc

SEQ ID NO: 2133274 - RNA, 19 nt, Artificial Sequence
  Description of Artificial Sequence: Synthetic oligonucleotide
  Sense strand starting at position 3050 of SEQ ID NO: 1882593
gagugauuuaugcgagggu

SEQ ID NO: 2133275 - RNA, 19 nt, Artificial Sequence
  Description of Artificial Sequence: Synthetic oligonucleotide
  Antisense strand to SEQ ID NO: 2133274
acccucgcauaaaucacuc

SEQ ID NO: 2133276 - RNA, 19 nt, Artificial Sequence
  Description of Artificial Sequence: Synthetic oligonucleotide
  Sense strand starting at position 3053 of SEQ ID NO: 1882593
ugauuuaugcgaggguuug

SEQ ID NO: 2133277 - RNA, 19 nt, Artificial Sequence
  Description of Artificial Sequence: Synthetic oligonucleotide
  Antisense strand to SEQ ID NO: 2133276
caaacccucgcauaaauca

SEQ ID NO: 2133278 - RNA, 19 nt, Artificial Sequence
  Description of Artificial Sequence: Synthetic oligonucleotide
  Sense strand starting at position 3436 of SEQ ID NO: 1882593
ucuaguaaugaucagcaaa

SEQ ID NO: 2133279 - RNA, 19 nt, Artificial Sequence
  Description of Artificial Sequence: Synthetic oligonucleotide
  Antisense strand to SEQ ID NO: 2133278
uuugcugaucauuacuaga

SEQ ID NO: 2133280 - RNA, 19 nt, Artificial Sequence
  Description of Artificial Sequence: Synthetic oligonucleotide
  Sense strand starting at position 3456 of SEQ ID NO: 1882593
ucaguaaauccucacuagu

SEQ ID NO: 2133281 - RNA, 19 nt, Artificial Sequence
  Description of Artificial Sequence: Synthetic oligonucleotide
  Antisense strand to SEQ ID NO: 2133280
acuagugaggauuuacuga

SEQ ID NO: 2133282 - RNA, 19 nt, Artificial Sequence
  Description of Artificial Sequence: Synthetic oligonucleotide
  Sense strand starting at position 3458 of SEQ ID NO: 1882593
aguaaauccucacuaguau

SEQ ID NO: 2133283 - RNA, 19 nt, Artificial Sequence
  Description of Artificial Sequence: Synthetic oligonucleotide
  Antisense strand to SEQ ID NO: 2133282
auacuagugaggauuuacu

SEQ ID NO: 2133284 - RNA, 19 nt, Artificial Sequence
  Description of Artificial Sequence: Synthetic oligonucleotide
  Sense strand starting at position 3459 of SEQ ID NO: 1882593
guaaauccucacuaguaug

SEQ ID NO: 2133285 - RNA, 19 nt, Artificial Sequence
  Description of Artificial Sequence: Synthetic oligonucleotide
  Antisense strand to SEQ ID NO: 2133284
cauacuagugaggauuuac

SEQ ID NO: 2133286 - RNA, 19 nt, Artificial Sequence
  Description of Artificial Sequence: Synthetic oligonucleotide
  Sense strand starting at position 3467 of SEQ ID NO: 1882593
ucacuaguaugaguguaau

SEQ ID NO: 2133287 - RNA, 19 nt, Artificial Sequence
  Description of Artificial Sequence: Synthetic oligonucleotide
  Antisense strand to SEQ ID NO: 2133286
auuacacucauacuaguga

SEQ ID NO: 2133288 - RNA, 19 nt, Artificial Sequence
  Description of Artificial Sequence: Synthetic oligonucleotide
  Sense strand starting at position 3470 of SEQ ID NO: 1882593
cuaguaugaguguaauaaa

SEQ ID NO: 2133289 - RNA, 19 nt, Artificial Sequence
  Description of Artificial Sequence: Synthetic oligonucleotide
  Antisense strand to SEQ ID NO: 2133288
uuuauuacacucauacuag

SEQ ID NO: 2133290 - RNA, 19 nt, Artificial Sequence
  Description of Artificial Sequence: Synthetic oligonucleotide
  Sense strand starting at position 3583 of SEQ ID NO: 1882593
acugauaaucauugagucu

SEQ ID NO: 2133291 - RNA, 19 nt, Artificial Sequence
  Description of Artificial Sequence: Synthetic oligonucleotide
  Antisense strand to SEQ ID NO: 2133290
agacucaaugauuaucagu

SEQ ID NO: 2133292 - RNA, 19 nt, Artificial Sequence
  Description of Artificial Sequence: Synthetic oligonucleotide
  Sense strand starting at position 3712 of SEQ ID NO: 1882593
uaggaucucuguuuguaua

SEQ ID NO: 2133293 - RNA, 19 nt, Artificial Sequence
  Description of Artificial Sequence: Synthetic oligonucleotide
  Antisense strand to SEQ ID NO: 2133292
uauacaaacagagauccua

SEQ ID NO: 2133294 - RNA, 19 nt, Artificial Sequence
  Description of Artificial Sequence: Synthetic oligonucleotide
  Sense strand starting at position 3713 of SEQ ID NO: 1882593
aggaucucuguuuguauau

SEQ ID NO: 2133295 - RNA, 19 nt, Artificial Sequence
  Description of Artificial Sequence: Synthetic oligonucleotide
  Antisense strand to SEQ ID NO: 2133294
auauacaaacagagauccu

SEQ ID NO: 2133296 - RNA, 19 nt, Artificial Sequence
  Description of Artificial Sequence: Synthetic oligonucleotide
  Sense strand starting at position 3714 of SEQ ID NO: 1882593
ggaucucuguuuguauaug

SEQ ID NO: 2133297 - RNA, 19 nt, Artificial Sequence
  Description of Artificial Sequence: Synthetic oligonucleotide
  Antisense strand to SEQ ID NO: 2133296
cauauacaaacagagaucc

SEQ ID NO: 2133298 - RNA, 19 nt, Artificial Sequence
  Description of Artificial Sequence: Synthetic oligonucleotide
  Sense strand starting at position 3806 of SEQ ID NO: 1882593
ugaauugucuucucaccga

SEQ ID NO: 2133299 - RNA, 19 nt, Artificial Sequence
  Description of Artificial Sequence: Synthetic oligonucleotide
  Antisense strand to SEQ ID NO: 2133298
ucggugagaagacaauuca

SEQ ID NO: 2133300 - RNA, 19 nt, Artificial Sequence
  Description of Artificial Sequence: Synthetic oligonucleotide
  Sense strand starting at position 3821 of SEQ ID NO: 1882593
ccgaauugguuucuggaau

SEQ ID NO: 2133301 - RNA, 19 nt, Artificial Sequence
  Description of Artificial Sequence: Synthetic oligonucleotide
  Antisense strand to SEQ ID NO: 2133300
auuccagaaaccaauucgg

SEQ ID NO: 2133302 - RNA, 19 nt, Artificial Sequence
  Description of Artificial Sequence: Synthetic oligonucleotide
  Sense strand starting at position 3832 of SEQ ID NO: 1882593
ucuggaauugcuggagaag

SEQ ID NO: 2133303 - RNA, 19 nt, Artificial Sequence
  Description of Artificial Sequence: Synthetic oligonucleotide
  Antisense strand to SEQ ID NO: 2133302
cuucuccagcaauuccaga

SEQ ID NO: 2133304 - RNA, 19 nt, Artificial Sequence
  Description of Artificial Sequence: Synthetic oligonucleotide
  Sense strand starting at position 361 of SEQ ID NO: 1882594
caggaagugugcuuaccua

SEQ ID NO: 2133305 - RNA, 19 nt, Artificial Sequence
  Description of Artificial Sequence: Synthetic oligonucleotide
  Antisense strand to SEQ ID NO: 2133304
uagguaagcacacuuccug

SEQ ID NO: 2133306 - RNA, 19 nt, Artificial Sequence
  Description of Artificial Sequence: Synthetic oligonucleotide
  Sense strand starting at position 436 of SEQ ID NO: 1882594
aucugaaguuaucuuugca

SEQ ID NO: 2133307 - RNA, 19 nt, Artificial Sequence
  Description of Artificial Sequence: Synthetic oligonucleotide
  Antisense strand to SEQ ID NO: 2133306
ugcaaagauaacuucagau

SEQ ID NO: 2133308 - RNA, 19 nt, Artificial Sequence
  Description of Artificial Sequence: Synthetic oligonucleotide
  Sense strand starting at position 506 of SEQ ID NO: 1882594
ucuccauaugucuacuaga

SEQ ID NO: 2133309 - RNA, 19 nt, Artificial Sequence
  Description of Artificial Sequence: Synthetic oligonucleotide
  Antisense strand to SEQ ID NO: 2133308
ucuaguagacauauggaga

SEQ ID NO: 2133310 - RNA, 19 nt, Artificial Sequence
  Description of Artificial Sequence: Synthetic oligonucleotide
  Sense strand starting at position 649 of SEQ ID NO: 1882594
gucagaccuugucucuauu

SEQ ID NO: 2133311 - RNA, 19 nt, Artificial Sequence
  Description of Artificial Sequence: Synthetic oligonucleotide
  Antisense strand to SEQ ID NO: 2133310
aauagagacaaggucugac

SEQ ID NO: 2133312 - RNA, 19 nt, Artificial Sequence
  Description of Artificial Sequence: Synthetic oligonucleotide
  Sense strand starting at position 864 of SEQ ID NO: 1882594
aucuuaaauuuacgacuga

SEQ ID NO: 2133313 - RNA, 19 nt, Artificial Sequence
  Description of Artificial Sequence: Synthetic oligonucleotide
  Antisense strand to SEQ ID NO: 2133312
ucagucguaaauuuaagau

SEQ ID NO: 2133314 - RNA, 19 nt, Artificial Sequence
  Description of Artificial Sequence: Synthetic oligonucleotide
  Sense strand starting at position 865 of SEQ ID NO: 1882594
ucuuaaauuuacgacugaa

SEQ ID NO: 2133315 - RNA, 19 nt, Artificial Sequence
  Description of Artificial Sequence: Synthetic oligonucleotide
  Antisense strand to SEQ ID NO: 2133314
uucagucguaaauuuaaga

SEQ ID NO: 2133316 - RNA, 19 nt, Artificial Sequence
  Description of Artificial Sequence: Synthetic oligonucleotide
  Sense strand starting at position 1019 of SEQ ID NO: 1882594
gggucugcucuccaguuaa

SEQ ID NO: 2133317 - RNA, 19 nt, Artificial Sequence
  Description of Artificial Sequence: Synthetic oligonucleotide
  Antisense strand to SEQ ID NO: 2133316
uuaacuggagagcagaccc

SEQ ID NO: 2133318 - RNA, 19 nt, Artificial Sequence
  Description of Artificial Sequence: Synthetic oligonucleotide
  Sense strand starting at position 1051 of SEQ ID NO: 1882594
gaacgaauuuagugcauuu

SEQ ID NO: 2133319 - RNA, 19 nt, Artificial Sequence
  Description of Artificial Sequence: Synthetic oligonucleotide
  Antisense strand to SEQ ID NO: 2133318
aaaugcacuaaauucguuc

SEQ ID NO: 2133320 - RNA, 19 nt, Artificial Sequence
  Description of Artificial Sequence: Synthetic oligonucleotide
  Sense strand starting at position 1070 of SEQ ID NO: 1882594
gcacaagaagugcauuaca

SEQ ID NO: 2133321 - RNA, 19 nt, Artificial Sequence
  Description of Artificial Sequence: Synthetic oligonucleotide
  Antisense strand to SEQ ID NO: 2133320
uguaaugcacuucuugugc

SEQ ID NO: 2133322 - RNA, 19 nt, Artificial Sequence
  Description of Artificial Sequence: Synthetic oligonucleotide
  Sense strand starting at position 1157 of SEQ ID NO: 1882594
uucuguggucgucuuguaa

SEQ ID NO: 2133323 - RNA, 19 nt, Artificial Sequence
  Description of Artificial Sequence: Synthetic oligonucleotide
  Antisense strand to SEQ ID NO: 2133322
uuacaagacgaccacagaa

SEQ ID NO: 2133324 - RNA, 19 nt, Artificial Sequence
  Description of Artificial Sequence: Synthetic oligonucleotide
  Sense strand starting at position 1212 of SEQ ID NO: 1882594
uaaggucaggguugagaau

SEQ ID NO: 2133325 - RNA, 19 nt, Artificial Sequence
  Description of Artificial Sequence: Synthetic oligonucleotide
  Antisense strand to SEQ ID NO: 2133324
auucucaacccugaccuua

SEQ ID NO: 2133326 - RNA, 19 nt, Artificial Sequence
  Description of Artificial Sequence: Synthetic oligonucleotide
  Sense strand starting at position 1221 of SEQ ID NO: 1882594
gguugagaaucguccucac

SEQ ID NO: 2133327 - RNA, 19 nt, Artificial Sequence
  Description of Artificial Sequence: Synthetic oligonucleotide
  Antisense strand to SEQ ID NO: 2133326
gugaggacgauucucaacc

SEQ ID NO: 2133328 - RNA, 19 nt, Artificial Sequence
  Description of Artificial Sequence: Synthetic oligonucleotide
  Sense strand starting at position 1224 of SEQ ID NO: 1882594
ugagaaucguccucacuuu

SEQ ID NO: 2133329 - RNA, 19 nt, Artificial Sequence
  Description of Artificial Sequence: Synthetic oligonucleotide
  Antisense strand to SEQ ID NO: 2133328
aaagugaggacgauucuca

SEQ ID NO: 2133330 - RNA, 19 nt, Artificial Sequence
  Description of Artificial Sequence: Synthetic oligonucleotide
  Sense strand starting at position 1281 of SEQ ID NO: 1882594
accggaauccuucggguaa

SEQ ID NO: 2133331 - RNA, 19 nt, Artificial Sequence
  Description of Artificial Sequence: Synthetic oligonucleotide
  Antisense strand to SEQ ID NO: 2133330
uuacccgaaggauuccggu

SEQ ID NO: 2133332 - RNA, 19 nt, Artificial Sequence
  Description of Artificial Sequence: Synthetic oligonucleotide
  Sense strand starting at position 2168 of SEQ ID NO: 1882594
gggauuaucuucuucguga

SEQ ID NO: 2133333 - RNA, 19 nt, Artificial Sequence
  Description of Artificial Sequence: Synthetic oligonucleotide
  Antisense strand to SEQ ID NO: 2133332
ucacgaagaagauaauccc

SEQ ID NO: 2133334 - RNA, 19 nt, Artificial Sequence
  Description of Artificial Sequence: Synthetic oligonucleotide
  Sense strand starting at position 2169 of SEQ ID NO: 1882594
ggauuaucuucuucgugag

SEQ ID NO: 2133335 - RNA, 19 nt, Artificial Sequence
  Description of Artificial Sequence: Synthetic oligonucleotide
  Antisense strand to SEQ ID NO: 2133334
cucacgaagaagauaaucc

SEQ ID NO: 2133336 - RNA, 19 nt, Artificial Sequence
  Description of Artificial Sequence: Synthetic oligonucleotide
  Sense strand starting at position 2171 of SEQ ID NO: 1882594
auuaucuucuucgugagga

SEQ ID NO: 2133337 - RNA, 19 nt, Artificial Sequence
  Description of Artificial Sequence: Synthetic oligonucleotide
  Antisense strand to SEQ ID NO: 2133336
uccucacgaagaagauaau

SEQ ID NO: 2133338 - RNA, 19 nt, Artificial Sequence
  Description of Artificial Sequence: Synthetic oligonucleotide
  Sense strand starting at position 2173 of SEQ ID NO: 1882594
uaucuucuucgugaggaau

SEQ ID NO: 2133339 - RNA, 19 nt, Artificial Sequence
  Description of Artificial Sequence: Synthetic oligonucleotide
  Antisense strand to SEQ ID NO: 2133338
auuccucacgaagaagaua

SEQ ID NO: 2133340 - RNA, 19 nt, Artificial Sequence
  Description of Artificial Sequence: Synthetic oligonucleotide
  Sense strand starting at position 2176 of SEQ ID NO: 1882594
cuucuucgugaggaaugaa

SEQ ID NO: 2133341 - RNA, 19 nt, Artificial Sequence
  Description of Artificial Sequence: Synthetic oligonucleotide
  Antisense strand to SEQ ID NO: 2133340
uucauuccucacgaagaag

SEQ ID NO: 2133342 - RNA, 19 nt, Artificial Sequence
  Description of Artificial Sequence: Synthetic oligonucleotide
  Sense strand starting at position 2179 of SEQ ID NO: 1882594
cuucgugaggaaugaaguu

SEQ ID NO: 2133343 - RNA, 19 nt, Artificial Sequence
  Description of Artificial Sequence: Synthetic oligonucleotide
  Antisense strand to SEQ ID NO: 2133342
aacuucauuccucacgaag

SEQ ID NO: 2133344 - RNA, 19 nt, Artificial Sequence
  Description of Artificial Sequence: Synthetic oligonucleotide
  Sense strand starting at position 2188 of SEQ ID NO: 1882594
gaaugaaguuccuuagucu

SEQ ID NO: 2133345 - RNA, 19 nt, Artificial Sequence
  Description of Artificial Sequence: Synthetic oligonucleotide
  Antisense strand to SEQ ID NO: 2133344
agacuaaggaacuucauuc

SEQ ID NO: 2133346 - RNA, 19 nt, Artificial Sequence
  Description of Artificial Sequence: Synthetic oligonucleotide
  Sense strand starting at position 2191 of SEQ ID NO: 1882594
ugaaguuccuuagucuaau

SEQ ID NO: 2133347 - RNA, 19 nt, Artificial Sequence
  Description of Artificial Sequence: Synthetic oligonucleotide
  Antisense strand to SEQ ID NO: 2133346
auuagacuaaggaacuuca

SEQ ID NO: 2133348 - RNA, 19 nt, Artificial Sequence
  Description of Artificial Sequence: Synthetic oligonucleotide
  Sense strand starting at position 2194 of SEQ ID NO: 1882594
aguuccuuagucuaauauu

SEQ ID NO: 2133349 - RNA, 19 nt, Artificial Sequence
  Description of Artificial Sequence: Synthetic oligonucleotide
  Antisense strand to SEQ ID NO: 2133348
aauauuagacuaaggaacu

SEQ ID NO: 2133350 - RNA, 19 nt, Artificial Sequence
  Description of Artificial Sequence: Synthetic oligonucleotide
  Sense strand starting at position 2318 of SEQ ID NO: 1882594
augacacucugguuauuac

SEQ ID NO: 2133351 - RNA, 19 nt, Artificial Sequence
  Description of Artificial Sequence: Synthetic oligonucleotide
  Antisense strand to SEQ ID NO: 2133350
guaauaaccagagugucau

SEQ ID NO: 2133352 - RNA, 19 nt, Artificial Sequence
  Description of Artificial Sequence: Synthetic oligonucleotide
  Sense strand starting at position 2431 of SEQ ID NO: 1882594
ugagcaacgguucaucaga

SEQ ID NO: 2133353 - RNA, 19 nt, Artificial Sequence
  Description of Artificial Sequence: Synthetic oligonucleotide
  Antisense strand to SEQ ID NO: 2133352
ucugaugaaccguugcuca

SEQ ID NO: 2133354 - RNA, 19 nt, Artificial Sequence
  Description of Artificial Sequence: Synthetic oligonucleotide
  Sense strand starting at position 2556 of SEQ ID NO: 1882594
cuaugcuaacaguguauau

SEQ ID NO: 2133355 - RNA, 19 nt, Artificial Sequence
  Description of Artificial Sequence: Synthetic oligonucleotide
  Antisense strand to SEQ ID NO: 2133354
auauacacuguuagcauag

SEQ ID NO: 2133356 - RNA, 19 nt, Artificial Sequence
  Description of Artificial Sequence: Synthetic oligonucleotide
  Sense strand starting at position 2569 of SEQ ID NO: 1882594
guauauaggaaaugguuua

SEQ ID NO: 2133357 - RNA, 19 nt, Artificial Sequence
  Description of Artificial Sequence: Synthetic oligonucleotide
  Antisense strand to SEQ ID NO: 2133356
uaaaccauuuccuauauac

SEQ ID NO: 2133358 - RNA, 19 nt, Artificial Sequence
  Description of Artificial Sequence: Synthetic oligonucleotide
  Sense strand starting at position 2587 of SEQ ID NO: 1882594
augauagcuguccaacuca

SEQ ID NO: 2133359 - RNA, 19 nt, Artificial Sequence
  Description of Artificial Sequence: Synthetic oligonucleotide
  Antisense strand to SEQ ID NO: 2133358
ugaguuggacagcuaucau

SEQ ID NO: 2133360 - RNA, 19 nt, Artificial Sequence
  Description of Artificial Sequence: Synthetic oligonucleotide
  Sense strand starting at position 2661 of SEQ ID NO: 1882594
caaaguuaaggauguaucu

SEQ ID NO: 2133361 - RNA, 19 nt, Artificial Sequence
  Description of Artificial Sequence: Synthetic oligonucleotide
  Antisense strand to SEQ ID NO: 2133360
agauacauccuuaacuuug

SEQ ID NO: 2133362 - RNA, 19 nt, Artificial Sequence
  Description of Artificial Sequence: Synthetic oligonucleotide
  Sense strand starting at position 2762 of SEQ ID NO: 1882594
uuucccagacaaugagauu

SEQ ID NO: 2133363 - RNA, 19 nt, Artificial Sequence
  Description of Artificial Sequence: Synthetic oligonucleotide
  Antisense strand to SEQ ID NO: 2133362
aaucucauugucugggaaa

SEQ ID NO: 2133364 - RNA, 19 nt, Artificial Sequence
  Description of Artificial Sequence: Synthetic oligonucleotide
  Sense strand starting at position 2775 of SEQ ID NO: 1882594
gagauuuaguauuagcauu

SEQ ID NO: 2133365 - RNA, 19 nt, Artificial Sequence
  Description of Artificial Sequence: Synthetic oligonucleotide
  Antisense strand to SEQ ID NO: 2133364
aaugcuaauacuaaaucuc

SEQ ID NO: 2133366 - RNA, 19 nt, Artificial Sequence
  Description of Artificial Sequence: Synthetic oligonucleotide
  Sense strand starting at position 3116 of SEQ ID NO: 1882594
uaagaauuauaggauugga

SEQ ID NO: 2133367 - RNA, 19 nt, Artificial Sequence
  Description of Artificial Sequence: Synthetic oligonucleotide
  Antisense strand to SEQ ID NO: 2133366
uccaauccuauaauucuua

SEQ ID NO: 2133368 - RNA, 19 nt, Artificial Sequence
  Description of Artificial Sequence: Synthetic oligonucleotide
  Sense strand starting at position 3314 of SEQ ID NO: 1882594
gagggauguacugaggcuu

SEQ ID NO: 2133369 - RNA, 19 nt, Artificial Sequence
  Description of Artificial Sequence: Synthetic oligonucleotide
  Antisense strand to SEQ ID NO: 2133368
aagccucaguacaucccuc

SEQ ID NO: 2133370 - RNA, 19 nt, Artificial Sequence
  Description of Artificial Sequence: Synthetic oligonucleotide
  Sense strand starting at position 3399 of SEQ ID NO: 1882594
aagaguugaugucuugaaa

SEQ ID NO: 2133371 - RNA, 19 nt, Artificial Sequence
  Description of Artificial Sequence: Synthetic oligonucleotide
  Antisense strand to SEQ ID NO: 2133370
uuucaagacaucaacucuu

SEQ ID NO: 2133372 - RNA, 19 nt, Artificial Sequence
  Description of Artificial Sequence: Synthetic oligonucleotide
  Sense strand starting at position 3482 of SEQ ID NO: 1882594
ucuuaaagguauccucuga

SEQ ID NO: 2133373 - RNA, 19 nt, Artificial Sequence
  Description of Artificial Sequence: Synthetic oligonucleotide
  Antisense strand to SEQ ID NO: 2133372
ucagaggauaccuuuaaga

SEQ ID NO: 2133374 - RNA, 19 nt, Artificial Sequence
  Description of Artificial Sequence: Synthetic oligonucleotide
  Sense strand starting at position 3486 of SEQ ID NO: 1882594
aaagguauccucugaauug

SEQ ID NO: 2133375 - RNA, 19 nt, Artificial Sequence
  Description of Artificial Sequence: Synthetic oligonucleotide
  Antisense strand to SEQ ID NO: 2133374
caauucagaggauaccuuu

SEQ ID NO: 2133376 - RNA, 19 nt, Artificial Sequence
  Description of Artificial Sequence: Synthetic oligonucleotide
  Sense strand starting at position 3498 of SEQ ID NO: 1882594
ugaauugucuuucccuaug

SEQ ID NO: 2133377 - RNA, 19 nt, Artificial Sequence
  Description of Artificial Sequence: Synthetic oligonucleotide
  Antisense strand to SEQ ID NO: 2133376
cauagggaaagacaauuca

SEQ ID NO: 2133378 - RNA, 19 nt, Artificial Sequence
  Description of Artificial Sequence: Synthetic oligonucleotide
  Sense strand starting at position 3501 of SEQ ID NO: 1882594
auugucuuucccuauguga

SEQ ID NO: 2133379 - RNA, 19 nt, Artificial Sequence
  Description of Artificial Sequence: Synthetic oligonucleotide
  Antisense strand to SEQ ID NO: 2133378
ucacauagggaaagacaau

SEQ ID NO: 2133380 - RNA, 19 nt, Artificial Sequence
  Description of Artificial Sequence: Synthetic oligonucleotide
  Sense strand starting at position 3570 of SEQ ID NO: 1882594
ugcacauggcuuuagagau

SEQ ID NO: 2133381 - RNA, 19 nt, Artificial Sequence
  Description of Artificial Sequence: Synthetic oligonucleotide
  Antisense strand to SEQ ID NO: 2133380
aucucuaaagccaugugca

SEQ ID NO: 2133382 - RNA, 19 nt, Artificial Sequence
  Description of Artificial Sequence: Synthetic oligonucleotide
  Sense strand starting at position 3576 of SEQ ID NO: 1882594
uggcuuuagagauguucca

SEQ ID NO: 2133383 - RNA, 19 nt, Artificial Sequence
  Description of Artificial Sequence: Synthetic oligonucleotide
  Antisense strand to SEQ ID NO: 2133382
uggaacaucucuaaagcca

SEQ ID NO: 2133384 - RNA, 19 nt, Artificial Sequence
  Description of Artificial Sequence: Synthetic oligonucleotide
  Sense strand starting at position 175 of SEQ ID NO: 1882595
ugagguaaauuauuacaug

SEQ ID NO: 2133385 - RNA, 19 nt, Artificial Sequence
  Description of Artificial Sequence: Synthetic oligonucleotide
  Antisense strand to SEQ ID NO: 2133384
cauguaauaauuuaccuca

SEQ ID NO: 2133386 - RNA, 19 nt, Artificial Sequence
  Description of Artificial Sequence: Synthetic oligonucleotide
  Sense strand starting at position 248 of SEQ ID NO: 1882595
guacuccacuguuuaauaa

SEQ ID NO: 2133387 - RNA, 19 nt, Artificial Sequence
  Description of Artificial Sequence: Synthetic oligonucleotide
  Antisense strand to SEQ ID NO: 2133386
uuauuaaacaguggaguac

SEQ ID NO: 2133388 - RNA, 19 nt, Artificial Sequence
  Description of Artificial Sequence: Synthetic oligonucleotide
  Sense strand starting at position 396 of SEQ ID NO: 1882595
aagaaaccguaaguauaau

SEQ ID NO: 2133389 - RNA, 19 nt, Artificial Sequence
  Description of Artificial Sequence: Synthetic oligonucleotide
  Antisense strand to SEQ ID NO: 2133388
auuauacuuacgguuucuu

SEQ ID NO: 2133390 - RNA, 19 nt, Artificial Sequence
  Description of Artificial Sequence: Synthetic oligonucleotide
  Sense strand starting at position 589 of SEQ ID NO: 1882595
augauauugacaggaguuc

SEQ ID NO: 2133391 - RNA, 19 nt, Artificial Sequence
  Description of Artificial Sequence: Synthetic oligonucleotide
  Antisense strand to SEQ ID NO: 2133390
gaacuccugucaauaucau

SEQ ID NO: 2133392 - RNA, 19 nt, Artificial Sequence
  Description of Artificial Sequence: Synthetic oligonucleotide
  Sense strand starting at position 709 of SEQ ID NO: 1882595
augcaaacacuggguuaaa

SEQ ID NO: 2133393 - RNA, 19 nt, Artificial Sequence
  Description of Artificial Sequence: Synthetic oligonucleotide
  Antisense strand to SEQ ID NO: 2133392
uuuaacccaguguuugcau

SEQ ID NO: 2133394 - RNA, 19 nt, Artificial Sequence
  Description of Artificial Sequence: Synthetic oligonucleotide
  Sense strand starting at position 966 of SEQ ID NO: 1882595
ggcuuacuccucuagacaa

SEQ ID NO: 2133395 - RNA, 19 nt, Artificial Sequence
  Description of Artificial Sequence: Synthetic oligonucleotide
  Antisense strand to SEQ ID NO: 2133394
uugucuagaggaguaagcc

SEQ ID NO: 2133396 - RNA, 19 nt, Artificial Sequence
  Description of Artificial Sequence: Synthetic oligonucleotide
  Sense strand starting at position 1024 of SEQ ID NO: 1882595
ucgguauucccuuugcagu

SEQ ID NO: 2133397 - RNA, 19 nt, Artificial Sequence
  Description of Artificial Sequence: Synthetic oligonucleotide
  Antisense strand to SEQ ID NO: 2133396
acugcaaagggaauaccga

SEQ ID NO: 2133398 - RNA, 19 nt, Artificial Sequence
  Description of Artificial Sequence: Synthetic oligonucleotide
  Sense strand starting at position 1040 of SEQ ID NO: 1882595
agugcucagagugaguaau

SEQ ID NO: 2133399 - RNA, 19 nt, Artificial Sequence
  Description of Artificial Sequence: Synthetic oligonucleotide
  Antisense strand to SEQ ID NO: 2133398
auuacucacucugagcacu

SEQ ID NO: 2133400 - RNA, 19 nt, Artificial Sequence
  Description of Artificial Sequence: Synthetic oligonucleotide
  Sense strand starting at position 1051 of SEQ ID NO: 1882595
ugaguaauucgugcggcca

SEQ ID NO: 2133401 - RNA, 19 nt, Artificial Sequence
  Description of Artificial Sequence: Synthetic oligonucleotide
  Antisense strand to SEQ ID NO: 2133400
uggccgcacgaauuacuca

SEQ ID NO: 2133402 - RNA, 19 nt, Artificial Sequence
  Description of Artificial Sequence: Synthetic oligonucleotide
  Sense strand starting at position 1097 of SEQ ID NO: 1882595
gaacaaagaucguuggaac

SEQ ID NO: 2133403 - RNA, 19 nt, Artificial Sequence
  Description of Artificial Sequence: Synthetic oligonucleotide
  Antisense strand to SEQ ID NO: 2133402
guuccaacgaucuuuguuc

SEQ ID NO: 2133404 - RNA, 19 nt, Artificial Sequence
  Description of Artificial Sequence: Synthetic oligonucleotide
  Sense strand starting at position 1098 of SEQ ID NO: 1882595
aacaaagaucguuggaacu

SEQ ID NO: 2133405 - RNA, 19 nt, Artificial Sequence
  Description of Artificial Sequence: Synthetic oligonucleotide
  Antisense strand to SEQ ID NO: 2133404
aguuccaacgaucuuuguu

SEQ ID NO: 2133406 - RNA, 19 nt, Artificial Sequence
  Description of Artificial Sequence: Synthetic oligonucleotide
  Sense strand starting at position 1148 of SEQ ID NO: 1882595
aucccuugaaaucguggaa

SEQ ID NO: 2133407 - RNA, 19 nt, Artificial Sequence
  Description of Artificial Sequence: Synthetic oligonucleotide
  Antisense strand to SEQ ID NO: 2133406
uuccacgauuucaagggau

SEQ ID NO: 2133408 - RNA, 19 nt, Artificial Sequence
  Description of Artificial Sequence: Synthetic oligonucleotide
  Sense strand starting at position 1151 of SEQ ID NO: 1882595
ccuugaaaucguggaagua

SEQ ID NO: 2133409 - RNA, 19 nt, Artificial Sequence
  Description of Artificial Sequence: Synthetic oligonucleotide
  Antisense strand to SEQ ID NO: 2133408
uacuuccacgauuucaagg

SEQ ID NO: 2133410 - RNA, 19 nt, Artificial Sequence
  Description of Artificial Sequence: Synthetic oligonucleotide
  Sense strand starting at position 1152 of SEQ ID NO: 1882595
cuugaaaucguggaaguau

SEQ ID NO: 2133411 - RNA, 19 nt, Artificial Sequence
  Description of Artificial Sequence: Synthetic oligonucleotide
  Antisense strand to SEQ ID NO: 2133410
auacuuccacgauuucaag

SEQ ID NO: 2133412 - RNA, 19 nt, Artificial Sequence
  Description of Artificial Sequence: Synthetic oligonucleotide
  Sense strand starting at position 1514 of SEQ ID NO: 1882595
cggagaucgagccauuaca

SEQ ID NO: 2133413 - RNA, 19 nt, Artificial Sequence
  Description of Artificial Sequence: Synthetic oligonucleotide
  Antisense strand to SEQ ID NO: 2133412
uguaauggcucgaucuccg

SEQ ID NO: 2133414 - RNA, 19 nt, Artificial Sequence
  Description of Artificial Sequence: Synthetic oligonucleotide
  Sense strand starting at position 1738 of SEQ ID NO: 1882595
gaugguuuauaggcuuaaa

SEQ ID NO: 2133415 - RNA, 19 nt, Artificial Sequence
  Description of Artificial Sequence: Synthetic oligonucleotide
  Antisense strand to SEQ ID NO: 2133414
uuuaagccuauaaaccauc

SEQ ID NO: 2133416 - RNA, 19 nt, Artificial Sequence
  Description of Artificial Sequence: Synthetic oligonucleotide
  Sense strand starting at position 1790 of SEQ ID NO: 1882595
aucaguuuccuccagaugu

SEQ ID NO: 2133417 - RNA, 19 nt, Artificial Sequence
  Description of Artificial Sequence: Synthetic oligonucleotide
  Antisense strand to SEQ ID NO: 2133416
acaucuggaggaaacugau

SEQ ID NO: 2133418 - RNA, 19 nt, Artificial Sequence
  Description of Artificial Sequence: Synthetic oligonucleotide
  Sense strand starting at position 1905 of SEQ ID NO: 1882595
ugguccucgcuggagaaau

SEQ ID NO: 2133419 - RNA, 19 nt, Artificial Sequence
  Description of Artificial Sequence: Synthetic oligonucleotide
  Antisense strand to SEQ ID NO: 2133418
auuucuccagcgaggacca

SEQ ID NO: 2133420 - RNA, 19 nt, Artificial Sequence
  Description of Artificial Sequence: Synthetic oligonucleotide
  Sense strand starting at position 2031 of SEQ ID NO: 1882595
ggcgucguucccagggaua

SEQ ID NO: 2133421 - RNA, 19 nt, Artificial Sequence
  Description of Artificial Sequence: Synthetic oligonucleotide
  Antisense strand to SEQ ID NO: 2133420
uaucccugggaacgacgcc

SEQ ID NO: 2133422 - RNA, 19 nt, Artificial Sequence
  Description of Artificial Sequence: Synthetic oligonucleotide
  Sense strand starting at position 2138 of SEQ ID NO: 1882595
cgaggucucgccucuggua

SEQ ID NO: 2133423 - RNA, 19 nt, Artificial Sequence
  Description of Artificial Sequence: Synthetic oligonucleotide
  Antisense strand to SEQ ID NO: 2133422
uaccagaggcgagaccucg

SEQ ID NO: 2133424 - RNA, 19 nt, Artificial Sequence
  Description of Artificial Sequence: Synthetic oligonucleotide
  Sense strand starting at position 2462 of SEQ ID NO: 1882595
gccucaguugaagagugaa

SEQ ID NO: 2133425 - RNA, 19 nt, Artificial Sequence
  Description of Artificial Sequence: Synthetic oligonucleotide
  Antisense strand to SEQ ID NO: 2133424
uucacucuucaacugaggc

SEQ ID NO: 2133426 - RNA, 19 nt, Artificial Sequence
  Description of Artificial Sequence: Synthetic oligonucleotide
  Sense strand starting at position 2773 of SEQ ID NO: 1882595
ggccucagaguguaggaua

SEQ ID NO: 2133427 - RNA, 19 nt, Artificial Sequence
  Description of Artificial Sequence: Synthetic oligonucleotide
  Antisense strand to SEQ ID NO: 2133426
uauccuacacucugaggcc

SEQ ID NO: 2133428 - RNA, 19 nt, Artificial Sequence
  Description of Artificial Sequence: Synthetic oligonucleotide
  Sense strand starting at position 2784 of SEQ ID NO: 1882595
guaggauauacuggcacuu

SEQ ID NO: 2133429 - RNA, 19 nt, Artificial Sequence
  Description of Artificial Sequence: Synthetic oligonucleotide
  Antisense strand to SEQ ID NO: 2133428
aagugccaguauauccuac

SEQ ID NO: 2133430 - RNA, 19 nt, Artificial Sequence
  Description of Artificial Sequence: Synthetic oligonucleotide
  Sense strand starting at position 2841 of SEQ ID NO: 1882595
agaaguaaauuggucacau

SEQ ID NO: 2133431 - RNA, 19 nt, Artificial Sequence
  Description of Artificial Sequence: Synthetic oligonucleotide
  Antisense strand to SEQ ID NO: 2133430
augugaccaauuuacuucu

SEQ ID NO: 2133432 - RNA, 19 nt, Artificial Sequence
  Description of Artificial Sequence: Synthetic oligonucleotide
  Sense strand starting at position 2842 of SEQ ID NO: 1882595
gaaguaaauuggucacauc

SEQ ID NO: 2133433 - RNA, 19 nt, Artificial Sequence
  Description of Artificial Sequence: Synthetic oligonucleotide
  Antisense strand to SEQ ID NO: 2133432
gaugugaccaauuuacuuc

SEQ ID NO: 2133434 - RNA, 19 nt, Artificial Sequence
  Description of Artificial Sequence: Synthetic oligonucleotide
  Sense strand starting at position 2941 of SEQ ID NO: 1882595
acaccaugugaugguauca

SEQ ID NO: 2133435 - RNA, 19 nt, Artificial Sequence
  Description of Artificial Sequence: Synthetic oligonucleotide
  Antisense strand to SEQ ID NO: 2133434
ugauaccaucacauggugu

SEQ ID NO: 2133436 - RNA, 19 nt, Artificial Sequence
  Description of Artificial Sequence: Synthetic oligonucleotide
  Sense strand starting at position 3015 of SEQ ID NO: 1882595
guuuccagucuagaucaau

SEQ ID NO: 2133437 - RNA, 19 nt, Artificial Sequence
  Description of Artificial Sequence: Synthetic oligonucleotide
  Antisense strand to SEQ ID NO: 2133436
auugaucuagacuggaaac

SEQ ID NO: 2133438 - RNA, 19 nt, Artificial Sequence
  Description of Artificial Sequence: Synthetic oligonucleotide
  Sense strand starting at position 3043 of SEQ ID NO: 1882595
caugguuauguccaggcua

SEQ ID NO: 2133439 - RNA, 19 nt, Artificial Sequence
  Description of Artificial Sequence: Synthetic oligonucleotide
  Antisense strand to SEQ ID NO: 2133438
uagccuggacauaaccaug

SEQ ID NO: 2133440 - RNA, 19 nt, Artificial Sequence
  Description of Artificial Sequence: Synthetic oligonucleotide
  Sense strand starting at position 3076 of SEQ ID NO: 1882595
acugaugagugguucaaug

SEQ ID NO: 2133441 - RNA, 19 nt, Artificial Sequence
  Description of Artificial Sequence: Synthetic oligonucleotide
  Antisense strand to SEQ ID NO: 2133440
cauugaaccacucaucagu

SEQ ID NO: 2133442 - RNA, 19 nt, Artificial Sequence
  Description of Artificial Sequence: Synthetic oligonucleotide
  Sense strand starting at position 3078 of SEQ ID NO: 1882595
ugaugagugguucaauguc

SEQ ID NO: 2133443 - RNA, 19 nt, Artificial Sequence
  Description of Artificial Sequence: Synthetic oligonucleotide
  Antisense strand to SEQ ID NO: 2133442
gacauugaaccacucauca

SEQ ID NO: 2133444 - RNA, 19 nt, Artificial Sequence
  Description of Artificial Sequence: Synthetic oligonucleotide
  Sense strand starting at position 3244 of SEQ ID NO: 1882595
auguaacuccaugaaaugu

SEQ ID NO: 2133445 - RNA, 19 nt, Artificial Sequence
  Description of Artificial Sequence: Synthetic oligonucleotide
  Antisense strand to SEQ ID NO: 2133444
acauuucauggaguuacau

SEQ ID NO: 2133446 - RNA, 19 nt, Artificial Sequence
  Description of Artificial Sequence: Synthetic oligonucleotide
  Sense strand starting at position 3390 of SEQ ID NO: 1882595
uagaguuaccagcaaugug

SEQ ID NO: 2133447 - RNA, 19 nt, Artificial Sequence
  Description of Artificial Sequence: Synthetic oligonucleotide
  Antisense strand to SEQ ID NO: 2133446
cacauugcugguaacucua

SEQ ID NO: 2133448 - RNA, 19 nt, Artificial Sequence
  Description of Artificial Sequence: Synthetic oligonucleotide
  Sense strand starting at position 3423 of SEQ ID NO: 1882595
aaauuaacagaugguugua

SEQ ID NO: 2133449 - RNA, 19 nt, Artificial Sequence
  Description of Artificial Sequence: Synthetic oligonucleotide
  Antisense strand to SEQ ID NO: 2133448
uacaaccaucuguuaauuu

SEQ ID NO: 2133450 - RNA, 19 nt, Artificial Sequence
  Description of Artificial Sequence: Synthetic oligonucleotide
  Sense strand starting at position 3425 of SEQ ID NO: 1882595
auuaacagaugguuguauu

SEQ ID NO: 2133451 - RNA, 19 nt, Artificial Sequence
  Description of Artificial Sequence: Synthetic oligonucleotide
  Antisense strand to SEQ ID NO: 2133450
aauacaaccaucuguuaau

SEQ ID NO: 2133452 - RNA, 19 nt, Artificial Sequence
  Description of Artificial Sequence: Synthetic oligonucleotide
  Sense strand starting at position 3464 of SEQ ID NO: 1882595
ugagauagccauuagugau

SEQ ID NO: 2133453 - RNA, 19 nt, Artificial Sequence
  Description of Artificial Sequence: Synthetic oligonucleotide
  Antisense strand to SEQ ID NO: 2133452
aucacuaauggcuaucuca

SEQ ID NO: 2133454 - RNA, 19 nt, Artificial Sequence
  Description of Artificial Sequence: Synthetic oligonucleotide
  Sense strand starting at position 3679 of SEQ ID NO: 1882595
ggaauuagauccuauuuau

SEQ ID NO: 2133455 - RNA, 19 nt, Artificial Sequence
  Description of Artificial Sequence: Synthetic oligonucleotide
  Antisense strand to SEQ ID NO: 2133454
auaaauaggaucuaauucc

SEQ ID NO: 2133456 - RNA, 19 nt, Artificial Sequence
  Description of Artificial Sequence: Synthetic oligonucleotide
  Sense strand starting at position 3789 of SEQ ID NO: 1882595
cauugaaaccacugagagu

SEQ ID NO: 2133457 - RNA, 19 nt, Artificial Sequence
  Description of Artificial Sequence: Synthetic oligonucleotide
  Antisense strand to SEQ ID NO: 2133456
acucucagugguuucaaug

SEQ ID NO: 2133458 - RNA, 19 nt, Artificial Sequence
  Description of Artificial Sequence: Synthetic oligonucleotide
  Sense strand starting at position 3842 of SEQ ID NO: 1882595
gacuguccuggguguauuu

SEQ ID NO: 2133459 - RNA, 19 nt, Artificial Sequence
  Description of Artificial Sequence: Synthetic oligonucleotide
  Antisense strand to SEQ ID NO: 2133458
aaauacacccaggacaguc

SEQ ID NO: 2133460 - RNA, 19 nt, Artificial Sequence
  Description of Artificial Sequence: Synthetic oligonucleotide
  Sense strand starting at position 3878 of SEQ ID NO: 1882595
ccugucucacacuacagau

SEQ ID NO: 2133461 - RNA, 19 nt, Artificial Sequence
  Description of Artificial Sequence: Synthetic oligonucleotide
  Antisense strand to SEQ ID NO: 2133460
aucuguagugugagacagg

SEQ ID NO: 2133462 - RNA, 19 nt, Artificial Sequence
  Description of Artificial Sequence: Synthetic oligonucleotide
  Sense strand starting at position 3953 of SEQ ID NO: 1882595
agccuucuacgggagaaua

SEQ ID NO: 2133463 - RNA, 19 nt, Artificial Sequence
  Description of Artificial Sequence: Synthetic oligonucleotide
  Antisense strand to SEQ ID NO: 2133462
uauucucccguagaaggcu

SEQ ID NO: 2133464 - RNA, 19 nt, Artificial Sequence
  Description of Artificial Sequence: Synthetic oligonucleotide
  Sense strand starting at position 252 of SEQ ID NO: 1882596
cugacauugagguggauau

SEQ ID NO: 2133465 - RNA, 19 nt, Artificial Sequence
  Description of Artificial Sequence: Synthetic oligonucleotide
  Antisense strand to SEQ ID NO: 2133464
auauccaccucaaugucag

SEQ ID NO: 2133466 - RNA, 19 nt, Artificial Sequence
  Description of Artificial Sequence: Synthetic oligonucleotide
  Sense strand starting at position 299 of SEQ ID NO: 1882596
uaagguaaaugcucagagu

SEQ ID NO: 2133467 - RNA, 19 nt, Artificial Sequence
  Description of Artificial Sequence: Synthetic oligonucleotide
  Antisense strand to SEQ ID NO: 2133466
acucugagcauuuaccuua

SEQ ID NO: 2133468 - RNA, 19 nt, Artificial Sequence
  Description of Artificial Sequence: Synthetic oligonucleotide
  Sense strand starting at position 315 of SEQ ID NO: 1882596
aguaaacugccagauaucu

SEQ ID NO: 2133469 - RNA, 19 nt, Artificial Sequence
  Description of Artificial Sequence: Synthetic oligonucleotide
  Antisense strand to SEQ ID NO: 2133468
agauaucuggcaguuuacu

SEQ ID NO: 2133470 - RNA, 19 nt, Artificial Sequence
  Description of Artificial Sequence: Synthetic oligonucleotide
  Sense strand starting at position 350 of SEQ ID NO: 1882596
ucaggucccugccuaagau

SEQ ID NO: 2133471 - RNA, 19 nt, Artificial Sequence
  Description of Artificial Sequence: Synthetic oligonucleotide
  Antisense strand to SEQ ID NO: 2133470
aucuuaggcagggaccuga

SEQ ID NO: 2133472 - RNA, 19 nt, Artificial Sequence
  Description of Artificial Sequence: Synthetic oligonucleotide
  Sense strand starting at position 351 of SEQ ID NO: 1882596
caggucccugccuaagaua

SEQ ID NO: 2133473 - RNA, 19 nt, Artificial Sequence
  Description of Artificial Sequence: Synthetic oligonucleotide
  Antisense strand to SEQ ID NO: 2133472
uaucuuaggcagggaccug

SEQ ID NO: 2133474 - RNA, 19 nt, Artificial Sequence
  Description of Artificial Sequence: Synthetic oligonucleotide
  Sense strand starting at position 402 of SEQ ID NO: 1882596
ggccaaggauaucccuuau

SEQ ID NO: 2133475 - RNA, 19 nt, Artificial Sequence
  Description of Artificial Sequence: Synthetic oligonucleotide
  Antisense strand to SEQ ID NO: 2133474
auaagggauauccuuggcc

SEQ ID NO: 2133476 - RNA, 19 nt, Artificial Sequence
  Description of Artificial Sequence: Synthetic oligonucleotide
  Sense strand starting at position 492 of SEQ ID NO: 1882596
auaucaaggucuucugaau

SEQ ID NO: 2133477 - RNA, 19 nt, Artificial Sequence
  Description of Artificial Sequence: Synthetic oligonucleotide
  Antisense strand to SEQ ID NO: 2133476
auucagaagaccuugauau

SEQ ID NO: 2133478 - RNA, 19 nt, Artificial Sequence
  Description of Artificial Sequence: Synthetic oligonucleotide
  Sense strand starting at position 1130 of SEQ ID NO: 1882596
cgcagugaccguuccuaua

SEQ ID NO: 2133479 - RNA, 19 nt, Artificial Sequence
  Description of Artificial Sequence: Synthetic oligonucleotide
  Antisense strand to SEQ ID NO: 2133478
uauaggaacggucacugcg

SEQ ID NO: 2133480 - RNA, 19 nt, Artificial Sequence
  Description of Artificial Sequence: Synthetic oligonucleotide
  Sense strand starting at position 1132 of SEQ ID NO: 1882596
cagugaccguuccuauaaa

SEQ ID NO: 2133481 - RNA, 19 nt, Artificial Sequence
  Description of Artificial Sequence: Synthetic oligonucleotide
  Antisense strand to SEQ ID NO: 2133480
uuuauaggaacggucacug

SEQ ID NO: 2133482 - RNA, 19 nt, Artificial Sequence
  Description of Artificial Sequence: Synthetic oligonucleotide
  Sense strand starting at position 1311 of SEQ ID NO: 1882596
augauugugucacuuucca

SEQ ID NO: 2133483 - RNA, 19 nt, Artificial Sequence
  Description of Artificial Sequence: Synthetic oligonucleotide
  Antisense strand to SEQ ID NO: 2133482
uggaaagugacacaaucau

SEQ ID NO: 2133484 - RNA, 19 nt, Artificial Sequence
  Description of Artificial Sequence: Synthetic oligonucleotide
  Sense strand starting at position 1353 of SEQ ID NO: 1882596
gguaaagugucuuucccau

SEQ ID NO: 2133485 - RNA, 19 nt, Artificial Sequence
  Description of Artificial Sequence: Synthetic oligonucleotide
  Antisense strand to SEQ ID NO: 2133484
augggaaagacacuuuacc

SEQ ID NO: 2133486 - RNA, 19 nt, Artificial Sequence
  Description of Artificial Sequence: Synthetic oligonucleotide
  Sense strand starting at position 1359 of SEQ ID NO: 1882596
gugucuuucccaugaucac

SEQ ID NO: 2133487 - RNA, 19 nt, Artificial Sequence
  Description of Artificial Sequence: Synthetic oligonucleotide
  Antisense strand to SEQ ID NO: 2133486
gugaucaugggaaagacac

SEQ ID NO: 2133488 - RNA, 19 nt, Artificial Sequence
  Description of Artificial Sequence: Synthetic oligonucleotide
  Sense strand starting at position 1360 of SEQ ID NO: 1882596
ugucuuucccaugaucaca

SEQ ID NO: 2133489 - RNA, 19 nt, Artificial Sequence
  Description of Artificial Sequence: Synthetic oligonucleotide
  Antisense strand to SEQ ID NO: 2133488
ugugaucaugggaaagaca

SEQ ID NO: 2133490 - RNA, 19 nt, Artificial Sequence
  Description of Artificial Sequence: Synthetic oligonucleotide
  Sense strand starting at position 2015 of SEQ ID NO: 1882596
ccuaaaucagccugucaag

SEQ ID NO: 2133491 - RNA, 19 nt, Artificial Sequence
  Description of Artificial Sequence: Synthetic oligonucleotide
  Antisense strand to SEQ ID NO: 2133490
cuugacaggcugauuuagg

SEQ ID NO: 2133492 - RNA, 19 nt, Artificial Sequence
  Description of Artificial Sequence: Synthetic oligonucleotide
  Sense strand starting at position 2050 of SEQ ID NO: 1882596
ggguaucuuccaggaacag

SEQ ID NO: 2133493 - RNA, 19 nt, Artificial Sequence
  Description of Artificial Sequence: Synthetic oligonucleotide
  Antisense strand to SEQ ID NO: 2133492
cuguuccuggaagauaccc

SEQ ID NO: 2133494 - RNA, 19 nt, Artificial Sequence
  Description of Artificial Sequence: Synthetic oligonucleotide
  Sense strand starting at position 2065 of SEQ ID NO: 1882596
acagaugaagguugcgaaa

SEQ ID NO: 2133495 - RNA, 19 nt, Artificial Sequence
  Description of Artificial Sequence: Synthetic oligonucleotide
  Antisense strand to SEQ ID NO: 2133494
uuucgcaaccuucaucugu

SEQ ID NO: 2133496 - RNA, 19 nt, Artificial Sequence
  Description of Artificial Sequence: Synthetic oligonucleotide
  Sense strand starting at position 2109 of SEQ ID NO: 1882596
gcaguuaucccguuagcca

SEQ ID NO: 2133497 - RNA, 19 nt, Artificial Sequence
  Description of Artificial Sequence: Synthetic oligonucleotide
  Antisense strand to SEQ ID NO: 2133496
uggcuaacgggauaacugc

SEQ ID NO: 2133498 - RNA, 19 nt, Artificial Sequence
  Description of Artificial Sequence: Synthetic oligonucleotide
  Sense strand starting at position 2196 of SEQ ID NO: 1882596
cugggccuuccagaaaguu

SEQ ID NO: 2133499 - RNA, 19 nt, Artificial Sequence
  Description of Artificial Sequence: Synthetic oligonucleotide
  Antisense strand to SEQ ID NO: 2133498
aacuuucuggaaggcccag

SEQ ID NO: 2133500 - RNA, 19 nt, Artificial Sequence
  Description of Artificial Sequence: Synthetic oligonucleotide
  Sense strand starting at position 2220 of SEQ ID NO: 1882596
gccucugauugguccuaga

SEQ ID NO: 2133501 - RNA, 19 nt, Artificial Sequence
  Description of Artificial Sequence: Synthetic oligonucleotide
  Antisense strand to SEQ ID NO: 2133500
ucuaggaccaaucagaggc

SEQ ID NO: 2133502 - RNA, 19 nt, Artificial Sequence
  Description of Artificial Sequence: Synthetic oligonucleotide
  Sense strand starting at position 2310 of SEQ ID NO: 1882596
ggaggaaagucguugauga

SEQ ID NO: 2133503 - RNA, 19 nt, Artificial Sequence
  Description of Artificial Sequence: Synthetic oligonucleotide
  Antisense strand to SEQ ID NO: 2133502
ucaucaacgacuuuccucc

SEQ ID NO: 2133504 - RNA, 19 nt, Artificial Sequence
  Description of Artificial Sequence: Synthetic oligonucleotide
  Sense strand starting at position 2311 of SEQ ID NO: 1882596
gaggaaagucguugaugau

SEQ ID NO: 2133505 - RNA, 19 nt, Artificial Sequence
  Description of Artificial Sequence: Synthetic oligonucleotide
  Antisense strand to SEQ ID NO: 2133504
aucaucaacgacuuuccuc

SEQ ID NO: 2133506 - RNA, 19 nt, Artificial Sequence
  Description of Artificial Sequence: Synthetic oligonucleotide
  Sense strand starting at position 2312 of SEQ ID NO: 1882596
aggaaagucguugaugaug

SEQ ID NO: 2133507 - RNA, 19 nt, Artificial Sequence
  Description of Artificial Sequence: Synthetic oligonucleotide
  Antisense strand to SEQ ID NO: 2133506
caucaucaacgacuuuccu

SEQ ID NO: 2133508 - RNA, 19 nt, Artificial Sequence
  Description of Artificial Sequence: Synthetic oligonucleotide
  Sense strand starting at position 2590 of SEQ ID NO: 1882596
agugccauccuaugacuuu

SEQ ID NO: 2133509 - RNA, 19 nt, Artificial Sequence
  Description of Artificial Sequence: Synthetic oligonucleotide
  Antisense strand to SEQ ID NO: 2133508
aaagucauaggauggcacu

SEQ ID NO: 2133510 - RNA, 19 nt, Artificial Sequence
  Description of Artificial Sequence: Synthetic oligonucleotide
  Sense strand starting at position 2797 of SEQ ID NO: 1882596
gagaaaguugcugagcaga

SEQ ID NO: 2133511 - RNA, 19 nt, Artificial Sequence
  Description of Artificial Sequence: Synthetic oligonucleotide
  Antisense strand to SEQ ID NO: 2133510
ucugcucagcaacuuucuc

SEQ ID NO: 2133512 - RNA, 19 nt, Artificial Sequence
  Description of Artificial Sequence: Synthetic oligonucleotide
  Sense strand starting at position 2810 of SEQ ID NO: 1882596
agcagaugagaaugcucuu

SEQ ID NO: 2133513 - RNA, 19 nt, Artificial Sequence
  Description of Artificial Sequence: Synthetic oligonucleotide
  Antisense strand to SEQ ID NO: 2133512
aagagcauucucaucugcu

SEQ ID NO: 2133514 - RNA, 19 nt, Artificial Sequence
  Description of Artificial Sequence: Synthetic oligonucleotide
  Sense strand starting at position 2817 of SEQ ID NO: 1882596
gagaaugcucuuggccaau

SEQ ID NO: 2133515 - RNA, 19 nt, Artificial Sequence
  Description of Artificial Sequence: Synthetic oligonucleotide
  Antisense strand to SEQ ID NO: 2133514
auuggccaagagcauucuc

SEQ ID NO: 2133516 - RNA, 19 nt, Artificial Sequence
  Description of Artificial Sequence: Synthetic oligonucleotide
  Sense strand starting at position 2823 of SEQ ID NO: 1882596
gcucuuggccaauggaaga

SEQ ID NO: 2133517 - RNA, 19 nt, Artificial Sequence
  Description of Artificial Sequence: Synthetic oligonucleotide
  Antisense strand to SEQ ID NO: 2133516
ucuuccauuggccaagagc

SEQ ID NO: 2133518 - RNA, 19 nt, Artificial Sequence
  Description of Artificial Sequence: Synthetic oligonucleotide
  Sense strand starting at position 2900 of SEQ ID NO: 1882596
uuugaaagaccuuguucug

SEQ ID NO: 2133519 - RNA, 19 nt, Artificial Sequence
  Description of Artificial Sequence: Synthetic oligonucleotide
  Antisense strand to SEQ ID NO: 2133518
cagaacaaggucuuucaaa

SEQ ID NO: 2133520 - RNA, 19 nt, Artificial Sequence
  Description of Artificial Sequence: Synthetic oligonucleotide
  Sense strand starting at position 2903 of SEQ ID NO: 1882596
gaaagaccuuguucugaaa

SEQ ID NO: 2133521 - RNA, 19 nt, Artificial Sequence
  Description of Artificial Sequence: Synthetic oligonucleotide
  Antisense strand to SEQ ID NO: 2133520
uuucagaacaaggucuuuc

SEQ ID NO: 2133522 - RNA, 19 nt, Artificial Sequence
  Description of Artificial Sequence: Synthetic oligonucleotide
  Sense strand starting at position 3252 of SEQ ID NO: 1882596
cugucauggcaauaaugaa

SEQ ID NO: 2133523 - RNA, 19 nt, Artificial Sequence
  Description of Artificial Sequence: Synthetic oligonucleotide
  Antisense strand to SEQ ID NO: 2133522
uucauuauugccaugacag

SEQ ID NO: 2133524 - RNA, 19 nt, Artificial Sequence
  Description of Artificial Sequence: Synthetic oligonucleotide
  Sense strand starting at position 3562 of SEQ ID NO: 1882596
ucuuuauagcagugauaga

SEQ ID NO: 2133525 - RNA, 19 nt, Artificial Sequence
  Description of Artificial Sequence: Synthetic oligonucleotide
  Antisense strand to SEQ ID NO: 2133524
ucuaucacugcuauaaaga

SEQ ID NO: 2133526 - RNA, 19 nt, Artificial Sequence
  Description of Artificial Sequence: Synthetic oligonucleotide
  Sense strand starting at position 3683 of SEQ ID NO: 1882596
uguaaacggagucauacaa

SEQ ID NO: 2133527 - RNA, 19 nt, Artificial Sequence
  Description of Artificial Sequence: Synthetic oligonucleotide
  Antisense strand to SEQ ID NO: 2133526
uuguaugacuccguuuaca

SEQ ID NO: 2133528 - RNA, 19 nt, Artificial Sequence
  Description of Artificial Sequence: Synthetic oligonucleotide
  Sense strand starting at position 3748 of SEQ ID NO: 1882596
caaggcucaugaguaucau

SEQ ID NO: 2133529 - RNA, 19 nt, Artificial Sequence
  Description of Artificial Sequence: Synthetic oligonucleotide
  Antisense strand to SEQ ID NO: 2133528
augauacucaugagccuug

SEQ ID NO: 2133530 - RNA, 19 nt, Artificial Sequence
  Description of Artificial Sequence: Synthetic oligonucleotide
  Sense strand starting at position 3749 of SEQ ID NO: 1882596
aaggcucaugaguaucaua

SEQ ID NO: 2133531 - RNA, 19 nt, Artificial Sequence
  Description of Artificial Sequence: Synthetic oligonucleotide
  Antisense strand to SEQ ID NO: 2133530
uaugauacucaugagccuu

SEQ ID NO: 2133532 - RNA, 19 nt, Artificial Sequence
  Description of Artificial Sequence: Synthetic oligonucleotide
  Sense strand starting at position 3821 of SEQ ID NO: 1882596
accauauauuguguaucca

SEQ ID NO: 2133533 - RNA, 19 nt, Artificial Sequence
  Description of Artificial Sequence: Synthetic oligonucleotide
  Antisense strand to SEQ ID NO: 2133532
uggauacacaauauauggu

SEQ ID NO: 2133534 - RNA, 19 nt, Artificial Sequence
  Description of Artificial Sequence: Synthetic oligonucleotide
  Sense strand starting at position 3822 of SEQ ID NO: 1882596
ccauauauuguguauccaa

SEQ ID NO: 2133535 - RNA, 19 nt, Artificial Sequence
  Description of Artificial Sequence: Synthetic oligonucleotide
  Antisense strand to SEQ ID NO: 2133534
uuggauacacaauauaugg

SEQ ID NO: 2133536 - RNA, 19 nt, Artificial Sequence
  Description of Artificial Sequence: Synthetic oligonucleotide
  Sense strand starting at position 3830 of SEQ ID NO: 1882596
uguguauccaauugaugga

SEQ ID NO: 2133537 - RNA, 19 nt, Artificial Sequence
  Description of Artificial Sequence: Synthetic oligonucleotide
  Antisense strand to SEQ ID NO: 2133536
uccaucaauuggauacaca

SEQ ID NO: 2133538 - RNA, 19 nt, Artificial Sequence
  Description of Artificial Sequence: Synthetic oligonucleotide
  Sense strand starting at position 3883 of SEQ ID NO: 1882596
auaauucugcuguggacau

SEQ ID NO: 2133539 - RNA, 19 nt, Artificial Sequence
  Description of Artificial Sequence: Synthetic oligonucleotide
  Antisense strand to SEQ ID NO: 2133538
auguccacagcagaauuau

SEQ ID NO: 2133540 - RNA, 19 nt, Artificial Sequence
  Description of Artificial Sequence: Synthetic oligonucleotide
  Sense strand starting at position 3932 of SEQ ID NO: 1882596
uccaguucugcuggauaug

SEQ ID NO: 2133541 - RNA, 19 nt, Artificial Sequence
  Description of Artificial Sequence: Synthetic oligonucleotide
  Antisense strand to SEQ ID NO: 2133540
cauauccagcagaacugga

SEQ ID NO: 2133542 - RNA, 19 nt, Artificial Sequence
  Description of Artificial Sequence: Synthetic oligonucleotide
  Sense strand starting at position 3933 of SEQ ID NO: 1882596
ccaguucugcuggauaugu

SEQ ID NO: 2133543 - RNA, 19 nt, Artificial Sequence
  Description of Artificial Sequence: Synthetic oligonucleotide
  Antisense strand to SEQ ID NO: 2133542
acauauccagcagaacugg

SEQ ID NO: 2133544 - RNA, 19 nt, Artificial Sequence
  Description of Artificial Sequence: Synthetic oligonucleotide
  Sense strand starting at position 29 of SEQ ID NO: 1882597
agcuucucccucugagcua

SEQ ID NO: 2133545 - RNA, 19 nt, Artificial Sequence
  Description of Artificial Sequence: Synthetic oligonucleotide
  Antisense strand to SEQ ID NO: 2133544
uagcucagagggagaagcu

SEQ ID NO: 2133546 - RNA, 19 nt, Artificial Sequence
  Description of Artificial Sequence: Synthetic oligonucleotide
  Sense strand starting at position 152 of SEQ ID NO: 1882597
ccagaacgaccgugggaau

SEQ ID NO: 2133547 - RNA, 19 nt, Artificial Sequence
  Description of Artificial Sequence: Synthetic oligonucleotide
  Antisense strand to SEQ ID NO: 2133546
auucccacggucguucugg

SEQ ID NO: 2133548 - RNA, 19 nt, Artificial Sequence
  Description of Artificial Sequence: Synthetic oligonucleotide
  Sense strand starting at position 356 of SEQ ID NO: 1882597
gagcaaugaguccgagaga

SEQ ID NO: 2133549 - RNA, 19 nt, Artificial Sequence
  Description of Artificial Sequence: Synthetic oligonucleotide
  Antisense strand to SEQ ID NO: 2133548
ucucucggacucauugcuc

SEQ ID NO: 2133550 - RNA, 19 nt, Artificial Sequence
  Description of Artificial Sequence: Synthetic oligonucleotide
  Sense strand starting at position 384 of SEQ ID NO: 1882597
guguguagggcuggagauu

SEQ ID NO: 2133551 - RNA, 19 nt, Artificial Sequence
  Description of Artificial Sequence: Synthetic oligonucleotide
  Antisense strand to SEQ ID NO: 2133550
aaucuccagcccuacacac

SEQ ID NO: 2133552 - RNA, 19 nt, Artificial Sequence
  Description of Artificial Sequence: Synthetic oligonucleotide
  Sense strand starting at position 385 of SEQ ID NO: 1882597
uguguagggcuggagauua

SEQ ID NO: 2133553 - RNA, 19 nt, Artificial Sequence
  Description of Artificial Sequence: Synthetic oligonucleotide
  Antisense strand to SEQ ID NO: 2133552
uaaucuccagcccuacaca

SEQ ID NO: 2133554 - RNA, 19 nt, Artificial Sequence
  Description of Artificial Sequence: Synthetic oligonucleotide
  Sense strand starting at position 393 of SEQ ID NO: 1882597
gcuggagauuaccuaaaua

SEQ ID NO: 2133555 - RNA, 19 nt, Artificial Sequence
  Description of Artificial Sequence: Synthetic oligonucleotide
  Antisense strand to SEQ ID NO: 2133554
uauuuagguaaucuccagc

SEQ ID NO: 2133556 - RNA, 19 nt, Artificial Sequence
  Description of Artificial Sequence: Synthetic oligonucleotide
  Sense strand starting at position 460 of SEQ ID NO: 1882597
ggcauuugcagcugagaau

SEQ ID NO: 2133557 - RNA, 19 nt, Artificial Sequence
  Description of Artificial Sequence: Synthetic oligonucleotide
  Antisense strand to SEQ ID NO: 2133556
auucucagcugcaaaugcc

SEQ ID NO: 2133558 - RNA, 19 nt, Artificial Sequence
  Description of Artificial Sequence: Synthetic oligonucleotide
  Sense strand starting at position 510 of SEQ ID NO: 1882597
ggcggagaucuugacuuca

SEQ ID NO: 2133559 - RNA, 19 nt, Artificial Sequence
  Description of Artificial Sequence: Synthetic oligonucleotide
  Antisense strand to SEQ ID NO: 2133558
ugaagucaagaucuccgcc

SEQ ID NO: 2133560 - RNA, 19 nt, Artificial Sequence
  Description of Artificial Sequence: Synthetic oligonucleotide
  Sense strand starting at position 535 of SEQ ID NO: 1882597
accagaaauuggguuuaug

SEQ ID NO: 2133561 - RNA, 19 nt, Artificial Sequence
  Description of Artificial Sequence: Synthetic oligonucleotide
  Antisense strand to SEQ ID NO: 2133560
cauaaacccaauuucuggu

SEQ ID NO: 2133562 - RNA, 19 nt, Artificial Sequence
  Description of Artificial Sequence: Synthetic oligonucleotide
  Sense strand starting at position 546 of SEQ ID NO: 1882597
gguuuaugugaacgaugug

SEQ ID NO: 2133563 - RNA, 19 nt, Artificial Sequence
  Description of Artificial Sequence: Synthetic oligonucleotide
  Antisense strand to SEQ ID NO: 2133562
cacaucguucacauaaacc

SEQ ID NO: 2133564 - RNA, 19 nt, Artificial Sequence
  Description of Artificial Sequence: Synthetic oligonucleotide
  Sense strand starting at position 547 of SEQ ID NO: 1882597
guuuaugugaacgaugugu

SEQ ID NO: 2133565 - RNA, 19 nt, Artificial Sequence
  Description of Artificial Sequence: Synthetic oligonucleotide
  Antisense strand to SEQ ID NO: 2133564
acacaucguucacauaaac

SEQ ID NO: 2133566 - RNA, 19 nt, Artificial Sequence
  Description of Artificial Sequence: Synthetic oligonucleotide
  Sense strand starting at position 549 of SEQ ID NO: 1882597
uuaugugaacgauguguca

SEQ ID NO: 2133567 - RNA, 19 nt, Artificial Sequence
  Description of Artificial Sequence: Synthetic oligonucleotide
  Antisense strand to SEQ ID NO: 2133566
ugacacaucguucacauaa

SEQ ID NO: 2133568 - RNA, 19 nt, Artificial Sequence
  Description of Artificial Sequence: Synthetic oligonucleotide
  Sense strand starting at position 1009 of SEQ ID NO: 1882597
gugugaaugcguguguaag

SEQ ID NO: 2133569 - RNA, 19 nt, Artificial Sequence
  Description of Artificial Sequence: Synthetic oligonucleotide
  Antisense strand to SEQ ID NO: 2133568
cuuacacacgcauucacac

SEQ ID NO: 2133570 - RNA, 19 nt, Artificial Sequence
  Description of Artificial Sequence: Synthetic oligonucleotide
  Sense strand starting at position 1063 of SEQ ID NO: 1882597
agucaaagcuguuuccaca

SEQ ID NO: 2133571 - RNA, 19 nt, Artificial Sequence
  Description of Artificial Sequence: Synthetic oligonucleotide
  Antisense strand to SEQ ID NO: 2133570
uguggaaacagcuuugacu

SEQ ID NO: 2133572 - RNA, 19 nt, Artificial Sequence
  Description of Artificial Sequence: Synthetic oligonucleotide
  Sense strand starting at position 1239 of SEQ ID NO: 1882597
gggagagcuagucguguca

SEQ ID NO: 2133573 - RNA, 19 nt, Artificial Sequence
  Description of Artificial Sequence: Synthetic oligonucleotide
  Antisense strand to SEQ ID NO: 2133572
ugacacgacuagcucuccc

SEQ ID NO: 2133574 - RNA, 19 nt, Artificial Sequence
  Description of Artificial Sequence: Synthetic oligonucleotide
  Sense strand starting at position 2229 of SEQ ID NO: 1882597
gcucgauuuccaggcauuc

SEQ ID NO: 2133575 - RNA, 19 nt, Artificial Sequence
  Description of Artificial Sequence: Synthetic oligonucleotide
  Antisense strand to SEQ ID NO: 2133574
gaaugccuggaaaucgagc

SEQ ID NO: 2133576 - RNA, 19 nt, Artificial Sequence
  Description of Artificial Sequence: Synthetic oligonucleotide
  Sense strand starting at position 2252 of SEQ ID NO: 1882597
cuuauuaaguauucgugua

SEQ ID NO: 2133577 - RNA, 19 nt, Artificial Sequence
  Description of Artificial Sequence: Synthetic oligonucleotide
  Antisense strand to SEQ ID NO: 2133576
uacacgaauacuuaauaag

SEQ ID NO: 2133578 - RNA, 19 nt, Artificial Sequence
  Description of Artificial Sequence: Synthetic oligonucleotide
  Sense strand starting at position 2279 of SEQ ID NO: 1882597
agucaugaauaucugcuau

SEQ ID NO: 2133579 - RNA, 19 nt, Artificial Sequence
  Description of Artificial Sequence: Synthetic oligonucleotide
  Antisense strand to SEQ ID NO: 2133578
auagcagauauucaugacu

SEQ ID NO: 2133580 - RNA, 19 nt, Artificial Sequence
  Description of Artificial Sequence: Synthetic oligonucleotide
  Sense strand starting at position 2707 of SEQ ID NO: 1882597
cccagacucuucgcagaug

SEQ ID NO: 2133581 - RNA, 19 nt, Artificial Sequence
  Description of Artificial Sequence: Synthetic oligonucleotide
  Antisense strand to SEQ ID NO: 2133580
caucugcgaagagucuggg

SEQ ID NO: 2133582 - RNA, 19 nt, Artificial Sequence
  Description of Artificial Sequence: Synthetic oligonucleotide
  Sense strand starting at position 2710 of SEQ ID NO: 1882597
agacucuucgcagauguua

SEQ ID NO: 2133583 - RNA, 19 nt, Artificial Sequence
  Description of Artificial Sequence: Synthetic oligonucleotide
  Antisense strand to SEQ ID NO: 2133582
uaacaucugcgaagagucu

SEQ ID NO: 2133584 - RNA, 19 nt, Artificial Sequence
  Description of Artificial Sequence: Synthetic oligonucleotide
  Sense strand starting at position 2712 of SEQ ID NO: 1882597
acucuucgcagauguuagu

SEQ ID NO: 2133585 - RNA, 19 nt, Artificial Sequence
  Description of Artificial Sequence: Synthetic oligonucleotide
  Antisense strand to SEQ ID NO: 2133584
acuaacaucugcgaagagu

SEQ ID NO: 2133586 - RNA, 19 nt, Artificial Sequence
  Description of Artificial Sequence: Synthetic oligonucleotide
  Sense strand starting at position 2771 of SEQ ID NO: 1882597
guugcuguuucuuuaggaa

SEQ ID NO: 2133587 - RNA, 19 nt, Artificial Sequence
  Description of Artificial Sequence: Synthetic oligonucleotide
  Antisense strand to SEQ ID NO: 2133586
uuccuaaagaaacagcaac

SEQ ID NO: 2133588 - RNA, 19 nt, Artificial Sequence
  Description of Artificial Sequence: Synthetic oligonucleotide
  Sense strand starting at position 2786 of SEQ ID NO: 1882597
ggaauuggauucuggaaac

SEQ ID NO: 2133589 - RNA, 19 nt, Artificial Sequence
  Description of Artificial Sequence: Synthetic oligonucleotide
  Antisense strand to SEQ ID NO: 2133588
guuuccagaauccaauucc

SEQ ID NO: 2133590 - RNA, 19 nt, Artificial Sequence
  Description of Artificial Sequence: Synthetic oligonucleotide
  Sense strand starting at position 2919 of SEQ ID NO: 1882597
cccuaaaucgagugcauua

SEQ ID NO: 2133591 - RNA, 19 nt, Artificial Sequence
  Description of Artificial Sequence: Synthetic oligonucleotide
  Antisense strand to SEQ ID NO: 2133590
uaaugcacucgauuuaggg

SEQ ID NO: 2133592 - RNA, 19 nt, Artificial Sequence
  Description of Artificial Sequence: Synthetic oligonucleotide
  Sense strand starting at position 3077 of SEQ ID NO: 1882597
gcuuaaacugucugcagga

SEQ ID NO: 2133593 - RNA, 19 nt, Artificial Sequence
  Description of Artificial Sequence: Synthetic oligonucleotide
  Antisense strand to SEQ ID NO: 2133592
uccugcagacaguuuaagc

SEQ ID NO: 2133594 - RNA, 19 nt, Artificial Sequence
  Description of Artificial Sequence: Synthetic oligonucleotide
  Sense strand starting at position 3078 of SEQ ID NO: 1882597
cuuaaacugucugcaggaa

SEQ ID NO: 2133595 - RNA, 19 nt, Artificial Sequence
  Description of Artificial Sequence: Synthetic oligonucleotide
  Antisense strand to SEQ ID NO: 2133594
uuccugcagacaguuuaag

SEQ ID NO: 2133596 - RNA, 19 nt, Artificial Sequence
  Description of Artificial Sequence: Synthetic oligonucleotide
  Sense strand starting at position 3079 of SEQ ID NO: 1882597
uuaaacugucugcaggaaa

SEQ ID NO: 2133597 - RNA, 19 nt, Artificial Sequence
  Description of Artificial Sequence: Synthetic oligonucleotide
  Antisense strand to SEQ ID NO: 2133596
uuuccugcagacaguuuaa

SEQ ID NO: 2133598 - RNA, 19 nt, Artificial Sequence
  Description of Artificial Sequence: Synthetic oligonucleotide
  Sense strand starting at position 3306 of SEQ ID NO: 1882597
cccaauaaggcugaaucuu

SEQ ID NO: 2133599 - RNA, 19 nt, Artificial Sequence
  Description of Artificial Sequence: Synthetic oligonucleotide
  Antisense strand to SEQ ID NO: 2133598
aagauucagccuuauuggg

SEQ ID NO: 2133600 - RNA, 19 nt, Artificial Sequence
  Description of Artificial Sequence: Synthetic oligonucleotide
  Sense strand starting at position 3447 of SEQ ID NO: 1882597
cuucuuuaagcugguaauu

SEQ ID NO: 2133601 - RNA, 19 nt, Artificial Sequence
  Description of Artificial Sequence: Synthetic oligonucleotide
  Antisense strand to SEQ ID NO: 2133600
aauuaccagcuuaaagaag

SEQ ID NO: 2133602 - RNA, 19 nt, Artificial Sequence
  Description of Artificial Sequence: Synthetic oligonucleotide
  Sense strand starting at position 3449 of SEQ ID NO: 1882597
ucuuuaagcugguaauuua

SEQ ID NO: 2133603 - RNA, 19 nt, Artificial Sequence
  Description of Artificial Sequence: Synthetic oligonucleotide
  Antisense strand to SEQ ID NO: 2133602
uaaauuaccagcuuaaaga

SEQ ID NO: 2133604 - RNA, 19 nt, Artificial Sequence
  Description of Artificial Sequence: Synthetic oligonucleotide
  Sense strand starting at position 3458 of SEQ ID NO: 1882597
ugguaauuuaaacgugugu

SEQ ID NO: 2133605 - RNA, 19 nt, Artificial Sequence
  Description of Artificial Sequence: Synthetic oligonucleotide
  Antisense strand to SEQ ID NO: 2133604
acacacguuuaaauuacca

SEQ ID NO: 2133606 - RNA, 19 nt, Artificial Sequence
  Description of Artificial Sequence: Synthetic oligonucleotide
  Sense strand starting at position 3460 of SEQ ID NO: 1882597
guaauuuaaacguguguuu

SEQ ID NO: 2133607 - RNA, 19 nt, Artificial Sequence
  Description of Artificial Sequence: Synthetic oligonucleotide
  Antisense strand to SEQ ID NO: 2133606
aaacacacguuuaaauuac

SEQ ID NO: 2133608 - RNA, 19 nt, Artificial Sequence
  Description of Artificial Sequence: Synthetic oligonucleotide
  Sense strand starting at position 3494 of SEQ ID NO: 1882597
ugcgaaauauguuucuauu

SEQ ID NO: 2133609 - RNA, 19 nt, Artificial Sequence
  Description of Artificial Sequence: Synthetic oligonucleotide
  Antisense strand to SEQ ID NO: 2133608
aauagaaacauauuucgca

SEQ ID NO: 2133610 - RNA, 19 nt, Artificial Sequence
  Description of Artificial Sequence: Synthetic oligonucleotide
  Sense strand starting at position 3504 of SEQ ID NO: 1882597
guuucuauuuaaguaguca

SEQ ID NO: 2133611 - RNA, 19 nt, Artificial Sequence
  Description of Artificial Sequence: Synthetic oligonucleotide
  Antisense strand to SEQ ID NO: 2133610
ugacuacuuaaauagaaac

SEQ ID NO: 2133612 - RNA, 19 nt, Artificial Sequence
  Description of Artificial Sequence: Synthetic oligonucleotide
  Sense strand starting at position 3529 of SEQ ID NO: 1882597
gguaacagucuuugaacgu

SEQ ID NO: 2133613 - RNA, 19 nt, Artificial Sequence
  Description of Artificial Sequence: Synthetic oligonucleotide
  Antisense strand to SEQ ID NO: 2133612
acguucaaagacuguuacc

SEQ ID NO: 2133614 - RNA, 19 nt, Artificial Sequence
  Description of Artificial Sequence: Synthetic oligonucleotide
  Sense strand starting at position 3533 of SEQ ID NO: 1882597
acagucuuugaacguuuau

SEQ ID NO: 2133615 - RNA, 19 nt, Artificial Sequence
  Description of Artificial Sequence: Synthetic oligonucleotide
  Antisense strand to SEQ ID NO: 2133614
auaaacguucaaagacugu

SEQ ID NO: 2133616 - RNA, 19 nt, Artificial Sequence
  Description of Artificial Sequence: Synthetic oligonucleotide
  Sense strand starting at position 3634 of SEQ ID NO: 1882597
ccgcuucugcuguuuagua

SEQ ID NO: 2133617 - RNA, 19 nt, Artificial Sequence
  Description of Artificial Sequence: Synthetic oligonucleotide
  Antisense strand to SEQ ID NO: 2133616
uacuaaacagcagaagcgg

SEQ ID NO: 2133618 - RNA, 19 nt, Artificial Sequence
  Description of Artificial Sequence: Synthetic oligonucleotide
  Sense strand starting at position 3646 of SEQ ID NO: 1882597
uuuaguauuuaggaggaau

SEQ ID NO: 2133619 - RNA, 19 nt, Artificial Sequence
  Description of Artificial Sequence: Synthetic oligonucleotide
  Antisense strand to SEQ ID NO: 2133618
auuccuccuaaauacuaaa

SEQ ID NO: 2133620 - RNA, 19 nt, Artificial Sequence
  Description of Artificial Sequence: Synthetic oligonucleotide
  Sense strand starting at position 3884 of SEQ ID NO: 1882597
ggcgauuucccacgcagac

SEQ ID NO: 2133621 - RNA, 19 nt, Artificial Sequence
  Description of Artificial Sequence: Synthetic oligonucleotide
  Antisense strand to SEQ ID NO: 2133620
gucugcgugggaaaucgcc

SEQ ID NO: 2133622 - RNA, 19 nt, Artificial Sequence
  Description of Artificial Sequence: Synthetic oligonucleotide
  Sense strand starting at position 3942 of SEQ ID NO: 1882597
ccugauuccuuguucuuua

SEQ ID NO: 2133623 - RNA, 19 nt, Artificial Sequence
  Description of Artificial Sequence: Synthetic oligonucleotide
  Antisense strand to SEQ ID NO: 2133622
uaaagaacaaggaaucagg

SEQ ID NO: 2133624 - RNA, 19 nt, Artificial Sequence
  Description of Artificial Sequence: Synthetic oligonucleotide
  Sense strand starting at position 56 of SEQ ID NO: 1882598
acccuugggugauuacaau

SEQ ID NO: 2133625 - RNA, 19 nt, Artificial Sequence
  Description of Artificial Sequence: Synthetic oligonucleotide
  Antisense strand to SEQ ID NO: 2133624
auuguaaucacccaagggu

SEQ ID NO: 2133626 - RNA, 19 nt, Artificial Sequence
  Description of Artificial Sequence: Synthetic oligonucleotide
  Sense strand starting at position 92 of SEQ ID NO: 1882598
cacgaauuguccucagaaa

SEQ ID NO: 2133627 - RNA, 19 nt, Artificial Sequence
  Description of Artificial Sequence: Synthetic oligonucleotide
  Antisense strand to SEQ ID NO: 2133626
uuucugaggacaauucgug

SEQ ID NO: 2133628 - RNA, 19 nt, Artificial Sequence
  Description of Artificial Sequence: Synthetic oligonucleotide
  Sense strand starting at position 145 of SEQ ID NO: 1882598
gcuacauaucaucaguucu

SEQ ID NO: 2133629 - RNA, 19 nt, Artificial Sequence
  Description of Artificial Sequence: Synthetic oligonucleotide
  Antisense strand to SEQ ID NO: 2133628
agaacugaugauauguagc

SEQ ID NO: 2133630 - RNA, 19 nt, Artificial Sequence
  Description of Artificial Sequence: Synthetic oligonucleotide
  Sense strand starting at position 214 of SEQ ID NO: 1882598
uucuguuuggaguaagccu

SEQ ID NO: 2133631 - RNA, 19 nt, Artificial Sequence
  Description of Artificial Sequence: Synthetic oligonucleotide
  Antisense strand to SEQ ID NO: 2133630
aggcuuacuccaaacagaa

SEQ ID NO: 2133632 - RNA, 19 nt, Artificial Sequence
  Description of Artificial Sequence: Synthetic oligonucleotide
  Sense strand starting at position 222 of SEQ ID NO: 1882598
ggaguaagccuuugauugg

SEQ ID NO: 2133633 - RNA, 19 nt, Artificial Sequence
  Description of Artificial Sequence: Synthetic oligonucleotide
  Antisense strand to SEQ ID NO: 2133632
ccaaucaaaggcuuacucc

SEQ ID NO: 2133634 - RNA, 19 nt, Artificial Sequence
  Description of Artificial Sequence: Synthetic oligonucleotide
  Sense strand starting at position 305 of SEQ ID NO: 1882598
aagcgaugcugauccugaa

SEQ ID NO: 2133635 - RNA, 19 nt, Artificial Sequence
  Description of Artificial Sequence: Synthetic oligonucleotide
  Antisense strand to SEQ ID NO: 2133634
uucaggaucagcaucgcuu

SEQ ID NO: 2133636 - RNA, 19 nt, Artificial Sequence
  Description of Artificial Sequence: Synthetic oligonucleotide
  Sense strand starting at position 476 of SEQ ID NO: 1882598
ggcuacugagacugauauu

SEQ ID NO: 2133637 - RNA, 19 nt, Artificial Sequence
  Description of Artificial Sequence: Synthetic oligonucleotide
  Antisense strand to SEQ ID NO: 2133636
aauaucagucucaguagcc

SEQ ID NO: 2133638 - RNA, 19 nt, Artificial Sequence
  Description of Artificial Sequence: Synthetic oligonucleotide
  Sense strand starting at position 502 of SEQ ID NO: 1882598
agugguuugaugggaagau

SEQ ID NO: 2133639 - RNA, 19 nt, Artificial Sequence
  Description of Artificial Sequence: Synthetic oligonucleotide
  Antisense strand to SEQ ID NO: 2133638
aucuucccaucaaaccacu

SEQ ID NO: 2133640 - RNA, 19 nt, Artificial Sequence
  Description of Artificial Sequence: Synthetic oligonucleotide
  Sense strand starting at position 556 of SEQ ID NO: 1882598
gagcaaguuccaugauccu

SEQ ID NO: 2133641 - RNA, 19 nt, Artificial Sequence
  Description of Artificial Sequence: Synthetic oligonucleotide
  Antisense strand to SEQ ID NO: 2133640
aggaucauggaacuugcuc

SEQ ID NO: 2133642 - RNA, 19 nt, Artificial Sequence
  Description of Artificial Sequence: Synthetic oligonucleotide
  Sense strand starting at position 592 of SEQ ID NO: 1882598
cuuguccaacuguaaagua

SEQ ID NO: 2133643 - RNA, 19 nt, Artificial Sequence
  Description of Artificial Sequence: Synthetic oligonucleotide
  Antisense strand to SEQ ID NO: 2133642
uacuuuacaguuggacaag

SEQ ID NO: 2133644 - RNA, 19 nt, Artificial Sequence
  Description of Artificial Sequence: Synthetic oligonucleotide
  Sense strand starting at position 600 of SEQ ID NO: 1882598
acuguaaaguagcucucaa

SEQ ID NO: 2133645 - RNA, 19 nt, Artificial Sequence
  Description of Artificial Sequence: Synthetic oligonucleotide
  Antisense strand to SEQ ID NO: 2133644
uugagagcuacuuuacagu

SEQ ID NO: 2133646 - RNA, 19 nt, Artificial Sequence
  Description of Artificial Sequence: Synthetic oligonucleotide
  Sense strand starting at position 862 of SEQ ID NO: 1882598
guaccuaaauggucaguga

SEQ ID NO: 2133647 - RNA, 19 nt, Artificial Sequence
  Description of Artificial Sequence: Synthetic oligonucleotide
  Antisense strand to SEQ ID NO: 2133646
ucacugaccauuuagguac

SEQ ID NO: 2133648 - RNA, 19 nt, Artificial Sequence
  Description of Artificial Sequence: Synthetic oligonucleotide
  Sense strand starting at position 865 of SEQ ID NO: 1882598
ccuaaauggucagugaaca

SEQ ID NO: 2133649 - RNA, 19 nt, Artificial Sequence
  Description of Artificial Sequence: Synthetic oligonucleotide
  Antisense strand to SEQ ID NO: 2133648
uguucacugaccauuuagg

SEQ ID NO: 2133650 - RNA, 19 nt, Artificial Sequence
  Description of Artificial Sequence: Synthetic oligonucleotide
  Sense strand starting at position 866 of SEQ ID NO: 1882598
cuaaauggucagugaacac

SEQ ID NO: 2133651 - RNA, 19 nt, Artificial Sequence
  Description of Artificial Sequence: Synthetic oligonucleotide
  Antisense strand to SEQ ID NO: 2133650
guguucacugaccauuuag

SEQ ID NO: 2133652 - RNA, 19 nt, Artificial Sequence
  Description of Artificial Sequence: Synthetic oligonucleotide
  Sense strand starting at position 873 of SEQ ID NO: 1882598
gucagugaacacgaucaga

SEQ ID NO: 2133653 - RNA, 19 nt, Artificial Sequence
  Description of Artificial Sequence: Synthetic oligonucleotide
  Antisense strand to SEQ ID NO: 2133652
ucugaucguguucacugac

SEQ ID NO: 2133654 - RNA, 19 nt, Artificial Sequence
  Description of Artificial Sequence: Synthetic oligonucleotide
  Sense strand starting at position 1002 of SEQ ID NO: 1882598
uaggaaacugcuugugaca

SEQ ID NO: 2133655 - RNA, 19 nt, Artificial Sequence
  Description of Artificial Sequence: Synthetic oligonucleotide
  Antisense strand to SEQ ID NO: 2133654
ugucacaagcaguuuccua

SEQ ID NO: 2133656 - RNA, 19 nt, Artificial Sequence
  Description of Artificial Sequence: Synthetic oligonucleotide
  Sense strand starting at position 1013 of SEQ ID NO: 1882598
uugugacagggauguguua

SEQ ID NO: 2133657 - RNA, 19 nt, Artificial Sequence
  Description of Artificial Sequence: Synthetic oligonucleotide
  Antisense strand to SEQ ID NO: 2133656
uaacacaucccugucacaa

SEQ ID NO: 2133658 - RNA, 19 nt, Artificial Sequence
  Description of Artificial Sequence: Synthetic oligonucleotide
  Sense strand starting at position 1015 of SEQ ID NO: 1882598
gugacagggauguguuaac

SEQ ID NO: 2133659 - RNA, 19 nt, Artificial Sequence
  Description of Artificial Sequence: Synthetic oligonucleotide
  Antisense strand to SEQ ID NO: 2133658
guuaacacaucccugucac

SEQ ID NO: 2133660 - RNA, 19 nt, Artificial Sequence
  Description of Artificial Sequence: Synthetic oligonucleotide
  Sense strand starting at position 1066 of SEQ ID NO: 1882598
gguuuacuugcauagguga

SEQ ID NO: 2133661 - RNA, 19 nt, Artificial Sequence
  Description of Artificial Sequence: Synthetic oligonucleotide
  Antisense strand to SEQ ID NO: 2133660
ucaccuaugcaaguaaacc

SEQ ID NO: 2133662 - RNA, 19 nt, Artificial Sequence
  Description of Artificial Sequence: Synthetic oligonucleotide
  Sense strand starting at position 1201 of SEQ ID NO: 1882598
gaccaaauguuucuuggca

SEQ ID NO: 2133663 - RNA, 19 nt, Artificial Sequence
  Description of Artificial Sequence: Synthetic oligonucleotide
  Antisense strand to SEQ ID NO: 2133662
ugccaagaaacauuugguc

SEQ ID NO: 2133664 - RNA, 19 nt, Artificial Sequence
  Description of Artificial Sequence: Synthetic oligonucleotide
  Sense strand starting at position 1202 of SEQ ID NO: 1882598
accaaauguuucuuggcau

SEQ ID NO: 2133665 - RNA, 19 nt, Artificial Sequence
  Description of Artificial Sequence: Synthetic oligonucleotide
  Antisense strand to SEQ ID NO: 2133664
augccaagaaacauuuggu

SEQ ID NO: 2133666 - RNA, 19 nt, Artificial Sequence
  Description of Artificial Sequence: Synthetic oligonucleotide
  Sense strand starting at position 1209 of SEQ ID NO: 1882598
guuucuuggcaucacucua

SEQ ID NO: 2133667 - RNA, 19 nt, Artificial Sequence
  Description of Artificial Sequence: Synthetic oligonucleotide
  Antisense strand to SEQ ID NO: 2133666
uagagugaugccaagaaac

SEQ ID NO: 2133668 - RNA, 19 nt, Artificial Sequence
  Description of Artificial Sequence: Synthetic oligonucleotide
  Sense strand starting at position 1449 of SEQ ID NO: 1882598
ucauuugacuggcuuuagu

SEQ ID NO: 2133669 - RNA, 19 nt, Artificial Sequence
  Description of Artificial Sequence: Synthetic oligonucleotide
  Antisense strand to SEQ ID NO: 2133668
acuaaagccagucaaauga

SEQ ID NO: 2133670 - RNA, 19 nt, Artificial Sequence
  Description of Artificial Sequence: Synthetic oligonucleotide
  Sense strand starting at position 2393 of SEQ ID NO: 1882598
gccuuaagaugucuaaucu

SEQ ID NO: 2133671 - RNA, 19 nt, Artificial Sequence
  Description of Artificial Sequence: Synthetic oligonucleotide
  Antisense strand to SEQ ID NO: 2133670
agauuagacaucuuaaggc

SEQ ID NO: 2133672 - RNA, 19 nt, Artificial Sequence
  Description of Artificial Sequence: Synthetic oligonucleotide
  Sense strand starting at position 2530 of SEQ ID NO: 1882598
uguacauagcuuuacugua

SEQ ID NO: 2133673 - RNA, 19 nt, Artificial Sequence
  Description of Artificial Sequence: Synthetic oligonucleotide
  Antisense strand to SEQ ID NO: 2133672
uacaguaaagcuauguaca

SEQ ID NO: 2133674 - RNA, 19 nt, Artificial Sequence
  Description of Artificial Sequence: Synthetic oligonucleotide
  Sense strand starting at position 2556 of SEQ ID NO: 1882598
cgugcaguguaauuauuua

SEQ ID NO: 2133675 - RNA, 19 nt, Artificial Sequence
  Description of Artificial Sequence: Synthetic oligonucleotide
  Antisense strand to SEQ ID NO: 2133674
uaaauaauuacacugcacg

SEQ ID NO: 2133676 - RNA, 19 nt, Artificial Sequence
  Description of Artificial Sequence: Synthetic oligonucleotide
  Sense strand starting at position 2654 of SEQ ID NO: 1882598
aggugcuuggcacacaaua

SEQ ID NO: 2133677 - RNA, 19 nt, Artificial Sequence
  Description of Artificial Sequence: Synthetic oligonucleotide
  Antisense strand to SEQ ID NO: 2133676
uauugugugccaagcaccu

SEQ ID NO: 2133678 - RNA, 19 nt, Artificial Sequence
  Description of Artificial Sequence: Synthetic oligonucleotide
  Sense strand starting at position 2726 of SEQ ID NO: 1882598
gccucagggucucuaaauu

SEQ ID NO: 2133679 - RNA, 19 nt, Artificial Sequence
  Description of Artificial Sequence: Synthetic oligonucleotide
  Antisense strand to SEQ ID NO: 2133678
aauuuagagacccugaggc

SEQ ID NO: 2133680 - RNA, 19 nt, Artificial Sequence
  Description of Artificial Sequence: Synthetic oligonucleotide
  Sense strand starting at position 2790 of SEQ ID NO: 1882598
ucauuugugucuuugcuca

SEQ ID NO: 2133681 - RNA, 19 nt, Artificial Sequence
  Description of Artificial Sequence: Synthetic oligonucleotide
  Antisense strand to SEQ ID NO: 2133680
ugagcaaagacacaaauga

SEQ ID NO: 2133682 - RNA, 19 nt, Artificial Sequence
  Description of Artificial Sequence: Synthetic oligonucleotide
  Sense strand starting at position 2792 of SEQ ID NO: 1882598
auuugugucuuugcucaag

SEQ ID NO: 2133683 - RNA, 19 nt, Artificial Sequence
  Description of Artificial Sequence: Synthetic oligonucleotide
  Antisense strand to SEQ ID NO: 2133682
cuugagcaaagacacaaau

SEQ ID NO: 2133684 - RNA, 19 nt, Artificial Sequence
  Description of Artificial Sequence: Synthetic oligonucleotide
  Sense strand starting at position 2810 of SEQ ID NO: 1882598
gugucaucacuuuagagaa

SEQ ID NO: 2133685 - RNA, 19 nt, Artificial Sequence
  Description of Artificial Sequence: Synthetic oligonucleotide
  Antisense strand to SEQ ID NO: 2133684
uucucuaaagugaugacac

SEQ ID NO: 2133686 - RNA, 19 nt, Artificial Sequence
  Description of Artificial Sequence: Synthetic oligonucleotide
  Sense strand starting at position 2972 of SEQ ID NO: 1882598
uccagaggucugggauguu

SEQ ID NO: 2133687 - RNA, 19 nt, Artificial Sequence
  Description of Artificial Sequence: Synthetic oligonucleotide
  Antisense strand to SEQ ID NO: 2133686
aacaucccagaccucugga

SEQ ID NO: 2133688 - RNA, 19 nt, Artificial Sequence
  Description of Artificial Sequence: Synthetic oligonucleotide
  Sense strand starting at position 3395 of SEQ ID NO: 1882598
gaauaaaugguauggaggu

SEQ ID NO: 2133689 - RNA, 19 nt, Artificial Sequence
  Description of Artificial Sequence: Synthetic oligonucleotide
  Antisense strand to SEQ ID NO: 2133688
accuccauaccauuuauuc

SEQ ID NO: 2133690 - RNA, 19 nt, Artificial Sequence
  Description of Artificial Sequence: Synthetic oligonucleotide
  Sense strand starting at position 3409 of SEQ ID NO: 1882598
gagguuggugauugacaga

SEQ ID NO: 2133691 - RNA, 19 nt, Artificial Sequence
  Description of Artificial Sequence: Synthetic oligonucleotide
  Antisense strand to SEQ ID NO: 2133690
ucugucaaucaccaaccuc

SEQ ID NO: 2133692 - RNA, 19 nt, Artificial Sequence
  Description of Artificial Sequence: Synthetic oligonucleotide
  Sense strand starting at position 3747 of SEQ ID NO: 1882598
gaugguuccggagaagcau

SEQ ID NO: 2133693 - RNA, 19 nt, Artificial Sequence
  Description of Artificial Sequence: Synthetic oligonucleotide
  Antisense strand to SEQ ID NO: 2133692
augcuucuccggaaccauc

SEQ ID NO: 2133694 - RNA, 19 nt, Artificial Sequence
  Description of Artificial Sequence: Synthetic oligonucleotide
  Sense strand starting at position 3812 of SEQ ID NO: 1882598
uggugacagccggaacaau

SEQ ID NO: 2133695 - RNA, 19 nt, Artificial Sequence
  Description of Artificial Sequence: Synthetic oligonucleotide
  Antisense strand to SEQ ID NO: 2133694
auuguuccggcugucacca

SEQ ID NO: 2133696 - RNA, 19 nt, Artificial Sequence
  Description of Artificial Sequence: Synthetic oligonucleotide
  Sense strand starting at position 3822 of SEQ ID NO: 1882598
cggaacaauuguccaggaa

SEQ ID NO: 2133697 - RNA, 19 nt, Artificial Sequence
  Description of Artificial Sequence: Synthetic oligonucleotide
  Antisense strand to SEQ ID NO: 2133696
uuccuggacaauuguuccg

SEQ ID NO: 2133698 - RNA, 19 nt, Artificial Sequence
  Description of Artificial Sequence: Synthetic oligonucleotide
  Sense strand starting at position 3893 of SEQ ID NO: 1882598
gcagcaagguaucccauuu

SEQ ID NO: 2133699 - RNA, 19 nt, Artificial Sequence
  Description of Artificial Sequence: Synthetic oligonucleotide
  Antisense strand to SEQ ID NO: 2133698
aaaugggauaccuugcugc

SEQ ID NO: 2133700 - RNA, 19 nt, Artificial Sequence
  Description of Artificial Sequence: Synthetic oligonucleotide
  Sense strand starting at position 3909 of SEQ ID NO: 1882598
uuucccugggccuagagau

SEQ ID NO: 2133701 - RNA, 19 nt, Artificial Sequence
  Description of Artificial Sequence: Synthetic oligonucleotide
  Antisense strand to SEQ ID NO: 2133700
aucucuaggcccagggaaa

SEQ ID NO: 2133702 - RNA, 19 nt, Artificial Sequence
  Description of Artificial Sequence: Synthetic oligonucleotide
  Sense strand starting at position 3945 of SEQ ID NO: 1882598
uggugaagcugaucucaug

SEQ ID NO: 2133703 - RNA, 19 nt, Artificial Sequence
  Description of Artificial Sequence: Synthetic oligonucleotide
  Antisense strand to SEQ ID NO: 2133702
caugagaucagcuucacca

SEQ ID NO: 2133704 - RNA, 19 nt, Artificial Sequence
  Description of Artificial Sequence: Synthetic oligonucleotide
  Sense strand starting at position 12 of SEQ ID NO: 1882599
acuggaacaacgugaagau

SEQ ID NO: 2133705 - RNA, 19 nt, Artificial Sequence
  Description of Artificial Sequence: Synthetic oligonucleotide
  Antisense strand to SEQ ID NO: 2133704
aucuucacguuguuccagu

SEQ ID NO: 2133706 - RNA, 19 nt, Artificial Sequence
  Description of Artificial Sequence: Synthetic oligonucleotide
  Sense strand starting at position 160 of SEQ ID NO: 1882599
gugagaagucagugcuaac

SEQ ID NO: 2133707 - RNA, 19 nt, Artificial Sequence
  Description of Artificial Sequence: Synthetic oligonucleotide
  Antisense strand to SEQ ID NO: 2133706
guuagcacugacuucucac

SEQ ID NO: 2133708 - RNA, 19 nt, Artificial Sequence
  Description of Artificial Sequence: Synthetic oligonucleotide
  Sense strand starting at position 573 of SEQ ID NO: 1882599
ccggaucagcagugguuaa

SEQ ID NO: 2133709 - RNA, 19 nt, Artificial Sequence
  Description of Artificial Sequence: Synthetic oligonucleotide
  Antisense strand to SEQ ID NO: 2133708
uuaaccacugcugauccgg

SEQ ID NO: 2133710 - RNA, 19 nt, Artificial Sequence
  Description of Artificial Sequence: Synthetic oligonucleotide
  Sense strand starting at position 574 of SEQ ID NO: 1882599
cggaucagcagugguuaaa

SEQ ID NO: 2133711 - RNA, 19 nt, Artificial Sequence
  Description of Artificial Sequence: Synthetic oligonucleotide
  Antisense strand to SEQ ID NO: 2133710
uuuaaccacugcugauccg

SEQ ID NO: 2133712 - RNA, 19 nt, Artificial Sequence
  Description of Artificial Sequence: Synthetic oligonucleotide
  Sense strand starting at position 764 of SEQ ID NO: 1882599
ugaacagaugccgaucauu

SEQ ID NO: 2133713 - RNA, 19 nt, Artificial Sequence
  Description of Artificial Sequence: Synthetic oligonucleotide
  Antisense strand to SEQ ID NO: 2133712
aaugaucggcaucuguuca

SEQ ID NO: 2133714 - RNA, 19 nt, Artificial Sequence
  Description of Artificial Sequence: Synthetic oligonucleotide
  Sense strand starting at position 825 of SEQ ID NO: 1882599
cucuauaaucagggaaugu

SEQ ID NO: 2133715 - RNA, 19 nt, Artificial Sequence
  Description of Artificial Sequence: Synthetic oligonucleotide
  Antisense strand to SEQ ID NO: 2133714
acauucccugauuauagag

SEQ ID NO: 2133716 - RNA, 19 nt, Artificial Sequence
  Description of Artificial Sequence: Synthetic oligonucleotide
  Sense strand starting at position 1137 of SEQ ID NO: 1882599
guauucuguaugcagugaa

SEQ ID NO: 2133717 - RNA, 19 nt, Artificial Sequence
  Description of Artificial Sequence: Synthetic oligonucleotide
  Antisense strand to SEQ ID NO: 2133716
uucacugcauacagaauac

SEQ ID NO: 2133718 - RNA, 19 nt, Artificial Sequence
  Description of Artificial Sequence: Synthetic oligonucleotide
  Sense strand starting at position 1174 of SEQ ID NO: 1882599
aaugcauacgccguuuauu

SEQ ID NO: 2133719 - RNA, 19 nt, Artificial Sequence
  Description of Artificial Sequence: Synthetic oligonucleotide
  Antisense strand to SEQ ID NO: 2133718
aauaaacggcguaugcauu

SEQ ID NO: 2133720 - RNA, 19 nt, Artificial Sequence
  Description of Artificial Sequence: Synthetic oligonucleotide
  Sense strand starting at position 2020 of SEQ ID NO: 1882599
cgcaguguccuuggagaga

SEQ ID NO: 2133721 - RNA, 19 nt, Artificial Sequence
  Description of Artificial Sequence: Synthetic oligonucleotide
  Antisense strand to SEQ ID NO: 2133720
ucucuccaaggacacugcg

SEQ ID NO: 2133722 - RNA, 19 nt, Artificial Sequence
  Description of Artificial Sequence: Synthetic oligonucleotide
  Sense strand starting at position 2435 of SEQ ID NO: 1882599
guuuguuuacaccaggaag

SEQ ID NO: 2133723 - RNA, 19 nt, Artificial Sequence
  Description of Artificial Sequence: Synthetic oligonucleotide
  Antisense strand to SEQ ID NO: 2133722
cuuccugguguaaacaaac

SEQ ID NO: 2133724 - RNA, 19 nt, Artificial Sequence
  Description of Artificial Sequence: Synthetic oligonucleotide
  Sense strand starting at position 2459 of SEQ ID NO: 1882599
gccuuccaccugcaagaaa

SEQ ID NO: 2133725 - RNA, 19 nt, Artificial Sequence
  Description of Artificial Sequence: Synthetic oligonucleotide
  Antisense strand to SEQ ID NO: 2133724
uuucuugcagguggaaggc

SEQ ID NO: 2133726 - RNA, 19 nt, Artificial Sequence
  Description of Artificial Sequence: Synthetic oligonucleotide
  Sense strand starting at position 2480 of SEQ ID NO: 1882599
auggcagcugcagaauaau

SEQ ID NO: 2133727 - RNA, 19 nt, Artificial Sequence
  Description of Artificial Sequence: Synthetic oligonucleotide
  Antisense strand to SEQ ID NO: 2133726
auuauucugcagcugccau

SEQ ID NO: 2133728 - RNA, 19 nt, Artificial Sequence
  Description of Artificial Sequence: Synthetic oligonucleotide
  Sense strand starting at position 2532 of SEQ ID NO: 1882599
gagugaggcuacuugagaa

SEQ ID NO: 2133729 - RNA, 19 nt, Artificial Sequence
  Description of Artificial Sequence: Synthetic oligonucleotide
  Antisense strand to SEQ ID NO: 2133728
uucucaaguagccucacuc

SEQ ID NO: 2133730 - RNA, 19 nt, Artificial Sequence
  Description of Artificial Sequence: Synthetic oligonucleotide
  Sense strand starting at position 2582 of SEQ ID NO: 1882599
aucugauuuccacgcagcu

SEQ ID NO: 2133731 - RNA, 19 nt, Artificial Sequence
  Description of Artificial Sequence: Synthetic oligonucleotide
  Antisense strand to SEQ ID NO: 2133730
agcugcguggaaaucagau

SEQ ID NO: 2133732 - RNA, 19 nt, Artificial Sequence
  Description of Artificial Sequence: Synthetic oligonucleotide
  Sense strand starting at position 2623 of SEQ ID NO: 1882599
guaugauguuaucuccauu

SEQ ID NO: 2133733 - RNA, 19 nt, Artificial Sequence
  Description of Artificial Sequence: Synthetic oligonucleotide
  Antisense strand to SEQ ID NO: 2133732
aauggagauaacaucauac

SEQ ID NO: 2133734 - RNA, 19 nt, Artificial Sequence
  Description of Artificial Sequence: Synthetic oligonucleotide
  Sense strand starting at position 2800 of SEQ ID NO: 1882599
gcaaauugcagcgcauauu

SEQ ID NO: 2133735 - RNA, 19 nt, Artificial Sequence
  Description of Artificial Sequence: Synthetic oligonucleotide
  Antisense strand to SEQ ID NO: 2133734
aauaugcgcugcaauuugc

SEQ ID NO: 2133736 - RNA, 19 nt, Artificial Sequence
  Description of Artificial Sequence: Synthetic oligonucleotide
  Sense strand starting at position 2873 of SEQ ID NO: 1882599
gaagcccguguuuaucaua

SEQ ID NO: 2133737 - RNA, 19 nt, Artificial Sequence
  Description of Artificial Sequence: Synthetic oligonucleotide
  Antisense strand to SEQ ID NO: 2133736
uaugauaaacacgggcuuc

SEQ ID NO: 2133738 - RNA, 19 nt, Artificial Sequence
  Description of Artificial Sequence: Synthetic oligonucleotide
  Sense strand starting at position 2903 of SEQ ID NO: 1882599
ccagccagagcugauaaua

SEQ ID NO: 2133739 - RNA, 19 nt, Artificial Sequence
  Description of Artificial Sequence: Synthetic oligonucleotide
  Antisense strand to SEQ ID NO: 2133738
uauuaucagcucuggcugg

SEQ ID NO: 2133740 - RNA, 19 nt, Artificial Sequence
  Description of Artificial Sequence: Synthetic oligonucleotide
  Sense strand starting at position 2998 of SEQ ID NO: 1882599
ugucuuaaccagcagggaa

SEQ ID NO: 2133741 - RNA, 19 nt, Artificial Sequence
  Description of Artificial Sequence: Synthetic oligonucleotide
  Antisense strand to SEQ ID NO: 2133740
uucccugcugguuaagaca

SEQ ID NO: 2133742 - RNA, 19 nt, Artificial Sequence
  Description of Artificial Sequence: Synthetic oligonucleotide
  Sense strand starting at position 3025 of SEQ ID NO: 1882599
gggacucauucuucccuau

SEQ ID NO: 2133743 - RNA, 19 nt, Artificial Sequence
  Description of Artificial Sequence: Synthetic oligonucleotide
  Antisense strand to SEQ ID NO: 2133742
auagggaagaaugaguccc

SEQ ID NO: 2133744 - RNA, 19 nt, Artificial Sequence
  Description of Artificial Sequence: Synthetic oligonucleotide
  Sense strand starting at position 3150 of SEQ ID NO: 1882599
aguccuggucacugguaga

SEQ ID NO: 2133745 - RNA, 19 nt, Artificial Sequence
  Description of Artificial Sequence: Synthetic oligonucleotide
  Antisense strand to SEQ ID NO: 2133744
ucuaccagugaccaggacu

SEQ ID NO: 2133746 - RNA, 19 nt, Artificial Sequence
  Description of Artificial Sequence: Synthetic oligonucleotide
  Sense strand starting at position 3263 of SEQ ID NO: 1882599
agcucuucuguguagguaa

SEQ ID NO: 2133747 - RNA, 19 nt, Artificial Sequence
  Description of Artificial Sequence: Synthetic oligonucleotide
  Antisense strand to SEQ ID NO: 2133746
uuaccuacacagaagagcu

SEQ ID NO: 2133748 - RNA, 19 nt, Artificial Sequence
  Description of Artificial Sequence: Synthetic oligonucleotide
  Sense strand starting at position 3274 of SEQ ID NO: 1882599
guagguaaaguccaucaaa

SEQ ID NO: 2133749 - RNA, 19 nt, Artificial Sequence
  Description of Artificial Sequence: Synthetic oligonucleotide
  Antisense strand to SEQ ID NO: 2133748
uuugauggacuuuaccuac

SEQ ID NO: 2133750 - RNA, 19 nt, Artificial Sequence
  Description of Artificial Sequence: Synthetic oligonucleotide
  Sense strand starting at position 3385 of SEQ ID NO: 1882599
ucuaguuggcauuaacguu

SEQ ID NO: 2133751 - RNA, 19 nt, Artificial Sequence
  Description of Artificial Sequence: Synthetic oligonucleotide
  Antisense strand to SEQ ID NO: 2133750
aacguuaaugccaacuaga

SEQ ID NO: 2133752 - RNA, 19 nt, Artificial Sequence
  Description of Artificial Sequence: Synthetic oligonucleotide
  Sense strand starting at position 3393 of SEQ ID NO: 1882599
gcauuaacguuguuaggag

SEQ ID NO: 2133753 - RNA, 19 nt, Artificial Sequence
  Description of Artificial Sequence: Synthetic oligonucleotide
  Antisense strand to SEQ ID NO: 2133752
cuccuaacaacguuaaugc

SEQ ID NO: 2133754 - RNA, 19 nt, Artificial Sequence
  Description of Artificial Sequence: Synthetic oligonucleotide
  Sense strand starting at position 3401 of SEQ ID NO: 1882599
guuguuaggagauagcuua

SEQ ID NO: 2133755 - RNA, 19 nt, Artificial Sequence
  Description of Artificial Sequence: Synthetic oligonucleotide
  Antisense strand to SEQ ID NO: 2133754
uaagcuaucuccuaacaac

SEQ ID NO: 2133756 - RNA, 19 nt, Artificial Sequence
  Description of Artificial Sequence: Synthetic oligonucleotide
  Sense strand starting at position 3488 of SEQ ID NO: 1882599
aaauuaugucagggaaugu

SEQ ID NO: 2133757 - RNA, 19 nt, Artificial Sequence
  Description of Artificial Sequence: Synthetic oligonucleotide
  Antisense strand to SEQ ID NO: 2133756
acauucccugacauaauuu

SEQ ID NO: 2133758 - RNA, 19 nt, Artificial Sequence
  Description of Artificial Sequence: Synthetic oligonucleotide
  Sense strand starting at position 3498 of SEQ ID NO: 1882599
agggaauguuaaguuucua

SEQ ID NO: 2133759 - RNA, 19 nt, Artificial Sequence
  Description of Artificial Sequence: Synthetic oligonucleotide
  Antisense strand to SEQ ID NO: 2133758
uagaaacuuaacauucccu

SEQ ID NO: 2133760 - RNA, 19 nt, Artificial Sequence
  Description of Artificial Sequence: Synthetic oligonucleotide
  Sense strand starting at position 3513 of SEQ ID NO: 1882599
ucuagucuuuggucacuga

SEQ ID NO: 2133761 - RNA, 19 nt, Artificial Sequence
  Description of Artificial Sequence: Synthetic oligonucleotide
  Antisense strand to SEQ ID NO: 2133760
ucagugaccaaagacuaga

SEQ ID NO: 2133762 - RNA, 19 nt, Artificial Sequence
  Description of Artificial Sequence: Synthetic oligonucleotide
  Sense strand starting at position 3524 of SEQ ID NO: 1882599
gucacugaggccuaucagu

SEQ ID NO: 2133763 - RNA, 19 nt, Artificial Sequence
  Description of Artificial Sequence: Synthetic oligonucleotide
  Antisense strand to SEQ ID NO: 2133762
acugauaggccucagugac

SEQ ID NO: 2133764 - RNA, 19 nt, Artificial Sequence
  Description of Artificial Sequence: Synthetic oligonucleotide
  Sense strand starting at position 3530 of SEQ ID NO: 1882599
gaggccuaucaguagguuu

SEQ ID NO: 2133765 - RNA, 19 nt, Artificial Sequence
  Description of Artificial Sequence: Synthetic oligonucleotide
  Antisense strand to SEQ ID NO: 2133764
aaaccuacugauaggccuc

SEQ ID NO: 2133766 - RNA, 19 nt, Artificial Sequence
  Description of Artificial Sequence: Synthetic oligonucleotide
  Sense strand starting at position 3588 of SEQ ID NO: 1882599
uaagaauugugucugguag

SEQ ID NO: 2133767 - RNA, 19 nt, Artificial Sequence
  Description of Artificial Sequence: Synthetic oligonucleotide
  Antisense strand to SEQ ID NO: 2133766
cuaccagacacaauucuua

SEQ ID NO: 2133768 - RNA, 19 nt, Artificial Sequence
  Description of Artificial Sequence: Synthetic oligonucleotide
  Sense strand starting at position 3589 of SEQ ID NO: 1882599
aagaauugugucugguaga

SEQ ID NO: 2133769 - RNA, 19 nt, Artificial Sequence
  Description of Artificial Sequence: Synthetic oligonucleotide
  Antisense strand to SEQ ID NO: 2133768
ucuaccagacacaauucuu

SEQ ID NO: 2133770 - RNA, 19 nt, Artificial Sequence
  Description of Artificial Sequence: Synthetic oligonucleotide
  Sense strand starting at position 3625 of SEQ ID NO: 1882599
acagguguguacucacaca

SEQ ID NO: 2133771 - RNA, 19 nt, Artificial Sequence
  Description of Artificial Sequence: Synthetic oligonucleotide
  Antisense strand to SEQ ID NO: 2133770
ugugugaguacacaccugu

SEQ ID NO: 2133772 - RNA, 19 nt, Artificial Sequence
  Description of Artificial Sequence: Synthetic oligonucleotide
  Sense strand starting at position 3642 of SEQ ID NO: 1882599
cagcaagagcaguagagau

SEQ ID NO: 2133773 - RNA, 19 nt, Artificial Sequence
  Description of Artificial Sequence: Synthetic oligonucleotide
  Antisense strand to SEQ ID NO: 2133772
aucucuacugcucuugcug

SEQ ID NO: 2133774 - RNA, 19 nt, Artificial Sequence
  Description of Artificial Sequence: Synthetic oligonucleotide
  Sense strand starting at position 3737 of SEQ ID NO: 1882599
ccugaauguguugacuuua

SEQ ID NO: 2133775 - RNA, 19 nt, Artificial Sequence
  Description of Artificial Sequence: Synthetic oligonucleotide
  Antisense strand to SEQ ID NO: 2133774
uaaagucaacacauucagg

SEQ ID NO: 2133776 - RNA, 19 nt, Artificial Sequence
  Description of Artificial Sequence: Synthetic oligonucleotide
  Sense strand starting at position 3742 of SEQ ID NO: 1882599
auguguugacuuuacaaau

SEQ ID NO: 2133777 - RNA, 19 nt, Artificial Sequence
  Description of Artificial Sequence: Synthetic oligonucleotide
  Antisense strand to SEQ ID NO: 2133776
auuuguaaagucaacacau

SEQ ID NO: 2133778 - RNA, 19 nt, Artificial Sequence
  Description of Artificial Sequence: Synthetic oligonucleotide
  Sense strand starting at position 3827 of SEQ ID NO: 1882599
ucuaucaagugucuacaau

SEQ ID NO: 2133779 - RNA, 19 nt, Artificial Sequence
  Description of Artificial Sequence: Synthetic oligonucleotide
  Antisense strand to SEQ ID NO: 2133778
auuguagacacuugauaga

SEQ ID NO: 2133780 - RNA, 19 nt, Artificial Sequence
  Description of Artificial Sequence: Synthetic oligonucleotide
  Sense strand starting at position 3828 of SEQ ID NO: 1882599
cuaucaagugucuacaaua

SEQ ID NO: 2133781 - RNA, 19 nt, Artificial Sequence
  Description of Artificial Sequence: Synthetic oligonucleotide
  Antisense strand to SEQ ID NO: 2133780
uauuguagacacuugauag

SEQ ID NO: 2133782 - RNA, 19 nt, Artificial Sequence
  Description of Artificial Sequence: Synthetic oligonucleotide
  Sense strand starting at position 3872 of SEQ ID NO: 1882599
uuuauagguuuguuugaag

SEQ ID NO: 2133783 - RNA, 19 nt, Artificial Sequence
  Description of Artificial Sequence: Synthetic oligonucleotide
  Antisense strand to SEQ ID NO: 2133782
cuucaaacaaaccuauaaa

SEQ ID NO: 2133784 - RNA, 19 nt, Artificial Sequence
  Description of Artificial Sequence: Synthetic oligonucleotide
  Sense strand starting at position 2 of SEQ ID NO: 1882600
ucuugucacauggaugagu

SEQ ID NO: 2133785 - RNA, 19 nt, Artificial Sequence
  Description of Artificial Sequence: Synthetic oligonucleotide
  Antisense strand to SEQ ID NO: 2133784
acucauccaugugacaaga

SEQ ID NO: 2133786 - RNA, 19 nt, Artificial Sequence
  Description of Artificial Sequence: Synthetic oligonucleotide
  Sense strand starting at position 178 of SEQ ID NO: 1882600
ucuggcuguccagaauaaa

SEQ ID NO: 2133787 - RNA, 19 nt, Artificial Sequence
  Description of Artificial Sequence: Synthetic oligonucleotide
  Antisense strand to SEQ ID NO: 2133786
uuuauucuggacagccaga

SEQ ID NO: 2133788 - RNA, 19 nt, Artificial Sequence
  Description of Artificial Sequence: Synthetic oligonucleotide
  Sense strand starting at position 338 of SEQ ID NO: 1882600
uggguuaaaugcccauaaa

SEQ ID NO: 2133789 - RNA, 19 nt, Artificial Sequence
  Description of Artificial Sequence: Synthetic oligonucleotide
  Antisense strand to SEQ ID NO: 2133788
uuuaugggcauuuaaccca

SEQ ID NO: 2133790 - RNA, 19 nt, Artificial Sequence
  Description of Artificial Sequence: Synthetic oligonucleotide
  Sense strand starting at position 481 of SEQ ID NO: 1882600
gucguuggaggacauauaa

SEQ ID NO: 2133791 - RNA, 19 nt, Artificial Sequence
  Description of Artificial Sequence: Synthetic oligonucleotide
  Antisense strand to SEQ ID NO: 2133790
uuauauguccuccaacgac

SEQ ID NO: 2133792 - RNA, 19 nt, Artificial Sequence
  Description of Artificial Sequence: Synthetic oligonucleotide
  Sense strand starting at position 528 of SEQ ID NO: 1882600
gggucaggucuuuaaguau

SEQ ID NO: 2133793 - RNA, 19 nt, Artificial Sequence
  Description of Artificial Sequence: Synthetic oligonucleotide
  Antisense strand to SEQ ID NO: 2133792
auacuuaaagaccugaccc

SEQ ID NO: 2133794 - RNA, 19 nt, Artificial Sequence
  Description of Artificial Sequence: Synthetic oligonucleotide
  Sense strand starting at position 627 of SEQ ID NO: 1882600
aguccuucgaagggacaaa

SEQ ID NO: 2133795 - RNA, 19 nt, Artificial Sequence
  Description of Artificial Sequence: Synthetic oligonucleotide
  Antisense strand to SEQ ID NO: 2133794
uuugucccuucgaaggacu

SEQ ID NO: 2133796 - RNA, 19 nt, Artificial Sequence
  Description of Artificial Sequence: Synthetic oligonucleotide
  Sense strand starting at position 681 of SEQ ID NO: 1882600
cccaaaucaccacggaaua

SEQ ID NO: 2133797 - RNA, 19 nt, Artificial Sequence
  Description of Artificial Sequence: Synthetic oligonucleotide
  Antisense strand to SEQ ID NO: 2133796
uauuccguggugauuuggg

SEQ ID NO: 2133798 - RNA, 19 nt, Artificial Sequence
  Description of Artificial Sequence: Synthetic oligonucleotide
  Sense strand starting at position 768 of SEQ ID NO: 1882600
uaaaucucauugucuggga

SEQ ID NO: 2133799 - RNA, 19 nt, Artificial Sequence
  Description of Artificial Sequence: Synthetic oligonucleotide
  Antisense strand to SEQ ID NO: 2133798
ucccagacaaugagauuua

SEQ ID NO: 2133800 - RNA, 19 nt, Artificial Sequence
  Description of Artificial Sequence: Synthetic oligonucleotide
  Sense strand starting at position 769 of SEQ ID NO: 1882600
aaaucucauugucugggaa

SEQ ID NO: 2133801 - RNA, 19 nt, Artificial Sequence
  Description of Artificial Sequence: Synthetic oligonucleotide
  Antisense strand to SEQ ID NO: 2133800
uucccagacaaugagauuu

SEQ ID NO: 2133802 - RNA, 19 nt, Artificial Sequence
  Description of Artificial Sequence: Synthetic oligonucleotide
  Sense strand starting at position 770 of SEQ ID NO: 1882600
aaucucauugucugggaaa

SEQ ID NO: 2133803 - RNA, 19 nt, Artificial Sequence
  Description of Artificial Sequence: Synthetic oligonucleotide
  Antisense strand to SEQ ID NO: 2133802
uuucccagacaaugagauu

SEQ ID NO: 2133804 - RNA, 19 nt, Artificial Sequence
  Description of Artificial Sequence: Synthetic oligonucleotide
  Sense strand starting at position 813 of SEQ ID NO: 1882600
gugcaagauuuauaauaga

SEQ ID NO: 2133805 - RNA, 19 nt, Artificial Sequence
  Description of Artificial Sequence: Synthetic oligonucleotide
  Antisense strand to SEQ ID NO: 2133804
ucuauuauaaaucuugcac

SEQ ID NO: 2133806 - RNA, 19 nt, Artificial Sequence
  Description of Artificial Sequence: Synthetic oligonucleotide
  Sense strand starting at position 840 of SEQ ID NO: 1882600
ggaaauuaaggauguuggu

SEQ ID NO: 2133807 - RNA, 19 nt, Artificial Sequence
  Description of Artificial Sequence: Synthetic oligonucleotide
  Antisense strand to SEQ ID NO: 2133806
accaacauccuuaauuucc

SEQ ID NO: 2133808 - RNA, 19 nt, Artificial Sequence
  Description of Artificial Sequence: Synthetic oligonucleotide
  Sense strand starting at position 936 of SEQ ID NO: 1882600
uugguaaucugaguuggac

SEQ ID NO: 2133809 - RNA, 19 nt, Artificial Sequence
  Description of Artificial Sequence: Synthetic oligonucleotide
  Antisense strand to SEQ ID NO: 2133808
guccaacucagauuaccaa

SEQ ID NO: 2133810 - RNA, 19 nt, Artificial Sequence
  Description of Artificial Sequence: Synthetic oligonucleotide
  Sense strand starting at position 938 of SEQ ID NO: 1882600
gguaaucugaguuggacag

SEQ ID NO: 2133811 - RNA, 19 nt, Artificial Sequence
  Description of Artificial Sequence: Synthetic oligonucleotide
  Antisense strand to SEQ ID NO: 2133810
cuguccaacucagauuacc

SEQ ID NO: 2133812 - RNA, 19 nt, Artificial Sequence
  Description of Artificial Sequence: Synthetic oligonucleotide
  Sense strand starting at position 942 of SEQ ID NO: 1882600
aucugaguuggacagcuau

SEQ ID NO: 2133813 - RNA, 19 nt, Artificial Sequence
  Description of Artificial Sequence: Synthetic oligonucleotide
  Antisense strand to SEQ ID NO: 2133812
auagcuguccaacucagau

SEQ ID NO: 2133814 - RNA, 19 nt, Artificial Sequence
  Description of Artificial Sequence: Synthetic oligonucleotide
  Sense strand starting at position 1212 of SEQ ID NO: 1882600
ggguaauaaccagaguguc

SEQ ID NO: 2133815 - RNA, 19 nt, Artificial Sequence
  Description of Artificial Sequence: Synthetic oligonucleotide
  Antisense strand to SEQ ID NO: 2133814
gacacucugguuauuaccc

SEQ ID NO: 2133816 - RNA, 19 nt, Artificial Sequence
  Description of Artificial Sequence: Synthetic oligonucleotide
  Sense strand starting at position 1220 of SEQ ID NO: 1882600
accagagugucauugaauu

SEQ ID NO: 2133817 - RNA, 19 nt, Artificial Sequence
  Description of Artificial Sequence: Synthetic oligonucleotide
  Antisense strand to SEQ ID NO: 2133816
aauucaaugacacucuggu

SEQ ID NO: 2133818 - RNA, 19 nt, Artificial Sequence
  Description of Artificial Sequence: Synthetic oligonucleotide
  Sense strand starting at position 1226 of SEQ ID NO: 1882600
gugucauugaauugagaga

SEQ ID NO: 2133819 - RNA, 19 nt, Artificial Sequence
  Description of Artificial Sequence: Synthetic oligonucleotide
  Antisense strand to SEQ ID NO: 2133818
ucucucaauucaaugacac

SEQ ID NO: 2133820 - RNA, 19 nt, Artificial Sequence
  Description of Artificial Sequence: Synthetic oligonucleotide
  Sense strand starting at position 1288 of SEQ ID NO: 1882600
ggugaaagauuccuauaua

SEQ ID NO: 2133821 - RNA, 19 nt, Artificial Sequence
  Description of Artificial Sequence: Synthetic oligonucleotide
  Antisense strand to SEQ ID NO: 2133820
uauauaggaaucuuucacc

SEQ ID NO: 2133822 - RNA, 19 nt, Artificial Sequence
  Description of Artificial Sequence: Synthetic oligonucleotide
  Sense strand starting at position 2059 of SEQ ID NO: 1882600
gggaagguggccgaagauu

SEQ ID NO: 2133823 - RNA, 19 nt, Artificial Sequence
  Description of Artificial Sequence: Synthetic oligonucleotide
  Antisense strand to SEQ ID NO: 2133822
aaucuucggccaccuuccc

SEQ ID NO: 2133824 - RNA, 19 nt, Artificial Sequence
  Description of Artificial Sequence: Synthetic oligonucleotide
  Sense strand starting at position 2091 of SEQ ID NO: 1882600
aguggaguugggugaauag

SEQ ID NO: 2133825 - RNA, 19 nt, Artificial Sequence
  Description of Artificial Sequence: Synthetic oligonucleotide
  Antisense strand to SEQ ID NO: 2133824
cuauucacccaacuccacu

SEQ ID NO: 2133826 - RNA, 19 nt, Artificial Sequence
  Description of Artificial Sequence: Synthetic oligonucleotide
  Sense strand starting at position 2092 of SEQ ID NO: 1882600
guggaguugggugaauagu

SEQ ID NO: 2133827 - RNA, 19 nt, Artificial Sequence
  Description of Artificial Sequence: Synthetic oligonucleotide
  Antisense strand to SEQ ID NO: 2133826
acuauucacccaacuccac

SEQ ID NO: 2133828 - RNA, 19 nt, Artificial Sequence
  Description of Artificial Sequence: Synthetic oligonucleotide
  Sense strand starting at position 2200 of SEQ ID NO: 1882600
gugguuggucgcucgagga

SEQ ID NO: 2133829 - RNA, 19 nt, Artificial Sequence
  Description of Artificial Sequence: Synthetic oligonucleotide
  Antisense strand to SEQ ID NO: 2133828
uccucgagcgaccaaccac

SEQ ID NO: 2133830 - RNA, 19 nt, Artificial Sequence
  Description of Artificial Sequence: Synthetic oligonucleotide
  Sense strand starting at position 2245 of SEQ ID NO: 1882600
cggcacuuacccgaaggau

SEQ ID NO: 2133831 - RNA, 19 nt, Artificial Sequence
  Description of Artificial Sequence: Synthetic oligonucleotide
  Antisense strand to SEQ ID NO: 2133830
auccuucggguaagugccg

SEQ ID NO: 2133832 - RNA, 19 nt, Artificial Sequence
  Description of Artificial Sequence: Synthetic oligonucleotide
  Sense strand starting at position 2257 of SEQ ID NO: 1882600
gaaggauuccggugggagu

SEQ ID NO: 2133833 - RNA, 19 nt, Artificial Sequence
  Description of Artificial Sequence: Synthetic oligonucleotide
  Antisense strand to SEQ ID NO: 2133832
acucccaccggaauccuuc

SEQ ID NO: 2133834 - RNA, 19 nt, Artificial Sequence
  Description of Artificial Sequence: Synthetic oligonucleotide
  Sense strand starting at position 2333 of SEQ ID NO: 1882600
accuuacuuuaucuugagu

SEQ ID NO: 2133835 - RNA, 19 nt, Artificial Sequence
  Description of Artificial Sequence: Synthetic oligonucleotide
  Antisense strand to SEQ ID NO: 2133834
acucaagauaaaguaaggu

SEQ ID NO: 2133836 - RNA, 19 nt, Artificial Sequence
  Description of Artificial Sequence: Synthetic oligonucleotide
  Sense strand starting at position 2354 of SEQ ID NO: 1882600
gcccuuucccacuaggaau

SEQ ID NO: 2133837 - RNA, 19 nt, Artificial Sequence
  Description of Artificial Sequence: Synthetic oligonucleotide
  Antisense strand to SEQ ID NO: 2133836
auuccuagugggaaagggc

SEQ ID NO: 2133838 - RNA, 19 nt, Artificial Sequence
  Description of Artificial Sequence: Synthetic oligonucleotide
  Sense strand starting at position 2391 of SEQ ID NO: 1882600
gaaucaggguuauuccuuu

SEQ ID NO: 2133839 - RNA, 19 nt, Artificial Sequence
  Description of Artificial Sequence: Synthetic oligonucleotide
  Antisense strand to SEQ ID NO: 2133838
aaaggaauaacccugauuc

SEQ ID NO: 2133840 - RNA, 19 nt, Artificial Sequence
  Description of Artificial Sequence: Synthetic oligonucleotide
  Sense strand starting at position 2477 of SEQ ID NO: 1882600
gugcaaaugcacuaaauuc

SEQ ID NO: 2133841 - RNA, 19 nt, Artificial Sequence
  Description of Artificial Sequence: Synthetic oligonucleotide
  Antisense strand to SEQ ID NO: 2133840
gaauuuagugcauuugcac

SEQ ID NO: 2133842 - RNA, 19 nt, Artificial Sequence
  Description of Artificial Sequence: Synthetic oligonucleotide
  Sense strand starting at position 2505 of SEQ ID NO: 1882600
ucaguuguuuaacuggaga

SEQ ID NO: 2133843 - RNA, 19 nt, Artificial Sequence
  Description of Artificial Sequence: Synthetic oligonucleotide
  Antisense strand to SEQ ID NO: 2133842
ucuccaguuaaacaacuga

SEQ ID NO: 2133844 - RNA, 19 nt, Artificial Sequence
  Description of Artificial Sequence: Synthetic oligonucleotide
  Sense strand starting at position 2508 of SEQ ID NO: 1882600
guuguuuaacuggagagca

SEQ ID NO: 2133845 - RNA, 19 nt, Artificial Sequence
  Description of Artificial Sequence: Synthetic oligonucleotide
  Antisense strand to SEQ ID NO: 2133844
ugcucuccaguuaaacaac

SEQ ID NO: 2133846 - RNA, 19 nt, Artificial Sequence
  Description of Artificial Sequence: Synthetic oligonucleotide
  Sense strand starting at position 2630 of SEQ ID NO: 1882600
gggcaaaguccugagaagu

SEQ ID NO: 2133847 - RNA, 19 nt, Artificial Sequence
  Description of Artificial Sequence: Synthetic oligonucleotide
  Antisense strand to SEQ ID NO: 2133846
acuucucaggacuuugccc

SEQ ID NO: 2133848 - RNA, 19 nt, Artificial Sequence
  Description of Artificial Sequence: Synthetic oligonucleotide
  Sense strand starting at position 2698 of SEQ ID NO: 1882600
acagucuacuuggugauga

SEQ ID NO: 2133849 - RNA, 19 nt, Artificial Sequence
  Description of Artificial Sequence: Synthetic oligonucleotide
  Antisense strand to SEQ ID NO: 2133848
ucaucaccaaguagacugu

SEQ ID NO: 2133850 - RNA, 19 nt, Artificial Sequence
  Description of Artificial Sequence: Synthetic oligonucleotide
  Sense strand starting at position 2771 of SEQ ID NO: 1882600
uuccuucugggauaaucuu

SEQ ID NO: 2133851 - RNA, 19 nt, Artificial Sequence
  Description of Artificial Sequence: Synthetic oligonucleotide
  Antisense strand to SEQ ID NO: 2133850
aagauuaucccagaaggaa

SEQ ID NO: 2133852 - RNA, 19 nt, Artificial Sequence
  Description of Artificial Sequence: Synthetic oligonucleotide
  Sense strand starting at position 3125 of SEQ ID NO: 1882600
uggacucaacaguguuaau

SEQ ID NO: 2133853 - RNA, 19 nt, Artificial Sequence
  Description of Artificial Sequence: Synthetic oligonucleotide
  Antisense strand to SEQ ID NO: 2133852
auuaacacuguugagucca

SEQ ID NO: 2133854 - RNA, 19 nt, Artificial Sequence
  Description of Artificial Sequence: Synthetic oligonucleotide
  Sense strand starting at position 3365 of SEQ ID NO: 1882600
gcuucugugccuucugacu

SEQ ID NO: 2133855 - RNA, 19 nt, Artificial Sequence
  Description of Artificial Sequence: Synthetic oligonucleotide
  Antisense strand to SEQ ID NO: 2133854
agucagaaggcacagaagc

SEQ ID NO: 2133856 - RNA, 19 nt, Artificial Sequence
  Description of Artificial Sequence: Synthetic oligonucleotide
  Sense strand starting at position 3596 of SEQ ID NO: 1882600
gugugugaccaagacaaau

SEQ ID NO: 2133857 - RNA, 19 nt, Artificial Sequence
  Description of Artificial Sequence: Synthetic oligonucleotide
  Antisense strand to SEQ ID NO: 2133856
auuugucuuggucacacac

SEQ ID NO: 2133858 - RNA, 19 nt, Artificial Sequence
  Description of Artificial Sequence: Synthetic oligonucleotide
  Sense strand starting at position 3722 of SEQ ID NO: 1882600
gacaguguuuauuuagcac

SEQ ID NO: 2133859 - RNA, 19 nt, Artificial Sequence
  Description of Artificial Sequence: Synthetic oligonucleotide
  Antisense strand to SEQ ID NO: 2133858
gugcuaaauaaacacuguc

SEQ ID NO: 2133860 - RNA, 19 nt, Artificial Sequence
  Description of Artificial Sequence: Synthetic oligonucleotide
  Sense strand starting at position 3725 of SEQ ID NO: 1882600
aguguuuauuuagcacauu

SEQ ID NO: 2133861 - RNA, 19 nt, Artificial Sequence
  Description of Artificial Sequence: Synthetic oligonucleotide
  Antisense strand to SEQ ID NO: 2133860
aaugugcuaaauaaacacu

SEQ ID NO: 2133862 - RNA, 19 nt, Artificial Sequence
  Description of Artificial Sequence: Synthetic oligonucleotide
  Sense strand starting at position 3895 of SEQ ID NO: 1882600
guaccuuacuugguaaaga

SEQ ID NO: 2133863 - RNA, 19 nt, Artificial Sequence
  Description of Artificial Sequence: Synthetic oligonucleotide
  Antisense strand to SEQ ID NO: 2133862
ucuuuaccaaguaagguac

SEQ ID NO: 2133864 - RNA, 19 nt, Artificial Sequence
  Description of Artificial Sequence: Synthetic oligonucleotide
  Sense strand starting at position 1269 of SEQ ID NO: 1882601
ugcccauucguguccucau

SEQ ID NO: 2133865 - RNA, 19 nt, Artificial Sequence
  Description of Artificial Sequence: Synthetic oligonucleotide
  Antisense strand to SEQ ID NO: 2133864
augaggacacgaaugggca

SEQ ID NO: 2133866 - RNA, 19 nt, Artificial Sequence
  Description of Artificial Sequence: Synthetic oligonucleotide
  Sense strand starting at position 1270 of SEQ ID NO: 1882601
gcccauucguguccucaua

SEQ ID NO: 2133867 - RNA, 19 nt, Artificial Sequence
  Description of Artificial Sequence: Synthetic oligonucleotide
  Antisense strand to SEQ ID NO: 2133866
uaugaggacacgaaugggc

SEQ ID NO: 2133868 - RNA, 19 nt, Artificial Sequence
  Description of Artificial Sequence: Synthetic oligonucleotide
  Sense strand starting at position 1272 of SEQ ID NO: 1882601
ccauucguguccucauacu

SEQ ID NO: 2133869 - RNA, 19 nt, Artificial Sequence
  Description of Artificial Sequence: Synthetic oligonucleotide
  Antisense strand to SEQ ID NO: 2133868
aguaugaggacacgaaugg

SEQ ID NO: 2133870 - RNA, 19 nt, Artificial Sequence
  Description of Artificial Sequence: Synthetic oligonucleotide
  Sense strand starting at position 1959 of SEQ ID NO: 1882601
cagggagguuugccacuau

SEQ ID NO: 2133871 - RNA, 19 nt, Artificial Sequence
  Description of Artificial Sequence: Synthetic oligonucleotide
  Antisense strand to SEQ ID NO: 2133870
auaguggcaaaccucccug

SEQ ID NO: 2133872 - RNA, 19 nt, Artificial Sequence
  Description of Artificial Sequence: Synthetic oligonucleotide
  Sense strand starting at position 2244 of SEQ ID NO: 1882601
gcacaaguacuuuguuaaa

SEQ ID NO: 2133873 - RNA, 19 nt, Artificial Sequence
  Description of Artificial Sequence: Synthetic oligonucleotide
  Antisense strand to SEQ ID NO: 2133872
uuuaacaaaguacuugugc

SEQ ID NO: 2133874 - RNA, 19 nt, Artificial Sequence
  Description of Artificial Sequence: Synthetic oligonucleotide
  Sense strand starting at position 56 of SEQ ID NO: 1882602
uggccagggccuugaugau

SEQ ID NO: 2133875 - RNA, 19 nt, Artificial Sequence
  Description of Artificial Sequence: Synthetic oligonucleotide
  Antisense strand to SEQ ID NO: 2133874
aucaucaaggcccuggcca

SEQ ID NO: 2133876 - RNA, 19 nt, Artificial Sequence
  Description of Artificial Sequence: Synthetic oligonucleotide
  Sense strand starting at position 304 of SEQ ID NO: 1882602
gauggcuuugagugugaga

SEQ ID NO: 2133877 - RNA, 19 nt, Artificial Sequence
  Description of Artificial Sequence: Synthetic oligonucleotide
  Antisense strand to SEQ ID NO: 2133876
ucucacacucaaagccauc

SEQ ID NO: 2133878 - RNA, 19 nt, Artificial Sequence
  Description of Artificial Sequence: Synthetic oligonucleotide
  Sense strand starting at position 306 of SEQ ID NO: 1882602
uggcuuugagugugagaau

SEQ ID NO: 2133879 - RNA, 19 nt, Artificial Sequence
  Description of Artificial Sequence: Synthetic oligonucleotide
  Antisense strand to SEQ ID NO: 2133878
auucucacacucaaagcca

SEQ ID NO: 2133880 - RNA, 19 nt, Artificial Sequence
  Description of Artificial Sequence: Synthetic oligonucleotide
  Sense strand starting at position 318 of SEQ ID NO: 1882602
ugagaauagcugggcgaca

SEQ ID NO: 2133881 - RNA, 19 nt, Artificial Sequence
  Description of Artificial Sequence: Synthetic oligonucleotide
  Antisense strand to SEQ ID NO: 2133880
ugucgcccagcuauucuca

SEQ ID NO: 2133882 - RNA, 19 nt, Artificial Sequence
  Description of Artificial Sequence: Synthetic oligonucleotide
  Sense strand starting at position 485 of SEQ ID NO: 1882602
gggcgaauuguaaguggua

SEQ ID NO: 2133883 - RNA, 19 nt, Artificial Sequence
  Description of Artificial Sequence: Synthetic oligonucleotide
  Antisense strand to SEQ ID NO: 2133882
uaccacuuacaauucgccc

SEQ ID NO: 2133884 - RNA, 19 nt, Artificial Sequence
  Description of Artificial Sequence: Synthetic oligonucleotide
  Sense strand starting at position 739 of SEQ ID NO: 1882602
aacgguugacuaggauauu

SEQ ID NO: 2133885 - RNA, 19 nt, Artificial Sequence
  Description of Artificial Sequence: Synthetic oligonucleotide
  Antisense strand to SEQ ID NO: 2133884
aauauccuagucaaccguu

SEQ ID NO: 2133886 - RNA, 19 nt, Artificial Sequence
  Description of Artificial Sequence: Synthetic oligonucleotide
  Sense strand starting at position 780 of SEQ ID NO: 1882602
gaggucuuccaugaagggu

SEQ ID NO: 2133887 - RNA, 19 nt, Artificial Sequence
  Description of Artificial Sequence: Synthetic oligonucleotide
  Antisense strand to SEQ ID NO: 2133886
acccuucauggaagaccuc

SEQ ID NO: 2133888 - RNA, 19 nt, Artificial Sequence
  Description of Artificial Sequence: Synthetic oligonucleotide
  Sense strand starting at position 797 of SEQ ID NO: 1882602
gugccuucuccaggaagag

SEQ ID NO: 2133889 - RNA, 19 nt, Artificial Sequence
  Description of Artificial Sequence: Synthetic oligonucleotide
  Antisense strand to SEQ ID NO: 2133888
cucuuccuggagaaggcac

SEQ ID NO: 2133890 - RNA, 19 nt, Artificial Sequence
  Description of Artificial Sequence: Synthetic oligonucleotide
  Sense strand starting at position 1310 of SEQ ID NO: 1882602
ccuggcuuccgaggagaaa

SEQ ID NO: 2133891 - RNA, 19 nt, Artificial Sequence
  Description of Artificial Sequence: Synthetic oligonucleotide
  Antisense strand to SEQ ID NO: 2133890
uuucuccucggaagccagg

SEQ ID NO: 2133892 - RNA, 19 nt, Artificial Sequence
  Description of Artificial Sequence: Synthetic oligonucleotide
  Sense strand starting at position 1334 of SEQ ID NO: 1882602
ucuggucgucaggagugaa

SEQ ID NO: 2133893 - RNA, 19 nt, Artificial Sequence
  Description of Artificial Sequence: Synthetic oligonucleotide
  Antisense strand to SEQ ID NO: 2133892
uucacuccugacgaccaga

SEQ ID NO: 2133894 - RNA, 19 nt, Artificial Sequence
  Description of Artificial Sequence: Synthetic oligonucleotide
  Sense strand starting at position 1337 of SEQ ID NO: 1882602
ggucgucaggagugaaacu

SEQ ID NO: 2133895 - RNA, 19 nt, Artificial Sequence
  Description of Artificial Sequence: Synthetic oligonucleotide
  Antisense strand to SEQ ID NO: 2133894
aguuucacuccugacgacc

SEQ ID NO: 2133896 - RNA, 19 nt, Artificial Sequence
  Description of Artificial Sequence: Synthetic oligonucleotide
  Sense strand starting at position 1346 of SEQ ID NO: 1882602
gagugaaacugcucuugau

SEQ ID NO: 2133897 - RNA, 19 nt, Artificial Sequence
  Description of Artificial Sequence: Synthetic oligonucleotide
  Antisense strand to SEQ ID NO: 2133896
aucaagagcaguuucacuc

SEQ ID NO: 2133898 - RNA, 19 nt, Artificial Sequence
  Description of Artificial Sequence: Synthetic oligonucleotide
  Sense strand starting at position 1611 of SEQ ID NO: 1882602
gugggcuucuuauuucuuu

SEQ ID NO: 2133899 - RNA, 19 nt, Artificial Sequence
  Description of Artificial Sequence: Synthetic oligonucleotide
  Antisense strand to SEQ ID NO: 2133898
aaagaaauaagaagcccac

SEQ ID NO: 2133900 - RNA, 19 nt, Artificial Sequence
  Description of Artificial Sequence: Synthetic oligonucleotide
  Sense strand starting at position 1927 of SEQ ID NO: 1882602
ggcagcuauggucaugacu

SEQ ID NO: 2133901 - RNA, 19 nt, Artificial Sequence
  Description of Artificial Sequence: Synthetic oligonucleotide
  Antisense strand to SEQ ID NO: 2133900
agucaugaccauagcugcc

SEQ ID NO: 2133902 - RNA, 19 nt, Artificial Sequence
  Description of Artificial Sequence: Synthetic oligonucleotide
  Sense strand starting at position 2198 of SEQ ID NO: 1882602
ugugcauauucuuugacac

SEQ ID NO: 2133903 - RNA, 19 nt, Artificial Sequence
  Description of Artificial Sequence: Synthetic oligonucleotide
  Antisense strand to SEQ ID NO: 2133902
gugucaaagaauaugcaca

SEQ ID NO: 2133904 - RNA, 19 nt, Artificial Sequence
  Description of Artificial Sequence: Synthetic oligonucleotide
  Sense strand starting at position 2205 of SEQ ID NO: 1882602
auucuuugacacgggaauu

SEQ ID NO: 2133905 - RNA, 19 nt, Artificial Sequence
  Description of Artificial Sequence: Synthetic oligonucleotide
  Antisense strand to SEQ ID NO: 2133904
aauucccgugucaaagaau

SEQ ID NO: 2133906 - RNA, 19 nt, Artificial Sequence
  Description of Artificial Sequence: Synthetic oligonucleotide
  Sense strand starting at position 2216 of SEQ ID NO: 1882602
cgggaauucuacuucuagg

SEQ ID NO: 2133907 - RNA, 19 nt, Artificial Sequence
  Description of Artificial Sequence: Synthetic oligonucleotide
  Antisense strand to SEQ ID NO: 2133906
ccuagaaguagaauucccg

SEQ ID NO: 2133908 - RNA, 19 nt, Artificial Sequence
  Description of Artificial Sequence: Synthetic oligonucleotide
  Sense strand starting at position 2232 of SEQ ID NO: 1882602
aggaauuuauccuagagac

SEQ ID NO: 2133909 - RNA, 19 nt, Artificial Sequence
  Description of Artificial Sequence: Synthetic oligonucleotide
  Antisense strand to SEQ ID NO: 2133908
gucucuaggauaaauuccu

SEQ ID NO: 2133910 - RNA, 19 nt, Artificial Sequence
  Description of Artificial Sequence: Synthetic oligonucleotide
  Sense strand starting at position 2303 of SEQ ID NO: 1882602
aauggaaagugauaggaaa

SEQ ID NO: 2133911 - RNA, 19 nt, Artificial Sequence
  Description of Artificial Sequence: Synthetic oligonucleotide
  Antisense strand to SEQ ID NO: 2133910
uuuccuaucacuuuccauu

SEQ ID NO: 2133912 - RNA, 19 nt, Artificial Sequence
  Description of Artificial Sequence: Synthetic oligonucleotide
  Sense strand starting at position 2854 of SEQ ID NO: 1882602
gcuguuucuaguggaugaa

SEQ ID NO: 2133913 - RNA, 19 nt, Artificial Sequence
  Description of Artificial Sequence: Synthetic oligonucleotide
  Antisense strand to SEQ ID NO: 2133912
uucauccacuagaaacagc

SEQ ID NO: 2133914 - RNA, 19 nt, Artificial Sequence
  Description of Artificial Sequence: Synthetic oligonucleotide
  Sense strand starting at position 2855 of SEQ ID NO: 1882602
cuguuucuaguggaugaaa

SEQ ID NO: 2133915 - RNA, 19 nt, Artificial Sequence
  Description of Artificial Sequence: Synthetic oligonucleotide
  Antisense strand to SEQ ID NO: 2133914
uuucauccacuagaaacag

SEQ ID NO: 2133916 - RNA, 19 nt, Artificial Sequence
  Description of Artificial Sequence: Synthetic oligonucleotide
  Sense strand starting at position 2857 of SEQ ID NO: 1882602
guuucuaguggaugaaauu

SEQ ID NO: 2133917 - RNA, 19 nt, Artificial Sequence
  Description of Artificial Sequence: Synthetic oligonucleotide
  Antisense strand to SEQ ID NO: 2133916
aauuucauccacuagaaac

SEQ ID NO: 2133918 - RNA, 19 nt, Artificial Sequence
  Description of Artificial Sequence: Synthetic oligonucleotide
  Sense strand starting at position 2879 of SEQ ID NO: 1882602
ugacuagugguaggaauaa

SEQ ID NO: 2133919 - RNA, 19 nt, Artificial Sequence
  Description of Artificial Sequence: Synthetic oligonucleotide
  Antisense strand to SEQ ID NO: 2133918
uuauuccuaccacuaguca

SEQ ID NO: 2133920 - RNA, 19 nt, Artificial Sequence
  Description of Artificial Sequence: Synthetic oligonucleotide
  Sense strand starting at position 2888 of SEQ ID NO: 1882602
guaggaauaaguuguauau

SEQ ID NO: 2133921 - RNA, 19 nt, Artificial Sequence
  Description of Artificial Sequence: Synthetic oligonucleotide
  Antisense strand to SEQ ID NO: 2133920
auauacaacuuauuccuac

SEQ ID NO: 2133922 - RNA, 19 nt, Artificial Sequence
  Description of Artificial Sequence: Synthetic oligonucleotide
  Sense strand starting at position 3140 of SEQ ID NO: 1882602
gaaauauugagguguuuga

SEQ ID NO: 2133923 - RNA, 19 nt, Artificial Sequence
  Description of Artificial Sequence: Synthetic oligonucleotide
  Antisense strand to SEQ ID NO: 2133922
ucaaacaccucaauauuuc

SEQ ID NO: 2133924 - RNA, 19 nt, Artificial Sequence
  Description of Artificial Sequence: Synthetic oligonucleotide
  Sense strand starting at position 3144 of SEQ ID NO: 1882602
uauugagguguuugauaug

SEQ ID NO: 2133925 - RNA, 19 nt, Artificial Sequence
  Description of Artificial Sequence: Synthetic oligonucleotide
  Antisense strand to SEQ ID NO: 2133924
cauaucaaacaccucaaua

SEQ ID NO: 2133926 - RNA, 19 nt, Artificial Sequence
  Description of Artificial Sequence: Synthetic oligonucleotide
  Sense strand starting at position 3154 of SEQ ID NO: 1882602
uuugauaugcucugaaacu

SEQ ID NO: 2133927 - RNA, 19 nt, Artificial Sequence
  Description of Artificial Sequence: Synthetic oligonucleotide
  Antisense strand to SEQ ID NO: 2133926
aguuucagagcauaucaaa

SEQ ID NO: 2133928 - RNA, 19 nt, Artificial Sequence
  Description of Artificial Sequence: Synthetic oligonucleotide
  Sense strand starting at position 3163 of SEQ ID NO: 1882602
cucugaaacucugcuggaa

SEQ ID NO: 2133929 - RNA, 19 nt, Artificial Sequence
  Description of Artificial Sequence: Synthetic oligonucleotide
  Antisense strand to SEQ ID NO: 2133928
uuccagcagaguuucagag

SEQ ID NO: 2133930 - RNA, 19 nt, Artificial Sequence
  Description of Artificial Sequence: Synthetic oligonucleotide
  Sense strand starting at position 3167 of SEQ ID NO: 1882602
gaaacucugcuggaaguua

SEQ ID NO: 2133931 - RNA, 19 nt, Artificial Sequence
  Description of Artificial Sequence: Synthetic oligonucleotide
  Antisense strand to SEQ ID NO: 2133930
uaacuuccagcagaguuuc

SEQ ID NO: 2133932 - RNA, 19 nt, Artificial Sequence
  Description of Artificial Sequence: Synthetic oligonucleotide
  Sense strand starting at position 3261 of SEQ ID NO: 1882602
cucccaaagguuuauguau

SEQ ID NO: 2133933 - RNA, 19 nt, Artificial Sequence
  Description of Artificial Sequence: Synthetic oligonucleotide
  Antisense strand to SEQ ID NO: 2133932
auacauaaaccuuugggag

SEQ ID NO: 2133934 - RNA, 19 nt, Artificial Sequence
  Description of Artificial Sequence: Synthetic oligonucleotide
  Sense strand starting at position 3455 of SEQ ID NO: 1882602
ugcugaaugaguugaccaa

SEQ ID NO: 2133935 - RNA, 19 nt, Artificial Sequence
  Description of Artificial Sequence: Synthetic oligonucleotide
  Antisense strand to SEQ ID NO: 2133934
uuggucaacucauucagca

SEQ ID NO: 2133936 - RNA, 19 nt, Artificial Sequence
  Description of Artificial Sequence: Synthetic oligonucleotide
  Sense strand starting at position 3542 of SEQ ID NO: 1882602
ugaacaaacgugcauguua

SEQ ID NO: 2133937 - RNA, 19 nt, Artificial Sequence
  Description of Artificial Sequence: Synthetic oligonucleotide
  Antisense strand to SEQ ID NO: 2133936
uaacaugcacguuuguuca

SEQ ID NO: 2133938 - RNA, 19 nt, Artificial Sequence
  Description of Artificial Sequence: Synthetic oligonucleotide
  Sense strand starting at position 3607 of SEQ ID NO: 1882602
uaggcucuauacgucaaau

SEQ ID NO: 2133939 - RNA, 19 nt, Artificial Sequence
  Description of Artificial Sequence: Synthetic oligonucleotide
  Antisense strand to SEQ ID NO: 2133938
auuugacguauagagccua

SEQ ID NO: 2133940 - RNA, 19 nt, Artificial Sequence
  Description of Artificial Sequence: Synthetic oligonucleotide
  Sense strand starting at position 3617 of SEQ ID NO: 1882602
acgucaaauggucacuuua

SEQ ID NO: 2133941 - RNA, 19 nt, Artificial Sequence
  Description of Artificial Sequence: Synthetic oligonucleotide
  Antisense strand to SEQ ID NO: 2133940
uaaagugaccauuugacgu

SEQ ID NO: 2133942 - RNA, 19 nt, Artificial Sequence
  Description of Artificial Sequence: Synthetic oligonucleotide
  Sense strand starting at position 3676 of SEQ ID NO: 1882602
cuagaaugaguccaugguu

SEQ ID NO: 2133943 - RNA, 19 nt, Artificial Sequence
  Description of Artificial Sequence: Synthetic oligonucleotide
  Antisense strand to SEQ ID NO: 2133942
aaccauggacucauucuag

SEQ ID NO: 2133944 - RNA, 19 nt, Artificial Sequence
  Description of Artificial Sequence: Synthetic oligonucleotide
  Sense strand starting at position 3679 of SEQ ID NO: 1882602
gaaugaguccaugguuggu

SEQ ID NO: 2133945 - RNA, 19 nt, Artificial Sequence
  Description of Artificial Sequence: Synthetic oligonucleotide
  Antisense strand to SEQ ID NO: 2133944
accaaccauggacucauuc

SEQ ID NO: 2133946 - RNA, 19 nt, Artificial Sequence
  Description of Artificial Sequence: Synthetic oligonucleotide
  Sense strand starting at position 3794 of SEQ ID NO: 1882602
agcugcaaauuguuugaau

SEQ ID NO: 2133947 - RNA, 19 nt, Artificial Sequence
  Description of Artificial Sequence: Synthetic oligonucleotide
  Antisense strand to SEQ ID NO: 2133946
auucaaacaauuugcagcu

SEQ ID NO: 2133948 - RNA, 19 nt, Artificial Sequence
  Description of Artificial Sequence: Synthetic oligonucleotide
  Sense strand starting at position 3795 of SEQ ID NO: 1882602
gcugcaaauuguuugaaua

SEQ ID NO: 2133949 - RNA, 19 nt, Artificial Sequence
  Description of Artificial Sequence: Synthetic oligonucleotide
  Antisense strand to SEQ ID NO: 2133948
uauucaaacaauuugcagc

SEQ ID NO: 2133950 - RNA, 19 nt, Artificial Sequence
  Description of Artificial Sequence: Synthetic oligonucleotide
  Sense strand starting at position 3796 of SEQ ID NO: 1882602
cugcaaauuguuugaauau

SEQ ID NO: 2133951 - RNA, 19 nt, Artificial Sequence
  Description of Artificial Sequence: Synthetic oligonucleotide
  Antisense strand to SEQ ID NO: 2133950
auauucaaacaauuugcag

SEQ ID NO: 2133952 - RNA, 19 nt, Artificial Sequence
  Description of Artificial Sequence: Synthetic oligonucleotide
  Sense strand starting at position 3903 of SEQ ID NO: 1882602
ggaagcgugacuuaaaccu

SEQ ID NO: 2133953 - RNA, 19 nt, Artificial Sequence
  Description of Artificial Sequence: Synthetic oligonucleotide
  Antisense strand to SEQ ID NO: 2133952
agguuuaagucacgcuucc

SEQ ID NO: 2133954 - RNA, 19 nt, Artificial Sequence
  Description of Artificial Sequence: Synthetic oligonucleotide
  Sense strand starting at position 149 of SEQ ID NO: 1882603
uauaauaacgggugcaauu

SEQ ID NO: 2133955 - RNA, 19 nt, Artificial Sequence
  Description of Artificial Sequence: Synthetic oligonucleotide
  Antisense strand to SEQ ID NO: 2133954
aauugcacccguuauuaua

SEQ ID NO: 2133956 - RNA, 19 nt, Artificial Sequence
  Description of Artificial Sequence: Synthetic oligonucleotide
  Sense strand starting at position 317 of SEQ ID NO: 1882603
auggauugcuauuagauuu

SEQ ID NO: 2133957 - RNA, 19 nt, Artificial Sequence
  Description of Artificial Sequence: Synthetic oligonucleotide
  Antisense strand to SEQ ID NO: 2133956
aaaucuaauagcaauccau

SEQ ID NO: 2133958 - RNA, 19 nt, Artificial Sequence
  Description of Artificial Sequence: Synthetic oligonucleotide
  Sense strand starting at position 397 of SEQ ID NO: 1882603
aguuauuuaugccaugaaa

SEQ ID NO: 2133959 - RNA, 19 nt, Artificial Sequence
  Description of Artificial Sequence: Synthetic oligonucleotide
  Antisense strand to SEQ ID NO: 2133958
uuucauggcauaaauaacu

SEQ ID NO: 2133960 - RNA, 19 nt, Artificial Sequence
  Description of Artificial Sequence: Synthetic oligonucleotide
  Sense strand starting at position 415 of SEQ ID NO: 1882603
aaauaaagguagcuaguau

SEQ ID NO: 2133961 - RNA, 19 nt, Artificial Sequence
  Description of Artificial Sequence: Synthetic oligonucleotide
  Antisense strand to SEQ ID NO: 2133960
auacuagcuaccuuuauuu

SEQ ID NO: 2133962 - RNA, 19 nt, Artificial Sequence
  Description of Artificial Sequence: Synthetic oligonucleotide
  Sense strand starting at position 436 of SEQ ID NO: 1882603
uggccauaaggucaaauau

SEQ ID NO: 2133963 - RNA, 19 nt, Artificial Sequence
  Description of Artificial Sequence: Synthetic oligonucleotide
  Antisense strand to SEQ ID NO: 2133962
auauuugaccuuauggcca

SEQ ID NO: 2133964 - RNA, 19 nt, Artificial Sequence
  Description of Artificial Sequence: Synthetic oligonucleotide
  Sense strand starting at position 599 of SEQ ID NO: 1882603
gcaguuucugcugucauua

SEQ ID NO: 2133965 - RNA, 19 nt, Artificial Sequence
  Description of Artificial Sequence: Synthetic oligonucleotide
  Antisense strand to SEQ ID NO: 2133964
uaaugacagcagaaacugc

SEQ ID NO: 2133966 - RNA, 19 nt, Artificial Sequence
  Description of Artificial Sequence: Synthetic oligonucleotide
  Sense strand starting at position 685 of SEQ ID NO: 1882603
uggacuucuagagguucca

SEQ ID NO: 2133967 - RNA, 19 nt, Artificial Sequence
  Description of Artificial Sequence: Synthetic oligonucleotide
  Antisense strand to SEQ ID NO: 2133966
uggaaccucuagaagucca

SEQ ID NO: 2133968 - RNA, 19 nt, Artificial Sequence
  Description of Artificial Sequence: Synthetic oligonucleotide
  Sense strand starting at position 2098 of SEQ ID NO: 1882603
gugagauuaguaugggcaa

SEQ ID NO: 2133969 - RNA, 19 nt, Artificial Sequence
  Description of Artificial Sequence: Synthetic oligonucleotide
  Antisense strand to SEQ ID NO: 2133968
uugcccauacuaaucucac

SEQ ID NO: 2133970 - RNA, 19 nt, Artificial Sequence
  Description of Artificial Sequence: Synthetic oligonucleotide
  Sense strand starting at position 2395 of SEQ ID NO: 1882603
augaucagucuugacaugu

SEQ ID NO: 2133971 - RNA, 19 nt, Artificial Sequence
  Description of Artificial Sequence: Synthetic oligonucleotide
  Antisense strand to SEQ ID NO: 2133970
acaugucaagacugaucau

SEQ ID NO: 2133972 - RNA, 19 nt, Artificial Sequence
  Description of Artificial Sequence: Synthetic oligonucleotide
  Sense strand starting at position 2514 of SEQ ID NO: 1882603
uuggaagacucauuguaaa

SEQ ID NO: 2133973 - RNA, 19 nt, Artificial Sequence
  Description of Artificial Sequence: Synthetic oligonucleotide
  Antisense strand to SEQ ID NO: 2133972
uuuacaaugagucuuccaa

SEQ ID NO: 2133974 - RNA, 19 nt, Artificial Sequence
  Description of Artificial Sequence: Synthetic oligonucleotide
  Sense strand starting at position 2545 of SEQ ID NO: 1882603
ggcuguuugacagaauugu

SEQ ID NO: 2133975 - RNA, 19 nt, Artificial Sequence
  Description of Artificial Sequence: Synthetic oligonucleotide
  Antisense strand to SEQ ID NO: 2133974
acaauucugucaaacagcc

SEQ ID NO: 2133976 - RNA, 19 nt, Artificial Sequence
  Description of Artificial Sequence: Synthetic oligonucleotide
  Sense strand starting at position 2567 of SEQ ID NO: 1882603
uaaugaauguuggccagaa

SEQ ID NO: 2133977 - RNA, 19 nt, Artificial Sequence
  Description of Artificial Sequence: Synthetic oligonucleotide
  Antisense strand to SEQ ID NO: 2133976
uucuggccaacauucauua

SEQ ID NO: 2133978 - RNA, 19 nt, Artificial Sequence
  Description of Artificial Sequence: Synthetic oligonucleotide
  Sense strand starting at position 2568 of SEQ ID NO: 1882603
aaugaauguuggccagaaa

SEQ ID NO: 2133979 - RNA, 19 nt, Artificial Sequence
  Description of Artificial Sequence: Synthetic oligonucleotide
  Antisense strand to SEQ ID NO: 2133978
uuucuggccaacauucauu

SEQ ID NO: 2133980 - RNA, 19 nt, Artificial Sequence
  Description of Artificial Sequence: Synthetic oligonucleotide
  Sense strand starting at position 2571 of SEQ ID NO: 1882603
gaauguuggccagaaaccu

SEQ ID NO: 2133981 - RNA, 19 nt, Artificial Sequence
  Description of Artificial Sequence: Synthetic oligonucleotide
  Antisense strand to SEQ ID NO: 2133980
agguuucuggccaacauuc

SEQ ID NO: 2133982 - RNA, 19 nt, Artificial Sequence
  Description of Artificial Sequence: Synthetic oligonucleotide
  Sense strand starting at position 2672 of SEQ ID NO: 1882603
uuguuuaucccguugcuuu

SEQ ID NO: 2133983 - RNA, 19 nt, Artificial Sequence
  Description of Artificial Sequence: Synthetic oligonucleotide
  Antisense strand to SEQ ID NO: 2133982
aaagcaacgggauaaacaa

SEQ ID NO: 2133984 - RNA, 19 nt, Artificial Sequence
  Description of Artificial Sequence: Synthetic oligonucleotide
  Sense strand starting at position 2704 of SEQ ID NO: 1882603
ugcacaucuuugcuggaga

SEQ ID NO: 2133985 - RNA, 19 nt, Artificial Sequence
  Description of Artificial Sequence: Synthetic oligonucleotide
  Antisense strand to SEQ ID NO: 2133984
ucuccagcaaagaugugca

SEQ ID NO: 2133986 - RNA, 19 nt, Artificial Sequence
  Description of Artificial Sequence: Synthetic oligonucleotide
  Sense strand starting at position 2707 of SEQ ID NO: 1882603
acaucuuugcuggagaauu

SEQ ID NO: 2133987 - RNA, 19 nt, Artificial Sequence
  Description of Artificial Sequence: Synthetic oligonucleotide
  Antisense strand to SEQ ID NO: 2133986
aauucuccagcaaagaugu

SEQ ID NO: 2133988 - RNA, 19 nt, Artificial Sequence
  Description of Artificial Sequence: Synthetic oligonucleotide
  Sense strand starting at position 2715 of SEQ ID NO: 1882603
gcuggagaauuugacacaa

SEQ ID NO: 2133989 - RNA, 19 nt, Artificial Sequence
  Description of Artificial Sequence: Synthetic oligonucleotide
  Antisense strand to SEQ ID NO: 2133988
uugugucaaauucuccagc

SEQ ID NO: 2133990 - RNA, 19 nt, Artificial Sequence
  Description of Artificial Sequence: Synthetic oligonucleotide
  Sense strand starting at position 2765 of SEQ ID NO: 1882603
uguacacauguguaggauu

SEQ ID NO: 2133991 - RNA, 19 nt, Artificial Sequence
  Description of Artificial Sequence: Synthetic oligonucleotide
  Antisense strand to SEQ ID NO: 2133990
aauccuacacauguguaca

SEQ ID NO: 2133992 - RNA, 19 nt, Artificial Sequence
  Description of Artificial Sequence: Synthetic oligonucleotide
  Sense strand starting at position 2818 of SEQ ID NO: 1882603
aggaaagugucuucaguug

SEQ ID NO: 2133993 - RNA, 19 nt, Artificial Sequence
  Description of Artificial Sequence: Synthetic oligonucleotide
  Antisense strand to SEQ ID NO: 2133992
caacugaagacacuuuccu

SEQ ID NO: 2133994 - RNA, 19 nt, Artificial Sequence
  Description of Artificial Sequence: Synthetic oligonucleotide
  Sense strand starting at position 3060 of SEQ ID NO: 1882603
aagugagaaugugugagaa

SEQ ID NO: 2133995 - RNA, 19 nt, Artificial Sequence
  Description of Artificial Sequence: Synthetic oligonucleotide
  Antisense strand to SEQ ID NO: 2133994
uucucacacauucucacuu

SEQ ID NO: 2133996 - RNA, 19 nt, Artificial Sequence
  Description of Artificial Sequence: Synthetic oligonucleotide
  Sense strand starting at position 3068 of SEQ ID NO: 1882603
augugugagaaacgauaga

SEQ ID NO: 2133997 - RNA, 19 nt, Artificial Sequence
  Description of Artificial Sequence: Synthetic oligonucleotide
  Antisense strand to SEQ ID NO: 2133996
ucuaucguuucucacacau

SEQ ID NO: 2133998 - RNA, 19 nt, Artificial Sequence
  Description of Artificial Sequence: Synthetic oligonucleotide
  Sense strand starting at position 3112 of SEQ ID NO: 1882603
cagauaauaguaugcagua

SEQ ID NO: 2133999 - RNA, 19 nt, Artificial Sequence
  Description of Artificial Sequence: Synthetic oligonucleotide
  Antisense strand to SEQ ID NO: 2133998
uacugcauacuauuaucug

SEQ ID NO: 2134000 - RNA, 19 nt, Artificial Sequence
  Description of Artificial Sequence: Synthetic oligonucleotide
  Sense strand starting at position 3151 of SEQ ID NO: 1882603
ggauauugugcucaguaug

SEQ ID NO: 2134001 - RNA, 19 nt, Artificial Sequence
  Description of Artificial Sequence: Synthetic oligonucleotide
  Antisense strand to SEQ ID NO: 2134000
cauacugagcacaauaucc

SEQ ID NO: 2134002 - RNA, 19 nt, Artificial Sequence
  Description of Artificial Sequence: Synthetic oligonucleotide
  Sense strand starting at position 3154 of SEQ ID NO: 1882603
uauugugcucaguauggaa

SEQ ID NO: 2134003 - RNA, 19 nt, Artificial Sequence
  Description of Artificial Sequence: Synthetic oligonucleotide
  Antisense strand to SEQ ID NO: 2134002
uuccauacugagcacaaua

SEQ ID NO: 2134004 - RNA, 19 nt, Artificial Sequence
  Description of Artificial Sequence: Synthetic oligonucleotide
  Sense strand starting at position 3158 of SEQ ID NO: 1882603
gugcucaguauggaaauaa

SEQ ID NO: 2134005 - RNA, 19 nt, Artificial Sequence
  Description of Artificial Sequence: Synthetic oligonucleotide
  Antisense strand to SEQ ID NO: 2134004
uuauuuccauacugagcac

SEQ ID NO: 2134006 - RNA, 19 nt, Artificial Sequence
  Description of Artificial Sequence: Synthetic oligonucleotide
  Sense strand starting at position 3183 of SEQ ID NO: 1882603
caaauaugggcaugccaga

SEQ ID NO: 2134007 - RNA, 19 nt, Artificial Sequence
  Description of Artificial Sequence: Synthetic oligonucleotide
  Antisense strand to SEQ ID NO: 2134006
ucuggcaugcccauauuug

SEQ ID NO: 2134008 - RNA, 19 nt, Artificial Sequence
  Description of Artificial Sequence: Synthetic oligonucleotide
  Sense strand starting at position 3188 of SEQ ID NO: 1882603
augggcaugccagaaaguu

SEQ ID NO: 2134009 - RNA, 19 nt, Artificial Sequence
  Description of Artificial Sequence: Synthetic oligonucleotide
  Antisense strand to SEQ ID NO: 2134008
aacuuucuggcaugcccau

SEQ ID NO: 2134010 - RNA, 19 nt, Artificial Sequence
  Description of Artificial Sequence: Synthetic oligonucleotide
  Sense strand starting at position 3209 of SEQ ID NO: 1882603
ugauucugugcuuauauua

SEQ ID NO: 2134011 - RNA, 19 nt, Artificial Sequence
  Description of Artificial Sequence: Synthetic oligonucleotide
  Antisense strand to SEQ ID NO: 2134010
uaauauaagcacagaauca

SEQ ID NO: 2134012 - RNA, 19 nt, Artificial Sequence
  Description of Artificial Sequence: Synthetic oligonucleotide
  Sense strand starting at position 3546 of SEQ ID NO: 1882603
augggaaauuggcuguaca

SEQ ID NO: 2134013 - RNA, 19 nt, Artificial Sequence
  Description of Artificial Sequence: Synthetic oligonucleotide
  Antisense strand to SEQ ID NO: 2134012
uguacagccaauuucccau

SEQ ID NO: 2134014 - RNA, 19 nt, Artificial Sequence
  Description of Artificial Sequence: Synthetic oligonucleotide
  Sense strand starting at position 3592 of SEQ ID NO: 1882603
gcuucuguaggguauuaga

SEQ ID NO: 2134015 - RNA, 19 nt, Artificial Sequence
  Description of Artificial Sequence: Synthetic oligonucleotide
  Antisense strand to SEQ ID NO: 2134014
ucuaauacccuacagaagc

SEQ ID NO: 2134016 - RNA, 19 nt, Artificial Sequence
  Description of Artificial Sequence: Synthetic oligonucleotide
  Sense strand starting at position 3600 of SEQ ID NO: 1882603
aggguauuagaguaaguua

SEQ ID NO: 2134017 - RNA, 19 nt, Artificial Sequence
  Description of Artificial Sequence: Synthetic oligonucleotide
  Antisense strand to SEQ ID NO: 2134016
uaacuuacucuaauacccu

SEQ ID NO: 2134018 - RNA, 19 nt, Artificial Sequence
  Description of Artificial Sequence: Synthetic oligonucleotide
  Sense strand starting at position 3603 of SEQ ID NO: 1882603
guauuagaguaaguuaaca

SEQ ID NO: 2134019 - RNA, 19 nt, Artificial Sequence
  Description of Artificial Sequence: Synthetic oligonucleotide
  Antisense strand to SEQ ID NO: 2134018
uguuaacuuacucuaauac

SEQ ID NO: 2134020 - RNA, 19 nt, Artificial Sequence
  Description of Artificial Sequence: Synthetic oligonucleotide
  Sense strand starting at position 3629 of SEQ ID NO: 1882603
uuggcugagugauucagaa

SEQ ID NO: 2134021 - RNA, 19 nt, Artificial Sequence
  Description of Artificial Sequence: Synthetic oligonucleotide
  Antisense strand to SEQ ID NO: 2134020
uucugaaucacucagccaa

SEQ ID NO: 2134022 - RNA, 19 nt, Artificial Sequence
  Description of Artificial Sequence: Synthetic oligonucleotide
  Sense strand starting at position 3654 of SEQ ID NO: 1882603
caaagaaagcagugauaca

SEQ ID NO: 2134023 - RNA, 19 nt, Artificial Sequence
  Description of Artificial Sequence: Synthetic oligonucleotide
  Antisense strand to SEQ ID NO: 2134022
uguaucacugcuuucuuug

SEQ ID NO: 2134024 - RNA, 19 nt, Artificial Sequence
  Description of Artificial Sequence: Synthetic oligonucleotide
  Sense strand starting at position 3682 of SEQ ID NO: 1882603
gccugacauucuccauuag

SEQ ID NO: 2134025 - RNA, 19 nt, Artificial Sequence
  Description of Artificial Sequence: Synthetic oligonucleotide
  Antisense strand to SEQ ID NO: 2134024
cuaauggagaaugucaggc

SEQ ID NO: 2134026 - RNA, 19 nt, Artificial Sequence
  Description of Artificial Sequence: Synthetic oligonucleotide
  Sense strand starting at position 3715 of SEQ ID NO: 1882603
auguguuauuugcugacuu

SEQ ID NO: 2134027 - RNA, 19 nt, Artificial Sequence
  Description of Artificial Sequence: Synthetic oligonucleotide
  Antisense strand to SEQ ID NO: 2134026
aagucagcaaauaacacau

SEQ ID NO: 2134028 - RNA, 19 nt, Artificial Sequence
  Description of Artificial Sequence: Synthetic oligonucleotide
  Sense strand starting at position 3894 of SEQ ID NO: 1882603
gacauaggacagugcucau

SEQ ID NO: 2134029 - RNA, 19 nt, Artificial Sequence
  Description of Artificial Sequence: Synthetic oligonucleotide
  Antisense strand to SEQ ID NO: 2134028
augagcacuguccuauguc

SEQ ID NO: 2134030 - RNA, 19 nt, Artificial Sequence
  Description of Artificial Sequence: Synthetic oligonucleotide
  Sense strand starting at position 3948 of SEQ ID NO: 1882603
aguuaaguacauugauauc

SEQ ID NO: 2134031 - RNA, 19 nt, Artificial Sequence
  Description of Artificial Sequence: Synthetic oligonucleotide
  Antisense strand to SEQ ID NO: 2134030
gauaucaauguacuuaacu

SEQ ID NO: 2134032 - RNA, 19 nt, Artificial Sequence
  Description of Artificial Sequence: Synthetic oligonucleotide
  Sense strand starting at position 3954 of SEQ ID NO: 1882603
guacauugauaucuauguu

SEQ ID NO: 2134033 - RNA, 19 nt, Artificial Sequence
  Description of Artificial Sequence: Synthetic oligonucleotide
  Antisense strand to SEQ ID NO: 2134032
aacauagauaucaauguac

SEQ ID NO: 2134034 - RNA, 19 nt, Artificial Sequence
  Description of Artificial Sequence: Synthetic oligonucleotide
  Sense strand starting at position 30 of SEQ ID NO: 1882604
ucacccuuacaugguauua

SEQ ID NO: 2134035 - RNA, 19 nt, Artificial Sequence
  Description of Artificial Sequence: Synthetic oligonucleotide
  Antisense strand to SEQ ID NO: 2134034
uaauaccauguaaggguga

SEQ ID NO: 2134036 - RNA, 19 nt, Artificial Sequence
  Description of Artificial Sequence: Synthetic oligonucleotide
  Sense strand starting at position 40 of SEQ ID NO: 1882604
augguauuaggauguguuu

SEQ ID NO: 2134037 - RNA, 19 nt, Artificial Sequence
  Description of Artificial Sequence: Synthetic oligonucleotide
  Antisense strand to SEQ ID NO: 2134036
aaacacauccuaauaccau

SEQ ID NO: 2134038 - RNA, 19 nt, Artificial Sequence
  Description of Artificial Sequence: Synthetic oligonucleotide
  Sense strand starting at position 190 of SEQ ID NO: 1882604
ugccuugacucuguggaca

SEQ ID NO: 2134039 - RNA, 19 nt, Artificial Sequence
  Description of Artificial Sequence: Synthetic oligonucleotide
  Antisense strand to SEQ ID NO: 2134038
uguccacagagucaaggca

SEQ ID NO: 2134040 - RNA, 19 nt, Artificial Sequence
  Description of Artificial Sequence: Synthetic oligonucleotide
  Sense strand starting at position 216 of SEQ ID NO: 1882604
agacuauccuuccugggua

SEQ ID NO: 2134041 - RNA, 19 nt, Artificial Sequence
  Description of Artificial Sequence: Synthetic oligonucleotide
  Antisense strand to SEQ ID NO: 2134040
uacccaggaaggauagucu

SEQ ID NO: 2134042 - RNA, 19 nt, Artificial Sequence
  Description of Artificial Sequence: Synthetic oligonucleotide
  Sense strand starting at position 283 of SEQ ID NO: 1882604
uuuggcuagagccaguaau

SEQ ID NO: 2134043 - RNA, 19 nt, Artificial Sequence
  Description of Artificial Sequence: Synthetic oligonucleotide
  Antisense strand to SEQ ID NO: 2134042
auuacuggcucuagccaaa

SEQ ID NO: 2134044 - RNA, 19 nt, Artificial Sequence
  Description of Artificial Sequence: Synthetic oligonucleotide
  Sense strand starting at position 370 of SEQ ID NO: 1882604
uuuaccucuugccuugaga

SEQ ID NO: 2134045 - RNA, 19 nt, Artificial Sequence
  Description of Artificial Sequence: Synthetic oligonucleotide
  Antisense strand to SEQ ID NO: 2134044
ucucaaggcaagagguaaa

SEQ ID NO: 2134046 - RNA, 19 nt, Artificial Sequence
  Description of Artificial Sequence: Synthetic oligonucleotide
  Sense strand starting at position 550 of SEQ ID NO: 1882604
auaugugaauaaucgguaa

SEQ ID NO: 2134047 - RNA, 19 nt, Artificial Sequence
  Description of Artificial Sequence: Synthetic oligonucleotide
  Antisense strand to SEQ ID NO: 2134046
uuaccgauuauucacauau

SEQ ID NO: 2134048 - RNA, 19 nt, Artificial Sequence
  Description of Artificial Sequence: Synthetic oligonucleotide
  Sense strand starting at position 552 of SEQ ID NO: 1882604
augugaauaaucgguaaac

SEQ ID NO: 2134049 - RNA, 19 nt, Artificial Sequence
  Description of Artificial Sequence: Synthetic oligonucleotide
  Antisense strand to SEQ ID NO: 2134048
guuuaccgauuauucacau

SEQ ID NO: 2134050 - RNA, 19 nt, Artificial Sequence
  Description of Artificial Sequence: Synthetic oligonucleotide
  Sense strand starting at position 553 of SEQ ID NO: 1882604
ugugaauaaucgguaaaca

SEQ ID NO: 2134051 - RNA, 19 nt, Artificial Sequence
  Description of Artificial Sequence: Synthetic oligonucleotide
  Antisense strand to SEQ ID NO: 2134050
uguuuaccgauuauucaca

SEQ ID NO: 2134052 - RNA, 19 nt, Artificial Sequence
  Description of Artificial Sequence: Synthetic oligonucleotide
  Sense strand starting at position 612 of SEQ ID NO: 1882604
ggacuauccuggcuuuguu

SEQ ID NO: 2134053 - RNA, 19 nt, Artificial Sequence
  Description of Artificial Sequence: Synthetic oligonucleotide
  Antisense strand to SEQ ID NO: 2134052
aacaaagccaggauagucc

SEQ ID NO: 2134054 - RNA, 19 nt, Artificial Sequence
  Description of Artificial Sequence: Synthetic oligonucleotide
  Sense strand starting at position 675 of SEQ ID NO: 1882604
ucaauuuacugaugaagaa

SEQ ID NO: 2134055 - RNA, 19 nt, Artificial Sequence
  Description of Artificial Sequence: Synthetic oligonucleotide
  Antisense strand to SEQ ID NO: 2134054
uucuucaucaguaaauuga

SEQ ID NO: 2134056 - RNA, 19 nt, Artificial Sequence
  Description of Artificial Sequence: Synthetic oligonucleotide
  Sense strand starting at position 687 of SEQ ID NO: 1882604
ugaagaaauccaggcuuag

SEQ ID NO: 2134057 - RNA, 19 nt, Artificial Sequence
  Description of Artificial Sequence: Synthetic oligonucleotide
  Antisense strand to SEQ ID NO: 2134056
cuaagccuggauuucuuca

SEQ ID NO: 2134058 - RNA, 19 nt, Artificial Sequence
  Description of Artificial Sequence: Synthetic oligonucleotide
  Sense strand starting at position 710 of SEQ ID NO: 1882604
gucagagugaauugccuaa

SEQ ID NO: 2134059 - RNA, 19 nt, Artificial Sequence
  Description of Artificial Sequence: Synthetic oligonucleotide
  Antisense strand to SEQ ID NO: 2134058
uuaggcaauucacucugac

SEQ ID NO: 2134060 - RNA, 19 nt, Artificial Sequence
  Description of Artificial Sequence: Synthetic oligonucleotide
  Sense strand starting at position 712 of SEQ ID NO: 1882604
cagagugaauugccuaagu

SEQ ID NO: 2134061 - RNA, 19 nt, Artificial Sequence
  Description of Artificial Sequence: Synthetic oligonucleotide
  Antisense strand to SEQ ID NO: 2134060
acuuaggcaauucacucug

SEQ ID NO: 2134062 - RNA, 19 nt, Artificial Sequence
  Description of Artificial Sequence: Synthetic oligonucleotide
  Sense strand starting at position 714 of SEQ ID NO: 1882604
gagugaauugccuaaguca

SEQ ID NO: 2134063 - RNA, 19 nt, Artificial Sequence
  Description of Artificial Sequence: Synthetic oligonucleotide
  Antisense strand to SEQ ID NO: 2134062
ugacuuaggcaauucacuc

SEQ ID NO: 2134064 - RNA, 19 nt, Artificial Sequence
  Description of Artificial Sequence: Synthetic oligonucleotide
  Sense strand starting at position 722 of SEQ ID NO: 1882604
ugccuaagucauggaacca

SEQ ID NO: 2134065 - RNA, 19 nt, Artificial Sequence
  Description of Artificial Sequence: Synthetic oligonucleotide
  Antisense strand to SEQ ID NO: 2134064
ugguuccaugacuuaggca

SEQ ID NO: 2134066 - RNA, 19 nt, Artificial Sequence
  Description of Artificial Sequence: Synthetic oligonucleotide
  Sense strand starting at position 854 of SEQ ID NO: 1882604
acuugaaagucacaagaag

SEQ ID NO: 2134067 - RNA, 19 nt, Artificial Sequence
  Description of Artificial Sequence: Synthetic oligonucleotide
  Antisense strand to SEQ ID NO: 2134066
cuucuugugacuuucaagu

SEQ ID NO: 2134068 - RNA, 19 nt, Artificial Sequence
  Description of Artificial Sequence: Synthetic oligonucleotide
  Sense strand starting at position 863 of SEQ ID NO: 1882604
ucacaagaagcuugauuag

SEQ ID NO: 2134069 - RNA, 19 nt, Artificial Sequence
  Description of Artificial Sequence: Synthetic oligonucleotide
  Antisense strand to SEQ ID NO: 2134068
cuaaucaagcuucuuguga

SEQ ID NO: 2134070 - RNA, 19 nt, Artificial Sequence
  Description of Artificial Sequence: Synthetic oligonucleotide
  Sense strand starting at position 1010 of SEQ ID NO: 1882604
gcagaacuuccuggcccaa

SEQ ID NO: 2134071 - RNA, 19 nt, Artificial Sequence
  Description of Artificial Sequence: Synthetic oligonucleotide
  Antisense strand to SEQ ID NO: 2134070
uugggccaggaaguucugc

SEQ ID NO: 2134072 - RNA, 19 nt, Artificial Sequence
  Description of Artificial Sequence: Synthetic oligonucleotide
  Sense strand starting at position 1156 of SEQ ID NO: 1882604
gggcuugaauucuugagag

SEQ ID NO: 2134073 - RNA, 19 nt, Artificial Sequence
  Description of Artificial Sequence: Synthetic oligonucleotide
  Antisense strand to SEQ ID NO: 2134072
cucucaagaauucaagccc

SEQ ID NO: 2134074 - RNA, 19 nt, Artificial Sequence
  Description of Artificial Sequence: Synthetic oligonucleotide
  Sense strand starting at position 1160 of SEQ ID NO: 1882604
uugaauucuugagagaaac

SEQ ID NO: 2134075 - RNA, 19 nt, Artificial Sequence
  Description of Artificial Sequence: Synthetic oligonucleotide
  Antisense strand to SEQ ID NO: 2134074
guuucucucaagaauucaa

SEQ ID NO: 2134076 - RNA, 19 nt, Artificial Sequence
  Description of Artificial Sequence: Synthetic oligonucleotide
  Sense strand starting at position 1241 of SEQ ID NO: 1882604
cgagccuccucuccucaaa

SEQ ID NO: 2134077 - RNA, 19 nt, Artificial Sequence
  Description of Artificial Sequence: Synthetic oligonucleotide
  Antisense strand to SEQ ID NO: 2134076
uuugaggagaggaggcucg

SEQ ID NO: 2134078 - RNA, 19 nt, Artificial Sequence
  Description of Artificial Sequence: Synthetic oligonucleotide
  Sense strand starting at position 1359 of SEQ ID NO: 1882604
gugcgaacaaguuaaagga

SEQ ID NO: 2134079 - RNA, 19 nt, Artificial Sequence
  Description of Artificial Sequence: Synthetic oligonucleotide
  Antisense strand to SEQ ID NO: 2134078
uccuuuaacuuguucgcac

SEQ ID NO: 2134080 - RNA, 19 nt, Artificial Sequence
  Description of Artificial Sequence: Synthetic oligonucleotide
  Sense strand starting at position 1482 of SEQ ID NO: 1882604
ggcaacuccgaauaacuua

SEQ ID NO: 2134081 - RNA, 19 nt, Artificial Sequence
  Description of Artificial Sequence: Synthetic oligonucleotide
  Antisense strand to SEQ ID NO: 2134080
uaaguuauucggaguugcc

SEQ ID NO: 2134082 - RNA, 19 nt, Artificial Sequence
  Description of Artificial Sequence: Synthetic oligonucleotide
  Sense strand starting at position 1489 of SEQ ID NO: 1882604
ccgaauaacuuaccuuaga

SEQ ID NO: 2134083 - RNA, 19 nt, Artificial Sequence
  Description of Artificial Sequence: Synthetic oligonucleotide
  Antisense strand to SEQ ID NO: 2134082
ucuaagguaaguuauucgg

SEQ ID NO: 2134084 - RNA, 19 nt, Artificial Sequence
  Description of Artificial Sequence: Synthetic oligonucleotide
  Sense strand starting at position 1490 of SEQ ID NO: 1882604
cgaauaacuuaccuuagau

SEQ ID NO: 2134085 - RNA, 19 nt, Artificial Sequence
  Description of Artificial Sequence: Synthetic oligonucleotide
  Antisense strand to SEQ ID NO: 2134084
aucuaagguaaguuauucg

SEQ ID NO: 2134086 - RNA, 19 nt, Artificial Sequence
  Description of Artificial Sequence: Synthetic oligonucleotide
  Sense strand starting at position 1652 of SEQ ID NO: 1882604
cuaggaagccucugcucaa

SEQ ID NO: 2134087 - RNA, 19 nt, Artificial Sequence
  Description of Artificial Sequence: Synthetic oligonucleotide
  Antisense strand to SEQ ID NO: 2134086
uugagcagaggcuuccuag

SEQ ID NO: 2134088 - RNA, 19 nt, Artificial Sequence
  Description of Artificial Sequence: Synthetic oligonucleotide
  Sense strand starting at position 1855 of SEQ ID NO: 1882604
gggugucuccgggaggaga

SEQ ID NO: 2134089 - RNA, 19 nt, Artificial Sequence
  Description of Artificial Sequence: Synthetic oligonucleotide
  Antisense strand to SEQ ID NO: 2134088
ucuccucccggagacaccc

SEQ ID NO: 2134090 - RNA, 19 nt, Artificial Sequence
  Description of Artificial Sequence: Synthetic oligonucleotide
  Sense strand starting at position 1869 of SEQ ID NO: 1882604
ggagauugaacucgaaugu

SEQ ID NO: 2134091 - RNA, 19 nt, Artificial Sequence
  Description of Artificial Sequence: Synthetic oligonucleotide
  Antisense strand to SEQ ID NO: 2134090
acauucgaguucaaucucc

SEQ ID NO: 2134092 - RNA, 19 nt, Artificial Sequence
  Description of Artificial Sequence: Synthetic oligonucleotide
  Sense strand starting at position 1873 of SEQ ID NO: 1882604
auugaacucgaauguuaag

SEQ ID NO: 2134093 - RNA, 19 nt, Artificial Sequence
  Description of Artificial Sequence: Synthetic oligonucleotide
  Antisense strand to SEQ ID NO: 2134092
cuuaacauucgaguucaau

SEQ ID NO: 2134094 - RNA, 19 nt, Artificial Sequence
  Description of Artificial Sequence: Synthetic oligonucleotide
  Sense strand starting at position 2311 of SEQ ID NO: 1882604
aguauuugcugcccauaac

SEQ ID NO: 2134095 - RNA, 19 nt, Artificial Sequence
  Description of Artificial Sequence: Synthetic oligonucleotide
  Antisense strand to SEQ ID NO: 2134094
guuaugggcagcaaauacu

SEQ ID NO: 2134096 - RNA, 19 nt, Artificial Sequence
  Description of Artificial Sequence: Synthetic oligonucleotide
  Sense strand starting at position 2567 of SEQ ID NO: 1882604
uaaucaguagccugcagaa

SEQ ID NO: 2134097 - RNA, 19 nt, Artificial Sequence
  Description of Artificial Sequence: Synthetic oligonucleotide
  Antisense strand to SEQ ID NO: 2134096
uucugcaggcuacugauua

SEQ ID NO: 2134098 - RNA, 19 nt, Artificial Sequence
  Description of Artificial Sequence: Synthetic oligonucleotide
  Sense strand starting at position 2569 of SEQ ID NO: 1882604
aucaguagccugcagaauu

SEQ ID NO: 2134099 - RNA, 19 nt, Artificial Sequence
  Description of Artificial Sequence: Synthetic oligonucleotide
  Antisense strand to SEQ ID NO: 2134098
aauucugcaggcuacugau

SEQ ID NO: 2134100 - RNA, 19 nt, Artificial Sequence
  Description of Artificial Sequence: Synthetic oligonucleotide
  Sense strand starting at position 2922 of SEQ ID NO: 1882604
gaagcagguugcucaacau

SEQ ID NO: 2134101 - RNA, 19 nt, Artificial Sequence
  Description of Artificial Sequence: Synthetic oligonucleotide
  Antisense strand to SEQ ID NO: 2134100
auguugagcaaccugcuuc

SEQ ID NO: 2134102 - RNA, 19 nt, Artificial Sequence
  Description of Artificial Sequence: Synthetic oligonucleotide
  Sense strand starting at position 2993 of SEQ ID NO: 1882604
uugcauuugguuugcagaa

SEQ ID NO: 2134103 - RNA, 19 nt, Artificial Sequence
  Description of Artificial Sequence: Synthetic oligonucleotide
  Antisense strand to SEQ ID NO: 2134102
uucugcaaaccaaaugcaa

SEQ ID NO: 2134104 - RNA, 19 nt, Artificial Sequence
  Description of Artificial Sequence: Synthetic oligonucleotide
  Sense strand starting at position 2994 of SEQ ID NO: 1882604
ugcauuugguuugcagaaa

SEQ ID NO: 2134105 - RNA, 19 nt, Artificial Sequence
  Description of Artificial Sequence: Synthetic oligonucleotide
  Antisense strand to SEQ ID NO: 2134104
uuucugcaaaccaaaugca

SEQ ID NO: 2134106 - RNA, 19 nt, Artificial Sequence
  Description of Artificial Sequence: Synthetic oligonucleotide
  Sense strand starting at position 3045 of SEQ ID NO: 1882604
uguauuaucugagccacua

SEQ ID NO: 2134107 - RNA, 19 nt, Artificial Sequence
  Description of Artificial Sequence: Synthetic oligonucleotide
  Antisense strand to SEQ ID NO: 2134106
uaguggcucagauaauaca

SEQ ID NO: 2134108 - RNA, 19 nt, Artificial Sequence
  Description of Artificial Sequence: Synthetic oligonucleotide
  Sense strand starting at position 3074 of SEQ ID NO: 1882604
guggcucugagauauuauu

SEQ ID NO: 2134109 - RNA, 19 nt, Artificial Sequence
  Description of Artificial Sequence: Synthetic oligonucleotide
  Antisense strand to SEQ ID NO: 2134108
aauaauaucucagagccac

SEQ ID NO: 2134110 - RNA, 19 nt, Artificial Sequence
  Description of Artificial Sequence: Synthetic oligonucleotide
  Sense strand starting at position 3117 of SEQ ID NO: 1882604
uugccaauauaugugacau

SEQ ID NO: 2134111 - RNA, 19 nt, Artificial Sequence
  Description of Artificial Sequence: Synthetic oligonucleotide
  Antisense strand to SEQ ID NO: 2134110
augucacauauauuggcaa

SEQ ID NO: 2134112 - RNA, 19 nt, Artificial Sequence
  Description of Artificial Sequence: Synthetic oligonucleotide
  Sense strand starting at position 3175 of SEQ ID NO: 1882604
gacagugucucagucuauu

SEQ ID NO: 2134113 - RNA, 19 nt, Artificial Sequence
  Description of Artificial Sequence: Synthetic oligonucleotide
  Antisense strand to SEQ ID NO: 2134112
aauagacugagacacuguc

SEQ ID NO: 2134114 - RNA, 19 nt, Artificial Sequence
  Description of Artificial Sequence: Synthetic oligonucleotide
  Sense strand starting at position 186 of SEQ ID NO: 1882605
caaguaguguugcuaacaa

SEQ ID NO: 2134115 - RNA, 19 nt, Artificial Sequence
  Description of Artificial Sequence: Synthetic oligonucleotide
  Antisense strand to SEQ ID NO: 2134114
uuguuagcaacacuacuug

SEQ ID NO: 2134116 - RNA, 19 nt, Artificial Sequence
  Description of Artificial Sequence: Synthetic oligonucleotide
  Sense strand starting at position 193 of SEQ ID NO: 1882605
uguugcuaacaauacagau

SEQ ID NO: 2134117 - RNA, 19 nt, Artificial Sequence
  Description of Artificial Sequence: Synthetic oligonucleotide
  Antisense strand to SEQ ID NO: 2134116
aucuguauuguuagcaaca

SEQ ID NO: 2134118 - RNA, 19 nt, Artificial Sequence
  Description of Artificial Sequence: Synthetic oligonucleotide
  Sense strand starting at position 266 of SEQ ID NO: 1882605
uaaagaauucuagguguca

SEQ ID NO: 2134119 - RNA, 19 nt, Artificial Sequence
  Description of Artificial Sequence: Synthetic oligonucleotide
  Antisense strand to SEQ ID NO: 2134118
ugacaccuagaauucuuua

SEQ ID NO: 2134120 - RNA, 19 nt, Artificial Sequence
  Description of Artificial Sequence: Synthetic oligonucleotide
  Sense strand starting at position 267 of SEQ ID NO: 1882605
aaagaauucuaggugucau

SEQ ID NO: 2134121 - RNA, 19 nt, Artificial Sequence
  Description of Artificial Sequence: Synthetic oligonucleotide
  Antisense strand to SEQ ID NO: 2134120
augacaccuagaauucuuu

SEQ ID NO: 2134122 - RNA, 19 nt, Artificial Sequence
  Description of Artificial Sequence: Synthetic oligonucleotide
  Sense strand starting at position 275 of SEQ ID NO: 1882605
cuaggugucauggaacacu

SEQ ID NO: 2134123 - RNA, 19 nt, Artificial Sequence
  Description of Artificial Sequence: Synthetic oligonucleotide
  Antisense strand to SEQ ID NO: 2134122
aguguuccaugacaccuag

SEQ ID NO: 2134124 - RNA, 19 nt, Artificial Sequence
  Description of Artificial Sequence: Synthetic oligonucleotide
  Sense strand starting at position 300 of SEQ ID NO: 1882605
cacugauauuguguaucug

SEQ ID NO: 2134125 - RNA, 19 nt, Artificial Sequence
  Description of Artificial Sequence: Synthetic oligonucleotide
  Antisense strand to SEQ ID NO: 2134124
cagauacacaauaucagug

SEQ ID NO: 2134126 - RNA, 19 nt, Artificial Sequence
  Description of Artificial Sequence: Synthetic oligonucleotide
  Sense strand starting at position 301 of SEQ ID NO: 1882605
acugauauuguguaucuga

SEQ ID NO: 2134127 - RNA, 19 nt, Artificial Sequence
  Description of Artificial Sequence: Synthetic oligonucleotide
  Antisense strand to SEQ ID NO: 2134126
ucagauacacaauaucagu

SEQ ID NO: 2134128 - RNA, 19 nt, Artificial Sequence
  Description of Artificial Sequence: Synthetic oligonucleotide
  Sense strand starting at position 304 of SEQ ID NO: 1882605
gauauuguguaucugacau

SEQ ID NO: 2134129 - RNA, 19 nt, Artificial Sequence
  Description of Artificial Sequence: Synthetic oligonucleotide
  Antisense strand to SEQ ID NO: 2134128
augucagauacacaauauc

SEQ ID NO: 2134130 - RNA, 19 nt, Artificial Sequence
  Description of Artificial Sequence: Synthetic oligonucleotide
  Sense strand starting at position 362 of SEQ ID NO: 1882605
uuagcaugguagucauauu

SEQ ID NO: 2134131 - RNA, 19 nt, Artificial Sequence
  Description of Artificial Sequence: Synthetic oligonucleotide
  Antisense strand to SEQ ID NO: 2134130
aauaugacuaccaugcuaa

SEQ ID NO: 2134132 - RNA, 19 nt, Artificial Sequence
  Description of Artificial Sequence: Synthetic oligonucleotide
  Sense strand starting at position 452 of SEQ ID NO: 1882605
uccagcauauuaguagaaa

SEQ ID NO: 2134133 - RNA, 19 nt, Artificial Sequence
  Description of Artificial Sequence: Synthetic oligonucleotide
  Antisense strand to SEQ ID NO: 2134132
uuucuacuaauaugcugga

SEQ ID NO: 2134134 - RNA, 19 nt, Artificial Sequence
  Description of Artificial Sequence: Synthetic oligonucleotide
  Sense strand starting at position 455 of SEQ ID NO: 1882605
agcauauuaguagaaaucu

SEQ ID NO: 2134135 - RNA, 19 nt, Artificial Sequence
  Description of Artificial Sequence: Synthetic oligonucleotide
  Antisense strand to SEQ ID NO: 2134134
agauuucuacuaauaugcu

SEQ ID NO: 2134136 - RNA, 19 nt, Artificial Sequence
  Description of Artificial Sequence: Synthetic oligonucleotide
  Sense strand starting at position 464 of SEQ ID NO: 1882605
guagaaaucuugccacgua

SEQ ID NO: 2134137 - RNA, 19 nt, Artificial Sequence
  Description of Artificial Sequence: Synthetic oligonucleotide
  Antisense strand to SEQ ID NO: 2134136
uacguggcaagauuucuac

SEQ ID NO: 2134138 - RNA, 19 nt, Artificial Sequence
  Description of Artificial Sequence: Synthetic oligonucleotide
  Sense strand starting at position 480 of SEQ ID NO: 1882605
guauguuuauaaucaugcu

SEQ ID NO: 2134139 - RNA, 19 nt, Artificial Sequence
  Description of Artificial Sequence: Synthetic oligonucleotide
  Antisense strand to SEQ ID NO: 2134138
agcaugauuauaaacauac

SEQ ID NO: 2134140 - RNA, 19 nt, Artificial Sequence
  Description of Artificial Sequence: Synthetic oligonucleotide
  Sense strand starting at position 488 of SEQ ID NO: 1882605
auaaucaugcucugagguu

SEQ ID NO: 2134141 - RNA, 19 nt, Artificial Sequence
  Description of Artificial Sequence: Synthetic oligonucleotide
  Antisense strand to SEQ ID NO: 2134140
aaccucagagcaugauuau

SEQ ID NO: 2134142 - RNA, 19 nt, Artificial Sequence
  Description of Artificial Sequence: Synthetic oligonucleotide
  Sense strand starting at position 574 of SEQ ID NO: 1882605
gcauuuauauguuagggaa

SEQ ID NO: 2134143 - RNA, 19 nt, Artificial Sequence
  Description of Artificial Sequence: Synthetic oligonucleotide
  Antisense strand to SEQ ID NO: 2134142
uucccuaacauauaaaugc

SEQ ID NO: 2134144 - RNA, 19 nt, Artificial Sequence
  Description of Artificial Sequence: Synthetic oligonucleotide
  Sense strand starting at position 599 of SEQ ID NO: 1882605
gacagcuucuuaccaguga

SEQ ID NO: 2134145 - RNA, 19 nt, Artificial Sequence
  Description of Artificial Sequence: Synthetic oligonucleotide
  Antisense strand to SEQ ID NO: 2134144
ucacugguaagaagcuguc

SEQ ID NO: 2134146 - RNA, 19 nt, Artificial Sequence
  Description of Artificial Sequence: Synthetic oligonucleotide
  Sense strand starting at position 759 of SEQ ID NO: 1882605
ucucuacuuggauggguua

SEQ ID NO: 2134147 - RNA, 19 nt, Artificial Sequence
  Description of Artificial Sequence: Synthetic oligonucleotide
  Antisense strand to SEQ ID NO: 2134146
uaacccauccaaguagaga

SEQ ID NO: 2134148 - RNA, 19 nt, Artificial Sequence
  Description of Artificial Sequence: Synthetic oligonucleotide
  Sense strand starting at position 761 of SEQ ID NO: 1882605
ucuacuuggauggguuaga

SEQ ID NO: 2134149 - RNA, 19 nt, Artificial Sequence
  Description of Artificial Sequence: Synthetic oligonucleotide
  Antisense strand to SEQ ID NO: 2134148
ucuaacccauccaaguaga

SEQ ID NO: 2134150 - RNA, 19 nt, Artificial Sequence
  Description of Artificial Sequence: Synthetic oligonucleotide
  Sense strand starting at position 762 of SEQ ID NO: 1882605
cuacuuggauggguuagaa

SEQ ID NO: 2134151 - RNA, 19 nt, Artificial Sequence
  Description of Artificial Sequence: Synthetic oligonucleotide
  Antisense strand to SEQ ID NO: 2134150
uucuaacccauccaaguag

SEQ ID NO: 2134152 - RNA, 19 nt, Artificial Sequence
  Description of Artificial Sequence: Synthetic oligonucleotide
  Sense strand starting at position 770 of SEQ ID NO: 1882605
auggguuagaaauguguca

SEQ ID NO: 2134153 - RNA, 19 nt, Artificial Sequence
  Description of Artificial Sequence: Synthetic oligonucleotide
  Antisense strand to SEQ ID NO: 2134152
ugacacauuucuaacccau

SEQ ID NO: 2134154 - RNA, 19 nt, Artificial Sequence
  Description of Artificial Sequence: Synthetic oligonucleotide
  Sense strand starting at position 772 of SEQ ID NO: 1882605
ggguuagaaaugugucaag

SEQ ID NO: 2134155 - RNA, 19 nt, Artificial Sequence
  Description of Artificial Sequence: Synthetic oligonucleotide
  Antisense strand to SEQ ID NO: 2134154
cuugacacauuucuaaccc

SEQ ID NO: 2134156 - RNA, 19 nt, Artificial Sequence
  Description of Artificial Sequence: Synthetic oligonucleotide
  Sense strand starting at position 962 of SEQ ID NO: 1882605
gcccaauaucaguggccaa

SEQ ID NO: 2134157 - RNA, 19 nt, Artificial Sequence
  Description of Artificial Sequence: Synthetic oligonucleotide
  Antisense strand to SEQ ID NO: 2134156
uuggccacugauauugggc

SEQ ID NO: 2134158 - RNA, 19 nt, Artificial Sequence
  Description of Artificial Sequence: Synthetic oligonucleotide
  Sense strand starting at position 1137 of SEQ ID NO: 1882605
uaugccuucggguaguaaa

SEQ ID NO: 2134159 - RNA, 19 nt, Artificial Sequence
  Description of Artificial Sequence: Synthetic oligonucleotide
  Antisense strand to SEQ ID NO: 2134158
uuuacuacccgaaggcaua

SEQ ID NO: 2134160 - RNA, 19 nt, Artificial Sequence
  Description of Artificial Sequence: Synthetic oligonucleotide
  Sense strand starting at position 1312 of SEQ ID NO: 1882605
gcugacaaguccuuacaug

SEQ ID NO: 2134161 - RNA, 19 nt, Artificial Sequence
  Description of Artificial Sequence: Synthetic oligonucleotide
  Antisense strand to SEQ ID NO: 2134160
cauguaaggacuugucagc

SEQ ID NO: 2134162 - RNA, 19 nt, Artificial Sequence
  Description of Artificial Sequence: Synthetic oligonucleotide
  Sense strand starting at position 1313 of SEQ ID NO: 1882605
cugacaaguccuuacaugu

SEQ ID NO: 2134163 - RNA, 19 nt, Artificial Sequence
  Description of Artificial Sequence: Synthetic oligonucleotide
  Antisense strand to SEQ ID NO: 2134162
acauguaaggacuugucag

SEQ ID NO: 2134164 - RNA, 19 nt, Artificial Sequence
  Description of Artificial Sequence: Synthetic oligonucleotide
  Sense strand starting at position 1431 of SEQ ID NO: 1882605
gugggaaaucccugugcac

SEQ ID NO: 2134165 - RNA, 19 nt, Artificial Sequence
  Description of Artificial Sequence: Synthetic oligonucleotide
  Antisense strand to SEQ ID NO: 2134164
gugcacagggauuucccac

SEQ ID NO: 2134166 - RNA, 19 nt, Artificial Sequence
  Description of Artificial Sequence: Synthetic oligonucleotide
  Sense strand starting at position 1433 of SEQ ID NO: 1882605
gggaaaucccugugcacug

SEQ ID NO: 2134167 - RNA, 19 nt, Artificial Sequence
  Description of Artificial Sequence: Synthetic oligonucleotide
  Antisense strand to SEQ ID NO: 2134166
cagugcacagggauuuccc

SEQ ID NO: 2134168 - RNA, 19 nt, Artificial Sequence
  Description of Artificial Sequence: Synthetic oligonucleotide
  Sense strand starting at position 1480 of SEQ ID NO: 1882605
agagccgugcgugaauaaa

SEQ ID NO: 2134169 - RNA, 19 nt, Artificial Sequence
  Description of Artificial Sequence: Synthetic oligonucleotide
  Antisense strand to SEQ ID NO: 2134168
uuuauucacgcacggcucu

SEQ ID NO: 2134170 - RNA, 19 nt, Artificial Sequence
  Description of Artificial Sequence: Synthetic oligonucleotide
  Sense strand starting at position 2249 of SEQ ID NO: 1882605
gcguccgugacaucaucau

SEQ ID NO: 2134171 - RNA, 19 nt, Artificial Sequence
  Description of Artificial Sequence: Synthetic oligonucleotide
  Antisense strand to SEQ ID NO: 2134170
augaugaugucacggacgc

SEQ ID NO: 2134172 - RNA, 19 nt, Artificial Sequence
  Description of Artificial Sequence: Synthetic oligonucleotide
  Sense strand starting at position 3324 of SEQ ID NO: 1882605
ggucgugacuccuuagagu

SEQ ID NO: 2134173 - RNA, 19 nt, Artificial Sequence
  Description of Artificial Sequence: Synthetic oligonucleotide
  Antisense strand to SEQ ID NO: 2134172
acucuaaggagucacgacc

SEQ ID NO: 2134174 - RNA, 19 nt, Artificial Sequence
  Description of Artificial Sequence: Synthetic oligonucleotide
  Sense strand starting at position 3400 of SEQ ID NO: 1882605
augugcauccauggaagua

SEQ ID NO: 2134175 - RNA, 19 nt, Artificial Sequence
  Description of Artificial Sequence: Synthetic oligonucleotide
  Antisense strand to SEQ ID NO: 2134174
uacuuccauggaugcacau

SEQ ID NO: 2134176 - RNA, 19 nt, Artificial Sequence
  Description of Artificial Sequence: Synthetic oligonucleotide
  Sense strand starting at position 3429 of SEQ ID NO: 1882605
guuuauguugcccaaccua

SEQ ID NO: 2134177 - RNA, 19 nt, Artificial Sequence
  Description of Artificial Sequence: Synthetic oligonucleotide
  Antisense strand to SEQ ID NO: 2134176
uagguugggcaacauaaac

SEQ ID NO: 2134178 - RNA, 19 nt, Artificial Sequence
  Description of Artificial Sequence: Synthetic oligonucleotide
  Sense strand starting at position 3465 of SEQ ID NO: 1882605
gggugaauuuauuaggaac

SEQ ID NO: 2134179 - RNA, 19 nt, Artificial Sequence
  Description of Artificial Sequence: Synthetic oligonucleotide
  Antisense strand to SEQ ID NO: 2134178
guuccuaauaaauucaccc

SEQ ID NO: 2134180 - RNA, 19 nt, Artificial Sequence
  Description of Artificial Sequence: Synthetic oligonucleotide
  Sense strand starting at position 3467 of SEQ ID NO: 1882605
gugaauuuauuaggaacca

SEQ ID NO: 2134181 - RNA, 19 nt, Artificial Sequence
  Description of Artificial Sequence: Synthetic oligonucleotide
  Antisense strand to SEQ ID NO: 2134180
ugguuccuaauaaauucac

SEQ ID NO: 2134182 - RNA, 19 nt, Artificial Sequence
  Description of Artificial Sequence: Synthetic oligonucleotide
  Sense strand starting at position 3675 of SEQ ID NO: 1882605
cccaguuuacuagguguuu

SEQ ID NO: 2134183 - RNA, 19 nt, Artificial Sequence
  Description of Artificial Sequence: Synthetic oligonucleotide
  Antisense strand to SEQ ID NO: 2134182
aaacaccuaguaaacuggg

SEQ ID NO: 2134184 - RNA, 19 nt, Artificial Sequence
  Description of Artificial Sequence: Synthetic oligonucleotide
  Sense strand starting at position 3778 of SEQ ID NO: 1882605
uguucuucccucuagcuau

SEQ ID NO: 2134185 - RNA, 19 nt, Artificial Sequence
  Description of Artificial Sequence: Synthetic oligonucleotide
  Antisense strand to SEQ ID NO: 2134184
auagcuagagggaagaaca

SEQ ID NO: 2134186 - RNA, 19 nt, Artificial Sequence
  Description of Artificial Sequence: Synthetic oligonucleotide
  Sense strand starting at position 3796 of SEQ ID NO: 1882605
ugaauugcccuaugggauu

SEQ ID NO: 2134187 - RNA, 19 nt, Artificial Sequence
  Description of Artificial Sequence: Synthetic oligonucleotide
  Antisense strand to SEQ ID NO: 2134186
aaucccauagggcaauuca

SEQ ID NO: 2134188 - RNA, 19 nt, Artificial Sequence
  Description of Artificial Sequence: Synthetic oligonucleotide
  Sense strand starting at position 3873 of SEQ ID NO: 1882605
cagucaguuucuguggacu

SEQ ID NO: 2134189 - RNA, 19 nt, Artificial Sequence
  Description of Artificial Sequence: Synthetic oligonucleotide
  Antisense strand to SEQ ID NO: 2134188
aguccacagaaacugacug

SEQ ID NO: 2134190 - RNA, 19 nt, Artificial Sequence
  Description of Artificial Sequence: Synthetic oligonucleotide
  Sense strand starting at position 3951 of SEQ ID NO: 1882605
ugugaauucucuuuguuaa

SEQ ID NO: 2134191 - RNA, 19 nt, Artificial Sequence
  Description of Artificial Sequence: Synthetic oligonucleotide
  Antisense strand to SEQ ID NO: 2134190
uuaacaaagagaauucaca

SEQ ID NO: 2134192 - RNA, 19 nt, Artificial Sequence
  Description of Artificial Sequence: Synthetic oligonucleotide
  Sense strand starting at position 3952 of SEQ ID NO: 1882605
gugaauucucuuuguuaaa

SEQ ID NO: 2134193 - RNA, 19 nt, Artificial Sequence
  Description of Artificial Sequence: Synthetic oligonucleotide
  Antisense strand to SEQ ID NO: 2134192
uuuaacaaagagaauucac

SEQ ID NO: 2134194 - RNA, 19 nt, Artificial Sequence
  Description of Artificial Sequence: Synthetic oligonucleotide
  Sense strand starting at position 12 of SEQ ID NO: 1882606
acccauaugccacguaaug

SEQ ID NO: 2134195 - RNA, 19 nt, Artificial Sequence
  Description of Artificial Sequence: Synthetic oligonucleotide
  Antisense strand to SEQ ID NO: 2134194
cauuacguggcauaugggu

SEQ ID NO: 2134196 - RNA, 19 nt, Artificial Sequence
  Description of Artificial Sequence: Synthetic oligonucleotide
  Sense strand starting at position 109 of SEQ ID NO: 1882606
ugucguagccacuguaaca

SEQ ID NO: 2134197 - RNA, 19 nt, Artificial Sequence
  Description of Artificial Sequence: Synthetic oligonucleotide
  Antisense strand to SEQ ID NO: 2134196
uguuacaguggcuacgaca

SEQ ID NO: 2134198 - RNA, 19 nt, Artificial Sequence
  Description of Artificial Sequence: Synthetic oligonucleotide
  Sense strand starting at position 138 of SEQ ID NO: 1882606
augcauuaaccacguguuu

SEQ ID NO: 2134199 - RNA, 19 nt, Artificial Sequence
  Description of Artificial Sequence: Synthetic oligonucleotide
  Antisense strand to SEQ ID NO: 2134198
aaacacgugguuaaugcau

SEQ ID NO: 2134200 - RNA, 19 nt, Artificial Sequence
  Description of Artificial Sequence: Synthetic oligonucleotide
  Sense strand starting at position 193 of SEQ ID NO: 1882606
cccauaauauaguuuagua

SEQ ID NO: 2134201 - RNA, 19 nt, Artificial Sequence
  Description of Artificial Sequence: Synthetic oligonucleotide
  Antisense strand to SEQ ID NO: 2134200
uacuaaacuauauuauggg

SEQ ID NO: 2134202 - RNA, 19 nt, Artificial Sequence
  Description of Artificial Sequence: Synthetic oligonucleotide
  Sense strand starting at position 206 of SEQ ID NO: 1882606
uuaguauaaauguguagca

SEQ ID NO: 2134203 - RNA, 19 nt, Artificial Sequence
  Description of Artificial Sequence: Synthetic oligonucleotide
  Antisense strand to SEQ ID NO: 2134202
ugcuacacauuuauacuaa

SEQ ID NO: 2134204 - RNA, 19 nt, Artificial Sequence
  Description of Artificial Sequence: Synthetic oligonucleotide
  Sense strand starting at position 207 of SEQ ID NO: 1882606
uaguauaaauguguagcaa

SEQ ID NO: 2134205 - RNA, 19 nt, Artificial Sequence
  Description of Artificial Sequence: Synthetic oligonucleotide
  Antisense strand to SEQ ID NO: 2134204
uugcuacacauuuauacua

SEQ ID NO: 2134206 - RNA, 19 nt, Artificial Sequence
  Description of Artificial Sequence: Synthetic oligonucleotide
  Sense strand starting at position 208 of SEQ ID NO: 1882606
aguauaaauguguagcaaa

SEQ ID NO: 2134207 - RNA, 19 nt, Artificial Sequence
  Description of Artificial Sequence: Synthetic oligonucleotide
  Antisense strand to SEQ ID NO: 2134206
uuugcuacacauuuauacu

SEQ ID NO: 2134208 - RNA, 19 nt, Artificial Sequence
  Description of Artificial Sequence: Synthetic oligonucleotide
  Sense strand starting at position 2331 of SEQ ID NO: 1882606
aggaguucgucauccacaa

SEQ ID NO: 2134209 - RNA, 19 nt, Artificial Sequence
  Description of Artificial Sequence: Synthetic oligonucleotide
  Antisense strand to SEQ ID NO: 2134208
uuguggaugacgaacuccu

SEQ ID NO: 2134210 - RNA, 19 nt, Artificial Sequence
  Description of Artificial Sequence: Synthetic oligonucleotide
  Sense strand starting at position 2335 of SEQ ID NO: 1882606
guucgucauccacaaccau

SEQ ID NO: 2134211 - RNA, 19 nt, Artificial Sequence
  Description of Artificial Sequence: Synthetic oligonucleotide
  Antisense strand to SEQ ID NO: 2134210
augguuguggaugacgaac

SEQ ID NO: 2134212 - RNA, 19 nt, Artificial Sequence
  Description of Artificial Sequence: Synthetic oligonucleotide
  Sense strand starting at position 2395 of SEQ ID NO: 1882606
gcuuauguucgaggugaga

SEQ ID NO: 2134213 - RNA, 19 nt, Artificial Sequence
  Description of Artificial Sequence: Synthetic oligonucleotide
  Antisense strand to SEQ ID NO: 2134212
ucucaccucgaacauaagc

SEQ ID NO: 2134214 - RNA, 19 nt, Artificial Sequence
  Description of Artificial Sequence: Synthetic oligonucleotide
  Sense strand starting at position 2867 of SEQ ID NO: 1882606
uuccacuuccuaugugauu

SEQ ID NO: 2134215 - RNA, 19 nt, Artificial Sequence
  Description of Artificial Sequence: Synthetic oligonucleotide
  Antisense strand to SEQ ID NO: 2134214
aaucacauaggaaguggaa

SEQ ID NO: 2134216 - RNA, 19 nt, Artificial Sequence
  Description of Artificial Sequence: Synthetic oligonucleotide
  Sense strand starting at position 3036 of SEQ ID NO: 1882606
cgugaacugucccuuuaga

SEQ ID NO: 2134217 - RNA, 19 nt, Artificial Sequence
  Description of Artificial Sequence: Synthetic oligonucleotide
  Antisense strand to SEQ ID NO: 2134216
ucuaaagggacaguucacg

SEQ ID NO: 2134218 - RNA, 19 nt, Artificial Sequence
  Description of Artificial Sequence: Synthetic oligonucleotide
  Sense strand starting at position 3142 of SEQ ID NO: 1882606
ucucuuauaguguaggagu

SEQ ID NO: 2134219 - RNA, 19 nt, Artificial Sequence
  Description of Artificial Sequence: Synthetic oligonucleotide
  Antisense strand to SEQ ID NO: 2134218
acuccuacacuauaagaga

SEQ ID NO: 2134220 - RNA, 19 nt, Artificial Sequence
  Description of Artificial Sequence: Synthetic oligonucleotide
  Sense strand starting at position 3217 of SEQ ID NO: 1882606
caggcagggaguuguagaa

SEQ ID NO: 2134221 - RNA, 19 nt, Artificial Sequence
  Description of Artificial Sequence: Synthetic oligonucleotide
  Antisense strand to SEQ ID NO: 2134220
uucuacaacucccugccug

SEQ ID NO: 2134222 - RNA, 19 nt, Artificial Sequence
  Description of Artificial Sequence: Synthetic oligonucleotide
  Sense strand starting at position 3283 of SEQ ID NO: 1882606
acucuugcagagcaagaaa

SEQ ID NO: 2134223 - RNA, 19 nt, Artificial Sequence
  Description of Artificial Sequence: Synthetic oligonucleotide
  Antisense strand to SEQ ID NO: 2134222
uuucuugcucugcaagagu

SEQ ID NO: 2134224 - RNA, 19 nt, Artificial Sequence
  Description of Artificial Sequence: Synthetic oligonucleotide
  Sense strand starting at position 3346 of SEQ ID NO: 1882606
ggguuuguugcgguauauc

SEQ ID NO: 2134225 - RNA, 19 nt, Artificial Sequence
  Description of Artificial Sequence: Synthetic oligonucleotide
  Antisense strand to SEQ ID NO: 2134224
gauauaccgcaacaaaccc

SEQ ID NO: 2134226 - RNA, 19 nt, Artificial Sequence
  Description of Artificial Sequence: Synthetic oligonucleotide
  Sense strand starting at position 3356 of SEQ ID NO: 1882606
cgguauaucuugucucaga

SEQ ID NO: 2134227 - RNA, 19 nt, Artificial Sequence
  Description of Artificial Sequence: Synthetic oligonucleotide
  Antisense strand to SEQ ID NO: 2134226
ucugagacaagauauaccg

SEQ ID NO: 2134228 - RNA, 19 nt, Artificial Sequence
  Description of Artificial Sequence: Synthetic oligonucleotide
  Sense strand starting at position 3357 of SEQ ID NO: 1882606
gguauaucuugucucagaa

SEQ ID NO: 2134229 - RNA, 19 nt, Artificial Sequence
  Description of Artificial Sequence: Synthetic oligonucleotide
  Antisense strand to SEQ ID NO: 2134228
uucugagacaagauauacc

SEQ ID NO: 2134230 - RNA, 19 nt, Artificial Sequence
  Description of Artificial Sequence: Synthetic oligonucleotide
  Sense strand starting at position 3365 of SEQ ID NO: 1882606
uugucucagaagugagaua

SEQ ID NO: 2134231 - RNA, 19 nt, Artificial Sequence
  Description of Artificial Sequence: Synthetic oligonucleotide
  Antisense strand to SEQ ID NO: 2134230
uaucucacuucugagacaa

SEQ ID NO: 2134232 - RNA, 19 nt, Artificial Sequence
  Description of Artificial Sequence: Synthetic oligonucleotide
  Sense strand starting at position 3374 of SEQ ID NO: 1882606
aagugagauaugugagcga

SEQ ID NO: 2134233 - RNA, 19 nt, Artificial Sequence
  Description of Artificial Sequence: Synthetic oligonucleotide
  Antisense strand to SEQ ID NO: 2134232
ucgcucacauaucucacuu

SEQ ID NO: 2134234 - RNA, 19 nt, Artificial Sequence
  Description of Artificial Sequence: Synthetic oligonucleotide
  Sense strand starting at position 3377 of SEQ ID NO: 1882606
ugagauaugugagcgacau

SEQ ID NO: 2134235 - RNA, 19 nt, Artificial Sequence
  Description of Artificial Sequence: Synthetic oligonucleotide
  Antisense strand to SEQ ID NO: 2134234
augucgcucacauaucuca

SEQ ID NO: 2134236 - RNA, 19 nt, Artificial Sequence
  Description of Artificial Sequence: Synthetic oligonucleotide
  Sense strand starting at position 3378 of SEQ ID NO: 1882606
gagauaugugagcgacauu

SEQ ID NO: 2134237 - RNA, 19 nt, Artificial Sequence
  Description of Artificial Sequence: Synthetic oligonucleotide
  Antisense strand to SEQ ID NO: 2134236
aaugucgcucacauaucuc

SEQ ID NO: 2134238 - RNA, 19 nt, Artificial Sequence
  Description of Artificial Sequence: Synthetic oligonucleotide
  Sense strand starting at position 3379 of SEQ ID NO: 1882606
agauaugugagcgacauuc

SEQ ID NO: 2134239 - RNA, 19 nt, Artificial Sequence
  Description of Artificial Sequence: Synthetic oligonucleotide
  Antisense strand to SEQ ID NO: 2134238
gaaugucgcucacauaucu

SEQ ID NO: 2134240 - RNA, 19 nt, Artificial Sequence
  Description of Artificial Sequence: Synthetic oligonucleotide
  Sense strand starting at position 3451 of SEQ ID NO: 1882606
cugcgucagcuugcuuauu

SEQ ID NO: 2134241 - RNA, 19 nt, Artificial Sequence
  Description of Artificial Sequence: Synthetic oligonucleotide
  Antisense strand to SEQ ID NO: 2134240
aauaagcaagcugacgcag

SEQ ID NO: 2134242 - RNA, 19 nt, Artificial Sequence
  Description of Artificial Sequence: Synthetic oligonucleotide
  Sense strand starting at position 3484 of SEQ ID NO: 1882606
ggguuaggaagcugugauc

SEQ ID NO: 2134243 - RNA, 19 nt, Artificial Sequence
  Description of Artificial Sequence: Synthetic oligonucleotide
  Antisense strand to SEQ ID NO: 2134242
gaucacagcuuccuaaccc

SEQ ID NO: 2134244 - RNA, 19 nt, Artificial Sequence
  Description of Artificial Sequence: Synthetic oligonucleotide
  Sense strand starting at position 3529 of SEQ ID NO: 1882606
gauggcuugccuggcuaaa

SEQ ID NO: 2134245 - RNA, 19 nt, Artificial Sequence
  Description of Artificial Sequence: Synthetic oligonucleotide
  Antisense strand to SEQ ID NO: 2134244
uuuagccaggcaagccauc

SEQ ID NO: 2134246 - RNA, 19 nt, Artificial Sequence
  Description of Artificial Sequence: Synthetic oligonucleotide
  Sense strand starting at position 3531 of SEQ ID NO: 1882606
uggcuugccuggcuaaauu

SEQ ID NO: 2134247 - RNA, 19 nt, Artificial Sequence
  Description of Artificial Sequence: Synthetic oligonucleotide
  Antisense strand to SEQ ID NO: 2134246
aauuuagccaggcaagcca

SEQ ID NO: 2134248 - RNA, 19 nt, Artificial Sequence
  Description of Artificial Sequence: Synthetic oligonucleotide
  Sense strand starting at position 3575 of SEQ ID NO: 1882606
uucccuguaucucuacgaa

SEQ ID NO: 2134249 - RNA, 19 nt, Artificial Sequence
  Description of Artificial Sequence: Synthetic oligonucleotide
  Antisense strand to SEQ ID NO: 2134248
uucguagagauacagggaa

SEQ ID NO: 2134250 - RNA, 19 nt, Artificial Sequence
  Description of Artificial Sequence: Synthetic oligonucleotide
  Sense strand starting at position 3578 of SEQ ID NO: 1882606
ccuguaucucuacgaauga

SEQ ID NO: 2134251 - RNA, 19 nt, Artificial Sequence
  Description of Artificial Sequence: Synthetic oligonucleotide
  Antisense strand to SEQ ID NO: 2134250
ucauucguagagauacagg

SEQ ID NO: 2134252 - RNA, 19 nt, Artificial Sequence
  Description of Artificial Sequence: Synthetic oligonucleotide
  Sense strand starting at position 3602 of SEQ ID NO: 1882606
gcccuaauuggcuggcgaa

SEQ ID NO: 2134253 - RNA, 19 nt, Artificial Sequence
  Description of Artificial Sequence: Synthetic oligonucleotide
  Antisense strand to SEQ ID NO: 2134252
uucgccagccaauuagggc

SEQ ID NO: 2134254 - RNA, 19 nt, Artificial Sequence
  Description of Artificial Sequence: Synthetic oligonucleotide
  Sense strand starting at position 3656 of SEQ ID NO: 1882606
aagucaggguuggaugaau

SEQ ID NO: 2134255 - RNA, 19 nt, Artificial Sequence
  Description of Artificial Sequence: Synthetic oligonucleotide
  Antisense strand to SEQ ID NO: 2134254
auucauccaacccugacuu

SEQ ID NO: 2134256 - RNA, 19 nt, Artificial Sequence
  Description of Artificial Sequence: Synthetic oligonucleotide
  Sense strand starting at position 3692 of SEQ ID NO: 1882606
agcuuuagggucuguagga

SEQ ID NO: 2134257 - RNA, 19 nt, Artificial Sequence
  Description of Artificial Sequence: Synthetic oligonucleotide
  Antisense strand to SEQ ID NO: 2134256
uccuacagacccuaaagcu

SEQ ID NO: 2134258 - RNA, 19 nt, Artificial Sequence
  Description of Artificial Sequence: Synthetic oligonucleotide
  Sense strand starting at position 3693 of SEQ ID NO: 1882606
gcuuuagggucuguaggaa

SEQ ID NO: 2134259 - RNA, 19 nt, Artificial Sequence
  Description of Artificial Sequence: Synthetic oligonucleotide
  Antisense strand to SEQ ID NO: 2134258
uuccuacagacccuaaagc

SEQ ID NO: 2134260 - RNA, 19 nt, Artificial Sequence
  Description of Artificial Sequence: Synthetic oligonucleotide
  Sense strand starting at position 3697 of SEQ ID NO: 1882606
uagggucuguaggaaauaa

SEQ ID NO: 2134261 - RNA, 19 nt, Artificial Sequence
  Description of Artificial Sequence: Synthetic oligonucleotide
  Antisense strand to SEQ ID NO: 2134260
uuauuuccuacagacccua

SEQ ID NO: 2134262 - RNA, 19 nt, Artificial Sequence
  Description of Artificial Sequence: Synthetic oligonucleotide
  Sense strand starting at position 3709 of SEQ ID NO: 1882606
gaaauaaacgguggugcua

SEQ ID NO: 2134263 - RNA, 19 nt, Artificial Sequence
  Description of Artificial Sequence: Synthetic oligonucleotide
  Antisense strand to SEQ ID NO: 2134262
uagcaccaccguuuauuuc

SEQ ID NO: 2134264 - RNA, 19 nt, Artificial Sequence
  Description of Artificial Sequence: Synthetic oligonucleotide
  Sense strand starting at position 3815 of SEQ ID NO: 1882606
gguauauugggucgggcuu

SEQ ID NO: 2134265 - RNA, 19 nt, Artificial Sequence
  Description of Artificial Sequence: Synthetic oligonucleotide
  Antisense strand to SEQ ID NO: 2134264
aagcccgacccaauauacc

SEQ ID NO: 2134266 - RNA, 19 nt, Artificial Sequence
  Description of Artificial Sequence: Synthetic oligonucleotide
  Sense strand starting at position 3870 of SEQ ID NO: 1882606
uggugucacacagagucau

SEQ ID NO: 2134267 - RNA, 19 nt, Artificial Sequence
  Description of Artificial Sequence: Synthetic oligonucleotide
  Antisense strand to SEQ ID NO: 2134266
augacucugugugacacca

SEQ ID NO: 2134268 - RNA, 19 nt, Artificial Sequence
  Description of Artificial Sequence: Synthetic oligonucleotide
  Sense strand starting at position 3880 of SEQ ID NO: 1882606
cagagucauauccgugugu

SEQ ID NO: 2134269 - RNA, 19 nt, Artificial Sequence
  Description of Artificial Sequence: Synthetic oligonucleotide
  Antisense strand to SEQ ID NO: 2134268
acacacggauaugacucug

SEQ ID NO: 2134270 - RNA, 19 nt, Artificial Sequence
  Description of Artificial Sequence: Synthetic oligonucleotide
  Sense strand starting at position 3902 of SEQ ID NO: 1882606
agucccuguucugugacua

SEQ ID NO: 2134271 - RNA, 19 nt, Artificial Sequence
  Description of Artificial Sequence: Synthetic oligonucleotide
  Antisense strand to SEQ ID NO: 2134270
uagucacagaacagggacu

SEQ ID NO: 2134272 - RNA, 19 nt, Artificial Sequence
  Description of Artificial Sequence: Synthetic oligonucleotide
  Sense strand starting at position 3910 of SEQ ID NO: 1882606
uucugugacuagucugacu

SEQ ID NO: 2134273 - RNA, 19 nt, Artificial Sequence
  Description of Artificial Sequence: Synthetic oligonucleotide
  Antisense strand to SEQ ID NO: 2134272
agucagacuagucacagaa

SEQ ID NO: 2134274 - RNA, 19 nt, Artificial Sequence
  Description of Artificial Sequence: Synthetic oligonucleotide
  Sense strand starting at position 2 of SEQ ID NO: 1882607
ccuucuauuuauuaggagu

SEQ ID NO: 2134275 - RNA, 19 nt, Artificial Sequence
  Description of Artificial Sequence: Synthetic oligonucleotide
  Antisense strand to SEQ ID NO: 2134274
acuccuaauaaauagaagg

SEQ ID NO: 2134276 - RNA, 19 nt, Artificial Sequence
  Description of Artificial Sequence: Synthetic oligonucleotide
  Sense strand starting at position 4 of SEQ ID NO: 1882607
uucuauuuauuaggaguga

SEQ ID NO: 2134277 - RNA, 19 nt, Artificial Sequence
  Description of Artificial Sequence: Synthetic oligonucleotide
  Antisense strand to SEQ ID NO: 2134276
ucacuccuaauaaauagaa

SEQ ID NO: 2134278 - RNA, 19 nt, Artificial Sequence
  Description of Artificial Sequence: Synthetic oligonucleotide
  Sense strand starting at position 108 of SEQ ID NO: 1882607
acccauaugccacguaaug

SEQ ID NO: 2134279 - RNA, 19 nt, Artificial Sequence
  Description of Artificial Sequence: Synthetic oligonucleotide
  Antisense strand to SEQ ID NO: 2134278
cauuacguggcauaugggu

SEQ ID NO: 2134280 - RNA, 19 nt, Artificial Sequence
  Description of Artificial Sequence: Synthetic oligonucleotide
  Sense strand starting at position 205 of SEQ ID NO: 1882607
ugucguagccacuguaaca

SEQ ID NO: 2134281 - RNA, 19 nt, Artificial Sequence
  Description of Artificial Sequence: Synthetic oligonucleotide
  Antisense strand to SEQ ID NO: 2134280
uguuacaguggcuacgaca

SEQ ID NO: 2134282 - RNA, 19 nt, Artificial Sequence
  Description of Artificial Sequence: Synthetic oligonucleotide
  Sense strand starting at position 234 of SEQ ID NO: 1882607
augcauuaaccacguguuu

SEQ ID NO: 2134283 - RNA, 19 nt, Artificial Sequence
  Description of Artificial Sequence: Synthetic oligonucleotide
  Antisense strand to SEQ ID NO: 2134282
aaacacgugguuaaugcau

SEQ ID NO: 2134284 - RNA, 19 nt, Artificial Sequence
  Description of Artificial Sequence: Synthetic oligonucleotide
  Sense strand starting at position 289 of SEQ ID NO: 1882607
cccauaauauaguuuagua

SEQ ID NO: 2134285 - RNA, 19 nt, Artificial Sequence
  Description of Artificial Sequence: Synthetic oligonucleotide
  Antisense strand to SEQ ID NO: 2134284
uacuaaacuauauuauggg

SEQ ID NO: 2134286 - RNA, 19 nt, Artificial Sequence
  Description of Artificial Sequence: Synthetic oligonucleotide
  Sense strand starting at position 302 of SEQ ID NO: 1882607
uuaguauaaauguguagca

SEQ ID NO: 2134287 - RNA, 19 nt, Artificial Sequence
  Description of Artificial Sequence: Synthetic oligonucleotide
  Antisense strand to SEQ ID NO: 2134286
ugcuacacauuuauacuaa

SEQ ID NO: 2134288 - RNA, 19 nt, Artificial Sequence
  Description of Artificial Sequence: Synthetic oligonucleotide
  Sense strand starting at position 303 of SEQ ID NO: 1882607
uaguauaaauguguagcaa

SEQ ID NO: 2134289 - RNA, 19 nt, Artificial Sequence
  Description of Artificial Sequence: Synthetic oligonucleotide
  Antisense strand to SEQ ID NO: 2134288
uugcuacacauuuauacua

SEQ ID NO: 2134290 - RNA, 19 nt, Artificial Sequence
  Description of Artificial Sequence: Synthetic oligonucleotide
  Sense strand starting at position 304 of SEQ ID NO: 1882607
aguauaaauguguagcaaa

SEQ ID NO: 2134291 - RNA, 19 nt, Artificial Sequence
  Description of Artificial Sequence: Synthetic oligonucleotide
  Antisense strand to SEQ ID NO: 2134290
uuugcuacacauuuauacu

SEQ ID NO: 2134292 - RNA, 19 nt, Artificial Sequence
  Description of Artificial Sequence: Synthetic oligonucleotide
  Sense strand starting at position 2427 of SEQ ID NO: 1882607
aggaguucgucauccacaa

SEQ ID NO: 2134293 - RNA, 19 nt, Artificial Sequence
  Description of Artificial Sequence: Synthetic oligonucleotide
  Antisense strand to SEQ ID NO: 2134292
uuguggaugacgaacuccu

SEQ ID NO: 2134294 - RNA, 19 nt, Artificial Sequence
  Description of Artificial Sequence: Synthetic oligonucleotide
  Sense strand starting at position 2431 of SEQ ID NO: 1882607
guucgucauccacaaccau

SEQ ID NO: 2134295 - RNA, 19 nt, Artificial Sequence
  Description of Artificial Sequence: Synthetic oligonucleotide
  Antisense strand to SEQ ID NO: 2134294
augguuguggaugacgaac

SEQ ID NO: 2134296 - RNA, 19 nt, Artificial Sequence
  Description of Artificial Sequence: Synthetic oligonucleotide
  Sense strand starting at position 2491 of SEQ ID NO: 1882607
gcuuauguucgaggugaga

SEQ ID NO: 2134297 - RNA, 19 nt, Artificial Sequence
  Description of Artificial Sequence: Synthetic oligonucleotide
  Antisense strand to SEQ ID NO: 2134296
ucucaccucgaacauaagc

SEQ ID NO: 2134298 - RNA, 19 nt, Artificial Sequence
  Description of Artificial Sequence: Synthetic oligonucleotide
  Sense strand starting at position 2963 of SEQ ID NO: 1882607
uuccacuuccuaugugauu

SEQ ID NO: 2134299 - RNA, 19 nt, Artificial Sequence
  Description of Artificial Sequence: Synthetic oligonucleotide
  Antisense strand to SEQ ID NO: 2134298
aaucacauaggaaguggaa

SEQ ID NO: 2134300 - RNA, 19 nt, Artificial Sequence
  Description of Artificial Sequence: Synthetic oligonucleotide
  Sense strand starting at position 3132 of SEQ ID NO: 1882607
cgugaacugucccuuuaga

SEQ ID NO: 2134301 - RNA, 19 nt, Artificial Sequence
  Description of Artificial Sequence: Synthetic oligonucleotide
  Antisense strand to SEQ ID NO: 2134300
ucuaaagggacaguucacg

SEQ ID NO: 2134302 - RNA, 19 nt, Artificial Sequence
  Description of Artificial Sequence: Synthetic oligonucleotide
  Sense strand starting at position 3238 of SEQ ID NO: 1882607
ucucuuauaguguaggagu

SEQ ID NO: 2134303 - RNA, 19 nt, Artificial Sequence
  Description of Artificial Sequence: Synthetic oligonucleotide
  Antisense strand to SEQ ID NO: 2134302
acuccuacacuauaagaga

SEQ ID NO: 2134304 - RNA, 19 nt, Artificial Sequence
  Description of Artificial Sequence: Synthetic oligonucleotide
  Sense strand starting at position 3313 of SEQ ID NO: 1882607
caggcagggaguuguagaa

SEQ ID NO: 2134305 - RNA, 19 nt, Artificial Sequence
  Description of Artificial Sequence: Synthetic oligonucleotide
  Antisense strand to SEQ ID NO: 2134304
uucuacaacucccugccug

SEQ ID NO: 2134306 - RNA, 19 nt, Artificial Sequence
  Description of Artificial Sequence: Synthetic oligonucleotide
  Sense strand starting at position 3379 of SEQ ID NO: 1882607
acucuugcagagcaagaaa

SEQ ID NO: 2134307 - RNA, 19 nt, Artificial Sequence
  Description of Artificial Sequence: Synthetic oligonucleotide
  Antisense strand to SEQ ID NO: 2134306
uuucuugcucugcaagagu

SEQ ID NO: 2134308 - RNA, 19 nt, Artificial Sequence
  Description of Artificial Sequence: Synthetic oligonucleotide
  Sense strand starting at position 3442 of SEQ ID NO: 1882607
ggguuuguugcgguauauc

SEQ ID NO: 2134309 - RNA, 19 nt, Artificial Sequence
  Description of Artificial Sequence: Synthetic oligonucleotide
  Antisense strand to SEQ ID NO: 2134308
gauauaccgcaacaaaccc

SEQ ID NO: 2134310 - RNA, 19 nt, Artificial Sequence
  Description of Artificial Sequence: Synthetic oligonucleotide
  Sense strand starting at position 3452 of SEQ ID NO: 1882607
cgguauaucuugucucaga

SEQ ID NO: 2134311 - RNA, 19 nt, Artificial Sequence
  Description of Artificial Sequence: Synthetic oligonucleotide
  Antisense strand to SEQ ID NO: 2134310
ucugagacaagauauaccg

SEQ ID NO: 2134312 - RNA, 19 nt, Artificial Sequence
  Description of Artificial Sequence: Synthetic oligonucleotide
  Sense strand starting at position 3453 of SEQ ID NO: 1882607
gguauaucuugucucagaa

SEQ ID NO: 2134313 - RNA, 19 nt, Artificial Sequence
  Description of Artificial Sequence: Synthetic oligonucleotide
  Antisense strand to SEQ ID NO: 2134312
uucugagacaagauauacc

SEQ ID NO: 2134314 - RNA, 19 nt, Artificial Sequence
  Description of Artificial Sequence: Synthetic oligonucleotide
  Sense strand starting at position 3461 of SEQ ID NO: 1882607
uugucucagaagugagaua

SEQ ID NO: 2134315 - RNA, 19 nt, Artificial Sequence
  Description of Artificial Sequence: Synthetic oligonucleotide
  Antisense strand to SEQ ID NO: 2134314
uaucucacuucugagacaa

SEQ ID NO: 2134316 - RNA, 19 nt, Artificial Sequence
  Description of Artificial Sequence: Synthetic oligonucleotide
  Sense strand starting at position 3470 of SEQ ID NO: 1882607
aagugagauaugugagcga

SEQ ID NO: 2134317 - RNA, 19 nt, Artificial Sequence
  Description of Artificial Sequence: Synthetic oligonucleotide
  Antisense strand to SEQ ID NO: 2134316
ucgcucacauaucucacuu

SEQ ID NO: 2134318 - RNA, 19 nt, Artificial Sequence
  Description of Artificial Sequence: Synthetic oligonucleotide
  Sense strand starting at position 3473 of SEQ ID NO: 1882607
ugagauaugugagcgacau

SEQ ID NO: 2134319 - RNA, 19 nt, Artificial Sequence
  Description of Artificial Sequence: Synthetic oligonucleotide
  Antisense strand to SEQ ID NO: 2134318
augucgcucacauaucuca

SEQ ID NO: 2134320 - RNA, 19 nt, Artificial Sequence
  Description of Artificial Sequence: Synthetic oligonucleotide
  Sense strand starting at position 3474 of SEQ ID NO: 1882607
gagauaugugagcgacauu

SEQ ID NO: 2134321 - RNA, 19 nt, Artificial Sequence
  Description of Artificial Sequence: Synthetic oligonucleotide
  Antisense strand to SEQ ID NO: 2134320
aaugucgcucacauaucuc

SEQ ID NO: 2134322 - RNA, 19 nt, Artificial Sequence
  Description of Artificial Sequence: Synthetic oligonucleotide
  Sense strand starting at position 3475 of SEQ ID NO: 1882607
agauaugugagcgacauuc

SEQ ID NO: 2134323 - RNA, 19 nt, Artificial Sequence
  Description of Artificial Sequence: Synthetic oligonucleotide
  Antisense strand to SEQ ID NO: 2134322
gaaugucgcucacauaucu

SEQ ID NO: 2134324 - RNA, 19 nt, Artificial Sequence
  Description of Artificial Sequence: Synthetic oligonucleotide
  Sense strand starting at position 3547 of SEQ ID NO: 1882607
cugcgucagcuugcuuauu

SEQ ID NO: 2134325 - RNA, 19 nt, Artificial Sequence
  Description of Artificial Sequence: Synthetic oligonucleotide
  Antisense strand to SEQ ID NO: 2134324
aauaagcaagcugacgcag

SEQ ID NO: 2134326 - RNA, 19 nt, Artificial Sequence
  Description of Artificial Sequence: Synthetic oligonucleotide
  Sense strand starting at position 3580 of SEQ ID NO: 1882607
ggguuaggaagcugugauc

SEQ ID NO: 2134327 - RNA, 19 nt, Artificial Sequence
  Description of Artificial Sequence: Synthetic oligonucleotide
  Antisense strand to SEQ ID NO: 2134326
gaucacagcuuccuaaccc

SEQ ID NO: 2134328 - RNA, 19 nt, Artificial Sequence
  Description of Artificial Sequence: Synthetic oligonucleotide
  Sense strand starting at position 3625 of SEQ ID NO: 1882607
gauggcuugccuggcuaaa

SEQ ID NO: 2134329 - RNA, 19 nt, Artificial Sequence
  Description of Artificial Sequence: Synthetic oligonucleotide
  Antisense strand to SEQ ID NO: 2134328
uuuagccaggcaagccauc

SEQ ID NO: 2134330 - RNA, 19 nt, Artificial Sequence
  Description of Artificial Sequence: Synthetic oligonucleotide
  Sense strand starting at position 3627 of SEQ ID NO: 1882607
uggcuugccuggcuaaauu

SEQ ID NO: 2134331 - RNA, 19 nt, Artificial Sequence
  Description of Artificial Sequence: Synthetic oligonucleotide
  Antisense strand to SEQ ID NO: 2134330
aauuuagccaggcaagcca

SEQ ID NO: 2134332 - RNA, 19 nt, Artificial Sequence
  Description of Artificial Sequence: Synthetic oligonucleotide
  Sense strand starting at position 3671 of SEQ ID NO: 1882607
uucccuguaucucuacgaa

SEQ ID NO: 2134333 - RNA, 19 nt, Artificial Sequence
  Description of Artificial Sequence: Synthetic oligonucleotide
  Antisense strand to SEQ ID NO: 2134332
uucguagagauacagggaa

SEQ ID NO: 2134334 - RNA, 19 nt, Artificial Sequence
  Description of Artificial Sequence: Synthetic oligonucleotide
  Sense strand starting at position 3674 of SEQ ID NO: 1882607
ccuguaucucuacgaauga

SEQ ID NO: 2134335 - RNA, 19 nt, Artificial Sequence
  Description of Artificial Sequence: Synthetic oligonucleotide
  Antisense strand to SEQ ID NO: 2134334
ucauucguagagauacagg

SEQ ID NO: 2134336 - RNA, 19 nt, Artificial Sequence
  Description of Artificial Sequence: Synthetic oligonucleotide
  Sense strand starting at position 3698 of SEQ ID NO: 1882607
gcccuaauuggcuggcgaa

SEQ ID NO: 2134337 - RNA, 19 nt, Artificial Sequence
  Description of Artificial Sequence: Synthetic oligonucleotide
  Antisense strand to SEQ ID NO: 2134336
uucgccagccaauuagggc

SEQ ID NO: 2134338 - RNA, 19 nt, Artificial Sequence
  Description of Artificial Sequence: Synthetic oligonucleotide
  Sense strand starting at position 3752 of SEQ ID NO: 1882607
aagucaggguuggaugaau

SEQ ID NO: 2134339 - RNA, 19 nt, Artificial Sequence
  Description of Artificial Sequence: Synthetic oligonucleotide
  Antisense strand to SEQ ID NO: 2134338
auucauccaacccugacuu

SEQ ID NO: 2134340 - RNA, 19 nt, Artificial Sequence
  Description of Artificial Sequence: Synthetic oligonucleotide
  Sense strand starting at position 3788 of SEQ ID NO: 1882607
agcuuuagggucuguagga

SEQ ID NO: 2134341 - RNA, 19 nt, Artificial Sequence
  Description of Artificial Sequence: Synthetic oligonucleotide
  Antisense strand to SEQ ID NO: 2134340
uccuacagacccuaaagcu

SEQ ID NO: 2134342 - RNA, 19 nt, Artificial Sequence
  Description of Artificial Sequence: Synthetic oligonucleotide
  Sense strand starting at position 3789 of SEQ ID NO: 1882607
gcuuuagggucuguaggaa

SEQ ID NO: 2134343 - RNA, 19 nt, Artificial Sequence
  Description of Artificial Sequence: Synthetic oligonucleotide
  Antisense strand to SEQ ID NO: 2134342
uuccuacagacccuaaagc

SEQ ID NO: 2134344 - RNA, 19 nt, Artificial Sequence
  Description of Artificial Sequence: Synthetic oligonucleotide
  Sense strand starting at position 3793 of SEQ ID NO: 1882607
uagggucuguaggaaauaa

SEQ ID NO: 2134345 - RNA, 19 nt, Artificial Sequence
  Description of Artificial Sequence: Synthetic oligonucleotide
  Antisense strand to SEQ ID NO: 2134344
uuauuuccuacagacccua

SEQ ID NO: 2134346 - RNA, 19 nt, Artificial Sequence
  Description of Artificial Sequence: Synthetic oligonucleotide
  Sense strand starting at position 3805 of SEQ ID NO: 1882607
gaaauaaacgguggugcua

SEQ ID NO: 2134347 - RNA, 19 nt, Artificial Sequence
  Description of Artificial Sequence: Synthetic oligonucleotide
  Antisense strand to SEQ ID NO: 2134346
uagcaccaccguuuauuuc

SEQ ID NO: 2134348 - RNA, 19 nt, Artificial Sequence
  Description of Artificial Sequence: Synthetic oligonucleotide
  Sense strand starting at position 3911 of SEQ ID NO: 1882607
gguauauugggucgggcuu

SEQ ID NO: 2134349 - RNA, 19 nt, Artificial Sequence
  Description of Artificial Sequence: Synthetic oligonucleotide
  Antisense strand to SEQ ID NO: 2134348
aagcccgacccaauauacc

SEQ ID NO: 2134350 - RNA, 19 nt, Artificial Sequence
  Description of Artificial Sequence: Synthetic oligonucleotide
  Sense strand starting at position 3966 of SEQ ID NO: 1882607
uggugucacacagagucau

SEQ ID NO: 2134351 - RNA, 19 nt, Artificial Sequence
  Description of Artificial Sequence: Synthetic oligonucleotide
  Antisense strand to SEQ ID NO: 2134350
augacucugugugacacca

SEQ ID NO: 2134352 - RNA, 19 nt, Artificial Sequence
  Description of Artificial Sequence: Synthetic oligonucleotide
  Sense strand starting at position 3976 of SEQ ID NO: 1882607
cagagucauauccgugugu

SEQ ID NO: 2134353 - RNA, 19 nt, Artificial Sequence
  Description of Artificial Sequence: Synthetic oligonucleotide
  Antisense strand to SEQ ID NO: 2134352
acacacggauaugacucug

SEQ ID NO: 2134354 - RNA, 19 nt, Artificial Sequence
  Description of Artificial Sequence: Synthetic oligonucleotide
  Sense strand starting at position 28 of SEQ ID NO: 1882608
gguaaagcaagcuaugaaa

SEQ ID NO: 2134355 - RNA, 19 nt, Artificial Sequence
  Description of Artificial Sequence: Synthetic oligonucleotide
  Antisense strand to SEQ ID NO: 2134354
uuucauagcuugcuuuacc

SEQ ID NO: 2134356 - RNA, 19 nt, Artificial Sequence
  Description of Artificial Sequence: Synthetic oligonucleotide
  Sense strand starting at position 211 of SEQ ID NO: 1882608
gagagauagucuguuugua

SEQ ID NO: 2134357 - RNA, 19 nt, Artificial Sequence
  Description of Artificial Sequence: Synthetic oligonucleotide
  Antisense strand to SEQ ID NO: 2134356
uacaaacagacuaucucuc

SEQ ID NO: 2134358 - RNA, 19 nt, Artificial Sequence
  Description of Artificial Sequence: Synthetic oligonucleotide
  Sense strand starting at position 213 of SEQ ID NO: 1882608
gagauagucuguuuguaau

SEQ ID NO: 2134359 - RNA, 19 nt, Artificial Sequence
  Description of Artificial Sequence: Synthetic oligonucleotide
  Antisense strand to SEQ ID NO: 2134358
auuacaaacagacuaucuc

SEQ ID NO: 2134360 - RNA, 19 nt, Artificial Sequence
  Description of Artificial Sequence: Synthetic oligonucleotide
  Sense strand starting at position 282 of SEQ ID NO: 1882608
ggcaguuaguugucuauuu

SEQ ID NO: 2134361 - RNA, 19 nt, Artificial Sequence
  Description of Artificial Sequence: Synthetic oligonucleotide
  Antisense strand to SEQ ID NO: 2134360
aaauagacaacuaacugcc

SEQ ID NO: 2134362 - RNA, 19 nt, Artificial Sequence
  Description of Artificial Sequence: Synthetic oligonucleotide
  Sense strand starting at position 283 of SEQ ID NO: 1882608
gcaguuaguugucuauuuc

SEQ ID NO: 2134363 - RNA, 19 nt, Artificial Sequence
  Description of Artificial Sequence: Synthetic oligonucleotide
  Antisense strand to SEQ ID NO: 2134362
gaaauagacaacuaacugc

SEQ ID NO: 2134364 - RNA, 19 nt, Artificial Sequence
  Description of Artificial Sequence: Synthetic oligonucleotide
  Sense strand starting at position 457 of SEQ ID NO: 1882608
accuuucucuggcugacau

SEQ ID NO: 2134365 - RNA, 19 nt, Artificial Sequence
  Description of Artificial Sequence: Synthetic oligonucleotide
  Antisense strand to SEQ ID NO: 2134364
augucagccagagaaaggu

SEQ ID NO: 2134366 - RNA, 19 nt, Artificial Sequence
  Description of Artificial Sequence: Synthetic oligonucleotide
  Sense strand starting at position 542 of SEQ ID NO: 1882608
ggucuaagguuuccacauu

SEQ ID NO: 2134367 - RNA, 19 nt, Artificial Sequence
  Description of Artificial Sequence: Synthetic oligonucleotide
  Antisense strand to SEQ ID NO: 2134366
aauguggaaaccuuagacc

SEQ ID NO: 2134368 - RNA, 19 nt, Artificial Sequence
  Description of Artificial Sequence: Synthetic oligonucleotide
  Sense strand starting at position 584 of SEQ ID NO: 1882608
ugcagaaauccauguugaa

SEQ ID NO: 2134369 - RNA, 19 nt, Artificial Sequence
  Description of Artificial Sequence: Synthetic oligonucleotide
  Antisense strand to SEQ ID NO: 2134368
uucaacauggauuucugca

SEQ ID NO: 2134370 - RNA, 19 nt, Artificial Sequence
  Description of Artificial Sequence: Synthetic oligonucleotide
  Sense strand starting at position 849 of SEQ ID NO: 1882608
uaaaguuaagucuggcacu

SEQ ID NO: 2134371 - RNA, 19 nt, Artificial Sequence
  Description of Artificial Sequence: Synthetic oligonucleotide
  Antisense strand to SEQ ID NO: 2134370
agugccagacuuaacuuua

SEQ ID NO: 2134372 - RNA, 19 nt, Artificial Sequence
  Description of Artificial Sequence: Synthetic oligonucleotide
  Sense strand starting at position 922 of SEQ ID NO: 1882608
caagguguuccauauggac

SEQ ID NO: 2134373 - RNA, 19 nt, Artificial Sequence
  Description of Artificial Sequence: Synthetic oligonucleotide
  Antisense strand to SEQ ID NO: 2134372
guccauauggaacaccuug

SEQ ID NO: 2134374 - RNA, 19 nt, Artificial Sequence
  Description of Artificial Sequence: Synthetic oligonucleotide
  Sense strand starting at position 959 of SEQ ID NO: 1882608
gcccauauucgugagaaca

SEQ ID NO: 2134375 - RNA, 19 nt, Artificial Sequence
  Description of Artificial Sequence: Synthetic oligonucleotide
  Antisense strand to SEQ ID NO: 2134374
uguucucacgaauaugggc

SEQ ID NO: 2134376 - RNA, 19 nt, Artificial Sequence
  Description of Artificial Sequence: Synthetic oligonucleotide
  Sense strand starting at position 1009 of SEQ ID NO: 1882608
uguuucucucccuaggaga

SEQ ID NO: 2134377 - RNA, 19 nt, Artificial Sequence
  Description of Artificial Sequence: Synthetic oligonucleotide
  Antisense strand to SEQ ID NO: 2134376
ucuccuagggagagaaaca

SEQ ID NO: 2134378 - RNA, 19 nt, Artificial Sequence
  Description of Artificial Sequence: Synthetic oligonucleotide
  Sense strand starting at position 1135 of SEQ ID NO: 1882608
ccuggugacuccucuaauc

SEQ ID NO: 2134379 - RNA, 19 nt, Artificial Sequence
  Description of Artificial Sequence: Synthetic oligonucleotide
  Antisense strand to SEQ ID NO: 2134378
gauuagaggagucaccagg

SEQ ID NO: 2134380 - RNA, 19 nt, Artificial Sequence
  Description of Artificial Sequence: Synthetic oligonucleotide
  Sense strand starting at position 1137 of SEQ ID NO: 1882608
uggugacuccucuaaucuc

SEQ ID NO: 2134381 - RNA, 19 nt, Artificial Sequence
  Description of Artificial Sequence: Synthetic oligonucleotide
  Antisense strand to SEQ ID NO: 2134380
gagauuagaggagucacca

SEQ ID NO: 2134382 - RNA, 19 nt, Artificial Sequence
  Description of Artificial Sequence: Synthetic oligonucleotide
  Sense strand starting at position 1360 of SEQ ID NO: 1882608
gccuaagaucugcaugaca

SEQ ID NO: 2134383 - RNA, 19 nt, Artificial Sequence
  Description of Artificial Sequence: Synthetic oligonucleotide
  Antisense strand to SEQ ID NO: 2134382
ugucaugcagaucuuaggc

SEQ ID NO: 2134384 - RNA, 19 nt, Artificial Sequence
  Description of Artificial Sequence: Synthetic oligonucleotide
  Sense strand starting at position 1362 of SEQ ID NO: 1882608
cuaagaucugcaugacaga

SEQ ID NO: 2134385 - RNA, 19 nt, Artificial Sequence
  Description of Artificial Sequence: Synthetic oligonucleotide
  Antisense strand to SEQ ID NO: 2134384
ucugucaugcagaucuuag

SEQ ID NO: 2134386 - RNA, 19 nt, Artificial Sequence
  Description of Artificial Sequence: Synthetic oligonucleotide
  Sense strand starting at position 1501 of SEQ ID NO: 1882608
guaucuucccaacaguuga

SEQ ID NO: 2134387 - RNA, 19 nt, Artificial Sequence
  Description of Artificial Sequence: Synthetic oligonucleotide
  Antisense strand to SEQ ID NO: 2134386
ucaacuguugggaagauac

SEQ ID NO: 2134388 - RNA, 19 nt, Artificial Sequence
  Description of Artificial Sequence: Synthetic oligonucleotide
  Sense strand starting at position 1549 of SEQ ID NO: 1882608
gagaguccaugucugggua

SEQ ID NO: 2134389 - RNA, 19 nt, Artificial Sequence
  Description of Artificial Sequence: Synthetic oligonucleotide
  Antisense strand to SEQ ID NO: 2134388
uacccagacauggacucuc

SEQ ID NO: 2134390 - RNA, 19 nt, Artificial Sequence
  Description of Artificial Sequence: Synthetic oligonucleotide
  Sense strand starting at position 1721 of SEQ ID NO: 1882608
ggcugacaucucugagaac

SEQ ID NO: 2134391 - RNA, 19 nt, Artificial Sequence
  Description of Artificial Sequence: Synthetic oligonucleotide
  Antisense strand to SEQ ID NO: 2134390
guucucagagaugucagcc

SEQ ID NO: 2134392 - RNA, 19 nt, Artificial Sequence
  Description of Artificial Sequence: Synthetic oligonucleotide
  Sense strand starting at position 1831 of SEQ ID NO: 1882608
gcauuuggcuugucccaga

SEQ ID NO: 2134393 - RNA, 19 nt, Artificial Sequence
  Description of Artificial Sequence: Synthetic oligonucleotide
  Antisense strand to SEQ ID NO: 2134392
ucugggacaagccaaaugc

SEQ ID NO: 2134394 - RNA, 19 nt, Artificial Sequence
  Description of Artificial Sequence: Synthetic oligonucleotide
  Sense strand starting at position 1842 of SEQ ID NO: 1882608
gucccagauuguguaauga

SEQ ID NO: 2134395 - RNA, 19 nt, Artificial Sequence
  Description of Artificial Sequence: Synthetic oligonucleotide
  Antisense strand to SEQ ID NO: 2134394
ucauuacacaaucugggac

SEQ ID NO: 2134396 - RNA, 19 nt, Artificial Sequence
  Description of Artificial Sequence: Synthetic oligonucleotide
  Sense strand starting at position 1890 of SEQ ID NO: 1882608
gcuggugacaaguaaggua

SEQ ID NO: 2134397 - RNA, 19 nt, Artificial Sequence
  Description of Artificial Sequence: Synthetic oligonucleotide
  Antisense strand to SEQ ID NO: 2134396
uaccuuacuugucaccagc

SEQ ID NO: 2134398 - RNA, 19 nt, Artificial Sequence
  Description of Artificial Sequence: Synthetic oligonucleotide
  Sense strand starting at position 1985 of SEQ ID NO: 1882608
ggaagagggucuguccuua

SEQ ID NO: 2134399 - RNA, 19 nt, Artificial Sequence
  Description of Artificial Sequence: Synthetic oligonucleotide
  Antisense strand to SEQ ID NO: 2134398
uaaggacagacccucuucc

SEQ ID NO: 2134400 - RNA, 19 nt, Artificial Sequence
  Description of Artificial Sequence: Synthetic oligonucleotide
  Sense strand starting at position 2066 of SEQ ID NO: 1882608
gucagagcucuggagagau

SEQ ID NO: 2134401 - RNA, 19 nt, Artificial Sequence
  Description of Artificial Sequence: Synthetic oligonucleotide
  Antisense strand to SEQ ID NO: 2134400
aucucuccagagcucugac

SEQ ID NO: 2134402 - RNA, 19 nt, Artificial Sequence
  Description of Artificial Sequence: Synthetic oligonucleotide
  Sense strand starting at position 2070 of SEQ ID NO: 1882608
gagcucuggagagaugcau

SEQ ID NO: 2134403 - RNA, 19 nt, Artificial Sequence
  Description of Artificial Sequence: Synthetic oligonucleotide
  Antisense strand to SEQ ID NO: 2134402
augcaucucuccagagcuc

SEQ ID NO: 2134404 - RNA, 19 nt, Artificial Sequence
  Description of Artificial Sequence: Synthetic oligonucleotide
  Sense strand starting at position 2504 of SEQ ID NO: 1882608
gcugcauaaauguaggauu

SEQ ID NO: 2134405 - RNA, 19 nt, Artificial Sequence
  Description of Artificial Sequence: Synthetic oligonucleotide
  Antisense strand to SEQ ID NO: 2134404
aauccuacauuuaugcagc

SEQ ID NO: 2134406 - RNA, 19 nt, Artificial Sequence
  Description of Artificial Sequence: Synthetic oligonucleotide
  Sense strand starting at position 2506 of SEQ ID NO: 1882608
ugcauaaauguaggauuau

SEQ ID NO: 2134407 - RNA, 19 nt, Artificial Sequence
  Description of Artificial Sequence: Synthetic oligonucleotide
  Antisense strand to SEQ ID NO: 2134406
auaauccuacauuuaugca

SEQ ID NO: 2134408 - RNA, 19 nt, Artificial Sequence
  Description of Artificial Sequence: Synthetic oligonucleotide
  Sense strand starting at position 2962 of SEQ ID NO: 1882608
cuacaaguucugcacaugu

SEQ ID NO: 2134409 - RNA, 19 nt, Artificial Sequence
  Description of Artificial Sequence: Synthetic oligonucleotide
  Antisense strand to SEQ ID NO: 2134408
acaugugcagaacuuguag

SEQ ID NO: 2134410 - RNA, 19 nt, Artificial Sequence
  Description of Artificial Sequence: Synthetic oligonucleotide
  Sense strand starting at position 2964 of SEQ ID NO: 1882608
acaaguucugcacauguau

SEQ ID NO: 2134411 - RNA, 19 nt, Artificial Sequence
  Description of Artificial Sequence: Synthetic oligonucleotide
  Antisense strand to SEQ ID NO: 2134410
auacaugugcagaacuugu

SEQ ID NO: 2134412 - RNA, 19 nt, Artificial Sequence
  Description of Artificial Sequence: Synthetic oligonucleotide
  Sense strand starting at position 3011 of SEQ ID NO: 1882608
gaagaauauuaagggauaa

SEQ ID NO: 2134413 - RNA, 19 nt, Artificial Sequence
  Description of Artificial Sequence: Synthetic oligonucleotide
  Antisense strand to SEQ ID NO: 2134412
uuaucccuuaauauucuuc

SEQ ID NO: 2134414 - RNA, 19 nt, Artificial Sequence
  Description of Artificial Sequence: Synthetic oligonucleotide
  Sense strand starting at position 3089 of SEQ ID NO: 1882608
ugauauaccuaugucagga

SEQ ID NO: 2134415 - RNA, 19 nt, Artificial Sequence
  Description of Artificial Sequence: Synthetic oligonucleotide
  Antisense strand to SEQ ID NO: 2134414
uccugacauagguauauca

SEQ ID NO: 2134416 - RNA, 19 nt, Artificial Sequence
  Description of Artificial Sequence: Synthetic oligonucleotide
  Sense strand starting at position 3111 of SEQ ID NO: 1882608
uggagacuuggguaguuua

SEQ ID NO: 2134417 - RNA, 19 nt, Artificial Sequence
  Description of Artificial Sequence: Synthetic oligonucleotide
  Antisense strand to SEQ ID NO: 2134416
uaaacuacccaagucucca

SEQ ID NO: 2134418 - RNA, 19 nt, Artificial Sequence
  Description of Artificial Sequence: Synthetic oligonucleotide
  Sense strand starting at position 3308 of SEQ ID NO: 1882608
cauauaugcguauauacga

SEQ ID NO: 2134419 - RNA, 19 nt, Artificial Sequence
  Description of Artificial Sequence: Synthetic oligonucleotide
  Antisense strand to SEQ ID NO: 2134418
ucguauauacgcauauaug

SEQ ID NO: 2134420 - RNA, 19 nt, Artificial Sequence
  Description of Artificial Sequence: Synthetic oligonucleotide
  Sense strand starting at position 3366 of SEQ ID NO: 1882608
auaugaaaugucugugcag

SEQ ID NO: 2134421 - RNA, 19 nt, Artificial Sequence
  Description of Artificial Sequence: Synthetic oligonucleotide
  Antisense strand to SEQ ID NO: 2134420
cugcacagacauuucauau

SEQ ID NO: 2134422 - RNA, 19 nt, Artificial Sequence
  Description of Artificial Sequence: Synthetic oligonucleotide
  Sense strand starting at position 3367 of SEQ ID NO: 1882608
uaugaaaugucugugcaga

SEQ ID NO: 2134423 - RNA, 19 nt, Artificial Sequence
  Description of Artificial Sequence: Synthetic oligonucleotide
  Antisense strand to SEQ ID NO: 2134422
ucugcacagacauuucaua

SEQ ID NO: 2134424 - RNA, 19 nt, Artificial Sequence
  Description of Artificial Sequence: Synthetic oligonucleotide
  Sense strand starting at position 3368 of SEQ ID NO: 1882608
augaaaugucugugcagau

SEQ ID NO: 2134425 - RNA, 19 nt, Artificial Sequence
  Description of Artificial Sequence: Synthetic oligonucleotide
  Antisense strand to SEQ ID NO: 2134424
aucugcacagacauuucau

SEQ ID NO: 2134426 - RNA, 19 nt, Artificial Sequence
  Description of Artificial Sequence: Synthetic oligonucleotide
  Sense strand starting at position 3369 of SEQ ID NO: 1882608
ugaaaugucugugcagauc

SEQ ID NO: 2134427 - RNA, 19 nt, Artificial Sequence
  Description of Artificial Sequence: Synthetic oligonucleotide
  Antisense strand to SEQ ID NO: 2134426
gaucugcacagacauuuca

SEQ ID NO: 2134428 - RNA, 19 nt, Artificial Sequence
  Description of Artificial Sequence: Synthetic oligonucleotide
  Sense strand starting at position 3372 of SEQ ID NO: 1882608
aaugucugugcagaucauu

SEQ ID NO: 2134429 - RNA, 19 nt, Artificial Sequence
  Description of Artificial Sequence: Synthetic oligonucleotide
  Antisense strand to SEQ ID NO: 2134428
aaugaucugcacagacauu

SEQ ID NO: 2134430 - RNA, 19 nt, Artificial Sequence
  Description of Artificial Sequence: Synthetic oligonucleotide
  Sense strand starting at position 3442 of SEQ ID NO: 1882608
cuccauguauauucuggau

SEQ ID NO: 2134431 - RNA, 19 nt, Artificial Sequence
  Description of Artificial Sequence: Synthetic oligonucleotide
  Antisense strand to SEQ ID NO: 2134430
auccagaauauacauggag

SEQ ID NO: 2134432 - RNA, 19 nt, Artificial Sequence
  Description of Artificial Sequence: Synthetic oligonucleotide
  Sense strand starting at position 3838 of SEQ ID NO: 1882608
ucaugaugcuguucuuaaa

SEQ ID NO: 2134433 - RNA, 19 nt, Artificial Sequence
  Description of Artificial Sequence: Synthetic oligonucleotide
  Antisense strand to SEQ ID NO: 2134432
uuuaagaacagcaucauga

SEQ ID NO: 2134434 - RNA, 19 nt, Artificial Sequence
  Description of Artificial Sequence: Synthetic oligonucleotide
  Sense strand starting at position 137 of SEQ ID NO: 1882609
ggagaagauuucuaggauc

SEQ ID NO: 2134435 - RNA, 19 nt, Artificial Sequence
  Description of Artificial Sequence: Synthetic oligonucleotide
  Antisense strand to SEQ ID NO: 2134434
gauccuagaaaucuucucc

SEQ ID NO: 2134436 - RNA, 19 nt, Artificial Sequence
  Description of Artificial Sequence: Synthetic oligonucleotide
  Sense strand starting at position 242 of SEQ ID NO: 1882609
agaugauucugacaauaga

SEQ ID NO: 2134437 - RNA, 19 nt, Artificial Sequence
  Description of Artificial Sequence: Synthetic oligonucleotide
  Antisense strand to SEQ ID NO: 2134436
ucuauugucagaaucaucu

SEQ ID NO: 2134438 - RNA, 19 nt, Artificial Sequence
  Description of Artificial Sequence: Synthetic oligonucleotide
  Sense strand starting at position 332 of SEQ ID NO: 1882609
cggugaagacgccauagaa

SEQ ID NO: 2134439 - RNA, 19 nt, Artificial Sequence
  Description of Artificial Sequence: Synthetic oligonucleotide
  Antisense strand to SEQ ID NO: 2134438
uucuauggcgucuucaccg

SEQ ID NO: 2134440 - RNA, 19 nt, Artificial Sequence
  Description of Artificial Sequence: Synthetic oligonucleotide
  Sense strand starting at position 350 of SEQ ID NO: 1882609
agcgaucaucuuggaugaa

SEQ ID NO: 2134441 - RNA, 19 nt, Artificial Sequence
  Description of Artificial Sequence: Synthetic oligonucleotide
  Antisense strand to SEQ ID NO: 2134440
uucauccaagaugaucgcu

SEQ ID NO: 2134442 - RNA, 19 nt, Artificial Sequence
  Description of Artificial Sequence: Synthetic oligonucleotide
  Sense strand starting at position 353 of SEQ ID NO: 1882609
gaucaucuuggaugaagua

SEQ ID NO: 2134443 - RNA, 19 nt, Artificial Sequence
  Description of Artificial Sequence: Synthetic oligonucleotide
  Antisense strand to SEQ ID NO: 2134442
uacuucauccaagaugauc

SEQ ID NO: 2134444 - RNA, 19 nt, Artificial Sequence
  Description of Artificial Sequence: Synthetic oligonucleotide
  Sense strand starting at position 365 of SEQ ID NO: 1882609
ugaaguaucgaggguccca

SEQ ID NO: 2134445 - RNA, 19 nt, Artificial Sequence
  Description of Artificial Sequence: Synthetic oligonucleotide
  Antisense strand to SEQ ID NO: 2134444
ugggacccucgauacuuca

SEQ ID NO: 2134446 - RNA, 19 nt, Artificial Sequence
  Description of Artificial Sequence: Synthetic oligonucleotide
  Sense strand starting at position 417 of SEQ ID NO: 1882609
acauguauuggcugauauu

SEQ ID NO: 2134447 - RNA, 19 nt, Artificial Sequence
  Description of Artificial Sequence: Synthetic oligonucleotide
  Antisense strand to SEQ ID NO: 2134446
aauaucagccaauacaugu

SEQ ID NO: 2134448 - RNA, 19 nt, Artificial Sequence
  Description of Artificial Sequence: Synthetic oligonucleotide
  Sense strand starting at position 447 of SEQ ID NO: 1882609
gcuuuccaccuguaaaugu

SEQ ID NO: 2134449 - RNA, 19 nt, Artificial Sequence
  Description of Artificial Sequence: Synthetic oligonucleotide
  Antisense strand to SEQ ID NO: 2134448
acauuuacagguggaaagc

SEQ ID NO: 2134450 - RNA, 19 nt, Artificial Sequence
  Description of Artificial Sequence: Synthetic oligonucleotide
  Sense strand starting at position 1178 of SEQ ID NO: 1882609
gcuggagaaugcucaccau

SEQ ID NO: 2134451 - RNA, 19 nt, Artificial Sequence
  Description of Artificial Sequence: Synthetic oligonucleotide
  Antisense strand to SEQ ID NO: 2134450
auggugagcauucuccagc

SEQ ID NO: 2134452 - RNA, 19 nt, Artificial Sequence
  Description of Artificial Sequence: Synthetic oligonucleotide
  Sense strand starting at position 1363 of SEQ ID NO: 1882609
ucacuacugucuccuuaga

SEQ ID NO: 2134453 - RNA, 19 nt, Artificial Sequence
  Description of Artificial Sequence: Synthetic oligonucleotide
  Antisense strand to SEQ ID NO: 2134452
ucuaaggagacaguaguga

SEQ ID NO: 2134454 - RNA, 19 nt, Artificial Sequence
  Description of Artificial Sequence: Synthetic oligonucleotide
  Sense strand starting at position 1373 of SEQ ID NO: 1882609
cuccuuagagccuagaaua

SEQ ID NO: 2134455 - RNA, 19 nt, Artificial Sequence
  Description of Artificial Sequence: Synthetic oligonucleotide
  Antisense strand to SEQ ID NO: 2134454
uauucuaggcucuaaggag

SEQ ID NO: 2134456 - RNA, 19 nt, Artificial Sequence
  Description of Artificial Sequence: Synthetic oligonucleotide
  Sense strand starting at position 1403 of SEQ ID NO: 1882609
auaauacgggcucagugaa

SEQ ID NO: 2134457 - RNA, 19 nt, Artificial Sequence
  Description of Artificial Sequence: Synthetic oligonucleotide
  Antisense strand to SEQ ID NO: 2134456
uucacugagcccguauuau

SEQ ID NO: 2134458 - RNA, 19 nt, Artificial Sequence
  Description of Artificial Sequence: Synthetic oligonucleotide
  Sense strand starting at position 1411 of SEQ ID NO: 1882609
ggcucagugaauuauguug

SEQ ID NO: 2134459 - RNA, 19 nt, Artificial Sequence
  Description of Artificial Sequence: Synthetic oligonucleotide
  Antisense strand to SEQ ID NO: 2134458
caacauaauucacugagcc

SEQ ID NO: 2134460 - RNA, 19 nt, Artificial Sequence
  Description of Artificial Sequence: Synthetic oligonucleotide
  Sense strand starting at position 1425 of SEQ ID NO: 1882609
uguugaagcaaugagugaa

SEQ ID NO: 2134461 - RNA, 19 nt, Artificial Sequence
  Description of Artificial Sequence: Synthetic oligonucleotide
  Antisense strand to SEQ ID NO: 2134460
uucacucauugcuucaaca

SEQ ID NO: 2134462 - RNA, 19 nt, Artificial Sequence
  Description of Artificial Sequence: Synthetic oligonucleotide
  Sense strand starting at position 1570 of SEQ ID NO: 1882609
acaauagugccacgaauag

SEQ ID NO: 2134463 - RNA, 19 nt, Artificial Sequence
  Description of Artificial Sequence: Synthetic oligonucleotide
  Antisense strand to SEQ ID NO: 2134462
cuauucguggcacuauugu

SEQ ID NO: 2134464 - RNA, 19 nt, Artificial Sequence
  Description of Artificial Sequence: Synthetic oligonucleotide
  Sense strand starting at position 1618 of SEQ ID NO: 1882609
gugcaacaugaccauugau

SEQ ID NO: 2134465 - RNA, 19 nt, Artificial Sequence
  Description of Artificial Sequence: Synthetic oligonucleotide
  Antisense strand to SEQ ID NO: 2134464
aucaauggucauguugcac

SEQ ID NO: 2134466 - RNA, 19 nt, Artificial Sequence
  Description of Artificial Sequence: Synthetic oligonucleotide
  Sense strand starting at position 1646 of SEQ ID NO: 1882609
uccuuauuaucucugaugu

SEQ ID NO: 2134467 - RNA, 19 nt, Artificial Sequence
  Description of Artificial Sequence: Synthetic oligonucleotide
  Antisense strand to SEQ ID NO: 2134466
acaucagagauaauaagga

SEQ ID NO: 2134468 - RNA, 19 nt, Artificial Sequence
  Description of Artificial Sequence: Synthetic oligonucleotide
  Sense strand starting at position 1647 of SEQ ID NO: 1882609
ccuuauuaucucugauguu

SEQ ID NO: 2134469 - RNA, 19 nt, Artificial Sequence
  Description of Artificial Sequence: Synthetic oligonucleotide
  Antisense strand to SEQ ID NO: 2134468
aacaucagagauaauaagg

SEQ ID NO: 2134470 - RNA, 19 nt, Artificial Sequence
  Description of Artificial Sequence: Synthetic oligonucleotide
  Sense strand starting at position 2108 of SEQ ID NO: 1882609
guugaagaucauggugaag

SEQ ID NO: 2134471 - RNA, 19 nt, Artificial Sequence
  Description of Artificial Sequence: Synthetic oligonucleotide
  Antisense strand to SEQ ID NO: 2134470
cuucaccaugaucuucaac

SEQ ID NO: 2134472 - RNA, 19 nt, Artificial Sequence
  Description of Artificial Sequence: Synthetic oligonucleotide
  Sense strand starting at position 2387 of SEQ ID NO: 1882609
cccuuuccucaugguauuu

SEQ ID NO: 2134473 - RNA, 19 nt, Artificial Sequence
  Description of Artificial Sequence: Synthetic oligonucleotide
  Antisense strand to SEQ ID NO: 2134472
aaauaccaugaggaaaggg

SEQ ID NO: 2134474 - RNA, 19 nt, Artificial Sequence
  Description of Artificial Sequence: Synthetic oligonucleotide
  Sense strand starting at position 2406 of SEQ ID NO: 1882609
ucuagucugaugggagagu

SEQ ID NO: 2134475 - RNA, 19 nt, Artificial Sequence
  Description of Artificial Sequence: Synthetic oligonucleotide
  Antisense strand to SEQ ID NO: 2134474
acucucccaucagacuaga

SEQ ID NO: 2134476 - RNA, 19 nt, Artificial Sequence
  Description of Artificial Sequence: Synthetic oligonucleotide
  Sense strand starting at position 2580 of SEQ ID NO: 1882609
uguaguccucuuuaaauaa

SEQ ID NO: 2134477 - RNA, 19 nt, Artificial Sequence
  Description of Artificial Sequence: Synthetic oligonucleotide
  Antisense strand to SEQ ID NO: 2134476
uuauuuaaagaggacuaca

SEQ ID NO: 2134478 - RNA, 19 nt, Artificial Sequence
  Description of Artificial Sequence: Synthetic oligonucleotide
  Sense strand starting at position 2665 of SEQ ID NO: 1882609
gaucaagccuguccaaaug

SEQ ID NO: 2134479 - RNA, 19 nt, Artificial Sequence
  Description of Artificial Sequence: Synthetic oligonucleotide
  Antisense strand to SEQ ID NO: 2134478
cauuuggacaggcuugauc

SEQ ID NO: 2134480 - RNA, 19 nt, Artificial Sequence
  Description of Artificial Sequence: Synthetic oligonucleotide
  Sense strand starting at position 2674 of SEQ ID NO: 1882609
uguccaaauguacauguaa

SEQ ID NO: 2134481 - RNA, 19 nt, Artificial Sequence
  Description of Artificial Sequence: Synthetic oligonucleotide
  Antisense strand to SEQ ID NO: 2134480
uuacauguacauuuggaca

SEQ ID NO: 2134482 - RNA, 19 nt, Artificial Sequence
  Description of Artificial Sequence: Synthetic oligonucleotide
  Sense strand starting at position 2772 of SEQ ID NO: 1882609
aggaguaagauguggucca

SEQ ID NO: 2134483 - RNA, 19 nt, Artificial Sequence
  Description of Artificial Sequence: Synthetic oligonucleotide
  Antisense strand to SEQ ID NO: 2134482
uggaccacaucuuacuccu

SEQ ID NO: 2134484 - RNA, 19 nt, Artificial Sequence
  Description of Artificial Sequence: Synthetic oligonucleotide
  Sense strand starting at position 2913 of SEQ ID NO: 1882609
ucagcugacucuucugaua

SEQ ID NO: 2134485 - RNA, 19 nt, Artificial Sequence
  Description of Artificial Sequence: Synthetic oligonucleotide
  Antisense strand to SEQ ID NO: 2134484
uaucagaagagucagcuga

SEQ ID NO: 2134486 - RNA, 19 nt, Artificial Sequence
  Description of Artificial Sequence: Synthetic oligonucleotide
  Sense strand starting at position 3045 of SEQ ID NO: 1882609
accacuuaacggugugauc

SEQ ID NO: 2134487 - RNA, 19 nt, Artificial Sequence
  Description of Artificial Sequence: Synthetic oligonucleotide
  Antisense strand to SEQ ID NO: 2134486
gaucacaccguuaaguggu

SEQ ID NO: 2134488 - RNA, 19 nt, Artificial Sequence
  Description of Artificial Sequence: Synthetic oligonucleotide
  Sense strand starting at position 3080 of SEQ ID NO: 1882609
cugucuuugcaucagucaa

SEQ ID NO: 2134489 - RNA, 19 nt, Artificial Sequence
  Description of Artificial Sequence: Synthetic oligonucleotide
  Antisense strand to SEQ ID NO: 2134488
uugacugaugcaaagacag

SEQ ID NO: 2134490 - RNA, 19 nt, Artificial Sequence
  Description of Artificial Sequence: Synthetic oligonucleotide
  Sense strand starting at position 3088 of SEQ ID NO: 1882609
gcaucagucaagugagaau

SEQ ID NO: 2134491 - RNA, 19 nt, Artificial Sequence
  Description of Artificial Sequence: Synthetic oligonucleotide
  Antisense strand to SEQ ID NO: 2134490
auucucacuugacugaugc

SEQ ID NO: 2134492 - RNA, 19 nt, Artificial Sequence
  Description of Artificial Sequence: Synthetic oligonucleotide
  Sense strand starting at position 3162 of SEQ ID NO: 1882609
cacacagugcgugcucaau

SEQ ID NO: 2134493 - RNA, 19 nt, Artificial Sequence
  Description of Artificial Sequence: Synthetic oligonucleotide
  Antisense strand to SEQ ID NO: 2134492
auugagcacgcacugugug

SEQ ID NO: 2134494 - RNA, 19 nt, Artificial Sequence
  Description of Artificial Sequence: Synthetic oligonucleotide
  Sense strand starting at position 3227 of SEQ ID NO: 1882609
ggaacccagagcugugaua

SEQ ID NO: 2134495 - RNA, 19 nt, Artificial Sequence
  Description of Artificial Sequence: Synthetic oligonucleotide
  Antisense strand to SEQ ID NO: 2134494
uaucacagcucuggguucc

SEQ ID NO: 2134496 - RNA, 19 nt, Artificial Sequence
  Description of Artificial Sequence: Synthetic oligonucleotide
  Sense strand starting at position 3229 of SEQ ID NO: 1882609
aacccagagcugugauagu

SEQ ID NO: 2134497 - RNA, 19 nt, Artificial Sequence
  Description of Artificial Sequence: Synthetic oligonucleotide
  Antisense strand to SEQ ID NO: 2134496
acuaucacagcucuggguu

SEQ ID NO: 2134498 - RNA, 19 nt, Artificial Sequence
  Description of Artificial Sequence: Synthetic oligonucleotide
  Sense strand starting at position 3333 of SEQ ID NO: 1882609
aucacucuguucuuuguaa

SEQ ID NO: 2134499 - RNA, 19 nt, Artificial Sequence
  Description of Artificial Sequence: Synthetic oligonucleotide
  Antisense strand to SEQ ID NO: 2134498
uuacaaagaacagagugau

SEQ ID NO: 2134500 - RNA, 19 nt, Artificial Sequence
  Description of Artificial Sequence: Synthetic oligonucleotide
  Sense strand starting at position 3334 of SEQ ID NO: 1882609
ucacucuguucuuuguaaa

SEQ ID NO: 2134501 - RNA, 19 nt, Artificial Sequence
  Description of Artificial Sequence: Synthetic oligonucleotide
  Antisense strand to SEQ ID NO: 2134500
uuuacaaagaacagaguga

SEQ ID NO: 2134502 - RNA, 19 nt, Artificial Sequence
  Description of Artificial Sequence: Synthetic oligonucleotide
  Sense strand starting at position 3345 of SEQ ID NO: 1882609
uuuguaaacuaagcagaau

SEQ ID NO: 2134503 - RNA, 19 nt, Artificial Sequence
  Description of Artificial Sequence: Synthetic oligonucleotide
  Antisense strand to SEQ ID NO: 2134502
auucugcuuaguuuacaaa

SEQ ID NO: 2134504 - RNA, 19 nt, Artificial Sequence
  Description of Artificial Sequence: Synthetic oligonucleotide
  Sense strand starting at position 3382 of SEQ ID NO: 1882609
gguggaugagcccagaauu

SEQ ID NO: 2134505 - RNA, 19 nt, Artificial Sequence
  Description of Artificial Sequence: Synthetic oligonucleotide
  Antisense strand to SEQ ID NO: 2134504
aauucugggcucauccacc

SEQ ID NO: 2134506 - RNA, 19 nt, Artificial Sequence
  Description of Artificial Sequence: Synthetic oligonucleotide
  Sense strand starting at position 3395 of SEQ ID NO: 1882609
agaauuucuuagcacagga

SEQ ID NO: 2134507 - RNA, 19 nt, Artificial Sequence
  Description of Artificial Sequence: Synthetic oligonucleotide
  Antisense strand to SEQ ID NO: 2134506
uccugugcuaagaaauucu

SEQ ID NO: 2134508 - RNA, 19 nt, Artificial Sequence
  Description of Artificial Sequence: Synthetic oligonucleotide
  Sense strand starting at position 3399 of SEQ ID NO: 1882609
uuucuuagcacaggagaga

SEQ ID NO: 2134509 - RNA, 19 nt, Artificial Sequence
  Description of Artificial Sequence: Synthetic oligonucleotide
  Antisense strand to SEQ ID NO: 2134508
ucucuccugugcuaagaaa

SEQ ID NO: 2134510 - RNA, 19 nt, Artificial Sequence
  Description of Artificial Sequence: Synthetic oligonucleotide
  Sense strand starting at position 3578 of SEQ ID NO: 1882609
cccaguggucucugguaaa

SEQ ID NO: 2134511 - RNA, 19 nt, Artificial Sequence
  Description of Artificial Sequence: Synthetic oligonucleotide
  Antisense strand to SEQ ID NO: 2134510
uuuaccagagaccacuggg

SEQ ID NO: 2134512 - RNA, 19 nt, Artificial Sequence
  Description of Artificial Sequence: Synthetic oligonucleotide
  Sense strand starting at position 3959 of SEQ ID NO: 1882609
gaaguuaggcaguauggga

SEQ ID NO: 2134513 - RNA, 19 nt, Artificial Sequence
  Description of Artificial Sequence: Synthetic oligonucleotide
  Antisense strand to SEQ ID NO: 2134512
ucccauacugccuaacuuc

SEQ ID NO: 2134514 - RNA, 19 nt, Artificial Sequence
  Description of Artificial Sequence: Synthetic oligonucleotide
  Sense strand starting at position 449 of SEQ ID NO: 1882610
ggucaagaauaguuugguu

SEQ ID NO: 2134515 - RNA, 19 nt, Artificial Sequence
  Description of Artificial Sequence: Synthetic oligonucleotide
  Antisense strand to SEQ ID NO: 2134514
aaccaaacuauucuugacc

SEQ ID NO: 2134516 - RNA, 19 nt, Artificial Sequence
  Description of Artificial Sequence: Synthetic oligonucleotide
  Sense strand starting at position 451 of SEQ ID NO: 1882610
ucaagaauaguuugguucu

SEQ ID NO: 2134517 - RNA, 19 nt, Artificial Sequence
  Description of Artificial Sequence: Synthetic oligonucleotide
  Antisense strand to SEQ ID NO: 2134516
agaaccaaacuauucuuga

SEQ ID NO: 2134518 - RNA, 19 nt, Artificial Sequence
  Description of Artificial Sequence: Synthetic oligonucleotide
  Sense strand starting at position 689 of SEQ ID NO: 1882610
gccaccuggcccuauuaaa

SEQ ID NO: 2134519 - RNA, 19 nt, Artificial Sequence
  Description of Artificial Sequence: Synthetic oligonucleotide
  Antisense strand to SEQ ID NO: 2134518
uuuaauagggccagguggc

SEQ ID NO: 2134520 - RNA, 19 nt, Artificial Sequence
  Description of Artificial Sequence: Synthetic oligonucleotide
  Sense strand starting at position 753 of SEQ ID NO: 1882610
guccaaucuccacaguucu

SEQ ID NO: 2134521 - RNA, 19 nt, Artificial Sequence
  Description of Artificial Sequence: Synthetic oligonucleotide
  Antisense strand to SEQ ID NO: 2134520
agaacuguggagauuggac

SEQ ID NO: 2134522 - RNA, 19 nt, Artificial Sequence
  Description of Artificial Sequence: Synthetic oligonucleotide
  Sense strand starting at position 1197 of SEQ ID NO: 1882610
aaaggagucucuucuggca

SEQ ID NO: 2134523 - RNA, 19 nt, Artificial Sequence
  Description of Artificial Sequence: Synthetic oligonucleotide
  Antisense strand to SEQ ID NO: 2134522
ugccagaagagacuccuuu

SEQ ID NO: 2134524 - RNA, 19 nt, Artificial Sequence
  Description of Artificial Sequence: Synthetic oligonucleotide
  Sense strand starting at position 1443 of SEQ ID NO: 1882610
uuugucaggcagugagaaa

SEQ ID NO: 2134525 - RNA, 19 nt, Artificial Sequence
  Description of Artificial Sequence: Synthetic oligonucleotide
  Antisense strand to SEQ ID NO: 2134524
uuucucacugccugacaaa

SEQ ID NO: 2134526 - RNA, 19 nt, Artificial Sequence
  Description of Artificial Sequence: Synthetic oligonucleotide
  Sense strand starting at position 1509 of SEQ ID NO: 1882610
cugacaggcacuugaaaug

SEQ ID NO: 2134527 - RNA, 19 nt, Artificial Sequence
  Description of Artificial Sequence: Synthetic oligonucleotide
  Antisense strand to SEQ ID NO: 2134526
cauuucaagugccugucag

SEQ ID NO: 2134528 - RNA, 19 nt, Artificial Sequence
  Description of Artificial Sequence: Synthetic oligonucleotide
  Sense strand starting at position 1542 of SEQ ID NO: 1882610
uuaaacaugcuauauguga

SEQ ID NO: 2134529 - RNA, 19 nt, Artificial Sequence
  Description of Artificial Sequence: Synthetic oligonucleotide
  Antisense strand to SEQ ID NO: 2134528
ucacauauagcauguuuaa

SEQ ID NO: 2134530 - RNA, 19 nt, Artificial Sequence
  Description of Artificial Sequence: Synthetic oligonucleotide
  Sense strand starting at position 1550 of SEQ ID NO: 1882610
gcuauaugugaagaaucau

SEQ ID NO: 2134531 - RNA, 19 nt, Artificial Sequence
  Description of Artificial Sequence: Synthetic oligonucleotide
  Antisense strand to SEQ ID NO: 2134530
augauucuucacauauagc

SEQ ID NO: 2134532 - RNA, 19 nt, Artificial Sequence
  Description of Artificial Sequence: Synthetic oligonucleotide
  Sense strand starting at position 1574 of SEQ ID NO: 1882610
ucacaagauugaguguaaa

SEQ ID NO: 2134533 - RNA, 19 nt, Artificial Sequence
  Description of Artificial Sequence: Synthetic oligonucleotide
  Antisense strand to SEQ ID NO: 2134532
uuuacacucaaucuuguga

SEQ ID NO: 2134534 - RNA, 19 nt, Artificial Sequence
  Description of Artificial Sequence: Synthetic oligonucleotide
  Sense strand starting at position 1738 of SEQ ID NO: 1882610
auauauaaguggcucacau

SEQ ID NO: 2134535 - RNA, 19 nt, Artificial Sequence
  Description of Artificial Sequence: Synthetic oligonucleotide
  Antisense strand to SEQ ID NO: 2134534
augugagccacuuauauau

SEQ ID NO: 2134536 - RNA, 19 nt, Artificial Sequence
  Description of Artificial Sequence: Synthetic oligonucleotide
  Sense strand starting at position 1751 of SEQ ID NO: 1882610
ucacauucgugacucagau

SEQ ID NO: 2134537 - RNA, 19 nt, Artificial Sequence
  Description of Artificial Sequence: Synthetic oligonucleotide
  Antisense strand to SEQ ID NO: 2134536
aucugagucacgaauguga

SEQ ID NO: 2134538 - RNA, 19 nt, Artificial Sequence
  Description of Artificial Sequence: Synthetic oligonucleotide
  Sense strand starting at position 2063 of SEQ ID NO: 1882610
caugaagagcuguaaguga

SEQ ID NO: 2134539 - RNA, 19 nt, Artificial Sequence
  Description of Artificial Sequence: Synthetic oligonucleotide
  Antisense strand to SEQ ID NO: 2134538
ucacuuacagcucuucaug

SEQ ID NO: 2134540 - RNA, 19 nt, Artificial Sequence
  Description of Artificial Sequence: Synthetic oligonucleotide
  Sense strand starting at position 2074 of SEQ ID NO: 1882610
guaagugagaaaugauggu

SEQ ID NO: 2134541 - RNA, 19 nt, Artificial Sequence
  Description of Artificial Sequence: Synthetic oligonucleotide
  Antisense strand to SEQ ID NO: 2134540
accaucauuucucacuuac

SEQ ID NO: 2134542 - RNA, 19 nt, Artificial Sequence
  Description of Artificial Sequence: Synthetic oligonucleotide
  Sense strand starting at position 2078 of SEQ ID NO: 1882610
gugagaaaugaugguuggu

SEQ ID NO: 2134543 - RNA, 19 nt, Artificial Sequence
  Description of Artificial Sequence: Synthetic oligonucleotide
  Antisense strand to SEQ ID NO: 2134542
accaaccaucauuucucac

SEQ ID NO: 2134544 - RNA, 19 nt, Artificial Sequence
  Description of Artificial Sequence: Synthetic oligonucleotide
  Sense strand starting at position 2080 of SEQ ID NO: 1882610
gagaaaugaugguugguug

SEQ ID NO: 2134545 - RNA, 19 nt, Artificial Sequence
  Description of Artificial Sequence: Synthetic oligonucleotide
  Antisense strand to SEQ ID NO: 2134544
caaccaaccaucauuucuc

SEQ ID NO: 2134546 - RNA, 19 nt, Artificial Sequence
  Description of Artificial Sequence: Synthetic oligonucleotide
  Sense strand starting at position 2130 of SEQ ID NO: 1882610
gaagaauugugucucuaug

SEQ ID NO: 2134547 - RNA, 19 nt, Artificial Sequence
  Description of Artificial Sequence: Synthetic oligonucleotide
  Antisense strand to SEQ ID NO: 2134546
cauagagacacaauucuuc

SEQ ID NO: 2134548 - RNA, 19 nt, Artificial Sequence
  Description of Artificial Sequence: Synthetic oligonucleotide
  Sense strand starting at position 2132 of SEQ ID NO: 1882610
agaauugugucucuaugau

SEQ ID NO: 2134549 - RNA, 19 nt, Artificial Sequence
  Description of Artificial Sequence: Synthetic oligonucleotide
  Antisense strand to SEQ ID NO: 2134548
aucauagagacacaauucu

SEQ ID NO: 2134550 - RNA, 19 nt, Artificial Sequence
  Description of Artificial Sequence: Synthetic oligonucleotide
  Sense strand starting at position 2138 of SEQ ID NO: 1882610
gugucucuaugauuacaug

SEQ ID NO: 2134551 - RNA, 19 nt, Artificial Sequence
  Description of Artificial Sequence: Synthetic oligonucleotide
  Antisense strand to SEQ ID NO: 2134550
cauguaaucauagagacac

SEQ ID NO: 2134552 - RNA, 19 nt, Artificial Sequence
  Description of Artificial Sequence: Synthetic oligonucleotide
  Sense strand starting at position 2139 of SEQ ID NO: 1882610
ugucucuaugauuacauga

SEQ ID NO: 2134553 - RNA, 19 nt, Artificial Sequence
  Description of Artificial Sequence: Synthetic oligonucleotide
  Antisense strand to SEQ ID NO: 2134552
ucauguaaucauagagaca

SEQ ID NO: 2134554 - RNA, 19 nt, Artificial Sequence
  Description of Artificial Sequence: Synthetic oligonucleotide
  Sense strand starting at position 2164 of SEQ ID NO: 1882610
gauauaagugaaugccgau

SEQ ID NO: 2134555 - RNA, 19 nt, Artificial Sequence
  Description of Artificial Sequence: Synthetic oligonucleotide
  Antisense strand to SEQ ID NO: 2134554
aucggcauucacuuauauc

SEQ ID NO: 2134556 - RNA, 19 nt, Artificial Sequence
  Description of Artificial Sequence: Synthetic oligonucleotide
  Sense strand starting at position 2470 of SEQ ID NO: 1882610
gugcuaaagucauuagaua

SEQ ID NO: 2134557 - RNA, 19 nt, Artificial Sequence
  Description of Artificial Sequence: Synthetic oligonucleotide
  Antisense strand to SEQ ID NO: 2134556
uaucuaaugacuuuagcac

SEQ ID NO: 2134558 - RNA, 19 nt, Artificial Sequence
  Description of Artificial Sequence: Synthetic oligonucleotide
  Sense strand starting at position 2471 of SEQ ID NO: 1882610
ugcuaaagucauuagauau

SEQ ID NO: 2134559 - RNA, 19 nt, Artificial Sequence
  Description of Artificial Sequence: Synthetic oligonucleotide
  Antisense strand to SEQ ID NO: 2134558
auaucuaaugacuuuagca

SEQ ID NO: 2134560 - RNA, 19 nt, Artificial Sequence
  Description of Artificial Sequence: Synthetic oligonucleotide
  Sense strand starting at position 2520 of SEQ ID NO: 1882610
aguaccauuucuuaaagga

SEQ ID NO: 2134561 - RNA, 19 nt, Artificial Sequence
  Description of Artificial Sequence: Synthetic oligonucleotide
  Antisense strand to SEQ ID NO: 2134560
uccuuuaagaaaugguacu

SEQ ID NO: 2134562 - RNA, 19 nt, Artificial Sequence
  Description of Artificial Sequence: Synthetic oligonucleotide
  Sense strand starting at position 2580 of SEQ ID NO: 1882610
ccuccaagauagguguuau

SEQ ID NO: 2134563 - RNA, 19 nt, Artificial Sequence
  Description of Artificial Sequence: Synthetic oligonucleotide
  Antisense strand to SEQ ID NO: 2134562
auaacaccuaucuuggagg

SEQ ID NO: 2134564 - RNA, 19 nt, Artificial Sequence
  Description of Artificial Sequence: Synthetic oligonucleotide
  Sense strand starting at position 2657 of SEQ ID NO: 1882610
gucauaugaucauuaagug

SEQ ID NO: 2134565 - RNA, 19 nt, Artificial Sequence
  Description of Artificial Sequence: Synthetic oligonucleotide
  Antisense strand to SEQ ID NO: 2134564
cacuuaaugaucauaugac

SEQ ID NO: 2134566 - RNA, 19 nt, Artificial Sequence
  Description of Artificial Sequence: Synthetic oligonucleotide
  Sense strand starting at position 2839 of SEQ ID NO: 1882610
cuguuaaaugcuuaguauc

SEQ ID NO: 2134567 - RNA, 19 nt, Artificial Sequence
  Description of Artificial Sequence: Synthetic oligonucleotide
  Antisense strand to SEQ ID NO: 2134566
gauacuaagcauuuaacag

SEQ ID NO: 2134568 - RNA, 19 nt, Artificial Sequence
  Description of Artificial Sequence: Synthetic oligonucleotide
  Sense strand starting at position 2919 of SEQ ID NO: 1882610
ccugaaagguuuccacacu

SEQ ID NO: 2134569 - RNA, 19 nt, Artificial Sequence
  Description of Artificial Sequence: Synthetic oligonucleotide
  Antisense strand to SEQ ID NO: 2134568
aguguggaaaccuuucagg

SEQ ID NO: 2134570 - RNA, 19 nt, Artificial Sequence
  Description of Artificial Sequence: Synthetic oligonucleotide
  Sense strand starting at position 2970 of SEQ ID NO: 1882610
accauugacuguucugauu

SEQ ID NO: 2134571 - RNA, 19 nt, Artificial Sequence
  Description of Artificial Sequence: Synthetic oligonucleotide
  Antisense strand to SEQ ID NO: 2134570
aaucagaacagucaauggu

SEQ ID NO: 2134572 - RNA, 19 nt, Artificial Sequence
  Description of Artificial Sequence: Synthetic oligonucleotide
  Sense strand starting at position 2976 of SEQ ID NO: 1882610
gacuguucugauugaugau

SEQ ID NO: 2134573 - RNA, 19 nt, Artificial Sequence
  Description of Artificial Sequence: Synthetic oligonucleotide
  Antisense strand to SEQ ID NO: 2134572
aucaucaaucagaacaguc

SEQ ID NO: 2134574 - RNA, 19 nt, Artificial Sequence
  Description of Artificial Sequence: Synthetic oligonucleotide
  Sense strand starting at position 3125 of SEQ ID NO: 1882610
ggucaucuucugcagguaa

SEQ ID NO: 2134575 - RNA, 19 nt, Artificial Sequence
  Description of Artificial Sequence: Synthetic oligonucleotide
  Antisense strand to SEQ ID NO: 2134574
uuaccugcagaagaugacc

SEQ ID NO: 2134576 - RNA, 19 nt, Artificial Sequence
  Description of Artificial Sequence: Synthetic oligonucleotide
  Sense strand starting at position 3129 of SEQ ID NO: 1882610
aucuucugcagguaagagu

SEQ ID NO: 2134577 - RNA, 19 nt, Artificial Sequence
  Description of Artificial Sequence: Synthetic oligonucleotide
  Antisense strand to SEQ ID NO: 2134576
acucuuaccugcagaagau

SEQ ID NO: 2134578 - RNA, 19 nt, Artificial Sequence
  Description of Artificial Sequence: Synthetic oligonucleotide
  Sense strand starting at position 3143 of SEQ ID NO: 1882610
agaguccugucucugaaua

SEQ ID NO: 2134579 - RNA, 19 nt, Artificial Sequence
  Description of Artificial Sequence: Synthetic oligonucleotide
  Antisense strand to SEQ ID NO: 2134578
uauucagagacaggacucu

SEQ ID NO: 2134580 - RNA, 19 nt, Artificial Sequence
  Description of Artificial Sequence: Synthetic oligonucleotide
  Sense strand starting at position 3175 of SEQ ID NO: 1882610
aagucuacagguggucaaa

SEQ ID NO: 2134581 - RNA, 19 nt, Artificial Sequence
  Description of Artificial Sequence: Synthetic oligonucleotide
  Antisense strand to SEQ ID NO: 2134580
uuugaccaccuguagacuu

SEQ ID NO: 2134582 - RNA, 19 nt, Artificial Sequence
  Description of Artificial Sequence: Synthetic oligonucleotide
  Sense strand starting at position 3282 of SEQ ID NO: 1882610
acaccucugccaggaaaca

SEQ ID NO: 2134583 - RNA, 19 nt, Artificial Sequence
  Description of Artificial Sequence: Synthetic oligonucleotide
  Antisense strand to SEQ ID NO: 2134582
uguuuccuggcagaggugu

SEQ ID NO: 2134584 - RNA, 19 nt, Artificial Sequence
  Description of Artificial Sequence: Synthetic oligonucleotide
  Sense strand starting at position 3561 of SEQ ID NO: 1882610
cucuuaugaugagauuucu

SEQ ID NO: 2134585 - RNA, 19 nt, Artificial Sequence
  Description of Artificial Sequence: Synthetic oligonucleotide
  Antisense strand to SEQ ID NO: 2134584
agaaaucucaucauaagag

SEQ ID NO: 2134586 - RNA, 19 nt, Artificial Sequence
  Description of Artificial Sequence: Synthetic oligonucleotide
  Sense strand starting at position 3793 of SEQ ID NO: 1882610
guucuugacuuaguggaau

SEQ ID NO: 2134587 - RNA, 19 nt, Artificial Sequence
  Description of Artificial Sequence: Synthetic oligonucleotide
  Antisense strand to SEQ ID NO: 2134586
auuccacuaagucaagaac

SEQ ID NO: 2134588 - RNA, 19 nt, Artificial Sequence
  Description of Artificial Sequence: Synthetic oligonucleotide
  Sense strand starting at position 3805 of SEQ ID NO: 1882610
guggaauugggucgaagga

SEQ ID NO: 2134589 - RNA, 19 nt, Artificial Sequence
  Description of Artificial Sequence: Synthetic oligonucleotide
  Antisense strand to SEQ ID NO: 2134588
uccuucgacccaauuccac

SEQ ID NO: 2134590 - RNA, 19 nt, Artificial Sequence
  Description of Artificial Sequence: Synthetic oligonucleotide
  Sense strand starting at position 3807 of SEQ ID NO: 1882610
ggaauugggucgaaggagu

SEQ ID NO: 2134591 - RNA, 19 nt, Artificial Sequence
  Description of Artificial Sequence: Synthetic oligonucleotide
  Antisense strand to SEQ ID NO: 2134590
acuccuucgacccaauucc

SEQ ID NO: 2134592 - RNA, 19 nt, Artificial Sequence
  Description of Artificial Sequence: Synthetic oligonucleotide
  Sense strand starting at position 3814 of SEQ ID NO: 1882610
ggucgaaggaguggagaau

SEQ ID NO: 2134593 - RNA, 19 nt, Artificial Sequence
  Description of Artificial Sequence: Synthetic oligonucleotide
  Antisense strand to SEQ ID NO: 2134592
auucuccacuccuucgacc

SEQ ID NO: 2134594 - RNA, 19 nt, Artificial Sequence
  Description of Artificial Sequence: Synthetic oligonucleotide
  Sense strand starting at position 5 of SEQ ID NO: 1882611
gguaauuauuuguuggguu

SEQ ID NO: 2134595 - RNA, 19 nt, Artificial Sequence
  Description of Artificial Sequence: Synthetic oligonucleotide
  Antisense strand to SEQ ID NO: 2134594
aacccaacaaauaauuacc

SEQ ID NO: 2134596 - RNA, 19 nt, Artificial Sequence
  Description of Artificial Sequence: Synthetic oligonucleotide
  Sense strand starting at position 6 of SEQ ID NO: 1882611
guaauuauuuguuggguug

SEQ ID NO: 2134597 - RNA, 19 nt, Artificial Sequence
  Description of Artificial Sequence: Synthetic oligonucleotide
  Antisense strand to SEQ ID NO: 2134596
caacccaacaaauaauuac

SEQ ID NO: 2134598 - RNA, 19 nt, Artificial Sequence
  Description of Artificial Sequence: Synthetic oligonucleotide
  Sense strand starting at position 8 of SEQ ID NO: 1882611
aauuauuuguuggguugga

SEQ ID NO: 2134599 - RNA, 19 nt, Artificial Sequence
  Description of Artificial Sequence: Synthetic oligonucleotide
  Antisense strand to SEQ ID NO: 2134598
uccaacccaacaaauaauu

SEQ ID NO: 2134600 - RNA, 19 nt, Artificial Sequence
  Description of Artificial Sequence: Synthetic oligonucleotide
  Sense strand starting at position 88 of SEQ ID NO: 1882611
acccucagucauugugaca

SEQ ID NO: 2134601 - RNA, 19 nt, Artificial Sequence
  Description of Artificial Sequence: Synthetic oligonucleotide
  Antisense strand to SEQ ID NO: 2134600
ugucacaaugacugagggu

SEQ ID NO: 2134602 - RNA, 19 nt, Artificial Sequence
  Description of Artificial Sequence: Synthetic oligonucleotide
  Sense strand starting at position 161 of SEQ ID NO: 1882611
gauugagaauuaguggucu

SEQ ID NO: 2134603 - RNA, 19 nt, Artificial Sequence
  Description of Artificial Sequence: Synthetic oligonucleotide
  Antisense strand to SEQ ID NO: 2134602
agaccacuaauucucaauc

SEQ ID NO: 2134604 - RNA, 19 nt, Artificial Sequence
  Description of Artificial Sequence: Synthetic oligonucleotide
  Sense strand starting at position 165 of SEQ ID NO: 1882611
gagaauuaguggucuggaa

SEQ ID NO: 2134605 - RNA, 19 nt, Artificial Sequence
  Description of Artificial Sequence: Synthetic oligonucleotide
  Antisense strand to SEQ ID NO: 2134604
uuccagaccacuaauucuc

SEQ ID NO: 2134606 - RNA, 19 nt, Artificial Sequence
  Description of Artificial Sequence: Synthetic oligonucleotide
  Sense strand starting at position 263 of SEQ ID NO: 1882611
cagaauaaagaguguauua

SEQ ID NO: 2134607 - RNA, 19 nt, Artificial Sequence
  Description of Artificial Sequence: Synthetic oligonucleotide
  Antisense strand to SEQ ID NO: 2134606
uaauacacucuuuauucug

SEQ ID NO: 2134608 - RNA, 19 nt, Artificial Sequence
  Description of Artificial Sequence: Synthetic oligonucleotide
  Sense strand starting at position 2114 of SEQ ID NO: 1882611
ccauccucugccuguuaca

SEQ ID NO: 2134609 - RNA, 19 nt, Artificial Sequence
  Description of Artificial Sequence: Synthetic oligonucleotide
  Antisense strand to SEQ ID NO: 2134608
uguaacaggcagaggaugg

SEQ ID NO: 2134610 - RNA, 19 nt, Artificial Sequence
  Description of Artificial Sequence: Synthetic oligonucleotide
  Sense strand starting at position 2125 of SEQ ID NO: 1882611
cuguuacacuguuccaaag

SEQ ID NO: 2134611 - RNA, 19 nt, Artificial Sequence
  Description of Artificial Sequence: Synthetic oligonucleotide
  Antisense strand to SEQ ID NO: 2134610
cuuuggaacaguguaacag

SEQ ID NO: 2134612 - RNA, 19 nt, Artificial Sequence
  Description of Artificial Sequence: Synthetic oligonucleotide
  Sense strand starting at position 2199 of SEQ ID NO: 1882611
uuuacuguaucagucaauu

SEQ ID NO: 2134613 - RNA, 19 nt, Artificial Sequence
  Description of Artificial Sequence: Synthetic oligonucleotide
  Antisense strand to SEQ ID NO: 2134612
aauugacugauacaguaaa

SEQ ID NO: 2134614 - RNA, 19 nt, Artificial Sequence
  Description of Artificial Sequence: Synthetic oligonucleotide
  Sense strand starting at position 2338 of SEQ ID NO: 1882611
ucucaugugucagcagaca

SEQ ID NO: 2134615 - RNA, 19 nt, Artificial Sequence
  Description of Artificial Sequence: Synthetic oligonucleotide
  Antisense strand to SEQ ID NO: 2134614
ugucugcugacacaugaga

SEQ ID NO: 2134616 - RNA, 19 nt, Artificial Sequence
  Description of Artificial Sequence: Synthetic oligonucleotide
  Sense strand starting at position 2400 of SEQ ID NO: 1882611
ucagaucucgugcaacuua

SEQ ID NO: 2134617 - RNA, 19 nt, Artificial Sequence
  Description of Artificial Sequence: Synthetic oligonucleotide
  Antisense strand to SEQ ID NO: 2134616
uaaguugcacgagaucuga

SEQ ID NO: 2134618 - RNA, 19 nt, Artificial Sequence
  Description of Artificial Sequence: Synthetic oligonucleotide
  Sense strand starting at position 2487 of SEQ ID NO: 1882611
cccacaacacguggauauu

SEQ ID NO: 2134619 - RNA, 19 nt, Artificial Sequence
  Description of Artificial Sequence: Synthetic oligonucleotide
  Antisense strand to SEQ ID NO: 2134618
aauauccacguguuguggg

SEQ ID NO: 2134620 - RNA, 19 nt, Artificial Sequence
  Description of Artificial Sequence: Synthetic oligonucleotide
  Sense strand starting at position 2497 of SEQ ID NO: 1882611
guggauauuuaagaugaga

SEQ ID NO: 2134621 - RNA, 19 nt, Artificial Sequence
  Description of Artificial Sequence: Synthetic oligonucleotide
  Antisense strand to SEQ ID NO: 2134620
ucucaucuuaaauauccac

SEQ ID NO: 2134622 - RNA, 19 nt, Artificial Sequence
  Description of Artificial Sequence: Synthetic oligonucleotide
  Sense strand starting at position 2539 of SEQ ID NO: 1882611
cguaucggagagugugaaa

SEQ ID NO: 2134623 - RNA, 19 nt, Artificial Sequence
  Description of Artificial Sequence: Synthetic oligonucleotide
  Antisense strand to SEQ ID NO: 2134622
uuucacacucuccgauacg

SEQ ID NO: 2134624 - RNA, 19 nt, Artificial Sequence
  Description of Artificial Sequence: Synthetic oligonucleotide
  Sense strand starting at position 2542 of SEQ ID NO: 1882611
aucggagagugugaaauaa

SEQ ID NO: 2134625 - RNA, 19 nt, Artificial Sequence
  Description of Artificial Sequence: Synthetic oligonucleotide
  Antisense strand to SEQ ID NO: 2134624
uuauuucacacucuccgau

SEQ ID NO: 2134626 - RNA, 19 nt, Artificial Sequence
  Description of Artificial Sequence: Synthetic oligonucleotide
  Sense strand starting at position 2665 of SEQ ID NO: 1882611
guuagagacuuaccucauc

SEQ ID NO: 2134627 - RNA, 19 nt, Artificial Sequence
  Description of Artificial Sequence: Synthetic oligonucleotide
  Antisense strand to SEQ ID NO: 2134626
gaugagguaagucucuaac

SEQ ID NO: 2134628 - RNA, 19 nt, Artificial Sequence
  Description of Artificial Sequence: Synthetic oligonucleotide
  Sense strand starting at position 2670 of SEQ ID NO: 1882611
agacuuaccucauccagua

SEQ ID NO: 2134629 - RNA, 19 nt, Artificial Sequence
  Description of Artificial Sequence: Synthetic oligonucleotide
  Antisense strand to SEQ ID NO: 2134628
uacuggaugagguaagucu

SEQ ID NO: 2134630 - RNA, 19 nt, Artificial Sequence
  Description of Artificial Sequence: Synthetic oligonucleotide
  Sense strand starting at position 2712 of SEQ ID NO: 1882611
acaaguuaugcagauugau

SEQ ID NO: 2134631 - RNA, 19 nt, Artificial Sequence
  Description of Artificial Sequence: Synthetic oligonucleotide
  Antisense strand to SEQ ID NO: 2134630
aucaaucugcauaacuugu

SEQ ID NO: 2134632 - RNA, 19 nt, Artificial Sequence
  Description of Artificial Sequence: Synthetic oligonucleotide
  Sense strand starting at position 2715 of SEQ ID NO: 1882611
aguuaugcagauugauuaa

SEQ ID NO: 2134633 - RNA, 19 nt, Artificial Sequence
  Description of Artificial Sequence: Synthetic oligonucleotide
  Antisense strand to SEQ ID NO: 2134632
uuaaucaaucugcauaacu

SEQ ID NO: 2134634 - RNA, 19 nt, Artificial Sequence
  Description of Artificial Sequence: Synthetic oligonucleotide
  Sense strand starting at position 2807 of SEQ ID NO: 1882611
gcaauaucuucuguaggaa

SEQ ID NO: 2134635 - RNA, 19 nt, Artificial Sequence
  Description of Artificial Sequence: Synthetic oligonucleotide
  Antisense strand to SEQ ID NO: 2134634
uuccuacagaagauauugc

SEQ ID NO: 2134636 - RNA, 19 nt, Artificial Sequence
  Description of Artificial Sequence: Synthetic oligonucleotide
  Sense strand starting at position 2868 of SEQ ID NO: 1882611
uuaagaucuuaugcuggua

SEQ ID NO: 2134637 - RNA, 19 nt, Artificial Sequence
  Description of Artificial Sequence: Synthetic oligonucleotide
  Antisense strand to SEQ ID NO: 2134636
uaccagcauaagaucuuaa

SEQ ID NO: 2134638 - RNA, 19 nt, Artificial Sequence
  Description of Artificial Sequence: Synthetic oligonucleotide
  Sense strand starting at position 2870 of SEQ ID NO: 1882611
aagaucuuaugcugguaga

SEQ ID NO: 2134639 - RNA, 19 nt, Artificial Sequence
  Description of Artificial Sequence: Synthetic oligonucleotide
  Antisense strand to SEQ ID NO: 2134638
ucuaccagcauaagaucuu

SEQ ID NO: 2134640 - RNA, 19 nt, Artificial Sequence
  Description of Artificial Sequence: Synthetic oligonucleotide
  Sense strand starting at position 2871 of SEQ ID NO: 1882611
agaucuuaugcugguagac

SEQ ID NO: 2134641 - RNA, 19 nt, Artificial Sequence
  Description of Artificial Sequence: Synthetic oligonucleotide
  Antisense strand to SEQ ID NO: 2134640
gucuaccagcauaagaucu

SEQ ID NO: 2134642 - RNA, 19 nt, Artificial Sequence
  Description of Artificial Sequence: Synthetic oligonucleotide
  Sense strand starting at position 2873 of SEQ ID NO: 1882611
aucuuaugcugguagacau

SEQ ID NO: 2134643 - RNA, 19 nt, Artificial Sequence
  Description of Artificial Sequence: Synthetic oligonucleotide
  Antisense strand to SEQ ID NO: 2134642
augucuaccagcauaagau

SEQ ID NO: 2134644 - RNA, 19 nt, Artificial Sequence
  Description of Artificial Sequence: Synthetic oligonucleotide
  Sense strand starting at position 2910 of SEQ ID NO: 1882611
caaaguggccugcagagua

SEQ ID NO: 2134645 - RNA, 19 nt, Artificial Sequence
  Description of Artificial Sequence: Synthetic oligonucleotide
  Antisense strand to SEQ ID NO: 2134644
uacucugcaggccacuuug

SEQ ID NO: 2134646 - RNA, 19 nt, Artificial Sequence
  Description of Artificial Sequence: Synthetic oligonucleotide
  Sense strand starting at position 2944 of SEQ ID NO: 1882611
gugaaugauuaauauccau

SEQ ID NO: 2134647 - RNA, 19 nt, Artificial Sequence
  Description of Artificial Sequence: Synthetic oligonucleotide
  Antisense strand to SEQ ID NO: 2134646
auggauauuaaucauucac

SEQ ID NO: 2134648 - RNA, 19 nt, Artificial Sequence
  Description of Artificial Sequence: Synthetic oligonucleotide
  Sense strand starting at position 3232 of SEQ ID NO: 1882611
uguauuccucagugucuau

SEQ ID NO: 2134649 - RNA, 19 nt, Artificial Sequence
  Description of Artificial Sequence: Synthetic oligonucleotide
  Antisense strand to SEQ ID NO: 2134648
auagacacugaggaauaca

SEQ ID NO: 2134650 - RNA, 19 nt, Artificial Sequence
  Description of Artificial Sequence: Synthetic oligonucleotide
  Sense strand starting at position 3484 of SEQ ID NO: 1882611
uguaaauagugacaaacau

SEQ ID NO: 2134651 - RNA, 19 nt, Artificial Sequence
  Description of Artificial Sequence: Synthetic oligonucleotide
  Antisense strand to SEQ ID NO: 2134650
auguuugucacuauuuaca

SEQ ID NO: 2134652 - RNA, 19 nt, Artificial Sequence
  Description of Artificial Sequence: Synthetic oligonucleotide
  Sense strand starting at position 3546 of SEQ ID NO: 1882611
ggguaugcaccugguaaca

SEQ ID NO: 2134653 - RNA, 19 nt, Artificial Sequence
  Description of Artificial Sequence: Synthetic oligonucleotide
  Antisense strand to SEQ ID NO: 2134652
uguuaccaggugcauaccc

SEQ ID NO: 2134654 - RNA, 19 nt, Artificial Sequence
  Description of Artificial Sequence: Synthetic oligonucleotide
  Sense strand starting at position 3790 of SEQ ID NO: 1882611
ugugaauuaguuugacaau

SEQ ID NO: 2134655 - RNA, 19 nt, Artificial Sequence
  Description of Artificial Sequence: Synthetic oligonucleotide
  Antisense strand to SEQ ID NO: 2134654
auugucaaacuaauucaca

SEQ ID NO: 2134656 - RNA, 19 nt, Artificial Sequence
  Description of Artificial Sequence: Synthetic oligonucleotide
  Sense strand starting at position 3791 of SEQ ID NO: 1882611
gugaauuaguuugacaauu

SEQ ID NO: 2134657 - RNA, 19 nt, Artificial Sequence
  Description of Artificial Sequence: Synthetic oligonucleotide
  Antisense strand to SEQ ID NO: 2134656
aauugucaaacuaauucac

SEQ ID NO: 2134658 - RNA, 19 nt, Artificial Sequence
  Description of Artificial Sequence: Synthetic oligonucleotide
  Sense strand starting at position 3851 of SEQ ID NO: 1882611
cuaggaauauugcuugaga

SEQ ID NO: 2134659 - RNA, 19 nt, Artificial Sequence
  Description of Artificial Sequence: Synthetic oligonucleotide
  Antisense strand to SEQ ID NO: 2134658
ucucaagcaauauuccuag

SEQ ID NO: 2134660 - RNA, 19 nt, Artificial Sequence
  Description of Artificial Sequence: Synthetic oligonucleotide
  Sense strand starting at position 3852 of SEQ ID NO: 1882611
uaggaauauugcuugagag

SEQ ID NO: 2134661 - RNA, 19 nt, Artificial Sequence
  Description of Artificial Sequence: Synthetic oligonucleotide
  Antisense strand to SEQ ID NO: 2134660
cucucaagcaauauuccua

SEQ ID NO: 2134662 - RNA, 19 nt, Artificial Sequence
  Description of Artificial Sequence: Synthetic oligonucleotide
  Sense strand starting at position 3853 of SEQ ID NO: 1882611
aggaauauugcuugagagc

SEQ ID NO: 2134663 - RNA, 19 nt, Artificial Sequence
  Description of Artificial Sequence: Synthetic oligonucleotide
  Antisense strand to SEQ ID NO: 2134662
gcucucaagcaauauuccu

SEQ ID NO: 2134664 - RNA, 19 nt, Artificial Sequence
  Description of Artificial Sequence: Synthetic oligonucleotide
  Sense strand starting at position 3854 of SEQ ID NO: 1882611
ggaauauugcuugagagca

SEQ ID NO: 2134665 - RNA, 19 nt, Artificial Sequence
  Description of Artificial Sequence: Synthetic oligonucleotide
  Antisense strand to SEQ ID NO: 2134664
ugcucucaagcaauauucc

SEQ ID NO: 2134666 - RNA, 19 nt, Artificial Sequence
  Description of Artificial Sequence: Synthetic oligonucleotide
  Sense strand starting at position 3856 of SEQ ID NO: 1882611
aauauugcuugagagcaga

SEQ ID NO: 2134667 - RNA, 19 nt, Artificial Sequence
  Description of Artificial Sequence: Synthetic oligonucleotide
  Antisense strand to SEQ ID NO: 2134666
ucugcucucaagcaauauu

SEQ ID NO: 2134668 - RNA, 19 nt, Artificial Sequence
  Description of Artificial Sequence: Synthetic oligonucleotide
  Sense strand starting at position 3892 of SEQ ID NO: 1882611
guuaauuuguaaugacauc

SEQ ID NO: 2134669 - RNA, 19 nt, Artificial Sequence
  Description of Artificial Sequence: Synthetic oligonucleotide
  Antisense strand to SEQ ID NO: 2134668
gaugucauuacaaauuaac

SEQ ID NO: 2134670 - RNA, 19 nt, Artificial Sequence
  Description of Artificial Sequence: Synthetic oligonucleotide
  Sense strand starting at position 3903 of SEQ ID NO: 1882611
augacaucauuacaguauu

SEQ ID NO: 2134671 - RNA, 19 nt, Artificial Sequence
  Description of Artificial Sequence: Synthetic oligonucleotide
  Antisense strand to SEQ ID NO: 2134670
aauacuguaaugaugucau

SEQ ID NO: 2134672 - RNA, 19 nt, Artificial Sequence
  Description of Artificial Sequence: Synthetic oligonucleotide
  Sense strand starting at position 3909 of SEQ ID NO: 1882611
ucauuacaguauugagacu

SEQ ID NO: 2134673 - RNA, 19 nt, Artificial Sequence
  Description of Artificial Sequence: Synthetic oligonucleotide
  Antisense strand to SEQ ID NO: 2134672
agucucaauacuguaauga

SEQ ID NO: 2134674 - RNA, 19 nt, Artificial Sequence
  Description of Artificial Sequence: Synthetic oligonucleotide
  Sense strand starting at position 30 of SEQ ID NO: 1882612
cgcccagcuucuucuaauu

SEQ ID NO: 2134675 - RNA, 19 nt, Artificial Sequence
  Description of Artificial Sequence: Synthetic oligonucleotide
  Antisense strand to SEQ ID NO: 2134674
aauuagaagaagcugggcg

SEQ ID NO: 2134676 - RNA, 19 nt, Artificial Sequence
  Description of Artificial Sequence: Synthetic oligonucleotide
  Sense strand starting at position 90 of SEQ ID NO: 1882612
ggugcaaucacggaugacu

SEQ ID NO: 2134677 - RNA, 19 nt, Artificial Sequence
  Description of Artificial Sequence: Synthetic oligonucleotide
  Antisense strand to SEQ ID NO: 2134676
agucauccgugauugcacc

SEQ ID NO: 2134678 - RNA, 19 nt, Artificial Sequence
  Description of Artificial Sequence: Synthetic oligonucleotide
  Sense strand starting at position 1341 of SEQ ID NO: 1882612
cgguucucggaccguuaga

SEQ ID NO: 2134679 - RNA, 19 nt, Artificial Sequence
  Description of Artificial Sequence: Synthetic oligonucleotide
  Antisense strand to SEQ ID NO: 2134678
ucuaacgguccgagaaccg

SEQ ID NO: 2134680 - RNA, 19 nt, Artificial Sequence
  Description of Artificial Sequence: Synthetic oligonucleotide
  Sense strand starting at position 1377 of SEQ ID NO: 1882612
ucuuauaaguccucggucu

SEQ ID NO: 2134681 - RNA, 19 nt, Artificial Sequence
  Description of Artificial Sequence: Synthetic oligonucleotide
  Antisense strand to SEQ ID NO: 2134680
agaccgaggacuuauaaga

SEQ ID NO: 2134682 - RNA, 19 nt, Artificial Sequence
  Description of Artificial Sequence: Synthetic oligonucleotide
  Sense strand starting at position 1378 of SEQ ID NO: 1882612
cuuauaaguccucggucuu

SEQ ID NO: 2134683 - RNA, 19 nt, Artificial Sequence
  Description of Artificial Sequence: Synthetic oligonucleotide
  Antisense strand to SEQ ID NO: 2134682
aagaccgaggacuuauaag

SEQ ID NO: 2134684 - RNA, 19 nt, Artificial Sequence
  Description of Artificial Sequence: Synthetic oligonucleotide
  Sense strand starting at position 1379 of SEQ ID NO: 1882612
uuauaaguccucggucuuc

SEQ ID NO: 2134685 - RNA, 19 nt, Artificial Sequence
  Description of Artificial Sequence: Synthetic oligonucleotide
  Antisense strand to SEQ ID NO: 2134684
gaagaccgaggacuuauaa

SEQ ID NO: 2134686 - RNA, 19 nt, Artificial Sequence
  Description of Artificial Sequence: Synthetic oligonucleotide
  Sense strand starting at position 1478 of SEQ ID NO: 1882612
ggcaaaugcuagcuacaau

SEQ ID NO: 2134687 - RNA, 19 nt, Artificial Sequence
  Description of Artificial Sequence: Synthetic oligonucleotide
  Antisense strand to SEQ ID NO: 2134686
auuguagcuagcauuugcc

SEQ ID NO: 2134688 - RNA, 19 nt, Artificial Sequence
  Description of Artificial Sequence: Synthetic oligonucleotide
  Sense strand starting at position 1530 of SEQ ID NO: 1882612
ggcaaaucuugauuaagga

SEQ ID NO: 2134689 - RNA, 19 nt, Artificial Sequence
  Description of Artificial Sequence: Synthetic oligonucleotide
  Antisense strand to SEQ ID NO: 2134688
uccuuaaucaagauuugcc

SEQ ID NO: 2134690 - RNA, 19 nt, Artificial Sequence
  Description of Artificial Sequence: Synthetic oligonucleotide
  Sense strand starting at position 1544 of SEQ ID NO: 1882612
aaggauagcgggugcaaau

SEQ ID NO: 2134691 - RNA, 19 nt, Artificial Sequence
  Description of Artificial Sequence: Synthetic oligonucleotide
  Antisense strand to SEQ ID NO: 2134690
auuugcacccgcuauccuu

SEQ ID NO: 2134692 - RNA, 19 nt, Artificial Sequence
  Description of Artificial Sequence: Synthetic oligonucleotide
  Sense strand starting at position 2036 of SEQ ID NO: 1882612
cgcaguccucuuugggagu

SEQ ID NO: 2134693 - RNA, 19 nt, Artificial Sequence
  Description of Artificial Sequence: Synthetic oligonucleotide
  Antisense strand to SEQ ID NO: 2134692
acucccaaagaggacugcg

SEQ ID NO: 2134694 - RNA, 19 nt, Artificial Sequence
  Description of Artificial Sequence: Synthetic oligonucleotide
  Sense strand starting at position 2149 of SEQ ID NO: 1882612
aacgaccuugcgcaagauu

SEQ ID NO: 2134695 - RNA, 19 nt, Artificial Sequence
  Description of Artificial Sequence: Synthetic oligonucleotide
  Antisense strand to SEQ ID NO: 2134694
aaucuugcgcaaggucguu

SEQ ID NO: 2134696 - RNA, 19 nt, Artificial Sequence
  Description of Artificial Sequence: Synthetic oligonucleotide
  Sense strand starting at position 2158 of SEQ ID NO: 1882612
gcgcaagauuccuuuccuc

SEQ ID NO: 2134697 - RNA, 19 nt, Artificial Sequence
  Description of Artificial Sequence: Synthetic oligonucleotide
  Antisense strand to SEQ ID NO: 2134696
gaggaaaggaaucuugcgc

SEQ ID NO: 2134698 - RNA, 19 nt, Artificial Sequence
  Description of Artificial Sequence: Synthetic oligonucleotide
  Sense strand starting at position 2171 of SEQ ID NO: 1882612
uuccucuaugccugagguu

SEQ ID NO: 2134699 - RNA, 19 nt, Artificial Sequence
  Description of Artificial Sequence: Synthetic oligonucleotide
  Antisense strand to SEQ ID NO: 2134698
aaccucaggcauagaggaa

SEQ ID NO: 2134700 - RNA, 19 nt, Artificial Sequence
  Description of Artificial Sequence: Synthetic oligonucleotide
  Sense strand starting at position 2172 of SEQ ID NO: 1882612
uccucuaugccugagguuu

SEQ ID NO: 2134701 - RNA, 19 nt, Artificial Sequence
  Description of Artificial Sequence: Synthetic oligonucleotide
  Antisense strand to SEQ ID NO: 2134700
aaaccucaggcauagagga

SEQ ID NO: 2134702 - RNA, 19 nt, Artificial Sequence
  Description of Artificial Sequence: Synthetic oligonucleotide
  Sense strand starting at position 2306 of SEQ ID NO: 1882612
gagaaaggauugcuuaguu

SEQ ID NO: 2134703 - RNA, 19 nt, Artificial Sequence
  Description of Artificial Sequence: Synthetic oligonucleotide
  Antisense strand to SEQ ID NO: 2134702
aacuaagcaauccuuucuc

SEQ ID NO: 2134704 - RNA, 19 nt, Artificial Sequence
  Description of Artificial Sequence: Synthetic oligonucleotide
  Sense strand starting at position 2447 of SEQ ID NO: 1882612
gcuauuuccuuggaaauuu

SEQ ID NO: 2134705 - RNA, 19 nt, Artificial Sequence
  Description of Artificial Sequence: Synthetic oligonucleotide
  Antisense strand to SEQ ID NO: 2134704
aaauuuccaaggaaauagc

SEQ ID NO: 2134706 - RNA, 19 nt, Artificial Sequence
  Description of Artificial Sequence: Synthetic oligonucleotide
  Sense strand starting at position 2518 of SEQ ID NO: 1882612
uagcgauguugucuggaga

SEQ ID NO: 2134707 - RNA, 19 nt, Artificial Sequence
  Description of Artificial Sequence: Synthetic oligonucleotide
  Antisense strand to SEQ ID NO: 2134706
ucuccagacaacaucgcua

SEQ ID NO: 2134708 - RNA, 19 nt, Artificial Sequence
  Description of Artificial Sequence: Synthetic oligonucleotide
  Sense strand starting at position 2519 of SEQ ID NO: 1882612
agcgauguugucuggagag

SEQ ID NO: 2134709 - RNA, 19 nt, Artificial Sequence
  Description of Artificial Sequence: Synthetic oligonucleotide
  Antisense strand to SEQ ID NO: 2134708
cucuccagacaacaucgcu

SEQ ID NO: 2134710 - RNA, 19 nt, Artificial Sequence
  Description of Artificial Sequence: Synthetic oligonucleotide
  Sense strand starting at position 2521 of SEQ ID NO: 1882612
cgauguugucuggagagua

SEQ ID NO: 2134711 - RNA, 19 nt, Artificial Sequence
  Description of Artificial Sequence: Synthetic oligonucleotide
  Antisense strand to SEQ ID NO: 2134710
uacucuccagacaacaucg

SEQ ID NO: 2134712 - RNA, 19 nt, Artificial Sequence
  Description of Artificial Sequence: Synthetic oligonucleotide
  Sense strand starting at position 2524 of SEQ ID NO: 1882612
uguugucuggagaguaugu

SEQ ID NO: 2134713 - RNA, 19 nt, Artificial Sequence
  Description of Artificial Sequence: Synthetic oligonucleotide
  Antisense strand to SEQ ID NO: 2134712
acauacucuccagacaaca

SEQ ID NO: 2134714 - RNA, 19 nt, Artificial Sequence
  Description of Artificial Sequence: Synthetic oligonucleotide
  Sense strand starting at position 2531 of SEQ ID NO: 1882612
uggagaguauguucaaaga

SEQ ID NO: 2134715 - RNA, 19 nt, Artificial Sequence
  Description of Artificial Sequence: Synthetic oligonucleotide
  Antisense strand to SEQ ID NO: 2134714
ucuuugaacauacucucca

SEQ ID NO: 2134716 - RNA, 19 nt, Artificial Sequence
  Description of Artificial Sequence: Synthetic oligonucleotide
  Sense strand starting at position 2649 of SEQ ID NO: 1882612
uuggucuucuugucaaaca

SEQ ID NO: 2134717 - RNA, 19 nt, Artificial Sequence
  Description of Artificial Sequence: Synthetic oligonucleotide
  Antisense strand to SEQ ID NO: 2134716
uguuugacaagaagaccaa

SEQ ID NO: 2134718 - RNA, 19 nt, Artificial Sequence
  Description of Artificial Sequence: Synthetic oligonucleotide
  Sense strand starting at position 2681 of SEQ ID NO: 1882612
ugagaugccugauagauuu

SEQ ID NO: 2134719 - RNA, 19 nt, Artificial Sequence
  Description of Artificial Sequence: Synthetic oligonucleotide
  Antisense strand to SEQ ID NO: 2134718
aaaucuaucaggcaucuca

SEQ ID NO: 2134720 - RNA, 19 nt, Artificial Sequence
  Description of Artificial Sequence: Synthetic oligonucleotide
  Sense strand starting at position 2785 of SEQ ID NO: 1882612
acugcaacucugcaagaga

SEQ ID NO: 2134721 - RNA, 19 nt, Artificial Sequence
  Description of Artificial Sequence: Synthetic oligonucleotide
  Antisense strand to SEQ ID NO: 2134720
ucucuugcagaguugcagu

SEQ ID NO: 2134722 - RNA, 19 nt, Artificial Sequence
  Description of Artificial Sequence: Synthetic oligonucleotide
  Sense strand starting at position 2899 of SEQ ID NO: 1882612
ucacuuauuugauaguuac

SEQ ID NO: 2134723 - RNA, 19 nt, Artificial Sequence
  Description of Artificial Sequence: Synthetic oligonucleotide
  Antisense strand to SEQ ID NO: 2134722
guaacuaucaaauaaguga

SEQ ID NO: 2134724 - RNA, 19 nt, Artificial Sequence
  Description of Artificial Sequence: Synthetic oligonucleotide
  Sense strand starting at position 2913 of SEQ ID NO: 1882612
guuacuauguauccaccaa

SEQ ID NO: 2134725 - RNA, 19 nt, Artificial Sequence
  Description of Artificial Sequence: Synthetic oligonucleotide
  Antisense strand to SEQ ID NO: 2134724
uugguggauacauaguaac

SEQ ID NO: 2134726 - RNA, 19 nt, Artificial Sequence
  Description of Artificial Sequence: Synthetic oligonucleotide
  Sense strand starting at position 3024 of SEQ ID NO: 1882612
gguaaccacucagaaaugu

SEQ ID NO: 2134727 - RNA, 19 nt, Artificial Sequence
  Description of Artificial Sequence: Synthetic oligonucleotide
  Antisense strand to SEQ ID NO: 2134726
acauuucugagugguuacc

SEQ ID NO: 2134728 - RNA, 19 nt, Artificial Sequence
  Description of Artificial Sequence: Synthetic oligonucleotide
  Sense strand starting at position 3033 of SEQ ID NO: 1882612
ucagaaauguaguaucaag

SEQ ID NO: 2134729 - RNA, 19 nt, Artificial Sequence
  Description of Artificial Sequence: Synthetic oligonucleotide
  Antisense strand to SEQ ID NO: 2134728
cuugauacuacauuucuga

SEQ ID NO: 2134730 - RNA, 19 nt, Artificial Sequence
  Description of Artificial Sequence: Synthetic oligonucleotide
  Sense strand starting at position 3044 of SEQ ID NO: 1882612
guaucaagucaacgucauu

SEQ ID NO: 2134731 - RNA, 19 nt, Artificial Sequence
  Description of Artificial Sequence: Synthetic oligonucleotide
  Antisense strand to SEQ ID NO: 2134730
aaugacguugacuugauac

SEQ ID NO: 2134732 - RNA, 19 nt, Artificial Sequence
  Description of Artificial Sequence: Synthetic oligonucleotide
  Sense strand starting at position 3049 of SEQ ID NO: 1882612
aagucaacgucauuguuaa

SEQ ID NO: 2134733 - RNA, 19 nt, Artificial Sequence
  Description of Artificial Sequence: Synthetic oligonucleotide
  Antisense strand to SEQ ID NO: 2134732
uuaacaaugacguugacuu

SEQ ID NO: 2134734 - RNA, 19 nt, Artificial Sequence
  Description of Artificial Sequence: Synthetic oligonucleotide
  Sense strand starting at position 3050 of SEQ ID NO: 1882612
agucaacgucauuguuaau

SEQ ID NO: 2134735 - RNA, 19 nt, Artificial Sequence
  Description of Artificial Sequence: Synthetic oligonucleotide
  Antisense strand to SEQ ID NO: 2134734
auuaacaaugacguugacu

SEQ ID NO: 2134736 - RNA, 19 nt, Artificial Sequence
  Description of Artificial Sequence: Synthetic oligonucleotide
  Sense strand starting at position 3258 of SEQ ID NO: 1882612
uugccuucuaaaugaggga

SEQ ID NO: 2134737 - RNA, 19 nt, Artificial Sequence
  Description of Artificial Sequence: Synthetic oligonucleotide
  Antisense strand to SEQ ID NO: 2134736
ucccucauuuagaaggcaa

SEQ ID NO: 2134738 - RNA, 19 nt, Artificial Sequence
  Description of Artificial Sequence: Synthetic oligonucleotide
  Sense strand starting at position 3410 of SEQ ID NO: 1882612
cuauauuagcuguaggauc

SEQ ID NO: 2134739 - RNA, 19 nt, Artificial Sequence
  Description of Artificial Sequence: Synthetic oligonucleotide
  Antisense strand to SEQ ID NO: 2134738
gauccuacagcuaauauag

SEQ ID NO: 2134740 - RNA, 19 nt, Artificial Sequence
  Description of Artificial Sequence: Synthetic oligonucleotide
  Sense strand starting at position 3418 of SEQ ID NO: 1882612
gcuguaggauccuaggaaa

SEQ ID NO: 2134741 - RNA, 19 nt, Artificial Sequence
  Description of Artificial Sequence: Synthetic oligonucleotide
  Antisense strand to SEQ ID NO: 2134740
uuuccuaggauccuacagc

SEQ ID NO: 2134742 - RNA, 19 nt, Artificial Sequence
  Description of Artificial Sequence: Synthetic oligonucleotide
  Sense strand starting at position 3421 of SEQ ID NO: 1882612
guaggauccuaggaaaguc

SEQ ID NO: 2134743 - RNA, 19 nt, Artificial Sequence
  Description of Artificial Sequence: Synthetic oligonucleotide
  Antisense strand to SEQ ID NO: 2134742
gacuuuccuaggauccuac

SEQ ID NO: 2134744 - RNA, 19 nt, Artificial Sequence
  Description of Artificial Sequence: Synthetic oligonucleotide
  Sense strand starting at position 3429 of SEQ ID NO: 1882612
cuaggaaaguccuuuaacu

SEQ ID NO: 2134745 - RNA, 19 nt, Artificial Sequence
  Description of Artificial Sequence: Synthetic oligonucleotide
  Antisense strand to SEQ ID NO: 2134744
aguuaaaggacuuuccuag

SEQ ID NO: 2134746 - RNA, 19 nt, Artificial Sequence
  Description of Artificial Sequence: Synthetic oligonucleotide
  Sense strand starting at position 3457 of SEQ ID NO: 1882612
uccagcuccucguuuguaa

SEQ ID NO: 2134747 - RNA, 19 nt, Artificial Sequence
  Description of Artificial Sequence: Synthetic oligonucleotide
  Antisense strand to SEQ ID NO: 2134746
uuacaaacgaggagcugga

SEQ ID NO: 2134748 - RNA, 19 nt, Artificial Sequence
  Description of Artificial Sequence: Synthetic oligonucleotide
  Sense strand starting at position 3487 of SEQ ID NO: 1882612
uugacuguugugcacagaa

SEQ ID NO: 2134749 - RNA, 19 nt, Artificial Sequence
  Description of Artificial Sequence: Synthetic oligonucleotide
  Antisense strand to SEQ ID NO: 2134748
uucugugcacaacagucaa

SEQ ID NO: 2134750 - RNA, 19 nt, Artificial Sequence
  Description of Artificial Sequence: Synthetic oligonucleotide
  Sense strand starting at position 3489 of SEQ ID NO: 1882612
gacuguugugcacagaauu

SEQ ID NO: 2134751 - RNA, 19 nt, Artificial Sequence
  Description of Artificial Sequence: Synthetic oligonucleotide
  Antisense strand to SEQ ID NO: 2134750
aauucugugcacaacaguc

SEQ ID NO: 2134752 - RNA, 19 nt, Artificial Sequence
  Description of Artificial Sequence: Synthetic oligonucleotide
  Sense strand starting at position 3495 of SEQ ID NO: 1882612
ugugcacagaauugagaua

SEQ ID NO: 2134753 - RNA, 19 nt, Artificial Sequence
  Description of Artificial Sequence: Synthetic oligonucleotide
  Antisense strand to SEQ ID NO: 2134752
uaucucaauucugugcaca

SEQ ID NO: 2134754 - RNA, 19 nt, Artificial Sequence
  Description of Artificial Sequence: Synthetic oligonucleotide
  Sense strand starting at position 35 of SEQ ID NO: 1882613
aguuguugugucuaaauua

SEQ ID NO: 2134755 - RNA, 19 nt, Artificial Sequence
  Description of Artificial Sequence: Synthetic oligonucleotide
  Antisense strand to SEQ ID NO: 2134754
uaauuuagacacaacaacu

SEQ ID NO: 2134756 - RNA, 19 nt, Artificial Sequence
  Description of Artificial Sequence: Synthetic oligonucleotide
  Sense strand starting at position 64 of SEQ ID NO: 1882613
gaaguaugacgagguguau

SEQ ID NO: 2134757 - RNA, 19 nt, Artificial Sequence
  Description of Artificial Sequence: Synthetic oligonucleotide
  Antisense strand to SEQ ID NO: 2134756
auacaccucgucauacuuc

SEQ ID NO: 2134758 - RNA, 19 nt, Artificial Sequence
  Description of Artificial Sequence: Synthetic oligonucleotide
  Sense strand starting at position 68 of SEQ ID NO: 1882613
uaugacgagguguaucuaa

SEQ ID NO: 2134759 - RNA, 19 nt, Artificial Sequence
  Description of Artificial Sequence: Synthetic oligonucleotide
  Antisense strand to SEQ ID NO: 2134758
uuagauacaccucgucaua

SEQ ID NO: 2134760 - RNA, 19 nt, Artificial Sequence
  Description of Artificial Sequence: Synthetic oligonucleotide
  Sense strand starting at position 75 of SEQ ID NO: 1882613
agguguaucuaacuuccca

SEQ ID NO: 2134761 - RNA, 19 nt, Artificial Sequence
  Description of Artificial Sequence: Synthetic oligonucleotide
  Antisense strand to SEQ ID NO: 2134760
ugggaaguuagauacaccu

SEQ ID NO: 2134762 - RNA, 19 nt, Artificial Sequence
  Description of Artificial Sequence: Synthetic oligonucleotide
  Sense strand starting at position 141 of SEQ ID NO: 1882613
auguccaugugucuauuua

SEQ ID NO: 2134763 - RNA, 19 nt, Artificial Sequence
  Description of Artificial Sequence: Synthetic oligonucleotide
  Antisense strand to SEQ ID NO: 2134762
uaaauagacacauggacau

SEQ ID NO: 2134764 - RNA, 19 nt, Artificial Sequence
  Description of Artificial Sequence: Synthetic oligonucleotide
  Sense strand starting at position 172 of SEQ ID NO: 1882613
aauuguguuccaugccaag

SEQ ID NO: 2134765 - RNA, 19 nt, Artificial Sequence
  Description of Artificial Sequence: Synthetic oligonucleotide
  Antisense strand to SEQ ID NO: 2134764
cuuggcauggaacacaauu

SEQ ID NO: 2134766 - RNA, 19 nt, Artificial Sequence
  Description of Artificial Sequence: Synthetic oligonucleotide
  Sense strand starting at position 247 of SEQ ID NO: 1882613
gcaaauaaaugguuuacaa

SEQ ID NO: 2134767 - RNA, 19 nt, Artificial Sequence
  Description of Artificial Sequence: Synthetic oligonucleotide
  Antisense strand to SEQ ID NO: 2134766
uuguaaaccauuuauuugc

SEQ ID NO: 2134768 - RNA, 19 nt, Artificial Sequence
  Description of Artificial Sequence: Synthetic oligonucleotide
  Sense strand starting at position 269 of SEQ ID NO: 1882613
ugagaaauauaccaagaaa

SEQ ID NO: 2134769 - RNA, 19 nt, Artificial Sequence
  Description of Artificial Sequence: Synthetic oligonucleotide
  Antisense strand to SEQ ID NO: 2134768
uuucuugguauauuucuca

SEQ ID NO: 2134770 - RNA, 19 nt, Artificial Sequence
  Description of Artificial Sequence: Synthetic oligonucleotide
  Sense strand starting at position 1998 of SEQ ID NO: 1882613
acugaauucuuagaaagaa

SEQ ID NO: 2134771 - RNA, 19 nt, Artificial Sequence
  Description of Artificial Sequence: Synthetic oligonucleotide
  Antisense strand to SEQ ID NO: 2134770
uucuuucuaagaauucagu

SEQ ID NO: 2134772 - RNA, 19 nt, Artificial Sequence
  Description of Artificial Sequence: Synthetic oligonucleotide
  Sense strand starting at position 2052 of SEQ ID NO: 1882613
ggacaaaucuaucaugaaa

SEQ ID NO: 2134773 - RNA, 19 nt, Artificial Sequence
  Description of Artificial Sequence: Synthetic oligonucleotide
  Antisense strand to SEQ ID NO: 2134772
uuucaugauagauuugucc

SEQ ID NO: 2134774 - RNA, 19 nt, Artificial Sequence
  Description of Artificial Sequence: Synthetic oligonucleotide
  Sense strand starting at position 2180 of SEQ ID NO: 1882613
gcaguugagauuugcauac

SEQ ID NO: 2134775 - RNA, 19 nt, Artificial Sequence
  Description of Artificial Sequence: Synthetic oligonucleotide
  Antisense strand to SEQ ID NO: 2134774
guaugcaaaucucaacugc

SEQ ID NO: 2134776 - RNA, 19 nt, Artificial Sequence
  Description of Artificial Sequence: Synthetic oligonucleotide
  Sense strand starting at position 2182 of SEQ ID NO: 1882613
aguugagauuugcauacac

SEQ ID NO: 2134777 - RNA, 19 nt, Artificial Sequence
  Description of Artificial Sequence: Synthetic oligonucleotide
  Antisense strand to SEQ ID NO: 2134776
guguaugcaaaucucaacu

SEQ ID NO: 2134778 - RNA, 19 nt, Artificial Sequence
  Description of Artificial Sequence: Synthetic oligonucleotide
  Sense strand starting at position 2229 of SEQ ID NO: 1882613
ucaggaguagucuguucua

SEQ ID NO: 2134779 - RNA, 19 nt, Artificial Sequence
  Description of Artificial Sequence: Synthetic oligonucleotide
  Antisense strand to SEQ ID NO: 2134778
uagaacagacuacuccuga

SEQ ID NO: 2134780 - RNA, 19 nt, Artificial Sequence
  Description of Artificial Sequence: Synthetic oligonucleotide
  Sense strand starting at position 2232 of SEQ ID NO: 1882613
ggaguagucuguucuauuu

SEQ ID NO: 2134781 - RNA, 19 nt, Artificial Sequence
  Description of Artificial Sequence: Synthetic oligonucleotide
  Antisense strand to SEQ ID NO: 2134780
aaauagaacagacuacucc

SEQ ID NO: 2134782 - RNA, 19 nt, Artificial Sequence
  Description of Artificial Sequence: Synthetic oligonucleotide
  Sense strand starting at position 2414 of SEQ ID NO: 1882613
cuaauuguaccacacuguu

SEQ ID NO: 2134783 - RNA, 19 nt, Artificial Sequence
  Description of Artificial Sequence: Synthetic oligonucleotide
  Antisense strand to SEQ ID NO: 2134782
aacagugugguacaauuag

SEQ ID NO: 2134784 - RNA, 19 nt, Artificial Sequence
  Description of Artificial Sequence: Synthetic oligonucleotide
  Sense strand starting at position 2417 of SEQ ID NO: 1882613
auuguaccacacuguuauu

SEQ ID NO: 2134785 - RNA, 19 nt, Artificial Sequence
  Description of Artificial Sequence: Synthetic oligonucleotide
  Antisense strand to SEQ ID NO: 2134784
aauaacagugugguacaau

SEQ ID NO: 2134786 - RNA, 19 nt, Artificial Sequence
  Description of Artificial Sequence: Synthetic oligonucleotide
  Sense strand starting at position 2461 of SEQ ID NO: 1882613
gaauaugguuaacuacuga

SEQ ID NO: 2134787 - RNA, 19 nt, Artificial Sequence
  Description of Artificial Sequence: Synthetic oligonucleotide
  Antisense strand to SEQ ID NO: 2134786
ucaguaguuaaccauauuc

SEQ ID NO: 2134788 - RNA, 19 nt, Artificial Sequence
  Description of Artificial Sequence: Synthetic oligonucleotide
  Sense strand starting at position 2502 of SEQ ID NO: 1882613
aaguuugcuuguucugaag

SEQ ID NO: 2134789 - RNA, 19 nt, Artificial Sequence
  Description of Artificial Sequence: Synthetic oligonucleotide
  Antisense strand to SEQ ID NO: 2134788
cuucagaacaagcaaacuu

SEQ ID NO: 2134790 - RNA, 19 nt, Artificial Sequence
  Description of Artificial Sequence: Synthetic oligonucleotide
  Sense strand starting at position 2516 of SEQ ID NO: 1882613
ugaagaacauucuuugcuu

SEQ ID NO: 2134791 - RNA, 19 nt, Artificial Sequence
  Description of Artificial Sequence: Synthetic oligonucleotide
  Antisense strand to SEQ ID NO: 2134790
aagcaaagaauguucuuca

SEQ ID NO: 2134792 - RNA, 19 nt, Artificial Sequence
  Description of Artificial Sequence: Synthetic oligonucleotide
  Sense strand starting at position 2563 of SEQ ID NO: 1882613
guaguaaagguuuaauuga

SEQ ID NO: 2134793 - RNA, 19 nt, Artificial Sequence
  Description of Artificial Sequence: Synthetic oligonucleotide
  Antisense strand to SEQ ID NO: 2134792
ucaauuaaaccuuuacuac

SEQ ID NO: 2134794 - RNA, 19 nt, Artificial Sequence
  Description of Artificial Sequence: Synthetic oligonucleotide
  Sense strand starting at position 2730 of SEQ ID NO: 1882613
guuuccuuacagcaaggua

SEQ ID NO: 2134795 - RNA, 19 nt, Artificial Sequence
  Description of Artificial Sequence: Synthetic oligonucleotide
  Antisense strand to SEQ ID NO: 2134794
uaccuugcuguaaggaaac

SEQ ID NO: 2134796 - RNA, 19 nt, Artificial Sequence
  Description of Artificial Sequence: Synthetic oligonucleotide
  Sense strand starting at position 2733 of SEQ ID NO: 1882613
uccuuacagcaagguauau

SEQ ID NO: 2134797 - RNA, 19 nt, Artificial Sequence
  Description of Artificial Sequence: Synthetic oligonucleotide
  Antisense strand to SEQ ID NO: 2134796
auauaccuugcuguaagga

SEQ ID NO: 2134798 - RNA, 19 nt, Artificial Sequence
  Description of Artificial Sequence: Synthetic oligonucleotide
  Sense strand starting at position 2888 of SEQ ID NO: 1882613
ccagaugcaugcuccagaa

SEQ ID NO: 2134799 - RNA, 19 nt, Artificial Sequence
  Description of Artificial Sequence: Synthetic oligonucleotide
  Antisense strand to SEQ ID NO: 2134798
uucuggagcaugcaucugg

SEQ ID NO: 2134800 - RNA, 19 nt, Artificial Sequence
  Description of Artificial Sequence: Synthetic oligonucleotide
  Sense strand starting at position 2890 of SEQ ID NO: 1882613
agaugcaugcuccagaaag

SEQ ID NO: 2134801 - RNA, 19 nt, Artificial Sequence
  Description of Artificial Sequence: Synthetic oligonucleotide
  Antisense strand to SEQ ID NO: 2134800
cuuucuggagcaugcaucu

SEQ ID NO: 2134802 - RNA, 19 nt, Artificial Sequence
  Description of Artificial Sequence: Synthetic oligonucleotide
  Sense strand starting at position 2892 of SEQ ID NO: 1882613
augcaugcuccagaaaguc

SEQ ID NO: 2134803 - RNA, 19 nt, Artificial Sequence
  Description of Artificial Sequence: Synthetic oligonucleotide
  Antisense strand to SEQ ID NO: 2134802
gacuuucuggagcaugcau

SEQ ID NO: 2134804 - RNA, 19 nt, Artificial Sequence
  Description of Artificial Sequence: Synthetic oligonucleotide
  Sense strand starting at position 2914 of SEQ ID NO: 1882613
agaguaccuuuggcuugua

SEQ ID NO: 2134805 - RNA, 19 nt, Artificial Sequence
  Description of Artificial Sequence: Synthetic oligonucleotide
  Antisense strand to SEQ ID NO: 2134804
uacaagccaaagguacucu

SEQ ID NO: 2134806 - RNA, 19 nt, Artificial Sequence
  Description of Artificial Sequence: Synthetic oligonucleotide
  Sense strand starting at position 2935 of SEQ ID NO: 1882613
ccugauugaucuuuggagu

SEQ ID NO: 2134807 - RNA, 19 nt, Artificial Sequence
  Description of Artificial Sequence: Synthetic oligonucleotide
  Antisense strand to SEQ ID NO: 2134806
acuccaaagaucaaucagg

SEQ ID NO: 2134808 - RNA, 19 nt, Artificial Sequence
  Description of Artificial Sequence: Synthetic oligonucleotide
  Sense strand starting at position 2936 of SEQ ID NO: 1882613
cugauugaucuuuggaguc

SEQ ID NO: 2134809 - RNA, 19 nt, Artificial Sequence
  Description of Artificial Sequence: Synthetic oligonucleotide
  Antisense strand to SEQ ID NO: 2134808
gacuccaaagaucaaucag

SEQ ID NO: 2134810 - RNA, 19 nt, Artificial Sequence
  Description of Artificial Sequence: Synthetic oligonucleotide
  Sense strand starting at position 2992 of SEQ ID NO: 1882613
gguggccuggcuuagagau

SEQ ID NO: 2134811 - RNA, 19 nt, Artificial Sequence
  Description of Artificial Sequence: Synthetic oligonucleotide
  Antisense strand to SEQ ID NO: 2134810
aucucuaagccaggccacc

SEQ ID NO: 2134812 - RNA, 19 nt, Artificial Sequence
  Description of Artificial Sequence: Synthetic oligonucleotide
  Sense strand starting at position 3149 of SEQ ID NO: 1882613
gcaauauagucuuugcaaa

SEQ ID NO: 2134813 - RNA, 19 nt, Artificial Sequence
  Description of Artificial Sequence: Synthetic oligonucleotide
  Antisense strand to SEQ ID NO: 2134812
uuugcaaagacuauauugc

SEQ ID NO: 2134814 - RNA, 19 nt, Artificial Sequence
  Description of Artificial Sequence: Synthetic oligonucleotide
  Sense strand starting at position 3174 of SEQ ID NO: 1882613
uugcgaaacucacuaaaga

SEQ ID NO: 2134815 - RNA, 19 nt, Artificial Sequence
  Description of Artificial Sequence: Synthetic oligonucleotide
  Antisense strand to SEQ ID NO: 2134814
ucuuuagugaguuucgcaa

SEQ ID NO: 2134816 - RNA, 19 nt, Artificial Sequence
  Description of Artificial Sequence: Synthetic oligonucleotide
  Sense strand starting at position 3232 of SEQ ID NO: 1882613
uaguaaacccuguggagga

SEQ ID NO: 2134817 - RNA, 19 nt, Artificial Sequence
  Description of Artificial Sequence: Synthetic oligonucleotide
  Antisense strand to SEQ ID NO: 2134816
uccuccacaggguuuacua

SEQ ID NO: 2134818 - RNA, 19 nt, Artificial Sequence
  Description of Artificial Sequence: Synthetic oligonucleotide
  Sense strand starting at position 3257 of SEQ ID NO: 1882613
aucugauauccagaguuuc

SEQ ID NO: 2134819 - RNA, 19 nt, Artificial Sequence
  Description of Artificial Sequence: Synthetic oligonucleotide
  Antisense strand to SEQ ID NO: 2134818
gaaacucuggauaucagau

SEQ ID NO: 2134820 - RNA, 19 nt, Artificial Sequence
  Description of Artificial Sequence: Synthetic oligonucleotide
  Sense strand starting at position 3335 of SEQ ID NO: 1882613
agaaauauguggcucauuc

SEQ ID NO: 2134821 - RNA, 19 nt, Artificial Sequence
  Description of Artificial Sequence: Synthetic oligonucleotide
  Antisense strand to SEQ ID NO: 2134820
gaaugagccacauauuucu

SEQ ID NO: 2134822 - RNA, 19 nt, Artificial Sequence
  Description of Artificial Sequence: Synthetic oligonucleotide
  Sense strand starting at position 3399 of SEQ ID NO: 1882613
agacauuggguuugcuaga

SEQ ID NO: 2134823 - RNA, 19 nt, Artificial Sequence
  Description of Artificial Sequence: Synthetic oligonucleotide
  Antisense strand to SEQ ID NO: 2134822
ucuagcaaacccaaugucu

SEQ ID NO: 2134824 - RNA, 19 nt, Artificial Sequence
  Description of Artificial Sequence: Synthetic oligonucleotide
  Sense strand starting at position 3400 of SEQ ID NO: 1882613
gacauuggguuugcuagau

SEQ ID NO: 2134825 - RNA, 19 nt, Artificial Sequence
  Description of Artificial Sequence: Synthetic oligonucleotide
  Antisense strand to SEQ ID NO: 2134824
aucuagcaaacccaauguc

SEQ ID NO: 2134826 - RNA, 19 nt, Artificial Sequence
  Description of Artificial Sequence: Synthetic oligonucleotide
  Sense strand starting at position 3404 of SEQ ID NO: 1882613
uuggguuugcuagauaaag

SEQ ID NO: 2134827 - RNA, 19 nt, Artificial Sequence
  Description of Artificial Sequence: Synthetic oligonucleotide
  Antisense strand to SEQ ID NO: 2134826
cuuuaucuagcaaacccaa

SEQ ID NO: 2134828 - RNA, 19 nt, Artificial Sequence
  Description of Artificial Sequence: Synthetic oligonucleotide
  Sense strand starting at position 3499 of SEQ ID NO: 1882613
aaugguguauaagcaagua

SEQ ID NO: 2134829 - RNA, 19 nt, Artificial Sequence
  Description of Artificial Sequence: Synthetic oligonucleotide
  Antisense strand to SEQ ID NO: 2134828
uacuugcuuauacaccauu

SEQ ID NO: 2134830 - RNA, 19 nt, Artificial Sequence
  Description of Artificial Sequence: Synthetic oligonucleotide
  Sense strand starting at position 3622 of SEQ ID NO: 1882613
ggugcucaacagcagauau

SEQ ID NO: 2134831 - RNA, 19 nt, Artificial Sequence
  Description of Artificial Sequence: Synthetic oligonucleotide
  Antisense strand to SEQ ID NO: 2134830
auaucugcuguugagcacc

SEQ ID NO: 2134832 - RNA, 19 nt, Artificial Sequence
  Description of Artificial Sequence: Synthetic oligonucleotide
  Sense strand starting at position 3882 of SEQ ID NO: 1882613
ucguuugaacuagggagau

SEQ ID NO: 2134833 - RNA, 19 nt, Artificial Sequence
  Description of Artificial Sequence: Synthetic oligonucleotide
  Antisense strand to SEQ ID NO: 2134832
aucucccuaguucaaacga

SEQ ID NO: 2134834 - RNA, 19 nt, Artificial Sequence
  Description of Artificial Sequence: Synthetic oligonucleotide
  Sense strand starting at position 10 of SEQ ID NO: 1882614
acuggugugugaccaaauc

SEQ ID NO: 2134835 - RNA, 19 nt, Artificial Sequence
  Description of Artificial Sequence: Synthetic oligonucleotide
  Antisense strand to SEQ ID NO: 2134834
gauuuggucacacaccagu

SEQ ID NO: 2134836 - RNA, 19 nt, Artificial Sequence
  Description of Artificial Sequence: Synthetic oligonucleotide
  Sense strand starting at position 115 of SEQ ID NO: 1882614
aguggaacuuaaguuaaua

SEQ ID NO: 2134837 - RNA, 19 nt, Artificial Sequence
  Description of Artificial Sequence: Synthetic oligonucleotide
  Antisense strand to SEQ ID NO: 2134836
uauuaacuuaaguuccacu

SEQ ID NO: 2134838 - RNA, 19 nt, Artificial Sequence
  Description of Artificial Sequence: Synthetic oligonucleotide
  Sense strand starting at position 192 of SEQ ID NO: 1882614
gaaugcuucccacacggua

SEQ ID NO: 2134839 - RNA, 19 nt, Artificial Sequence
  Description of Artificial Sequence: Synthetic oligonucleotide
  Antisense strand to SEQ ID NO: 2134838
uaccgugugggaagcauuc

SEQ ID NO: 2134840 - RNA, 19 nt, Artificial Sequence
  Description of Artificial Sequence: Synthetic oligonucleotide
  Sense strand starting at position 207 of SEQ ID NO: 1882614
gguaucuauugcuccagaa

SEQ ID NO: 2134841 - RNA, 19 nt, Artificial Sequence
  Description of Artificial Sequence: Synthetic oligonucleotide
  Antisense strand to SEQ ID NO: 2134840
uucuggagcaauagauacc

SEQ ID NO: 2134842 - RNA, 19 nt, Artificial Sequence
  Description of Artificial Sequence: Synthetic oligonucleotide
  Sense strand starting at position 753 of SEQ ID NO: 1882614
ugaacucaucaugguguuu

SEQ ID NO: 2134843 - RNA, 19 nt, Artificial Sequence
  Description of Artificial Sequence: Synthetic oligonucleotide
  Antisense strand to SEQ ID NO: 2134842
aaacaccaugaugaguuca

SEQ ID NO: 2134844 - RNA, 19 nt, Artificial Sequence
  Description of Artificial Sequence: Synthetic oligonucleotide
  Sense strand starting at position 765 of SEQ ID NO: 1882614
gguguuuaacaccaucuau

SEQ ID NO: 2134845 - RNA, 19 nt, Artificial Sequence
  Description of Artificial Sequence: Synthetic oligonucleotide
  Antisense strand to SEQ ID NO: 2134844
auagaugguguuaaacacc

SEQ ID NO: 2134846 - RNA, 19 nt, Artificial Sequence
  Description of Artificial Sequence: Synthetic oligonucleotide
  Sense strand starting at position 779 of SEQ ID NO: 1882614
ucuauaugcugacauuuga

SEQ ID NO: 2134847 - RNA, 19 nt, Artificial Sequence
  Description of Artificial Sequence: Synthetic oligonucleotide
  Antisense strand to SEQ ID NO: 2134846
ucaaaugucagcauauaga

SEQ ID NO: 2134848 - RNA, 19 nt, Artificial Sequence
  Description of Artificial Sequence: Synthetic oligonucleotide
  Sense strand starting at position 903 of SEQ ID NO: 1882614
auuagaagguuucuagaua

SEQ ID NO: 2134849 - RNA, 19 nt, Artificial Sequence
  Description of Artificial Sequence: Synthetic oligonucleotide
  Antisense strand to SEQ ID NO: 2134848
uaucuagaaaccuucuaau

SEQ ID NO: 2134850 - RNA, 19 nt, Artificial Sequence
  Description of Artificial Sequence: Synthetic oligonucleotide
  Sense strand starting at position 1012 of SEQ ID NO: 1882614
agucuuucugccuaagaag

SEQ ID NO: 2134851 - RNA, 19 nt, Artificial Sequence
  Description of Artificial Sequence: Synthetic oligonucleotide
  Antisense strand to SEQ ID NO: 2134850
cuucuuaggcagaaagacu

SEQ ID NO: 2134852 - RNA, 19 nt, Artificial Sequence
  Description of Artificial Sequence: Synthetic oligonucleotide
  Sense strand starting at position 1082 of SEQ ID NO: 1882614
gaggcuuuggaauguauuc

SEQ ID NO: 2134853 - RNA, 19 nt, Artificial Sequence
  Description of Artificial Sequence: Synthetic oligonucleotide
  Antisense strand to SEQ ID NO: 2134852
gaauacauuccaaagccuc

SEQ ID NO: 2134854 - RNA, 19 nt, Artificial Sequence
  Description of Artificial Sequence: Synthetic oligonucleotide
  Sense strand starting at position 1087 of SEQ ID NO: 1882614
uuuggaauguauuccuaac

SEQ ID NO: 2134855 - RNA, 19 nt, Artificial Sequence
  Description of Artificial Sequence: Synthetic oligonucleotide
  Antisense strand to SEQ ID NO: 2134854
guuaggaauacauuccaaa

SEQ ID NO: 2134856 - RNA, 19 nt, Artificial Sequence
  Description of Artificial Sequence: Synthetic oligonucleotide
  Sense strand starting at position 1130 of SEQ ID NO: 1882614
uuaaguuacuacuuguauc

SEQ ID NO: 2134857 - RNA, 19 nt, Artificial Sequence
  Description of Artificial Sequence: Synthetic oligonucleotide
  Antisense strand to SEQ ID NO: 2134856
gauacaaguaguaacuuaa

SEQ ID NO: 2134858 - RNA, 19 nt, Artificial Sequence
  Description of Artificial Sequence: Synthetic oligonucleotide
  Sense strand starting at position 1151 of SEQ ID NO: 1882614
ugagaucucuucccuuagu

SEQ ID NO: 2134859 - RNA, 19 nt, Artificial Sequence
  Description of Artificial Sequence: Synthetic oligonucleotide
  Antisense strand to SEQ ID NO: 2134858
acuaagggaagagaucuca

SEQ ID NO: 2134860 - RNA, 19 nt, Artificial Sequence
  Description of Artificial Sequence: Synthetic oligonucleotide
  Sense strand starting at position 1275 of SEQ ID NO: 1882614
gacaaauguugagauaaau

SEQ ID NO: 2134861 - RNA, 19 nt, Artificial Sequence
  Description of Artificial Sequence: Synthetic oligonucleotide
  Antisense strand to SEQ ID NO: 2134860
auuuaucucaacauuuguc

SEQ ID NO: 2134862 - RNA, 19 nt, Artificial Sequence
  Description of Artificial Sequence: Synthetic oligonucleotide
  Sense strand starting at position 1625 of SEQ ID NO: 1882614
ccucguguacauuaugauu

SEQ ID NO: 2134863 - RNA, 19 nt, Artificial Sequence
  Description of Artificial Sequence: Synthetic oligonucleotide
  Antisense strand to SEQ ID NO: 2134862
aaucauaauguacacgagg

SEQ ID NO: 2134864 - RNA, 19 nt, Artificial Sequence
  Description of Artificial Sequence: Synthetic oligonucleotide
  Sense strand starting at position 1681 of SEQ ID NO: 1882614
gaucgcugucuccagaaug

SEQ ID NO: 2134865 - RNA, 19 nt, Artificial Sequence
  Description of Artificial Sequence: Synthetic oligonucleotide
  Antisense strand to SEQ ID NO: 2134864
cauucuggagacagcgauc

SEQ ID NO: 2134866 - RNA, 19 nt, Artificial Sequence
  Description of Artificial Sequence: Synthetic oligonucleotide
  Sense strand starting at position 1733 of SEQ ID NO: 1882614
uccugagaaacugguguuu

SEQ ID NO: 2134867 - RNA, 19 nt, Artificial Sequence
  Description of Artificial Sequence: Synthetic oligonucleotide
  Antisense strand to SEQ ID NO: 2134866
aaacaccaguuucucagga

SEQ ID NO: 2134868 - RNA, 19 nt, Artificial Sequence
  Description of Artificial Sequence: Synthetic oligonucleotide
  Sense strand starting at position 1933 of SEQ ID NO: 1882614
gggagaauguuugcauaac

SEQ ID NO: 2134869 - RNA, 19 nt, Artificial Sequence
  Description of Artificial Sequence: Synthetic oligonucleotide
  Antisense strand to SEQ ID NO: 2134868
guuaugcaaacauucuccc

SEQ ID NO: 2134870 - RNA, 19 nt, Artificial Sequence
  Description of Artificial Sequence: Synthetic oligonucleotide
  Sense strand starting at position 2347 of SEQ ID NO: 1882614
uuaagaacgcaauauaucu

SEQ ID NO: 2134871 - RNA, 19 nt, Artificial Sequence
  Description of Artificial Sequence: Synthetic oligonucleotide
  Antisense strand to SEQ ID NO: 2134870
agauauauugcguucuuaa

SEQ ID NO: 2134872 - RNA, 19 nt, Artificial Sequence
  Description of Artificial Sequence: Synthetic oligonucleotide
  Sense strand starting at position 2400 of SEQ ID NO: 1882614
uuaagacaaucagaaagua

SEQ ID NO: 2134873 - RNA, 19 nt, Artificial Sequence
  Description of Artificial Sequence: Synthetic oligonucleotide
  Antisense strand to SEQ ID NO: 2134872
uacuuucugauugucuuaa

SEQ ID NO: 2134874 - RNA, 19 nt, Artificial Sequence
  Description of Artificial Sequence: Synthetic oligonucleotide
  Sense strand starting at position 2410 of SEQ ID NO: 1882614
cagaaaguauuacagggau

SEQ ID NO: 2134875 - RNA, 19 nt, Artificial Sequence
  Description of Artificial Sequence: Synthetic oligonucleotide
  Antisense strand to SEQ ID NO: 2134874
aucccuguaauacuuucug

SEQ ID NO: 2134876 - RNA, 19 nt, Artificial Sequence
  Description of Artificial Sequence: Synthetic oligonucleotide
  Sense strand starting at position 2426 of SEQ ID NO: 1882614
gauugaacagcauguacua

SEQ ID NO: 2134877 - RNA, 19 nt, Artificial Sequence
  Description of Artificial Sequence: Synthetic oligonucleotide
  Antisense strand to SEQ ID NO: 2134876
uaguacaugcuguucaauc

SEQ ID NO: 2134878 - RNA, 19 nt, Artificial Sequence
  Description of Artificial Sequence: Synthetic oligonucleotide
  Sense strand starting at position 2612 of SEQ ID NO: 1882614
ucuguugagucacuuacau

SEQ ID NO: 2134879 - RNA, 19 nt, Artificial Sequence
  Description of Artificial Sequence: Synthetic oligonucleotide
  Antisense strand to SEQ ID NO: 2134878
auguaagugacucaacaga

SEQ ID NO: 2134880 - RNA, 19 nt, Artificial Sequence
  Description of Artificial Sequence: Synthetic oligonucleotide
  Sense strand starting at position 2693 of SEQ ID NO: 1882614
ggacaauauugauaacaaa

SEQ ID NO: 2134881 - RNA, 19 nt, Artificial Sequence
  Description of Artificial Sequence: Synthetic oligonucleotide
  Antisense strand to SEQ ID NO: 2134880
uuuguuaucaauauugucc

SEQ ID NO: 2134882 - RNA, 19 nt, Artificial Sequence
  Description of Artificial Sequence: Synthetic oligonucleotide
  Sense strand starting at position 2812 of SEQ ID NO: 1882614
auaguuagugccuacagca

SEQ ID NO: 2134883 - RNA, 19 nt, Artificial Sequence
  Description of Artificial Sequence: Synthetic oligonucleotide
  Antisense strand to SEQ ID NO: 2134882
ugcuguaggcacuaacuau

SEQ ID NO: 2134884 - RNA, 19 nt, Artificial Sequence
  Description of Artificial Sequence: Synthetic oligonucleotide
  Sense strand starting at position 3038 of SEQ ID NO: 1882614
gaguccaggauuggugaua

SEQ ID NO: 2134885 - RNA, 19 nt, Artificial Sequence
  Description of Artificial Sequence: Synthetic oligonucleotide
  Antisense strand to SEQ ID NO: 2134884
uaucaccaauccuggacuc

SEQ ID NO: 2134886 - RNA, 19 nt, Artificial Sequence
  Description of Artificial Sequence: Synthetic oligonucleotide
  Sense strand starting at position 3039 of SEQ ID NO: 1882614
aguccaggauuggugauaa

SEQ ID NO: 2134887 - RNA, 19 nt, Artificial Sequence
  Description of Artificial Sequence: Synthetic oligonucleotide
  Antisense strand to SEQ ID NO: 2134886
uuaucaccaauccuggacu

SEQ ID NO: 2134888 - RNA, 19 nt, Artificial Sequence
  Description of Artificial Sequence: Synthetic oligonucleotide
  Sense strand starting at position 3043 of SEQ ID NO: 1882614
caggauuggugauaaagau

SEQ ID NO: 2134889 - RNA, 19 nt, Artificial Sequence
  Description of Artificial Sequence: Synthetic oligonucleotide
  Antisense strand to SEQ ID NO: 2134888
aucuuuaucaccaauccug

SEQ ID NO: 2134890 - RNA, 19 nt, Artificial Sequence
  Description of Artificial Sequence: Synthetic oligonucleotide
  Sense strand starting at position 3052 of SEQ ID NO: 1882614
ugauaaagaucaucugugu

SEQ ID NO: 2134891 - RNA, 19 nt, Artificial Sequence
  Description of Artificial Sequence: Synthetic oligonucleotide
  Antisense strand to SEQ ID NO: 2134890
acacagaugaucuuuauca

SEQ ID NO: 2134892 - RNA, 19 nt, Artificial Sequence
  Description of Artificial Sequence: Synthetic oligonucleotide
  Sense strand starting at position 3055 of SEQ ID NO: 1882614
uaaagaucaucuguguugu

SEQ ID NO: 2134893 - RNA, 19 nt, Artificial Sequence
  Description of Artificial Sequence: Synthetic oligonucleotide
  Antisense strand to SEQ ID NO: 2134892
acaacacagaugaucuuua

SEQ ID NO: 2134894 - RNA, 19 nt, Artificial Sequence
  Description of Artificial Sequence: Synthetic oligonucleotide
  Sense strand starting at position 3056 of SEQ ID NO: 1882614
aaagaucaucuguguugua

SEQ ID NO: 2134895 - RNA, 19 nt, Artificial Sequence
  Description of Artificial Sequence: Synthetic oligonucleotide
  Antisense strand to SEQ ID NO: 2134894
uacaacacagaugaucuuu

SEQ ID NO: 2134896 - RNA, 19 nt, Artificial Sequence
  Description of Artificial Sequence: Synthetic oligonucleotide
  Sense strand starting at position 3057 of SEQ ID NO: 1882614
aagaucaucuguguuguaa

SEQ ID NO: 2134897 - RNA, 19 nt, Artificial Sequence
  Description of Artificial Sequence: Synthetic oligonucleotide
  Antisense strand to SEQ ID NO: 2134896
uuacaacacagaugaucuu

SEQ ID NO: 2134898 - RNA, 19 nt, Artificial Sequence
  Description of Artificial Sequence: Synthetic oligonucleotide
  Sense strand starting at position 3717 of SEQ ID NO: 1882614
uucugcuuugaauagaagu

SEQ ID NO: 2134899 - RNA, 19 nt, Artificial Sequence
  Description of Artificial Sequence: Synthetic oligonucleotide
  Antisense strand to SEQ ID NO: 2134898
acuucuauucaaagcagaa

SEQ ID NO: 2134900 - RNA, 19 nt, Artificial Sequence
  Description of Artificial Sequence: Synthetic oligonucleotide
  Sense strand starting at position 3862 of SEQ ID NO: 1882614
uguauaauagacuguuagu

SEQ ID NO: 2134901 - RNA, 19 nt, Artificial Sequence
  Description of Artificial Sequence: Synthetic oligonucleotide
  Antisense strand to SEQ ID NO: 2134900
acuaacagucuauuauaca

SEQ ID NO: 2134902 - RNA, 19 nt, Artificial Sequence
  Description of Artificial Sequence: Synthetic oligonucleotide
  Sense strand starting at position 3875 of SEQ ID NO: 1882614
guuaguauauaaccauacu

SEQ ID NO: 2134903 - RNA, 19 nt, Artificial Sequence
  Description of Artificial Sequence: Synthetic oligonucleotide
  Antisense strand to SEQ ID NO: 2134902
aguaugguuauauacuaac

SEQ ID NO: 2134904 - RNA, 19 nt, Artificial Sequence
  Description of Artificial Sequence: Synthetic oligonucleotide
  Sense strand starting at position 3909 of SEQ ID NO: 1882614
aguaaauuagcauagguga

SEQ ID NO: 2134905 - RNA, 19 nt, Artificial Sequence
  Description of Artificial Sequence: Synthetic oligonucleotide
  Antisense strand to SEQ ID NO: 2134904
ucaccuaugcuaauuuacu

SEQ ID NO: 2134906 - RNA, 19 nt, Artificial Sequence
  Description of Artificial Sequence: Synthetic oligonucleotide
  Sense strand starting at position 3916 of SEQ ID NO: 1882614
uagcauaggugauugguau

SEQ ID NO: 2134907 - RNA, 19 nt, Artificial Sequence
  Description of Artificial Sequence: Synthetic oligonucleotide
  Antisense strand to SEQ ID NO: 2134906
auaccaaucaccuaugcua

SEQ ID NO: 2134908 - RNA, 19 nt, Artificial Sequence
  Description of Artificial Sequence: Synthetic oligonucleotide
  Sense strand starting at position 3917 of SEQ ID NO: 1882614
agcauaggugauugguaua

SEQ ID NO: 2134909 - RNA, 19 nt, Artificial Sequence
  Description of Artificial Sequence: Synthetic oligonucleotide
  Antisense strand to SEQ ID NO: 2134908
uauaccaaucaccuaugcu

SEQ ID NO: 2134910 - RNA, 19 nt, Artificial Sequence
  Description of Artificial Sequence: Synthetic oligonucleotide
  Sense strand starting at position 3938 of SEQ ID NO: 1882614
auagauuaugagugcuguu

SEQ ID NO: 2134911 - RNA, 19 nt, Artificial Sequence
  Description of Artificial Sequence: Synthetic oligonucleotide
  Antisense strand to SEQ ID NO: 2134910
aacagcacucauaaucuau

SEQ ID NO: 2134912 - RNA, 19 nt, Artificial Sequence
  Description of Artificial Sequence: Synthetic oligonucleotide
  Sense strand starting at position 3951 of SEQ ID NO: 1882614
gcuguuagaguuuagaaau

SEQ ID NO: 2134913 - RNA, 19 nt, Artificial Sequence
  Description of Artificial Sequence: Synthetic oligonucleotide
  Antisense strand to SEQ ID NO: 2134912
auuucuaaacucuaacagc

SEQ ID NO: 2134914 - RNA, 19 nt, Artificial Sequence
  Description of Artificial Sequence: Synthetic oligonucleotide
  Sense strand starting at position 5 of SEQ ID NO: 1882616
auagucaauauguggguaa

SEQ ID NO: 2134915 - RNA, 19 nt, Artificial Sequence
  Description of Artificial Sequence: Synthetic oligonucleotide
  Antisense strand to SEQ ID NO: 2134914
uuacccacauauugacuau

SEQ ID NO: 2134916 - RNA, 19 nt, Artificial Sequence
  Description of Artificial Sequence: Synthetic oligonucleotide
  Sense strand starting at position 8 of SEQ ID NO: 1882616
gucaauauguggguaaaua

SEQ ID NO: 2134917 - RNA, 19 nt, Artificial Sequence
  Description of Artificial Sequence: Synthetic oligonucleotide
  Antisense strand to SEQ ID NO: 2134916
uauuuacccacauauugac

SEQ ID NO: 2134918 - RNA, 19 nt, Artificial Sequence
  Description of Artificial Sequence: Synthetic oligonucleotide
  Sense strand starting at position 99 of SEQ ID NO: 1882616
uaagcaucacuagaauggu

SEQ ID NO: 2134919 - RNA, 19 nt, Artificial Sequence
  Description of Artificial Sequence: Synthetic oligonucleotide
  Antisense strand to SEQ ID NO: 2134918
accauucuagugaugcuua

SEQ ID NO: 2134920 - RNA, 19 nt, Artificial Sequence
  Description of Artificial Sequence: Synthetic oligonucleotide
  Sense strand starting at position 158 of SEQ ID NO: 1882616
uugcaacagcucugugauc

SEQ ID NO: 2134921 - RNA, 19 nt, Artificial Sequence
  Description of Artificial Sequence: Synthetic oligonucleotide
  Antisense strand to SEQ ID NO: 2134920
gaucacagagcuguugcaa

SEQ ID NO: 2134922 - RNA, 19 nt, Artificial Sequence
  Description of Artificial Sequence: Synthetic oligonucleotide
  Sense strand starting at position 160 of SEQ ID NO: 1882616
gcaacagcucugugaucuu

SEQ ID NO: 2134923 - RNA, 19 nt, Artificial Sequence
  Description of Artificial Sequence: Synthetic oligonucleotide
  Antisense strand to SEQ ID NO: 2134922
aagaucacagagcuguugc

SEQ ID NO: 2134924 - RNA, 19 nt, Artificial Sequence
  Description of Artificial Sequence: Synthetic oligonucleotide
  Sense strand starting at position 163 of SEQ ID NO: 1882616
acagcucugugaucuuaca

SEQ ID NO: 2134925 - RNA, 19 nt, Artificial Sequence
  Description of Artificial Sequence: Synthetic oligonucleotide
  Antisense strand to SEQ ID NO: 2134924
uguaagaucacagagcugu

SEQ ID NO: 2134926 - RNA, 19 nt, Artificial Sequence
  Description of Artificial Sequence: Synthetic oligonucleotide
  Sense strand starting at position 197 of SEQ ID NO: 1882616
ugaucuccucuguaauaug

SEQ ID NO: 2134927 - RNA, 19 nt, Artificial Sequence
  Description of Artificial Sequence: Synthetic oligonucleotide
  Antisense strand to SEQ ID NO: 2134926
cauauuacagaggagauca

SEQ ID NO: 2134928 - RNA, 19 nt, Artificial Sequence
  Description of Artificial Sequence: Synthetic oligonucleotide
  Sense strand starting at position 427 of SEQ ID NO: 1882616
gguguaggccuguaaucuc

SEQ ID NO: 2134929 - RNA, 19 nt, Artificial Sequence
  Description of Artificial Sequence: Synthetic oligonucleotide
  Antisense strand to SEQ ID NO: 2134928
gagauuacaggccuacacc

SEQ ID NO: 2134930 - RNA, 19 nt, Artificial Sequence
  Description of Artificial Sequence: Synthetic oligonucleotide
  Sense strand starting at position 625 of SEQ ID NO: 1882616
caguaaaugcuagguauua

SEQ ID NO: 2134931 - RNA, 19 nt, Artificial Sequence
  Description of Artificial Sequence: Synthetic oligonucleotide
  Antisense strand to SEQ ID NO: 2134930
uaauaccuagcauuuacug

SEQ ID NO: 2134932 - RNA, 19 nt, Artificial Sequence
  Description of Artificial Sequence: Synthetic oligonucleotide
  Sense strand starting at position 626 of SEQ ID NO: 1882616
aguaaaugcuagguauuau

SEQ ID NO: 2134933 - RNA, 19 nt, Artificial Sequence
  Description of Artificial Sequence: Synthetic oligonucleotide
  Antisense strand to SEQ ID NO: 2134932
auaauaccuagcauuuacu

SEQ ID NO: 2134934 - RNA, 19 nt, Artificial Sequence
  Description of Artificial Sequence: Synthetic oligonucleotide
  Sense strand starting at position 753 of SEQ ID NO: 1882616
guacacaucucucuguguu

SEQ ID NO: 2134935 - RNA, 19 nt, Artificial Sequence
  Description of Artificial Sequence: Synthetic oligonucleotide
  Antisense strand to SEQ ID NO: 2134934
aacacagagagauguguac

SEQ ID NO: 2134936 - RNA, 19 nt, Artificial Sequence
  Description of Artificial Sequence: Synthetic oligonucleotide
  Sense strand starting at position 756 of SEQ ID NO: 1882616
cacaucucucuguguugga

SEQ ID NO: 2134937 - RNA, 19 nt, Artificial Sequence
  Description of Artificial Sequence: Synthetic oligonucleotide
  Antisense strand to SEQ ID NO: 2134936
uccaacacagagagaugug

SEQ ID NO: 2134938 - RNA, 19 nt, Artificial Sequence
  Description of Artificial Sequence: Synthetic oligonucleotide
  Sense strand starting at position 757 of SEQ ID NO: 1882616
acaucucucuguguuggaa

SEQ ID NO: 2134939 - RNA, 19 nt, Artificial Sequence
  Description of Artificial Sequence: Synthetic oligonucleotide
  Antisense strand to SEQ ID NO: 2134938
uuccaacacagagagaugu

SEQ ID NO: 2134940 - RNA, 19 nt, Artificial Sequence
  Description of Artificial Sequence: Synthetic oligonucleotide
  Sense strand starting at position 907 of SEQ ID NO: 1882616
cugacauucuugucaugau

SEQ ID NO: 2134941 - RNA, 19 nt, Artificial Sequence
  Description of Artificial Sequence: Synthetic oligonucleotide
  Antisense strand to SEQ ID NO: 2134940
aucaugacaagaaugucag

SEQ ID NO: 2134942 - RNA, 19 nt, Artificial Sequence
  Description of Artificial Sequence: Synthetic oligonucleotide
  Sense strand starting at position 1078 of SEQ ID NO: 1882616
cugucuaccguguaaauaa

SEQ ID NO: 2134943 - RNA, 19 nt, Artificial Sequence
  Description of Artificial Sequence: Synthetic oligonucleotide
  Antisense strand to SEQ ID NO: 2134942
uuauuuacacgguagacag

SEQ ID NO: 2134944 - RNA, 19 nt, Artificial Sequence
  Description of Artificial Sequence: Synthetic oligonucleotide
  Sense strand starting at position 1101 of SEQ ID NO: 1882616
acaauuaagucaccuuguu

SEQ ID NO: 2134945 - RNA, 19 nt, Artificial Sequence
  Description of Artificial Sequence: Synthetic oligonucleotide
  Antisense strand to SEQ ID NO: 2134944
aacaaggugacuuaauugu

SEQ ID NO: 2134946 - RNA, 19 nt, Artificial Sequence
  Description of Artificial Sequence: Synthetic oligonucleotide
  Sense strand starting at position 1167 of SEQ ID NO: 1882616
aguuaaacuucccuuuggu

SEQ ID NO: 2134947 - RNA, 19 nt, Artificial Sequence
  Description of Artificial Sequence: Synthetic oligonucleotide
  Antisense strand to SEQ ID NO: 2134946
accaaagggaaguuuaacu

SEQ ID NO: 2134948 - RNA, 19 nt, Artificial Sequence
  Description of Artificial Sequence: Synthetic oligonucleotide
  Sense strand starting at position 1180 of SEQ ID NO: 1882616
uuuggucuguugcuugaaa

SEQ ID NO: 2134949 - RNA, 19 nt, Artificial Sequence
  Description of Artificial Sequence: Synthetic oligonucleotide
  Antisense strand to SEQ ID NO: 2134948
uuucaagcaacagaccaaa

SEQ ID NO: 2134950 - RNA, 19 nt, Artificial Sequence
  Description of Artificial Sequence: Synthetic oligonucleotide
  Sense strand starting at position 1181 of SEQ ID NO: 1882616
uuggucuguugcuugaaau

SEQ ID NO: 2134951 - RNA, 19 nt, Artificial Sequence
  Description of Artificial Sequence: Synthetic oligonucleotide
  Antisense strand to SEQ ID NO: 2134950
auuucaagcaacagaccaa

SEQ ID NO: 2134952 - RNA, 19 nt, Artificial Sequence
  Description of Artificial Sequence: Synthetic oligonucleotide
  Sense strand starting at position 1182 of SEQ ID NO: 1882616
uggucuguugcuugaaaua

SEQ ID NO: 2134953 - RNA, 19 nt, Artificial Sequence
  Description of Artificial Sequence: Synthetic oligonucleotide
  Antisense strand to SEQ ID NO: 2134952
uauuucaagcaacagacca

SEQ ID NO: 2134954 - RNA, 19 nt, Artificial Sequence
  Description of Artificial Sequence: Synthetic oligonucleotide
  Sense strand starting at position 1289 of SEQ ID NO: 1882616
guaaauguuuauuccaaag

SEQ ID NO: 2134955 - RNA, 19 nt, Artificial Sequence
  Description of Artificial Sequence: Synthetic oligonucleotide
  Antisense strand to SEQ ID NO: 2134954
cuuuggaauaaacauuuac

SEQ ID NO: 2134956 - RNA, 19 nt, Artificial Sequence
  Description of Artificial Sequence: Synthetic oligonucleotide
  Sense strand starting at position 1498 of SEQ ID NO: 1882616
aagcguggcgcuguucaaa

SEQ ID NO: 2134957 - RNA, 19 nt, Artificial Sequence
  Description of Artificial Sequence: Synthetic oligonucleotide
  Antisense strand to SEQ ID NO: 2134956
uuugaacagcgccacgcuu

SEQ ID NO: 2134958 - RNA, 19 nt, Artificial Sequence
  Description of Artificial Sequence: Synthetic oligonucleotide
  Sense strand starting at position 1640 of SEQ ID NO: 1882616
gaaguaguuccacaagcca

SEQ ID NO: 2134959 - RNA, 19 nt, Artificial Sequence
  Description of Artificial Sequence: Synthetic oligonucleotide
  Antisense strand to SEQ ID NO: 2134958
uggcuuguggaacuacuuc

SEQ ID NO: 2134960 - RNA, 19 nt, Artificial Sequence
  Description of Artificial Sequence: Synthetic oligonucleotide
  Sense strand starting at position 1753 of SEQ ID NO: 1882616
agaggacuuaccugugcca

SEQ ID NO: 2134961 - RNA, 19 nt, Artificial Sequence
  Description of Artificial Sequence: Synthetic oligonucleotide
  Antisense strand to SEQ ID NO: 2134960
uggcacagguaaguccucu

SEQ ID NO: 2134962 - RNA, 19 nt, Artificial Sequence
  Description of Artificial Sequence: Synthetic oligonucleotide
  Sense strand starting at position 2106 of SEQ ID NO: 1882616
aguagugacuguucucuaa

SEQ ID NO: 2134963 - RNA, 19 nt, Artificial Sequence
  Description of Artificial Sequence: Synthetic oligonucleotide
  Antisense strand to SEQ ID NO: 2134962
uuagagaacagucacuacu

SEQ ID NO: 2134964 - RNA, 19 nt, Artificial Sequence
  Description of Artificial Sequence: Synthetic oligonucleotide
  Sense strand starting at position 2108 of SEQ ID NO: 1882616
uagugacuguucucuaagu

SEQ ID NO: 2134965 - RNA, 19 nt, Artificial Sequence
  Description of Artificial Sequence: Synthetic oligonucleotide
  Antisense strand to SEQ ID NO: 2134964
acuuagagaacagucacua

SEQ ID NO: 2134966 - RNA, 19 nt, Artificial Sequence
  Description of Artificial Sequence: Synthetic oligonucleotide
  Sense strand starting at position 2110 of SEQ ID NO: 1882616
gugacuguucucuaaguga

SEQ ID NO: 2134967 - RNA, 19 nt, Artificial Sequence
  Description of Artificial Sequence: Synthetic oligonucleotide
  Antisense strand to SEQ ID NO: 2134966
ucacuuagagaacagucac

SEQ ID NO: 2134968 - RNA, 19 nt, Artificial Sequence
  Description of Artificial Sequence: Synthetic oligonucleotide
  Sense strand starting at position 2130 of SEQ ID NO: 1882616
uguguuaccuguuccugga

SEQ ID NO: 2134969 - RNA, 19 nt, Artificial Sequence
  Description of Artificial Sequence: Synthetic oligonucleotide
  Antisense strand to SEQ ID NO: 2134968
uccaggaacagguaacaca

SEQ ID NO: 2134970 - RNA, 19 nt, Artificial Sequence
  Description of Artificial Sequence: Synthetic oligonucleotide
  Sense strand starting at position 2388 of SEQ ID NO: 1882616
ucagauucucucggaggca

SEQ ID NO: 2134971 - RNA, 19 nt, Artificial Sequence
  Description of Artificial Sequence: Synthetic oligonucleotide
  Antisense strand to SEQ ID NO: 2134970
ugccuccgagagaaucuga

SEQ ID NO: 2134972 - RNA, 19 nt, Artificial Sequence
  Description of Artificial Sequence: Synthetic oligonucleotide
  Sense strand starting at position 2455 of SEQ ID NO: 1882616
gguggacugugaguggaaa

SEQ ID NO: 2134973 - RNA, 19 nt, Artificial Sequence
  Description of Artificial Sequence: Synthetic oligonucleotide
  Antisense strand to SEQ ID NO: 2134972
uuuccacucacaguccacc

SEQ ID NO: 2134974 - RNA, 19 nt, Artificial Sequence
  Description of Artificial Sequence: Synthetic oligonucleotide
  Sense strand starting at position 2538 of SEQ ID NO: 1882616
gccacaguuccaugacaga

SEQ ID NO: 2134975 - RNA, 19 nt, Artificial Sequence
  Description of Artificial Sequence: Synthetic oligonucleotide
  Antisense strand to SEQ ID NO: 2134974
ucugucauggaacuguggc

SEQ ID NO: 2134976 - RNA, 19 nt, Artificial Sequence
  Description of Artificial Sequence: Synthetic oligonucleotide
  Sense strand starting at position 2833 of SEQ ID NO: 1882616
ggacaagagugagaauuau

SEQ ID NO: 2134977 - RNA, 19 nt, Artificial Sequence
  Description of Artificial Sequence: Synthetic oligonucleotide
  Antisense strand to SEQ ID NO: 2134976
auaauucucacucuugucc

SEQ ID NO: 2134978 - RNA, 19 nt, Artificial Sequence
  Description of Artificial Sequence: Synthetic oligonucleotide
  Sense strand starting at position 2839 of SEQ ID NO: 1882616
gagugagaauuauucucaa

SEQ ID NO: 2134979 - RNA, 19 nt, Artificial Sequence
  Description of Artificial Sequence: Synthetic oligonucleotide
  Antisense strand to SEQ ID NO: 2134978
uugagaauaauucucacuc

SEQ ID NO: 2134980 - RNA, 19 nt, Artificial Sequence
  Description of Artificial Sequence: Synthetic oligonucleotide
  Sense strand starting at position 3098 of SEQ ID NO: 1882616
ucuauuuccuuugaucagu

SEQ ID NO: 2134981 - RNA, 19 nt, Artificial Sequence
  Description of Artificial Sequence: Synthetic oligonucleotide
  Antisense strand to SEQ ID NO: 2134980
acugaucaaaggaaauaga

SEQ ID NO: 2134982 - RNA, 19 nt, Artificial Sequence
  Description of Artificial Sequence: Synthetic oligonucleotide
  Sense strand starting at position 3277 of SEQ ID NO: 1882616
ucugguguccuuggagaac

SEQ ID NO: 2134983 - RNA, 19 nt, Artificial Sequence
  Description of Artificial Sequence: Synthetic oligonucleotide
  Antisense strand to SEQ ID NO: 2134982
guucuccaaggacaccaga

SEQ ID NO: 2134984 - RNA, 19 nt, Artificial Sequence
  Description of Artificial Sequence: Synthetic oligonucleotide
  Sense strand starting at position 3280 of SEQ ID NO: 1882616
gguguccuuggagaaccau

SEQ ID NO: 2134985 - RNA, 19 nt, Artificial Sequence
  Description of Artificial Sequence: Synthetic oligonucleotide
  Antisense strand to SEQ ID NO: 2134984
augguucuccaaggacacc

SEQ ID NO: 2134986 - RNA, 19 nt, Artificial Sequence
  Description of Artificial Sequence: Synthetic oligonucleotide
  Sense strand starting at position 3341 of SEQ ID NO: 1882616
gucauuaaacuguaaguau

SEQ ID NO: 2134987 - RNA, 19 nt, Artificial Sequence
  Description of Artificial Sequence: Synthetic oligonucleotide
  Antisense strand to SEQ ID NO: 2134986
auacuuacaguuuaaugac

SEQ ID NO: 2134988 - RNA, 19 nt, Artificial Sequence
  Description of Artificial Sequence: Synthetic oligonucleotide
  Sense strand starting at position 3613 of SEQ ID NO: 1882616
guccuuuagcauuaggcau

SEQ ID NO: 2134989 - RNA, 19 nt, Artificial Sequence
  Description of Artificial Sequence: Synthetic oligonucleotide
  Antisense strand to SEQ ID NO: 2134988
augccuaaugcuaaaggac

SEQ ID NO: 2134990 - RNA, 19 nt, Artificial Sequence
  Description of Artificial Sequence: Synthetic oligonucleotide
  Sense strand starting at position 3709 of SEQ ID NO: 1882616
caguguucucacuguagag

SEQ ID NO: 2134991 - RNA, 19 nt, Artificial Sequence
  Description of Artificial Sequence: Synthetic oligonucleotide
  Antisense strand to SEQ ID NO: 2134990
cucuacagugagaacacug

SEQ ID NO: 2134992 - RNA, 19 nt, Artificial Sequence
  Description of Artificial Sequence: Synthetic oligonucleotide
  Sense strand starting at position 3713 of SEQ ID NO: 1882616
guucucacuguagagaagu

SEQ ID NO: 2134993 - RNA, 19 nt, Artificial Sequence
  Description of Artificial Sequence: Synthetic oligonucleotide
  Antisense strand to SEQ ID NO: 2134992
acuucucuacagugagaac

SEQ ID NO: 2134994 - RNA, 19 nt, Artificial Sequence
  Description of Artificial Sequence: Synthetic oligonucleotide
  Sense strand starting at position 6 of SEQ ID NO: 1882615
uaagcaucacuagaauggu

SEQ ID NO: 2134995 - RNA, 19 nt, Artificial Sequence
  Description of Artificial Sequence: Synthetic oligonucleotide
  Antisense strand to SEQ ID NO: 2134994
accauucuagugaugcuua

SEQ ID NO: 2134996 - RNA, 19 nt, Artificial Sequence
  Description of Artificial Sequence: Synthetic oligonucleotide
  Sense strand starting at position 65 of SEQ ID NO: 1882615
uugcaacagcucugugauc

SEQ ID NO: 2134997 - RNA, 19 nt, Artificial Sequence
  Description of Artificial Sequence: Synthetic oligonucleotide
  Antisense strand to SEQ ID NO: 2134996
gaucacagagcuguugcaa

SEQ ID NO: 2134998 - RNA, 19 nt, Artificial Sequence
  Description of Artificial Sequence: Synthetic oligonucleotide
  Sense strand starting at position 67 of SEQ ID NO: 1882615
gcaacagcucugugaucuu

SEQ ID NO: 2134999 - RNA, 19 nt, Artificial Sequence
  Description of Artificial Sequence: Synthetic oligonucleotide
  Antisense strand to SEQ ID NO: 2134998
aagaucacagagcuguugc

SEQ ID NO: 2135000 - RNA, 19 nt, Artificial Sequence
  Description of Artificial Sequence: Synthetic oligonucleotide
  Sense strand starting at position 70 of SEQ ID NO: 1882615
acagcucugugaucuuaca

SEQ ID NO: 2135001 - RNA, 19 nt, Artificial Sequence
  Description of Artificial Sequence: Synthetic oligonucleotide
  Antisense strand to SEQ ID NO: 2135000
uguaagaucacagagcugu

SEQ ID NO: 2135002 - RNA, 19 nt, Artificial Sequence
  Description of Artificial Sequence: Synthetic oligonucleotide
  Sense strand starting at position 104 of SEQ ID NO: 1882615
ugaucuccucuguaauaug

SEQ ID NO: 2135003 - RNA, 19 nt, Artificial Sequence
  Description of Artificial Sequence: Synthetic oligonucleotide
  Antisense strand to SEQ ID NO: 2135002
cauauuacagaggagauca

SEQ ID NO: 2135004 - RNA, 19 nt, Artificial Sequence
  Description of Artificial Sequence: Synthetic oligonucleotide
  Sense strand starting at position 334 of SEQ ID NO: 1882615
gguguaggccuguaaucuc

SEQ ID NO: 2135005 - RNA, 19 nt, Artificial Sequence
  Description of Artificial Sequence: Synthetic oligonucleotide
  Antisense strand to SEQ ID NO: 2135004
gagauuacaggccuacacc

SEQ ID NO: 2135006 - RNA, 19 nt, Artificial Sequence
  Description of Artificial Sequence: Synthetic oligonucleotide
  Sense strand starting at position 532 of SEQ ID NO: 1882615
caguaaaugcuagguauua

SEQ ID NO: 2135007 - RNA, 19 nt, Artificial Sequence
  Description of Artificial Sequence: Synthetic oligonucleotide
  Antisense strand to SEQ ID NO: 2135006
uaauaccuagcauuuacug

SEQ ID NO: 2135008 - RNA, 19 nt, Artificial Sequence
  Description of Artificial Sequence: Synthetic oligonucleotide
  Sense strand starting at position 533 of SEQ ID NO: 1882615
aguaaaugcuagguauuau

SEQ ID NO: 2135009 - RNA, 19 nt, Artificial Sequence
  Description of Artificial Sequence: Synthetic oligonucleotide
  Antisense strand to SEQ ID NO: 2135008
auaauaccuagcauuuacu

SEQ ID NO: 2135010 - RNA, 19 nt, Artificial Sequence
  Description of Artificial Sequence: Synthetic oligonucleotide
  Sense strand starting at position 660 of SEQ ID NO: 1882615
guacacaucucucuguguu

SEQ ID NO: 2135011 - RNA, 19 nt, Artificial Sequence
  Description of Artificial Sequence: Synthetic oligonucleotide
  Antisense strand to SEQ ID NO: 2135010
aacacagagagauguguac

SEQ ID NO: 2135012 - RNA, 19 nt, Artificial Sequence
  Description of Artificial Sequence: Synthetic oligonucleotide
  Sense strand starting at position 663 of SEQ ID NO: 1882615
cacaucucucuguguugga

SEQ ID NO: 2135013 - RNA, 19 nt, Artificial Sequence
  Description of Artificial Sequence: Synthetic oligonucleotide
  Antisense strand to SEQ ID NO: 2135012
uccaacacagagagaugug

SEQ ID NO: 2135014 - RNA, 19 nt, Artificial Sequence
  Description of Artificial Sequence: Synthetic oligonucleotide
  Sense strand starting at position 664 of SEQ ID NO: 1882615
acaucucucuguguuggaa

SEQ ID NO: 2135015 - RNA, 19 nt, Artificial Sequence
  Description of Artificial Sequence: Synthetic oligonucleotide
  Antisense strand to SEQ ID NO: 2135014
uuccaacacagagagaugu

SEQ ID NO: 2135016 - RNA, 19 nt, Artificial Sequence
  Description of Artificial Sequence: Synthetic oligonucleotide
  Sense strand starting at position 814 of SEQ ID NO: 1882615
cugacauucuugucaugau

SEQ ID NO: 2135017 - RNA, 19 nt, Artificial Sequence
  Description of Artificial Sequence: Synthetic oligonucleotide
  Antisense strand to SEQ ID NO: 2135016
aucaugacaagaaugucag

SEQ ID NO: 2135018 - RNA, 19 nt, Artificial Sequence
  Description of Artificial Sequence: Synthetic oligonucleotide
  Sense strand starting at position 985 of SEQ ID NO: 1882615
cugucuaccguguaaauaa

SEQ ID NO: 2135019 - RNA, 19 nt, Artificial Sequence
  Description of Artificial Sequence: Synthetic oligonucleotide
  Antisense strand to SEQ ID NO: 2135018
uuauuuacacgguagacag

SEQ ID NO: 2135020 - RNA, 19 nt, Artificial Sequence
  Description of Artificial Sequence: Synthetic oligonucleotide
  Sense strand starting at position 1008 of SEQ ID NO: 1882615
acaauuaagucaccuuguu

SEQ ID NO: 2135021 - RNA, 19 nt, Artificial Sequence
  Description of Artificial Sequence: Synthetic oligonucleotide
  Antisense strand to SEQ ID NO: 2135020
aacaaggugacuuaauugu

SEQ ID NO: 2135022 - RNA, 19 nt, Artificial Sequence
  Description of Artificial Sequence: Synthetic oligonucleotide
  Sense strand starting at position 1074 of SEQ ID NO: 1882615
aguuaaacuucccuuuggu

SEQ ID NO: 2135023 - RNA, 19 nt, Artificial Sequence
  Description of Artificial Sequence: Synthetic oligonucleotide
  Antisense strand to SEQ ID NO: 2135022
accaaagggaaguuuaacu

SEQ ID NO: 2135024 - RNA, 19 nt, Artificial Sequence
  Description of Artificial Sequence: Synthetic oligonucleotide
  Sense strand starting at position 1087 of SEQ ID NO: 1882615
uuuggucuguugcuugaaa

SEQ ID NO: 2135025 - RNA, 19 nt, Artificial Sequence
  Description of Artificial Sequence: Synthetic oligonucleotide
  Antisense strand to SEQ ID NO: 2135024
uuucaagcaacagaccaaa

SEQ ID NO: 2135026 - RNA, 19 nt, Artificial Sequence
  Description of Artificial Sequence: Synthetic oligonucleotide
  Sense strand starting at position 1088 of SEQ ID NO: 1882615
uuggucuguugcuugaaau

SEQ ID NO: 2135027 - RNA, 19 nt, Artificial Sequence
  Description of Artificial Sequence: Synthetic oligonucleotide
  Antisense strand to SEQ ID NO: 2135026
auuucaagcaacagaccaa

SEQ ID NO: 2135028 - RNA, 19 nt, Artificial Sequence
  Description of Artificial Sequence: Synthetic oligonucleotide
  Sense strand starting at position 1089 of SEQ ID NO: 1882615
uggucuguugcuugaaaua

SEQ ID NO: 2135029 - RNA, 19 nt, Artificial Sequence
  Description of Artificial Sequence: Synthetic oligonucleotide
  Antisense strand to SEQ ID NO: 2135028
uauuucaagcaacagacca

SEQ ID NO: 2135030 - RNA, 19 nt, Artificial Sequence
  Description of Artificial Sequence: Synthetic oligonucleotide
  Sense strand starting at position 1196 of SEQ ID NO: 1882615
guaaauguuuauuccaaag

SEQ ID NO: 2135031 - RNA, 19 nt, Artificial Sequence
  Description of Artificial Sequence: Synthetic oligonucleotide
  Antisense strand to SEQ ID NO: 2135030
cuuuggaauaaacauuuac

SEQ ID NO: 2135032 - RNA, 19 nt, Artificial Sequence
  Description of Artificial Sequence: Synthetic oligonucleotide
  Sense strand starting at position 1405 of SEQ ID NO: 1882615
aagcguggcgcuguucaaa

SEQ ID NO: 2135033 - RNA, 19 nt, Artificial Sequence
  Description of Artificial Sequence: Synthetic oligonucleotide
  Antisense strand to SEQ ID NO: 2135032
uuugaacagcgccacgcuu

SEQ ID NO: 2135034 - RNA, 19 nt, Artificial Sequence
  Description of Artificial Sequence: Synthetic oligonucleotide
  Sense strand starting at position 1547 of SEQ ID NO: 1882615
gaaguaguuccacaagcca

SEQ ID NO: 2135035 - RNA, 19 nt, Artificial Sequence
  Description of Artificial Sequence: Synthetic oligonucleotide
  Antisense strand to SEQ ID NO: 2135034
uggcuuguggaacuacuuc

SEQ ID NO: 2135036 - RNA, 19 nt, Artificial Sequence
  Description of Artificial Sequence: Synthetic oligonucleotide
  Sense strand starting at position 1660 of SEQ ID NO: 1882615
agaggacuuaccugugcca

SEQ ID NO: 2135037 - RNA, 19 nt, Artificial Sequence
  Description of Artificial Sequence: Synthetic oligonucleotide
  Antisense strand to SEQ ID NO: 2135036
uggcacagguaaguccucu

SEQ ID NO: 2135038 - RNA, 19 nt, Artificial Sequence
  Description of Artificial Sequence: Synthetic oligonucleotide
  Sense strand starting at position 2013 of SEQ ID NO: 1882615
aguagugacuguucucuaa

SEQ ID NO: 2135039 - RNA, 19 nt, Artificial Sequence
  Description of Artificial Sequence: Synthetic oligonucleotide
  Antisense strand to SEQ ID NO: 2135038
uuagagaacagucacuacu

SEQ ID NO: 2135040 - RNA, 19 nt, Artificial Sequence
  Description of Artificial Sequence: Synthetic oligonucleotide
  Sense strand starting at position 2015 of SEQ ID NO: 1882615
uagugacuguucucuaagu

SEQ ID NO: 2135041 - RNA, 19 nt, Artificial Sequence
  Description of Artificial Sequence: Synthetic oligonucleotide
  Antisense strand to SEQ ID NO: 2135040
acuuagagaacagucacua

SEQ ID NO: 2135042 - RNA, 19 nt, Artificial Sequence
  Description of Artificial Sequence: Synthetic oligonucleotide
  Sense strand starting at position 2017 of SEQ ID NO: 1882615
gugacuguucucuaaguga

SEQ ID NO: 2135043 - RNA, 19 nt, Artificial Sequence
  Description of Artificial Sequence: Synthetic oligonucleotide
  Antisense strand to SEQ ID NO: 2135042
ucacuuagagaacagucac

SEQ ID NO: 2135044 - RNA, 19 nt, Artificial Sequence
  Description of Artificial Sequence: Synthetic oligonucleotide
  Sense strand starting at position 2037 of SEQ ID NO: 1882615
uguguuaccuguuccugga

SEQ ID NO: 2135045 - RNA, 19 nt, Artificial Sequence
  Description of Artificial Sequence: Synthetic oligonucleotide
  Antisense strand to SEQ ID NO: 2135044
uccaggaacagguaacaca

SEQ ID NO: 2135046 - RNA, 19 nt, Artificial Sequence
  Description of Artificial Sequence: Synthetic oligonucleotide
  Sense strand starting at position 2295 of SEQ ID NO: 1882615
ucagauucucucggaggca

SEQ ID NO: 2135047 - RNA, 19 nt, Artificial Sequence
  Description of Artificial Sequence: Synthetic oligonucleotide
  Antisense strand to SEQ ID NO: 2135046
ugccuccgagagaaucuga

SEQ ID NO: 2135048 - RNA, 19 nt, Artificial Sequence
  Description of Artificial Sequence: Synthetic oligonucleotide
  Sense strand starting at position 2362 of SEQ ID NO: 1882615
gguggacugugaguggaaa

SEQ ID NO: 2135049 - RNA, 19 nt, Artificial Sequence
  Description of Artificial Sequence: Synthetic oligonucleotide
  Antisense strand to SEQ ID NO: 2135048
uuuccacucacaguccacc

SEQ ID NO: 2135050 - RNA, 19 nt, Artificial Sequence
  Description of Artificial Sequence: Synthetic oligonucleotide
  Sense strand starting at position 2445 of SEQ ID NO: 1882615
gccacaguuccaugacaga

SEQ ID NO: 2135051 - RNA, 19 nt, Artificial Sequence
  Description of Artificial Sequence: Synthetic oligonucleotide
  Antisense strand to SEQ ID NO: 2135050
ucugucauggaacuguggc

SEQ ID NO: 2135052 - RNA, 19 nt, Artificial Sequence
  Description of Artificial Sequence: Synthetic oligonucleotide
  Sense strand starting at position 2448 of SEQ ID NO: 1882615
acaguuccaugacagauga

SEQ ID NO: 2135053 - RNA, 19 nt, Artificial Sequence
  Description of Artificial Sequence: Synthetic oligonucleotide
  Antisense strand to SEQ ID NO: 2135052
ucaucugucauggaacugu

SEQ ID NO: 2135054 - RNA, 19 nt, Artificial Sequence
  Description of Artificial Sequence: Synthetic oligonucleotide
  Sense strand starting at position 2740 of SEQ ID NO: 1882615
ggacaagagugagaauuau

SEQ ID NO: 2135055 - RNA, 19 nt, Artificial Sequence
  Description of Artificial Sequence: Synthetic oligonucleotide
  Antisense strand to SEQ ID NO: 2135054
auaauucucacucuugucc

SEQ ID NO: 2135056 - RNA, 19 nt, Artificial Sequence
  Description of Artificial Sequence: Synthetic oligonucleotide
  Sense strand starting at position 2746 of SEQ ID NO: 1882615
gagugagaauuauucucaa

SEQ ID NO: 2135057 - RNA, 19 nt, Artificial Sequence
  Description of Artificial Sequence: Synthetic oligonucleotide
  Antisense strand to SEQ ID NO: 2135056
uugagaauaauucucacuc

SEQ ID NO: 2135058 - RNA, 19 nt, Artificial Sequence
  Description of Artificial Sequence: Synthetic oligonucleotide
  Sense strand starting at position 2906 of SEQ ID NO: 1882615
gggucuguguucccaucuu

SEQ ID NO: 2135059 - RNA, 19 nt, Artificial Sequence
  Description of Artificial Sequence: Synthetic oligonucleotide
  Antisense strand to SEQ ID NO: 2135058
aagaugggaacacagaccc

SEQ ID NO: 2135060 - RNA, 19 nt, Artificial Sequence
  Description of Artificial Sequence: Synthetic oligonucleotide
  Sense strand starting at position 3005 of SEQ ID NO: 1882615
ucuauuuccuuugaucagu

SEQ ID NO: 2135061 - RNA, 19 nt, Artificial Sequence
  Description of Artificial Sequence: Synthetic oligonucleotide
  Antisense strand to SEQ ID NO: 2135060
acugaucaaaggaaauaga

SEQ ID NO: 2135062 - RNA, 19 nt, Artificial Sequence
  Description of Artificial Sequence: Synthetic oligonucleotide
  Sense strand starting at position 3184 of SEQ ID NO: 1882615
ucugguguccuuggagaac

SEQ ID NO: 2135063 - RNA, 19 nt, Artificial Sequence
  Description of Artificial Sequence: Synthetic oligonucleotide
  Antisense strand to SEQ ID NO: 2135062
guucuccaaggacaccaga

SEQ ID NO: 2135064 - RNA, 19 nt, Artificial Sequence
  Description of Artificial Sequence: Synthetic oligonucleotide
  Sense strand starting at position 3187 of SEQ ID NO: 1882615
gguguccuuggagaaccau

SEQ ID NO: 2135065 - RNA, 19 nt, Artificial Sequence
  Description of Artificial Sequence: Synthetic oligonucleotide
  Antisense strand to SEQ ID NO: 2135064
augguucuccaaggacacc

SEQ ID NO: 2135066 - RNA, 19 nt, Artificial Sequence
  Description of Artificial Sequence: Synthetic oligonucleotide
  Sense strand starting at position 3248 of SEQ ID NO: 1882615
gucauuaaacuguaaguau

SEQ ID NO: 2135067 - RNA, 19 nt, Artificial Sequence
  Description of Artificial Sequence: Synthetic oligonucleotide
  Antisense strand to SEQ ID NO: 2135066
auacuuacaguuuaaugac

SEQ ID NO: 2135068 - RNA, 19 nt, Artificial Sequence
  Description of Artificial Sequence: Synthetic oligonucleotide
  Sense strand starting at position 3520 of SEQ ID NO: 1882615
guccuuuagcauuaggcau

SEQ ID NO: 2135069 - RNA, 19 nt, Artificial Sequence
  Description of Artificial Sequence: Synthetic oligonucleotide
  Antisense strand to SEQ ID NO: 2135068
augccuaaugcuaaaggac

SEQ ID NO: 2135070 - RNA, 19 nt, Artificial Sequence
  Description of Artificial Sequence: Synthetic oligonucleotide
  Sense strand starting at position 3616 of SEQ ID NO: 1882615
caguguucucacuguagag

SEQ ID NO: 2135071 - RNA, 19 nt, Artificial Sequence
  Description of Artificial Sequence: Synthetic oligonucleotide
  Antisense strand to SEQ ID NO: 2135070
cucuacagugagaacacug

SEQ ID NO: 2135072 - RNA, 19 nt, Artificial Sequence
  Description of Artificial Sequence: Synthetic oligonucleotide
  Sense strand starting at position 3620 of SEQ ID NO: 1882615
guucucacuguagagaagu

SEQ ID NO: 2135073 - RNA, 19 nt, Artificial Sequence
  Description of Artificial Sequence: Synthetic oligonucleotide
  Antisense strand to SEQ ID NO: 2135072
acuucucuacagugagaac

SEQ ID NO: 2135074 - RNA, 19 nt, Artificial Sequence
  Description of Artificial Sequence: Synthetic oligonucleotide
  Sense strand starting at position 61 of SEQ ID NO: 1882617
ugguaaacuugacccacau

SEQ ID NO: 2135075 - RNA, 19 nt, Artificial Sequence
  Description of Artificial Sequence: Synthetic oligonucleotide
  Antisense strand to SEQ ID NO: 2135074
augugggucaaguuuacca

SEQ ID NO: 2135076 - RNA, 19 nt, Artificial Sequence
  Description of Artificial Sequence: Synthetic oligonucleotide
  Sense strand starting at position 194 of SEQ ID NO: 1882617
gaaguuccugaacgauaaa

SEQ ID NO: 2135077 - RNA, 19 nt, Artificial Sequence
  Description of Artificial Sequence: Synthetic oligonucleotide
  Antisense strand to SEQ ID NO: 2135076
uuuaucguucaggaacuuc

SEQ ID NO: 2135078 - RNA, 19 nt, Artificial Sequence
  Description of Artificial Sequence: Synthetic oligonucleotide
  Sense strand starting at position 414 of SEQ ID NO: 1882617
gagggaagagucugucauu

SEQ ID NO: 2135079 - RNA, 19 nt, Artificial Sequence
  Description of Artificial Sequence: Synthetic oligonucleotide
  Antisense strand to SEQ ID NO: 2135078
aaugacagacucuucccuc

SEQ ID NO: 2135080 - RNA, 19 nt, Artificial Sequence
  Description of Artificial Sequence: Synthetic oligonucleotide
  Sense strand starting at position 415 of SEQ ID NO: 1882617
agggaagagucugucauua

SEQ ID NO: 2135081 - RNA, 19 nt, Artificial Sequence
  Description of Artificial Sequence: Synthetic oligonucleotide
  Antisense strand to SEQ ID NO: 2135080
uaaugacagacucuucccu

SEQ ID NO: 2135082 - RNA, 19 nt, Artificial Sequence
  Description of Artificial Sequence: Synthetic oligonucleotide
  Sense strand starting at position 420 of SEQ ID NO: 1882617
agagucugucauuaacacu

SEQ ID NO: 2135083 - RNA, 19 nt, Artificial Sequence
  Description of Artificial Sequence: Synthetic oligonucleotide
  Antisense strand to SEQ ID NO: 2135082
aguguuaaugacagacucu

SEQ ID NO: 2135084 - RNA, 19 nt, Artificial Sequence
  Description of Artificial Sequence: Synthetic oligonucleotide
  Sense strand starting at position 576 of SEQ ID NO: 1882617
aaagaaucgcuguggaaau

SEQ ID NO: 2135085 - RNA, 19 nt, Artificial Sequence
  Description of Artificial Sequence: Synthetic oligonucleotide
  Antisense strand to SEQ ID NO: 2135084
auuuccacagcgauucuuu

SEQ ID NO: 2135086 - RNA, 19 nt, Artificial Sequence
  Description of Artificial Sequence: Synthetic oligonucleotide
  Sense strand starting at position 578 of SEQ ID NO: 1882617
agaaucgcuguggaaauga

SEQ ID NO: 2135087 - RNA, 19 nt, Artificial Sequence
  Description of Artificial Sequence: Synthetic oligonucleotide
  Antisense strand to SEQ ID NO: 2135086
ucauuuccacagcgauucu

SEQ ID NO: 2135088 - RNA, 19 nt, Artificial Sequence
  Description of Artificial Sequence: Synthetic oligonucleotide
  Sense strand starting at position 583 of SEQ ID NO: 1882617
cgcuguggaaaugaauaaa

SEQ ID NO: 2135089 - RNA, 19 nt, Artificial Sequence
  Description of Artificial Sequence: Synthetic oligonucleotide
  Antisense strand to SEQ ID NO: 2135088
uuuauucauuuccacagcg

SEQ ID NO: 2135090 - RNA, 19 nt, Artificial Sequence
  Description of Artificial Sequence: Synthetic oligonucleotide
  Sense strand starting at position 612 of SEQ ID NO: 1882617
aggcuaauuccagggaggu

SEQ ID NO: 2135091 - RNA, 19 nt, Artificial Sequence
  Description of Artificial Sequence: Synthetic oligonucleotide
  Antisense strand to SEQ ID NO: 2135090
accucccuggaauuagccu

SEQ ID NO: 2135092 - RNA, 19 nt, Artificial Sequence
  Description of Artificial Sequence: Synthetic oligonucleotide
  Sense strand starting at position 613 of SEQ ID NO: 1882617
ggcuaauuccagggaggua

SEQ ID NO: 2135093 - RNA, 19 nt, Artificial Sequence
  Description of Artificial Sequence: Synthetic oligonucleotide
  Antisense strand to SEQ ID NO: 2135092
uaccucccuggaauuagcc

SEQ ID NO: 2135094 - RNA, 19 nt, Artificial Sequence
  Description of Artificial Sequence: Synthetic oligonucleotide
  Sense strand starting at position 870 of SEQ ID NO: 1882617
guaagaugguaaucucucu

SEQ ID NO: 2135095 - RNA, 19 nt, Artificial Sequence
  Description of Artificial Sequence: Synthetic oligonucleotide
  Antisense strand to SEQ ID NO: 2135094
agagagauuaccaucuuac

SEQ ID NO: 2135096 - RNA, 19 nt, Artificial Sequence
  Description of Artificial Sequence: Synthetic oligonucleotide
  Sense strand starting at position 1215 of SEQ ID NO: 1882617
caaagauugccauaggugu

SEQ ID NO: 2135097 - RNA, 19 nt, Artificial Sequence
  Description of Artificial Sequence: Synthetic oligonucleotide
  Antisense strand to SEQ ID NO: 2135096
acaccuauggcaaucuuug

SEQ ID NO: 2135098 - RNA, 19 nt, Artificial Sequence
  Description of Artificial Sequence: Synthetic oligonucleotide
  Sense strand starting at position 1255 of SEQ ID NO: 1882617
gggaaagaagugcaauguu

SEQ ID NO: 2135099 - RNA, 19 nt, Artificial Sequence
  Description of Artificial Sequence: Synthetic oligonucleotide
  Antisense strand to SEQ ID NO: 2135098
aacauugcacuucuuuccc

SEQ ID NO: 2135100 - RNA, 19 nt, Artificial Sequence
  Description of Artificial Sequence: Synthetic oligonucleotide
  Sense strand starting at position 1258 of SEQ ID NO: 1882617
aaagaagugcaauguuaaa

SEQ ID NO: 2135101 - RNA, 19 nt, Artificial Sequence
  Description of Artificial Sequence: Synthetic oligonucleotide
  Antisense strand to SEQ ID NO: 2135100
uuuaacauugcacuucuuu

SEQ ID NO: 2135102 - RNA, 19 nt, Artificial Sequence
  Description of Artificial Sequence: Synthetic oligonucleotide
  Sense strand starting at position 1355 of SEQ ID NO: 1882617
uuaagcacugcuugggaua

SEQ ID NO: 2135103 - RNA, 19 nt, Artificial Sequence
  Description of Artificial Sequence: Synthetic oligonucleotide
  Antisense strand to SEQ ID NO: 2135102
uaucccaagcagugcuuaa

SEQ ID NO: 2135104 - RNA, 19 nt, Artificial Sequence
  Description of Artificial Sequence: Synthetic oligonucleotide
  Sense strand starting at position 1430 of SEQ ID NO: 1882617
gauggaagugacugcuaaa

SEQ ID NO: 2135105 - RNA, 19 nt, Artificial Sequence
  Description of Artificial Sequence: Synthetic oligonucleotide
  Antisense strand to SEQ ID NO: 2135104
uuuagcagucacuuccauc

SEQ ID NO: 2135106 - RNA, 19 nt, Artificial Sequence
  Description of Artificial Sequence: Synthetic oligonucleotide
  Sense strand starting at position 1499 of SEQ ID NO: 1882617
ugcauucgaaaugaaaugu

SEQ ID NO: 2135107 - RNA, 19 nt, Artificial Sequence
  Description of Artificial Sequence: Synthetic oligonucleotide
  Antisense strand to SEQ ID NO: 2135106
acauuucauuucgaaugca

SEQ ID NO: 2135108 - RNA, 19 nt, Artificial Sequence
  Description of Artificial Sequence: Synthetic oligonucleotide
  Sense strand starting at position 1509 of SEQ ID NO: 1882617
augaaaugucacgggcaca

SEQ ID NO: 2135109 - RNA, 19 nt, Artificial Sequence
  Description of Artificial Sequence: Synthetic oligonucleotide
  Antisense strand to SEQ ID NO: 2135108
ugugcccgugacauuucau

SEQ ID NO: 2135110 - RNA, 19 nt, Artificial Sequence
  Description of Artificial Sequence: Synthetic oligonucleotide
  Sense strand starting at position 1510 of SEQ ID NO: 1882617
ugaaaugucacgggcacaa

SEQ ID NO: 2135111 - RNA, 19 nt, Artificial Sequence
  Description of Artificial Sequence: Synthetic oligonucleotide
  Antisense strand to SEQ ID NO: 2135110
uugugcccgugacauuuca

SEQ ID NO: 2135112 - RNA, 19 nt, Artificial Sequence
  Description of Artificial Sequence: Synthetic oligonucleotide
  Sense strand starting at position 1512 of SEQ ID NO: 1882617
aaaugucacgggcacaauu

SEQ ID NO: 2135113 - RNA, 19 nt, Artificial Sequence
  Description of Artificial Sequence: Synthetic oligonucleotide
  Antisense strand to SEQ ID NO: 2135112
aauugugcccgugacauuu

SEQ ID NO: 2135114 - RNA, 19 nt, Artificial Sequence
  Description of Artificial Sequence: Synthetic oligonucleotide
  Sense strand starting at position 1523 of SEQ ID NO: 1882617
gcacaauuaagugguggaa

SEQ ID NO: 2135115 - RNA, 19 nt, Artificial Sequence
  Description of Artificial Sequence: Synthetic oligonucleotide
  Antisense strand to SEQ ID NO: 2135114
uuccaccacuuaauugugc

SEQ ID NO: 2135116 - RNA, 19 nt, Artificial Sequence
  Description of Artificial Sequence: Synthetic oligonucleotide
  Sense strand starting at position 1622 of SEQ ID NO: 1882617
ugaagaucuggugggcagu

SEQ ID NO: 2135117 - RNA, 19 nt, Artificial Sequence
  Description of Artificial Sequence: Synthetic oligonucleotide
  Antisense strand to SEQ ID NO: 2135116
acugcccaccagaucuuca

SEQ ID NO: 2135118 - RNA, 19 nt, Artificial Sequence
  Description of Artificial Sequence: Synthetic oligonucleotide
  Sense strand starting at position 2017 of SEQ ID NO: 1882617
gggcgugucccggaaauuu

SEQ ID NO: 2135119 - RNA, 19 nt, Artificial Sequence
  Description of Artificial Sequence: Synthetic oligonucleotide
  Antisense strand to SEQ ID NO: 2135118
aaauuuccgggacacgccc

SEQ ID NO: 2135120 - RNA, 19 nt, Artificial Sequence
  Description of Artificial Sequence: Synthetic oligonucleotide
  Sense strand starting at position 2075 of SEQ ID NO: 1882617
gguugaaaccuccaccugu

SEQ ID NO: 2135121 - RNA, 19 nt, Artificial Sequence
  Description of Artificial Sequence: Synthetic oligonucleotide
  Antisense strand to SEQ ID NO: 2135120
acagguggagguuucaacc

SEQ ID NO: 2135122 - RNA, 19 nt, Artificial Sequence
  Description of Artificial Sequence: Synthetic oligonucleotide
  Sense strand starting at position 2257 of SEQ ID NO: 1882617
uggugaaauuucucgugug

SEQ ID NO: 2135123 - RNA, 19 nt, Artificial Sequence
  Description of Artificial Sequence: Synthetic oligonucleotide
  Antisense strand to SEQ ID NO: 2135122
cacacgagaaauuucacca

SEQ ID NO: 2135124 - RNA, 19 nt, Artificial Sequence
  Description of Artificial Sequence: Synthetic oligonucleotide
  Sense strand starting at position 2321 of SEQ ID NO: 1882617
uggucuuaauuauuaguga

SEQ ID NO: 2135125 - RNA, 19 nt, Artificial Sequence
  Description of Artificial Sequence: Synthetic oligonucleotide
  Antisense strand to SEQ ID NO: 2135124
ucacuaauaauuaagacca

SEQ ID NO: 2135126 - RNA, 19 nt, Artificial Sequence
  Description of Artificial Sequence: Synthetic oligonucleotide
  Sense strand starting at position 2477 of SEQ ID NO: 1882617
aaagcacuguagucaguaa

SEQ ID NO: 2135127 - RNA, 19 nt, Artificial Sequence
  Description of Artificial Sequence: Synthetic oligonucleotide
  Antisense strand to SEQ ID NO: 2135126
uuacugacuacagugcuuu

SEQ ID NO: 2135128 - RNA, 19 nt, Artificial Sequence
  Description of Artificial Sequence: Synthetic oligonucleotide
  Sense strand starting at position 2493 of SEQ ID NO: 1882617
uaaauauacugguuuggau

SEQ ID NO: 2135129 - RNA, 19 nt, Artificial Sequence
  Description of Artificial Sequence: Synthetic oligonucleotide
  Antisense strand to SEQ ID NO: 2135128
auccaaaccaguauauuua

SEQ ID NO: 2135130 - RNA, 19 nt, Artificial Sequence
  Description of Artificial Sequence: Synthetic oligonucleotide
  Sense strand starting at position 2495 of SEQ ID NO: 1882617
aauauacugguuuggauau

SEQ ID NO: 2135131 - RNA, 19 nt, Artificial Sequence
  Description of Artificial Sequence: Synthetic oligonucleotide
  Antisense strand to SEQ ID NO: 2135130
auauccaaaccaguauauu

SEQ ID NO: 2135132 - RNA, 19 nt, Artificial Sequence
  Description of Artificial Sequence: Synthetic oligonucleotide
  Sense strand starting at position 2583 of SEQ ID NO: 1882617
uauggcagagcaugaauua

SEQ ID NO: 2135133 - RNA, 19 nt, Artificial Sequence
  Description of Artificial Sequence: Synthetic oligonucleotide
  Antisense strand to SEQ ID NO: 2135132
uaauucaugcucugccaua

SEQ ID NO: 2135134 - RNA, 19 nt, Artificial Sequence
  Description of Artificial Sequence: Synthetic oligonucleotide
  Sense strand starting at position 2769 of SEQ ID NO: 1882617
agcaguuauuucuuuggua

SEQ ID NO: 2135135 - RNA, 19 nt, Artificial Sequence
  Description of Artificial Sequence: Synthetic oligonucleotide
  Antisense strand to SEQ ID NO: 2135134
uaccaaagaaauaacugcu

SEQ ID NO: 2135136 - RNA, 19 nt, Artificial Sequence
  Description of Artificial Sequence: Synthetic oligonucleotide
  Sense strand starting at position 2770 of SEQ ID NO: 1882617
gcaguuauuucuuugguau

SEQ ID NO: 2135137 - RNA, 19 nt, Artificial Sequence
  Description of Artificial Sequence: Synthetic oligonucleotide
  Antisense strand to SEQ ID NO: 2135136
auaccaaagaaauaacugc

SEQ ID NO: 2135138 - RNA, 19 nt, Artificial Sequence
  Description of Artificial Sequence: Synthetic oligonucleotide
  Sense strand starting at position 3086 of SEQ ID NO: 1882617
gguugaaccuuucuaaacc

SEQ ID NO: 2135139 - RNA, 19 nt, Artificial Sequence
  Description of Artificial Sequence: Synthetic oligonucleotide
  Antisense strand to SEQ ID NO: 2135138
gguuuagaaagguucaacc

SEQ ID NO: 2135140 - RNA, 19 nt, Artificial Sequence
  Description of Artificial Sequence: Synthetic oligonucleotide
  Sense strand starting at position 3324 of SEQ ID NO: 1882617
gguaauuccugccuagagg

SEQ ID NO: 2135141 - RNA, 19 nt, Artificial Sequence
  Description of Artificial Sequence: Synthetic oligonucleotide
  Antisense strand to SEQ ID NO: 2135140
ccucuaggcaggaauuacc

SEQ ID NO: 2135142 - RNA, 19 nt, Artificial Sequence
  Description of Artificial Sequence: Synthetic oligonucleotide
  Sense strand starting at position 3364 of SEQ ID NO: 1882617
auauguuguccuuaaggcu

SEQ ID NO: 2135143 - RNA, 19 nt, Artificial Sequence
  Description of Artificial Sequence: Synthetic oligonucleotide
  Antisense strand to SEQ ID NO: 2135142
agccuuaaggacaacauau

SEQ ID NO: 2135144 - RNA, 19 nt, Artificial Sequence
  Description of Artificial Sequence: Synthetic oligonucleotide
  Sense strand starting at position 3377 of SEQ ID NO: 1882617
aaggcuaaaucuuugaugu

SEQ ID NO: 2135145 - RNA, 19 nt, Artificial Sequence
  Description of Artificial Sequence: Synthetic oligonucleotide
  Antisense strand to SEQ ID NO: 2135144
acaucaaagauuuagccuu

SEQ ID NO: 2135146 - RNA, 19 nt, Artificial Sequence
  Description of Artificial Sequence: Synthetic oligonucleotide
  Sense strand starting at position 3378 of SEQ ID NO: 1882617
aggcuaaaucuuugauguu

SEQ ID NO: 2135147 - RNA, 19 nt, Artificial Sequence
  Description of Artificial Sequence: Synthetic oligonucleotide
  Antisense strand to SEQ ID NO: 2135146
aacaucaaagauuuagccu

SEQ ID NO: 2135148 - RNA, 19 nt, Artificial Sequence
  Description of Artificial Sequence: Synthetic oligonucleotide
  Sense strand starting at position 3480 of SEQ ID NO: 1882617
cuuguacuucuguaacacu

SEQ ID NO: 2135149 - RNA, 19 nt, Artificial Sequence
  Description of Artificial Sequence: Synthetic oligonucleotide
  Antisense strand to SEQ ID NO: 2135148
aguguuacagaaguacaag

SEQ ID NO: 2135150 - RNA, 19 nt, Artificial Sequence
  Description of Artificial Sequence: Synthetic oligonucleotide
  Sense strand starting at position 3533 of SEQ ID NO: 1882617
agaucugaugcugaaagca

SEQ ID NO: 2135151 - RNA, 19 nt, Artificial Sequence
  Description of Artificial Sequence: Synthetic oligonucleotide
  Antisense strand to SEQ ID NO: 2135150
ugcuuucagcaucagaucu

SEQ ID NO: 2135152 - RNA, 19 nt, Artificial Sequence
  Description of Artificial Sequence: Synthetic oligonucleotide
  Sense strand starting at position 3683 of SEQ ID NO: 1882617
uaaggcuuggcauagcuaa

SEQ ID NO: 2135153 - RNA, 19 nt, Artificial Sequence
  Description of Artificial Sequence: Synthetic oligonucleotide
  Antisense strand to SEQ ID NO: 2135152
uuagcuaugccaagccuua

SEQ ID NO: 2135154 - RNA, 19 nt, Artificial Sequence
  Description of Artificial Sequence: Synthetic oligonucleotide
  Sense strand starting at position 192 of SEQ ID NO: 1882618
ucugaacuccuaugggaug

SEQ ID NO: 2135155 - RNA, 19 nt, Artificial Sequence
  Description of Artificial Sequence: Synthetic oligonucleotide
  Antisense strand to SEQ ID NO: 2135154
caucccauaggaguucaga

SEQ ID NO: 2135156 - RNA, 19 nt, Artificial Sequence
  Description of Artificial Sequence: Synthetic oligonucleotide
  Sense strand starting at position 194 of SEQ ID NO: 1882618
ugaacuccuaugggauguu

SEQ ID NO: 2135157 - RNA, 19 nt, Artificial Sequence
  Description of Artificial Sequence: Synthetic oligonucleotide
  Antisense strand to SEQ ID NO: 2135156
aacaucccauaggaguuca

SEQ ID NO: 2135158 - RNA, 19 nt, Artificial Sequence
  Description of Artificial Sequence: Synthetic oligonucleotide
  Sense strand starting at position 259 of SEQ ID NO: 1882618
ccuuaacuccuugguuaga

SEQ ID NO: 2135159 - RNA, 19 nt, Artificial Sequence
  Description of Artificial Sequence: Synthetic oligonucleotide
  Antisense strand to SEQ ID NO: 2135158
ucuaaccaaggaguuaagg

SEQ ID NO: 2135160 - RNA, 19 nt, Artificial Sequence
  Description of Artificial Sequence: Synthetic oligonucleotide
  Sense strand starting at position 261 of SEQ ID NO: 1882618
uuaacuccuugguuagaca

SEQ ID NO: 2135161 - RNA, 19 nt, Artificial Sequence
  Description of Artificial Sequence: Synthetic oligonucleotide
  Antisense strand to SEQ ID NO: 2135160
ugucuaaccaaggaguuaa

SEQ ID NO: 2135162 - RNA, 19 nt, Artificial Sequence
  Description of Artificial Sequence: Synthetic oligonucleotide
  Sense strand starting at position 306 of SEQ ID NO: 1882618
gacaaugccuaauugagag

SEQ ID NO: 2135163 - RNA, 19 nt, Artificial Sequence
  Description of Artificial Sequence: Synthetic oligonucleotide
  Antisense strand to SEQ ID NO: 2135162
cucucaauuaggcauuguc

SEQ ID NO: 2135164 - RNA, 19 nt, Artificial Sequence
  Description of Artificial Sequence: Synthetic oligonucleotide
  Sense strand starting at position 366 of SEQ ID NO: 1882618
cuaugcuaguuaccagaaa

SEQ ID NO: 2135165 - RNA, 19 nt, Artificial Sequence
  Description of Artificial Sequence: Synthetic oligonucleotide
  Antisense strand to SEQ ID NO: 2135164
uuucugguaacuagcauag

SEQ ID NO: 2135166 - RNA, 19 nt, Artificial Sequence
  Description of Artificial Sequence: Synthetic oligonucleotide
  Sense strand starting at position 478 of SEQ ID NO: 1882618
aggccuugguuccuagaaa

SEQ ID NO: 2135167 - RNA, 19 nt, Artificial Sequence
  Description of Artificial Sequence: Synthetic oligonucleotide
  Antisense strand to SEQ ID NO: 2135166
uuucuaggaaccaaggccu

SEQ ID NO: 2135168 - RNA, 19 nt, Artificial Sequence
  Description of Artificial Sequence: Synthetic oligonucleotide
  Sense strand starting at position 658 of SEQ ID NO: 1882618
ggcucuucucuugaagaag

SEQ ID NO: 2135169 - RNA, 19 nt, Artificial Sequence
  Description of Artificial Sequence: Synthetic oligonucleotide
  Antisense strand to SEQ ID NO: 2135168
cuucuucaagagaagagcc

SEQ ID NO: 2135170 - RNA, 19 nt, Artificial Sequence
  Description of Artificial Sequence: Synthetic oligonucleotide
  Sense strand starting at position 900 of SEQ ID NO: 1882618
ccgagcaauguauacauca

SEQ ID NO: 2135171 - RNA, 19 nt, Artificial Sequence
  Description of Artificial Sequence: Synthetic oligonucleotide
  Antisense strand to SEQ ID NO: 2135170
ugauguauacauugcucgg

SEQ ID NO: 2135172 - RNA, 19 nt, Artificial Sequence
  Description of Artificial Sequence: Synthetic oligonucleotide
  Sense strand starting at position 1073 of SEQ ID NO: 1882618
uugcauucucaauaguuug

SEQ ID NO: 2135173 - RNA, 19 nt, Artificial Sequence
  Description of Artificial Sequence: Synthetic oligonucleotide
  Antisense strand to SEQ ID NO: 2135172
caaacuauugagaaugcaa

SEQ ID NO: 2135174 - RNA, 19 nt, Artificial Sequence
  Description of Artificial Sequence: Synthetic oligonucleotide
  Sense strand starting at position 1173 of SEQ ID NO: 1882618
cggugaaucccucaugaau

SEQ ID NO: 2135175 - RNA, 19 nt, Artificial Sequence
  Description of Artificial Sequence: Synthetic oligonucleotide
  Antisense strand to SEQ ID NO: 2135174
auucaugagggauucaccg

SEQ ID NO: 2135176 - RNA, 19 nt, Artificial Sequence
  Description of Artificial Sequence: Synthetic oligonucleotide
  Sense strand starting at position 1216 of SEQ ID NO: 1882618
agguucucacucuauuagu

SEQ ID NO: 2135177 - RNA, 19 nt, Artificial Sequence
  Description of Artificial Sequence: Synthetic oligonucleotide
  Antisense strand to SEQ ID NO: 2135176
acuaauagagugagaaccu

SEQ ID NO: 2135178 - RNA, 19 nt, Artificial Sequence
  Description of Artificial Sequence: Synthetic oligonucleotide
  Sense strand starting at position 1807 of SEQ ID NO: 1882618
agacaccauccaugguuua

SEQ ID NO: 2135179 - RNA, 19 nt, Artificial Sequence
  Description of Artificial Sequence: Synthetic oligonucleotide
  Antisense strand to SEQ ID NO: 2135178
uaaaccauggauggugucu

SEQ ID NO: 2135180 - RNA, 19 nt, Artificial Sequence
  Description of Artificial Sequence: Synthetic oligonucleotide
  Sense strand starting at position 1846 of SEQ ID NO: 1882618
agcaguuaccuagacucua

SEQ ID NO: 2135181 - RNA, 19 nt, Artificial Sequence
  Description of Artificial Sequence: Synthetic oligonucleotide
  Antisense strand to SEQ ID NO: 2135180
uagagucuagguaacugcu

SEQ ID NO: 2135182 - RNA, 19 nt, Artificial Sequence
  Description of Artificial Sequence: Synthetic oligonucleotide
  Sense strand starting at position 1995 of SEQ ID NO: 1882618
aagucuugauauguuugau

SEQ ID NO: 2135183 - RNA, 19 nt, Artificial Sequence
  Description of Artificial Sequence: Synthetic oligonucleotide
  Antisense strand to SEQ ID NO: 2135182
aucaaacauaucaagacuu

SEQ ID NO: 2135184 - RNA, 19 nt, Artificial Sequence
  Description of Artificial Sequence: Synthetic oligonucleotide
  Sense strand starting at position 1998 of SEQ ID NO: 1882618
ucuugauauguuugaugaa

SEQ ID NO: 2135185 - RNA, 19 nt, Artificial Sequence
  Description of Artificial Sequence: Synthetic oligonucleotide
  Antisense strand to SEQ ID NO: 2135184
uucaucaaacauaucaaga

SEQ ID NO: 2135186 - RNA, 19 nt, Artificial Sequence
  Description of Artificial Sequence: Synthetic oligonucleotide
  Sense strand starting at position 2017 of SEQ ID NO: 1882618
augaauagacgaggcuaaa

SEQ ID NO: 2135187 - RNA, 19 nt, Artificial Sequence
  Description of Artificial Sequence: Synthetic oligonucleotide
  Antisense strand to SEQ ID NO: 2135186
uuuagccucgucuauucau

SEQ ID NO: 2135188 - RNA, 19 nt, Artificial Sequence
  Description of Artificial Sequence: Synthetic oligonucleotide
  Sense strand starting at position 2364 of SEQ ID NO: 1882618
uaaagauaucucugggcag

SEQ ID NO: 2135189 - RNA, 19 nt, Artificial Sequence
  Description of Artificial Sequence: Synthetic oligonucleotide
  Antisense strand to SEQ ID NO: 2135188
cugcccagagauaucuuua

SEQ ID NO: 2135190 - RNA, 19 nt, Artificial Sequence
  Description of Artificial Sequence: Synthetic oligonucleotide
  Sense strand starting at position 2366 of SEQ ID NO: 1882618
aagauaucucugggcagac

SEQ ID NO: 2135191 - RNA, 19 nt, Artificial Sequence
  Description of Artificial Sequence: Synthetic oligonucleotide
  Antisense strand to SEQ ID NO: 2135190
gucugcccagagauaucuu

SEQ ID NO: 2135192 - RNA, 19 nt, Artificial Sequence
  Description of Artificial Sequence: Synthetic oligonucleotide
  Sense strand starting at position 2367 of SEQ ID NO: 1882618
agauaucucugggcagacu

SEQ ID NO: 2135193 - RNA, 19 nt, Artificial Sequence
  Description of Artificial Sequence: Synthetic oligonucleotide
  Antisense strand to SEQ ID NO: 2135192
agucugcccagagauaucu

SEQ ID NO: 2135194 - RNA, 19 nt, Artificial Sequence
  Description of Artificial Sequence: Synthetic oligonucleotide
  Sense strand starting at position 2399 of SEQ ID NO: 1882618
gugcaaagucugcaaacaa

SEQ ID NO: 2135195 - RNA, 19 nt, Artificial Sequence
  Description of Artificial Sequence: Synthetic oligonucleotide
  Antisense strand to SEQ ID NO: 2135194
uuguuugcagacuuugcac

SEQ ID NO: 2135196 - RNA, 19 nt, Artificial Sequence
  Description of Artificial Sequence: Synthetic oligonucleotide
  Sense strand starting at position 2418 of SEQ ID NO: 1882618
aaucuugagguuggaauau

SEQ ID NO: 2135197 - RNA, 19 nt, Artificial Sequence
  Description of Artificial Sequence: Synthetic oligonucleotide
  Antisense strand to SEQ ID NO: 2135196
auauuccaaccucaagauu

SEQ ID NO: 2135198 - RNA, 19 nt, Artificial Sequence
  Description of Artificial Sequence: Synthetic oligonucleotide
  Sense strand starting at position 2428 of SEQ ID NO: 1882618
uuggaauauccuugucaug

SEQ ID NO: 2135199 - RNA, 19 nt, Artificial Sequence
  Description of Artificial Sequence: Synthetic oligonucleotide
  Antisense strand to SEQ ID NO: 2135198
caugacaaggauauuccaa

SEQ ID NO: 2135200 - RNA, 19 nt, Artificial Sequence
  Description of Artificial Sequence: Synthetic oligonucleotide
  Sense strand starting at position 2438 of SEQ ID NO: 1882618
cuugucaugcucuaagaac

SEQ ID NO: 2135201 - RNA, 19 nt, Artificial Sequence
  Description of Artificial Sequence: Synthetic oligonucleotide
  Antisense strand to SEQ ID NO: 2135200
guucuuagagcaugacaag

SEQ ID NO: 2135202 - RNA, 19 nt, Artificial Sequence
  Description of Artificial Sequence: Synthetic oligonucleotide
  Sense strand starting at position 2491 of SEQ ID NO: 1882618
ugaggaauuuaucauuaag

SEQ ID NO: 2135203 - RNA, 19 nt, Artificial Sequence
  Description of Artificial Sequence: Synthetic oligonucleotide
  Antisense strand to SEQ ID NO: 2135202
cuuaaugauaaauuccuca

SEQ ID NO: 2135204 - RNA, 19 nt, Artificial Sequence
  Description of Artificial Sequence: Synthetic oligonucleotide
  Sense strand starting at position 2556 of SEQ ID NO: 1882618
agaaauuacuuggcaaauc

SEQ ID NO: 2135205 - RNA, 19 nt, Artificial Sequence
  Description of Artificial Sequence: Synthetic oligonucleotide
  Antisense strand to SEQ ID NO: 2135204
gauuugccaaguaauuucu

SEQ ID NO: 2135206 - RNA, 19 nt, Artificial Sequence
  Description of Artificial Sequence: Synthetic oligonucleotide
  Sense strand starting at position 2663 of SEQ ID NO: 1882618
ucuaauaucugaguuagua

SEQ ID NO: 2135207 - RNA, 19 nt, Artificial Sequence
  Description of Artificial Sequence: Synthetic oligonucleotide
  Antisense strand to SEQ ID NO: 2135206
uacuaacucagauauuaga

SEQ ID NO: 2135208 - RNA, 19 nt, Artificial Sequence
  Description of Artificial Sequence: Synthetic oligonucleotide
  Sense strand starting at position 2875 of SEQ ID NO: 1882618
aacuaugguccguagauca

SEQ ID NO: 2135209 - RNA, 19 nt, Artificial Sequence
  Description of Artificial Sequence: Synthetic oligonucleotide
  Antisense strand to SEQ ID NO: 2135208
ugaucuacggaccauaguu

SEQ ID NO: 2135210 - RNA, 19 nt, Artificial Sequence
  Description of Artificial Sequence: Synthetic oligonucleotide
  Sense strand starting at position 2999 of SEQ ID NO: 1882618
acaaauccuccaggugacu

SEQ ID NO: 2135211 - RNA, 19 nt, Artificial Sequence
  Description of Artificial Sequence: Synthetic oligonucleotide
  Antisense strand to SEQ ID NO: 2135210
agucaccuggaggauuugu

SEQ ID NO: 2135212 - RNA, 19 nt, Artificial Sequence
  Description of Artificial Sequence: Synthetic oligonucleotide
  Sense strand starting at position 3036 of SEQ ID NO: 1882618
uaagaagcaugaguuuaua

SEQ ID NO: 2135213 - RNA, 19 nt, Artificial Sequence
  Description of Artificial Sequence: Synthetic oligonucleotide
  Antisense strand to SEQ ID NO: 2135212
uauaaacucaugcuucuua

SEQ ID NO: 2135214 - RNA, 19 nt, Artificial Sequence
  Description of Artificial Sequence: Synthetic oligonucleotide
  Sense strand starting at position 3115 of SEQ ID NO: 1882618
ggagguuuagaauguuauu

SEQ ID NO: 2135215 - RNA, 19 nt, Artificial Sequence
  Description of Artificial Sequence: Synthetic oligonucleotide
  Antisense strand to SEQ ID NO: 2135214
aauaacauucuaaaccucc

SEQ ID NO: 2135216 - RNA, 19 nt, Artificial Sequence
  Description of Artificial Sequence: Synthetic oligonucleotide
  Sense strand starting at position 3546 of SEQ ID NO: 1882618
ccuuguauugaguggaaga

SEQ ID NO: 2135217 - RNA, 19 nt, Artificial Sequence
  Description of Artificial Sequence: Synthetic oligonucleotide
  Antisense strand to SEQ ID NO: 2135216
ucuuccacucaauacaagg

SEQ ID NO: 2135218 - RNA, 19 nt, Artificial Sequence
  Description of Artificial Sequence: Synthetic oligonucleotide
  Sense strand starting at position 3547 of SEQ ID NO: 1882618
cuuguauugaguggaagaa

SEQ ID NO: 2135219 - RNA, 19 nt, Artificial Sequence
  Description of Artificial Sequence: Synthetic oligonucleotide
  Antisense strand to SEQ ID NO: 2135218
uucuuccacucaauacaag

SEQ ID NO: 2135220 - RNA, 19 nt, Artificial Sequence
  Description of Artificial Sequence: Synthetic oligonucleotide
  Sense strand starting at position 3576 of SEQ ID NO: 1882618
gcauuuaauuuguaggagu

SEQ ID NO: 2135221 - RNA, 19 nt, Artificial Sequence
  Description of Artificial Sequence: Synthetic oligonucleotide
  Antisense strand to SEQ ID NO: 2135220
acuccuacaaauuaaaugc

SEQ ID NO: 2135222 - RNA, 19 nt, Artificial Sequence
  Description of Artificial Sequence: Synthetic oligonucleotide
  Sense strand starting at position 3797 of SEQ ID NO: 1882618
ggacaacuauggucuaaau

SEQ ID NO: 2135223 - RNA, 19 nt, Artificial Sequence
  Description of Artificial Sequence: Synthetic oligonucleotide
  Antisense strand to SEQ ID NO: 2135222
auuuagaccauaguugucc

SEQ ID NO: 2135224 - RNA, 19 nt, Artificial Sequence
  Description of Artificial Sequence: Synthetic oligonucleotide
  Sense strand starting at position 3807 of SEQ ID NO: 1882618
ggucuaaaucaagguacuu

SEQ ID NO: 2135225 - RNA, 19 nt, Artificial Sequence
  Description of Artificial Sequence: Synthetic oligonucleotide
  Antisense strand to SEQ ID NO: 2135224
aaguaccuugauuuagacc

SEQ ID NO: 2135226 - RNA, 19 nt, Artificial Sequence
  Description of Artificial Sequence: Synthetic oligonucleotide
  Sense strand starting at position 3816 of SEQ ID NO: 1882618
caagguacuuuguucugaa

SEQ ID NO: 2135227 - RNA, 19 nt, Artificial Sequence
  Description of Artificial Sequence: Synthetic oligonucleotide
  Antisense strand to SEQ ID NO: 2135226
uucagaacaaaguaccuug

SEQ ID NO: 2135228 - RNA, 19 nt, Artificial Sequence
  Description of Artificial Sequence: Synthetic oligonucleotide
  Sense strand starting at position 3817 of SEQ ID NO: 1882618
aagguacuuuguucugaau

SEQ ID NO: 2135229 - RNA, 19 nt, Artificial Sequence
  Description of Artificial Sequence: Synthetic oligonucleotide
  Antisense strand to SEQ ID NO: 2135228
auucagaacaaaguaccuu

SEQ ID NO: 2135230 - RNA, 19 nt, Artificial Sequence
  Description of Artificial Sequence: Synthetic oligonucleotide
  Sense strand starting at position 3862 of SEQ ID NO: 1882618
gccugaguugcaguguauu

SEQ ID NO: 2135231 - RNA, 19 nt, Artificial Sequence
  Description of Artificial Sequence: Synthetic oligonucleotide
  Antisense strand to SEQ ID NO: 2135230
aauacacugcaacucaggc

SEQ ID NO: 2135232 - RNA, 19 nt, Artificial Sequence
  Description of Artificial Sequence: Synthetic oligonucleotide
  Sense strand starting at position 3893 of SEQ ID NO: 1882618
uccuuuauuguagaauuag

SEQ ID NO: 2135233 - RNA, 19 nt, Artificial Sequence
  Description of Artificial Sequence: Synthetic oligonucleotide
  Antisense strand to SEQ ID NO: 2135232
cuaauucuacaauaaagga

SEQ ID NO: 2135234 - RNA, 19 nt, Artificial Sequence
  Description of Artificial Sequence: Synthetic oligonucleotide
  Sense strand starting at position 13 of SEQ ID NO: 1882619
gccugaguugcaguguauu

SEQ ID NO: 2135235 - RNA, 19 nt, Artificial Sequence
  Description of Artificial Sequence: Synthetic oligonucleotide
  Antisense strand to SEQ ID NO: 2135234
aauacacugcaacucaggc

SEQ ID NO: 2135236 - RNA, 19 nt, Artificial Sequence
  Description of Artificial Sequence: Synthetic oligonucleotide
  Sense strand starting at position 44 of SEQ ID NO: 1882619
uccuuuauuguagaauuag

SEQ ID NO: 2135237 - RNA, 19 nt, Artificial Sequence
  Description of Artificial Sequence: Synthetic oligonucleotide
  Antisense strand to SEQ ID NO: 2135236
cuaauucuacaauaaagga

SEQ ID NO: 2135238 - RNA, 19 nt, Artificial Sequence
  Description of Artificial Sequence: Synthetic oligonucleotide
  Sense strand starting at position 63 of SEQ ID NO: 1882619
ggcaucauauggcuuuaaa

SEQ ID NO: 2135239 - RNA, 19 nt, Artificial Sequence
  Description of Artificial Sequence: Synthetic oligonucleotide
  Antisense strand to SEQ ID NO: 2135238
uuuaaagccauaugaugcc

SEQ ID NO: 2135240 - RNA, 19 nt, Artificial Sequence
  Description of Artificial Sequence: Synthetic oligonucleotide
  Sense strand starting at position 173 of SEQ ID NO: 1882619
cuuggucugaaagaguuga

SEQ ID NO: 2135241 - RNA, 19 nt, Artificial Sequence
  Description of Artificial Sequence: Synthetic oligonucleotide
  Antisense strand to SEQ ID NO: 2135240
ucaacucuuucagaccaag

SEQ ID NO: 2135242 - RNA, 19 nt, Artificial Sequence
  Description of Artificial Sequence: Synthetic oligonucleotide
  Sense strand starting at position 212 of SEQ ID NO: 1882619
gucguuuaaccucacaaca

SEQ ID NO: 2135243 - RNA, 19 nt, Artificial Sequence
  Description of Artificial Sequence: Synthetic oligonucleotide
  Antisense strand to SEQ ID NO: 2135242
uguugugagguuaaacgac

SEQ ID NO: 2135244 - RNA, 19 nt, Artificial Sequence
  Description of Artificial Sequence: Synthetic oligonucleotide
  Sense strand starting at position 527 of SEQ ID NO: 1882619
agaagaaagugacacaaua

SEQ ID NO: 2135245 - RNA, 19 nt, Artificial Sequence
  Description of Artificial Sequence: Synthetic oligonucleotide
  Antisense strand to SEQ ID NO: 2135244
uauugugucacuuucuucu

SEQ ID NO: 2135246 - RNA, 19 nt, Artificial Sequence
  Description of Artificial Sequence: Synthetic oligonucleotide
  Sense strand starting at position 861 of SEQ ID NO: 1882619
uccauuguacuaugauaga

SEQ ID NO: 2135247 - RNA, 19 nt, Artificial Sequence
  Description of Artificial Sequence: Synthetic oligonucleotide
  Antisense strand to SEQ ID NO: 2135246
ucuaucauaguacaaugga

SEQ ID NO: 2135248 - RNA, 19 nt, Artificial Sequence
  Description of Artificial Sequence: Synthetic oligonucleotide
  Sense strand starting at position 960 of SEQ ID NO: 1882619
acuacacaagcgugaaauu

SEQ ID NO: 2135249 - RNA, 19 nt, Artificial Sequence
  Description of Artificial Sequence: Synthetic oligonucleotide
  Antisense strand to SEQ ID NO: 2135248
aauuucacgcuuguguagu

SEQ ID NO: 2135250 - RNA, 19 nt, Artificial Sequence
  Description of Artificial Sequence: Synthetic oligonucleotide
  Sense strand starting at position 970 of SEQ ID NO: 1882619
cgugaaauuucgcuuucuu

SEQ ID NO: 2135251 - RNA, 19 nt, Artificial Sequence
  Description of Artificial Sequence: Synthetic oligonucleotide
  Antisense strand to SEQ ID NO: 2135250
aagaaagcgaaauuucacg

SEQ ID NO: 2135252 - RNA, 19 nt, Artificial Sequence
  Description of Artificial Sequence: Synthetic oligonucleotide
  Sense strand starting at position 1074 of SEQ ID NO: 1882619
agggaaagcucuccuuucu

SEQ ID NO: 2135253 - RNA, 19 nt, Artificial Sequence
  Description of Artificial Sequence: Synthetic oligonucleotide
  Antisense strand to SEQ ID NO: 2135252
agaaaggagagcuuucccu

SEQ ID NO: 2135254 - RNA, 19 nt, Artificial Sequence
  Description of Artificial Sequence: Synthetic oligonucleotide
  Sense strand starting at position 1410 of SEQ ID NO: 1882619
gccgucgucacccucuaau

SEQ ID NO: 2135255 - RNA, 19 nt, Artificial Sequence
  Description of Artificial Sequence: Synthetic oligonucleotide
  Antisense strand to SEQ ID NO: 2135254
auuagagggugacgacggc

SEQ ID NO: 2135256 - RNA, 19 nt, Artificial Sequence
  Description of Artificial Sequence: Synthetic oligonucleotide
  Sense strand starting at position 1687 of SEQ ID NO: 1882619
ccgcuuucuccugaaagag

SEQ ID NO: 2135257 - RNA, 19 nt, Artificial Sequence
  Description of Artificial Sequence: Synthetic oligonucleotide
  Antisense strand to SEQ ID NO: 2135256
cucuuucaggagaaagcgg

SEQ ID NO: 2135258 - RNA, 19 nt, Artificial Sequence
  Description of Artificial Sequence: Synthetic oligonucleotide
  Sense strand starting at position 1793 of SEQ ID NO: 1882619
ggaggagcccgcugagaaa

SEQ ID NO: 2135259 - RNA, 19 nt, Artificial Sequence
  Description of Artificial Sequence: Synthetic oligonucleotide
  Antisense strand to SEQ ID NO: 2135258
uuucucagcgggcuccucc

SEQ ID NO: 2135260 - RNA, 19 nt, Artificial Sequence
  Description of Artificial Sequence: Synthetic oligonucleotide
  Sense strand starting at position 1982 of SEQ ID NO: 1882619
uggagagucugaucuaugu

SEQ ID NO: 2135261 - RNA, 19 nt, Artificial Sequence
  Description of Artificial Sequence: Synthetic oligonucleotide
  Antisense strand to SEQ ID NO: 2135260
acauagaucagacucucca

SEQ ID NO: 2135262 - RNA, 19 nt, Artificial Sequence
  Description of Artificial Sequence: Synthetic oligonucleotide
  Sense strand starting at position 1984 of SEQ ID NO: 1882619
gagagucugaucuauguga

SEQ ID NO: 2135263 - RNA, 19 nt, Artificial Sequence
  Description of Artificial Sequence: Synthetic oligonucleotide
  Antisense strand to SEQ ID NO: 2135262
ucacauagaucagacucuc

SEQ ID NO: 2135264 - RNA, 19 nt, Artificial Sequence
  Description of Artificial Sequence: Synthetic oligonucleotide
  Sense strand starting at position 1986 of SEQ ID NO: 1882619
gagucugaucuaugugaca

SEQ ID NO: 2135265 - RNA, 19 nt, Artificial Sequence
  Description of Artificial Sequence: Synthetic oligonucleotide
  Antisense strand to SEQ ID NO: 2135264
ugucacauagaucagacuc

SEQ ID NO: 2135266 - RNA, 19 nt, Artificial Sequence
  Description of Artificial Sequence: Synthetic oligonucleotide
  Sense strand starting at position 2028 of SEQ ID NO: 1882619
cgugaauaauuuguaugca

SEQ ID NO: 2135267 - RNA, 19 nt, Artificial Sequence
  Description of Artificial Sequence: Synthetic oligonucleotide
  Antisense strand to SEQ ID NO: 2135266
ugcauacaaauuauucacg

SEQ ID NO: 2135268 - RNA, 19 nt, Artificial Sequence
  Description of Artificial Sequence: Synthetic oligonucleotide
  Sense strand starting at position 2059 of SEQ ID NO: 1882619
ugcauuacaucauugacag

SEQ ID NO: 2135269 - RNA, 19 nt, Artificial Sequence
  Description of Artificial Sequence: Synthetic oligonucleotide
  Antisense strand to SEQ ID NO: 2135268
cugucaaugauguaaugca

SEQ ID NO: 2135270 - RNA, 19 nt, Artificial Sequence
  Description of Artificial Sequence: Synthetic oligonucleotide
  Sense strand starting at position 2060 of SEQ ID NO: 1882619
gcauuacaucauugacaga

SEQ ID NO: 2135271 - RNA, 19 nt, Artificial Sequence
  Description of Artificial Sequence: Synthetic oligonucleotide
  Antisense strand to SEQ ID NO: 2135270
ucugucaaugauguaaugc

SEQ ID NO: 2135272 - RNA, 19 nt, Artificial Sequence
  Description of Artificial Sequence: Synthetic oligonucleotide
  Sense strand starting at position 2070 of SEQ ID NO: 1882619
auugacagaucucuaguaa

SEQ ID NO: 2135273 - RNA, 19 nt, Artificial Sequence
  Description of Artificial Sequence: Synthetic oligonucleotide
  Antisense strand to SEQ ID NO: 2135272
uuacuagagaucugucaau

SEQ ID NO: 2135274 - RNA, 19 nt, Artificial Sequence
  Description of Artificial Sequence: Synthetic oligonucleotide
  Sense strand starting at position 2381 of SEQ ID NO: 1882619
gugucauaauuguuaaagg

SEQ ID NO: 2135275 - RNA, 19 nt, Artificial Sequence
  Description of Artificial Sequence: Synthetic oligonucleotide
  Antisense strand to SEQ ID NO: 2135274
ccuuuaacaauuaugacac

SEQ ID NO: 2135276 - RNA, 19 nt, Artificial Sequence
  Description of Artificial Sequence: Synthetic oligonucleotide
  Sense strand starting at position 2651 of SEQ ID NO: 1882619
guguaagcccuauggagaa

SEQ ID NO: 2135277 - RNA, 19 nt, Artificial Sequence
  Description of Artificial Sequence: Synthetic oligonucleotide
  Antisense strand to SEQ ID NO: 2135276
uucuccauagggcuuacac

SEQ ID NO: 2135278 - RNA, 19 nt, Artificial Sequence
  Description of Artificial Sequence: Synthetic oligonucleotide
  Sense strand starting at position 2683 of SEQ ID NO: 1882619
auaccugaagugugaaaca

SEQ ID NO: 2135279 - RNA, 19 nt, Artificial Sequence
  Description of Artificial Sequence: Synthetic oligonucleotide
  Antisense strand to SEQ ID NO: 2135278
uguuucacacuucagguau

SEQ ID NO: 2135280 - RNA, 19 nt, Artificial Sequence
  Description of Artificial Sequence: Synthetic oligonucleotide
  Sense strand starting at position 2822 of SEQ ID NO: 1882619
gauaauauuguuugcugaa

SEQ ID NO: 2135281 - RNA, 19 nt, Artificial Sequence
  Description of Artificial Sequence: Synthetic oligonucleotide
  Antisense strand to SEQ ID NO: 2135280
uucagcaaacaauauuauc

SEQ ID NO: 2135282 - RNA, 19 nt, Artificial Sequence
  Description of Artificial Sequence: Synthetic oligonucleotide
  Sense strand starting at position 2977 of SEQ ID NO: 1882619
aggagcacauauucuuaau

SEQ ID NO: 2135283 - RNA, 19 nt, Artificial Sequence
  Description of Artificial Sequence: Synthetic oligonucleotide
  Antisense strand to SEQ ID NO: 2135282
auuaagaauaugugcuccu

SEQ ID NO: 2135284 - RNA, 19 nt, Artificial Sequence
  Description of Artificial Sequence: Synthetic oligonucleotide
  Sense strand starting at position 2989 of SEQ ID NO: 1882619
ucuuaauugcuguagaaac

SEQ ID NO: 2135285 - RNA, 19 nt, Artificial Sequence
  Description of Artificial Sequence: Synthetic oligonucleotide
  Antisense strand to SEQ ID NO: 2135284
guuucuacagcaauuaaga

SEQ ID NO: 2135286 - RNA, 19 nt, Artificial Sequence
  Description of Artificial Sequence: Synthetic oligonucleotide
  Sense strand starting at position 3056 of SEQ ID NO: 1882619
ggauuagaaucccuuucua

SEQ ID NO: 2135287 - RNA, 19 nt, Artificial Sequence
  Description of Artificial Sequence: Synthetic oligonucleotide
  Antisense strand to SEQ ID NO: 2135286
uagaaagggauucuaaucc

SEQ ID NO: 2135288 - RNA, 19 nt, Artificial Sequence
  Description of Artificial Sequence: Synthetic oligonucleotide
  Sense strand starting at position 3098 of SEQ ID NO: 1882619
auacuaccucacuguggua

SEQ ID NO: 2135289 - RNA, 19 nt, Artificial Sequence
  Description of Artificial Sequence: Synthetic oligonucleotide
  Antisense strand to SEQ ID NO: 2135288
uaccacagugagguaguau

SEQ ID NO: 2135290 - RNA, 19 nt, Artificial Sequence
  Description of Artificial Sequence: Synthetic oligonucleotide
  Sense strand starting at position 3195 of SEQ ID NO: 1882619
ugacaacaucucugggauc

SEQ ID NO: 2135291 - RNA, 19 nt, Artificial Sequence
  Description of Artificial Sequence: Synthetic oligonucleotide
  Antisense strand to SEQ ID NO: 2135290
gaucccagagauguuguca

SEQ ID NO: 2135292 - RNA, 19 nt, Artificial Sequence
  Description of Artificial Sequence: Synthetic oligonucleotide
  Sense strand starting at position 3197 of SEQ ID NO: 1882619
acaacaucucugggaucca

SEQ ID NO: 2135293 - RNA, 19 nt, Artificial Sequence
  Description of Artificial Sequence: Synthetic oligonucleotide
  Antisense strand to SEQ ID NO: 2135292
uggaucccagagauguugu

SEQ ID NO: 2135294 - RNA, 19 nt, Artificial Sequence
  Description of Artificial Sequence: Synthetic oligonucleotide
  Sense strand starting at position 3248 of SEQ ID NO: 1882619
guuuccacccauugauaag

SEQ ID NO: 2135295 - RNA, 19 nt, Artificial Sequence
  Description of Artificial Sequence: Synthetic oligonucleotide
  Antisense strand to SEQ ID NO: 2135294
cuuaucaauggguggaaac

SEQ ID NO: 2135296 - RNA, 19 nt, Artificial Sequence
  Description of Artificial Sequence: Synthetic oligonucleotide
  Sense strand starting at position 3266 of SEQ ID NO: 1882619
gguauaaccuuaucaagac

SEQ ID NO: 2135297 - RNA, 19 nt, Artificial Sequence
  Description of Artificial Sequence: Synthetic oligonucleotide
  Antisense strand to SEQ ID NO: 2135296
gucuugauaagguuauacc

SEQ ID NO: 2135298 - RNA, 19 nt, Artificial Sequence
  Description of Artificial Sequence: Synthetic oligonucleotide
  Sense strand starting at position 3547 of SEQ ID NO: 1882619
gccuccugccuugagauua

SEQ ID NO: 2135299 - RNA, 19 nt, Artificial Sequence
  Description of Artificial Sequence: Synthetic oligonucleotide
  Antisense strand to SEQ ID NO: 2135298
uaaucucaaggcaggaggc

SEQ ID NO: 2135300 - RNA, 19 nt, Artificial Sequence
  Description of Artificial Sequence: Synthetic oligonucleotide
  Sense strand starting at position 3555 of SEQ ID NO: 1882619
ccuugagauuauuccuaag

SEQ ID NO: 2135301 - RNA, 19 nt, Artificial Sequence
  Description of Artificial Sequence: Synthetic oligonucleotide
  Antisense strand to SEQ ID NO: 2135300
cuuaggaauaaucucaagg

SEQ ID NO: 2135302 - RNA, 19 nt, Artificial Sequence
  Description of Artificial Sequence: Synthetic oligonucleotide
  Sense strand starting at position 3557 of SEQ ID NO: 1882619
uugagauuauuccuaagug

SEQ ID NO: 2135303 - RNA, 19 nt, Artificial Sequence
  Description of Artificial Sequence: Synthetic oligonucleotide
  Antisense strand to SEQ ID NO: 2135302
cacuuaggaauaaucucaa

SEQ ID NO: 2135304 - RNA, 19 nt, Artificial Sequence
  Description of Artificial Sequence: Synthetic oligonucleotide
  Sense strand starting at position 3615 of SEQ ID NO: 1882619
uaauguaaugguugugaga

SEQ ID NO: 2135305 - RNA, 19 nt, Artificial Sequence
  Description of Artificial Sequence: Synthetic oligonucleotide
  Antisense strand to SEQ ID NO: 2135304
ucucacaaccauuacauua

SEQ ID NO: 2135306 - RNA, 19 nt, Artificial Sequence
  Description of Artificial Sequence: Synthetic oligonucleotide
  Sense strand starting at position 3676 of SEQ ID NO: 1882619
gucaacaacugagucagau

SEQ ID NO: 2135307 - RNA, 19 nt, Artificial Sequence
  Description of Artificial Sequence: Synthetic oligonucleotide
  Antisense strand to SEQ ID NO: 2135306
aucugacucaguuguugac

SEQ ID NO: 2135308 - RNA, 19 nt, Artificial Sequence
  Description of Artificial Sequence: Synthetic oligonucleotide
  Sense strand starting at position 3846 of SEQ ID NO: 1882619
augaaagacuaguagaaag

SEQ ID NO: 2135309 - RNA, 19 nt, Artificial Sequence
  Description of Artificial Sequence: Synthetic oligonucleotide
  Antisense strand to SEQ ID NO: 2135308
cuuucuacuagucuuucau

SEQ ID NO: 2135310 - RNA, 19 nt, Artificial Sequence
  Description of Artificial Sequence: Synthetic oligonucleotide
  Sense strand starting at position 3876 of SEQ ID NO: 1882619
uguagcuucucauuggaaa

SEQ ID NO: 2135311 - RNA, 19 nt, Artificial Sequence
  Description of Artificial Sequence: Synthetic oligonucleotide
  Antisense strand to SEQ ID NO: 2135310
uuuccaaugagaagcuaca

SEQ ID NO: 2135312 - RNA, 19 nt, Artificial Sequence
  Description of Artificial Sequence: Synthetic oligonucleotide
  Sense strand starting at position 3877 of SEQ ID NO: 1882619
guagcuucucauuggaaac

SEQ ID NO: 2135313 - RNA, 19 nt, Artificial Sequence
  Description of Artificial Sequence: Synthetic oligonucleotide
  Antisense strand to SEQ ID NO: 2135312
guuuccaaugagaagcuac

SEQ ID NO: 2135314 - RNA, 19 nt, Artificial Sequence
  Description of Artificial Sequence: Synthetic oligonucleotide
  Sense strand starting at position 155 of SEQ ID NO: 1882620
auacuauagugacugcaga

SEQ ID NO: 2135315 - RNA, 19 nt, Artificial Sequence
  Description of Artificial Sequence: Synthetic oligonucleotide
  Antisense strand to SEQ ID NO: 2135314
ucugcagucacuauaguau

SEQ ID NO: 2135316 - RNA, 19 nt, Artificial Sequence
  Description of Artificial Sequence: Synthetic oligonucleotide
  Sense strand starting at position 156 of SEQ ID NO: 1882620
uacuauagugacugcagaa

SEQ ID NO: 2135317 - RNA, 19 nt, Artificial Sequence
  Description of Artificial Sequence: Synthetic oligonucleotide
  Antisense strand to SEQ ID NO: 2135316
uucugcagucacuauagua

SEQ ID NO: 2135318 - RNA, 19 nt, Artificial Sequence
  Description of Artificial Sequence: Synthetic oligonucleotide
  Sense strand starting at position 273 of SEQ ID NO: 1882620
gguugaagacugcaguaua

SEQ ID NO: 2135319 - RNA, 19 nt, Artificial Sequence
  Description of Artificial Sequence: Synthetic oligonucleotide
  Antisense strand to SEQ ID NO: 2135318
uauacugcagucuucaacc

SEQ ID NO: 2135320 - RNA, 19 nt, Artificial Sequence
  Description of Artificial Sequence: Synthetic oligonucleotide
  Sense strand starting at position 289 of SEQ ID NO: 1882620
auaagaugcugaccacuaa

SEQ ID NO: 2135321 - RNA, 19 nt, Artificial Sequence
  Description of Artificial Sequence: Synthetic oligonucleotide
  Antisense strand to SEQ ID NO: 2135320
uuaguggucagcaucuuau

SEQ ID NO: 2135322 - RNA, 19 nt, Artificial Sequence
  Description of Artificial Sequence: Synthetic oligonucleotide
  Sense strand starting at position 853 of SEQ ID NO: 1882620
uggauuuguuuaguuagca

SEQ ID NO: 2135323 - RNA, 19 nt, Artificial Sequence
  Description of Artificial Sequence: Synthetic oligonucleotide
  Antisense strand to SEQ ID NO: 2135322
ugcuaacuaaacaaaucca

SEQ ID NO: 2135324 - RNA, 19 nt, Artificial Sequence
  Description of Artificial Sequence: Synthetic oligonucleotide
  Sense strand starting at position 1008 of SEQ ID NO: 1882620
gccugucaaccugggaaga

SEQ ID NO: 2135325 - RNA, 19 nt, Artificial Sequence
  Description of Artificial Sequence: Synthetic oligonucleotide
  Antisense strand to SEQ ID NO: 2135324
ucuucccagguugacaggc

SEQ ID NO: 2135326 - RNA, 19 nt, Artificial Sequence
  Description of Artificial Sequence: Synthetic oligonucleotide
  Sense strand starting at position 1009 of SEQ ID NO: 1882620
ccugucaaccugggaagaa

SEQ ID NO: 2135327 - RNA, 19 nt, Artificial Sequence
  Description of Artificial Sequence: Synthetic oligonucleotide
  Antisense strand to SEQ ID NO: 2135326
uucuucccagguugacagg

SEQ ID NO: 2135328 - RNA, 19 nt, Artificial Sequence
  Description of Artificial Sequence: Synthetic oligonucleotide
  Sense strand starting at position 1196 of SEQ ID NO: 1882620
gagccaguucuugaucuca

SEQ ID NO: 2135329 - RNA, 19 nt, Artificial Sequence
  Description of Artificial Sequence: Synthetic oligonucleotide
  Antisense strand to SEQ ID NO: 2135328
ugagaucaagaacuggcuc

SEQ ID NO: 2135330 - RNA, 19 nt, Artificial Sequence
  Description of Artificial Sequence: Synthetic oligonucleotide
  Sense strand starting at position 1333 of SEQ ID NO: 1882620
gcaaguaagaacugguuau

SEQ ID NO: 2135331 - RNA, 19 nt, Artificial Sequence
  Description of Artificial Sequence: Synthetic oligonucleotide
  Antisense strand to SEQ ID NO: 2135330
auaaccaguucuuacuugc

SEQ ID NO: 2135332 - RNA, 19 nt, Artificial Sequence
  Description of Artificial Sequence: Synthetic oligonucleotide
  Sense strand starting at position 2018 of SEQ ID NO: 1882620
caggcuuucgcguugacga

SEQ ID NO: 2135333 - RNA, 19 nt, Artificial Sequence
  Description of Artificial Sequence: Synthetic oligonucleotide
  Antisense strand to SEQ ID NO: 2135332
ucgucaacgcgaaagccug

SEQ ID NO: 2135334 - RNA, 19 nt, Artificial Sequence
  Description of Artificial Sequence: Synthetic oligonucleotide
  Sense strand starting at position 2079 of SEQ ID NO: 1882620
gcguuagagauggagacua

SEQ ID NO: 2135335 - RNA, 19 nt, Artificial Sequence
  Description of Artificial Sequence: Synthetic oligonucleotide
  Antisense strand to SEQ ID NO: 2135334
uagucuccaucucuaacgc

SEQ ID NO: 2135336 - RNA, 19 nt, Artificial Sequence
  Description of Artificial Sequence: Synthetic oligonucleotide
  Sense strand starting at position 2097 of SEQ ID NO: 1882620
aacgucuuccaagggagau

SEQ ID NO: 2135337 - RNA, 19 nt, Artificial Sequence
  Description of Artificial Sequence: Synthetic oligonucleotide
  Antisense strand to SEQ ID NO: 2135336
aucucccuuggaagacguu

SEQ ID NO: 2135338 - RNA, 19 nt, Artificial Sequence
  Description of Artificial Sequence: Synthetic oligonucleotide
  Sense strand starting at position 2098 of SEQ ID NO: 1882620
acgucuuccaagggagauu

SEQ ID NO: 2135339 - RNA, 19 nt, Artificial Sequence
  Description of Artificial Sequence: Synthetic oligonucleotide
  Antisense strand to SEQ ID NO: 2135338
aaucucccuuggaagacgu

SEQ ID NO: 2135340 - RNA, 19 nt, Artificial Sequence
  Description of Artificial Sequence: Synthetic oligonucleotide
  Sense strand starting at position 2140 of SEQ ID NO: 1882620
cugagagguugagcacaaa

SEQ ID NO: 2135341 - RNA, 19 nt, Artificial Sequence
  Description of Artificial Sequence: Synthetic oligonucleotide
  Antisense strand to SEQ ID NO: 2135340
uuugugcucaaccucucag

SEQ ID NO: 2135342 - RNA, 19 nt, Artificial Sequence
  Description of Artificial Sequence: Synthetic oligonucleotide
  Sense strand starting at position 2173 of SEQ ID NO: 1882620
cugcgcuuccagcaaauuu

SEQ ID NO: 2135343 - RNA, 19 nt, Artificial Sequence
  Description of Artificial Sequence: Synthetic oligonucleotide
  Antisense strand to SEQ ID NO: 2135342
aaauuugcuggaagcgcag

SEQ ID NO: 2135344 - RNA, 19 nt, Artificial Sequence
  Description of Artificial Sequence: Synthetic oligonucleotide
  Sense strand starting at position 2200 of SEQ ID NO: 1882620
gcacccaauccugggauau

SEQ ID NO: 2135345 - RNA, 19 nt, Artificial Sequence
  Description of Artificial Sequence: Synthetic oligonucleotide
  Antisense strand to SEQ ID NO: 2135344
auaucccaggauugggugc

SEQ ID NO: 2135346 - RNA, 19 nt, Artificial Sequence
  Description of Artificial Sequence: Synthetic oligonucleotide
  Sense strand starting at position 2202 of SEQ ID NO: 1882620
acccaauccugggauauuu

SEQ ID NO: 2135347 - RNA, 19 nt, Artificial Sequence
  Description of Artificial Sequence: Synthetic oligonucleotide
  Antisense strand to SEQ ID NO: 2135346
aaauaucccaggauugggu

SEQ ID NO: 2135348 - RNA, 19 nt, Artificial Sequence
  Description of Artificial Sequence: Synthetic oligonucleotide
  Sense strand starting at position 2295 of SEQ ID NO: 1882620
augauuucuuuggauuaga

SEQ ID NO: 2135349 - RNA, 19 nt, Artificial Sequence
  Description of Artificial Sequence: Synthetic oligonucleotide
  Antisense strand to SEQ ID NO: 2135348
ucuaauccaaagaaaucau

SEQ ID NO: 2135350 - RNA, 19 nt, Artificial Sequence
  Description of Artificial Sequence: Synthetic oligonucleotide
  Sense strand starting at position 2395 of SEQ ID NO: 1882620
ggacguauaguucuagcgu

SEQ ID NO: 2135351 - RNA, 19 nt, Artificial Sequence
  Description of Artificial Sequence: Synthetic oligonucleotide
  Antisense strand to SEQ ID NO: 2135350
acgcuagaacuauacgucc

SEQ ID NO: 2135352 - RNA, 19 nt, Artificial Sequence
  Description of Artificial Sequence: Synthetic oligonucleotide
  Sense strand starting at position 2535 of SEQ ID NO: 1882620
gagugaaggcccgaggaau

SEQ ID NO: 2135353 - RNA, 19 nt, Artificial Sequence
  Description of Artificial Sequence: Synthetic oligonucleotide
  Antisense strand to SEQ ID NO: 2135352
auuccucgggccuucacuc

SEQ ID NO: 2135354 - RNA, 19 nt, Artificial Sequence
  Description of Artificial Sequence: Synthetic oligonucleotide
  Sense strand starting at position 2661 of SEQ ID NO: 1882620
cgacuccugccagauaagu

SEQ ID NO: 2135355 - RNA, 19 nt, Artificial Sequence
  Description of Artificial Sequence: Synthetic oligonucleotide
  Antisense strand to SEQ ID NO: 2135354
acuuaucuggcaggagucg

SEQ ID NO: 2135356 - RNA, 19 nt, Artificial Sequence
  Description of Artificial Sequence: Synthetic oligonucleotide
  Sense strand starting at position 2683 of SEQ ID NO: 1882620
gcuagcaguagucaagaaa

SEQ ID NO: 2135357 - RNA, 19 nt, Artificial Sequence
  Description of Artificial Sequence: Synthetic oligonucleotide
  Antisense strand to SEQ ID NO: 2135356
uuucuugacuacugcuagc

SEQ ID NO: 2135358 - RNA, 19 nt, Artificial Sequence
  Description of Artificial Sequence: Synthetic oligonucleotide
  Sense strand starting at position 2686 of SEQ ID NO: 1882620
agcaguagucaagaaagcu

SEQ ID NO: 2135359 - RNA, 19 nt, Artificial Sequence
  Description of Artificial Sequence: Synthetic oligonucleotide
  Antisense strand to SEQ ID NO: 2135358
agcuuucuugacuacugcu

SEQ ID NO: 2135360 - RNA, 19 nt, Artificial Sequence
  Description of Artificial Sequence: Synthetic oligonucleotide
  Sense strand starting at position 2894 of SEQ ID NO: 1882620
aguagaaacuuucccugaa

SEQ ID NO: 2135361 - RNA, 19 nt, Artificial Sequence
  Description of Artificial Sequence: Synthetic oligonucleotide
  Antisense strand to SEQ ID NO: 2135360
uucagggaaaguuucuacu

SEQ ID NO: 2135362 - RNA, 19 nt, Artificial Sequence
  Description of Artificial Sequence: Synthetic oligonucleotide
  Sense strand starting at position 2895 of SEQ ID NO: 1882620
guagaaacuuucccugaag

SEQ ID NO: 2135363 - RNA, 19 nt, Artificial Sequence
  Description of Artificial Sequence: Synthetic oligonucleotide
  Antisense strand to SEQ ID NO: 2135362
cuucagggaaaguuucuac

SEQ ID NO: 2135364 - RNA, 19 nt, Artificial Sequence
  Description of Artificial Sequence: Synthetic oligonucleotide
  Sense strand starting at position 3102 of SEQ ID NO: 1882620
gccauagugaaaggguuaa

SEQ ID NO: 2135365 - RNA, 19 nt, Artificial Sequence
  Description of Artificial Sequence: Synthetic oligonucleotide
  Antisense strand to SEQ ID NO: 2135364
uuaacccuuucacuauggc

SEQ ID NO: 2135366 - RNA, 19 nt, Artificial Sequence
  Description of Artificial Sequence: Synthetic oligonucleotide
  Sense strand starting at position 3125 of SEQ ID NO: 1882620
cagcaaacugcugaagagu

SEQ ID NO: 2135367 - RNA, 19 nt, Artificial Sequence
  Description of Artificial Sequence: Synthetic oligonucleotide
  Antisense strand to SEQ ID NO: 2135366
acucuucagcaguuugcug

SEQ ID NO: 2135368 - RNA, 19 nt, Artificial Sequence
  Description of Artificial Sequence: Synthetic oligonucleotide
  Sense strand starting at position 3141 of SEQ ID NO: 1882620
agugacaagcccuaucauu

SEQ ID NO: 2135369 - RNA, 19 nt, Artificial Sequence
  Description of Artificial Sequence: Synthetic oligonucleotide
  Antisense strand to SEQ ID NO: 2135368
aaugauagggcuugucacu

SEQ ID NO: 2135370 - RNA, 19 nt, Artificial Sequence
  Description of Artificial Sequence: Synthetic oligonucleotide
  Sense strand starting at position 3155 of SEQ ID NO: 1882620
ucauuuaacugugaaauug

SEQ ID NO: 2135371 - RNA, 19 nt, Artificial Sequence
  Description of Artificial Sequence: Synthetic oligonucleotide
  Antisense strand to SEQ ID NO: 2135370
caauuucacaguuaaauga

SEQ ID NO: 2135372 - RNA, 19 nt, Artificial Sequence
  Description of Artificial Sequence: Synthetic oligonucleotide
  Sense strand starting at position 3331 of SEQ ID NO: 1882620
ugugaauugcaguaaagga

SEQ ID NO: 2135373 - RNA, 19 nt, Artificial Sequence
  Description of Artificial Sequence: Synthetic oligonucleotide
  Antisense strand to SEQ ID NO: 2135372
uccuuuacugcaauucaca

SEQ ID NO: 2135374 - RNA, 19 nt, Artificial Sequence
  Description of Artificial Sequence: Synthetic oligonucleotide
  Sense strand starting at position 3388 of SEQ ID NO: 1882620
cucacagucuaaucaguaa

SEQ ID NO: 2135375 - RNA, 19 nt, Artificial Sequence
  Description of Artificial Sequence: Synthetic oligonucleotide
  Antisense strand to SEQ ID NO: 2135374
uuacugauuagacugugag

SEQ ID NO: 2135376 - RNA, 19 nt, Artificial Sequence
  Description of Artificial Sequence: Synthetic oligonucleotide
  Sense strand starting at position 3391 of SEQ ID NO: 1882620
acagucuaaucaguaaaga

SEQ ID NO: 2135377 - RNA, 19 nt, Artificial Sequence
  Description of Artificial Sequence: Synthetic oligonucleotide
  Antisense strand to SEQ ID NO: 2135376
ucuuuacugauuagacugu

SEQ ID NO: 2135378 - RNA, 19 nt, Artificial Sequence
  Description of Artificial Sequence: Synthetic oligonucleotide
  Sense strand starting at position 3652 of SEQ ID NO: 1882620
cucagauauuaugugucaa

SEQ ID NO: 2135379 - RNA, 19 nt, Artificial Sequence
  Description of Artificial Sequence: Synthetic oligonucleotide
  Antisense strand to SEQ ID NO: 2135378
uugacacauaauaucugag

SEQ ID NO: 2135380 - RNA, 19 nt, Artificial Sequence
  Description of Artificial Sequence: Synthetic oligonucleotide
  Sense strand starting at position 3665 of SEQ ID NO: 1882620
ugucaaggaucaucagcaa

SEQ ID NO: 2135381 - RNA, 19 nt, Artificial Sequence
  Description of Artificial Sequence: Synthetic oligonucleotide
  Antisense strand to SEQ ID NO: 2135380
uugcugaugauccuugaca

SEQ ID NO: 2135382 - RNA, 19 nt, Artificial Sequence
  Description of Artificial Sequence: Synthetic oligonucleotide
  Sense strand starting at position 3772 of SEQ ID NO: 1882620
agaugaucauacguuuaca

SEQ ID NO: 2135383 - RNA, 19 nt, Artificial Sequence
  Description of Artificial Sequence: Synthetic oligonucleotide
  Antisense strand to SEQ ID NO: 2135382
uguaaacguaugaucaucu

SEQ ID NO: 2135384 - RNA, 19 nt, Artificial Sequence
  Description of Artificial Sequence: Synthetic oligonucleotide
  Sense strand starting at position 3775 of SEQ ID NO: 1882620
ugaucauacguuuacaauc

SEQ ID NO: 2135385 - RNA, 19 nt, Artificial Sequence
  Description of Artificial Sequence: Synthetic oligonucleotide
  Antisense strand to SEQ ID NO: 2135384
gauuguaaacguaugauca

SEQ ID NO: 2135386 - RNA, 19 nt, Artificial Sequence
  Description of Artificial Sequence: Synthetic oligonucleotide
  Sense strand starting at position 3797 of SEQ ID NO: 1882620
aaauaagcuuacguagaca

SEQ ID NO: 2135387 - RNA, 19 nt, Artificial Sequence
  Description of Artificial Sequence: Synthetic oligonucleotide
  Antisense strand to SEQ ID NO: 2135386
ugucuacguaagcuuauuu

SEQ ID NO: 2135388 - RNA, 19 nt, Artificial Sequence
  Description of Artificial Sequence: Synthetic oligonucleotide
  Sense strand starting at position 3800 of SEQ ID NO: 1882620
uaagcuuacguagacaaau

SEQ ID NO: 2135389 - RNA, 19 nt, Artificial Sequence
  Description of Artificial Sequence: Synthetic oligonucleotide
  Antisense strand to SEQ ID NO: 2135388
auuugucuacguaagcuua

SEQ ID NO: 2135390 - RNA, 19 nt, Artificial Sequence
  Description of Artificial Sequence: Synthetic oligonucleotide
  Sense strand starting at position 3981 of SEQ ID NO: 1882620
caguguaaaccacgauuaa

SEQ ID NO: 2135391 - RNA, 19 nt, Artificial Sequence
  Description of Artificial Sequence: Synthetic oligonucleotide
  Antisense strand to SEQ ID NO: 2135390
uuaaucgugguuuacacug

SEQ ID NO: 2135392 - RNA, 19 nt, Artificial Sequence
  Description of Artificial Sequence: Synthetic oligonucleotide
  Sense strand starting at position 3982 of SEQ ID NO: 1882620
aguguaaaccacgauuaau

SEQ ID NO: 2135393 - RNA, 19 nt, Artificial Sequence
  Description of Artificial Sequence: Synthetic oligonucleotide
  Antisense strand to SEQ ID NO: 2135392
auuaaucgugguuuacacu

SEQ ID NO: 2135394 - RNA, 19 nt, Artificial Sequence
  Description of Artificial Sequence: Synthetic oligonucleotide
  Sense strand starting at position 164 of SEQ ID NO: 1882621
auaugaugccucuauauug

SEQ ID NO: 2135395 - RNA, 19 nt, Artificial Sequence
  Description of Artificial Sequence: Synthetic oligonucleotide
  Antisense strand to SEQ ID NO: 2135394
caauauagaggcaucauau

SEQ ID NO: 2135396 - RNA, 19 nt, Artificial Sequence
  Description of Artificial Sequence: Synthetic oligonucleotide
  Sense strand starting at position 171 of SEQ ID NO: 1882621
gccucuauauuguuggaaa

SEQ ID NO: 2135397 - RNA, 19 nt, Artificial Sequence
  Description of Artificial Sequence: Synthetic oligonucleotide
  Antisense strand to SEQ ID NO: 2135396
uuuccaacaauauagaggc

SEQ ID NO: 2135398 - RNA, 19 nt, Artificial Sequence
  Description of Artificial Sequence: Synthetic oligonucleotide
  Sense strand starting at position 233 of SEQ ID NO: 1882621
auucuuauuugucuacgua

SEQ ID NO: 2135399 - RNA, 19 nt, Artificial Sequence
  Description of Artificial Sequence: Synthetic oligonucleotide
  Antisense strand to SEQ ID NO: 2135398
uacguagacaaauaagaau

SEQ ID NO: 2135400 - RNA, 19 nt, Artificial Sequence
  Description of Artificial Sequence: Synthetic oligonucleotide
  Sense strand starting at position 237 of SEQ ID NO: 1882621
uuauuugucuacguaagcu

SEQ ID NO: 2135401 - RNA, 19 nt, Artificial Sequence
  Description of Artificial Sequence: Synthetic oligonucleotide
  Antisense strand to SEQ ID NO: 2135400
agcuuacguagacaaauaa

SEQ ID NO: 2135402 - RNA, 19 nt, Artificial Sequence
  Description of Artificial Sequence: Synthetic oligonucleotide
  Sense strand starting at position 261 of SEQ ID NO: 1882621
ugagauuguaaacguauga

SEQ ID NO: 2135403 - RNA, 19 nt, Artificial Sequence
  Description of Artificial Sequence: Synthetic oligonucleotide
  Antisense strand to SEQ ID NO: 2135402
ucauacguuuacaaucuca

SEQ ID NO: 2135404 - RNA, 19 nt, Artificial Sequence
  Description of Artificial Sequence: Synthetic oligonucleotide
  Sense strand starting at position 265 of SEQ ID NO: 1882621
auuguaaacguaugaucau

SEQ ID NO: 2135405 - RNA, 19 nt, Artificial Sequence
  Description of Artificial Sequence: Synthetic oligonucleotide
  Antisense strand to SEQ ID NO: 2135404
augaucauacguuuacaau

SEQ ID NO: 2135406 - RNA, 19 nt, Artificial Sequence
  Description of Artificial Sequence: Synthetic oligonucleotide
  Sense strand starting at position 306 of SEQ ID NO: 1882621
uggcuucuagcacaauacu

SEQ ID NO: 2135407 - RNA, 19 nt, Artificial Sequence
  Description of Artificial Sequence: Synthetic oligonucleotide
  Antisense strand to SEQ ID NO: 2135406
aguauugugcuagaagcca

SEQ ID NO: 2135408 - RNA, 19 nt, Artificial Sequence
  Description of Artificial Sequence: Synthetic oligonucleotide
  Sense strand starting at position 326 of SEQ ID NO: 1882621
aacauuagagucugugauc

SEQ ID NO: 2135409 - RNA, 19 nt, Artificial Sequence
  Description of Artificial Sequence: Synthetic oligonucleotide
  Antisense strand to SEQ ID NO: 2135408
gaucacagacucuaauguu

SEQ ID NO: 2135410 - RNA, 19 nt, Artificial Sequence
  Description of Artificial Sequence: Synthetic oligonucleotide
  Sense strand starting at position 363 of SEQ ID NO: 1882621
ugauuugcugauugcugau

SEQ ID NO: 2135411 - RNA, 19 nt, Artificial Sequence
  Description of Artificial Sequence: Synthetic oligonucleotide
  Antisense strand to SEQ ID NO: 2135410
aucagcaaucagcaaauca

SEQ ID NO: 2135412 - RNA, 19 nt, Artificial Sequence
  Description of Artificial Sequence: Synthetic oligonucleotide
  Sense strand starting at position 375 of SEQ ID NO: 1882621
ugcugaugauccuugacac

SEQ ID NO: 2135413 - RNA, 19 nt, Artificial Sequence
  Description of Artificial Sequence: Synthetic oligonucleotide
  Antisense strand to SEQ ID NO: 2135412
gugucaaggaucaucagca

SEQ ID NO: 2135414 - RNA, 19 nt, Artificial Sequence
  Description of Artificial Sequence: Synthetic oligonucleotide
  Sense strand starting at position 376 of SEQ ID NO: 1882621
gcugaugauccuugacaca

SEQ ID NO: 2135415 - RNA, 19 nt, Artificial Sequence
  Description of Artificial Sequence: Synthetic oligonucleotide
  Antisense strand to SEQ ID NO: 2135414
ugugucaaggaucaucagc

SEQ ID NO: 2135416 - RNA, 19 nt, Artificial Sequence
  Description of Artificial Sequence: Synthetic oligonucleotide
  Sense strand starting at position 460 of SEQ ID NO: 1882621
ccagucuuccuugaaguuu

SEQ ID NO: 2135417 - RNA, 19 nt, Artificial Sequence
  Description of Artificial Sequence: Synthetic oligonucleotide
  Antisense strand to SEQ ID NO: 2135416
aaacuucaaggaagacugg

SEQ ID NO: 2135418 - RNA, 19 nt, Artificial Sequence
  Description of Artificial Sequence: Synthetic oligonucleotide
  Sense strand starting at position 466 of SEQ ID NO: 1882621
uuccuugaaguuuacagau

SEQ ID NO: 2135419 - RNA, 19 nt, Artificial Sequence
  Description of Artificial Sequence: Synthetic oligonucleotide
  Antisense strand to SEQ ID NO: 2135418
aucuguaaacuucaaggaa

SEQ ID NO: 2135420 - RNA, 19 nt, Artificial Sequence
  Description of Artificial Sequence: Synthetic oligonucleotide
  Sense strand starting at position 479 of SEQ ID NO: 1882621
acagauauguuuccuuuau

SEQ ID NO: 2135421 - RNA, 19 nt, Artificial Sequence
  Description of Artificial Sequence: Synthetic oligonucleotide
  Antisense strand to SEQ ID NO: 2135420
auaaaggaaacauaucugu

SEQ ID NO: 2135422 - RNA, 19 nt, Artificial Sequence
  Description of Artificial Sequence: Synthetic oligonucleotide
  Sense strand starting at position 568 of SEQ ID NO: 1882621
guuccuugaggucagagaa

SEQ ID NO: 2135423 - RNA, 19 nt, Artificial Sequence
  Description of Artificial Sequence: Synthetic oligonucleotide
  Antisense strand to SEQ ID NO: 2135422
uucucugaccucaaggaac

SEQ ID NO: 2135424 - RNA, 19 nt, Artificial Sequence
  Description of Artificial Sequence: Synthetic oligonucleotide
  Sense strand starting at position 629 of SEQ ID NO: 1882621
ggcauaguugcucaauaaa

SEQ ID NO: 2135425 - RNA, 19 nt, Artificial Sequence
  Description of Artificial Sequence: Synthetic oligonucleotide
  Antisense strand to SEQ ID NO: 2135424
uuuauugagcaacuaugcc

SEQ ID NO: 2135426 - RNA, 19 nt, Artificial Sequence
  Description of Artificial Sequence: Synthetic oligonucleotide
  Sense strand starting at position 807 of SEQ ID NO: 1882621
acagauaagugagaauaaa

SEQ ID NO: 2135427 - RNA, 19 nt, Artificial Sequence
  Description of Artificial Sequence: Synthetic oligonucleotide
  Antisense strand to SEQ ID NO: 2135426
uuuauucucacuuaucugu

SEQ ID NO: 2135428 - RNA, 19 nt, Artificial Sequence
  Description of Artificial Sequence: Synthetic oligonucleotide
  Sense strand starting at position 898 of SEQ ID NO: 1882621
aaugauagggcuugucacu

SEQ ID NO: 2135429 - RNA, 19 nt, Artificial Sequence
  Description of Artificial Sequence: Synthetic oligonucleotide
  Antisense strand to SEQ ID NO: 2135428
agugacaagcccuaucauu

SEQ ID NO: 2135430 - RNA, 19 nt, Artificial Sequence
  Description of Artificial Sequence: Synthetic oligonucleotide
  Sense strand starting at position 955 of SEQ ID NO: 1882621
cguucucuccauuauuaca

SEQ ID NO: 2135431 - RNA, 19 nt, Artificial Sequence
  Description of Artificial Sequence: Synthetic oligonucleotide
  Antisense strand to SEQ ID NO: 2135430
uguaauaauggagagaacg

SEQ ID NO: 2135432 - RNA, 19 nt, Artificial Sequence
  Description of Artificial Sequence: Synthetic oligonucleotide
  Sense strand starting at position 1039 of SEQ ID NO: 1882621
cagugauggcuccagaacu

SEQ ID NO: 2135433 - RNA, 19 nt, Artificial Sequence
  Description of Artificial Sequence: Synthetic oligonucleotide
  Antisense strand to SEQ ID NO: 2135432
aguucuggagccaucacug

SEQ ID NO: 2135434 - RNA, 19 nt, Artificial Sequence
  Description of Artificial Sequence: Synthetic oligonucleotide
  Sense strand starting at position 1151 of SEQ ID NO: 1882621
gaaaguuucuacuuggaau

SEQ ID NO: 2135435 - RNA, 19 nt, Artificial Sequence
  Description of Artificial Sequence: Synthetic oligonucleotide
  Antisense strand to SEQ ID NO: 2135434
auuccaaguagaaacuuuc

SEQ ID NO: 2135436 - RNA, 19 nt, Artificial Sequence
  Description of Artificial Sequence: Synthetic oligonucleotide
  Sense strand starting at position 1208 of SEQ ID NO: 1882621
agauacuuauucucauguu

SEQ ID NO: 2135437 - RNA, 19 nt, Artificial Sequence
  Description of Artificial Sequence: Synthetic oligonucleotide
  Antisense strand to SEQ ID NO: 2135436
aacaugagaauaaguaucu

SEQ ID NO: 2135438 - RNA, 19 nt, Artificial Sequence
  Description of Artificial Sequence: Synthetic oligonucleotide
  Sense strand starting at position 1254 of SEQ ID NO: 1882621
guccacuuaacggaugaca

SEQ ID NO: 2135439 - RNA, 19 nt, Artificial Sequence
  Description of Artificial Sequence: Synthetic oligonucleotide
  Antisense strand to SEQ ID NO: 2135438
ugucauccguuaaguggac

SEQ ID NO: 2135440 - RNA, 19 nt, Artificial Sequence
  Description of Artificial Sequence: Synthetic oligonucleotide
  Sense strand starting at position 1256 of SEQ ID NO: 1882621
ccacuuaacggaugacaua

SEQ ID NO: 2135441 - RNA, 19 nt, Artificial Sequence
  Description of Artificial Sequence: Synthetic oligonucleotide
  Antisense strand to SEQ ID NO: 2135440
uaugucauccguuaagugg

SEQ ID NO: 2135442 - RNA, 19 nt, Artificial Sequence
  Description of Artificial Sequence: Synthetic oligonucleotide
  Sense strand starting at position 1277 of SEQ ID NO: 1882621
gaauuaagaguucgauagg

SEQ ID NO: 2135443 - RNA, 19 nt, Artificial Sequence
  Description of Artificial Sequence: Synthetic oligonucleotide
  Antisense strand to SEQ ID NO: 2135442
ccuaucgaacucuuaauuc

SEQ ID NO: 2135444 - RNA, 19 nt, Artificial Sequence
  Description of Artificial Sequence: Synthetic oligonucleotide
  Sense strand starting at position 1350 of SEQ ID NO: 1882621
augagcuuucuugacuacu

SEQ ID NO: 2135445 - RNA, 19 nt, Artificial Sequence
  Description of Artificial Sequence: Synthetic oligonucleotide
  Antisense strand to SEQ ID NO: 2135444
aguagucaagaaagcucau

SEQ ID NO: 2135446 - RNA, 19 nt, Artificial Sequence
  Description of Artificial Sequence: Synthetic oligonucleotide
  Sense strand starting at position 1653 of SEQ ID NO: 1882621
cuauacgucccagaacacu

SEQ ID NO: 2135447 - RNA, 19 nt, Artificial Sequence
  Description of Artificial Sequence: Synthetic oligonucleotide
  Antisense strand to SEQ ID NO: 2135446
aguguucugggacguauag

SEQ ID NO: 2135448 - RNA, 19 nt, Artificial Sequence
  Description of Artificial Sequence: Synthetic oligonucleotide
  Sense strand starting at position 1737 of SEQ ID NO: 1882621
guaguucucuaauccaaag

SEQ ID NO: 2135449 - RNA, 19 nt, Artificial Sequence
  Description of Artificial Sequence: Synthetic oligonucleotide
  Antisense strand to SEQ ID NO: 2135448
cuuuggauuagagaacuac

SEQ ID NO: 2135450 - RNA, 19 nt, Artificial Sequence
  Description of Artificial Sequence: Synthetic oligonucleotide
  Sense strand starting at position 1810 of SEQ ID NO: 1882621
uccuguaggaugugagaca

SEQ ID NO: 2135451 - RNA, 19 nt, Artificial Sequence
  Description of Artificial Sequence: Synthetic oligonucleotide
  Antisense strand to SEQ ID NO: 2135450
ugucucacauccuacagga

SEQ ID NO: 2135452 - RNA, 19 nt, Artificial Sequence
  Description of Artificial Sequence: Synthetic oligonucleotide
  Sense strand starting at position 1936 of SEQ ID NO: 1882621
gacgcaaucucccuuggaa

SEQ ID NO: 2135453 - RNA, 19 nt, Artificial Sequence
  Description of Artificial Sequence: Synthetic oligonucleotide
  Antisense strand to SEQ ID NO: 2135452
uuccaagggagauugcguc

SEQ ID NO: 2135454 - RNA, 19 nt, Artificial Sequence
  Description of Artificial Sequence: Synthetic oligonucleotide
  Sense strand starting at position 2597 of SEQ ID NO: 1882621
guacauuuggucuagcgau

SEQ ID NO: 2135455 - RNA, 19 nt, Artificial Sequence
  Description of Artificial Sequence: Synthetic oligonucleotide
  Antisense strand to SEQ ID NO: 2135454
aucgcuagaccaaauguac

SEQ ID NO: 2135456 - RNA, 19 nt, Artificial Sequence
  Description of Artificial Sequence: Synthetic oligonucleotide
  Sense strand starting at position 2896 of SEQ ID NO: 1882621
ugcaaagcucuggagaguu

SEQ ID NO: 2135457 - RNA, 19 nt, Artificial Sequence
  Description of Artificial Sequence: Synthetic oligonucleotide
  Antisense strand to SEQ ID NO: 2135456
aacucuccagagcuuugca

SEQ ID NO: 2135458 - RNA, 19 nt, Artificial Sequence
  Description of Artificial Sequence: Synthetic oligonucleotide
  Sense strand starting at position 2977 of SEQ ID NO: 1882621
cugauuccugugggaagua

SEQ ID NO: 2135459 - RNA, 19 nt, Artificial Sequence
  Description of Artificial Sequence: Synthetic oligonucleotide
  Antisense strand to SEQ ID NO: 2135458
uacuucccacaggaaucag

SEQ ID NO: 2135460 - RNA, 19 nt, Artificial Sequence
  Description of Artificial Sequence: Synthetic oligonucleotide
  Sense strand starting at position 3143 of SEQ ID NO: 1882621
acugcaagugaguauucuu

SEQ ID NO: 2135461 - RNA, 19 nt, Artificial Sequence
  Description of Artificial Sequence: Synthetic oligonucleotide
  Antisense strand to SEQ ID NO: 2135460
aagaauacucacuugcagu

SEQ ID NO: 2135462 - RNA, 19 nt, Artificial Sequence
  Description of Artificial Sequence: Synthetic oligonucleotide
  Sense strand starting at position 3172 of SEQ ID NO: 1882621
cugcucagucuguuugcua

SEQ ID NO: 2135463 - RNA, 19 nt, Artificial Sequence
  Description of Artificial Sequence: Synthetic oligonucleotide
  Antisense strand to SEQ ID NO: 2135462
uagcaaacagacugagcag

SEQ ID NO: 2135464 - RNA, 19 nt, Artificial Sequence
  Description of Artificial Sequence: Synthetic oligonucleotide
  Sense strand starting at position 3249 of SEQ ID NO: 1882621
ucccuuauuucugugcagu

SEQ ID NO: 2135465 - RNA, 19 nt, Artificial Sequence
  Description of Artificial Sequence: Synthetic oligonucleotide
  Antisense strand to SEQ ID NO: 2135464
acugcacagaaauaaggga

SEQ ID NO: 2135466 - RNA, 19 nt, Artificial Sequence
  Description of Artificial Sequence: Synthetic oligonucleotide
  Sense strand starting at position 3250 of SEQ ID NO: 1882621
cccuuauuucugugcaguu

SEQ ID NO: 2135467 - RNA, 19 nt, Artificial Sequence
  Description of Artificial Sequence: Synthetic oligonucleotide
  Antisense strand to SEQ ID NO: 2135466
aacugcacagaaauaaggg

SEQ ID NO: 2135468 - RNA, 19 nt, Artificial Sequence
  Description of Artificial Sequence: Synthetic oligonucleotide
  Sense strand starting at position 3732 of SEQ ID NO: 1882621
auaagaagcagguauuguu

SEQ ID NO: 2135469 - RNA, 19 nt, Artificial Sequence
  Description of Artificial Sequence: Synthetic oligonucleotide
  Antisense strand to SEQ ID NO: 2135468
aacaauaccugcuucuuau

SEQ ID NO: 2135470 - RNA, 19 nt, Artificial Sequence
  Description of Artificial Sequence: Synthetic oligonucleotide
  Sense strand starting at position 3797 of SEQ ID NO: 1882621
gcuuucuuuggagagaauu

SEQ ID NO: 2135471 - RNA, 19 nt, Artificial Sequence
  Description of Artificial Sequence: Synthetic oligonucleotide
  Antisense strand to SEQ ID NO: 2135470
aauucucuccaaagaaagc

SEQ ID NO: 2135472 - RNA, 19 nt, Artificial Sequence
  Description of Artificial Sequence: Synthetic oligonucleotide
  Sense strand starting at position 3883 of SEQ ID NO: 1882621
uucugcagucacuauagua

SEQ ID NO: 2135473 - RNA, 19 nt, Artificial Sequence
  Description of Artificial Sequence: Synthetic oligonucleotide
  Antisense strand to SEQ ID NO: 2135472
uacuauagugacugcagaa

SEQ ID NO: 2135474 - RNA, 19 nt, Artificial Sequence
  Description of Artificial Sequence: Synthetic oligonucleotide
  Sense strand starting at position 94 of SEQ ID NO: 1882622
ccaacuuuccgugaaacuc

SEQ ID NO: 2135475 - RNA, 19 nt, Artificial Sequence
  Description of Artificial Sequence: Synthetic oligonucleotide
  Antisense strand to SEQ ID NO: 2135474
gaguuucacggaaaguugg

SEQ ID NO: 2135476 - RNA, 19 nt, Artificial Sequence
  Description of Artificial Sequence: Synthetic oligonucleotide
  Sense strand starting at position 488 of SEQ ID NO: 1882622
gucugaaguacugacggaa

SEQ ID NO: 2135477 - RNA, 19 nt, Artificial Sequence
  Description of Artificial Sequence: Synthetic oligonucleotide
  Antisense strand to SEQ ID NO: 2135476
uuccgucaguacuucagac

SEQ ID NO: 2135478 - RNA, 19 nt, Artificial Sequence
  Description of Artificial Sequence: Synthetic oligonucleotide
  Sense strand starting at position 503 of SEQ ID NO: 1882622
ggaagaccucucugcuaug

SEQ ID NO: 2135479 - RNA, 19 nt, Artificial Sequence
  Description of Artificial Sequence: Synthetic oligonucleotide
  Antisense strand to SEQ ID NO: 2135478
cauagcagagaggucuucc

SEQ ID NO: 2135480 - RNA, 19 nt, Artificial Sequence
  Description of Artificial Sequence: Synthetic oligonucleotide
  Sense strand starting at position 556 of SEQ ID NO: 1882622
gugguauauuucucuuccu

SEQ ID NO: 2135481 - RNA, 19 nt, Artificial Sequence
  Description of Artificial Sequence: Synthetic oligonucleotide
  Antisense strand to SEQ ID NO: 2135480
aggaagagaaauauaccac

SEQ ID NO: 2135482 - RNA, 19 nt, Artificial Sequence
  Description of Artificial Sequence: Synthetic oligonucleotide
  Sense strand starting at position 685 of SEQ ID NO: 1882622
gaaacuguauuccuggaca

SEQ ID NO: 2135483 - RNA, 19 nt, Artificial Sequence
  Description of Artificial Sequence: Synthetic oligonucleotide
  Antisense strand to SEQ ID NO: 2135482
uguccaggaauacaguuuc

SEQ ID NO: 2135484 - RNA, 19 nt, Artificial Sequence
  Description of Artificial Sequence: Synthetic oligonucleotide
  Sense strand starting at position 687 of SEQ ID NO: 1882622
aacuguauuccuggacagu

SEQ ID NO: 2135485 - RNA, 19 nt, Artificial Sequence
  Description of Artificial Sequence: Synthetic oligonucleotide
  Antisense strand to SEQ ID NO: 2135484
acuguccaggaauacaguu

SEQ ID NO: 2135486 - RNA, 19 nt, Artificial Sequence
  Description of Artificial Sequence: Synthetic oligonucleotide
  Sense strand starting at position 688 of SEQ ID NO: 1882622
acuguauuccuggacaguc

SEQ ID NO: 2135487 - RNA, 19 nt, Artificial Sequence
  Description of Artificial Sequence: Synthetic oligonucleotide
  Antisense strand to SEQ ID NO: 2135486
gacuguccaggaauacagu

SEQ ID NO: 2135488 - RNA, 19 nt, Artificial Sequence
  Description of Artificial Sequence: Synthetic oligonucleotide
  Sense strand starting at position 791 of SEQ ID NO: 1882622
aucugaccuccggauuaau

SEQ ID NO: 2135489 - RNA, 19 nt, Artificial Sequence
  Description of Artificial Sequence: Synthetic oligonucleotide
  Antisense strand to SEQ ID NO: 2135488
auuaauccggaggucagau

SEQ ID NO: 2135490 - RNA, 19 nt, Artificial Sequence
  Description of Artificial Sequence: Synthetic oligonucleotide
  Sense strand starting at position 794 of SEQ ID NO: 1882622
ugaccuccggauuaaugua

SEQ ID NO: 2135491 - RNA, 19 nt, Artificial Sequence
  Description of Artificial Sequence: Synthetic oligonucleotide
  Antisense strand to SEQ ID NO: 2135490
uacauuaauccggagguca

SEQ ID NO: 2135492 - RNA, 19 nt, Artificial Sequence
  Description of Artificial Sequence: Synthetic oligonucleotide
  Sense strand starting at position 801 of SEQ ID NO: 1882622
cggauuaauguacaauacu

SEQ ID NO: 2135493 - RNA, 19 nt, Artificial Sequence
  Description of Artificial Sequence: Synthetic oligonucleotide
  Antisense strand to SEQ ID NO: 2135492
aguauuguacauuaauccg

SEQ ID NO: 2135494 - RNA, 19 nt, Artificial Sequence
  Description of Artificial Sequence: Synthetic oligonucleotide
  Sense strand starting at position 1238 of SEQ ID NO: 1882622
aagaguaagacuuguuggu

SEQ ID NO: 2135495 - RNA, 19 nt, Artificial Sequence
  Description of Artificial Sequence: Synthetic oligonucleotide
  Antisense strand to SEQ ID NO: 2135494
accaacaagucuuacucuu

SEQ ID NO: 2135496 - RNA, 19 nt, Artificial Sequence
  Description of Artificial Sequence: Synthetic oligonucleotide
  Sense strand starting at position 1240 of SEQ ID NO: 1882622
gaguaagacuuguugguaa

SEQ ID NO: 2135497 - RNA, 19 nt, Artificial Sequence
  Description of Artificial Sequence: Synthetic oligonucleotide
  Antisense strand to SEQ ID NO: 2135496
uuaccaacaagucuuacuc

SEQ ID NO: 2135498 - RNA, 19 nt, Artificial Sequence
  Description of Artificial Sequence: Synthetic oligonucleotide
  Sense strand starting at position 1243 of SEQ ID NO: 1882622
uaagacuuguugguaaacu

SEQ ID NO: 2135499 - RNA, 19 nt, Artificial Sequence
  Description of Artificial Sequence: Synthetic oligonucleotide
  Antisense strand to SEQ ID NO: 2135498
aguuuaccaacaagucuua

SEQ ID NO: 2135500 - RNA, 19 nt, Artificial Sequence
  Description of Artificial Sequence: Synthetic oligonucleotide
  Sense strand starting at position 1340 of SEQ ID NO: 1882622
uuaggacauccuugauuag

SEQ ID NO: 2135501 - RNA, 19 nt, Artificial Sequence
  Description of Artificial Sequence: Synthetic oligonucleotide
  Antisense strand to SEQ ID NO: 2135500
cuaaucaaggauguccuaa

SEQ ID NO: 2135502 - RNA, 19 nt, Artificial Sequence
  Description of Artificial Sequence: Synthetic oligonucleotide
  Sense strand starting at position 1343 of SEQ ID NO: 1882622
ggacauccuugauuaguua

SEQ ID NO: 2135503 - RNA, 19 nt, Artificial Sequence
  Description of Artificial Sequence: Synthetic oligonucleotide
  Antisense strand to SEQ ID NO: 2135502
uaacuaaucaaggaugucc

SEQ ID NO: 2135504 - RNA, 19 nt, Artificial Sequence
  Description of Artificial Sequence: Synthetic oligonucleotide
  Sense strand starting at position 1371 of SEQ ID NO: 1882622
uuugaauguccagaugucu

SEQ ID NO: 2135505 - RNA, 19 nt, Artificial Sequence
  Description of Artificial Sequence: Synthetic oligonucleotide
  Antisense strand to SEQ ID NO: 2135504
agacaucuggacauucaaa

SEQ ID NO: 2135506 - RNA, 19 nt, Artificial Sequence
  Description of Artificial Sequence: Synthetic oligonucleotide
  Sense strand starting at position 1488 of SEQ ID NO: 1882622
ggcugaagagguuacucuu

SEQ ID NO: 2135507 - RNA, 19 nt, Artificial Sequence
  Description of Artificial Sequence: Synthetic oligonucleotide
  Antisense strand to SEQ ID NO: 2135506
aagaguaaccucuucagcc

SEQ ID NO: 2135508 - RNA, 19 nt, Artificial Sequence
  Description of Artificial Sequence: Synthetic oligonucleotide
  Sense strand starting at position 1491 of SEQ ID NO: 1882622
ugaagagguuacucuuuaa

SEQ ID NO: 2135509 - RNA, 19 nt, Artificial Sequence
  Description of Artificial Sequence: Synthetic oligonucleotide
  Antisense strand to SEQ ID NO: 2135508
uuaaagaguaaccucuuca

SEQ ID NO: 2135510 - RNA, 19 nt, Artificial Sequence
  Description of Artificial Sequence: Synthetic oligonucleotide
  Sense strand starting at position 1495 of SEQ ID NO: 1882622
gagguuacucuuuaaggcu

SEQ ID NO: 2135511 - RNA, 19 nt, Artificial Sequence
  Description of Artificial Sequence: Synthetic oligonucleotide
  Antisense strand to SEQ ID NO: 2135510
agccuuaaagaguaaccuc

SEQ ID NO: 2135512 - RNA, 19 nt, Artificial Sequence
  Description of Artificial Sequence: Synthetic oligonucleotide
  Sense strand starting at position 1532 of SEQ ID NO: 1882622
cugugauuauaaucugaag

SEQ ID NO: 2135513 - RNA, 19 nt, Artificial Sequence
  Description of Artificial Sequence: Synthetic oligonucleotide
  Antisense strand to SEQ ID NO: 2135512
cuucagauuauaaucacag

SEQ ID NO: 2135514 - RNA, 19 nt, Artificial Sequence
  Description of Artificial Sequence: Synthetic oligonucleotide
  Sense strand starting at position 1534 of SEQ ID NO: 1882622
gugauuauaaucugaagug

SEQ ID NO: 2135515 - RNA, 19 nt, Artificial Sequence
  Description of Artificial Sequence: Synthetic oligonucleotide
  Antisense strand to SEQ ID NO: 2135514
cacuucagauuauaaucac

SEQ ID NO: 2135516 - RNA, 19 nt, Artificial Sequence
  Description of Artificial Sequence: Synthetic oligonucleotide
  Sense strand starting at position 2098 of SEQ ID NO: 1882622
cgcgucuacgugagaggaa

SEQ ID NO: 2135517 - RNA, 19 nt, Artificial Sequence
  Description of Artificial Sequence: Synthetic oligonucleotide
  Antisense strand to SEQ ID NO: 2135516
uuccucucacguagacgcg

SEQ ID NO: 2135518 - RNA, 19 nt, Artificial Sequence
  Description of Artificial Sequence: Synthetic oligonucleotide
  Sense strand starting at position 2140 of SEQ ID NO: 1882622
gguaaauggaacggguuua

SEQ ID NO: 2135519 - RNA, 19 nt, Artificial Sequence
  Description of Artificial Sequence: Synthetic oligonucleotide
  Antisense strand to SEQ ID NO: 2135518
uaaacccguuccauuuacc

SEQ ID NO: 2135520 - RNA, 19 nt, Artificial Sequence
  Description of Artificial Sequence: Synthetic oligonucleotide
  Sense strand starting at position 2141 of SEQ ID NO: 1882622
guaaauggaacggguuuau

SEQ ID NO: 2135521 - RNA, 19 nt, Artificial Sequence
  Description of Artificial Sequence: Synthetic oligonucleotide
  Antisense strand to SEQ ID NO: 2135520
auaaacccguuccauuuac

SEQ ID NO: 2135522 - RNA, 19 nt, Artificial Sequence
  Description of Artificial Sequence: Synthetic oligonucleotide
  Sense strand starting at position 2282 of SEQ ID NO: 1882622
ugucucugagguuagagau

SEQ ID NO: 2135523 - RNA, 19 nt, Artificial Sequence
  Description of Artificial Sequence: Synthetic oligonucleotide
  Antisense strand to SEQ ID NO: 2135522
aucucuaaccucagagaca

SEQ ID NO: 2135524 - RNA, 19 nt, Artificial Sequence
  Description of Artificial Sequence: Synthetic oligonucleotide
  Sense strand starting at position 2288 of SEQ ID NO: 1882622
ugagguuagagaugccuca

SEQ ID NO: 2135525 - RNA, 19 nt, Artificial Sequence
  Description of Artificial Sequence: Synthetic oligonucleotide
  Antisense strand to SEQ ID NO: 2135524
ugaggcaucucuaaccuca

SEQ ID NO: 2135526 - RNA, 19 nt, Artificial Sequence
  Description of Artificial Sequence: Synthetic oligonucleotide
  Sense strand starting at position 2409 of SEQ ID NO: 1882622
gcucuuucgccauccacga

SEQ ID NO: 2135527 - RNA, 19 nt, Artificial Sequence
  Description of Artificial Sequence: Synthetic oligonucleotide
  Antisense strand to SEQ ID NO: 2135526
ucguggauggcgaaagagc

SEQ ID NO: 2135528 - RNA, 19 nt, Artificial Sequence
  Description of Artificial Sequence: Synthetic oligonucleotide
  Sense strand starting at position 2452 of SEQ ID NO: 1882622
gcugauguaugauuauaug

SEQ ID NO: 2135529 - RNA, 19 nt, Artificial Sequence
  Description of Artificial Sequence: Synthetic oligonucleotide
  Antisense strand to SEQ ID NO: 2135528
cauauaaucauacaucagc

SEQ ID NO: 2135530 - RNA, 19 nt, Artificial Sequence
  Description of Artificial Sequence: Synthetic oligonucleotide
  Sense strand starting at position 2458 of SEQ ID NO: 1882622
guaugauuauaugucagaa

SEQ ID NO: 2135531 - RNA, 19 nt, Artificial Sequence
  Description of Artificial Sequence: Synthetic oligonucleotide
  Antisense strand to SEQ ID NO: 2135530
uucugacauauaaucauac

SEQ ID NO: 2135532 - RNA, 19 nt, Artificial Sequence
  Description of Artificial Sequence: Synthetic oligonucleotide
  Sense strand starting at position 2589 of SEQ ID NO: 1882622
cgaguuacgagauauaaug

SEQ ID NO: 2135533 - RNA, 19 nt, Artificial Sequence
  Description of Artificial Sequence: Synthetic oligonucleotide
  Antisense strand to SEQ ID NO: 2135532
cauuauaucucguaacucg

SEQ ID NO: 2135534 - RNA, 19 nt, Artificial Sequence
  Description of Artificial Sequence: Synthetic oligonucleotide
  Sense strand starting at position 2738 of SEQ ID NO: 1882622
cagaaagcgauaugagguu

SEQ ID NO: 2135535 - RNA, 19 nt, Artificial Sequence
  Description of Artificial Sequence: Synthetic oligonucleotide
  Antisense strand to SEQ ID NO: 2135534
aaccucauaucgcuuucug

SEQ ID NO: 2135536 - RNA, 19 nt, Artificial Sequence
  Description of Artificial Sequence: Synthetic oligonucleotide
  Sense strand starting at position 2772 of SEQ ID NO: 1882622
agaggucaguccucccuaa

SEQ ID NO: 2135537 - RNA, 19 nt, Artificial Sequence
  Description of Artificial Sequence: Synthetic oligonucleotide
  Antisense strand to SEQ ID NO: 2135536
uuagggaggacugaccucu

SEQ ID NO: 2135538 - RNA, 19 nt, Artificial Sequence
  Description of Artificial Sequence: Synthetic oligonucleotide
  Sense strand starting at position 2776 of SEQ ID NO: 1882622
gucaguccucccuaaauac

SEQ ID NO: 2135539 - RNA, 19 nt, Artificial Sequence
  Description of Artificial Sequence: Synthetic oligonucleotide
  Antisense strand to SEQ ID NO: 2135538
guauuuagggaggacugac

SEQ ID NO: 2135540 - RNA, 19 nt, Artificial Sequence
  Description of Artificial Sequence: Synthetic oligonucleotide
  Sense strand starting at position 2921 of SEQ ID NO: 1882622
gggucaaccuuaucagaua

SEQ ID NO: 2135541 - RNA, 19 nt, Artificial Sequence
  Description of Artificial Sequence: Synthetic oligonucleotide
  Antisense strand to SEQ ID NO: 2135540
uaucugauaagguugaccc

SEQ ID NO: 2135542 - RNA, 19 nt, Artificial Sequence
  Description of Artificial Sequence: Synthetic oligonucleotide
  Sense strand starting at position 3071 of SEQ ID NO: 1882622
agaaguugugcugggauga

SEQ ID NO: 2135543 - RNA, 19 nt, Artificial Sequence
  Description of Artificial Sequence: Synthetic oligonucleotide
  Antisense strand to SEQ ID NO: 2135542
ucaucccagcacaacuucu

SEQ ID NO: 2135544 - RNA, 19 nt, Artificial Sequence
  Description of Artificial Sequence: Synthetic oligonucleotide
  Sense strand starting at position 3224 of SEQ ID NO: 1882622
auucuaacacgugggaaua

SEQ ID NO: 2135545 - RNA, 19 nt, Artificial Sequence
  Description of Artificial Sequence: Synthetic oligonucleotide
  Antisense strand to SEQ ID NO: 2135544
uauucccacguguuagaau

SEQ ID NO: 2135546 - RNA, 19 nt, Artificial Sequence
  Description of Artificial Sequence: Synthetic oligonucleotide
  Sense strand starting at position 3567 of SEQ ID NO: 1882622
accguuagucaucagauug

SEQ ID NO: 2135547 - RNA, 19 nt, Artificial Sequence
  Description of Artificial Sequence: Synthetic oligonucleotide
  Antisense strand to SEQ ID NO: 2135546
caaucugaugacuaacggu

SEQ ID NO: 2135548 - RNA, 19 nt, Artificial Sequence
  Description of Artificial Sequence: Synthetic oligonucleotide
  Sense strand starting at position 3572 of SEQ ID NO: 1882622
uagucaucagauuggcaau

SEQ ID NO: 2135549 - RNA, 19 nt, Artificial Sequence
  Description of Artificial Sequence: Synthetic oligonucleotide
  Antisense strand to SEQ ID NO: 2135548
auugccaaucugaugacua

SEQ ID NO: 2135550 - RNA, 19 nt, Artificial Sequence
  Description of Artificial Sequence: Synthetic oligonucleotide
  Sense strand starting at position 3578 of SEQ ID NO: 1882622
ucagauuggcaaugguaca

SEQ ID NO: 2135551 - RNA, 19 nt, Artificial Sequence
  Description of Artificial Sequence: Synthetic oligonucleotide
  Antisense strand to SEQ ID NO: 2135550
uguaccauugccaaucuga

SEQ ID NO: 2135552 - RNA, 19 nt, Artificial Sequence
  Description of Artificial Sequence: Synthetic oligonucleotide
  Sense strand starting at position 3664 of SEQ ID NO: 1882622
ugguacaacccauagguau

SEQ ID NO: 2135553 - RNA, 19 nt, Artificial Sequence
  Description of Artificial Sequence: Synthetic oligonucleotide
  Antisense strand to SEQ ID NO: 2135552
auaccuauggguuguacca

SEQ ID NO: 2135554 - RNA, 19 nt, Artificial Sequence
  Description of Artificial Sequence: Synthetic oligonucleotide
  Sense strand starting at position 537 of SEQ ID NO: 1882623
auuaaagacgucuaguuau

SEQ ID NO: 2135555 - RNA, 19 nt, Artificial Sequence
  Description of Artificial Sequence: Synthetic oligonucleotide
  Antisense strand to SEQ ID NO: 2135554
auaacuagacgucuuuaau

SEQ ID NO: 2135556 - RNA, 19 nt, Artificial Sequence
  Description of Artificial Sequence: Synthetic oligonucleotide
  Sense strand starting at position 540 of SEQ ID NO: 1882623
aaagacgucuaguuaucuu

SEQ ID NO: 2135557 - RNA, 19 nt, Artificial Sequence
  Description of Artificial Sequence: Synthetic oligonucleotide
  Antisense strand to SEQ ID NO: 2135556
aagauaacuagacgucuuu

SEQ ID NO: 2135558 - RNA, 19 nt, Artificial Sequence
  Description of Artificial Sequence: Synthetic oligonucleotide
  Sense strand starting at position 543 of SEQ ID NO: 1882623
gacgucuaguuaucuugaa

SEQ ID NO: 2135559 - RNA, 19 nt, Artificial Sequence
  Description of Artificial Sequence: Synthetic oligonucleotide
  Antisense strand to SEQ ID NO: 2135558
uucaagauaacuagacguc

SEQ ID NO: 2135560 - RNA, 19 nt, Artificial Sequence
  Description of Artificial Sequence: Synthetic oligonucleotide
  Sense strand starting at position 544 of SEQ ID NO: 1882623
acgucuaguuaucuugaaa

SEQ ID NO: 2135561 - RNA, 19 nt, Artificial Sequence
  Description of Artificial Sequence: Synthetic oligonucleotide
  Antisense strand to SEQ ID NO: 2135560
uuucaagauaacuagacgu

SEQ ID NO: 2135562 - RNA, 19 nt, Artificial Sequence
  Description of Artificial Sequence: Synthetic oligonucleotide
  Sense strand starting at position 617 of SEQ ID NO: 1882623
uaucaugugcgacagaaag

SEQ ID NO: 2135563 - RNA, 19 nt, Artificial Sequence
  Description of Artificial Sequence: Synthetic oligonucleotide
  Antisense strand to SEQ ID NO: 2135562
cuuucugucgcacaugaua

SEQ ID NO: 2135564 - RNA, 19 nt, Artificial Sequence
  Description of Artificial Sequence: Synthetic oligonucleotide
  Sense strand starting at position 850 of SEQ ID NO: 1882623
uuugacaagguuuaucagu

SEQ ID NO: 2135565 - RNA, 19 nt, Artificial Sequence
  Description of Artificial Sequence: Synthetic oligonucleotide
  Antisense strand to SEQ ID NO: 2135564
acugauaaaccuugucaaa

SEQ ID NO: 2135566 - RNA, 19 nt, Artificial Sequence
  Description of Artificial Sequence: Synthetic oligonucleotide
  Sense strand starting at position 852 of SEQ ID NO: 1882623
ugacaagguuuaucaguag

SEQ ID NO: 2135567 - RNA, 19 nt, Artificial Sequence
  Description of Artificial Sequence: Synthetic oligonucleotide
  Antisense strand to SEQ ID NO: 2135566
cuacugauaaaccuuguca

SEQ ID NO: 2135568 - RNA, 19 nt, Artificial Sequence
  Description of Artificial Sequence: Synthetic oligonucleotide
  Sense strand starting at position 855 of SEQ ID NO: 1882623
caagguuuaucaguagaca

SEQ ID NO: 2135569 - RNA, 19 nt, Artificial Sequence
  Description of Artificial Sequence: Synthetic oligonucleotide
  Antisense strand to SEQ ID NO: 2135568
ugucuacugauaaaccuug

SEQ ID NO: 2135570 - RNA, 19 nt, Artificial Sequence
  Description of Artificial Sequence: Synthetic oligonucleotide
  Sense strand starting at position 867 of SEQ ID NO: 1882623
guagacauucuuuauagca

SEQ ID NO: 2135571 - RNA, 19 nt, Artificial Sequence
  Description of Artificial Sequence: Synthetic oligonucleotide
  Antisense strand to SEQ ID NO: 2135570
ugcuauaaagaaugucuac

SEQ ID NO: 2135572 - RNA, 19 nt, Artificial Sequence
  Description of Artificial Sequence: Synthetic oligonucleotide
  Sense strand starting at position 875 of SEQ ID NO: 1882623
ucuuuauagcacugcugua

SEQ ID NO: 2135573 - RNA, 19 nt, Artificial Sequence
  Description of Artificial Sequence: Synthetic oligonucleotide
  Antisense strand to SEQ ID NO: 2135572
uacagcagugcuauaaaga

SEQ ID NO: 2135574 - RNA, 19 nt, Artificial Sequence
  Description of Artificial Sequence: Synthetic oligonucleotide
  Sense strand starting at position 1077 of SEQ ID NO: 1882623
ugccauucugugcauucua

SEQ ID NO: 2135575 - RNA, 19 nt, Artificial Sequence
  Description of Artificial Sequence: Synthetic oligonucleotide
  Antisense strand to SEQ ID NO: 2135574
uagaaugcacagaauggca

SEQ ID NO: 2135576 - RNA, 19 nt, Artificial Sequence
  Description of Artificial Sequence: Synthetic oligonucleotide
  Sense strand starting at position 1084 of SEQ ID NO: 1882623
cugugcauucuagguuaua

SEQ ID NO: 2135577 - RNA, 19 nt, Artificial Sequence
  Description of Artificial Sequence: Synthetic oligonucleotide
  Antisense strand to SEQ ID NO: 2135576
uauaaccuagaaugcacag

SEQ ID NO: 2135578 - RNA, 19 nt, Artificial Sequence
  Description of Artificial Sequence: Synthetic oligonucleotide
  Sense strand starting at position 1085 of SEQ ID NO: 1882623
ugugcauucuagguuauaa

SEQ ID NO: 2135579 - RNA, 19 nt, Artificial Sequence
  Description of Artificial Sequence: Synthetic oligonucleotide
  Antisense strand to SEQ ID NO: 2135578
uuauaaccuagaaugcaca

SEQ ID NO: 2135580 - RNA, 19 nt, Artificial Sequence
  Description of Artificial Sequence: Synthetic oligonucleotide
  Sense strand starting at position 1087 of SEQ ID NO: 1882623
ugcauucuagguuauaauc

SEQ ID NO: 2135581 - RNA, 19 nt, Artificial Sequence
  Description of Artificial Sequence: Synthetic oligonucleotide
  Antisense strand to SEQ ID NO: 2135580
gauuauaaccuagaaugca

SEQ ID NO: 2135582 - RNA, 19 nt, Artificial Sequence
  Description of Artificial Sequence: Synthetic oligonucleotide
  Sense strand starting at position 1109 of SEQ ID NO: 1882623
auuucucauuugcgaguaa

SEQ ID NO: 2135583 - RNA, 19 nt, Artificial Sequence
  Description of Artificial Sequence: Synthetic oligonucleotide
  Antisense strand to SEQ ID NO: 2135582
uuacucgcaaaugagaaau

SEQ ID NO: 2135584 - RNA, 19 nt, Artificial Sequence
  Description of Artificial Sequence: Synthetic oligonucleotide
  Sense strand starting at position 1205 of SEQ ID NO: 1882623
augcuaaugugucucacua

SEQ ID NO: 2135585 - RNA, 19 nt, Artificial Sequence
  Description of Artificial Sequence: Synthetic oligonucleotide
  Antisense strand to SEQ ID NO: 2135584
uagugagacacauuagcau

SEQ ID NO: 2135586 - RNA, 19 nt, Artificial Sequence
  Description of Artificial Sequence: Synthetic oligonucleotide
  Sense strand starting at position 1263 of SEQ ID NO: 1882623
ugauccaauuguguuuaga

SEQ ID NO: 2135587 - RNA, 19 nt, Artificial Sequence
  Description of Artificial Sequence: Synthetic oligonucleotide
  Antisense strand to SEQ ID NO: 2135586
ucuaaacacaauuggauca

SEQ ID NO: 2135588 - RNA, 19 nt, Artificial Sequence
  Description of Artificial Sequence: Synthetic oligonucleotide
  Sense strand starting at position 1266 of SEQ ID NO: 1882623
uccaauuguguuuagaggu

SEQ ID NO: 2135589 - RNA, 19 nt, Artificial Sequence
  Description of Artificial Sequence: Synthetic oligonucleotide
  Antisense strand to SEQ ID NO: 2135588
accucuaaacacaauugga

SEQ ID NO: 2135590 - RNA, 19 nt, Artificial Sequence
  Description of Artificial Sequence: Synthetic oligonucleotide
  Sense strand starting at position 1302 of SEQ ID NO: 1882623
agauuuaagugugacuaua

SEQ ID NO: 2135591 - RNA, 19 nt, Artificial Sequence
  Description of Artificial Sequence: Synthetic oligonucleotide
  Antisense strand to SEQ ID NO: 2135590
uauagucacacuuaaaucu

SEQ ID NO: 2135592 - RNA, 19 nt, Artificial Sequence
  Description of Artificial Sequence: Synthetic oligonucleotide
  Sense strand starting at position 2016 of SEQ ID NO: 1882623
cuuacuaugugaucuuuag

SEQ ID NO: 2135593 - RNA, 19 nt, Artificial Sequence
  Description of Artificial Sequence: Synthetic oligonucleotide
  Antisense strand to SEQ ID NO: 2135592
cuaaagaucacauaguaag

SEQ ID NO: 2135594 - RNA, 19 nt, Artificial Sequence
  Description of Artificial Sequence: Synthetic oligonucleotide
  Sense strand starting at position 2022 of SEQ ID NO: 1882623
augugaucuuuagcaagau

SEQ ID NO: 2135595 - RNA, 19 nt, Artificial Sequence
  Description of Artificial Sequence: Synthetic oligonucleotide
  Antisense strand to SEQ ID NO: 2135594
aucuugcuaaagaucacau

SEQ ID NO: 2135596 - RNA, 19 nt, Artificial Sequence
  Description of Artificial Sequence: Synthetic oligonucleotide
  Sense strand starting at position 2026 of SEQ ID NO: 1882623
gaucuuuagcaagauaguu

SEQ ID NO: 2135597 - RNA, 19 nt, Artificial Sequence
  Description of Artificial Sequence: Synthetic oligonucleotide
  Antisense strand to SEQ ID NO: 2135596
aacuaucuugcuaaagauc

SEQ ID NO: 2135598 - RNA, 19 nt, Artificial Sequence
  Description of Artificial Sequence: Synthetic oligonucleotide
  Sense strand starting at position 2031 of SEQ ID NO: 1882623
uuagcaagauaguuaacuu

SEQ ID NO: 2135599 - RNA, 19 nt, Artificial Sequence
  Description of Artificial Sequence: Synthetic oligonucleotide
  Antisense strand to SEQ ID NO: 2135598
aaguuaacuaucuugcuaa

SEQ ID NO: 2135600 - RNA, 19 nt, Artificial Sequence
  Description of Artificial Sequence: Synthetic oligonucleotide
  Sense strand starting at position 2185 of SEQ ID NO: 1882623
cuuagaucccgucaggaca

SEQ ID NO: 2135601 - RNA, 19 nt, Artificial Sequence
  Description of Artificial Sequence: Synthetic oligonucleotide
  Antisense strand to SEQ ID NO: 2135600
uguccugacgggaucuaag

SEQ ID NO: 2135602 - RNA, 19 nt, Artificial Sequence
  Description of Artificial Sequence: Synthetic oligonucleotide
  Sense strand starting at position 2247 of SEQ ID NO: 1882623
agccucuuagugggagauu

SEQ ID NO: 2135603 - RNA, 19 nt, Artificial Sequence
  Description of Artificial Sequence: Synthetic oligonucleotide
  Antisense strand to SEQ ID NO: 2135602
aaucucccacuaagaggcu

SEQ ID NO: 2135604 - RNA, 19 nt, Artificial Sequence
  Description of Artificial Sequence: Synthetic oligonucleotide
  Sense strand starting at position 2248 of SEQ ID NO: 1882623
gccucuuagugggagauuu

SEQ ID NO: 2135605 - RNA, 19 nt, Artificial Sequence
  Description of Artificial Sequence: Synthetic oligonucleotide
  Antisense strand to SEQ ID NO: 2135604
aaaucucccacuaagaggc

SEQ ID NO: 2135606 - RNA, 19 nt, Artificial Sequence
  Description of Artificial Sequence: Synthetic oligonucleotide
  Sense strand starting at position 2340 of SEQ ID NO: 1882623
cauacuguggaauguuuaa

SEQ ID NO: 2135607 - RNA, 19 nt, Artificial Sequence
  Description of Artificial Sequence: Synthetic oligonucleotide
  Antisense strand to SEQ ID NO: 2135606
uuaaacauuccacaguaug

SEQ ID NO: 2135608 - RNA, 19 nt, Artificial Sequence
  Description of Artificial Sequence: Synthetic oligonucleotide
  Sense strand starting at position 2347 of SEQ ID NO: 1882623
uggaauguuuaagacuuaa

SEQ ID NO: 2135609 - RNA, 19 nt, Artificial Sequence
  Description of Artificial Sequence: Synthetic oligonucleotide
  Antisense strand to SEQ ID NO: 2135608
uuaagucuuaaacauucca

SEQ ID NO: 2135610 - RNA, 19 nt, Artificial Sequence
  Description of Artificial Sequence: Synthetic oligonucleotide
  Sense strand starting at position 2477 of SEQ ID NO: 1882623
aguacuaacuuccucagua

SEQ ID NO: 2135611 - RNA, 19 nt, Artificial Sequence
  Description of Artificial Sequence: Synthetic oligonucleotide
  Antisense strand to SEQ ID NO: 2135610
uacugaggaaguuaguacu

SEQ ID NO: 2135612 - RNA, 19 nt, Artificial Sequence
  Description of Artificial Sequence: Synthetic oligonucleotide
  Sense strand starting at position 2478 of SEQ ID NO: 1882623
guacuaacuuccucaguaa

SEQ ID NO: 2135613 - RNA, 19 nt, Artificial Sequence
  Description of Artificial Sequence: Synthetic oligonucleotide
  Antisense strand to SEQ ID NO: 2135612
uuacugaggaaguuaguac

SEQ ID NO: 2135614 - RNA, 19 nt, Artificial Sequence
  Description of Artificial Sequence: Synthetic oligonucleotide
  Sense strand starting at position 2543 of SEQ ID NO: 1882623
cugucaguuucuguuagga

SEQ ID NO: 2135615 - RNA, 19 nt, Artificial Sequence
  Description of Artificial Sequence: Synthetic oligonucleotide
  Antisense strand to SEQ ID NO: 2135614
uccuaacagaaacugacag

SEQ ID NO: 2135616 - RNA, 19 nt, Artificial Sequence
  Description of Artificial Sequence: Synthetic oligonucleotide
  Sense strand starting at position 2620 of SEQ ID NO: 1882623
cugguuauccugugucuau

SEQ ID NO: 2135617 - RNA, 19 nt, Artificial Sequence
  Description of Artificial Sequence: Synthetic oligonucleotide
  Antisense strand to SEQ ID NO: 2135616
auagacacaggauaaccag

SEQ ID NO: 2135618 - RNA, 19 nt, Artificial Sequence
  Description of Artificial Sequence: Synthetic oligonucleotide
  Sense strand starting at position 2621 of SEQ ID NO: 1882623
ugguuauccugugucuauc

SEQ ID NO: 2135619 - RNA, 19 nt, Artificial Sequence
  Description of Artificial Sequence: Synthetic oligonucleotide
  Antisense strand to SEQ ID NO: 2135618
gauagacacaggauaacca

SEQ ID NO: 2135620 - RNA, 19 nt, Artificial Sequence
  Description of Artificial Sequence: Synthetic oligonucleotide
  Sense strand starting at position 2627 of SEQ ID NO: 1882623
uccugugucuauccuccaa

SEQ ID NO: 2135621 - RNA, 19 nt, Artificial Sequence
  Description of Artificial Sequence: Synthetic oligonucleotide
  Antisense strand to SEQ ID NO: 2135620
uuggaggauagacacagga

SEQ ID NO: 2135622 - RNA, 19 nt, Artificial Sequence
  Description of Artificial Sequence: Synthetic oligonucleotide
  Sense strand starting at position 2729 of SEQ ID NO: 1882623
uuacuuaaaugucuggauu

SEQ ID NO: 2135623 - RNA, 19 nt, Artificial Sequence
  Description of Artificial Sequence: Synthetic oligonucleotide
  Antisense strand to SEQ ID NO: 2135622
aauccagacauuuaaguaa

SEQ ID NO: 2135624 - RNA, 19 nt, Artificial Sequence
  Description of Artificial Sequence: Synthetic oligonucleotide
  Sense strand starting at position 2846 of SEQ ID NO: 1882623
guccucauuugacauuacu

SEQ ID NO: 2135625 - RNA, 19 nt, Artificial Sequence
  Description of Artificial Sequence: Synthetic oligonucleotide
  Antisense strand to SEQ ID NO: 2135624
aguaaugucaaaugaggac

SEQ ID NO: 2135626 - RNA, 19 nt, Artificial Sequence
  Description of Artificial Sequence: Synthetic oligonucleotide
  Sense strand starting at position 2988 of SEQ ID NO: 1882623
gugcuaaacuaacuaggaa

SEQ ID NO: 2135627 - RNA, 19 nt, Artificial Sequence
  Description of Artificial Sequence: Synthetic oligonucleotide
  Antisense strand to SEQ ID NO: 2135626
uuccuaguuaguuuagcac

SEQ ID NO: 2135628 - RNA, 19 nt, Artificial Sequence
  Description of Artificial Sequence: Synthetic oligonucleotide
  Sense strand starting at position 3154 of SEQ ID NO: 1882623
uugguuugacuuuaguagu

SEQ ID NO: 2135629 - RNA, 19 nt, Artificial Sequence
  Description of Artificial Sequence: Synthetic oligonucleotide
  Antisense strand to SEQ ID NO: 2135628
acuacuaaagucaaaccaa

SEQ ID NO: 2135630 - RNA, 19 nt, Artificial Sequence
  Description of Artificial Sequence: Synthetic oligonucleotide
  Sense strand starting at position 3160 of SEQ ID NO: 1882623
ugacuuuaguagucaauga

SEQ ID NO: 2135631 - RNA, 19 nt, Artificial Sequence
  Description of Artificial Sequence: Synthetic oligonucleotide
  Antisense strand to SEQ ID NO: 2135630
ucauugacuacuaaaguca

SEQ ID NO: 2135632 - RNA, 19 nt, Artificial Sequence
  Description of Artificial Sequence: Synthetic oligonucleotide
  Sense strand starting at position 3164 of SEQ ID NO: 1882623
uuuaguagucaaugaaaga

SEQ ID NO: 2135633 - RNA, 19 nt, Artificial Sequence
  Description of Artificial Sequence: Synthetic oligonucleotide
  Antisense strand to SEQ ID NO: 2135632
ucuuucauugacuacuaaa

SEQ ID NO: 2135634 - RNA, 19 nt, Artificial Sequence
  Description of Artificial Sequence: Synthetic oligonucleotide
  Sense strand starting at position 70 of SEQ ID NO: 1882624
ggugaaucccauuauauuc

SEQ ID NO: 2135635 - RNA, 19 nt, Artificial Sequence
  Description of Artificial Sequence: Synthetic oligonucleotide
  Antisense strand to SEQ ID NO: 2135634
gaauauaaugggauucacc

SEQ ID NO: 2135636 - RNA, 19 nt, Artificial Sequence
  Description of Artificial Sequence: Synthetic oligonucleotide
  Sense strand starting at position 154 of SEQ ID NO: 1882624
augcaaagucucugaauag

SEQ ID NO: 2135637 - RNA, 19 nt, Artificial Sequence
  Description of Artificial Sequence: Synthetic oligonucleotide
  Antisense strand to SEQ ID NO: 2135636
cuauucagagacuuugcau

SEQ ID NO: 2135638 - RNA, 19 nt, Artificial Sequence
  Description of Artificial Sequence: Synthetic oligonucleotide
  Sense strand starting at position 214 of SEQ ID NO: 1882624
guugaaagcacuggauuaa

SEQ ID NO: 2135639 - RNA, 19 nt, Artificial Sequence
  Description of Artificial Sequence: Synthetic oligonucleotide
  Antisense strand to SEQ ID NO: 2135638
uuaauccagugcuuucaac

SEQ ID NO: 2135640 - RNA, 19 nt, Artificial Sequence
  Description of Artificial Sequence: Synthetic oligonucleotide
  Sense strand starting at position 276 of SEQ ID NO: 1882624
caggauguguauucuaaac

SEQ ID NO: 2135641 - RNA, 19 nt, Artificial Sequence
  Description of Artificial Sequence: Synthetic oligonucleotide
  Antisense strand to SEQ ID NO: 2135640
guuuagaauacacauccug

SEQ ID NO: 2135642 - RNA, 19 nt, Artificial Sequence
  Description of Artificial Sequence: Synthetic oligonucleotide
  Sense strand starting at position 457 of SEQ ID NO: 1882624
auggguucacaguggauau

SEQ ID NO: 2135643 - RNA, 19 nt, Artificial Sequence
  Description of Artificial Sequence: Synthetic oligonucleotide
  Antisense strand to SEQ ID NO: 2135642
auauccacugugaacccau

SEQ ID NO: 2135644 - RNA, 19 nt, Artificial Sequence
  Description of Artificial Sequence: Synthetic oligonucleotide
  Sense strand starting at position 561 of SEQ ID NO: 1882624
aaagauguuucuguauuag

SEQ ID NO: 2135645 - RNA, 19 nt, Artificial Sequence
  Description of Artificial Sequence: Synthetic oligonucleotide
  Antisense strand to SEQ ID NO: 2135644
cuaauacagaaacaucuuu

SEQ ID NO: 2135646 - RNA, 19 nt, Artificial Sequence
  Description of Artificial Sequence: Synthetic oligonucleotide
  Sense strand starting at position 570 of SEQ ID NO: 1882624
ucuguauuagguuaaacaa

SEQ ID NO: 2135647 - RNA, 19 nt, Artificial Sequence
  Description of Artificial Sequence: Synthetic oligonucleotide
  Antisense strand to SEQ ID NO: 2135646
uuguuuaaccuaauacaga

SEQ ID NO: 2135648 - RNA, 19 nt, Artificial Sequence
  Description of Artificial Sequence: Synthetic oligonucleotide
  Sense strand starting at position 671 of SEQ ID NO: 1882624
agagaagaaucagaggaau

SEQ ID NO: 2135649 - RNA, 19 nt, Artificial Sequence
  Description of Artificial Sequence: Synthetic oligonucleotide
  Antisense strand to SEQ ID NO: 2135648
auuccucugauucuucucu

SEQ ID NO: 2135650 - RNA, 19 nt, Artificial Sequence
  Description of Artificial Sequence: Synthetic oligonucleotide
  Sense strand starting at position 751 of SEQ ID NO: 1882624
uccuuaaaucucuguggaa

SEQ ID NO: 2135651 - RNA, 19 nt, Artificial Sequence
  Description of Artificial Sequence: Synthetic oligonucleotide
  Antisense strand to SEQ ID NO: 2135650
uuccacagagauuuaagga

SEQ ID NO: 2135652 - RNA, 19 nt, Artificial Sequence
  Description of Artificial Sequence: Synthetic oligonucleotide
  Sense strand starting at position 752 of SEQ ID NO: 1882624
ccuuaaaucucuguggaag

SEQ ID NO: 2135653 - RNA, 19 nt, Artificial Sequence
  Description of Artificial Sequence: Synthetic oligonucleotide
  Antisense strand to SEQ ID NO: 2135652
cuuccacagagauuuaagg

SEQ ID NO: 2135654 - RNA, 19 nt, Artificial Sequence
  Description of Artificial Sequence: Synthetic oligonucleotide
  Sense strand starting at position 882 of SEQ ID NO: 1882624
cuuccaucuggauagcaaa

SEQ ID NO: 2135655 - RNA, 19 nt, Artificial Sequence
  Description of Artificial Sequence: Synthetic oligonucleotide
  Antisense strand to SEQ ID NO: 2135654
uuugcuauccagauggaag

SEQ ID NO: 2135656 - RNA, 19 nt, Artificial Sequence
  Description of Artificial Sequence: Synthetic oligonucleotide
  Sense strand starting at position 957 of SEQ ID NO: 1882624
ggaagaaugccuggguaug

SEQ ID NO: 2135657 - RNA, 19 nt, Artificial Sequence
  Description of Artificial Sequence: Synthetic oligonucleotide
  Antisense strand to SEQ ID NO: 2135656
cauacccaggcauucuucc

SEQ ID NO: 2135658 - RNA, 19 nt, Artificial Sequence
  Description of Artificial Sequence: Synthetic oligonucleotide
  Sense strand starting at position 958 of SEQ ID NO: 1882624
gaagaaugccuggguauga

SEQ ID NO: 2135659 - RNA, 19 nt, Artificial Sequence
  Description of Artificial Sequence: Synthetic oligonucleotide
  Antisense strand to SEQ ID NO: 2135658
ucauacccaggcauucuuc

SEQ ID NO: 2135660 - RNA, 19 nt, Artificial Sequence
  Description of Artificial Sequence: Synthetic oligonucleotide
  Sense strand starting at position 959 of SEQ ID NO: 1882624
aagaaugccuggguaugaa

SEQ ID NO: 2135661 - RNA, 19 nt, Artificial Sequence
  Description of Artificial Sequence: Synthetic oligonucleotide
  Antisense strand to SEQ ID NO: 2135660
uucauacccaggcauucuu

SEQ ID NO: 2135662 - RNA, 19 nt, Artificial Sequence
  Description of Artificial Sequence: Synthetic oligonucleotide
  Sense strand starting at position 1106 of SEQ ID NO: 1882624
accaaaugugaaggguuua

SEQ ID NO: 2135663 - RNA, 19 nt, Artificial Sequence
  Description of Artificial Sequence: Synthetic oligonucleotide
  Antisense strand to SEQ ID NO: 2135662
uaaacccuucacauuuggu

SEQ ID NO: 2135664 - RNA, 19 nt, Artificial Sequence
  Description of Artificial Sequence: Synthetic oligonucleotide
  Sense strand starting at position 1637 of SEQ ID NO: 1882624
gggaccuauuuggauggau

SEQ ID NO: 2135665 - RNA, 19 nt, Artificial Sequence
  Description of Artificial Sequence: Synthetic oligonucleotide
  Antisense strand to SEQ ID NO: 2135664
auccauccaaauagguccc

SEQ ID NO: 2135666 - RNA, 19 nt, Artificial Sequence
  Description of Artificial Sequence: Synthetic oligonucleotide
  Sense strand starting at position 1912 of SEQ ID NO: 1882624
cagagcugccgcuucgaaa

SEQ ID NO: 2135667 - RNA, 19 nt, Artificial Sequence
  Description of Artificial Sequence: Synthetic oligonucleotide
  Antisense strand to SEQ ID NO: 2135666
uuucgaagcggcagcucug

SEQ ID NO: 2135668 - RNA, 19 nt, Artificial Sequence
  Description of Artificial Sequence: Synthetic oligonucleotide
  Sense strand starting at position 2013 of SEQ ID NO: 1882624
cguucuugacuuuaggaua

SEQ ID NO: 2135669 - RNA, 19 nt, Artificial Sequence
  Description of Artificial Sequence: Synthetic oligonucleotide
  Antisense strand to SEQ ID NO: 2135668
uauccuaaagucaagaacg

SEQ ID NO: 2135670 - RNA, 19 nt, Artificial Sequence
  Description of Artificial Sequence: Synthetic oligonucleotide
  Sense strand starting at position 2131 of SEQ ID NO: 1882624
cggacuuacggagacgaaa

SEQ ID NO: 2135671 - RNA, 19 nt, Artificial Sequence
  Description of Artificial Sequence: Synthetic oligonucleotide
  Antisense strand to SEQ ID NO: 2135670
uuucgucuccguaaguccg

SEQ ID NO: 2135672 - RNA, 19 nt, Artificial Sequence
  Description of Artificial Sequence: Synthetic oligonucleotide
  Sense strand starting at position 2347 of SEQ ID NO: 1882624
cguagugucuauuucauag

SEQ ID NO: 2135673 - RNA, 19 nt, Artificial Sequence
  Description of Artificial Sequence: Synthetic oligonucleotide
  Antisense strand to SEQ ID NO: 2135672
cuaugaaauagacacuacg

SEQ ID NO: 2135674 - RNA, 19 nt, Artificial Sequence
  Description of Artificial Sequence: Synthetic oligonucleotide
  Sense strand starting at position 2366 of SEQ ID NO: 1882624
gguggcuuugacuauuaag

SEQ ID NO: 2135675 - RNA, 19 nt, Artificial Sequence
  Description of Artificial Sequence: Synthetic oligonucleotide
  Antisense strand to SEQ ID NO: 2135674
cuuaauagucaaagccacc

SEQ ID NO: 2135676 - RNA, 19 nt, Artificial Sequence
  Description of Artificial Sequence: Synthetic oligonucleotide
  Sense strand starting at position 2373 of SEQ ID NO: 1882624
uugacuauuaagugugaga

SEQ ID NO: 2135677 - RNA, 19 nt, Artificial Sequence
  Description of Artificial Sequence: Synthetic oligonucleotide
  Antisense strand to SEQ ID NO: 2135676
ucucacacuuaauagucaa

SEQ ID NO: 2135678 - RNA, 19 nt, Artificial Sequence
  Description of Artificial Sequence: Synthetic oligonucleotide
  Sense strand starting at position 2457 of SEQ ID NO: 1882624
guguuagacaaauggaauu

SEQ ID NO: 2135679 - RNA, 19 nt, Artificial Sequence
  Description of Artificial Sequence: Synthetic oligonucleotide
  Antisense strand to SEQ ID NO: 2135678
aauuccauuugucuaacac

SEQ ID NO: 2135680 - RNA, 19 nt, Artificial Sequence
  Description of Artificial Sequence: Synthetic oligonucleotide
  Sense strand starting at position 2562 of SEQ ID NO: 1882624
gauggauggucauugugag

SEQ ID NO: 2135681 - RNA, 19 nt, Artificial Sequence
  Description of Artificial Sequence: Synthetic oligonucleotide
  Antisense strand to SEQ ID NO: 2135680
cucacaaugaccauccauc

SEQ ID NO: 2135682 - RNA, 19 nt, Artificial Sequence
  Description of Artificial Sequence: Synthetic oligonucleotide
  Sense strand starting at position 2563 of SEQ ID NO: 1882624
auggauggucauugugaga

SEQ ID NO: 2135683 - RNA, 19 nt, Artificial Sequence
  Description of Artificial Sequence: Synthetic oligonucleotide
  Antisense strand to SEQ ID NO: 2135682
ucucacaaugaccauccau

SEQ ID NO: 2135684 - RNA, 19 nt, Artificial Sequence
  Description of Artificial Sequence: Synthetic oligonucleotide
  Sense strand starting at position 2574 of SEQ ID NO: 1882624
uugugagauccacagaggu

SEQ ID NO: 2135685 - RNA, 19 nt, Artificial Sequence
  Description of Artificial Sequence: Synthetic oligonucleotide
  Antisense strand to SEQ ID NO: 2135684
accucuguggaucucacaa

SEQ ID NO: 2135686 - RNA, 19 nt, Artificial Sequence
  Description of Artificial Sequence: Synthetic oligonucleotide
  Sense strand starting at position 2643 of SEQ ID NO: 1882624
uugauaaguacauggguga

SEQ ID NO: 2135687 - RNA, 19 nt, Artificial Sequence
  Description of Artificial Sequence: Synthetic oligonucleotide
  Antisense strand to SEQ ID NO: 2135686
ucacccauguacuuaucaa

SEQ ID NO: 2135688 - RNA, 19 nt, Artificial Sequence
  Description of Artificial Sequence: Synthetic oligonucleotide
  Sense strand starting at position 2644 of SEQ ID NO: 1882624
ugauaaguacaugggugaa

SEQ ID NO: 2135689 - RNA, 19 nt, Artificial Sequence
  Description of Artificial Sequence: Synthetic oligonucleotide
  Antisense strand to SEQ ID NO: 2135688
uucacccauguacuuauca

SEQ ID NO: 2135690 - RNA, 19 nt, Artificial Sequence
  Description of Artificial Sequence: Synthetic oligonucleotide
  Sense strand starting at position 2647 of SEQ ID NO: 1882624
uaaguacaugggugaauga

SEQ ID NO: 2135691 - RNA, 19 nt, Artificial Sequence
  Description of Artificial Sequence: Synthetic oligonucleotide
  Antisense strand to SEQ ID NO: 2135690
ucauucacccauguacuua

SEQ ID NO: 2135692 - RNA, 19 nt, Artificial Sequence
  Description of Artificial Sequence: Synthetic oligonucleotide
  Sense strand starting at position 2730 of SEQ ID NO: 1882624
uugauuagcuacuugacaa

SEQ ID NO: 2135693 - RNA, 19 nt, Artificial Sequence
  Description of Artificial Sequence: Synthetic oligonucleotide
  Antisense strand to SEQ ID NO: 2135692
uugucaaguagcuaaucaa

SEQ ID NO: 2135694 - RNA, 19 nt, Artificial Sequence
  Description of Artificial Sequence: Synthetic oligonucleotide
  Sense strand starting at position 2908 of SEQ ID NO: 1882624
acagaaugugaucagugca

SEQ ID NO: 2135695 - RNA, 19 nt, Artificial Sequence
  Description of Artificial Sequence: Synthetic oligonucleotide
  Antisense strand to SEQ ID NO: 2135694
ugcacugaucacauucugu

SEQ ID NO: 2135696 - RNA, 19 nt, Artificial Sequence
  Description of Artificial Sequence: Synthetic oligonucleotide
  Sense strand starting at position 2987 of SEQ ID NO: 1882624
aguagugagcaaugagaua

SEQ ID NO: 2135697 - RNA, 19 nt, Artificial Sequence
  Description of Artificial Sequence: Synthetic oligonucleotide
  Antisense strand to SEQ ID NO: 2135696
uaucucauugcucacuacu

SEQ ID NO: 2135698 - RNA, 19 nt, Artificial Sequence
  Description of Artificial Sequence: Synthetic oligonucleotide
  Sense strand starting at position 2999 of SEQ ID NO: 1882624
ugagauaaguccuuugacu

SEQ ID NO: 2135699 - RNA, 19 nt, Artificial Sequence
  Description of Artificial Sequence: Synthetic oligonucleotide
  Antisense strand to SEQ ID NO: 2135698
agucaaaggacuuaucuca

SEQ ID NO: 2135700 - RNA, 19 nt, Artificial Sequence
  Description of Artificial Sequence: Synthetic oligonucleotide
  Sense strand starting at position 3001 of SEQ ID NO: 1882624
agauaaguccuuugacuug

SEQ ID NO: 2135701 - RNA, 19 nt, Artificial Sequence
  Description of Artificial Sequence: Synthetic oligonucleotide
  Antisense strand to SEQ ID NO: 2135700
caagucaaaggacuuaucu

SEQ ID NO: 2135702 - RNA, 19 nt, Artificial Sequence
  Description of Artificial Sequence: Synthetic oligonucleotide
  Sense strand starting at position 3135 of SEQ ID NO: 1882624
auguaaaucaauggcggaa

SEQ ID NO: 2135703 - RNA, 19 nt, Artificial Sequence
  Description of Artificial Sequence: Synthetic oligonucleotide
  Antisense strand to SEQ ID NO: 2135702
uuccgccauugauuuacau

SEQ ID NO: 2135704 - RNA, 19 nt, Artificial Sequence
  Description of Artificial Sequence: Synthetic oligonucleotide
  Sense strand starting at position 3138 of SEQ ID NO: 1882624
uaaaucaauggcggaagaa

SEQ ID NO: 2135705 - RNA, 19 nt, Artificial Sequence
  Description of Artificial Sequence: Synthetic oligonucleotide
  Antisense strand to SEQ ID NO: 2135704
uucuuccgccauugauuua

SEQ ID NO: 2135706 - RNA, 19 nt, Artificial Sequence
  Description of Artificial Sequence: Synthetic oligonucleotide
  Sense strand starting at position 3172 of SEQ ID NO: 1882624
gcuauugaggaauaccuuu

SEQ ID NO: 2135707 - RNA, 19 nt, Artificial Sequence
  Description of Artificial Sequence: Synthetic oligonucleotide
  Antisense strand to SEQ ID NO: 2135706
aaagguauuccucaauagc

SEQ ID NO: 2135708 - RNA, 19 nt, Artificial Sequence
  Description of Artificial Sequence: Synthetic oligonucleotide
  Sense strand starting at position 3771 of SEQ ID NO: 1882624
cuagguaaauacuauuuga

SEQ ID NO: 2135709 - RNA, 19 nt, Artificial Sequence
  Description of Artificial Sequence: Synthetic oligonucleotide
  Antisense strand to SEQ ID NO: 2135708
ucaaauaguauuuaccuag

SEQ ID NO: 2135710 - RNA, 19 nt, Artificial Sequence
  Description of Artificial Sequence: Synthetic oligonucleotide
  Sense strand starting at position 3921 of SEQ ID NO: 1882624
agggucagugauuggaaga

SEQ ID NO: 2135711 - RNA, 19 nt, Artificial Sequence
  Description of Artificial Sequence: Synthetic oligonucleotide
  Antisense strand to SEQ ID NO: 2135710
ucuuccaaucacugacccu

SEQ ID NO: 2135712 - RNA, 19 nt, Artificial Sequence
  Description of Artificial Sequence: Synthetic oligonucleotide
  Sense strand starting at position 3922 of SEQ ID NO: 1882624
gggucagugauuggaagaa

SEQ ID NO: 2135713 - RNA, 19 nt, Artificial Sequence
  Description of Artificial Sequence: Synthetic oligonucleotide
  Antisense strand to SEQ ID NO: 2135712
uucuuccaaucacugaccc

SEQ ID NO: 2135714 - RNA, 19 nt, Artificial Sequence
  Description of Artificial Sequence: Synthetic oligonucleotide
  Sense strand starting at position 106 of SEQ ID NO: 1882625
agaguguuggcccgaggua

SEQ ID NO: 2135715 - RNA, 19 nt, Artificial Sequence
  Description of Artificial Sequence: Synthetic oligonucleotide
  Antisense strand to SEQ ID NO: 2135714
uaccucgggccaacacucu

SEQ ID NO: 2135716 - RNA, 19 nt, Artificial Sequence
  Description of Artificial Sequence: Synthetic oligonucleotide
  Sense strand starting at position 148 of SEQ ID NO: 1882625
ccaagaucuugucuaggug

SEQ ID NO: 2135717 - RNA, 19 nt, Artificial Sequence
  Description of Artificial Sequence: Synthetic oligonucleotide
  Antisense strand to SEQ ID NO: 2135716
caccuagacaagaucuugg

SEQ ID NO: 2135718 - RNA, 19 nt, Artificial Sequence
  Description of Artificial Sequence: Synthetic oligonucleotide
  Sense strand starting at position 321 of SEQ ID NO: 1882625
cagguccuggucuacaaua

SEQ ID NO: 2135719 - RNA, 19 nt, Artificial Sequence
  Description of Artificial Sequence: Synthetic oligonucleotide
  Antisense strand to SEQ ID NO: 2135718
uauuguagaccaggaccug

SEQ ID NO: 2135720 - RNA, 19 nt, Artificial Sequence
  Description of Artificial Sequence: Synthetic oligonucleotide
  Sense strand starting at position 354 of SEQ ID NO: 1882625
uuggguguaucaccuggau

SEQ ID NO: 2135721 - RNA, 19 nt, Artificial Sequence
  Description of Artificial Sequence: Synthetic oligonucleotide
  Antisense strand to SEQ ID NO: 2135720
auccaggugauacacccaa

SEQ ID NO: 2135722 - RNA, 19 nt, Artificial Sequence
  Description of Artificial Sequence: Synthetic oligonucleotide
  Sense strand starting at position 356 of SEQ ID NO: 1882625
ggguguaucaccuggauga

SEQ ID NO: 2135723 - RNA, 19 nt, Artificial Sequence
  Description of Artificial Sequence: Synthetic oligonucleotide
  Antisense strand to SEQ ID NO: 2135722
ucauccaggugauacaccc

SEQ ID NO: 2135724 - RNA, 19 nt, Artificial Sequence
  Description of Artificial Sequence: Synthetic oligonucleotide
  Sense strand starting at position 357 of SEQ ID NO: 1882625
gguguaucaccuggaugac

SEQ ID NO: 2135725 - RNA, 19 nt, Artificial Sequence
  Description of Artificial Sequence: Synthetic oligonucleotide
  Antisense strand to SEQ ID NO: 2135724
gucauccaggugauacacc

SEQ ID NO: 2135726 - RNA, 19 nt, Artificial Sequence
  Description of Artificial Sequence: Synthetic oligonucleotide
  Sense strand starting at position 358 of SEQ ID NO: 1882625
guguaucaccuggaugaca

SEQ ID NO: 2135727 - RNA, 19 nt, Artificial Sequence
  Description of Artificial Sequence: Synthetic oligonucleotide
  Antisense strand to SEQ ID NO: 2135726
ugucauccaggugauacac

SEQ ID NO: 2135728 - RNA, 19 nt, Artificial Sequence
  Description of Artificial Sequence: Synthetic oligonucleotide
  Sense strand starting at position 360 of SEQ ID NO: 1882625
guaucaccuggaugacaga

SEQ ID NO: 2135729 - RNA, 19 nt, Artificial Sequence
  Description of Artificial Sequence: Synthetic oligonucleotide
  Antisense strand to SEQ ID NO: 2135728
ucugucauccaggugauac

SEQ ID NO: 2135730 - RNA, 19 nt, Artificial Sequence
  Description of Artificial Sequence: Synthetic oligonucleotide
  Sense strand starting at position 420 of SEQ ID NO: 1882625
gcagcucaucugcgauguu

SEQ ID NO: 2135731 - RNA, 19 nt, Artificial Sequence
  Description of Artificial Sequence: Synthetic oligonucleotide
  Antisense strand to SEQ ID NO: 2135730
aacaucgcagaugagcugc

SEQ ID NO: 2135732 - RNA, 19 nt, Artificial Sequence
  Description of Artificial Sequence: Synthetic oligonucleotide
  Sense strand starting at position 423 of SEQ ID NO: 1882625
gcucaucugcgauguugau

SEQ ID NO: 2135733 - RNA, 19 nt, Artificial Sequence
  Description of Artificial Sequence: Synthetic oligonucleotide
  Antisense strand to SEQ ID NO: 2135732
aucaacaucgcagaugagc

SEQ ID NO: 2135734 - RNA, 19 nt, Artificial Sequence
  Description of Artificial Sequence: Synthetic oligonucleotide
  Sense strand starting at position 472 of SEQ ID NO: 1882625
gugggagacaccugugcuu

SEQ ID NO: 2135735 - RNA, 19 nt, Artificial Sequence
  Description of Artificial Sequence: Synthetic oligonucleotide
  Antisense strand to SEQ ID NO: 2135734
aagcacaggugucucccac

SEQ ID NO: 2135736 - RNA, 19 nt, Artificial Sequence
  Description of Artificial Sequence: Synthetic oligonucleotide
  Sense strand starting at position 487 of SEQ ID NO: 1882625
gcuuuccacugggcugaua

SEQ ID NO: 2135737 - RNA, 19 nt, Artificial Sequence
  Description of Artificial Sequence: Synthetic oligonucleotide
  Antisense strand to SEQ ID NO: 2135736
uaucagcccaguggaaagc

SEQ ID NO: 2135738 - RNA, 19 nt, Artificial Sequence
  Description of Artificial Sequence: Synthetic oligonucleotide
  Sense strand starting at position 498 of SEQ ID NO: 1882625
ggcugauaucuacagcaau

SEQ ID NO: 2135739 - RNA, 19 nt, Artificial Sequence
  Description of Artificial Sequence: Synthetic oligonucleotide
  Antisense strand to SEQ ID NO: 2135738
auugcuguagauaucagcc

SEQ ID NO: 2135740 - RNA, 19 nt, Artificial Sequence
  Description of Artificial Sequence: Synthetic oligonucleotide
  Sense strand starting at position 606 of SEQ ID NO: 1882625
gccugaacuuggucaucca

SEQ ID NO: 2135741 - RNA, 19 nt, Artificial Sequence
  Description of Artificial Sequence: Synthetic oligonucleotide
  Antisense strand to SEQ ID NO: 2135740
uggaugaccaaguucaggc

SEQ ID NO: 2135742 - RNA, 19 nt, Artificial Sequence
  Description of Artificial Sequence: Synthetic oligonucleotide
  Sense strand starting at position 607 of SEQ ID NO: 1882625
ccugaacuuggucauccaa

SEQ ID NO: 2135743 - RNA, 19 nt, Artificial Sequence
  Description of Artificial Sequence: Synthetic oligonucleotide
  Antisense strand to SEQ ID NO: 2135742
uuggaugaccaaguucagg

SEQ ID NO: 2135744 - RNA, 19 nt, Artificial Sequence
  Description of Artificial Sequence: Synthetic oligonucleotide
  Sense strand starting at position 614 of SEQ ID NO: 1882625
uuggucauccaacgaucau

SEQ ID NO: 2135745 - RNA, 19 nt, Artificial Sequence
  Description of Artificial Sequence: Synthetic oligonucleotide
  Antisense strand to SEQ ID NO: 2135744
augaucguuggaugaccaa

SEQ ID NO: 2135746 - RNA, 19 nt, Artificial Sequence
  Description of Artificial Sequence: Synthetic oligonucleotide
  Sense strand starting at position 1047 of SEQ ID NO: 1882625
gggccacucugccagagaa

SEQ ID NO: 2135747 - RNA, 19 nt, Artificial Sequence
  Description of Artificial Sequence: Synthetic oligonucleotide
  Antisense strand to SEQ ID NO: 2135746
uucucuggcagaguggccc

SEQ ID NO: 2135748 - RNA, 19 nt, Artificial Sequence
  Description of Artificial Sequence: Synthetic oligonucleotide
  Sense strand starting at position 1049 of SEQ ID NO: 1882625
gccacucugccagagaaga

SEQ ID NO: 2135749 - RNA, 19 nt, Artificial Sequence
  Description of Artificial Sequence: Synthetic oligonucleotide
  Antisense strand to SEQ ID NO: 2135748
ucuucucuggcagaguggc

SEQ ID NO: 2135750 - RNA, 19 nt, Artificial Sequence
  Description of Artificial Sequence: Synthetic oligonucleotide
  Sense strand starting at position 1115 of SEQ ID NO: 1882625
gguggcaaucucggagaau

SEQ ID NO: 2135751 - RNA, 19 nt, Artificial Sequence
  Description of Artificial Sequence: Synthetic oligonucleotide
  Antisense strand to SEQ ID NO: 2135750
auucuccgagauugccacc

SEQ ID NO: 2135752 - RNA, 19 nt, Artificial Sequence
  Description of Artificial Sequence: Synthetic oligonucleotide
  Sense strand starting at position 1116 of SEQ ID NO: 1882625
guggcaaucucggagaaug

SEQ ID NO: 2135753 - RNA, 19 nt, Artificial Sequence
  Description of Artificial Sequence: Synthetic oligonucleotide
  Antisense strand to SEQ ID NO: 2135752
cauucuccgagauugccac

SEQ ID NO: 2135754 - RNA, 19 nt, Artificial Sequence
  Description of Artificial Sequence: Synthetic oligonucleotide
  Sense strand starting at position 1175 of SEQ ID NO: 1882625
agaagaaugggcugccaua

SEQ ID NO: 2135755 - RNA, 19 nt, Artificial Sequence
  Description of Artificial Sequence: Synthetic oligonucleotide
  Antisense strand to SEQ ID NO: 2135754
uauggcagcccauucuucu

SEQ ID NO: 2135756 - RNA, 19 nt, Artificial Sequence
  Description of Artificial Sequence: Synthetic oligonucleotide
  Sense strand starting at position 1208 of SEQ ID NO: 1882625
cccggucaucccuagugaa

SEQ ID NO: 2135757 - RNA, 19 nt, Artificial Sequence
  Description of Artificial Sequence: Synthetic oligonucleotide
  Antisense strand to SEQ ID NO: 2135756
uucacuagggaugaccggg

SEQ ID NO: 2135758 - RNA, 19 nt, Artificial Sequence
  Description of Artificial Sequence: Synthetic oligonucleotide
  Sense strand starting at position 1211 of SEQ ID NO: 1882625
ggucaucccuagugaacaa

SEQ ID NO: 2135759 - RNA, 19 nt, Artificial Sequence
  Description of Artificial Sequence: Synthetic oligonucleotide
  Antisense strand to SEQ ID NO: 2135758
uuguucacuagggaugacc

SEQ ID NO: 2135760 - RNA, 19 nt, Artificial Sequence
  Description of Artificial Sequence: Synthetic oligonucleotide
  Sense strand starting at position 1359 of SEQ ID NO: 1882625
gagugagggaucuggaagu

SEQ ID NO: 2135761 - RNA, 19 nt, Artificial Sequence
  Description of Artificial Sequence: Synthetic oligonucleotide
  Antisense strand to SEQ ID NO: 2135760
acuuccagaucccucacuc

SEQ ID NO: 2135762 - RNA, 19 nt, Artificial Sequence
  Description of Artificial Sequence: Synthetic oligonucleotide
  Sense strand starting at position 1492 of SEQ ID NO: 1882625
ggccaagaucuuggcgaug

SEQ ID NO: 2135763 - RNA, 19 nt, Artificial Sequence
  Description of Artificial Sequence: Synthetic oligonucleotide
  Antisense strand to SEQ ID NO: 2135762
caucgccaagaucuuggcc

SEQ ID NO: 2135764 - RNA, 19 nt, Artificial Sequence
  Description of Artificial Sequence: Synthetic oligonucleotide
  Sense strand starting at position 1497 of SEQ ID NO: 1882625
agaucuuggcgauggaguu

SEQ ID NO: 2135765 - RNA, 19 nt, Artificial Sequence
  Description of Artificial Sequence: Synthetic oligonucleotide
  Antisense strand to SEQ ID NO: 2135764
aacuccaucgccaagaucu

SEQ ID NO: 2135766 - RNA, 19 nt, Artificial Sequence
  Description of Artificial Sequence: Synthetic oligonucleotide
  Sense strand starting at position 1503 of SEQ ID NO: 1882625
uggcgauggaguugaaguu

SEQ ID NO: 2135767 - RNA, 19 nt, Artificial Sequence
  Description of Artificial Sequence: Synthetic oligonucleotide
  Antisense strand to SEQ ID NO: 2135766
aacuucaacuccaucgcca

SEQ ID NO: 2135768 - RNA, 19 nt, Artificial Sequence
  Description of Artificial Sequence: Synthetic oligonucleotide
  Sense strand starting at position 1504 of SEQ ID NO: 1882625
ggcgauggaguugaaguua

SEQ ID NO: 2135769 - RNA, 19 nt, Artificial Sequence
  Description of Artificial Sequence: Synthetic oligonucleotide
  Antisense strand to SEQ ID NO: 2135768
uaacuucaacuccaucgcc

SEQ ID NO: 2135770 - RNA, 19 nt, Artificial Sequence
  Description of Artificial Sequence: Synthetic oligonucleotide
  Sense strand starting at position 2082 of SEQ ID NO: 1882625
ggucccguuuccuuacgua

SEQ ID NO: 2135771 - RNA, 19 nt, Artificial Sequence
  Description of Artificial Sequence: Synthetic oligonucleotide
  Antisense strand to SEQ ID NO: 2135770
uacguaaggaaacgggacc

SEQ ID NO: 2135772 - RNA, 19 nt, Artificial Sequence
  Description of Artificial Sequence: Synthetic oligonucleotide
  Sense strand starting at position 2256 of SEQ ID NO: 1882625
gugcguagaaucugggaau

SEQ ID NO: 2135773 - RNA, 19 nt, Artificial Sequence
  Description of Artificial Sequence: Synthetic oligonucleotide
  Antisense strand to SEQ ID NO: 2135772
auucccagauucuacgcac

SEQ ID NO: 2135774 - RNA, 19 nt, Artificial Sequence
  Description of Artificial Sequence: Synthetic oligonucleotide
  Sense strand starting at position 2504 of SEQ ID NO: 1882625
ccuggagucgucgaucuag

SEQ ID NO: 2135775 - RNA, 19 nt, Artificial Sequence
  Description of Artificial Sequence: Synthetic oligonucleotide
  Antisense strand to SEQ ID NO: 2135774
cuagaucgacgacuccagg

SEQ ID NO: 2135776 - RNA, 19 nt, Artificial Sequence
  Description of Artificial Sequence: Synthetic oligonucleotide
  Sense strand starting at position 2509 of SEQ ID NO: 1882625
agucgucgaucuagaagga

SEQ ID NO: 2135777 - RNA, 19 nt, Artificial Sequence
  Description of Artificial Sequence: Synthetic oligonucleotide
  Antisense strand to SEQ ID NO: 2135776
uccuucuagaucgacgacu

SEQ ID NO: 2135778 - RNA, 19 nt, Artificial Sequence
  Description of Artificial Sequence: Synthetic oligonucleotide
  Sense strand starting at position 2700 of SEQ ID NO: 1882625
ugcugucugucuuccagau

SEQ ID NO: 2135779 - RNA, 19 nt, Artificial Sequence
  Description of Artificial Sequence: Synthetic oligonucleotide
  Antisense strand to SEQ ID NO: 2135778
aucuggaagacagacagca

SEQ ID NO: 2135780 - RNA, 19 nt, Artificial Sequence
  Description of Artificial Sequence: Synthetic oligonucleotide
  Sense strand starting at position 2840 of SEQ ID NO: 1882625
cgccuuugccucccgagaa

SEQ ID NO: 2135781 - RNA, 19 nt, Artificial Sequence
  Description of Artificial Sequence: Synthetic oligonucleotide
  Antisense strand to SEQ ID NO: 2135780
uucucgggaggcaaaggcg

SEQ ID NO: 2135782 - RNA, 19 nt, Artificial Sequence
  Description of Artificial Sequence: Synthetic oligonucleotide
  Sense strand starting at position 2914 of SEQ ID NO: 1882625
acugaaucaugguuacaau

SEQ ID NO: 2135783 - RNA, 19 nt, Artificial Sequence
  Description of Artificial Sequence: Synthetic oligonucleotide
  Antisense strand to SEQ ID NO: 2135782
auuguaaccaugauucagu

SEQ ID NO: 2135784 - RNA, 19 nt, Artificial Sequence
  Description of Artificial Sequence: Synthetic oligonucleotide
  Sense strand starting at position 3208 of SEQ ID NO: 1882625
ggagacagacuccguuuaa

SEQ ID NO: 2135785 - RNA, 19 nt, Artificial Sequence
  Description of Artificial Sequence: Synthetic oligonucleotide
  Antisense strand to SEQ ID NO: 2135784
uuaaacggagucugucucc

SEQ ID NO: 2135786 - RNA, 19 nt, Artificial Sequence
  Description of Artificial Sequence: Synthetic oligonucleotide
  Sense strand starting at position 3300 of SEQ ID NO: 1882625
ucgugugaacuugggagau

SEQ ID NO: 2135787 - RNA, 19 nt, Artificial Sequence
  Description of Artificial Sequence: Synthetic oligonucleotide
  Antisense strand to SEQ ID NO: 2135786
aucucccaaguucacacga

SEQ ID NO: 2135788 - RNA, 19 nt, Artificial Sequence
  Description of Artificial Sequence: Synthetic oligonucleotide
  Sense strand starting at position 3790 of SEQ ID NO: 1882625
agagucuuacuauguucua

SEQ ID NO: 2135789 - RNA, 19 nt, Artificial Sequence
  Description of Artificial Sequence: Synthetic oligonucleotide
  Antisense strand to SEQ ID NO: 2135788
uagaacauaguaagacucu

SEQ ID NO: 2135790 - RNA, 19 nt, Artificial Sequence
  Description of Artificial Sequence: Synthetic oligonucleotide
  Sense strand starting at position 3791 of SEQ ID NO: 1882625
gagucuuacuauguucuag

SEQ ID NO: 2135791 - RNA, 19 nt, Artificial Sequence
  Description of Artificial Sequence: Synthetic oligonucleotide
  Antisense strand to SEQ ID NO: 2135790
cuagaacauaguaagacuc

SEQ ID NO: 2135792 - RNA, 19 nt, Artificial Sequence
  Description of Artificial Sequence: Synthetic oligonucleotide
  Sense strand starting at position 3974 of SEQ ID NO: 1882625
uucgcagacuuucugaguu

SEQ ID NO: 2135793 - RNA, 19 nt, Artificial Sequence
  Description of Artificial Sequence: Synthetic oligonucleotide
  Antisense strand to SEQ ID NO: 2135792
aacucagaaagucugcgaa

SEQ ID NO: 2135794 - RNA, 19 nt, Artificial Sequence
  Description of Artificial Sequence: Synthetic oligonucleotide
  Sense strand starting at position 100 of SEQ ID NO: 1882626
agaguguuggcccgaggua

SEQ ID NO: 2135795 - RNA, 19 nt, Artificial Sequence
  Description of Artificial Sequence: Synthetic oligonucleotide
  Antisense strand to SEQ ID NO: 2135794
uaccucgggccaacacucu

SEQ ID NO: 2135796 - RNA, 19 nt, Artificial Sequence
  Description of Artificial Sequence: Synthetic oligonucleotide
  Sense strand starting at position 142 of SEQ ID NO: 1882626
ccaagaucuugucuaggug

SEQ ID NO: 2135797 - RNA, 19 nt, Artificial Sequence
  Description of Artificial Sequence: Synthetic oligonucleotide
  Antisense strand to SEQ ID NO: 2135796
caccuagacaagaucuugg

SEQ ID NO: 2135798 - RNA, 19 nt, Artificial Sequence
  Description of Artificial Sequence: Synthetic oligonucleotide
  Sense strand starting at position 315 of SEQ ID NO: 1882626
cagguccuggucuacaaua

SEQ ID NO: 2135799 - RNA, 19 nt, Artificial Sequence
  Description of Artificial Sequence: Synthetic oligonucleotide
  Antisense strand to SEQ ID NO: 2135798
uauuguagaccaggaccug

SEQ ID NO: 2135800 - RNA, 19 nt, Artificial Sequence
  Description of Artificial Sequence: Synthetic oligonucleotide
  Sense strand starting at position 348 of SEQ ID NO: 1882626
uuggguguaucaccuggau

SEQ ID NO: 2135801 - RNA, 19 nt, Artificial Sequence
  Description of Artificial Sequence: Synthetic oligonucleotide
  Antisense strand to SEQ ID NO: 2135800
auccaggugauacacccaa

SEQ ID NO: 2135802 - RNA, 19 nt, Artificial Sequence
  Description of Artificial Sequence: Synthetic oligonucleotide
  Sense strand starting at position 350 of SEQ ID NO: 1882626
ggguguaucaccuggauga

SEQ ID NO: 2135803 - RNA, 19 nt, Artificial Sequence
  Description of Artificial Sequence: Synthetic oligonucleotide
  Antisense strand to SEQ ID NO: 2135802
ucauccaggugauacaccc

SEQ ID NO: 2135804 - RNA, 19 nt, Artificial Sequence
  Description of Artificial Sequence: Synthetic oligonucleotide
  Sense strand starting at position 351 of SEQ ID NO: 1882626
gguguaucaccuggaugac

SEQ ID NO: 2135805 - RNA, 19 nt, Artificial Sequence
  Description of Artificial Sequence: Synthetic oligonucleotide
  Antisense strand to SEQ ID NO: 2135804
gucauccaggugauacacc

SEQ ID NO: 2135806 - RNA, 19 nt, Artificial Sequence
  Description of Artificial Sequence: Synthetic oligonucleotide
  Sense strand starting at position 352 of SEQ ID NO: 1882626
guguaucaccuggaugaca

SEQ ID NO: 2135807 - RNA, 19 nt, Artificial Sequence
  Description of Artificial Sequence: Synthetic oligonucleotide
  Antisense strand to SEQ ID NO: 2135806
ugucauccaggugauacac

SEQ ID NO: 2135808 - RNA, 19 nt, Artificial Sequence
  Description of Artificial Sequence: Synthetic oligonucleotide
  Sense strand starting at position 354 of SEQ ID NO: 1882626
guaucaccuggaugacaga

SEQ ID NO: 2135809 - RNA, 19 nt, Artificial Sequence
  Description of Artificial Sequence: Synthetic oligonucleotide
  Antisense strand to SEQ ID NO: 2135808
ucugucauccaggugauac

SEQ ID NO: 2135810 - RNA, 19 nt, Artificial Sequence
  Description of Artificial Sequence: Synthetic oligonucleotide
  Sense strand starting at position 414 of SEQ ID NO: 1882626
gcagcucaucugcgauguu

SEQ ID NO: 2135811 - RNA, 19 nt, Artificial Sequence
  Description of Artificial Sequence: Synthetic oligonucleotide
  Antisense strand to SEQ ID NO: 2135810
aacaucgcagaugagcugc

SEQ ID NO: 2135812 - RNA, 19 nt, Artificial Sequence
  Description of Artificial Sequence: Synthetic oligonucleotide
  Sense strand starting at position 417 of SEQ ID NO: 1882626
gcucaucugcgauguugau

SEQ ID NO: 2135813 - RNA, 19 nt, Artificial Sequence
  Description of Artificial Sequence: Synthetic oligonucleotide
  Antisense strand to SEQ ID NO: 2135812
aucaacaucgcagaugagc

SEQ ID NO: 2135814 - RNA, 19 nt, Artificial Sequence
  Description of Artificial Sequence: Synthetic oligonucleotide
  Sense strand starting at position 466 of SEQ ID NO: 1882626
gugggagacaccugugcuu

SEQ ID NO: 2135815 - RNA, 19 nt, Artificial Sequence
  Description of Artificial Sequence: Synthetic oligonucleotide
  Antisense strand to SEQ ID NO: 2135814
aagcacaggugucucccac

SEQ ID NO: 2135816 - RNA, 19 nt, Artificial Sequence
  Description of Artificial Sequence: Synthetic oligonucleotide
  Sense strand starting at position 481 of SEQ ID NO: 1882626
gcuuuccacugggcugaua

SEQ ID NO: 2135817 - RNA, 19 nt, Artificial Sequence
  Description of Artificial Sequence: Synthetic oligonucleotide
  Antisense strand to SEQ ID NO: 2135816
uaucagcccaguggaaagc

SEQ ID NO: 2135818 - RNA, 19 nt, Artificial Sequence
  Description of Artificial Sequence: Synthetic oligonucleotide
  Sense strand starting at position 492 of SEQ ID NO: 1882626
ggcugauaucuacagcaau

SEQ ID NO: 2135819 - RNA, 19 nt, Artificial Sequence
  Description of Artificial Sequence: Synthetic oligonucleotide
  Antisense strand to SEQ ID NO: 2135818
auugcuguagauaucagcc

SEQ ID NO: 2135820 - RNA, 19 nt, Artificial Sequence
  Description of Artificial Sequence: Synthetic oligonucleotide
  Sense strand starting at position 600 of SEQ ID NO: 1882626
gccugaacuuggucaucca

SEQ ID NO: 2135821 - RNA, 19 nt, Artificial Sequence
  Description of Artificial Sequence: Synthetic oligonucleotide
  Antisense strand to SEQ ID NO: 2135820
uggaugaccaaguucaggc

SEQ ID NO: 2135822 - RNA, 19 nt, Artificial Sequence
  Description of Artificial Sequence: Synthetic oligonucleotide
  Sense strand starting at position 601 of SEQ ID NO: 1882626
ccugaacuuggucauccaa

SEQ ID NO: 2135823 - RNA, 19 nt, Artificial Sequence
  Description of Artificial Sequence: Synthetic oligonucleotide
  Antisense strand to SEQ ID NO: 2135822
uuggaugaccaaguucagg

SEQ ID NO: 2135824 - RNA, 19 nt, Artificial Sequence
  Description of Artificial Sequence: Synthetic oligonucleotide
  Sense strand starting at position 608 of SEQ ID NO: 1882626
uuggucauccaacgaucau

SEQ ID NO: 2135825 - RNA, 19 nt, Artificial Sequence
  Description of Artificial Sequence: Synthetic oligonucleotide
  Antisense strand to SEQ ID NO: 2135824
augaucguuggaugaccaa

SEQ ID NO: 2135826 - RNA, 19 nt, Artificial Sequence
  Description of Artificial Sequence: Synthetic oligonucleotide
  Sense strand starting at position 1041 of SEQ ID NO: 1882626
gggccacucugccagagaa

SEQ ID NO: 2135827 - RNA, 19 nt, Artificial Sequence
  Description of Artificial Sequence: Synthetic oligonucleotide
  Antisense strand to SEQ ID NO: 2135826
uucucuggcagaguggccc

SEQ ID NO: 2135828 - RNA, 19 nt, Artificial Sequence
  Description of Artificial Sequence: Synthetic oligonucleotide
  Sense strand starting at position 1043 of SEQ ID NO: 1882626
gccacucugccagagaaga

SEQ ID NO: 2135829 - RNA, 19 nt, Artificial Sequence
  Description of Artificial Sequence: Synthetic oligonucleotide
  Antisense strand to SEQ ID NO: 2135828
ucuucucuggcagaguggc

SEQ ID NO: 2135830 - RNA, 19 nt, Artificial Sequence
  Description of Artificial Sequence: Synthetic oligonucleotide
  Sense strand starting at position 1109 of SEQ ID NO: 1882626
gguggcaaucucggagaau

SEQ ID NO: 2135831 - RNA, 19 nt, Artificial Sequence
  Description of Artificial Sequence: Synthetic oligonucleotide
  Antisense strand to SEQ ID NO: 2135830
auucuccgagauugccacc

SEQ ID NO: 2135832 - RNA, 19 nt, Artificial Sequence
  Description of Artificial Sequence: Synthetic oligonucleotide
  Sense strand starting at position 1110 of SEQ ID NO: 1882626
guggcaaucucggagaaug

SEQ ID NO: 2135833 - RNA, 19 nt, Artificial Sequence
  Description of Artificial Sequence: Synthetic oligonucleotide
  Antisense strand to SEQ ID NO: 2135832
cauucuccgagauugccac

SEQ ID NO: 2135834 - RNA, 19 nt, Artificial Sequence
  Description of Artificial Sequence: Synthetic oligonucleotide
  Sense strand starting at position 1169 of SEQ ID NO: 1882626
agaagaaugggcugccaua

SEQ ID NO: 2135835 - RNA, 19 nt, Artificial Sequence
  Description of Artificial Sequence: Synthetic oligonucleotide
  Antisense strand to SEQ ID NO: 2135834
uauggcagcccauucuucu

SEQ ID NO: 2135836 - RNA, 19 nt, Artificial Sequence
  Description of Artificial Sequence: Synthetic oligonucleotide
  Sense strand starting at position 1202 of SEQ ID NO: 1882626
cccggucaucccuagugaa

SEQ ID NO: 2135837 - RNA, 19 nt, Artificial Sequence
  Description of Artificial Sequence: Synthetic oligonucleotide
  Antisense strand to SEQ ID NO: 2135836
uucacuagggaugaccggg

SEQ ID NO: 2135838 - RNA, 19 nt, Artificial Sequence
  Description of Artificial Sequence: Synthetic oligonucleotide
  Sense strand starting at position 1205 of SEQ ID NO: 1882626
ggucaucccuagugaacaa

SEQ ID NO: 2135839 - RNA, 19 nt, Artificial Sequence
  Description of Artificial Sequence: Synthetic oligonucleotide
  Antisense strand to SEQ ID NO: 2135838
uuguucacuagggaugacc

SEQ ID NO: 2135840 - RNA, 19 nt, Artificial Sequence
  Description of Artificial Sequence: Synthetic oligonucleotide
  Sense strand starting at position 1353 of SEQ ID NO: 1882626
gagugagggaucuggaagu

SEQ ID NO: 2135841 - RNA, 19 nt, Artificial Sequence
  Description of Artificial Sequence: Synthetic oligonucleotide
  Antisense strand to SEQ ID NO: 2135840
acuuccagaucccucacuc

SEQ ID NO: 2135842 - RNA, 19 nt, Artificial Sequence
  Description of Artificial Sequence: Synthetic oligonucleotide
  Sense strand starting at position 1486 of SEQ ID NO: 1882626
ggccaagaucuuggcgaug

SEQ ID NO: 2135843 - RNA, 19 nt, Artificial Sequence
  Description of Artificial Sequence: Synthetic oligonucleotide
  Antisense strand to SEQ ID NO: 2135842
caucgccaagaucuuggcc

SEQ ID NO: 2135844 - RNA, 19 nt, Artificial Sequence
  Description of Artificial Sequence: Synthetic oligonucleotide
  Sense strand starting at position 1491 of SEQ ID NO: 1882626
agaucuuggcgauggaguu

SEQ ID NO: 2135845 - RNA, 19 nt, Artificial Sequence
  Description of Artificial Sequence: Synthetic oligonucleotide
  Antisense strand to SEQ ID NO: 2135844
aacuccaucgccaagaucu

SEQ ID NO: 2135846 - RNA, 19 nt, Artificial Sequence
  Description of Artificial Sequence: Synthetic oligonucleotide
  Sense strand starting at position 1497 of SEQ ID NO: 1882626
uggcgauggaguugaaguu

SEQ ID NO: 2135847 - RNA, 19 nt, Artificial Sequence
  Description of Artificial Sequence: Synthetic oligonucleotide
  Antisense strand to SEQ ID NO: 2135846
aacuucaacuccaucgcca

SEQ ID NO: 2135848 - RNA, 19 nt, Artificial Sequence
  Description of Artificial Sequence: Synthetic oligonucleotide
  Sense strand starting at position 1498 of SEQ ID NO: 1882626
ggcgauggaguugaaguua

SEQ ID NO: 2135849 - RNA, 19 nt, Artificial Sequence
  Description of Artificial Sequence: Synthetic oligonucleotide
  Antisense strand to SEQ ID NO: 2135848
uaacuucaacuccaucgcc

SEQ ID NO: 2135850 - RNA, 19 nt, Artificial Sequence
  Description of Artificial Sequence: Synthetic oligonucleotide
  Sense strand starting at position 2076 of SEQ ID NO: 1882626
ggucccguuuccuuacgua

SEQ ID NO: 2135851 - RNA, 19 nt, Artificial Sequence
  Description of Artificial Sequence: Synthetic oligonucleotide
  Antisense strand to SEQ ID NO: 2135850
uacguaaggaaacgggacc

SEQ ID NO: 2135852 - RNA, 19 nt, Artificial Sequence
  Description of Artificial Sequence: Synthetic oligonucleotide
  Sense strand starting at position 2250 of SEQ ID NO: 1882626
gugcguagaaucugggaau

SEQ ID NO: 2135853 - RNA, 19 nt, Artificial Sequence
  Description of Artificial Sequence: Synthetic oligonucleotide
  Antisense strand to SEQ ID NO: 2135852
auucccagauucuacgcac

SEQ ID NO: 2135854 - RNA, 19 nt, Artificial Sequence
  Description of Artificial Sequence: Synthetic oligonucleotide
  Sense strand starting at position 2498 of SEQ ID NO: 1882626
ccuggagucgucgaucuag

SEQ ID NO: 2135855 - RNA, 19 nt, Artificial Sequence
  Description of Artificial Sequence: Synthetic oligonucleotide
  Antisense strand to SEQ ID NO: 2135854
cuagaucgacgacuccagg

SEQ ID NO: 2135856 - RNA, 19 nt, Artificial Sequence
  Description of Artificial Sequence: Synthetic oligonucleotide
  Sense strand starting at position 2503 of SEQ ID NO: 1882626
agucgucgaucuagaagga

SEQ ID NO: 2135857 - RNA, 19 nt, Artificial Sequence
  Description of Artificial Sequence: Synthetic oligonucleotide
  Antisense strand to SEQ ID NO: 2135856
uccuucuagaucgacgacu

SEQ ID NO: 2135858 - RNA, 19 nt, Artificial Sequence
  Description of Artificial Sequence: Synthetic oligonucleotide
  Sense strand starting at position 2694 of SEQ ID NO: 1882626
ugcugucugucuuccagau

SEQ ID NO: 2135859 - RNA, 19 nt, Artificial Sequence
  Description of Artificial Sequence: Synthetic oligonucleotide
  Antisense strand to SEQ ID NO: 2135858
aucuggaagacagacagca

SEQ ID NO: 2135860 - RNA, 19 nt, Artificial Sequence
  Description of Artificial Sequence: Synthetic oligonucleotide
  Sense strand starting at position 2834 of SEQ ID NO: 1882626
cgccuuugccucccgagaa

SEQ ID NO: 2135861 - RNA, 19 nt, Artificial Sequence
  Description of Artificial Sequence: Synthetic oligonucleotide
  Antisense strand to SEQ ID NO: 2135860
uucucgggaggcaaaggcg

SEQ ID NO: 2135862 - RNA, 19 nt, Artificial Sequence
  Description of Artificial Sequence: Synthetic oligonucleotide
  Sense strand starting at position 2908 of SEQ ID NO: 1882626
acugaaucaugguuacaau

SEQ ID NO: 2135863 - RNA, 19 nt, Artificial Sequence
  Description of Artificial Sequence: Synthetic oligonucleotide
  Antisense strand to SEQ ID NO: 2135862
auuguaaccaugauucagu

SEQ ID NO: 2135864 - RNA, 19 nt, Artificial Sequence
  Description of Artificial Sequence: Synthetic oligonucleotide
  Sense strand starting at position 3202 of SEQ ID NO: 1882626
ggagacagacuccguuuaa

SEQ ID NO: 2135865 - RNA, 19 nt, Artificial Sequence
  Description of Artificial Sequence: Synthetic oligonucleotide
  Antisense strand to SEQ ID NO: 2135864
uuaaacggagucugucucc

SEQ ID NO: 2135866 - RNA, 19 nt, Artificial Sequence
  Description of Artificial Sequence: Synthetic oligonucleotide
  Sense strand starting at position 3294 of SEQ ID NO: 1882626
ucgugugaacuugggagau

SEQ ID NO: 2135867 - RNA, 19 nt, Artificial Sequence
  Description of Artificial Sequence: Synthetic oligonucleotide
  Antisense strand to SEQ ID NO: 2135866
aucucccaaguucacacga

SEQ ID NO: 2135868 - RNA, 19 nt, Artificial Sequence
  Description of Artificial Sequence: Synthetic oligonucleotide
  Sense strand starting at position 3784 of SEQ ID NO: 1882626
agagucuuacuauguucua

SEQ ID NO: 2135869 - RNA, 19 nt, Artificial Sequence
  Description of Artificial Sequence: Synthetic oligonucleotide
  Antisense strand to SEQ ID NO: 2135868
uagaacauaguaagacucu

SEQ ID NO: 2135870 - RNA, 19 nt, Artificial Sequence
  Description of Artificial Sequence: Synthetic oligonucleotide
  Sense strand starting at position 3785 of SEQ ID NO: 1882626
gagucuuacuauguucuag

SEQ ID NO: 2135871 - RNA, 19 nt, Artificial Sequence
  Description of Artificial Sequence: Synthetic oligonucleotide
  Antisense strand to SEQ ID NO: 2135870
cuagaacauaguaagacuc

SEQ ID NO: 2135872 - RNA, 19 nt, Artificial Sequence
  Description of Artificial Sequence: Synthetic oligonucleotide
  Sense strand starting at position 3968 of SEQ ID NO: 1882626
uucgcagacuuucugaguu

SEQ ID NO: 2135873 - RNA, 19 nt, Artificial Sequence
  Description of Artificial Sequence: Synthetic oligonucleotide
  Antisense strand to SEQ ID NO: 2135872
aacucagaaagucugcgaa

SEQ ID NO: 2135874 - RNA, 19 nt, Artificial Sequence
  Description of Artificial Sequence: Synthetic oligonucleotide
  Sense strand starting at position 106 of SEQ ID NO: 1882627
acucuuucuccuuggugga

SEQ ID NO: 2135875 - RNA, 19 nt, Artificial Sequence
  Description of Artificial Sequence: Synthetic oligonucleotide
  Antisense strand to SEQ ID NO: 2135874
uccaccaaggagaaagagu

SEQ ID NO: 2135876 - RNA, 19 nt, Artificial Sequence
  Description of Artificial Sequence: Synthetic oligonucleotide
  Sense strand starting at position 107 of SEQ ID NO: 1882627
cucuuucuccuugguggaa

SEQ ID NO: 2135877 - RNA, 19 nt, Artificial Sequence
  Description of Artificial Sequence: Synthetic oligonucleotide
  Antisense strand to SEQ ID NO: 2135876
uuccaccaaggagaaagag

SEQ ID NO: 2135878 - RNA, 19 nt, Artificial Sequence
  Description of Artificial Sequence: Synthetic oligonucleotide
  Sense strand starting at position 108 of SEQ ID NO: 1882627
ucuuucuccuugguggaaa

SEQ ID NO: 2135879 - RNA, 19 nt, Artificial Sequence
  Description of Artificial Sequence: Synthetic oligonucleotide
  Antisense strand to SEQ ID NO: 2135878
uuuccaccaaggagaaaga

SEQ ID NO: 2135880 - RNA, 19 nt, Artificial Sequence
  Description of Artificial Sequence: Synthetic oligonucleotide
  Sense strand starting at position 127 of SEQ ID NO: 1882627
cucccaguucgugcaguaa

SEQ ID NO: 2135881 - RNA, 19 nt, Artificial Sequence
  Description of Artificial Sequence: Synthetic oligonucleotide
  Antisense strand to SEQ ID NO: 2135880
uuacugcacgaacugggag

SEQ ID NO: 2135882 - RNA, 19 nt, Artificial Sequence
  Description of Artificial Sequence: Synthetic oligonucleotide
  Sense strand starting at position 250 of SEQ ID NO: 1882627
agaaauaccaccgggcaua

SEQ ID NO: 2135883 - RNA, 19 nt, Artificial Sequence
  Description of Artificial Sequence: Synthetic oligonucleotide
  Antisense strand to SEQ ID NO: 2135882
uaugcccggugguauuucu

SEQ ID NO: 2135884 - RNA, 19 nt, Artificial Sequence
  Description of Artificial Sequence: Synthetic oligonucleotide
  Sense strand starting at position 393 of SEQ ID NO: 1882627
cugagauuaugcggcucuu

SEQ ID NO: 2135885 - RNA, 19 nt, Artificial Sequence
  Description of Artificial Sequence: Synthetic oligonucleotide
  Antisense strand to SEQ ID NO: 2135884
aagagccgcauaaucucag

SEQ ID NO: 2135886 - RNA, 19 nt, Artificial Sequence
  Description of Artificial Sequence: Synthetic oligonucleotide
  Sense strand starting at position 495 of SEQ ID NO: 1882627
gaggcuuccuggucuaaga

SEQ ID NO: 2135887 - RNA, 19 nt, Artificial Sequence
  Description of Artificial Sequence: Synthetic oligonucleotide
  Antisense strand to SEQ ID NO: 2135886
ucuuagaccaggaagccuc

SEQ ID NO: 2135888 - RNA, 19 nt, Artificial Sequence
  Description of Artificial Sequence: Synthetic oligonucleotide
  Sense strand starting at position 497 of SEQ ID NO: 1882627
ggcuuccuggucuaagagu

SEQ ID NO: 2135889 - RNA, 19 nt, Artificial Sequence
  Description of Artificial Sequence: Synthetic oligonucleotide
  Antisense strand to SEQ ID NO: 2135888
acucuuagaccaggaagcc

SEQ ID NO: 2135890 - RNA, 19 nt, Artificial Sequence
  Description of Artificial Sequence: Synthetic oligonucleotide
  Sense strand starting at position 506 of SEQ ID NO: 1882627
gucuaagaguugcuggcaa

SEQ ID NO: 2135891 - RNA, 19 nt, Artificial Sequence
  Description of Artificial Sequence: Synthetic oligonucleotide
  Antisense strand to SEQ ID NO: 2135890
uugccagcaacucuuagac

SEQ ID NO: 2135892 - RNA, 19 nt, Artificial Sequence
  Description of Artificial Sequence: Synthetic oligonucleotide
  Sense strand starting at position 508 of SEQ ID NO: 1882627
cuaagaguugcuggcaaga

SEQ ID NO: 2135893 - RNA, 19 nt, Artificial Sequence
  Description of Artificial Sequence: Synthetic oligonucleotide
  Antisense strand to SEQ ID NO: 2135892
ucuugccagcaacucuuag

SEQ ID NO: 2135894 - RNA, 19 nt, Artificial Sequence
  Description of Artificial Sequence: Synthetic oligonucleotide
  Sense strand starting at position 510 of SEQ ID NO: 1882627
aagaguugcuggcaagaag

SEQ ID NO: 2135895 - RNA, 19 nt, Artificial Sequence
  Description of Artificial Sequence: Synthetic oligonucleotide
  Antisense strand to SEQ ID NO: 2135894
cuucuugccagcaacucuu

SEQ ID NO: 2135896 - RNA, 19 nt, Artificial Sequence
  Description of Artificial Sequence: Synthetic oligonucleotide
  Sense strand starting at position 1458 of SEQ ID NO: 1882627
uggcuuuccuuccagaaug

SEQ ID NO: 2135897 - RNA, 19 nt, Artificial Sequence
  Description of Artificial Sequence: Synthetic oligonucleotide
  Antisense strand to SEQ ID NO: 2135896
cauucuggaaggaaagcca

SEQ ID NO: 2135898 - RNA, 19 nt, Artificial Sequence
  Description of Artificial Sequence: Synthetic oligonucleotide
  Sense strand starting at position 1950 of SEQ ID NO: 1882627
cgaggcagcuguguucaga

SEQ ID NO: 2135899 - RNA, 19 nt, Artificial Sequence
  Description of Artificial Sequence: Synthetic oligonucleotide
  Antisense strand to SEQ ID NO: 2135898
ucugaacacagcugccucg

SEQ ID NO: 2135900 - RNA, 19 nt, Artificial Sequence
  Description of Artificial Sequence: Synthetic oligonucleotide
  Sense strand starting at position 1953 of SEQ ID NO: 1882627
ggcagcuguguucagaaga

SEQ ID NO: 2135901 - RNA, 19 nt, Artificial Sequence
  Description of Artificial Sequence: Synthetic oligonucleotide
  Antisense strand to SEQ ID NO: 2135900
ucuucugaacacagcugcc

SEQ ID NO: 2135902 - RNA, 19 nt, Artificial Sequence
  Description of Artificial Sequence: Synthetic oligonucleotide
  Sense strand starting at position 2126 of SEQ ID NO: 1882627
ugcugcauccuagaaacuu

SEQ ID NO: 2135903 - RNA, 19 nt, Artificial Sequence
  Description of Artificial Sequence: Synthetic oligonucleotide
  Antisense strand to SEQ ID NO: 2135902
aaguuucuaggaugcagca

SEQ ID NO: 2135904 - RNA, 19 nt, Artificial Sequence
  Description of Artificial Sequence: Synthetic oligonucleotide
  Sense strand starting at position 2202 of SEQ ID NO: 1882627
cuacccacgucuugugaaa

SEQ ID NO: 2135905 - RNA, 19 nt, Artificial Sequence
  Description of Artificial Sequence: Synthetic oligonucleotide
  Antisense strand to SEQ ID NO: 2135904
uuucacaagacguggguag

SEQ ID NO: 2135906 - RNA, 19 nt, Artificial Sequence
  Description of Artificial Sequence: Synthetic oligonucleotide
  Sense strand starting at position 2204 of SEQ ID NO: 1882627
acccacgucuugugaaaga

SEQ ID NO: 2135907 - RNA, 19 nt, Artificial Sequence
  Description of Artificial Sequence: Synthetic oligonucleotide
  Antisense strand to SEQ ID NO: 2135906
ucuuucacaagacgugggu

SEQ ID NO: 2135908 - RNA, 19 nt, Artificial Sequence
  Description of Artificial Sequence: Synthetic oligonucleotide
  Sense strand starting at position 2412 of SEQ ID NO: 1882627
gcauuaugucuccaaugcu

SEQ ID NO: 2135909 - RNA, 19 nt, Artificial Sequence
  Description of Artificial Sequence: Synthetic oligonucleotide
  Antisense strand to SEQ ID NO: 2135908
agcauuggagacauaaugc

SEQ ID NO: 2135910 - RNA, 19 nt, Artificial Sequence
  Description of Artificial Sequence: Synthetic oligonucleotide
  Sense strand starting at position 2421 of SEQ ID NO: 1882627
cuccaaugcugagaggcau

SEQ ID NO: 2135911 - RNA, 19 nt, Artificial Sequence
  Description of Artificial Sequence: Synthetic oligonucleotide
  Antisense strand to SEQ ID NO: 2135910
augccucucagcauuggag

SEQ ID NO: 2135912 - RNA, 19 nt, Artificial Sequence
  Description of Artificial Sequence: Synthetic oligonucleotide
  Sense strand starting at position 2427 of SEQ ID NO: 1882627
ugcugagaggcauaaggua

SEQ ID NO: 2135913 - RNA, 19 nt, Artificial Sequence
  Description of Artificial Sequence: Synthetic oligonucleotide
  Antisense strand to SEQ ID NO: 2135912
uaccuuaugccucucagca

SEQ ID NO: 2135914 - RNA, 19 nt, Artificial Sequence
  Description of Artificial Sequence: Synthetic oligonucleotide
  Sense strand starting at position 2468 of SEQ ID NO: 1882627
uuagcuugguaccuugaau

SEQ ID NO: 2135915 - RNA, 19 nt, Artificial Sequence
  Description of Artificial Sequence: Synthetic oligonucleotide
  Antisense strand to SEQ ID NO: 2135914
auucaagguaccaagcuaa

SEQ ID NO: 2135916 - RNA, 19 nt, Artificial Sequence
  Description of Artificial Sequence: Synthetic oligonucleotide
  Sense strand starting at position 2545 of SEQ ID NO: 1882627
guguaucccuaacaaauuc

SEQ ID NO: 2135917 - RNA, 19 nt, Artificial Sequence
  Description of Artificial Sequence: Synthetic oligonucleotide
  Antisense strand to SEQ ID NO: 2135916
gaauuuguuagggauacac

SEQ ID NO: 2135918 - RNA, 19 nt, Artificial Sequence
  Description of Artificial Sequence: Synthetic oligonucleotide
  Sense strand starting at position 3664 of SEQ ID NO: 1882627
uuacaagugugacccacau

SEQ ID NO: 2135919 - RNA, 19 nt, Artificial Sequence
  Description of Artificial Sequence: Synthetic oligonucleotide
  Antisense strand to SEQ ID NO: 2135918
augugggucacacuuguaa

SEQ ID NO: 2135920 - RNA, 19 nt, Artificial Sequence
  Description of Artificial Sequence: Synthetic oligonucleotide
  Sense strand starting at position 3792 of SEQ ID NO: 1882627
ccuccucagucuucgaagu

SEQ ID NO: 2135921 - RNA, 19 nt, Artificial Sequence
  Description of Artificial Sequence: Synthetic oligonucleotide
  Antisense strand to SEQ ID NO: 2135920
acuucgaagacugaggagg

SEQ ID NO: 2135922 - RNA, 19 nt, Artificial Sequence
  Description of Artificial Sequence: Synthetic oligonucleotide
  Sense strand starting at position 3793 of SEQ ID NO: 1882627
cuccucagucuucgaagua

SEQ ID NO: 2135923 - RNA, 19 nt, Artificial Sequence
  Description of Artificial Sequence: Synthetic oligonucleotide
  Antisense strand to SEQ ID NO: 2135922
uacuucgaagacugaggag

SEQ ID NO: 2135924 - RNA, 19 nt, Artificial Sequence
  Description of Artificial Sequence: Synthetic oligonucleotide
  Sense strand starting at position 3805 of SEQ ID NO: 1882627
cgaaguagcugguacuaaa

SEQ ID NO: 2135925 - RNA, 19 nt, Artificial Sequence
  Description of Artificial Sequence: Synthetic oligonucleotide
  Antisense strand to SEQ ID NO: 2135924
uuuaguaccagcuacuucg

SEQ ID NO: 2135926 - RNA, 19 nt, Artificial Sequence
  Description of Artificial Sequence: Synthetic oligonucleotide
  Sense strand starting at position 3969 of SEQ ID NO: 1882627
cucuaauauucccagcguu

SEQ ID NO: 2135927 - RNA, 19 nt, Artificial Sequence
  Description of Artificial Sequence: Synthetic oligonucleotide
  Antisense strand to SEQ ID NO: 2135926
aacgcugggaauauuagag

SEQ ID NO: 2135928 - RNA, 19 nt, Artificial Sequence
  Description of Artificial Sequence: Synthetic oligonucleotide
  Sense strand starting at position 42 of SEQ ID NO: 1882628
uggccauacacucgauaug

SEQ ID NO: 2135929 - RNA, 19 nt, Artificial Sequence
  Description of Artificial Sequence: Synthetic oligonucleotide
  Antisense strand to SEQ ID NO: 2135928
cauaucgaguguauggcca

SEQ ID NO: 2135930 - RNA, 19 nt, Artificial Sequence
  Description of Artificial Sequence: Synthetic oligonucleotide
  Sense strand starting at position 119 of SEQ ID NO: 1882628
gcaugacuuugggccacaa

SEQ ID NO: 2135931 - RNA, 19 nt, Artificial Sequence
  Description of Artificial Sequence: Synthetic oligonucleotide
  Antisense strand to SEQ ID NO: 2135930
uuguggcccaaagucaugc

SEQ ID NO: 2135932 - RNA, 19 nt, Artificial Sequence
  Description of Artificial Sequence: Synthetic oligonucleotide
  Sense strand starting at position 152 of SEQ ID NO: 1882628
gaaguugaaucuccaaguu

SEQ ID NO: 2135933 - RNA, 19 nt, Artificial Sequence
  Description of Artificial Sequence: Synthetic oligonucleotide
  Antisense strand to SEQ ID NO: 2135932
aacuuggagauucaacuuc

SEQ ID NO: 2135934 - RNA, 19 nt, Artificial Sequence
  Description of Artificial Sequence: Synthetic oligonucleotide
  Sense strand starting at position 248 of SEQ ID NO: 1882628
gaguaagguccacgacuua

SEQ ID NO: 2135935 - RNA, 19 nt, Artificial Sequence
  Description of Artificial Sequence: Synthetic oligonucleotide
  Antisense strand to SEQ ID NO: 2135934
uaagucguggaccuuacuc

SEQ ID NO: 2135936 - RNA, 19 nt, Artificial Sequence
  Description of Artificial Sequence: Synthetic oligonucleotide
  Sense strand starting at position 281 of SEQ ID NO: 1882628
augacaacucugugagcau

SEQ ID NO: 2135937 - RNA, 19 nt, Artificial Sequence
  Description of Artificial Sequence: Synthetic oligonucleotide
  Antisense strand to SEQ ID NO: 2135936
augcucacagaguugucau

SEQ ID NO: 2135938 - RNA, 19 nt, Artificial Sequence
  Description of Artificial Sequence: Synthetic oligonucleotide
  Sense strand starting at position 284 of SEQ ID NO: 1882628
acaacucugugagcauuau

SEQ ID NO: 2135939 - RNA, 19 nt, Artificial Sequence
  Description of Artificial Sequence: Synthetic oligonucleotide
  Antisense strand to SEQ ID NO: 2135938
auaaugcucacagaguugu

SEQ ID NO: 2135940 - RNA, 19 nt, Artificial Sequence
  Description of Artificial Sequence: Synthetic oligonucleotide
  Sense strand starting at position 334 of SEQ ID NO: 1882628
uuuaauaguucugcaagac

SEQ ID NO: 2135941 - RNA, 19 nt, Artificial Sequence
  Description of Artificial Sequence: Synthetic oligonucleotide
  Antisense strand to SEQ ID NO: 2135940
gucuugcagaacuauuaaa

SEQ ID NO: 2135942 - RNA, 19 nt, Artificial Sequence
  Description of Artificial Sequence: Synthetic oligonucleotide
  Sense strand starting at position 335 of SEQ ID NO: 1882628
uuaauaguucugcaagacu

SEQ ID NO: 2135943 - RNA, 19 nt, Artificial Sequence
  Description of Artificial Sequence: Synthetic oligonucleotide
  Antisense strand to SEQ ID NO: 2135942
agucuugcagaacuauuaa

SEQ ID NO: 2135944 - RNA, 19 nt, Artificial Sequence
  Description of Artificial Sequence: Synthetic oligonucleotide
  Sense strand starting at position 338 of SEQ ID NO: 1882628
auaguucugcaagacuaaa

SEQ ID NO: 2135945 - RNA, 19 nt, Artificial Sequence
  Description of Artificial Sequence: Synthetic oligonucleotide
  Antisense strand to SEQ ID NO: 2135944
uuuagucuugcagaacuau

SEQ ID NO: 2135946 - RNA, 19 nt, Artificial Sequence
  Description of Artificial Sequence: Synthetic oligonucleotide
  Sense strand starting at position 473 of SEQ ID NO: 1882628
gcaugaguuaaggguguca

SEQ ID NO: 2135947 - RNA, 19 nt, Artificial Sequence
  Description of Artificial Sequence: Synthetic oligonucleotide
  Antisense strand to SEQ ID NO: 2135946
ugacacccuuaacucaugc

SEQ ID NO: 2135948 - RNA, 19 nt, Artificial Sequence
  Description of Artificial Sequence: Synthetic oligonucleotide
  Sense strand starting at position 485 of SEQ ID NO: 1882628
ggugucaauaauugaggga

SEQ ID NO: 2135949 - RNA, 19 nt, Artificial Sequence
  Description of Artificial Sequence: Synthetic oligonucleotide
  Antisense strand to SEQ ID NO: 2135948
ucccucaauuauugacacc

SEQ ID NO: 2135950 - RNA, 19 nt, Artificial Sequence
  Description of Artificial Sequence: Synthetic oligonucleotide
  Sense strand starting at position 576 of SEQ ID NO: 1882628
gcuacaaagcuugauauga

SEQ ID NO: 2135951 - RNA, 19 nt, Artificial Sequence
  Description of Artificial Sequence: Synthetic oligonucleotide
  Antisense strand to SEQ ID NO: 2135950
ucauaucaagcuuuguagc

SEQ ID NO: 2135952 - RNA, 19 nt, Artificial Sequence
  Description of Artificial Sequence: Synthetic oligonucleotide
  Sense strand starting at position 585 of SEQ ID NO: 1882628
cuugauaugacguguauuu

SEQ ID NO: 2135953 - RNA, 19 nt, Artificial Sequence
  Description of Artificial Sequence: Synthetic oligonucleotide
  Antisense strand to SEQ ID NO: 2135952
aaauacacgucauaucaag

SEQ ID NO: 2135954 - RNA, 19 nt, Artificial Sequence
  Description of Artificial Sequence: Synthetic oligonucleotide
  Sense strand starting at position 789 of SEQ ID NO: 1882628
gugaacaugccauguuaca

SEQ ID NO: 2135955 - RNA, 19 nt, Artificial Sequence
  Description of Artificial Sequence: Synthetic oligonucleotide
  Antisense strand to SEQ ID NO: 2135954
uguaacauggcauguucac

SEQ ID NO: 2135956 - RNA, 19 nt, Artificial Sequence
  Description of Artificial Sequence: Synthetic oligonucleotide
  Sense strand starting at position 912 of SEQ ID NO: 1882628
gcaagcuuguauucccaaa

SEQ ID NO: 2135957 - RNA, 19 nt, Artificial Sequence
  Description of Artificial Sequence: Synthetic oligonucleotide
  Antisense strand to SEQ ID NO: 2135956
uuugggaauacaagcuugc

SEQ ID NO: 2135958 - RNA, 19 nt, Artificial Sequence
  Description of Artificial Sequence: Synthetic oligonucleotide
  Sense strand starting at position 998 of SEQ ID NO: 1882628
ggcauuuccuaagaucucu

SEQ ID NO: 2135959 - RNA, 19 nt, Artificial Sequence
  Description of Artificial Sequence: Synthetic oligonucleotide
  Antisense strand to SEQ ID NO: 2135958
agagaucuuaggaaaugcc

SEQ ID NO: 2135960 - RNA, 19 nt, Artificial Sequence
  Description of Artificial Sequence: Synthetic oligonucleotide
  Sense strand starting at position 1247 of SEQ ID NO: 1882628
augguaucaaguugggaga

SEQ ID NO: 2135961 - RNA, 19 nt, Artificial Sequence
  Description of Artificial Sequence: Synthetic oligonucleotide
  Antisense strand to SEQ ID NO: 2135960
ucucccaacuugauaccau

SEQ ID NO: 2135962 - RNA, 19 nt, Artificial Sequence
  Description of Artificial Sequence: Synthetic oligonucleotide
  Sense strand starting at position 1258 of SEQ ID NO: 1882628
uugggagaucgaugcuauu

SEQ ID NO: 2135963 - RNA, 19 nt, Artificial Sequence
  Description of Artificial Sequence: Synthetic oligonucleotide
  Antisense strand to SEQ ID NO: 2135962
aauagcaucgaucucccaa

SEQ ID NO: 2135964 - RNA, 19 nt, Artificial Sequence
  Description of Artificial Sequence: Synthetic oligonucleotide
  Sense strand starting at position 1267 of SEQ ID NO: 1882628
cgaugcuauucucuccaca

SEQ ID NO: 2135965 - RNA, 19 nt, Artificial Sequence
  Description of Artificial Sequence: Synthetic oligonucleotide
  Antisense strand to SEQ ID NO: 2135964
uguggagagaauagcaucg

SEQ ID NO: 2135966 - RNA, 19 nt, Artificial Sequence
  Description of Artificial Sequence: Synthetic oligonucleotide
  Sense strand starting at position 1293 of SEQ ID NO: 1882628
gguaaagaauccucagcca

SEQ ID NO: 2135967 - RNA, 19 nt, Artificial Sequence
  Description of Artificial Sequence: Synthetic oligonucleotide
  Antisense strand to SEQ ID NO: 2135966
uggcugaggauucuuuacc

SEQ ID NO: 2135968 - RNA, 19 nt, Artificial Sequence
  Description of Artificial Sequence: Synthetic oligonucleotide
  Sense strand starting at position 1387 of SEQ ID NO: 1882628
cuaggagaugagugacguu

SEQ ID NO: 2135969 - RNA, 19 nt, Artificial Sequence
  Description of Artificial Sequence: Synthetic oligonucleotide
  Antisense strand to SEQ ID NO: 2135968
aacgucacucaucuccuag

SEQ ID NO: 2135970 - RNA, 19 nt, Artificial Sequence
  Description of Artificial Sequence: Synthetic oligonucleotide
  Sense strand starting at position 1403 of SEQ ID NO: 1882628
guuaaaggaucugcaguga

SEQ ID NO: 2135971 - RNA, 19 nt, Artificial Sequence
  Description of Artificial Sequence: Synthetic oligonucleotide
  Antisense strand to SEQ ID NO: 2135970
ucacugcagauccuuuaac

SEQ ID NO: 2135972 - RNA, 19 nt, Artificial Sequence
  Description of Artificial Sequence: Synthetic oligonucleotide
  Sense strand starting at position 1407 of SEQ ID NO: 1882628
aaggaucugcagugaugau

SEQ ID NO: 2135973 - RNA, 19 nt, Artificial Sequence
  Description of Artificial Sequence: Synthetic oligonucleotide
  Antisense strand to SEQ ID NO: 2135972
aucaucacugcagauccuu

SEQ ID NO: 2135974 - RNA, 19 nt, Artificial Sequence
  Description of Artificial Sequence: Synthetic oligonucleotide
  Sense strand starting at position 1417 of SEQ ID NO: 1882628
agugaugaucugugccuca

SEQ ID NO: 2135975 - RNA, 19 nt, Artificial Sequence
  Description of Artificial Sequence: Synthetic oligonucleotide
  Antisense strand to SEQ ID NO: 2135974
ugaggcacagaucaucacu

SEQ ID NO: 2135976 - RNA, 19 nt, Artificial Sequence
  Description of Artificial Sequence: Synthetic oligonucleotide
  Sense strand starting at position 1439 of SEQ ID NO: 1882628
uggcgaauauuccuaggag

SEQ ID NO: 2135977 - RNA, 19 nt, Artificial Sequence
  Description of Artificial Sequence: Synthetic oligonucleotide
  Antisense strand to SEQ ID NO: 2135976
cuccuaggaauauucgcca

SEQ ID NO: 2135978 - RNA, 19 nt, Artificial Sequence
  Description of Artificial Sequence: Synthetic oligonucleotide
  Sense strand starting at position 2256 of SEQ ID NO: 1882628
gagggaaguuguuccugau

SEQ ID NO: 2135979 - RNA, 19 nt, Artificial Sequence
  Description of Artificial Sequence: Synthetic oligonucleotide
  Antisense strand to SEQ ID NO: 2135978
aucaggaacaacuucccuc

SEQ ID NO: 2135980 - RNA, 19 nt, Artificial Sequence
  Description of Artificial Sequence: Synthetic oligonucleotide
  Sense strand starting at position 2462 of SEQ ID NO: 1882628
aggugcuuagcacaguauu

SEQ ID NO: 2135981 - RNA, 19 nt, Artificial Sequence
  Description of Artificial Sequence: Synthetic oligonucleotide
  Antisense strand to SEQ ID NO: 2135980
aauacugugcuaagcaccu

SEQ ID NO: 2135982 - RNA, 19 nt, Artificial Sequence
  Description of Artificial Sequence: Synthetic oligonucleotide
  Sense strand starting at position 2490 of SEQ ID NO: 1882628
uguggaagugcccaaaugu

SEQ ID NO: 2135983 - RNA, 19 nt, Artificial Sequence
  Description of Artificial Sequence: Synthetic oligonucleotide
  Antisense strand to SEQ ID NO: 2135982
acauuugggcacuuccaca

SEQ ID NO: 2135984 - RNA, 19 nt, Artificial Sequence
  Description of Artificial Sequence: Synthetic oligonucleotide
  Sense strand starting at position 2498 of SEQ ID NO: 1882628
ugcccaaauguuuguugaa

SEQ ID NO: 2135985 - RNA, 19 nt, Artificial Sequence
  Description of Artificial Sequence: Synthetic oligonucleotide
  Antisense strand to SEQ ID NO: 2135984
uucaacaaacauuugggca

SEQ ID NO: 2135986 - RNA, 19 nt, Artificial Sequence
  Description of Artificial Sequence: Synthetic oligonucleotide
  Sense strand starting at position 2499 of SEQ ID NO: 1882628
gcccaaauguuuguugaau

SEQ ID NO: 2135987 - RNA, 19 nt, Artificial Sequence
  Description of Artificial Sequence: Synthetic oligonucleotide
  Antisense strand to SEQ ID NO: 2135986
auucaacaaacauuugggc

SEQ ID NO: 2135988 - RNA, 19 nt, Artificial Sequence
  Description of Artificial Sequence: Synthetic oligonucleotide
  Sense strand starting at position 2500 of SEQ ID NO: 1882628
cccaaauguuuguugaaug

SEQ ID NO: 2135989 - RNA, 19 nt, Artificial Sequence
  Description of Artificial Sequence: Synthetic oligonucleotide
  Antisense strand to SEQ ID NO: 2135988
cauucaacaaacauuuggg

SEQ ID NO: 2135990 - RNA, 19 nt, Artificial Sequence
  Description of Artificial Sequence: Synthetic oligonucleotide
  Sense strand starting at position 2508 of SEQ ID NO: 1882628
uuuguugaaugacugagua

SEQ ID NO: 2135991 - RNA, 19 nt, Artificial Sequence
  Description of Artificial Sequence: Synthetic oligonucleotide
  Antisense strand to SEQ ID NO: 2135990
uacucagucauucaacaaa

SEQ ID NO: 2135992 - RNA, 19 nt, Artificial Sequence
  Description of Artificial Sequence: Synthetic oligonucleotide
  Sense strand starting at position 2957 of SEQ ID NO: 1882628
auggccuuagacugaguaa

SEQ ID NO: 2135993 - RNA, 19 nt, Artificial Sequence
  Description of Artificial Sequence: Synthetic oligonucleotide
  Antisense strand to SEQ ID NO: 2135992
uuacucagucuaaggccau

SEQ ID NO: 2135994 - RNA, 19 nt, Artificial Sequence
  Description of Artificial Sequence: Synthetic oligonucleotide
  Sense strand starting at position 2958 of SEQ ID NO: 1882628
uggccuuagacugaguaaa

SEQ ID NO: 2135995 - RNA, 19 nt, Artificial Sequence
  Description of Artificial Sequence: Synthetic oligonucleotide
  Antisense strand to SEQ ID NO: 2135994
uuuacucagucuaaggcca

SEQ ID NO: 2135996 - RNA, 19 nt, Artificial Sequence
  Description of Artificial Sequence: Synthetic oligonucleotide
  Sense strand starting at position 3131 of SEQ ID NO: 1882628
gaucguaaauucuugauac

SEQ ID NO: 2135997 - RNA, 19 nt, Artificial Sequence
  Description of Artificial Sequence: Synthetic oligonucleotide
  Antisense strand to SEQ ID NO: 2135996
guaucaagaauuuacgauc

SEQ ID NO: 2135998 - RNA, 19 nt, Artificial Sequence
  Description of Artificial Sequence: Synthetic oligonucleotide
  Sense strand starting at position 3133 of SEQ ID NO: 1882628
ucguaaauucuugauacua

SEQ ID NO: 2135999 - RNA, 19 nt, Artificial Sequence
  Description of Artificial Sequence: Synthetic oligonucleotide
  Antisense strand to SEQ ID NO: 2135998
uaguaucaagaauuuacga

SEQ ID NO: 2136000 - RNA, 19 nt, Artificial Sequence
  Description of Artificial Sequence: Synthetic oligonucleotide
  Sense strand starting at position 3537 of SEQ ID NO: 1882628
aauagauacguugaccacu

SEQ ID NO: 2136001 - RNA, 19 nt, Artificial Sequence
  Description of Artificial Sequence: Synthetic oligonucleotide
  Antisense strand to SEQ ID NO: 2136000
aguggucaacguaucuauu

SEQ ID NO: 2136002 - RNA, 19 nt, Artificial Sequence
  Description of Artificial Sequence: Synthetic oligonucleotide
  Sense strand starting at position 3714 of SEQ ID NO: 1882628
guuaaagauuggcuggcuu

SEQ ID NO: 2136003 - RNA, 19 nt, Artificial Sequence
  Description of Artificial Sequence: Synthetic oligonucleotide
  Antisense strand to SEQ ID NO: 2136002
aagccagccaaucuuuaac

SEQ ID NO: 2136004 - RNA, 19 nt, Artificial Sequence
  Description of Artificial Sequence: Synthetic oligonucleotide
  Sense strand starting at position 3785 of SEQ ID NO: 1882628
auugcuuguuucuuagaga

SEQ ID NO: 2136005 - RNA, 19 nt, Artificial Sequence
  Description of Artificial Sequence: Synthetic oligonucleotide
  Antisense strand to SEQ ID NO: 2136004
ucucuaagaaacaagcaau

SEQ ID NO: 2136006 - RNA, 19 nt, Artificial Sequence
  Description of Artificial Sequence: Synthetic oligonucleotide
  Sense strand starting at position 3864 of SEQ ID NO: 1882628
uacugaucugcaugagagu

SEQ ID NO: 2136007 - RNA, 19 nt, Artificial Sequence
  Description of Artificial Sequence: Synthetic oligonucleotide
  Antisense strand to SEQ ID NO: 2136006
acucucaugcagaucagua

SEQ ID NO: 2136008 - RNA, 19 nt, Artificial Sequence
  Description of Artificial Sequence: Synthetic oligonucleotide
  Sense strand starting at position 32 of SEQ ID NO: 1882629
cucagcuaccugggagauu

SEQ ID NO: 2136009 - RNA, 19 nt, Artificial Sequence
  Description of Artificial Sequence: Synthetic oligonucleotide
  Antisense strand to SEQ ID NO: 2136008
aaucucccagguagcugag

SEQ ID NO: 2136010 - RNA, 19 nt, Artificial Sequence
  Description of Artificial Sequence: Synthetic oligonucleotide
  Sense strand starting at position 52 of SEQ ID NO: 1882629
cuggaauccuugcugauau

SEQ ID NO: 2136011 - RNA, 19 nt, Artificial Sequence
  Description of Artificial Sequence: Synthetic oligonucleotide
  Antisense strand to SEQ ID NO: 2136010
auaucagcaaggauuccag

SEQ ID NO: 2136012 - RNA, 19 nt, Artificial Sequence
  Description of Artificial Sequence: Synthetic oligonucleotide
  Sense strand starting at position 54 of SEQ ID NO: 1882629
ggaauccuugcugauaucu

SEQ ID NO: 2136013 - RNA, 19 nt, Artificial Sequence
  Description of Artificial Sequence: Synthetic oligonucleotide
  Antisense strand to SEQ ID NO: 2136012
agauaucagcaaggauucc

SEQ ID NO: 2136014 - RNA, 19 nt, Artificial Sequence
  Description of Artificial Sequence: Synthetic oligonucleotide
  Sense strand starting at position 59 of SEQ ID NO: 1882629
ccuugcugauaucucagaa

SEQ ID NO: 2136015 - RNA, 19 nt, Artificial Sequence
  Description of Artificial Sequence: Synthetic oligonucleotide
  Antisense strand to SEQ ID NO: 2136014
uucugagauaucagcaagg

SEQ ID NO: 2136016 - RNA, 19 nt, Artificial Sequence
  Description of Artificial Sequence: Synthetic oligonucleotide
  Sense strand starting at position 71 of SEQ ID NO: 1882629
cucagaaacuaguuagucu

SEQ ID NO: 2136017 - RNA, 19 nt, Artificial Sequence
  Description of Artificial Sequence: Synthetic oligonucleotide
  Antisense strand to SEQ ID NO: 2136016
agacuaacuaguuucugag

SEQ ID NO: 2136018 - RNA, 19 nt, Artificial Sequence
  Description of Artificial Sequence: Synthetic oligonucleotide
  Sense strand starting at position 79 of SEQ ID NO: 1882629
cuaguuagucuuggaauca

SEQ ID NO: 2136019 - RNA, 19 nt, Artificial Sequence
  Description of Artificial Sequence: Synthetic oligonucleotide
  Antisense strand to SEQ ID NO: 2136018
ugauuccaagacuaacuag

SEQ ID NO: 2136020 - RNA, 19 nt, Artificial Sequence
  Description of Artificial Sequence: Synthetic oligonucleotide
  Sense strand starting at position 206 of SEQ ID NO: 1882629
caggucacucgaugaacuu

SEQ ID NO: 2136021 - RNA, 19 nt, Artificial Sequence
  Description of Artificial Sequence: Synthetic oligonucleotide
  Antisense strand to SEQ ID NO: 2136020
aaguucaucgagugaccug

SEQ ID NO: 2136022 - RNA, 19 nt, Artificial Sequence
  Description of Artificial Sequence: Synthetic oligonucleotide
  Sense strand starting at position 494 of SEQ ID NO: 1882629
ugaacugucccagguuuaa

SEQ ID NO: 2136023 - RNA, 19 nt, Artificial Sequence
  Description of Artificial Sequence: Synthetic oligonucleotide
  Antisense strand to SEQ ID NO: 2136022
uuaaaccugggacaguuca

SEQ ID NO: 2136024 - RNA, 19 nt, Artificial Sequence
  Description of Artificial Sequence: Synthetic oligonucleotide
  Sense strand starting at position 503 of SEQ ID NO: 1882629
ccagguuuaagaggaguga

SEQ ID NO: 2136025 - RNA, 19 nt, Artificial Sequence
  Description of Artificial Sequence: Synthetic oligonucleotide
  Antisense strand to SEQ ID NO: 2136024
ucacuccucuuaaaccugg

SEQ ID NO: 2136026 - RNA, 19 nt, Artificial Sequence
  Description of Artificial Sequence: Synthetic oligonucleotide
  Sense strand starting at position 507 of SEQ ID NO: 1882629
guuuaagaggagugacauu

SEQ ID NO: 2136027 - RNA, 19 nt, Artificial Sequence
  Description of Artificial Sequence: Synthetic oligonucleotide
  Antisense strand to SEQ ID NO: 2136026
aaugucacuccucuuaaac

SEQ ID NO: 2136028 - RNA, 19 nt, Artificial Sequence
  Description of Artificial Sequence: Synthetic oligonucleotide
  Sense strand starting at position 545 of SEQ ID NO: 1882629
aagguuugagcacacuaau

SEQ ID NO: 2136029 - RNA, 19 nt, Artificial Sequence
  Description of Artificial Sequence: Synthetic oligonucleotide
  Antisense strand to SEQ ID NO: 2136028
auuagugugcucaaaccuu

SEQ ID NO: 2136030 - RNA, 19 nt, Artificial Sequence
  Description of Artificial Sequence: Synthetic oligonucleotide
  Sense strand starting at position 548 of SEQ ID NO: 1882629
guuugagcacacuaauaga

SEQ ID NO: 2136031 - RNA, 19 nt, Artificial Sequence
  Description of Artificial Sequence: Synthetic oligonucleotide
  Antisense strand to SEQ ID NO: 2136030
ucuauuagugugcucaaac

SEQ ID NO: 2136032 - RNA, 19 nt, Artificial Sequence
  Description of Artificial Sequence: Synthetic oligonucleotide
  Sense strand starting at position 562 of SEQ ID NO: 1882629
auagaagccuuggcauauu

SEQ ID NO: 2136033 - RNA, 19 nt, Artificial Sequence
  Description of Artificial Sequence: Synthetic oligonucleotide
  Antisense strand to SEQ ID NO: 2136032
aauaugccaaggcuucuau

SEQ ID NO: 2136034 - RNA, 19 nt, Artificial Sequence
  Description of Artificial Sequence: Synthetic oligonucleotide
  Sense strand starting at position 662 of SEQ ID NO: 1882629
gagaauguuuaaguccuau

SEQ ID NO: 2136035 - RNA, 19 nt, Artificial Sequence
  Description of Artificial Sequence: Synthetic oligonucleotide
  Antisense strand to SEQ ID NO: 2136034
auaggacuuaaacauucuc

SEQ ID NO: 2136036 - RNA, 19 nt, Artificial Sequence
  Description of Artificial Sequence: Synthetic oligonucleotide
  Sense strand starting at position 795 of SEQ ID NO: 1882629
uugagcauuuauguucuua

SEQ ID NO: 2136037 - RNA, 19 nt, Artificial Sequence
  Description of Artificial Sequence: Synthetic oligonucleotide
  Antisense strand to SEQ ID NO: 2136036
uaagaacauaaaugcucaa

SEQ ID NO: 2136038 - RNA, 19 nt, Artificial Sequence
  Description of Artificial Sequence: Synthetic oligonucleotide
  Sense strand starting at position 905 of SEQ ID NO: 1882629
caaccuagugaguguuaga

SEQ ID NO: 2136039 - RNA, 19 nt, Artificial Sequence
  Description of Artificial Sequence: Synthetic oligonucleotide
  Antisense strand to SEQ ID NO: 2136038
ucuaacacucacuagguug

SEQ ID NO: 2136040 - RNA, 19 nt, Artificial Sequence
  Description of Artificial Sequence: Synthetic oligonucleotide
  Sense strand starting at position 1065 of SEQ ID NO: 1882629
uuuccaugcaucgagaaag

SEQ ID NO: 2136041 - RNA, 19 nt, Artificial Sequence
  Description of Artificial Sequence: Synthetic oligonucleotide
  Antisense strand to SEQ ID NO: 2136040
cuuucucgaugcauggaaa

SEQ ID NO: 2136042 - RNA, 19 nt, Artificial Sequence
  Description of Artificial Sequence: Synthetic oligonucleotide
  Sense strand starting at position 1151 of SEQ ID NO: 1882629
cccuaaugucagcaagcaa

SEQ ID NO: 2136043 - RNA, 19 nt, Artificial Sequence
  Description of Artificial Sequence: Synthetic oligonucleotide
  Antisense strand to SEQ ID NO: 2136042
uugcuugcugacauuaggg

SEQ ID NO: 2136044 - RNA, 19 nt, Artificial Sequence
  Description of Artificial Sequence: Synthetic oligonucleotide
  Sense strand starting at position 1165 of SEQ ID NO: 1882629
agcaauugauguucuuaaa

SEQ ID NO: 2136045 - RNA, 19 nt, Artificial Sequence
  Description of Artificial Sequence: Synthetic oligonucleotide
  Antisense strand to SEQ ID NO: 2136044
uuuaagaacaucaauugcu

SEQ ID NO: 2136046 - RNA, 19 nt, Artificial Sequence
  Description of Artificial Sequence: Synthetic oligonucleotide
  Sense strand starting at position 1242 of SEQ ID NO: 1882629
ccagucuuccagcaaagca

SEQ ID NO: 2136047 - RNA, 19 nt, Artificial Sequence
  Description of Artificial Sequence: Synthetic oligonucleotide
  Antisense strand to SEQ ID NO: 2136046
ugcuuugcuggaagacugg

SEQ ID NO: 2136048 - RNA, 19 nt, Artificial Sequence
  Description of Artificial Sequence: Synthetic oligonucleotide
  Sense strand starting at position 1569 of SEQ ID NO: 1882629
uuaauaacgcuggagaguu

SEQ ID NO: 2136049 - RNA, 19 nt, Artificial Sequence
  Description of Artificial Sequence: Synthetic oligonucleotide
  Antisense strand to SEQ ID NO: 2136048
aacucuccagcguuauuaa

SEQ ID NO: 2136050 - RNA, 19 nt, Artificial Sequence
  Description of Artificial Sequence: Synthetic oligonucleotide
  Sense strand starting at position 1896 of SEQ ID NO: 1882629
gcaugaaucuguccuacaa

SEQ ID NO: 2136051 - RNA, 19 nt, Artificial Sequence
  Description of Artificial Sequence: Synthetic oligonucleotide
  Antisense strand to SEQ ID NO: 2136050
uuguaggacagauucaugc

SEQ ID NO: 2136052 - RNA, 19 nt, Artificial Sequence
  Description of Artificial Sequence: Synthetic oligonucleotide
  Sense strand starting at position 1960 of SEQ ID NO: 1882629
gauaacuugcauuaagcga

SEQ ID NO: 2136053 - RNA, 19 nt, Artificial Sequence
  Description of Artificial Sequence: Synthetic oligonucleotide
  Antisense strand to SEQ ID NO: 2136052
ucgcuuaaugcaaguuauc

SEQ ID NO: 2136054 - RNA, 19 nt, Artificial Sequence
  Description of Artificial Sequence: Synthetic oligonucleotide
  Sense strand starting at position 2140 of SEQ ID NO: 1882629
cauguaucagauuggauau

SEQ ID NO: 2136055 - RNA, 19 nt, Artificial Sequence
  Description of Artificial Sequence: Synthetic oligonucleotide
  Antisense strand to SEQ ID NO: 2136054
auauccaaucugauacaug

SEQ ID NO: 2136056 - RNA, 19 nt, Artificial Sequence
  Description of Artificial Sequence: Synthetic oligonucleotide
  Sense strand starting at position 2375 of SEQ ID NO: 1882629
agauaugucuggccugaca

SEQ ID NO: 2136057 - RNA, 19 nt, Artificial Sequence
  Description of Artificial Sequence: Synthetic oligonucleotide
  Antisense strand to SEQ ID NO: 2136056
ugucaggccagacauaucu

SEQ ID NO: 2136058 - RNA, 19 nt, Artificial Sequence
  Description of Artificial Sequence: Synthetic oligonucleotide
  Sense strand starting at position 2377 of SEQ ID NO: 1882629
auaugucuggccugacaua

SEQ ID NO: 2136059 - RNA, 19 nt, Artificial Sequence
  Description of Artificial Sequence: Synthetic oligonucleotide
  Antisense strand to SEQ ID NO: 2136058
uaugucaggccagacauau

SEQ ID NO: 2136060 - RNA, 19 nt, Artificial Sequence
  Description of Artificial Sequence: Synthetic oligonucleotide
  Sense strand starting at position 2378 of SEQ ID NO: 1882629
uaugucuggccugacauau

SEQ ID NO: 2136061 - RNA, 19 nt, Artificial Sequence
  Description of Artificial Sequence: Synthetic oligonucleotide
  Antisense strand to SEQ ID NO: 2136060
auaugucaggccagacaua

SEQ ID NO: 2136062 - RNA, 19 nt, Artificial Sequence
  Description of Artificial Sequence: Synthetic oligonucleotide
  Sense strand starting at position 2452 of SEQ ID NO: 1882629
aggucauagaucugguaaa

SEQ ID NO: 2136063 - RNA, 19 nt, Artificial Sequence
  Description of Artificial Sequence: Synthetic oligonucleotide
  Antisense strand to SEQ ID NO: 2136062
uuuaccagaucuaugaccu

SEQ ID NO: 2136064 - RNA, 19 nt, Artificial Sequence
  Description of Artificial Sequence: Synthetic oligonucleotide
  Sense strand starting at position 2492 of SEQ ID NO: 1882629
ccagguucugguggaacaa

SEQ ID NO: 2136065 - RNA, 19 nt, Artificial Sequence
  Description of Artificial Sequence: Synthetic oligonucleotide
  Antisense strand to SEQ ID NO: 2136064
uuguuccaccagaaccugg

SEQ ID NO: 2136066 - RNA, 19 nt, Artificial Sequence
  Description of Artificial Sequence: Synthetic oligonucleotide
  Sense strand starting at position 2640 of SEQ ID NO: 1882629
uagauaguccuugaacgug

SEQ ID NO: 2136067 - RNA, 19 nt, Artificial Sequence
  Description of Artificial Sequence: Synthetic oligonucleotide
  Antisense strand to SEQ ID NO: 2136066
cacguucaaggacuaucua

SEQ ID NO: 2136068 - RNA, 19 nt, Artificial Sequence
  Description of Artificial Sequence: Synthetic oligonucleotide
  Sense strand starting at position 2715 of SEQ ID NO: 1882629
aguucugaaguccacagau

SEQ ID NO: 2136069 - RNA, 19 nt, Artificial Sequence
  Description of Artificial Sequence: Synthetic oligonucleotide
  Antisense strand to SEQ ID NO: 2136068
aucuguggacuucagaacu

SEQ ID NO: 2136070 - RNA, 19 nt, Artificial Sequence
  Description of Artificial Sequence: Synthetic oligonucleotide
  Sense strand starting at position 3009 of SEQ ID NO: 1882629
gaggauauaucaucugguu

SEQ ID NO: 2136071 - RNA, 19 nt, Artificial Sequence
  Description of Artificial Sequence: Synthetic oligonucleotide
  Antisense strand to SEQ ID NO: 2136070
aaccagaugauauauccuc

SEQ ID NO: 2136072 - RNA, 19 nt, Artificial Sequence
  Description of Artificial Sequence: Synthetic oligonucleotide
  Sense strand starting at position 3112 of SEQ ID NO: 1882629
guaauuuaacucugugcau

SEQ ID NO: 2136073 - RNA, 19 nt, Artificial Sequence
  Description of Artificial Sequence: Synthetic oligonucleotide
  Antisense strand to SEQ ID NO: 2136072
augcacagaguuaaauuac

SEQ ID NO: 2136074 - RNA, 19 nt, Artificial Sequence
  Description of Artificial Sequence: Synthetic oligonucleotide
  Sense strand starting at position 3127 of SEQ ID NO: 1882629
gcauuugauuuguaaaccu

SEQ ID NO: 2136075 - RNA, 19 nt, Artificial Sequence
  Description of Artificial Sequence: Synthetic oligonucleotide
  Antisense strand to SEQ ID NO: 2136074
agguuuacaaaucaaaugc

SEQ ID NO: 2136076 - RNA, 19 nt, Artificial Sequence
  Description of Artificial Sequence: Synthetic oligonucleotide
  Sense strand starting at position 3171 of SEQ ID NO: 1882629
ucucauauugagggaaagu

SEQ ID NO: 2136077 - RNA, 19 nt, Artificial Sequence
  Description of Artificial Sequence: Synthetic oligonucleotide
  Antisense strand to SEQ ID NO: 2136076
acuuucccucaauaugaga

SEQ ID NO: 2136078 - RNA, 19 nt, Artificial Sequence
  Description of Artificial Sequence: Synthetic oligonucleotide
  Sense strand starting at position 3351 of SEQ ID NO: 1882629
ggacucaccgucuagagga

SEQ ID NO: 2136079 - RNA, 19 nt, Artificial Sequence
  Description of Artificial Sequence: Synthetic oligonucleotide
  Antisense strand to SEQ ID NO: 2136078
uccucuagacggugagucc

SEQ ID NO: 2136080 - RNA, 19 nt, Artificial Sequence
  Description of Artificial Sequence: Synthetic oligonucleotide
  Sense strand starting at position 3513 of SEQ ID NO: 1882629
augcaugacguuuagacuu

SEQ ID NO: 2136081 - RNA, 19 nt, Artificial Sequence
  Description of Artificial Sequence: Synthetic oligonucleotide
  Antisense strand to SEQ ID NO: 2136080
aagucuaaacgucaugcau

SEQ ID NO: 2136082 - RNA, 19 nt, Artificial Sequence
  Description of Artificial Sequence: Synthetic oligonucleotide
  Sense strand starting at position 3519 of SEQ ID NO: 1882629
gacguuuagacuuguaaga

SEQ ID NO: 2136083 - RNA, 19 nt, Artificial Sequence
  Description of Artificial Sequence: Synthetic oligonucleotide
  Antisense strand to SEQ ID NO: 2136082
ucuuacaagucuaaacguc

SEQ ID NO: 2136084 - RNA, 19 nt, Artificial Sequence
  Description of Artificial Sequence: Synthetic oligonucleotide
  Sense strand starting at position 3642 of SEQ ID NO: 1882629
ggaagucuuaucuaacgug

SEQ ID NO: 2136085 - RNA, 19 nt, Artificial Sequence
  Description of Artificial Sequence: Synthetic oligonucleotide
  Antisense strand to SEQ ID NO: 2136084
cacguuagauaagacuucc

SEQ ID NO: 2136086 - RNA, 19 nt, Artificial Sequence
  Description of Artificial Sequence: Synthetic oligonucleotide
  Sense strand starting at position 3867 of SEQ ID NO: 1882629
ccagcagaucaguagcaau

SEQ ID NO: 2136087 - RNA, 19 nt, Artificial Sequence
  Description of Artificial Sequence: Synthetic oligonucleotide
  Antisense strand to SEQ ID NO: 2136086
auugcuacugaucugcugg

SEQ ID NO: 2136088 - RNA, 19 nt, Artificial Sequence
  Description of Artificial Sequence: Synthetic oligonucleotide
  Sense strand starting at position 1877 of SEQ ID NO: 1882630
ggaaauggagccuguaauu

SEQ ID NO: 2136089 - RNA, 19 nt, Artificial Sequence
  Description of Artificial Sequence: Synthetic oligonucleotide
  Antisense strand to SEQ ID NO: 2136088
aauuacaggcuccauuucc

SEQ ID NO: 2136090 - RNA, 19 nt, Artificial Sequence
  Description of Artificial Sequence: Synthetic oligonucleotide
  Sense strand starting at position 1887 of SEQ ID NO: 1882630
ccuguaauuucgguugcag

SEQ ID NO: 2136091 - RNA, 19 nt, Artificial Sequence
  Description of Artificial Sequence: Synthetic oligonucleotide
  Antisense strand to SEQ ID NO: 2136090
cugcaaccgaaauuacagg

SEQ ID NO: 2136092 - RNA, 19 nt, Artificial Sequence
  Description of Artificial Sequence: Synthetic oligonucleotide
  Sense strand starting at position 1889 of SEQ ID NO: 1882630
uguaauuucgguugcagag

SEQ ID NO: 2136093 - RNA, 19 nt, Artificial Sequence
  Description of Artificial Sequence: Synthetic oligonucleotide
  Antisense strand to SEQ ID NO: 2136092
cucugcaaccgaaauuaca

SEQ ID NO: 2136094 - RNA, 19 nt, Artificial Sequence
  Description of Artificial Sequence: Synthetic oligonucleotide
  Sense strand starting at position 1962 of SEQ ID NO: 1882630
cgcugcaggauuugugaaa

SEQ ID NO: 2136095 - RNA, 19 nt, Artificial Sequence
  Description of Artificial Sequence: Synthetic oligonucleotide
  Antisense strand to SEQ ID NO: 2136094
uuucacaaauccugcagcg

SEQ ID NO: 2136096 - RNA, 19 nt, Artificial Sequence
  Description of Artificial Sequence: Synthetic oligonucleotide
  Sense strand starting at position 2114 of SEQ ID NO: 1882630
guauuugugacacagcguu

SEQ ID NO: 2136097 - RNA, 19 nt, Artificial Sequence
  Description of Artificial Sequence: Synthetic oligonucleotide
  Antisense strand to SEQ ID NO: 2136096
aacgcugugucacaaauac

SEQ ID NO: 2136098 - RNA, 19 nt, Artificial Sequence
  Description of Artificial Sequence: Synthetic oligonucleotide
  Sense strand starting at position 2462 of SEQ ID NO: 1882630
cgaauucuuaaggguucuu

SEQ ID NO: 2136099 - RNA, 19 nt, Artificial Sequence
  Description of Artificial Sequence: Synthetic oligonucleotide
  Antisense strand to SEQ ID NO: 2136098
aagaacccuuaagaauucg

SEQ ID NO: 2136100 - RNA, 19 nt, Artificial Sequence
  Description of Artificial Sequence: Synthetic oligonucleotide
  Sense strand starting at position 2571 of SEQ ID NO: 1882630
cugacaauagugcaacaua

SEQ ID NO: 2136101 - RNA, 19 nt, Artificial Sequence
  Description of Artificial Sequence: Synthetic oligonucleotide
  Antisense strand to SEQ ID NO: 2136100
uauguugcacuauugucag

SEQ ID NO: 2136102 - RNA, 19 nt, Artificial Sequence
  Description of Artificial Sequence: Synthetic oligonucleotide
  Sense strand starting at position 2763 of SEQ ID NO: 1882630
uucuguuuggauuauaaug

SEQ ID NO: 2136103 - RNA, 19 nt, Artificial Sequence
  Description of Artificial Sequence: Synthetic oligonucleotide
  Antisense strand to SEQ ID NO: 2136102
cauuauaauccaaacagaa

SEQ ID NO: 2136104 - RNA, 19 nt, Artificial Sequence
  Description of Artificial Sequence: Synthetic oligonucleotide
  Sense strand starting at position 2771 of SEQ ID NO: 1882630
ggauuauaaugguuuguuu

SEQ ID NO: 2136105 - RNA, 19 nt, Artificial Sequence
  Description of Artificial Sequence: Synthetic oligonucleotide
  Antisense strand to SEQ ID NO: 2136104
aaacaaaccauuauaaucc

SEQ ID NO: 2136106 - RNA, 19 nt, Artificial Sequence
  Description of Artificial Sequence: Synthetic oligonucleotide
  Sense strand starting at position 2858 of SEQ ID NO: 1882630
guagcaaagcuuuaacauc

SEQ ID NO: 2136107 - RNA, 19 nt, Artificial Sequence
  Description of Artificial Sequence: Synthetic oligonucleotide
  Antisense strand to SEQ ID NO: 2136106
gauguuaaagcuuugcuac

SEQ ID NO: 2136108 - RNA, 19 nt, Artificial Sequence
  Description of Artificial Sequence: Synthetic oligonucleotide
  Sense strand starting at position 2892 of SEQ ID NO: 1882630
gggacucuggugcaaugua

SEQ ID NO: 2136109 - RNA, 19 nt, Artificial Sequence
  Description of Artificial Sequence: Synthetic oligonucleotide
  Antisense strand to SEQ ID NO: 2136108
uacauugcaccagaguccc

SEQ ID NO: 2136110 - RNA, 19 nt, Artificial Sequence
  Description of Artificial Sequence: Synthetic oligonucleotide
  Sense strand starting at position 2985 of SEQ ID NO: 1882630
ggaauuccaggugauuagu

SEQ ID NO: 2136111 - RNA, 19 nt, Artificial Sequence
  Description of Artificial Sequence: Synthetic oligonucleotide
  Antisense strand to SEQ ID NO: 2136110
acuaaucaccuggaauucc

SEQ ID NO: 2136112 - RNA, 19 nt, Artificial Sequence
  Description of Artificial Sequence: Synthetic oligonucleotide
  Sense strand starting at position 2987 of SEQ ID NO: 1882630
aauuccaggugauuaguau

SEQ ID NO: 2136113 - RNA, 19 nt, Artificial Sequence
  Description of Artificial Sequence: Synthetic oligonucleotide
  Antisense strand to SEQ ID NO: 2136112
auacuaaucaccuggaauu

SEQ ID NO: 2136114 - RNA, 19 nt, Artificial Sequence
  Description of Artificial Sequence: Synthetic oligonucleotide
  Sense strand starting at position 2988 of SEQ ID NO: 1882630
auuccaggugauuaguauu

SEQ ID NO: 2136115 - RNA, 19 nt, Artificial Sequence
  Description of Artificial Sequence: Synthetic oligonucleotide
  Antisense strand to SEQ ID NO: 2136114
aauacuaaucaccuggaau

SEQ ID NO: 2136116 - RNA, 19 nt, Artificial Sequence
  Description of Artificial Sequence: Synthetic oligonucleotide
  Sense strand starting at position 3047 of SEQ ID NO: 1882630
ggagauaagugccuggaag

SEQ ID NO: 2136117 - RNA, 19 nt, Artificial Sequence
  Description of Artificial Sequence: Synthetic oligonucleotide
  Antisense strand to SEQ ID NO: 2136116
cuuccaggcacuuaucucc

SEQ ID NO: 2136118 - RNA, 19 nt, Artificial Sequence
  Description of Artificial Sequence: Synthetic oligonucleotide
  Sense strand starting at position 3048 of SEQ ID NO: 1882630
gagauaagugccuggaagu

SEQ ID NO: 2136119 - RNA, 19 nt, Artificial Sequence
  Description of Artificial Sequence: Synthetic oligonucleotide
  Antisense strand to SEQ ID NO: 2136118
acuuccaggcacuuaucuc

SEQ ID NO: 2136120 - RNA, 19 nt, Artificial Sequence
  Description of Artificial Sequence: Synthetic oligonucleotide
  Sense strand starting at position 3049 of SEQ ID NO: 1882630
agauaagugccuggaaguu

SEQ ID NO: 2136121 - RNA, 19 nt, Artificial Sequence
  Description of Artificial Sequence: Synthetic oligonucleotide
  Antisense strand to SEQ ID NO: 2136120
aacuuccaggcacuuaucu

SEQ ID NO: 2136122 - RNA, 19 nt, Artificial Sequence
  Description of Artificial Sequence: Synthetic oligonucleotide
  Sense strand starting at position 3058 of SEQ ID NO: 1882630
ccuggaaguuuguccauau

SEQ ID NO: 2136123 - RNA, 19 nt, Artificial Sequence
  Description of Artificial Sequence: Synthetic oligonucleotide
  Antisense strand to SEQ ID NO: 2136122
auauggacaaacuuccagg

SEQ ID NO: 2136124 - RNA, 19 nt, Artificial Sequence
  Description of Artificial Sequence: Synthetic oligonucleotide
  Sense strand starting at position 3059 of SEQ ID NO: 1882630
cuggaaguuuguccauaug

SEQ ID NO: 2136125 - RNA, 19 nt, Artificial Sequence
  Description of Artificial Sequence: Synthetic oligonucleotide
  Antisense strand to SEQ ID NO: 2136124
cauauggacaaacuuccag

SEQ ID NO: 2136126 - RNA, 19 nt, Artificial Sequence
  Description of Artificial Sequence: Synthetic oligonucleotide
  Sense strand starting at position 3062 of SEQ ID NO: 1882630
gaaguuuguccauaugcag

SEQ ID NO: 2136127 - RNA, 19 nt, Artificial Sequence
  Description of Artificial Sequence: Synthetic oligonucleotide
  Antisense strand to SEQ ID NO: 2136126
cugcauauggacaaacuuc

SEQ ID NO: 2136128 - RNA, 19 nt, Artificial Sequence
  Description of Artificial Sequence: Synthetic oligonucleotide
  Sense strand starting at position 3083 of SEQ ID NO: 1882630
ugguaucaucacuaguguu

SEQ ID NO: 2136129 - RNA, 19 nt, Artificial Sequence
  Description of Artificial Sequence: Synthetic oligonucleotide
  Antisense strand to SEQ ID NO: 2136128
aacacuagugaugauacca

SEQ ID NO: 2136130 - RNA, 19 nt, Artificial Sequence
  Description of Artificial Sequence: Synthetic oligonucleotide
  Sense strand starting at position 3117 of SEQ ID NO: 1882630
gcacauuugcuguaaguuc

SEQ ID NO: 2136131 - RNA, 19 nt, Artificial Sequence
  Description of Artificial Sequence: Synthetic oligonucleotide
  Antisense strand to SEQ ID NO: 2136130
gaacuuacagcaaaugugc

SEQ ID NO: 2136132 - RNA, 19 nt, Artificial Sequence
  Description of Artificial Sequence: Synthetic oligonucleotide
  Sense strand starting at position 3126 of SEQ ID NO: 1882630
cuguaaguucucugaaaga

SEQ ID NO: 2136133 - RNA, 19 nt, Artificial Sequence
  Description of Artificial Sequence: Synthetic oligonucleotide
  Antisense strand to SEQ ID NO: 2136132
ucuuucagagaacuuacag

SEQ ID NO: 2136134 - RNA, 19 nt, Artificial Sequence
  Description of Artificial Sequence: Synthetic oligonucleotide
  Sense strand starting at position 3147 of SEQ ID NO: 1882630
aagugaauaugaguauuac

SEQ ID NO: 2136135 - RNA, 19 nt, Artificial Sequence
  Description of Artificial Sequence: Synthetic oligonucleotide
  Antisense strand to SEQ ID NO: 2136134
guaauacucauauucacuu

SEQ ID NO: 2136136 - RNA, 19 nt, Artificial Sequence
  Description of Artificial Sequence: Synthetic oligonucleotide
  Sense strand starting at position 3158 of SEQ ID NO: 1882630
aguauuacauaguuggagu

SEQ ID NO: 2136137 - RNA, 19 nt, Artificial Sequence
  Description of Artificial Sequence: Synthetic oligonucleotide
  Antisense strand to SEQ ID NO: 2136136
acuccaacuauguaauacu

SEQ ID NO: 2136138 - RNA, 19 nt, Artificial Sequence
  Description of Artificial Sequence: Synthetic oligonucleotide
  Sense strand starting at position 3159 of SEQ ID NO: 1882630
guauuacauaguuggagua

SEQ ID NO: 2136139 - RNA, 19 nt, Artificial Sequence
  Description of Artificial Sequence: Synthetic oligonucleotide
  Antisense strand to SEQ ID NO: 2136138
uacuccaacuauguaauac

SEQ ID NO: 2136140 - RNA, 19 nt, Artificial Sequence
  Description of Artificial Sequence: Synthetic oligonucleotide
  Sense strand starting at position 3160 of SEQ ID NO: 1882630
uauuacauaguuggaguaa

SEQ ID NO: 2136141 - RNA, 19 nt, Artificial Sequence
  Description of Artificial Sequence: Synthetic oligonucleotide
  Antisense strand to SEQ ID NO: 2136140
uuacuccaacuauguaaua

SEQ ID NO: 2136142 - RNA, 19 nt, Artificial Sequence
  Description of Artificial Sequence: Synthetic oligonucleotide
  Sense strand starting at position 3238 of SEQ ID NO: 1882630
guacacaaaugguccuuaa

SEQ ID NO: 2136143 - RNA, 19 nt, Artificial Sequence
  Description of Artificial Sequence: Synthetic oligonucleotide
  Antisense strand to SEQ ID NO: 2136142
uuaaggaccauuuguguac

SEQ ID NO: 2136144 - RNA, 19 nt, Artificial Sequence
  Description of Artificial Sequence: Synthetic oligonucleotide
  Sense strand starting at position 3256 of SEQ ID NO: 1882630
aagugaaauggcuguuaaa

SEQ ID NO: 2136145 - RNA, 19 nt, Artificial Sequence
  Description of Artificial Sequence: Synthetic oligonucleotide
  Antisense strand to SEQ ID NO: 2136144
uuuaacagccauuucacuu

SEQ ID NO: 2136146 - RNA, 19 nt, Artificial Sequence
  Description of Artificial Sequence: Synthetic oligonucleotide
  Sense strand starting at position 3372 of SEQ ID NO: 1882630
uuuacauuaagauguggga

SEQ ID NO: 2136147 - RNA, 19 nt, Artificial Sequence
  Description of Artificial Sequence: Synthetic oligonucleotide
  Antisense strand to SEQ ID NO: 2136146
ucccacaucuuaauguaaa

SEQ ID NO: 2136148 - RNA, 19 nt, Artificial Sequence
  Description of Artificial Sequence: Synthetic oligonucleotide
  Sense strand starting at position 3478 of SEQ ID NO: 1882630
aaugcuaucuuguugagga

SEQ ID NO: 2136149 - RNA, 19 nt, Artificial Sequence
  Description of Artificial Sequence: Synthetic oligonucleotide
  Antisense strand to SEQ ID NO: 2136148
uccucaacaagauagcauu

SEQ ID NO: 2136150 - RNA, 19 nt, Artificial Sequence
  Description of Artificial Sequence: Synthetic oligonucleotide
  Sense strand starting at position 3480 of SEQ ID NO: 1882630
ugcuaucuuguugaggaaa

SEQ ID NO: 2136151 - RNA, 19 nt, Artificial Sequence
  Description of Artificial Sequence: Synthetic oligonucleotide
  Antisense strand to SEQ ID NO: 2136150
uuuccucaacaagauagca

SEQ ID NO: 2136152 - RNA, 19 nt, Artificial Sequence
  Description of Artificial Sequence: Synthetic oligonucleotide
  Sense strand starting at position 3647 of SEQ ID NO: 1882630
cuuaaauagcgguauuaac

SEQ ID NO: 2136153 - RNA, 19 nt, Artificial Sequence
  Description of Artificial Sequence: Synthetic oligonucleotide
  Antisense strand to SEQ ID NO: 2136152
guuaauaccgcuauuuaag

SEQ ID NO: 2136154 - RNA, 19 nt, Artificial Sequence
  Description of Artificial Sequence: Synthetic oligonucleotide
  Sense strand starting at position 3657 of SEQ ID NO: 1882630
gguauuaacaagugguaua

SEQ ID NO: 2136155 - RNA, 19 nt, Artificial Sequence
  Description of Artificial Sequence: Synthetic oligonucleotide
  Antisense strand to SEQ ID NO: 2136154
uauaccacuuguuaauacc

SEQ ID NO: 2136156 - RNA, 19 nt, Artificial Sequence
  Description of Artificial Sequence: Synthetic oligonucleotide
  Sense strand starting at position 3658 of SEQ ID NO: 1882630
guauuaacaagugguauag

SEQ ID NO: 2136157 - RNA, 19 nt, Artificial Sequence
  Description of Artificial Sequence: Synthetic oligonucleotide
  Antisense strand to SEQ ID NO: 2136156
cuauaccacuuguuaauac

SEQ ID NO: 2136158 - RNA, 19 nt, Artificial Sequence
  Description of Artificial Sequence: Synthetic oligonucleotide
  Sense strand starting at position 3668 of SEQ ID NO: 1882630
gugguauagcaagaauaca

SEQ ID NO: 2136159 - RNA, 19 nt, Artificial Sequence
  Description of Artificial Sequence: Synthetic oligonucleotide
  Antisense strand to SEQ ID NO: 2136158
uguauucuugcuauaccac

SEQ ID NO: 2136160 - RNA, 19 nt, Artificial Sequence
  Description of Artificial Sequence: Synthetic oligonucleotide
  Sense strand starting at position 3744 of SEQ ID NO: 1882630
ugaucauuucucugugcuu

SEQ ID NO: 2136161 - RNA, 19 nt, Artificial Sequence
  Description of Artificial Sequence: Synthetic oligonucleotide
  Antisense strand to SEQ ID NO: 2136160
aagcacagagaaaugauca

SEQ ID NO: 2136162 - RNA, 19 nt, Artificial Sequence
  Description of Artificial Sequence: Synthetic oligonucleotide
  Sense strand starting at position 3771 of SEQ ID NO: 1882630
aaucuuagugaauggguga

SEQ ID NO: 2136163 - RNA, 19 nt, Artificial Sequence
  Description of Artificial Sequence: Synthetic oligonucleotide
  Antisense strand to SEQ ID NO: 2136162
ucacccauucacuaagauu

SEQ ID NO: 2136164 - RNA, 19 nt, Artificial Sequence
  Description of Artificial Sequence: Synthetic oligonucleotide
  Sense strand starting at position 3882 of SEQ ID NO: 1882630
gauugaacagucugaguca

SEQ ID NO: 2136165 - RNA, 19 nt, Artificial Sequence
  Description of Artificial Sequence: Synthetic oligonucleotide
  Antisense strand to SEQ ID NO: 2136164
ugacucagacuguucaauc

SEQ ID NO: 2136166 - RNA, 19 nt, Artificial Sequence
  Description of Artificial Sequence: Synthetic oligonucleotide
  Sense strand starting at position 3885 of SEQ ID NO: 1882630
ugaacagucugagucagaa

SEQ ID NO: 2136167 - RNA, 19 nt, Artificial Sequence
  Description of Artificial Sequence: Synthetic oligonucleotide
  Antisense strand to SEQ ID NO: 2136166
uucugacucagacuguuca

SEQ ID NO: 2136168 - RNA, 19 nt, Artificial Sequence
  Description of Artificial Sequence: Synthetic oligonucleotide
  Sense strand starting at position 48 of SEQ ID NO: 1882631
gguuguccuucucaaaggu

SEQ ID NO: 2136169 - RNA, 19 nt, Artificial Sequence
  Description of Artificial Sequence: Synthetic oligonucleotide
  Antisense strand to SEQ ID NO: 2136168
accuuugagaaggacaacc

SEQ ID NO: 2136170 - RNA, 19 nt, Artificial Sequence
  Description of Artificial Sequence: Synthetic oligonucleotide
  Sense strand starting at position 79 of SEQ ID NO: 1882631
gccucaggguguucugaga

SEQ ID NO: 2136171 - RNA, 19 nt, Artificial Sequence
  Description of Artificial Sequence: Synthetic oligonucleotide
  Antisense strand to SEQ ID NO: 2136170
ucucagaacacccugaggc

SEQ ID NO: 2136172 - RNA, 19 nt, Artificial Sequence
  Description of Artificial Sequence: Synthetic oligonucleotide
  Sense strand starting at position 167 of SEQ ID NO: 1882631
auaggaaguuugucauguu

SEQ ID NO: 2136173 - RNA, 19 nt, Artificial Sequence
  Description of Artificial Sequence: Synthetic oligonucleotide
  Antisense strand to SEQ ID NO: 2136172
aacaugacaaacuuccuau

SEQ ID NO: 2136174 - RNA, 19 nt, Artificial Sequence
  Description of Artificial Sequence: Synthetic oligonucleotide
  Sense strand starting at position 168 of SEQ ID NO: 1882631
uaggaaguuugucauguug

SEQ ID NO: 2136175 - RNA, 19 nt, Artificial Sequence
  Description of Artificial Sequence: Synthetic oligonucleotide
  Antisense strand to SEQ ID NO: 2136174
caacaugacaaacuuccua

SEQ ID NO: 2136176 - RNA, 19 nt, Artificial Sequence
  Description of Artificial Sequence: Synthetic oligonucleotide
  Sense strand starting at position 170 of SEQ ID NO: 1882631
ggaaguuugucauguugcu

SEQ ID NO: 2136177 - RNA, 19 nt, Artificial Sequence
  Description of Artificial Sequence: Synthetic oligonucleotide
  Antisense strand to SEQ ID NO: 2136176
agcaacaugacaaacuucc

SEQ ID NO: 2136178 - RNA, 19 nt, Artificial Sequence
  Description of Artificial Sequence: Synthetic oligonucleotide
  Sense strand starting at position 234 of SEQ ID NO: 1882631
agugaaagacucuguugau

SEQ ID NO: 2136179 - RNA, 19 nt, Artificial Sequence
  Description of Artificial Sequence: Synthetic oligonucleotide
  Antisense strand to SEQ ID NO: 2136178
aucaacagagucuuucacu

SEQ ID NO: 2136180 - RNA, 19 nt, Artificial Sequence
  Description of Artificial Sequence: Synthetic oligonucleotide
  Sense strand starting at position 235 of SEQ ID NO: 1882631
gugaaagacucuguugauc

SEQ ID NO: 2136181 - RNA, 19 nt, Artificial Sequence
  Description of Artificial Sequence: Synthetic oligonucleotide
  Antisense strand to SEQ ID NO: 2136180
gaucaacagagucuuucac

SEQ ID NO: 2136182 - RNA, 19 nt, Artificial Sequence
  Description of Artificial Sequence: Synthetic oligonucleotide
  Sense strand starting at position 237 of SEQ ID NO: 1882631
gaaagacucuguugaucua

SEQ ID NO: 2136183 - RNA, 19 nt, Artificial Sequence
  Description of Artificial Sequence: Synthetic oligonucleotide
  Antisense strand to SEQ ID NO: 2136182
uagaucaacagagucuuuc

SEQ ID NO: 2136184 - RNA, 19 nt, Artificial Sequence
  Description of Artificial Sequence: Synthetic oligonucleotide
  Sense strand starting at position 453 of SEQ ID NO: 1882631
ccuguagauccuugagcua

SEQ ID NO: 2136185 - RNA, 19 nt, Artificial Sequence
  Description of Artificial Sequence: Synthetic oligonucleotide
  Antisense strand to SEQ ID NO: 2136184
uagcucaaggaucuacagg

SEQ ID NO: 2136186 - RNA, 19 nt, Artificial Sequence
  Description of Artificial Sequence: Synthetic oligonucleotide
  Sense strand starting at position 859 of SEQ ID NO: 1882631
guggcaaaggcuggauuau

SEQ ID NO: 2136187 - RNA, 19 nt, Artificial Sequence
  Description of Artificial Sequence: Synthetic oligonucleotide
  Antisense strand to SEQ ID NO: 2136186
auaauccagccuuugccac

SEQ ID NO: 2136188 - RNA, 19 nt, Artificial Sequence
  Description of Artificial Sequence: Synthetic oligonucleotide
  Sense strand starting at position 950 of SEQ ID NO: 1882631
ccugcuucagcguggauaa

SEQ ID NO: 2136189 - RNA, 19 nt, Artificial Sequence
  Description of Artificial Sequence: Synthetic oligonucleotide
  Antisense strand to SEQ ID NO: 2136188
uuauccacgcugaagcagg

SEQ ID NO: 2136190 - RNA, 19 nt, Artificial Sequence
  Description of Artificial Sequence: Synthetic oligonucleotide
  Sense strand starting at position 1028 of SEQ ID NO: 1882631
gggucacagagcuguagau

SEQ ID NO: 2136191 - RNA, 19 nt, Artificial Sequence
  Description of Artificial Sequence: Synthetic oligonucleotide
  Antisense strand to SEQ ID NO: 2136190
aucuacagcucugugaccc

SEQ ID NO: 2136192 - RNA, 19 nt, Artificial Sequence
  Description of Artificial Sequence: Synthetic oligonucleotide
  Sense strand starting at position 1070 of SEQ ID NO: 1882631
gcagcucugagugggagua

SEQ ID NO: 2136193 - RNA, 19 nt, Artificial Sequence
  Description of Artificial Sequence: Synthetic oligonucleotide
  Antisense strand to SEQ ID NO: 2136192
uacucccacucagagcugc

SEQ ID NO: 2136194 - RNA, 19 nt, Artificial Sequence
  Description of Artificial Sequence: Synthetic oligonucleotide
  Sense strand starting at position 1118 of SEQ ID NO: 1882631
ucugcucuguccugugaga

SEQ ID NO: 2136195 - RNA, 19 nt, Artificial Sequence
  Description of Artificial Sequence: Synthetic oligonucleotide
  Antisense strand to SEQ ID NO: 2136194
ucucacaggacagagcaga

SEQ ID NO: 2136196 - RNA, 19 nt, Artificial Sequence
  Description of Artificial Sequence: Synthetic oligonucleotide
  Sense strand starting at position 1120 of SEQ ID NO: 1882631
ugcucuguccugugagaac

SEQ ID NO: 2136197 - RNA, 19 nt, Artificial Sequence
  Description of Artificial Sequence: Synthetic oligonucleotide
  Antisense strand to SEQ ID NO: 2136196
guucucacaggacagagca

SEQ ID NO: 2136198 - RNA, 19 nt, Artificial Sequence
  Description of Artificial Sequence: Synthetic oligonucleotide
  Sense strand starting at position 1264 of SEQ ID NO: 1882631
ggagaugggucauccauug

SEQ ID NO: 2136199 - RNA, 19 nt, Artificial Sequence
  Description of Artificial Sequence: Synthetic oligonucleotide
  Antisense strand to SEQ ID NO: 2136198
caauggaugacccaucucc

SEQ ID NO: 2136200 - RNA, 19 nt, Artificial Sequence
  Description of Artificial Sequence: Synthetic oligonucleotide
  Sense strand starting at position 1269 of SEQ ID NO: 1882631
ugggucauccauugagaga

SEQ ID NO: 2136201 - RNA, 19 nt, Artificial Sequence
  Description of Artificial Sequence: Synthetic oligonucleotide
  Antisense strand to SEQ ID NO: 2136200
ucucucaauggaugaccca

SEQ ID NO: 2136202 - RNA, 19 nt, Artificial Sequence
  Description of Artificial Sequence: Synthetic oligonucleotide
  Sense strand starting at position 1325 of SEQ ID NO: 1882631
agguuucccuccugggaaa

SEQ ID NO: 2136203 - RNA, 19 nt, Artificial Sequence
  Description of Artificial Sequence: Synthetic oligonucleotide
  Antisense strand to SEQ ID NO: 2136202
uuucccaggagggaaaccu

SEQ ID NO: 2136204 - RNA, 19 nt, Artificial Sequence
  Description of Artificial Sequence: Synthetic oligonucleotide
  Sense strand starting at position 1410 of SEQ ID NO: 1882631
agcugaaucugguguccuu

SEQ ID NO: 2136205 - RNA, 19 nt, Artificial Sequence
  Description of Artificial Sequence: Synthetic oligonucleotide
  Antisense strand to SEQ ID NO: 2136204
aaggacaccagauucagcu

SEQ ID NO: 2136206 - RNA, 19 nt, Artificial Sequence
  Description of Artificial Sequence: Synthetic oligonucleotide
  Sense strand starting at position 1526 of SEQ ID NO: 1882631
cuauuuccuugucagguga

SEQ ID NO: 2136207 - RNA, 19 nt, Artificial Sequence
  Description of Artificial Sequence: Synthetic oligonucleotide
  Antisense strand to SEQ ID NO: 2136206
ucaccugacaaggaaauag

SEQ ID NO: 2136208 - RNA, 19 nt, Artificial Sequence
  Description of Artificial Sequence: Synthetic oligonucleotide
  Sense strand starting at position 2881 of SEQ ID NO: 1882631
augggagccuuagggauaa

SEQ ID NO: 2136209 - RNA, 19 nt, Artificial Sequence
  Description of Artificial Sequence: Synthetic oligonucleotide
  Antisense strand to SEQ ID NO: 2136208
uuaucccuaaggcucccau

SEQ ID NO: 2136210 - RNA, 19 nt, Artificial Sequence
  Description of Artificial Sequence: Synthetic oligonucleotide
  Sense strand starting at position 2891 of SEQ ID NO: 1882631
uagggauaaugcugaauuc

SEQ ID NO: 2136211 - RNA, 19 nt, Artificial Sequence
  Description of Artificial Sequence: Synthetic oligonucleotide
  Antisense strand to SEQ ID NO: 2136210
gaauucagcauuaucccua

SEQ ID NO: 2136212 - RNA, 19 nt, Artificial Sequence
  Description of Artificial Sequence: Synthetic oligonucleotide
  Sense strand starting at position 22 of SEQ ID NO: 1882632
uugugugcucccuaccauu

SEQ ID NO: 2136213 - RNA, 19 nt, Artificial Sequence
  Description of Artificial Sequence: Synthetic oligonucleotide
  Antisense strand to SEQ ID NO: 2136212
aaugguagggagcacacaa

SEQ ID NO: 2136214 - RNA, 19 nt, Artificial Sequence
  Description of Artificial Sequence: Synthetic oligonucleotide
  Sense strand starting at position 263 of SEQ ID NO: 1882632
guauguuugcgucucuucu

SEQ ID NO: 2136215 - RNA, 19 nt, Artificial Sequence
  Description of Artificial Sequence: Synthetic oligonucleotide
  Antisense strand to SEQ ID NO: 2136214
agaagagacgcaaacauac

SEQ ID NO: 2136216 - RNA, 19 nt, Artificial Sequence
  Description of Artificial Sequence: Synthetic oligonucleotide
  Sense strand starting at position 267 of SEQ ID NO: 1882632
guuugcgucucuucuuuga

SEQ ID NO: 2136217 - RNA, 19 nt, Artificial Sequence
  Description of Artificial Sequence: Synthetic oligonucleotide
  Antisense strand to SEQ ID NO: 2136216
ucaaagaagagacgcaaac

SEQ ID NO: 2136218 - RNA, 19 nt, Artificial Sequence
  Description of Artificial Sequence: Synthetic oligonucleotide
  Sense strand starting at position 269 of SEQ ID NO: 1882632
uugcgucucuucuuugaau

SEQ ID NO: 2136219 - RNA, 19 nt, Artificial Sequence
  Description of Artificial Sequence: Synthetic oligonucleotide
  Antisense strand to SEQ ID NO: 2136218
auucaaagaagagacgcaa

SEQ ID NO: 2136220 - RNA, 19 nt, Artificial Sequence
  Description of Artificial Sequence: Synthetic oligonucleotide
  Sense strand starting at position 270 of SEQ ID NO: 1882632
ugcgucucuucuuugaaua

SEQ ID NO: 2136221 - RNA, 19 nt, Artificial Sequence
  Description of Artificial Sequence: Synthetic oligonucleotide
  Antisense strand to SEQ ID NO: 2136220
uauucaaagaagagacgca

SEQ ID NO: 2136222 - RNA, 19 nt, Artificial Sequence
  Description of Artificial Sequence: Synthetic oligonucleotide
  Sense strand starting at position 271 of SEQ ID NO: 1882632
gcgucucuucuuugaauac

SEQ ID NO: 2136223 - RNA, 19 nt, Artificial Sequence
  Description of Artificial Sequence: Synthetic oligonucleotide
  Antisense strand to SEQ ID NO: 2136222
guauucaaagaagagacgc

SEQ ID NO: 2136224 - RNA, 19 nt, Artificial Sequence
  Description of Artificial Sequence: Synthetic oligonucleotide
  Sense strand starting at position 272 of SEQ ID NO: 1882632
cgucucuucuuugaauacu

SEQ ID NO: 2136225 - RNA, 19 nt, Artificial Sequence
  Description of Artificial Sequence: Synthetic oligonucleotide
  Antisense strand to SEQ ID NO: 2136224
aguauucaaagaagagacg

SEQ ID NO: 2136226 - RNA, 19 nt, Artificial Sequence
  Description of Artificial Sequence: Synthetic oligonucleotide
  Sense strand starting at position 424 of SEQ ID NO: 1882632
uucuguguuucucugggaa

SEQ ID NO: 2136227 - RNA, 19 nt, Artificial Sequence
  Description of Artificial Sequence: Synthetic oligonucleotide
  Antisense strand to SEQ ID NO: 2136226
uucccagagaaacacagaa

SEQ ID NO: 2136228 - RNA, 19 nt, Artificial Sequence
  Description of Artificial Sequence: Synthetic oligonucleotide
  Sense strand starting at position 426 of SEQ ID NO: 1882632
cuguguuucucugggaacu

SEQ ID NO: 2136229 - RNA, 19 nt, Artificial Sequence
  Description of Artificial Sequence: Synthetic oligonucleotide
  Antisense strand to SEQ ID NO: 2136228
aguucccagagaaacacag

SEQ ID NO: 2136230 - RNA, 19 nt, Artificial Sequence
  Description of Artificial Sequence: Synthetic oligonucleotide
  Sense strand starting at position 427 of SEQ ID NO: 1882632
uguguuucucugggaacug

SEQ ID NO: 2136231 - RNA, 19 nt, Artificial Sequence
  Description of Artificial Sequence: Synthetic oligonucleotide
  Antisense strand to SEQ ID NO: 2136230
caguucccagagaaacaca

SEQ ID NO: 2136232 - RNA, 19 nt, Artificial Sequence
  Description of Artificial Sequence: Synthetic oligonucleotide
  Sense strand starting at position 558 of SEQ ID NO: 1882632
ccagaauggucccaccaug

SEQ ID NO: 2136233 - RNA, 19 nt, Artificial Sequence
  Description of Artificial Sequence: Synthetic oligonucleotide
  Antisense strand to SEQ ID NO: 2136232
cauggugggaccauucugg

SEQ ID NO: 2136234 - RNA, 19 nt, Artificial Sequence
  Description of Artificial Sequence: Synthetic oligonucleotide
  Sense strand starting at position 787 of SEQ ID NO: 1882632
cugugcuggcuagggaauu

SEQ ID NO: 2136235 - RNA, 19 nt, Artificial Sequence
  Description of Artificial Sequence: Synthetic oligonucleotide
  Antisense strand to SEQ ID NO: 2136234
aauucccuagccagcacag

SEQ ID NO: 2136236 - RNA, 19 nt, Artificial Sequence
  Description of Artificial Sequence: Synthetic oligonucleotide
  Sense strand starting at position 864 of SEQ ID NO: 1882632
gucagcucaccguggugaa

SEQ ID NO: 2136237 - RNA, 19 nt, Artificial Sequence
  Description of Artificial Sequence: Synthetic oligonucleotide
  Antisense strand to SEQ ID NO: 2136236
uucaccacggugagcugac

SEQ ID NO: 2136238 - RNA, 19 nt, Artificial Sequence
  Description of Artificial Sequence: Synthetic oligonucleotide
  Sense strand starting at position 2236 of SEQ ID NO: 1882632
gcccgucuguuuccuaagu

SEQ ID NO: 2136239 - RNA, 19 nt, Artificial Sequence
  Description of Artificial Sequence: Synthetic oligonucleotide
  Antisense strand to SEQ ID NO: 2136238
acuuaggaaacagacgggc

SEQ ID NO: 2136240 - RNA, 19 nt, Artificial Sequence
  Description of Artificial Sequence: Synthetic oligonucleotide
  Sense strand starting at position 2238 of SEQ ID NO: 1882632
ccgucuguuuccuaagugu

SEQ ID NO: 2136241 - RNA, 19 nt, Artificial Sequence
  Description of Artificial Sequence: Synthetic oligonucleotide
  Antisense strand to SEQ ID NO: 2136240
acacuuaggaaacagacgg

SEQ ID NO: 2136242 - RNA, 19 nt, Artificial Sequence
  Description of Artificial Sequence: Synthetic oligonucleotide
  Sense strand starting at position 2293 of SEQ ID NO: 1882632
cacucaggccucugaggau

SEQ ID NO: 2136243 - RNA, 19 nt, Artificial Sequence
  Description of Artificial Sequence: Synthetic oligonucleotide
  Antisense strand to SEQ ID NO: 2136242
auccucagaggccugagug

SEQ ID NO: 2136244 - RNA, 19 nt, Artificial Sequence
  Description of Artificial Sequence: Synthetic oligonucleotide
  Sense strand starting at position 2309 of SEQ ID NO: 1882632
gauguuggccucuacaaug

SEQ ID NO: 2136245 - RNA, 19 nt, Artificial Sequence
  Description of Artificial Sequence: Synthetic oligonucleotide
  Antisense strand to SEQ ID NO: 2136244
cauuguagaggccaacauc

SEQ ID NO: 2136246 - RNA, 19 nt, Artificial Sequence
  Description of Artificial Sequence: Synthetic oligonucleotide
  Sense strand starting at position 2314 of SEQ ID NO: 1882632
uggccucuacaaugguuau

SEQ ID NO: 2136247 - RNA, 19 nt, Artificial Sequence
  Description of Artificial Sequence: Synthetic oligonucleotide
  Antisense strand to SEQ ID NO: 2136246
auaaccauuguagaggcca

SEQ ID NO: 2136248 - RNA, 19 nt, Artificial Sequence
  Description of Artificial Sequence: Synthetic oligonucleotide
  Sense strand starting at position 2421 of SEQ ID NO: 1882632
caacauggguauucuguga

SEQ ID NO: 2136249 - RNA, 19 nt, Artificial Sequence
  Description of Artificial Sequence: Synthetic oligonucleotide
  Antisense strand to SEQ ID NO: 2136248
ucacagaauacccauguug

SEQ ID NO: 2136250 - RNA, 19 nt, Artificial Sequence
  Description of Artificial Sequence: Synthetic oligonucleotide
  Sense strand starting at position 2443 of SEQ ID NO: 1882632
cccaucuuacgcugcuaua

SEQ ID NO: 2136251 - RNA, 19 nt, Artificial Sequence
  Description of Artificial Sequence: Synthetic oligonucleotide
  Antisense strand to SEQ ID NO: 2136250
uauagcagcguaagauggg

SEQ ID NO: 2136252 - RNA, 19 nt, Artificial Sequence
  Description of Artificial Sequence: Synthetic oligonucleotide
  Sense strand starting at position 627 of SEQ ID NO: 1882633
cuugguugguuggcaaaga

SEQ ID NO: 2136253 - RNA, 19 nt, Artificial Sequence
  Description of Artificial Sequence: Synthetic oligonucleotide
  Antisense strand to SEQ ID NO: 2136252
ucuuugccaaccaaccaag

SEQ ID NO: 2136254 - RNA, 19 nt, Artificial Sequence
  Description of Artificial Sequence: Synthetic oligonucleotide
  Sense strand starting at position 651 of SEQ ID NO: 1882633
uuguaauccacgcaucgaa

SEQ ID NO: 2136255 - RNA, 19 nt, Artificial Sequence
  Description of Artificial Sequence: Synthetic oligonucleotide
  Antisense strand to SEQ ID NO: 2136254
uucgaugcguggauuacaa

SEQ ID NO: 2136256 - RNA, 19 nt, Artificial Sequence
  Description of Artificial Sequence: Synthetic oligonucleotide
  Sense strand starting at position 670 of SEQ ID NO: 1882633
ggaggaagguugugaaggu

SEQ ID NO: 2136257 - RNA, 19 nt, Artificial Sequence
  Description of Artificial Sequence: Synthetic oligonucleotide
  Antisense strand to SEQ ID NO: 2136256
accuucacaaccuuccucc

SEQ ID NO: 2136258 - RNA, 19 nt, Artificial Sequence
  Description of Artificial Sequence: Synthetic oligonucleotide
  Sense strand starting at position 679 of SEQ ID NO: 1882633
uugugaaggugacaaugaa

SEQ ID NO: 2136259 - RNA, 19 nt, Artificial Sequence
  Description of Artificial Sequence: Synthetic oligonucleotide
  Antisense strand to SEQ ID NO: 2136258
uucauugucaccuucacaa

SEQ ID NO: 2136260 - RNA, 19 nt, Artificial Sequence
  Description of Artificial Sequence: Synthetic oligonucleotide
  Sense strand starting at position 698 of SEQ ID NO: 1882633
aauaaauugucugccggga

SEQ ID NO: 2136261 - RNA, 19 nt, Artificial Sequence
  Description of Artificial Sequence: Synthetic oligonucleotide
  Antisense strand to SEQ ID NO: 2136260
ucccggcagacaauuuauu

SEQ ID NO: 2136262 - RNA, 19 nt, Artificial Sequence
  Description of Artificial Sequence: Synthetic oligonucleotide
  Sense strand starting at position 702 of SEQ ID NO: 1882633
aauugucugccgggaggaa

SEQ ID NO: 2136263 - RNA, 19 nt, Artificial Sequence
  Description of Artificial Sequence: Synthetic oligonucleotide
  Antisense strand to SEQ ID NO: 2136262
uuccucccggcagacaauu

SEQ ID NO: 2136264 - RNA, 19 nt, Artificial Sequence
  Description of Artificial Sequence: Synthetic oligonucleotide
  Sense strand starting at position 992 of SEQ ID NO: 1882633
gcuggugguagcuguagau

SEQ ID NO: 2136265 - RNA, 19 nt, Artificial Sequence
  Description of Artificial Sequence: Synthetic oligonucleotide
  Antisense strand to SEQ ID NO: 2136264
aucuacagcuaccaccagc

SEQ ID NO: 2136266 - RNA, 19 nt, Artificial Sequence
  Description of Artificial Sequence: Synthetic oligonucleotide
  Sense strand starting at position 1007 of SEQ ID NO: 1882633
agauguggcugcgugucaa

SEQ ID NO: 2136267 - RNA, 19 nt, Artificial Sequence
  Description of Artificial Sequence: Synthetic oligonucleotide
  Antisense strand to SEQ ID NO: 2136266
uugacacgcagccacaucu

SEQ ID NO: 2136268 - RNA, 19 nt, Artificial Sequence
  Description of Artificial Sequence: Synthetic oligonucleotide
  Sense strand starting at position 1181 of SEQ ID NO: 1882633
aggauaucuuggugaagaa

SEQ ID NO: 2136269 - RNA, 19 nt, Artificial Sequence
  Description of Artificial Sequence: Synthetic oligonucleotide
  Antisense strand to SEQ ID NO: 2136268
uucuucaccaagauauccu

SEQ ID NO: 2136270 - RNA, 19 nt, Artificial Sequence
  Description of Artificial Sequence: Synthetic oligonucleotide
  Sense strand starting at position 1193 of SEQ ID NO: 1882633
ugaagaaacuguccagguu

SEQ ID NO: 2136271 - RNA, 19 nt, Artificial Sequence
  Description of Artificial Sequence: Synthetic oligonucleotide
  Antisense strand to SEQ ID NO: 2136270
aaccuggacaguuucuuca

SEQ ID NO: 2136272 - RNA, 19 nt, Artificial Sequence
  Description of Artificial Sequence: Synthetic oligonucleotide
  Sense strand starting at position 1205 of SEQ ID NO: 1882633
ccagguucuggaugugaug

SEQ ID NO: 2136273 - RNA, 19 nt, Artificial Sequence
  Description of Artificial Sequence: Synthetic oligonucleotide
  Antisense strand to SEQ ID NO: 2136272
caucacauccagaaccugg

SEQ ID NO: 2136274 - RNA, 19 nt, Artificial Sequence
  Description of Artificial Sequence: Synthetic oligonucleotide
  Sense strand starting at position 1260 of SEQ ID NO: 1882633
cuggcaugugaucaauucu

SEQ ID NO: 2136275 - RNA, 19 nt, Artificial Sequence
  Description of Artificial Sequence: Synthetic oligonucleotide
  Antisense strand to SEQ ID NO: 2136274
agaauugaucacaugccag

SEQ ID NO: 2136276 - RNA, 19 nt, Artificial Sequence
  Description of Artificial Sequence: Synthetic oligonucleotide
  Sense strand starting at position 1267 of SEQ ID NO: 1882633
gugaucaauucuccacguu

SEQ ID NO: 2136277 - RNA, 19 nt, Artificial Sequence
  Description of Artificial Sequence: Synthetic oligonucleotide
  Antisense strand to SEQ ID NO: 2136276
aacguggagaauugaucac

SEQ ID NO: 2136278 - RNA, 19 nt, Artificial Sequence
  Description of Artificial Sequence: Synthetic oligonucleotide
  Sense strand starting at position 1595 of SEQ ID NO: 1882633
ugcagaggcaggugucauu

SEQ ID NO: 2136279 - RNA, 19 nt, Artificial Sequence
  Description of Artificial Sequence: Synthetic oligonucleotide
  Antisense strand to SEQ ID NO: 2136278
aaugacaccugccucugca

SEQ ID NO: 2136280 - RNA, 19 nt, Artificial Sequence
  Description of Artificial Sequence: Synthetic oligonucleotide
  Sense strand starting at position 1931 of SEQ ID NO: 1882633
acggcuucuccagaaaggu

SEQ ID NO: 2136281 - RNA, 19 nt, Artificial Sequence
  Description of Artificial Sequence: Synthetic oligonucleotide
  Antisense strand to SEQ ID NO: 2136280
accuuucuggagaagccgu

SEQ ID NO: 2136282 - RNA, 19 nt, Artificial Sequence
  Description of Artificial Sequence: Synthetic oligonucleotide
  Sense strand starting at position 1940 of SEQ ID NO: 1882633
ccagaaagguuggaaggau

SEQ ID NO: 2136283 - RNA, 19 nt, Artificial Sequence
  Description of Artificial Sequence: Synthetic oligonucleotide
  Antisense strand to SEQ ID NO: 2136282
auccuuccaaccuuucugg

SEQ ID NO: 2136284 - RNA, 19 nt, Artificial Sequence
  Description of Artificial Sequence: Synthetic oligonucleotide
  Sense strand starting at position 1963 of SEQ ID NO: 1882633
gcuguuguugcuuccacaa

SEQ ID NO: 2136285 - RNA, 19 nt, Artificial Sequence
  Description of Artificial Sequence: Synthetic oligonucleotide
  Antisense strand to SEQ ID NO: 2136284
uuguggaagcaacaacagc

SEQ ID NO: 2136286 - RNA, 19 nt, Artificial Sequence
  Description of Artificial Sequence: Synthetic oligonucleotide
  Sense strand starting at position 1975 of SEQ ID NO: 1882633
uccacaaaggucugugaca

SEQ ID NO: 2136287 - RNA, 19 nt, Artificial Sequence
  Description of Artificial Sequence: Synthetic oligonucleotide
  Antisense strand to SEQ ID NO: 2136286
ugucacagaccuuugugga

SEQ ID NO: 2136288 - RNA, 19 nt, Artificial Sequence
  Description of Artificial Sequence: Synthetic oligonucleotide
  Sense strand starting at position 1977 of SEQ ID NO: 1882633
cacaaaggucugugacacu

SEQ ID NO: 2136289 - RNA, 19 nt, Artificial Sequence
  Description of Artificial Sequence: Synthetic oligonucleotide
  Antisense strand to SEQ ID NO: 2136288
agugucacagaccuuugug

SEQ ID NO: 2136290 - RNA, 19 nt, Artificial Sequence
  Description of Artificial Sequence: Synthetic oligonucleotide
  Sense strand starting at position 2025 of SEQ ID NO: 1882633
acaacauuacuaggugacu

SEQ ID NO: 2136291 - RNA, 19 nt, Artificial Sequence
  Description of Artificial Sequence: Synthetic oligonucleotide
  Antisense strand to SEQ ID NO: 2136290
agucaccuaguaauguugu

SEQ ID NO: 2136292 - RNA, 19 nt, Artificial Sequence
  Description of Artificial Sequence: Synthetic oligonucleotide
  Sense strand starting at position 2079 of SEQ ID NO: 1882633
ucaccugucugaucacuca

SEQ ID NO: 2136293 - RNA, 19 nt, Artificial Sequence
  Description of Artificial Sequence: Synthetic oligonucleotide
  Antisense strand to SEQ ID NO: 2136292
ugagugaucagacagguga

SEQ ID NO: 2136294 - RNA, 19 nt, Artificial Sequence
  Description of Artificial Sequence: Synthetic oligonucleotide
  Sense strand starting at position 2186 of SEQ ID NO: 1882633
ugagaagauuccuauuauc

SEQ ID NO: 2136295 - RNA, 19 nt, Artificial Sequence
  Description of Artificial Sequence: Synthetic oligonucleotide
  Antisense strand to SEQ ID NO: 2136294
gauaauaggaaucuucuca

SEQ ID NO: 2136296 - RNA, 19 nt, Artificial Sequence
  Description of Artificial Sequence: Synthetic oligonucleotide
  Sense strand starting at position 2295 of SEQ ID NO: 1882633
uggugaugugugcuugugu

SEQ ID NO: 2136297 - RNA, 19 nt, Artificial Sequence
  Description of Artificial Sequence: Synthetic oligonucleotide
  Antisense strand to SEQ ID NO: 2136296
acacaagcacacaucacca

SEQ ID NO: 2136298 - RNA, 19 nt, Artificial Sequence
  Description of Artificial Sequence: Synthetic oligonucleotide
  Sense strand starting at position 2300 of SEQ ID NO: 1882633
augugugcuuguguuccua

SEQ ID NO: 2136299 - RNA, 19 nt, Artificial Sequence
  Description of Artificial Sequence: Synthetic oligonucleotide
  Antisense strand to SEQ ID NO: 2136298
uaggaacacaagcacacau

SEQ ID NO: 2136300 - RNA, 19 nt, Artificial Sequence
  Description of Artificial Sequence: Synthetic oligonucleotide
  Sense strand starting at position 2308 of SEQ ID NO: 1882633
uuguguuccuagcuacuca

SEQ ID NO: 2136301 - RNA, 19 nt, Artificial Sequence
  Description of Artificial Sequence: Synthetic oligonucleotide
  Antisense strand to SEQ ID NO: 2136300
ugaguagcuaggaacacaa

SEQ ID NO: 2136302 - RNA, 19 nt, Artificial Sequence
  Description of Artificial Sequence: Synthetic oligonucleotide
  Sense strand starting at position 2427 of SEQ ID NO: 1882633
cuauuaaaggauuguagca

SEQ ID NO: 2136303 - RNA, 19 nt, Artificial Sequence
  Description of Artificial Sequence: Synthetic oligonucleotide
  Antisense strand to SEQ ID NO: 2136302
ugcuacaauccuuuaauag

SEQ ID NO: 2136304 - RNA, 19 nt, Artificial Sequence
  Description of Artificial Sequence: Synthetic oligonucleotide
  Sense strand starting at position 2579 of SEQ ID NO: 1882633
ggaccaagauguuaacuau

SEQ ID NO: 2136305 - RNA, 19 nt, Artificial Sequence
  Description of Artificial Sequence: Synthetic oligonucleotide
  Antisense strand to SEQ ID NO: 2136304
auaguuaacaucuuggucc

SEQ ID NO: 2136306 - RNA, 19 nt, Artificial Sequence
  Description of Artificial Sequence: Synthetic oligonucleotide
  Sense strand starting at position 3273 of SEQ ID NO: 1882633
gcagcuaucuuggauuuga

SEQ ID NO: 2136307 - RNA, 19 nt, Artificial Sequence
  Description of Artificial Sequence: Synthetic oligonucleotide
  Antisense strand to SEQ ID NO: 2136306
ucaaauccaagauagcugc

SEQ ID NO: 2136308 - RNA, 19 nt, Artificial Sequence
  Description of Artificial Sequence: Synthetic oligonucleotide
  Sense strand starting at position 3278 of SEQ ID NO: 1882633
uaucuuggauuugagaguu

SEQ ID NO: 2136309 - RNA, 19 nt, Artificial Sequence
  Description of Artificial Sequence: Synthetic oligonucleotide
  Antisense strand to SEQ ID NO: 2136308
aacucucaaauccaagaua

SEQ ID NO: 2136310 - RNA, 19 nt, Artificial Sequence
  Description of Artificial Sequence: Synthetic oligonucleotide
  Sense strand starting at position 3290 of SEQ ID NO: 1882633
gagaguugguuuggagaac

SEQ ID NO: 2136311 - RNA, 19 nt, Artificial Sequence
  Description of Artificial Sequence: Synthetic oligonucleotide
  Antisense strand to SEQ ID NO: 2136310
guucuccaaaccaacucuc

SEQ ID NO: 2136312 - RNA, 19 nt, Artificial Sequence
  Description of Artificial Sequence: Synthetic oligonucleotide
  Sense strand starting at position 3291 of SEQ ID NO: 1882633
agaguugguuuggagaacu

SEQ ID NO: 2136313 - RNA, 19 nt, Artificial Sequence
  Description of Artificial Sequence: Synthetic oligonucleotide
  Antisense strand to SEQ ID NO: 2136312
aguucuccaaaccaacucu

SEQ ID NO: 2136314 - RNA, 19 nt, Artificial Sequence
  Description of Artificial Sequence: Synthetic oligonucleotide
  Sense strand starting at position 3371 of SEQ ID NO: 1882633
cugugacauucucucaagu

SEQ ID NO: 2136315 - RNA, 19 nt, Artificial Sequence
  Description of Artificial Sequence: Synthetic oligonucleotide
  Antisense strand to SEQ ID NO: 2136314
acuugagagaaugucacag

SEQ ID NO: 2136316 - RNA, 19 nt, Artificial Sequence
  Description of Artificial Sequence: Synthetic oligonucleotide
  Sense strand starting at position 3500 of SEQ ID NO: 1882633
aacugaguuccuuguuguc

SEQ ID NO: 2136317 - RNA, 19 nt, Artificial Sequence
  Description of Artificial Sequence: Synthetic oligonucleotide
  Antisense strand to SEQ ID NO: 2136316
gacaacaaggaacucaguu

SEQ ID NO: 2136318 - RNA, 19 nt, Artificial Sequence
  Description of Artificial Sequence: Synthetic oligonucleotide
  Sense strand starting at position 3611 of SEQ ID NO: 1882633
gcccauuacugagauacug

SEQ ID NO: 2136319 - RNA, 19 nt, Artificial Sequence
  Description of Artificial Sequence: Synthetic oligonucleotide
  Antisense strand to SEQ ID NO: 2136318
caguaucucaguaaugggc

SEQ ID NO: 2136320 - RNA, 19 nt, Artificial Sequence
  Description of Artificial Sequence: Synthetic oligonucleotide
  Sense strand starting at position 3716 of SEQ ID NO: 1882633
cugugcuucccagauuguu

SEQ ID NO: 2136321 - RNA, 19 nt, Artificial Sequence
  Description of Artificial Sequence: Synthetic oligonucleotide
  Antisense strand to SEQ ID NO: 2136320
aacaaucugggaagcacag

SEQ ID NO: 2136322 - RNA, 19 nt, Artificial Sequence
  Description of Artificial Sequence: Synthetic oligonucleotide
  Sense strand starting at position 3880 of SEQ ID NO: 1882633
uguccuucuagagguagca

SEQ ID NO: 2136323 - RNA, 19 nt, Artificial Sequence
  Description of Artificial Sequence: Synthetic oligonucleotide
  Antisense strand to SEQ ID NO: 2136322
ugcuaccucuagaaggaca

SEQ ID NO: 2136324 - RNA, 19 nt, Artificial Sequence
  Description of Artificial Sequence: Synthetic oligonucleotide
  Sense strand starting at position 3948 of SEQ ID NO: 1882633
ugagacaucugucaagaug

SEQ ID NO: 2136325 - RNA, 19 nt, Artificial Sequence
  Description of Artificial Sequence: Synthetic oligonucleotide
  Antisense strand to SEQ ID NO: 2136324
caucuugacagaugucuca

SEQ ID NO: 2136326 - RNA, 19 nt, Artificial Sequence
  Description of Artificial Sequence: Synthetic oligonucleotide
  Sense strand starting at position 3951 of SEQ ID NO: 1882633
gacaucugucaagaugggu

SEQ ID NO: 2136327 - RNA, 19 nt, Artificial Sequence
  Description of Artificial Sequence: Synthetic oligonucleotide
  Antisense strand to SEQ ID NO: 2136326
acccaucuugacagauguc

SEQ ID NO: 2136328 - RNA, 19 nt, Artificial Sequence
  Description of Artificial Sequence: Synthetic oligonucleotide
  Sense strand starting at position 3954 of SEQ ID NO: 1882633
aucugucaagauggguuau

SEQ ID NO: 2136329 - RNA, 19 nt, Artificial Sequence
  Description of Artificial Sequence: Synthetic oligonucleotide
  Antisense strand to SEQ ID NO: 2136328
auaacccaucuugacagau

SEQ ID NO: 2136330 - RNA, 19 nt, Artificial Sequence
  Description of Artificial Sequence: Synthetic oligonucleotide
  Sense strand starting at position 3956 of SEQ ID NO: 1882633
cugucaagauggguuaugu

SEQ ID NO: 2136331 - RNA, 19 nt, Artificial Sequence
  Description of Artificial Sequence: Synthetic oligonucleotide
  Antisense strand to SEQ ID NO: 2136330
acauaacccaucuugacag

SEQ ID NO: 2136332 - RNA, 19 nt, Artificial Sequence
  Description of Artificial Sequence: Synthetic oligonucleotide
  Sense strand starting at position 51 of SEQ ID NO: 1882634
gggcaaagcuaacucuaau

SEQ ID NO: 2136333 - RNA, 19 nt, Artificial Sequence
  Description of Artificial Sequence: Synthetic oligonucleotide
  Antisense strand to SEQ ID NO: 2136332
auuagaguuagcuuugccc

SEQ ID NO: 2136334 - RNA, 19 nt, Artificial Sequence
  Description of Artificial Sequence: Synthetic oligonucleotide
  Sense strand starting at position 72 of SEQ ID NO: 1882634
aaacgaggcccuugaucuu

SEQ ID NO: 2136335 - RNA, 19 nt, Artificial Sequence
  Description of Artificial Sequence: Synthetic oligonucleotide
  Antisense strand to SEQ ID NO: 2136334
aagaucaagggccucguuu

SEQ ID NO: 2136336 - RNA, 19 nt, Artificial Sequence
  Description of Artificial Sequence: Synthetic oligonucleotide
  Sense strand starting at position 78 of SEQ ID NO: 1882634
ggcccuugaucuuugaucu

SEQ ID NO: 2136337 - RNA, 19 nt, Artificial Sequence
  Description of Artificial Sequence: Synthetic oligonucleotide
  Antisense strand to SEQ ID NO: 2136336
agaucaaagaucaagggcc

SEQ ID NO: 2136338 - RNA, 19 nt, Artificial Sequence
  Description of Artificial Sequence: Synthetic oligonucleotide
  Sense strand starting at position 79 of SEQ ID NO: 1882634
gcccuugaucuuugaucua

SEQ ID NO: 2136339 - RNA, 19 nt, Artificial Sequence
  Description of Artificial Sequence: Synthetic oligonucleotide
  Antisense strand to SEQ ID NO: 2136338
uagaucaaagaucaagggc

SEQ ID NO: 2136340 - RNA, 19 nt, Artificial Sequence
  Description of Artificial Sequence: Synthetic oligonucleotide
  Sense strand starting at position 82 of SEQ ID NO: 1882634
cuugaucuuugaucuaaag

SEQ ID NO: 2136341 - RNA, 19 nt, Artificial Sequence
  Description of Artificial Sequence: Synthetic oligonucleotide
  Antisense strand to SEQ ID NO: 2136340
cuuuagaucaaagaucaag

SEQ ID NO: 2136342 - RNA, 19 nt, Artificial Sequence
  Description of Artificial Sequence: Synthetic oligonucleotide
  Sense strand starting at position 184 of SEQ ID NO: 1882634
cugaguagacaauggugaa

SEQ ID NO: 2136343 - RNA, 19 nt, Artificial Sequence
  Description of Artificial Sequence: Synthetic oligonucleotide
  Antisense strand to SEQ ID NO: 2136342
uucaccauugucuacucag

SEQ ID NO: 2136344 - RNA, 19 nt, Artificial Sequence
  Description of Artificial Sequence: Synthetic oligonucleotide
  Sense strand starting at position 238 of SEQ ID NO: 1882634
agggaagggugcuuuguaa

SEQ ID NO: 2136345 - RNA, 19 nt, Artificial Sequence
  Description of Artificial Sequence: Synthetic oligonucleotide
  Antisense strand to SEQ ID NO: 2136344
uuacaaagcacccuucccu

SEQ ID NO: 2136346 - RNA, 19 nt, Artificial Sequence
  Description of Artificial Sequence: Synthetic oligonucleotide
  Sense strand starting at position 245 of SEQ ID NO: 1882634
ggugcuuuguaacugaaga

SEQ ID NO: 2136347 - RNA, 19 nt, Artificial Sequence
  Description of Artificial Sequence: Synthetic oligonucleotide
  Antisense strand to SEQ ID NO: 2136346
ucuucaguuacaaagcacc

SEQ ID NO: 2136348 - RNA, 19 nt, Artificial Sequence
  Description of Artificial Sequence: Synthetic oligonucleotide
  Sense strand starting at position 246 of SEQ ID NO: 1882634
gugcuuuguaacugaagau

SEQ ID NO: 2136349 - RNA, 19 nt, Artificial Sequence
  Description of Artificial Sequence: Synthetic oligonucleotide
  Antisense strand to SEQ ID NO: 2136348
aucuucaguuacaaagcac

SEQ ID NO: 2136350 - RNA, 19 nt, Artificial Sequence
  Description of Artificial Sequence: Synthetic oligonucleotide
  Sense strand starting at position 425 of SEQ ID NO: 1882634
agucgacauuaucuccauu

SEQ ID NO: 2136351 - RNA, 19 nt, Artificial Sequence
  Description of Artificial Sequence: Synthetic oligonucleotide
  Antisense strand to SEQ ID NO: 2136350
aauggagauaaugucgacu

SEQ ID NO: 2136352 - RNA, 19 nt, Artificial Sequence
  Description of Artificial Sequence: Synthetic oligonucleotide
  Sense strand starting at position 467 of SEQ ID NO: 1882634
ugauauuggcucuagguca

SEQ ID NO: 2136353 - RNA, 19 nt, Artificial Sequence
  Description of Artificial Sequence: Synthetic oligonucleotide
  Antisense strand to SEQ ID NO: 2136352
ugaccuagagccaauauca

SEQ ID NO: 2136354 - RNA, 19 nt, Artificial Sequence
  Description of Artificial Sequence: Synthetic oligonucleotide
  Sense strand starting at position 2172 of SEQ ID NO: 1882634
uccguucucuaguugaaac

SEQ ID NO: 2136355 - RNA, 19 nt, Artificial Sequence
  Description of Artificial Sequence: Synthetic oligonucleotide
  Antisense strand to SEQ ID NO: 2136354
guuucaacuagagaacgga

SEQ ID NO: 2136356 - RNA, 19 nt, Artificial Sequence
  Description of Artificial Sequence: Synthetic oligonucleotide
  Sense strand starting at position 2246 of SEQ ID NO: 1882634
ccaaacuguuagguauaaa

SEQ ID NO: 2136357 - RNA, 19 nt, Artificial Sequence
  Description of Artificial Sequence: Synthetic oligonucleotide
  Antisense strand to SEQ ID NO: 2136356
uuuauaccuaacaguuugg

SEQ ID NO: 2136358 - RNA, 19 nt, Artificial Sequence
  Description of Artificial Sequence: Synthetic oligonucleotide
  Sense strand starting at position 2285 of SEQ ID NO: 1882634
ggguuucuaaaguaguuga

SEQ ID NO: 2136359 - RNA, 19 nt, Artificial Sequence
  Description of Artificial Sequence: Synthetic oligonucleotide
  Antisense strand to SEQ ID NO: 2136358
ucaacuacuuuagaaaccc

SEQ ID NO: 2136360 - RNA, 19 nt, Artificial Sequence
  Description of Artificial Sequence: Synthetic oligonucleotide
  Sense strand starting at position 2296 of SEQ ID NO: 1882634
guaguugaggagugauaua

SEQ ID NO: 2136361 - RNA, 19 nt, Artificial Sequence
  Description of Artificial Sequence: Synthetic oligonucleotide
  Antisense strand to SEQ ID NO: 2136360
uauaucacuccucaacuac

SEQ ID NO: 2136362 - RNA, 19 nt, Artificial Sequence
  Description of Artificial Sequence: Synthetic oligonucleotide
  Sense strand starting at position 2349 of SEQ ID NO: 1882634
cuaagagcccugugaucaa

SEQ ID NO: 2136363 - RNA, 19 nt, Artificial Sequence
  Description of Artificial Sequence: Synthetic oligonucleotide
  Antisense strand to SEQ ID NO: 2136362
uugaucacagggcucuuag

SEQ ID NO: 2136364 - RNA, 19 nt, Artificial Sequence
  Description of Artificial Sequence: Synthetic oligonucleotide
  Sense strand starting at position 2352 of SEQ ID NO: 1882634
agagcccugugaucaaagu

SEQ ID NO: 2136365 - RNA, 19 nt, Artificial Sequence
  Description of Artificial Sequence: Synthetic oligonucleotide
  Antisense strand to SEQ ID NO: 2136364
acuuugaucacagggcucu

SEQ ID NO: 2136366 - RNA, 19 nt, Artificial Sequence
  Description of Artificial Sequence: Synthetic oligonucleotide
  Sense strand starting at position 2353 of SEQ ID NO: 1882634
gagcccugugaucaaagua

SEQ ID NO: 2136367 - RNA, 19 nt, Artificial Sequence
  Description of Artificial Sequence: Synthetic oligonucleotide
  Antisense strand to SEQ ID NO: 2136366
uacuuugaucacagggcuc

SEQ ID NO: 2136368 - RNA, 19 nt, Artificial Sequence
  Description of Artificial Sequence: Synthetic oligonucleotide
  Sense strand starting at position 2448 of SEQ ID NO: 1882634
gauuguaaacaaugguuau

SEQ ID NO: 2136369 - RNA, 19 nt, Artificial Sequence
  Description of Artificial Sequence: Synthetic oligonucleotide
  Antisense strand to SEQ ID NO: 2136368
auaaccauuguuuacaauc

SEQ ID NO: 2136370 - RNA, 19 nt, Artificial Sequence
  Description of Artificial Sequence: Synthetic oligonucleotide
  Sense strand starting at position 2473 of SEQ ID NO: 1882634
cauccagaguguguacauu

SEQ ID NO: 2136371 - RNA, 19 nt, Artificial Sequence
  Description of Artificial Sequence: Synthetic oligonucleotide
  Antisense strand to SEQ ID NO: 2136370
aauguacacacucuggaug

SEQ ID NO: 2136372 - RNA, 19 nt, Artificial Sequence
  Description of Artificial Sequence: Synthetic oligonucleotide
  Sense strand starting at position 2483 of SEQ ID NO: 1882634
guguacauuguugagaaca

SEQ ID NO: 2136373 - RNA, 19 nt, Artificial Sequence
  Description of Artificial Sequence: Synthetic oligonucleotide
  Antisense strand to SEQ ID NO: 2136372
uguucucaacaauguacac

SEQ ID NO: 2136374 - RNA, 19 nt, Artificial Sequence
  Description of Artificial Sequence: Synthetic oligonucleotide
  Sense strand starting at position 2520 of SEQ ID NO: 1882634
gcacuuggcauccaggaga

SEQ ID NO: 2136375 - RNA, 19 nt, Artificial Sequence
  Description of Artificial Sequence: Synthetic oligonucleotide
  Antisense strand to SEQ ID NO: 2136374
ucuccuggaugccaagugc

SEQ ID NO: 2136376 - RNA, 19 nt, Artificial Sequence
  Description of Artificial Sequence: Synthetic oligonucleotide
  Sense strand starting at position 2541 of SEQ ID NO: 1882634
gaguuaagaguauguccau

SEQ ID NO: 2136377 - RNA, 19 nt, Artificial Sequence
  Description of Artificial Sequence: Synthetic oligonucleotide
  Antisense strand to SEQ ID NO: 2136376
auggacauacucuuaacuc

SEQ ID NO: 2136378 - RNA, 19 nt, Artificial Sequence
  Description of Artificial Sequence: Synthetic oligonucleotide
  Sense strand starting at position 2542 of SEQ ID NO: 1882634
aguuaagaguauguccaua

SEQ ID NO: 2136379 - RNA, 19 nt, Artificial Sequence
  Description of Artificial Sequence: Synthetic oligonucleotide
  Antisense strand to SEQ ID NO: 2136378
uauggacauacucuuaacu

SEQ ID NO: 2136380 - RNA, 19 nt, Artificial Sequence
  Description of Artificial Sequence: Synthetic oligonucleotide
  Sense strand starting at position 2544 of SEQ ID NO: 1882634
uuaagaguauguccauaca

SEQ ID NO: 2136381 - RNA, 19 nt, Artificial Sequence
  Description of Artificial Sequence: Synthetic oligonucleotide
  Antisense strand to SEQ ID NO: 2136380
uguauggacauacucuuaa

SEQ ID NO: 2136382 - RNA, 19 nt, Artificial Sequence
  Description of Artificial Sequence: Synthetic oligonucleotide
  Sense strand starting at position 2899 of SEQ ID NO: 1882634
acgaaaguucuauagcuca

SEQ ID NO: 2136383 - RNA, 19 nt, Artificial Sequence
  Description of Artificial Sequence: Synthetic oligonucleotide
  Antisense strand to SEQ ID NO: 2136382
ugagcuauagaacuuucgu

SEQ ID NO: 2136384 - RNA, 19 nt, Artificial Sequence
  Description of Artificial Sequence: Synthetic oligonucleotide
  Sense strand starting at position 3026 of SEQ ID NO: 1882634
uggcuuuggccagaaccaa

SEQ ID NO: 2136385 - RNA, 19 nt, Artificial Sequence
  Description of Artificial Sequence: Synthetic oligonucleotide
  Antisense strand to SEQ ID NO: 2136384
uugguucuggccaaagcca

SEQ ID NO: 2136386 - RNA, 19 nt, Artificial Sequence
  Description of Artificial Sequence: Synthetic oligonucleotide
  Sense strand starting at position 3103 of SEQ ID NO: 1882634
ccuuuaaugucuuugaugu

SEQ ID NO: 2136387 - RNA, 19 nt, Artificial Sequence
  Description of Artificial Sequence: Synthetic oligonucleotide
  Antisense strand to SEQ ID NO: 2136386
acaucaaagacauuaaagg

SEQ ID NO: 2136388 - RNA, 19 nt, Artificial Sequence
  Description of Artificial Sequence: Synthetic oligonucleotide
  Sense strand starting at position 3104 of SEQ ID NO: 1882634
cuuuaaugucuuugauguu

SEQ ID NO: 2136389 - RNA, 19 nt, Artificial Sequence
  Description of Artificial Sequence: Synthetic oligonucleotide
  Antisense strand to SEQ ID NO: 2136388
aacaucaaagacauuaaag

SEQ ID NO: 2136390 - RNA, 19 nt, Artificial Sequence
  Description of Artificial Sequence: Synthetic oligonucleotide
  Sense strand starting at position 3132 of SEQ ID NO: 1882634
uccuaauuugcaugugauu

SEQ ID NO: 2136391 - RNA, 19 nt, Artificial Sequence
  Description of Artificial Sequence: Synthetic oligonucleotide
  Antisense strand to SEQ ID NO: 2136390
aaucacaugcaaauuagga

SEQ ID NO: 2136392 - RNA, 19 nt, Artificial Sequence
  Description of Artificial Sequence: Synthetic oligonucleotide
  Sense strand starting at position 3145 of SEQ ID NO: 1882634
gugauugccugugucauuu

SEQ ID NO: 2136393 - RNA, 19 nt, Artificial Sequence
  Description of Artificial Sequence: Synthetic oligonucleotide
  Antisense strand to SEQ ID NO: 2136392
aaaugacacaggcaaucac

SEQ ID NO: 2136394 - RNA, 19 nt, Artificial Sequence
  Description of Artificial Sequence: Synthetic oligonucleotide
  Sense strand starting at position 3149 of SEQ ID NO: 1882634
uugccugugucauuuguuu

SEQ ID NO: 2136395 - RNA, 19 nt, Artificial Sequence
  Description of Artificial Sequence: Synthetic oligonucleotide
  Antisense strand to SEQ ID NO: 2136394
aaacaaaugacacaggcaa

SEQ ID NO: 2136396 - RNA, 19 nt, Artificial Sequence
  Description of Artificial Sequence: Synthetic oligonucleotide
  Sense strand starting at position 3153 of SEQ ID NO: 1882634
cugugucauuuguuuggca

SEQ ID NO: 2136397 - RNA, 19 nt, Artificial Sequence
  Description of Artificial Sequence: Synthetic oligonucleotide
  Antisense strand to SEQ ID NO: 2136396
ugccaaacaaaugacacag

SEQ ID NO: 2136398 - RNA, 19 nt, Artificial Sequence
  Description of Artificial Sequence: Synthetic oligonucleotide
  Sense strand starting at position 3157 of SEQ ID NO: 1882634
gucauuuguuuggcagcuu

SEQ ID NO: 2136399 - RNA, 19 nt, Artificial Sequence
  Description of Artificial Sequence: Synthetic oligonucleotide
  Antisense strand to SEQ ID NO: 2136398
aagcugccaaacaaaugac

SEQ ID NO: 2136400 - RNA, 19 nt, Artificial Sequence
  Description of Artificial Sequence: Synthetic oligonucleotide
  Sense strand starting at position 3286 of SEQ ID NO: 1882634
ggaagaugugagcagcuuu

SEQ ID NO: 2136401 - RNA, 19 nt, Artificial Sequence
  Description of Artificial Sequence: Synthetic oligonucleotide
  Antisense strand to SEQ ID NO: 2136400
aaagcugcucacaucuucc

SEQ ID NO: 2136402 - RNA, 19 nt, Artificial Sequence
  Description of Artificial Sequence: Synthetic oligonucleotide
  Sense strand starting at position 3529 of SEQ ID NO: 1882634
ggccgagacuucucccuaa

SEQ ID NO: 2136403 - RNA, 19 nt, Artificial Sequence
  Description of Artificial Sequence: Synthetic oligonucleotide
  Antisense strand to SEQ ID NO: 2136402
uuagggagaagucucggcc

SEQ ID NO: 2136404 - RNA, 19 nt, Artificial Sequence
  Description of Artificial Sequence: Synthetic oligonucleotide
  Sense strand starting at position 3786 of SEQ ID NO: 1882634
uugggugugauugacaagu

SEQ ID NO: 2136405 - RNA, 19 nt, Artificial Sequence
  Description of Artificial Sequence: Synthetic oligonucleotide
  Antisense strand to SEQ ID NO: 2136404
acuugucaaucacacccaa

SEQ ID NO: 2136406 - RNA, 19 nt, Artificial Sequence
  Description of Artificial Sequence: Synthetic oligonucleotide
  Sense strand starting at position 3830 of SEQ ID NO: 1882634
gguccugauguuggugaca

SEQ ID NO: 2136407 - RNA, 19 nt, Artificial Sequence
  Description of Artificial Sequence: Synthetic oligonucleotide
  Antisense strand to SEQ ID NO: 2136406
ugucaccaacaucaggacc

SEQ ID NO: 2136408 - RNA, 19 nt, Artificial Sequence
  Description of Artificial Sequence: Synthetic oligonucleotide
  Sense strand starting at position 3841 of SEQ ID NO: 1882634
uggugacaucucuaucguu

SEQ ID NO: 2136409 - RNA, 19 nt, Artificial Sequence
  Description of Artificial Sequence: Synthetic oligonucleotide
  Antisense strand to SEQ ID NO: 2136408
aacgauagagaugucacca

SEQ ID NO: 2136410 - RNA, 19 nt, Artificial Sequence
  Description of Artificial Sequence: Synthetic oligonucleotide
  Sense strand starting at position 3874 of SEQ ID NO: 1882634
gcugaugaauuccuagaaa

SEQ ID NO: 2136411 - RNA, 19 nt, Artificial Sequence
  Description of Artificial Sequence: Synthetic oligonucleotide
  Antisense strand to SEQ ID NO: 2136410
uuucuaggaauucaucagc

SEQ ID NO: 2136412 - RNA, 19 nt, Artificial Sequence
  Description of Artificial Sequence: Synthetic oligonucleotide
  Sense strand starting at position 195 of SEQ ID NO: 1882635
uauagaacuuucgugguga

SEQ ID NO: 2136413 - RNA, 19 nt, Artificial Sequence
  Description of Artificial Sequence: Synthetic oligonucleotide
  Antisense strand to SEQ ID NO: 2136412
ucaccacgaaaguucuaua

SEQ ID NO: 2136414 - RNA, 19 nt, Artificial Sequence
  Description of Artificial Sequence: Synthetic oligonucleotide
  Sense strand starting at position 197 of SEQ ID NO: 1882635
uagaacuuucguggugauu

SEQ ID NO: 2136415 - RNA, 19 nt, Artificial Sequence
  Description of Artificial Sequence: Synthetic oligonucleotide
  Antisense strand to SEQ ID NO: 2136414
aaucaccacgaaaguucua

SEQ ID NO: 2136416 - RNA, 19 nt, Artificial Sequence
  Description of Artificial Sequence: Synthetic oligonucleotide
  Sense strand starting at position 599 of SEQ ID NO: 1882635
aggccaguguucucaacaa

SEQ ID NO: 2136417 - RNA, 19 nt, Artificial Sequence
  Description of Artificial Sequence: Synthetic oligonucleotide
  Antisense strand to SEQ ID NO: 2136416
uuguugagaacacuggccu

SEQ ID NO: 2136418 - RNA, 19 nt, Artificial Sequence
  Description of Artificial Sequence: Synthetic oligonucleotide
  Sense strand starting at position 681 of SEQ ID NO: 1882635
cagggagucuuccuggauu

SEQ ID NO: 2136419 - RNA, 19 nt, Artificial Sequence
  Description of Artificial Sequence: Synthetic oligonucleotide
  Antisense strand to SEQ ID NO: 2136418
aauccaggaagacucccug

SEQ ID NO: 2136420 - RNA, 19 nt, Artificial Sequence
  Description of Artificial Sequence: Synthetic oligonucleotide
  Sense strand starting at position 727 of SEQ ID NO: 1882635
gcauuuggcuacuuugauc

SEQ ID NO: 2136421 - RNA, 19 nt, Artificial Sequence
  Description of Artificial Sequence: Synthetic oligonucleotide
  Antisense strand to SEQ ID NO: 2136420
gaucaaaguagccaaaugc

SEQ ID NO: 2136422 - RNA, 19 nt, Artificial Sequence
  Description of Artificial Sequence: Synthetic oligonucleotide
  Sense strand starting at position 761 of SEQ ID NO: 1882635
cugcgcuguccagcauuau

SEQ ID NO: 2136423 - RNA, 19 nt, Artificial Sequence
  Description of Artificial Sequence: Synthetic oligonucleotide
  Antisense strand to SEQ ID NO: 2136422
auaaugcuggacagcgcag

SEQ ID NO: 2136424 - RNA, 19 nt, Artificial Sequence
  Description of Artificial Sequence: Synthetic oligonucleotide
  Sense strand starting at position 765 of SEQ ID NO: 1882635
gcuguccagcauuaugauu

SEQ ID NO: 2136425 - RNA, 19 nt, Artificial Sequence
  Description of Artificial Sequence: Synthetic oligonucleotide
  Antisense strand to SEQ ID NO: 2136424
aaucauaaugcuggacagc

SEQ ID NO: 2136426 - RNA, 19 nt, Artificial Sequence
  Description of Artificial Sequence: Synthetic oligonucleotide
  Sense strand starting at position 943 of SEQ ID NO: 1882635
ggauguaacugguucuuga

SEQ ID NO: 2136427 - RNA, 19 nt, Artificial Sequence
  Description of Artificial Sequence: Synthetic oligonucleotide
  Antisense strand to SEQ ID NO: 2136426
ucaagaaccaguuacaucc

SEQ ID NO: 2136428 - RNA, 19 nt, Artificial Sequence
  Description of Artificial Sequence: Synthetic oligonucleotide
  Sense strand starting at position 1059 of SEQ ID NO: 1882635
ucaugaagccagggaauau

SEQ ID NO: 2136429 - RNA, 19 nt, Artificial Sequence
  Description of Artificial Sequence: Synthetic oligonucleotide
  Antisense strand to SEQ ID NO: 2136428
auauucccuggcuucauga

SEQ ID NO: 2136430 - RNA, 19 nt, Artificial Sequence
  Description of Artificial Sequence: Synthetic oligonucleotide
  Sense strand starting at position 1098 of SEQ ID NO: 1882635
uagcacuuguugcuagaga

SEQ ID NO: 2136431 - RNA, 19 nt, Artificial Sequence
  Description of Artificial Sequence: Synthetic oligonucleotide
  Antisense strand to SEQ ID NO: 2136430
ucucuagcaacaagugcua

SEQ ID NO: 2136432 - RNA, 19 nt, Artificial Sequence
  Description of Artificial Sequence: Synthetic oligonucleotide
  Sense strand starting at position 2533 of SEQ ID NO: 1882635
ugacauuggagaugucugu

SEQ ID NO: 2136433 - RNA, 19 nt, Artificial Sequence
  Description of Artificial Sequence: Synthetic oligonucleotide
  Antisense strand to SEQ ID NO: 2136432
acagacaucuccaauguca

SEQ ID NO: 2136434 - RNA, 19 nt, Artificial Sequence
  Description of Artificial Sequence: Synthetic oligonucleotide
  Sense strand starting at position 2667 of SEQ ID NO: 1882635
ggagauaaugucgacuccu

SEQ ID NO: 2136435 - RNA, 19 nt, Artificial Sequence
  Description of Artificial Sequence: Synthetic oligonucleotide
  Antisense strand to SEQ ID NO: 2136434
aggagucgacauuaucucc

SEQ ID NO: 2136436 - RNA, 19 nt, Artificial Sequence
  Description of Artificial Sequence: Synthetic oligonucleotide
  Sense strand starting at position 2749 of SEQ ID NO: 1882635
acacuuuguagguauggga

SEQ ID NO: 2136437 - RNA, 19 nt, Artificial Sequence
  Description of Artificial Sequence: Synthetic oligonucleotide
  Antisense strand to SEQ ID NO: 2136436
ucccauaccuacaaagugu

SEQ ID NO: 2136438 - RNA, 19 nt, Artificial Sequence
  Description of Artificial Sequence: Synthetic oligonucleotide
  Sense strand starting at position 2756 of SEQ ID NO: 1882635
guagguaugggauaaguuu

SEQ ID NO: 2136439 - RNA, 19 nt, Artificial Sequence
  Description of Artificial Sequence: Synthetic oligonucleotide
  Antisense strand to SEQ ID NO: 2136438
aaacuuaucccauaccuac

SEQ ID NO: 2136440 - RNA, 19 nt, Artificial Sequence
  Description of Artificial Sequence: Synthetic oligonucleotide
  Sense strand starting at position 2768 of SEQ ID NO: 1882635
uaaguuuagcuggcguuau

SEQ ID NO: 2136441 - RNA, 19 nt, Artificial Sequence
  Description of Artificial Sequence: Synthetic oligonucleotide
  Antisense strand to SEQ ID NO: 2136440
auaacgccagcuaaacuua

SEQ ID NO: 2136442 - RNA, 19 nt, Artificial Sequence
  Description of Artificial Sequence: Synthetic oligonucleotide
  Sense strand starting at position 2939 of SEQ ID NO: 1882635
ggcacaaccugcuuaguaa

SEQ ID NO: 2136443 - RNA, 19 nt, Artificial Sequence
  Description of Artificial Sequence: Synthetic oligonucleotide
  Antisense strand to SEQ ID NO: 2136442
uuacuaagcagguugugcc

SEQ ID NO: 2136444 - RNA, 19 nt, Artificial Sequence
  Description of Artificial Sequence: Synthetic oligonucleotide
  Sense strand starting at position 2940 of SEQ ID NO: 1882635
gcacaaccugcuuaguaau

SEQ ID NO: 2136445 - RNA, 19 nt, Artificial Sequence
  Description of Artificial Sequence: Synthetic oligonucleotide
  Antisense strand to SEQ ID NO: 2136444
auuacuaagcagguugugc

SEQ ID NO: 2136446 - RNA, 19 nt, Artificial Sequence
  Description of Artificial Sequence: Synthetic oligonucleotide
  Sense strand starting at position 2997 of SEQ ID NO: 1882635
gcuugcagugcuuuagauc

SEQ ID NO: 2136447 - RNA, 19 nt, Artificial Sequence
  Description of Artificial Sequence: Synthetic oligonucleotide
  Antisense strand to SEQ ID NO: 2136446
gaucuaaagcacugcaagc

SEQ ID NO: 2136448 - RNA, 19 nt, Artificial Sequence
  Description of Artificial Sequence: Synthetic oligonucleotide
  Sense strand starting at position 2998 of SEQ ID NO: 1882635
cuugcagugcuuuagauca

SEQ ID NO: 2136449 - RNA, 19 nt, Artificial Sequence
  Description of Artificial Sequence: Synthetic oligonucleotide
  Antisense strand to SEQ ID NO: 2136448
ugaucuaaagcacugcaag

SEQ ID NO: 2136450 - RNA, 19 nt, Artificial Sequence
  Description of Artificial Sequence: Synthetic oligonucleotide
  Sense strand starting at position 3003 of SEQ ID NO: 1882635
agugcuuuagaucaaagau

SEQ ID NO: 2136451 - RNA, 19 nt, Artificial Sequence
  Description of Artificial Sequence: Synthetic oligonucleotide
  Antisense strand to SEQ ID NO: 2136450
aucuuugaucuaaagcacu

SEQ ID NO: 2136452 - RNA, 19 nt, Artificial Sequence
  Description of Artificial Sequence: Synthetic oligonucleotide
  Sense strand starting at position 3028 of SEQ ID NO: 1882635
ccucguuuggauuagaguu

SEQ ID NO: 2136453 - RNA, 19 nt, Artificial Sequence
  Description of Artificial Sequence: Synthetic oligonucleotide
  Antisense strand to SEQ ID NO: 2136452
aacucuaauccaaacgagg

SEQ ID NO: 2136454 - RNA, 19 nt, Artificial Sequence
  Description of Artificial Sequence: Synthetic oligonucleotide
  Sense strand starting at position 3034 of SEQ ID NO: 1882635
uuggauuagaguuagcuuu

SEQ ID NO: 2136455 - RNA, 19 nt, Artificial Sequence
  Description of Artificial Sequence: Synthetic oligonucleotide
  Antisense strand to SEQ ID NO: 2136454
aaagcuaacucuaauccaa

SEQ ID NO: 2136456 - RNA, 19 nt, Artificial Sequence
  Description of Artificial Sequence: Synthetic oligonucleotide
  Sense strand starting at position 3041 of SEQ ID NO: 1882635
agaguuagcuuugcccaaa

SEQ ID NO: 2136457 - RNA, 19 nt, Artificial Sequence
  Description of Artificial Sequence: Synthetic oligonucleotide
  Antisense strand to SEQ ID NO: 2136456
uuugggcaaagcuaacucu

SEQ ID NO: 2136458 - RNA, 19 nt, Artificial Sequence
  Description of Artificial Sequence: Synthetic oligonucleotide
  Sense strand starting at position 3042 of SEQ ID NO: 1882635
gaguuagcuuugcccaaag

SEQ ID NO: 2136459 - RNA, 19 nt, Artificial Sequence
  Description of Artificial Sequence: Synthetic oligonucleotide
  Antisense strand to SEQ ID NO: 2136458
cuuugggcaaagcuaacuc

SEQ ID NO: 2136460 - RNA, 19 nt, Artificial Sequence
  Description of Artificial Sequence: Synthetic oligonucleotide
  Sense strand starting at position 3081 of SEQ ID NO: 1882635
cugccuuuguucuuaaaga

SEQ ID NO: 2136461 - RNA, 19 nt, Artificial Sequence
  Description of Artificial Sequence: Synthetic oligonucleotide
  Antisense strand to SEQ ID NO: 2136460
ucuuuaagaacaaaggcag

SEQ ID NO: 2136462 - RNA, 19 nt, Artificial Sequence
  Description of Artificial Sequence: Synthetic oligonucleotide
  Sense strand starting at position 3229 of SEQ ID NO: 1882635
ucuggucuucucugaguac

SEQ ID NO: 2136463 - RNA, 19 nt, Artificial Sequence
  Description of Artificial Sequence: Synthetic oligonucleotide
  Antisense strand to SEQ ID NO: 2136462
guacucagagaagaccaga

SEQ ID NO: 2136464 - RNA, 19 nt, Artificial Sequence
  Description of Artificial Sequence: Synthetic oligonucleotide
  Sense strand starting at position 3265 of SEQ ID NO: 1882635
ccuguucucuuuguaacaa

SEQ ID NO: 2136465 - RNA, 19 nt, Artificial Sequence
  Description of Artificial Sequence: Synthetic oligonucleotide
  Antisense strand to SEQ ID NO: 2136464
uuguuacaaagagaacagg

SEQ ID NO: 2136466 - RNA, 19 nt, Artificial Sequence
  Description of Artificial Sequence: Synthetic oligonucleotide
  Sense strand starting at position 3434 of SEQ ID NO: 1882635
ccacaacacgucugcauua

SEQ ID NO: 2136467 - RNA, 19 nt, Artificial Sequence
  Description of Artificial Sequence: Synthetic oligonucleotide
  Antisense strand to SEQ ID NO: 2136466
uaaugcagacguguugugg

SEQ ID NO: 2136468 - RNA, 19 nt, Artificial Sequence
  Description of Artificial Sequence: Synthetic oligonucleotide
  Sense strand starting at position 3439 of SEQ ID NO: 1882635
acacgucugcauuaagaug

SEQ ID NO: 2136469 - RNA, 19 nt, Artificial Sequence
  Description of Artificial Sequence: Synthetic oligonucleotide
  Antisense strand to SEQ ID NO: 2136468
caucuuaaugcagacgugu

SEQ ID NO: 2136470 - RNA, 19 nt, Artificial Sequence
  Description of Artificial Sequence: Synthetic oligonucleotide
  Sense strand starting at position 3459 of SEQ ID NO: 1882635
agcaauauugggugguaga

SEQ ID NO: 2136471 - RNA, 19 nt, Artificial Sequence
  Description of Artificial Sequence: Synthetic oligonucleotide
  Antisense strand to SEQ ID NO: 2136470
ucuaccacccaauauugcu

SEQ ID NO: 2136472 - RNA, 19 nt, Artificial Sequence
  Description of Artificial Sequence: Synthetic oligonucleotide
  Sense strand starting at position 3460 of SEQ ID NO: 1882635
gcaauauugggugguagag

SEQ ID NO: 2136473 - RNA, 19 nt, Artificial Sequence
  Description of Artificial Sequence: Synthetic oligonucleotide
  Antisense strand to SEQ ID NO: 2136472
cucuaccacccaauauugc

SEQ ID NO: 2136474 - RNA, 19 nt, Artificial Sequence
  Description of Artificial Sequence: Synthetic oligonucleotide
  Sense strand starting at position 3507 of SEQ ID NO: 1882635
gcaacuuggauguggucaa

SEQ ID NO: 2136475 - RNA, 19 nt, Artificial Sequence
  Description of Artificial Sequence: Synthetic oligonucleotide
  Antisense strand to SEQ ID NO: 2136474
uugaccacauccaaguugc

SEQ ID NO: 2136476 - RNA, 19 nt, Artificial Sequence
  Description of Artificial Sequence: Synthetic oligonucleotide
  Sense strand starting at position 3511 of SEQ ID NO: 1882635
cuuggauguggucaagguu

SEQ ID NO: 2136477 - RNA, 19 nt, Artificial Sequence
  Description of Artificial Sequence: Synthetic oligonucleotide
  Antisense strand to SEQ ID NO: 2136476
aaccuugaccacauccaag

SEQ ID NO: 2136478 - RNA, 19 nt, Artificial Sequence
  Description of Artificial Sequence: Synthetic oligonucleotide
  Sense strand starting at position 3575 of SEQ ID NO: 1882635
cuauucuuacccugaguag

SEQ ID NO: 2136479 - RNA, 19 nt, Artificial Sequence
  Description of Artificial Sequence: Synthetic oligonucleotide
  Antisense strand to SEQ ID NO: 2136478
cuacucaggguaagaauag

SEQ ID NO: 2136480 - RNA, 19 nt, Artificial Sequence
  Description of Artificial Sequence: Synthetic oligonucleotide
  Sense strand starting at position 3578 of SEQ ID NO: 1882635
uucuuacccugaguagaac

SEQ ID NO: 2136481 - RNA, 19 nt, Artificial Sequence
  Description of Artificial Sequence: Synthetic oligonucleotide
  Antisense strand to SEQ ID NO: 2136480
guucuacucaggguaagaa

SEQ ID NO: 2136482 - RNA, 19 nt, Artificial Sequence
  Description of Artificial Sequence: Synthetic oligonucleotide
  Sense strand starting at position 3603 of SEQ ID NO: 1882635
uccuguguccaggaggcau

SEQ ID NO: 2136483 - RNA, 19 nt, Artificial Sequence
  Description of Artificial Sequence: Synthetic oligonucleotide
  Antisense strand to SEQ ID NO: 2136482
augccuccuggacacagga

SEQ ID NO: 2136484 - RNA, 19 nt, Artificial Sequence
  Description of Artificial Sequence: Synthetic oligonucleotide
  Sense strand starting at position 3723 of SEQ ID NO: 1882635
ucuucugcugcagagugau

SEQ ID NO: 2136485 - RNA, 19 nt, Artificial Sequence
  Description of Artificial Sequence: Synthetic oligonucleotide
  Antisense strand to SEQ ID NO: 2136484
aucacucugcagcagaaga

SEQ ID NO: 2136486 - RNA, 19 nt, Artificial Sequence
  Description of Artificial Sequence: Synthetic oligonucleotide
  Sense strand starting at position 3874 of SEQ ID NO: 1882635
gguaguaaaugccucuuga

SEQ ID NO: 2136487 - RNA, 19 nt, Artificial Sequence
  Description of Artificial Sequence: Synthetic oligonucleotide
  Antisense strand to SEQ ID NO: 2136486
ucaagaggcauuuacuacc

SEQ ID NO: 2136488 - RNA, 19 nt, Artificial Sequence
  Description of Artificial Sequence: Synthetic oligonucleotide
  Sense strand starting at position 3924 of SEQ ID NO: 1882635
ggugguguggaaugggaaa

SEQ ID NO: 2136489 - RNA, 19 nt, Artificial Sequence
  Description of Artificial Sequence: Synthetic oligonucleotide
  Antisense strand to SEQ ID NO: 2136488
uuucccauuccacaccacc

SEQ ID NO: 2136490 - RNA, 19 nt, Artificial Sequence
  Description of Artificial Sequence: Synthetic oligonucleotide
  Sense strand starting at position 3954 of SEQ ID NO: 1882635
gccagaagucaugaacccu

SEQ ID NO: 2136491 - RNA, 19 nt, Artificial Sequence
  Description of Artificial Sequence: Synthetic oligonucleotide
  Antisense strand to SEQ ID NO: 2136490
aggguucaugacuucuggc

SEQ ID NO: 2136492 - RNA, 19 nt, Artificial Sequence
  Description of Artificial Sequence: Synthetic oligonucleotide
  Sense strand starting at position 141 of SEQ ID NO: 1882636
cuagucuaaccggacaaau

SEQ ID NO: 2136493 - RNA, 19 nt, Artificial Sequence
  Description of Artificial Sequence: Synthetic oligonucleotide
  Antisense strand to SEQ ID NO: 2136492
auuuguccgguuagacuag

SEQ ID NO: 2136494 - RNA, 19 nt, Artificial Sequence
  Description of Artificial Sequence: Synthetic oligonucleotide
  Sense strand starting at position 164 of SEQ ID NO: 1882636
auaguuagaaaguguagga

SEQ ID NO: 2136495 - RNA, 19 nt, Artificial Sequence
  Description of Artificial Sequence: Synthetic oligonucleotide
  Antisense strand to SEQ ID NO: 2136494
uccuacacuuucuaacuau

SEQ ID NO: 2136496 - RNA, 19 nt, Artificial Sequence
  Description of Artificial Sequence: Synthetic oligonucleotide
  Sense strand starting at position 250 of SEQ ID NO: 1882636
cucucagaauuccuggcau

SEQ ID NO: 2136497 - RNA, 19 nt, Artificial Sequence
  Description of Artificial Sequence: Synthetic oligonucleotide
  Antisense strand to SEQ ID NO: 2136496
augccaggaauucugagag

SEQ ID NO: 2136498 - RNA, 19 nt, Artificial Sequence
  Description of Artificial Sequence: Synthetic oligonucleotide
  Sense strand starting at position 252 of SEQ ID NO: 1882636
cucagaauuccuggcauug

SEQ ID NO: 2136499 - RNA, 19 nt, Artificial Sequence
  Description of Artificial Sequence: Synthetic oligonucleotide
  Antisense strand to SEQ ID NO: 2136498
caaugccaggaauucugag

SEQ ID NO: 2136500 - RNA, 19 nt, Artificial Sequence
  Description of Artificial Sequence: Synthetic oligonucleotide
  Sense strand starting at position 276 of SEQ ID NO: 1882636
ugcaguuugguacaagaug

SEQ ID NO: 2136501 - RNA, 19 nt, Artificial Sequence
  Description of Artificial Sequence: Synthetic oligonucleotide
  Antisense strand to SEQ ID NO: 2136500
caucuuguaccaaacugca

SEQ ID NO: 2136502 - RNA, 19 nt, Artificial Sequence
  Description of Artificial Sequence: Synthetic oligonucleotide
  Sense strand starting at position 299 of SEQ ID NO: 1882636
cugagagagugggacauuu

SEQ ID NO: 2136503 - RNA, 19 nt, Artificial Sequence
  Description of Artificial Sequence: Synthetic oligonucleotide
  Antisense strand to SEQ ID NO: 2136502
aaaugucccacucucucag

SEQ ID NO: 2136504 - RNA, 19 nt, Artificial Sequence
  Description of Artificial Sequence: Synthetic oligonucleotide
  Sense strand starting at position 307 of SEQ ID NO: 1882636
gugggacauuuccacaauu

SEQ ID NO: 2136505 - RNA, 19 nt, Artificial Sequence
  Description of Artificial Sequence: Synthetic oligonucleotide
  Antisense strand to SEQ ID NO: 2136504
aauuguggaaaugucccac

SEQ ID NO: 2136506 - RNA, 19 nt, Artificial Sequence
  Description of Artificial Sequence: Synthetic oligonucleotide
  Sense strand starting at position 355 of SEQ ID NO: 1882636
acaugaguguuaguaaugu

SEQ ID NO: 2136507 - RNA, 19 nt, Artificial Sequence
  Description of Artificial Sequence: Synthetic oligonucleotide
  Antisense strand to SEQ ID NO: 2136506
acauuacuaacacucaugu

SEQ ID NO: 2136508 - RNA, 19 nt, Artificial Sequence
  Description of Artificial Sequence: Synthetic oligonucleotide
  Sense strand starting at position 363 of SEQ ID NO: 1882636
guuaguaauguuggaaguc

SEQ ID NO: 2136509 - RNA, 19 nt, Artificial Sequence
  Description of Artificial Sequence: Synthetic oligonucleotide
  Antisense strand to SEQ ID NO: 2136508
gacuuccaacauuacuaac

SEQ ID NO: 2136510 - RNA, 19 nt, Artificial Sequence
  Description of Artificial Sequence: Synthetic oligonucleotide
  Sense strand starting at position 373 of SEQ ID NO: 1882636
uuggaagucauauggcaga

SEQ ID NO: 2136511 - RNA, 19 nt, Artificial Sequence
  Description of Artificial Sequence: Synthetic oligonucleotide
  Antisense strand to SEQ ID NO: 2136510
ucugccauaugacuuccaa

SEQ ID NO: 2136512 - RNA, 19 nt, Artificial Sequence
  Description of Artificial Sequence: Synthetic oligonucleotide
  Sense strand starting at position 376 of SEQ ID NO: 1882636
gaagucauauggcagauuu

SEQ ID NO: 2136513 - RNA, 19 nt, Artificial Sequence
  Description of Artificial Sequence: Synthetic oligonucleotide
  Antisense strand to SEQ ID NO: 2136512
aaaucugccauaugacuuc

SEQ ID NO: 2136514 - RNA, 19 nt, Artificial Sequence
  Description of Artificial Sequence: Synthetic oligonucleotide
  Sense strand starting at position 412 of SEQ ID NO: 1882636
gucauucuugcucaugagu

SEQ ID NO: 2136515 - RNA, 19 nt, Artificial Sequence
  Description of Artificial Sequence: Synthetic oligonucleotide
  Antisense strand to SEQ ID NO: 2136514
acucaugagcaagaaugac

SEQ ID NO: 2136516 - RNA, 19 nt, Artificial Sequence
  Description of Artificial Sequence: Synthetic oligonucleotide
  Sense strand starting at position 426 of SEQ ID NO: 1882636
ugaguuucugaaugugauu

SEQ ID NO: 2136517 - RNA, 19 nt, Artificial Sequence
  Description of Artificial Sequence: Synthetic oligonucleotide
  Antisense strand to SEQ ID NO: 2136516
aaucacauucagaaacuca

SEQ ID NO: 2136518 - RNA, 19 nt, Artificial Sequence
  Description of Artificial Sequence: Synthetic oligonucleotide
  Sense strand starting at position 431 of SEQ ID NO: 1882636
uucugaaugugauuagccu

SEQ ID NO: 2136519 - RNA, 19 nt, Artificial Sequence
  Description of Artificial Sequence: Synthetic oligonucleotide
  Antisense strand to SEQ ID NO: 2136518
aggcuaaucacauucagaa

SEQ ID NO: 2136520 - RNA, 19 nt, Artificial Sequence
  Description of Artificial Sequence: Synthetic oligonucleotide
  Sense strand starting at position 432 of SEQ ID NO: 1882636
ucugaaugugauuagccuu

SEQ ID NO: 2136521 - RNA, 19 nt, Artificial Sequence
  Description of Artificial Sequence: Synthetic oligonucleotide
  Antisense strand to SEQ ID NO: 2136520
aaggcuaaucacauucaga

SEQ ID NO: 2136522 - RNA, 19 nt, Artificial Sequence
  Description of Artificial Sequence: Synthetic oligonucleotide
  Sense strand starting at position 435 of SEQ ID NO: 1882636
gaaugugauuagccuuuaa

SEQ ID NO: 2136523 - RNA, 19 nt, Artificial Sequence
  Description of Artificial Sequence: Synthetic oligonucleotide
  Antisense strand to SEQ ID NO: 2136522
uuaaaggcuaaucacauuc

SEQ ID NO: 2136524 - RNA, 19 nt, Artificial Sequence
  Description of Artificial Sequence: Synthetic oligonucleotide
  Sense strand starting at position 439 of SEQ ID NO: 1882636
gugauuagccuuuaaauca

SEQ ID NO: 2136525 - RNA, 19 nt, Artificial Sequence
  Description of Artificial Sequence: Synthetic oligonucleotide
  Antisense strand to SEQ ID NO: 2136524
ugauuuaaaggcuaaucac

SEQ ID NO: 2136526 - RNA, 19 nt, Artificial Sequence
  Description of Artificial Sequence: Synthetic oligonucleotide
  Sense strand starting at position 655 of SEQ ID NO: 1882636
agcccucagaauuguguga

SEQ ID NO: 2136527 - RNA, 19 nt, Artificial Sequence
  Description of Artificial Sequence: Synthetic oligonucleotide
  Antisense strand to SEQ ID NO: 2136526
ucacacaauucugagggcu

SEQ ID NO: 2136528 - RNA, 19 nt, Artificial Sequence
  Description of Artificial Sequence: Synthetic oligonucleotide
  Sense strand starting at position 659 of SEQ ID NO: 1882636
cucagaauugugugagcca

SEQ ID NO: 2136529 - RNA, 19 nt, Artificial Sequence
  Description of Artificial Sequence: Synthetic oligonucleotide
  Antisense strand to SEQ ID NO: 2136528
uggcucacacaauucugag

SEQ ID NO: 2136530 - RNA, 19 nt, Artificial Sequence
  Description of Artificial Sequence: Synthetic oligonucleotide
  Sense strand starting at position 662 of SEQ ID NO: 1882636
agaauugugugagccacaa

SEQ ID NO: 2136531 - RNA, 19 nt, Artificial Sequence
  Description of Artificial Sequence: Synthetic oligonucleotide
  Antisense strand to SEQ ID NO: 2136530
uuguggcucacacaauucu

SEQ ID NO: 2136532 - RNA, 19 nt, Artificial Sequence
  Description of Artificial Sequence: Synthetic oligonucleotide
  Sense strand starting at position 666 of SEQ ID NO: 1882636
uugugugagccacaagaaa

SEQ ID NO: 2136533 - RNA, 19 nt, Artificial Sequence
  Description of Artificial Sequence: Synthetic oligonucleotide
  Antisense strand to SEQ ID NO: 2136532
uuucuuguggcucacacaa

SEQ ID NO: 2136534 - RNA, 19 nt, Artificial Sequence
  Description of Artificial Sequence: Synthetic oligonucleotide
  Sense strand starting at position 800 of SEQ ID NO: 1882636
auacauacgugaguguuua

SEQ ID NO: 2136535 - RNA, 19 nt, Artificial Sequence
  Description of Artificial Sequence: Synthetic oligonucleotide
  Antisense strand to SEQ ID NO: 2136534
uaaacacucacguauguau

SEQ ID NO: 2136536 - RNA, 19 nt, Artificial Sequence
  Description of Artificial Sequence: Synthetic oligonucleotide
  Sense strand starting at position 804 of SEQ ID NO: 1882636
auacgugaguguuuauaca

SEQ ID NO: 2136537 - RNA, 19 nt, Artificial Sequence
  Description of Artificial Sequence: Synthetic oligonucleotide
  Antisense strand to SEQ ID NO: 2136536
uguauaaacacucacguau

SEQ ID NO: 2136538 - RNA, 19 nt, Artificial Sequence
  Description of Artificial Sequence: Synthetic oligonucleotide
  Sense strand starting at position 1703 of SEQ ID NO: 1882636
cagauuccugaaggucuua

SEQ ID NO: 2136539 - RNA, 19 nt, Artificial Sequence
  Description of Artificial Sequence: Synthetic oligonucleotide
  Antisense strand to SEQ ID NO: 2136538
uaagaccuucaggaaucug

SEQ ID NO: 2136540 - RNA, 19 nt, Artificial Sequence
  Description of Artificial Sequence: Synthetic oligonucleotide
  Sense strand starting at position 1745 of SEQ ID NO: 1882636
cugaaugcuccuggaagug

SEQ ID NO: 2136541 - RNA, 19 nt, Artificial Sequence
  Description of Artificial Sequence: Synthetic oligonucleotide
  Antisense strand to SEQ ID NO: 2136540
cacuuccaggagcauucag

SEQ ID NO: 2136542 - RNA, 19 nt, Artificial Sequence
  Description of Artificial Sequence: Synthetic oligonucleotide
  Sense strand starting at position 1803 of SEQ ID NO: 1882636
ugccauaugccagggaauc

SEQ ID NO: 2136543 - RNA, 19 nt, Artificial Sequence
  Description of Artificial Sequence: Synthetic oligonucleotide
  Antisense strand to SEQ ID NO: 2136542
gauucccuggcauauggca

SEQ ID NO: 2136544 - RNA, 19 nt, Artificial Sequence
  Description of Artificial Sequence: Synthetic oligonucleotide
  Sense strand starting at position 2151 of SEQ ID NO: 1882636
ugugaucagugagucuaca

SEQ ID NO: 2136545 - RNA, 19 nt, Artificial Sequence
  Description of Artificial Sequence: Synthetic oligonucleotide
  Antisense strand to SEQ ID NO: 2136544
uguagacucacugaucaca

SEQ ID NO: 2136546 - RNA, 19 nt, Artificial Sequence
  Description of Artificial Sequence: Synthetic oligonucleotide
  Sense strand starting at position 2196 of SEQ ID NO: 1882636
gacaguugaucucuggacu

SEQ ID NO: 2136547 - RNA, 19 nt, Artificial Sequence
  Description of Artificial Sequence: Synthetic oligonucleotide
  Antisense strand to SEQ ID NO: 2136546
aguccagagaucaacuguc

SEQ ID NO: 2136548 - RNA, 19 nt, Artificial Sequence
  Description of Artificial Sequence: Synthetic oligonucleotide
  Sense strand starting at position 2453 of SEQ ID NO: 1882636
gccagagcugucuggagga

SEQ ID NO: 2136549 - RNA, 19 nt, Artificial Sequence
  Description of Artificial Sequence: Synthetic oligonucleotide
  Antisense strand to SEQ ID NO: 2136548
uccuccagacagcucuggc

SEQ ID NO: 2136550 - RNA, 19 nt, Artificial Sequence
  Description of Artificial Sequence: Synthetic oligonucleotide
  Sense strand starting at position 2455 of SEQ ID NO: 1882636
cagagcugucuggaggaca

SEQ ID NO: 2136551 - RNA, 19 nt, Artificial Sequence
  Description of Artificial Sequence: Synthetic oligonucleotide
  Antisense strand to SEQ ID NO: 2136550
uguccuccagacagcucug

SEQ ID NO: 2136552 - RNA, 19 nt, Artificial Sequence
  Description of Artificial Sequence: Synthetic oligonucleotide
  Sense strand starting at position 2520 of SEQ ID NO: 1882636
ccagccuuccaugauggaa

SEQ ID NO: 2136553 - RNA, 19 nt, Artificial Sequence
  Description of Artificial Sequence: Synthetic oligonucleotide
  Antisense strand to SEQ ID NO: 2136552
uuccaucauggaaggcugg

SEQ ID NO: 2136554 - RNA, 19 nt, Artificial Sequence
  Description of Artificial Sequence: Synthetic oligonucleotide
  Sense strand starting at position 2599 of SEQ ID NO: 1882636
caggguuuaugcucagcaa

SEQ ID NO: 2136555 - RNA, 19 nt, Artificial Sequence
  Description of Artificial Sequence: Synthetic oligonucleotide
  Antisense strand to SEQ ID NO: 2136554
uugcugagcauaaacccug

SEQ ID NO: 2136556 - RNA, 19 nt, Artificial Sequence
  Description of Artificial Sequence: Synthetic oligonucleotide
  Sense strand starting at position 2600 of SEQ ID NO: 1882636
aggguuuaugcucagcaag

SEQ ID NO: 2136557 - RNA, 19 nt, Artificial Sequence
  Description of Artificial Sequence: Synthetic oligonucleotide
  Antisense strand to SEQ ID NO: 2136556
cuugcugagcauaaacccu

SEQ ID NO: 2136558 - RNA, 19 nt, Artificial Sequence
  Description of Artificial Sequence: Synthetic oligonucleotide
  Sense strand starting at position 2634 of SEQ ID NO: 1882636
uggauaucaggucaagugu

SEQ ID NO: 2136559 - RNA, 19 nt, Artificial Sequence
  Description of Artificial Sequence: Synthetic oligonucleotide
  Antisense strand to SEQ ID NO: 2136558
acacuugaccugauaucca

SEQ ID NO: 2136560 - RNA, 19 nt, Artificial Sequence
  Description of Artificial Sequence: Synthetic oligonucleotide
  Sense strand starting at position 2990 of SEQ ID NO: 1882636
acaaauacuccuggcggau

SEQ ID NO: 2136561 - RNA, 19 nt, Artificial Sequence
  Description of Artificial Sequence: Synthetic oligonucleotide
  Antisense strand to SEQ ID NO: 2136560
auccgccaggaguauuugu

SEQ ID NO: 2136562 - RNA, 19 nt, Artificial Sequence
  Description of Artificial Sequence: Synthetic oligonucleotide
  Sense strand starting at position 3022 of SEQ ID NO: 1882636
caaggauuguuuccaggca

SEQ ID NO: 2136563 - RNA, 19 nt, Artificial Sequence
  Description of Artificial Sequence: Synthetic oligonucleotide
  Antisense strand to SEQ ID NO: 2136562
ugccuggaaacaauccuug

SEQ ID NO: 2136564 - RNA, 19 nt, Artificial Sequence
  Description of Artificial Sequence: Synthetic oligonucleotide
  Sense strand starting at position 3040 of SEQ ID NO: 1882636
aguauuuacucagggaaau

SEQ ID NO: 2136565 - RNA, 19 nt, Artificial Sequence
  Description of Artificial Sequence: Synthetic oligonucleotide
  Antisense strand to SEQ ID NO: 2136564
auuucccugaguaaauacu

SEQ ID NO: 2136566 - RNA, 19 nt, Artificial Sequence
  Description of Artificial Sequence: Synthetic oligonucleotide
  Sense strand starting at position 3078 of SEQ ID NO: 1882636
guugguuacugggccagau

SEQ ID NO: 2136567 - RNA, 19 nt, Artificial Sequence
  Description of Artificial Sequence: Synthetic oligonucleotide
  Antisense strand to SEQ ID NO: 2136566
aucuggcccaguaaccaac

SEQ ID NO: 2136568 - RNA, 19 nt, Artificial Sequence
  Description of Artificial Sequence: Synthetic oligonucleotide
  Sense strand starting at position 3164 of SEQ ID NO: 1882636
ucaacaguuggcugaggua

SEQ ID NO: 2136569 - RNA, 19 nt, Artificial Sequence
  Description of Artificial Sequence: Synthetic oligonucleotide
  Antisense strand to SEQ ID NO: 2136568
uaccucagccaacuguuga

SEQ ID NO: 2136570 - RNA, 19 nt, Artificial Sequence
  Description of Artificial Sequence: Synthetic oligonucleotide
  Sense strand starting at position 3191 of SEQ ID NO: 1882636
gguagauugguguagggac

SEQ ID NO: 2136571 - RNA, 19 nt, Artificial Sequence
  Description of Artificial Sequence: Synthetic oligonucleotide
  Antisense strand to SEQ ID NO: 2136570
gucccuacaccaaucuacc

SEQ ID NO: 2136572 - RNA, 19 nt, Artificial Sequence
  Description of Artificial Sequence: Synthetic oligonucleotide
  Sense strand starting at position 45 of SEQ ID NO: 1882637
ugggucucaguacgugaua

SEQ ID NO: 2136573 - RNA, 19 nt, Artificial Sequence
  Description of Artificial Sequence: Synthetic oligonucleotide
  Antisense strand to SEQ ID NO: 2136572
uaucacguacugagaccca

SEQ ID NO: 2136574 - RNA, 19 nt, Artificial Sequence
  Description of Artificial Sequence: Synthetic oligonucleotide
  Sense strand starting at position 46 of SEQ ID NO: 1882637
gggucucaguacgugauau

SEQ ID NO: 2136575 - RNA, 19 nt, Artificial Sequence
  Description of Artificial Sequence: Synthetic oligonucleotide
  Antisense strand to SEQ ID NO: 2136574
auaucacguacugagaccc

SEQ ID NO: 2136576 - RNA, 19 nt, Artificial Sequence
  Description of Artificial Sequence: Synthetic oligonucleotide
  Sense strand starting at position 47 of SEQ ID NO: 1882637
ggucucaguacgugauaua

SEQ ID NO: 2136577 - RNA, 19 nt, Artificial Sequence
  Description of Artificial Sequence: Synthetic oligonucleotide
  Antisense strand to SEQ ID NO: 2136576
uauaucacguacugagacc

SEQ ID NO: 2136578 - RNA, 19 nt, Artificial Sequence
  Description of Artificial Sequence: Synthetic oligonucleotide
  Sense strand starting at position 48 of SEQ ID NO: 1882637
gucucaguacgugauauau

SEQ ID NO: 2136579 - RNA, 19 nt, Artificial Sequence
  Description of Artificial Sequence: Synthetic oligonucleotide
  Antisense strand to SEQ ID NO: 2136578
auauaucacguacugagac

SEQ ID NO: 2136580 - RNA, 19 nt, Artificial Sequence
  Description of Artificial Sequence: Synthetic oligonucleotide
  Sense strand starting at position 54 of SEQ ID NO: 1882637
guacgugauauauagaaca

SEQ ID NO: 2136581 - RNA, 19 nt, Artificial Sequence
  Description of Artificial Sequence: Synthetic oligonucleotide
  Antisense strand to SEQ ID NO: 2136580
uguucuauauaucacguac

SEQ ID NO: 2136582 - RNA, 19 nt, Artificial Sequence
  Description of Artificial Sequence: Synthetic oligonucleotide
  Sense strand starting at position 82 of SEQ ID NO: 1882637
uggaucaaauaagaucaaa

SEQ ID NO: 2136583 - RNA, 19 nt, Artificial Sequence
  Description of Artificial Sequence: Synthetic oligonucleotide
  Antisense strand to SEQ ID NO: 2136582
uuugaucuuauuugaucca

SEQ ID NO: 2136584 - RNA, 19 nt, Artificial Sequence
  Description of Artificial Sequence: Synthetic oligonucleotide
  Sense strand starting at position 151 of SEQ ID NO: 1882637
gagcuuagcuuagcugaua

SEQ ID NO: 2136585 - RNA, 19 nt, Artificial Sequence
  Description of Artificial Sequence: Synthetic oligonucleotide
  Antisense strand to SEQ ID NO: 2136584
uaucagcuaagcuaagcuc

SEQ ID NO: 2136586 - RNA, 19 nt, Artificial Sequence
  Description of Artificial Sequence: Synthetic oligonucleotide
  Sense strand starting at position 211 of SEQ ID NO: 1882637
caaguuaggaguugugaaa

SEQ ID NO: 2136587 - RNA, 19 nt, Artificial Sequence
  Description of Artificial Sequence: Synthetic oligonucleotide
  Antisense strand to SEQ ID NO: 2136586
uuucacaacuccuaacuug

SEQ ID NO: 2136588 - RNA, 19 nt, Artificial Sequence
  Description of Artificial Sequence: Synthetic oligonucleotide
  Sense strand starting at position 302 of SEQ ID NO: 1882637
guggguuaucucuaggauc

SEQ ID NO: 2136589 - RNA, 19 nt, Artificial Sequence
  Description of Artificial Sequence: Synthetic oligonucleotide
  Antisense strand to SEQ ID NO: 2136588
gauccuagagauaacccac

SEQ ID NO: 2136590 - RNA, 19 nt, Artificial Sequence
  Description of Artificial Sequence: Synthetic oligonucleotide
  Sense strand starting at position 316 of SEQ ID NO: 1882637
ggaucucacuuaugaaaua

SEQ ID NO: 2136591 - RNA, 19 nt, Artificial Sequence
  Description of Artificial Sequence: Synthetic oligonucleotide
  Antisense strand to SEQ ID NO: 2136590
uauuucauaagugagaucc

SEQ ID NO: 2136592 - RNA, 19 nt, Artificial Sequence
  Description of Artificial Sequence: Synthetic oligonucleotide
  Sense strand starting at position 444 of SEQ ID NO: 1882637
aguagauuacugcaagggu

SEQ ID NO: 2136593 - RNA, 19 nt, Artificial Sequence
  Description of Artificial Sequence: Synthetic oligonucleotide
  Antisense strand to SEQ ID NO: 2136592
acccuugcaguaaucuacu

SEQ ID NO: 2136594 - RNA, 19 nt, Artificial Sequence
  Description of Artificial Sequence: Synthetic oligonucleotide
  Sense strand starting at position 447 of SEQ ID NO: 1882637
agauuacugcaaggguaaa

SEQ ID NO: 2136595 - RNA, 19 nt, Artificial Sequence
  Description of Artificial Sequence: Synthetic oligonucleotide
  Antisense strand to SEQ ID NO: 2136594
uuuacccuugcaguaaucu

SEQ ID NO: 2136596 - RNA, 19 nt, Artificial Sequence
  Description of Artificial Sequence: Synthetic oligonucleotide
  Sense strand starting at position 470 of SEQ ID NO: 1882637
accacugcuuggcuugaaa

SEQ ID NO: 2136597 - RNA, 19 nt, Artificial Sequence
  Description of Artificial Sequence: Synthetic oligonucleotide
  Antisense strand to SEQ ID NO: 2136596
uuucaagccaagcaguggu

SEQ ID NO: 2136598 - RNA, 19 nt, Artificial Sequence
  Description of Artificial Sequence: Synthetic oligonucleotide
  Sense strand starting at position 512 of SEQ ID NO: 1882637
cuuagaaguuccgucacua

SEQ ID NO: 2136599 - RNA, 19 nt, Artificial Sequence
  Description of Artificial Sequence: Synthetic oligonucleotide
  Antisense strand to SEQ ID NO: 2136598
uagugacggaacuucuaag

SEQ ID NO: 2136600 - RNA, 19 nt, Artificial Sequence
  Description of Artificial Sequence: Synthetic oligonucleotide
  Sense strand starting at position 516 of SEQ ID NO: 1882637
gaaguuccgucacuaacga

SEQ ID NO: 2136601 - RNA, 19 nt, Artificial Sequence
  Description of Artificial Sequence: Synthetic oligonucleotide
  Antisense strand to SEQ ID NO: 2136600
ucguuagugacggaacuuc

SEQ ID NO: 2136602 - RNA, 19 nt, Artificial Sequence
  Description of Artificial Sequence: Synthetic oligonucleotide
  Sense strand starting at position 541 of SEQ ID NO: 1882637
gcuaauacaugguugugau

SEQ ID NO: 2136603 - RNA, 19 nt, Artificial Sequence
  Description of Artificial Sequence: Synthetic oligonucleotide
  Antisense strand to SEQ ID NO: 2136602
aucacaaccauguauuagc

SEQ ID NO: 2136604 - RNA, 19 nt, Artificial Sequence
  Description of Artificial Sequence: Synthetic oligonucleotide
  Sense strand starting at position 542 of SEQ ID NO: 1882637
cuaauacaugguugugaua

SEQ ID NO: 2136605 - RNA, 19 nt, Artificial Sequence
  Description of Artificial Sequence: Synthetic oligonucleotide
  Antisense strand to SEQ ID NO: 2136604
uaucacaaccauguauuag

SEQ ID NO: 2136606 - RNA, 19 nt, Artificial Sequence
  Description of Artificial Sequence: Synthetic oligonucleotide
  Sense strand starting at position 699 of SEQ ID NO: 1882637
guuccagugccucagugaa

SEQ ID NO: 2136607 - RNA, 19 nt, Artificial Sequence
  Description of Artificial Sequence: Synthetic oligonucleotide
  Antisense strand to SEQ ID NO: 2136606
uucacugaggcacuggaac

SEQ ID NO: 2136608 - RNA, 19 nt, Artificial Sequence
  Description of Artificial Sequence: Synthetic oligonucleotide
  Sense strand starting at position 840 of SEQ ID NO: 1882637
aaaguauaaucguugcuuu

SEQ ID NO: 2136609 - RNA, 19 nt, Artificial Sequence
  Description of Artificial Sequence: Synthetic oligonucleotide
  Antisense strand to SEQ ID NO: 2136608
aaagcaacgauuauacuuu

SEQ ID NO: 2136610 - RNA, 19 nt, Artificial Sequence
  Description of Artificial Sequence: Synthetic oligonucleotide
  Sense strand starting at position 841 of SEQ ID NO: 1882637
aaguauaaucguugcuuua

SEQ ID NO: 2136611 - RNA, 19 nt, Artificial Sequence
  Description of Artificial Sequence: Synthetic oligonucleotide
  Antisense strand to SEQ ID NO: 2136610
uaaagcaacgauuauacuu

SEQ ID NO: 2136612 - RNA, 19 nt, Artificial Sequence
  Description of Artificial Sequence: Synthetic oligonucleotide
  Sense strand starting at position 843 of SEQ ID NO: 1882637
guauaaucguugcuuuauu

SEQ ID NO: 2136613 - RNA, 19 nt, Artificial Sequence
  Description of Artificial Sequence: Synthetic oligonucleotide
  Antisense strand to SEQ ID NO: 2136612
aauaaagcaacgauuauac

SEQ ID NO: 2136614 - RNA, 19 nt, Artificial Sequence
  Description of Artificial Sequence: Synthetic oligonucleotide
  Sense strand starting at position 988 of SEQ ID NO: 1882637
uaccuaauucguuagguga

SEQ ID NO: 2136615 - RNA, 19 nt, Artificial Sequence
  Description of Artificial Sequence: Synthetic oligonucleotide
  Antisense strand to SEQ ID NO: 2136614
ucaccuaacgaauuaggua

SEQ ID NO: 2136616 - RNA, 19 nt, Artificial Sequence
  Description of Artificial Sequence: Synthetic oligonucleotide
  Sense strand starting at position 991 of SEQ ID NO: 1882637
cuaauucguuaggugaguu

SEQ ID NO: 2136617 - RNA, 19 nt, Artificial Sequence
  Description of Artificial Sequence: Synthetic oligonucleotide
  Antisense strand to SEQ ID NO: 2136616
aacucaccuaacgaauuag

SEQ ID NO: 2136618 - RNA, 19 nt, Artificial Sequence
  Description of Artificial Sequence: Synthetic oligonucleotide
  Sense strand starting at position 992 of SEQ ID NO: 1882637
uaauucguuaggugaguuu

SEQ ID NO: 2136619 - RNA, 19 nt, Artificial Sequence
  Description of Artificial Sequence: Synthetic oligonucleotide
  Antisense strand to SEQ ID NO: 2136618
aaacucaccuaacgaauua

SEQ ID NO: 2136620 - RNA, 19 nt, Artificial Sequence
  Description of Artificial Sequence: Synthetic oligonucleotide
  Sense strand starting at position 995 of SEQ ID NO: 1882637
uucguuaggugaguuuauu

SEQ ID NO: 2136621 - RNA, 19 nt, Artificial Sequence
  Description of Artificial Sequence: Synthetic oligonucleotide
  Antisense strand to SEQ ID NO: 2136620
aauaaacucaccuaacgaa

SEQ ID NO: 2136622 - RNA, 19 nt, Artificial Sequence
  Description of Artificial Sequence: Synthetic oligonucleotide
  Sense strand starting at position 1061 of SEQ ID NO: 1882637
uuacauuaagagcgaucca

SEQ ID NO: 2136623 - RNA, 19 nt, Artificial Sequence
  Description of Artificial Sequence: Synthetic oligonucleotide
  Antisense strand to SEQ ID NO: 2136622
uggaucgcucuuaauguaa

SEQ ID NO: 2136624 - RNA, 19 nt, Artificial Sequence
  Description of Artificial Sequence: Synthetic oligonucleotide
  Sense strand starting at position 1089 of SEQ ID NO: 1882637
aguuaacgauuugaagguu

SEQ ID NO: 2136625 - RNA, 19 nt, Artificial Sequence
  Description of Artificial Sequence: Synthetic oligonucleotide
  Antisense strand to SEQ ID NO: 2136624
aaccuucaaaucguuaacu

SEQ ID NO: 2136626 - RNA, 19 nt, Artificial Sequence
  Description of Artificial Sequence: Synthetic oligonucleotide
  Sense strand starting at position 2103 of SEQ ID NO: 1882637
ggaacuguuuguguccaga

SEQ ID NO: 2136627 - RNA, 19 nt, Artificial Sequence
  Description of Artificial Sequence: Synthetic oligonucleotide
  Antisense strand to SEQ ID NO: 2136626
ucuggacacaaacaguucc

SEQ ID NO: 2136628 - RNA, 19 nt, Artificial Sequence
  Description of Artificial Sequence: Synthetic oligonucleotide
  Sense strand starting at position 2105 of SEQ ID NO: 1882637
aacuguuuguguccagaau

SEQ ID NO: 2136629 - RNA, 19 nt, Artificial Sequence
  Description of Artificial Sequence: Synthetic oligonucleotide
  Antisense strand to SEQ ID NO: 2136628
auucuggacacaaacaguu

SEQ ID NO: 2136630 - RNA, 19 nt, Artificial Sequence
  Description of Artificial Sequence: Synthetic oligonucleotide
  Sense strand starting at position 2106 of SEQ ID NO: 1882637
acuguuuguguccagaauu

SEQ ID NO: 2136631 - RNA, 19 nt, Artificial Sequence
  Description of Artificial Sequence: Synthetic oligonucleotide
  Antisense strand to SEQ ID NO: 2136630
aauucuggacacaaacagu

SEQ ID NO: 2136632 - RNA, 19 nt, Artificial Sequence
  Description of Artificial Sequence: Synthetic oligonucleotide
  Sense strand starting at position 2188 of SEQ ID NO: 1882637
ggaucaacuguaugucaca

SEQ ID NO: 2136633 - RNA, 19 nt, Artificial Sequence
  Description of Artificial Sequence: Synthetic oligonucleotide
  Antisense strand to SEQ ID NO: 2136632
ugugacauacaguugaucc

SEQ ID NO: 2136634 - RNA, 19 nt, Artificial Sequence
  Description of Artificial Sequence: Synthetic oligonucleotide
  Sense strand starting at position 2205 of SEQ ID NO: 1882637
caacauauuccguaggcgu

SEQ ID NO: 2136635 - RNA, 19 nt, Artificial Sequence
  Description of Artificial Sequence: Synthetic oligonucleotide
  Antisense strand to SEQ ID NO: 2136634
acgccuacggaauauguug

SEQ ID NO: 2136636 - RNA, 19 nt, Artificial Sequence
  Description of Artificial Sequence: Synthetic oligonucleotide
  Sense strand starting at position 2254 of SEQ ID NO: 1882637
caguaaacuuuaccgugau

SEQ ID NO: 2136637 - RNA, 19 nt, Artificial Sequence
  Description of Artificial Sequence: Synthetic oligonucleotide
  Antisense strand to SEQ ID NO: 2136636
aucacgguaaaguuuacug

SEQ ID NO: 2136638 - RNA, 19 nt, Artificial Sequence
  Description of Artificial Sequence: Synthetic oligonucleotide
  Sense strand starting at position 2257 of SEQ ID NO: 1882637
uaaacuuuaccgugauguu

SEQ ID NO: 2136639 - RNA, 19 nt, Artificial Sequence
  Description of Artificial Sequence: Synthetic oligonucleotide
  Antisense strand to SEQ ID NO: 2136638
aacaucacgguaaaguuua

SEQ ID NO: 2136640 - RNA, 19 nt, Artificial Sequence
  Description of Artificial Sequence: Synthetic oligonucleotide
  Sense strand starting at position 2258 of SEQ ID NO: 1882637
aaacuuuaccgugauguuu

SEQ ID NO: 2136641 - RNA, 19 nt, Artificial Sequence
  Description of Artificial Sequence: Synthetic oligonucleotide
  Antisense strand to SEQ ID NO: 2136640
aaacaucacgguaaaguuu

SEQ ID NO: 2136642 - RNA, 19 nt, Artificial Sequence
  Description of Artificial Sequence: Synthetic oligonucleotide
  Sense strand starting at position 2377 of SEQ ID NO: 1882637
gacaacguaucaggaauuu

SEQ ID NO: 2136643 - RNA, 19 nt, Artificial Sequence
  Description of Artificial Sequence: Synthetic oligonucleotide
  Antisense strand to SEQ ID NO: 2136642
aaauuccugauacguuguc

SEQ ID NO: 2136644 - RNA, 19 nt, Artificial Sequence
  Description of Artificial Sequence: Synthetic oligonucleotide
  Sense strand starting at position 2880 of SEQ ID NO: 1882637
gcgccuagccaggaaguua

SEQ ID NO: 2136645 - RNA, 19 nt, Artificial Sequence
  Description of Artificial Sequence: Synthetic oligonucleotide
  Antisense strand to SEQ ID NO: 2136644
uaacuuccuggcuaggcgc

SEQ ID NO: 2136646 - RNA, 19 nt, Artificial Sequence
  Description of Artificial Sequence: Synthetic oligonucleotide
  Sense strand starting at position 3242 of SEQ ID NO: 1882637
cacgcugguuccuuccaaa

SEQ ID NO: 2136647 - RNA, 19 nt, Artificial Sequence
  Description of Artificial Sequence: Synthetic oligonucleotide
  Antisense strand to SEQ ID NO: 2136646
uuuggaaggaaccagcgug

SEQ ID NO: 2136648 - RNA, 19 nt, Artificial Sequence
  Description of Artificial Sequence: Synthetic oligonucleotide
  Sense strand starting at position 3266 of SEQ ID NO: 1882637
agcacauuacucuagugau

SEQ ID NO: 2136649 - RNA, 19 nt, Artificial Sequence
  Description of Artificial Sequence: Synthetic oligonucleotide
  Antisense strand to SEQ ID NO: 2136648
aucacuagaguaaugugcu

SEQ ID NO: 2136650 - RNA, 19 nt, Artificial Sequence
  Description of Artificial Sequence: Synthetic oligonucleotide
  Sense strand starting at position 3369 of SEQ ID NO: 1882637
aacagcgaguuaucuuuaa

SEQ ID NO: 2136651 - RNA, 19 nt, Artificial Sequence
  Description of Artificial Sequence: Synthetic oligonucleotide
  Antisense strand to SEQ ID NO: 2136650
uuaaagauaacucgcuguu

SEQ ID NO: 2136652 - RNA, 19 nt, Artificial Sequence
  Description of Artificial Sequence: Synthetic oligonucleotide
  Sense strand starting at position 158 of SEQ ID NO: 1882638
gucuuaugaguccaucuaa

SEQ ID NO: 2136653 - RNA, 19 nt, Artificial Sequence
  Description of Artificial Sequence: Synthetic oligonucleotide
  Antisense strand to SEQ ID NO: 2136652
uuagauggacucauaagac

SEQ ID NO: 2136654 - RNA, 19 nt, Artificial Sequence
  Description of Artificial Sequence: Synthetic oligonucleotide
  Sense strand starting at position 219 of SEQ ID NO: 1882638
gggaaucucaagugguaaa

SEQ ID NO: 2136655 - RNA, 19 nt, Artificial Sequence
  Description of Artificial Sequence: Synthetic oligonucleotide
  Antisense strand to SEQ ID NO: 2136654
uuuaccacuugagauuccc

SEQ ID NO: 2136656 - RNA, 19 nt, Artificial Sequence
  Description of Artificial Sequence: Synthetic oligonucleotide
  Sense strand starting at position 220 of SEQ ID NO: 1882638
ggaaucucaagugguaaac

SEQ ID NO: 2136657 - RNA, 19 nt, Artificial Sequence
  Description of Artificial Sequence: Synthetic oligonucleotide
  Antisense strand to SEQ ID NO: 2136656
guuuaccacuugagauucc

SEQ ID NO: 2136658 - RNA, 19 nt, Artificial Sequence
  Description of Artificial Sequence: Synthetic oligonucleotide
  Sense strand starting at position 255 of SEQ ID NO: 1882638
ugagcugagcuaggaguua

SEQ ID NO: 2136659 - RNA, 19 nt, Artificial Sequence
  Description of Artificial Sequence: Synthetic oligonucleotide
  Antisense strand to SEQ ID NO: 2136658
uaacuccuagcucagcuca

SEQ ID NO: 2136660 - RNA, 19 nt, Artificial Sequence
  Description of Artificial Sequence: Synthetic oligonucleotide
  Sense strand starting at position 266 of SEQ ID NO: 1882638
aggaguuaacucggcaaga

SEQ ID NO: 2136661 - RNA, 19 nt, Artificial Sequence
  Description of Artificial Sequence: Synthetic oligonucleotide
  Antisense strand to SEQ ID NO: 2136660
ucuugccgaguuaacuccu

SEQ ID NO: 2136662 - RNA, 19 nt, Artificial Sequence
  Description of Artificial Sequence: Synthetic oligonucleotide
  Sense strand starting at position 267 of SEQ ID NO: 1882638
ggaguuaacucggcaagag

SEQ ID NO: 2136663 - RNA, 19 nt, Artificial Sequence
  Description of Artificial Sequence: Synthetic oligonucleotide
  Antisense strand to SEQ ID NO: 2136662
cucuugccgaguuaacucc

SEQ ID NO: 2136664 - RNA, 19 nt, Artificial Sequence
  Description of Artificial Sequence: Synthetic oligonucleotide
  Sense strand starting at position 268 of SEQ ID NO: 1882638
gaguuaacucggcaagagg

SEQ ID NO: 2136665 - RNA, 19 nt, Artificial Sequence
  Description of Artificial Sequence: Synthetic oligonucleotide
  Antisense strand to SEQ ID NO: 2136664
ccucuugccgaguuaacuc

SEQ ID NO: 2136666 - RNA, 19 nt, Artificial Sequence
  Description of Artificial Sequence: Synthetic oligonucleotide
  Sense strand starting at position 354 of SEQ ID NO: 1882638
gcgggcauccugggaaaga

SEQ ID NO: 2136667 - RNA, 19 nt, Artificial Sequence
  Description of Artificial Sequence: Synthetic oligonucleotide
  Antisense strand to SEQ ID NO: 2136666
ucuuucccaggaugcccgc

SEQ ID NO: 2136668 - RNA, 19 nt, Artificial Sequence
  Description of Artificial Sequence: Synthetic oligonucleotide
  Sense strand starting at position 696 of SEQ ID NO: 1882638
agcagaagcagagaguuua

SEQ ID NO: 2136669 - RNA, 19 nt, Artificial Sequence
  Description of Artificial Sequence: Synthetic oligonucleotide
  Antisense strand to SEQ ID NO: 2136668
uaaacucucugcuucugcu

SEQ ID NO: 2136670 - RNA, 19 nt, Artificial Sequence
  Description of Artificial Sequence: Synthetic oligonucleotide
  Sense strand starting at position 727 of SEQ ID NO: 1882638
uacagaguuccaggugaca

SEQ ID NO: 2136671 - RNA, 19 nt, Artificial Sequence
  Description of Artificial Sequence: Synthetic oligonucleotide
  Antisense strand to SEQ ID NO: 2136670
ugucaccuggaacucugua

SEQ ID NO: 2136672 - RNA, 19 nt, Artificial Sequence
  Description of Artificial Sequence: Synthetic oligonucleotide
  Sense strand starting at position 809 of SEQ ID NO: 1882638
guguaccuguucuuagguu

SEQ ID NO: 2136673 - RNA, 19 nt, Artificial Sequence
  Description of Artificial Sequence: Synthetic oligonucleotide
  Antisense strand to SEQ ID NO: 2136672
aaccuaagaacagguacac

SEQ ID NO: 2136674 - RNA, 19 nt, Artificial Sequence
  Description of Artificial Sequence: Synthetic oligonucleotide
  Sense strand starting at position 937 of SEQ ID NO: 1882638
gaaggaacuucccucuugu

SEQ ID NO: 2136675 - RNA, 19 nt, Artificial Sequence
  Description of Artificial Sequence: Synthetic oligonucleotide
  Antisense strand to SEQ ID NO: 2136674
acaagagggaaguuccuuc

SEQ ID NO: 2136676 - RNA, 19 nt, Artificial Sequence
  Description of Artificial Sequence: Synthetic oligonucleotide
  Sense strand starting at position 1056 of SEQ ID NO: 1882638
gguaacaucuacuugaacu

SEQ ID NO: 2136677 - RNA, 19 nt, Artificial Sequence
  Description of Artificial Sequence: Synthetic oligonucleotide
  Antisense strand to SEQ ID NO: 2136676
aguucaaguagauguuacc

SEQ ID NO: 2136678 - RNA, 19 nt, Artificial Sequence
  Description of Artificial Sequence: Synthetic oligonucleotide
  Sense strand starting at position 1226 of SEQ ID NO: 1882638
aguaguaauuggcuauaca

SEQ ID NO: 2136679 - RNA, 19 nt, Artificial Sequence
  Description of Artificial Sequence: Synthetic oligonucleotide
  Antisense strand to SEQ ID NO: 2136678
uguauagccaauuacuacu

SEQ ID NO: 2136680 - RNA, 19 nt, Artificial Sequence
  Description of Artificial Sequence: Synthetic oligonucleotide
  Sense strand starting at position 1227 of SEQ ID NO: 1882638
guaguaauuggcuauacaa

SEQ ID NO: 2136681 - RNA, 19 nt, Artificial Sequence
  Description of Artificial Sequence: Synthetic oligonucleotide
  Antisense strand to SEQ ID NO: 2136680
uuguauagccaauuacuac

SEQ ID NO: 2136682 - RNA, 19 nt, Artificial Sequence
  Description of Artificial Sequence: Synthetic oligonucleotide
  Sense strand starting at position 1253 of SEQ ID NO: 1882638
gacgaaguuggcugugaaa

SEQ ID NO: 2136683 - RNA, 19 nt, Artificial Sequence
  Description of Artificial Sequence: Synthetic oligonucleotide
  Antisense strand to SEQ ID NO: 2136682
uuucacagccaacuucguc

SEQ ID NO: 2136684 - RNA, 19 nt, Artificial Sequence
  Description of Artificial Sequence: Synthetic oligonucleotide
  Sense strand starting at position 1255 of SEQ ID NO: 1882638
cgaaguuggcugugaaagu

SEQ ID NO: 2136685 - RNA, 19 nt, Artificial Sequence
  Description of Artificial Sequence: Synthetic oligonucleotide
  Antisense strand to SEQ ID NO: 2136684
acuuucacagccaacuucg

SEQ ID NO: 2136686 - RNA, 19 nt, Artificial Sequence
  Description of Artificial Sequence: Synthetic oligonucleotide
  Sense strand starting at position 1269 of SEQ ID NO: 1882638
aaaguuuaaugugaugacu

SEQ ID NO: 2136687 - RNA, 19 nt, Artificial Sequence
  Description of Artificial Sequence: Synthetic oligonucleotide
  Antisense strand to SEQ ID NO: 2136686
agucaucacauuaaacuuu

SEQ ID NO: 2136688 - RNA, 19 nt, Artificial Sequence
  Description of Artificial Sequence: Synthetic oligonucleotide
  Sense strand starting at position 1277 of SEQ ID NO: 1882638
augugaugacuccgauaca

SEQ ID NO: 2136689 - RNA, 19 nt, Artificial Sequence
  Description of Artificial Sequence: Synthetic oligonucleotide
  Antisense strand to SEQ ID NO: 2136688
uguaucggagucaucacau

SEQ ID NO: 2136690 - RNA, 19 nt, Artificial Sequence
  Description of Artificial Sequence: Synthetic oligonucleotide
  Sense strand starting at position 1287 of SEQ ID NO: 1882638
uccgauacacaccgauaua

SEQ ID NO: 2136691 - RNA, 19 nt, Artificial Sequence
  Description of Artificial Sequence: Synthetic oligonucleotide
  Antisense strand to SEQ ID NO: 2136690
uauaucgguguguaucgga

SEQ ID NO: 2136692 - RNA, 19 nt, Artificial Sequence
  Description of Artificial Sequence: Synthetic oligonucleotide
  Sense strand starting at position 1299 of SEQ ID NO: 1882638
cgauauaguauguaucgga

SEQ ID NO: 2136693 - RNA, 19 nt, Artificial Sequence
  Description of Artificial Sequence: Synthetic oligonucleotide
  Antisense strand to SEQ ID NO: 2136692
uccgauacauacuauaucg

SEQ ID NO: 2136694 - RNA, 19 nt, Artificial Sequence
  Description of Artificial Sequence: Synthetic oligonucleotide
  Sense strand starting at position 1303 of SEQ ID NO: 1882638
auaguauguaucggaguuc

SEQ ID NO: 2136695 - RNA, 19 nt, Artificial Sequence
  Description of Artificial Sequence: Synthetic oligonucleotide
  Antisense strand to SEQ ID NO: 2136694
gaacuccgauacauacuau

SEQ ID NO: 2136696 - RNA, 19 nt, Artificial Sequence
  Description of Artificial Sequence: Synthetic oligonucleotide
  Sense strand starting at position 1312 of SEQ ID NO: 1882638
aucggaguuccggauacua

SEQ ID NO: 2136697 - RNA, 19 nt, Artificial Sequence
  Description of Artificial Sequence: Synthetic oligonucleotide
  Antisense strand to SEQ ID NO: 2136696
uaguauccggaacuccgau

SEQ ID NO: 2136698 - RNA, 19 nt, Artificial Sequence
  Description of Artificial Sequence: Synthetic oligonucleotide
  Sense strand starting at position 1314 of SEQ ID NO: 1882638
cggaguuccggauacuaaa

SEQ ID NO: 2136699 - RNA, 19 nt, Artificial Sequence
  Description of Artificial Sequence: Synthetic oligonucleotide
  Antisense strand to SEQ ID NO: 2136698
uuuaguauccggaacuccg

SEQ ID NO: 2136700 - RNA, 19 nt, Artificial Sequence
  Description of Artificial Sequence: Synthetic oligonucleotide
  Sense strand starting at position 1345 of SEQ ID NO: 1882638
cggcaucuuccaugaacau

SEQ ID NO: 2136701 - RNA, 19 nt, Artificial Sequence
  Description of Artificial Sequence: Synthetic oligonucleotide
  Antisense strand to SEQ ID NO: 2136700
auguucauggaagaugccg

SEQ ID NO: 2136702 - RNA, 19 nt, Artificial Sequence
  Description of Artificial Sequence: Synthetic oligonucleotide
  Sense strand starting at position 1346 of SEQ ID NO: 1882638
ggcaucuuccaugaacauu

SEQ ID NO: 2136703 - RNA, 19 nt, Artificial Sequence
  Description of Artificial Sequence: Synthetic oligonucleotide
  Antisense strand to SEQ ID NO: 2136702
aauguucauggaagaugcc

SEQ ID NO: 2136704 - RNA, 19 nt, Artificial Sequence
  Description of Artificial Sequence: Synthetic oligonucleotide
  Sense strand starting at position 1508 of SEQ ID NO: 1882638
gcuacuuggaagugagaaa

SEQ ID NO: 2136705 - RNA, 19 nt, Artificial Sequence
  Description of Artificial Sequence: Synthetic oligonucleotide
  Antisense strand to SEQ ID NO: 2136704
uuucucacuuccaaguagc

SEQ ID NO: 2136706 - RNA, 19 nt, Artificial Sequence
  Description of Artificial Sequence: Synthetic oligonucleotide
  Sense strand starting at position 1727 of SEQ ID NO: 1882638
caggcuugcucccuugaca

SEQ ID NO: 2136707 - RNA, 19 nt, Artificial Sequence
  Description of Artificial Sequence: Synthetic oligonucleotide
  Antisense strand to SEQ ID NO: 2136706
ugucaagggagcaagccug

SEQ ID NO: 2136708 - RNA, 19 nt, Artificial Sequence
  Description of Artificial Sequence: Synthetic oligonucleotide
  Sense strand starting at position 1730 of SEQ ID NO: 1882638
gcuugcucccuugacagau

SEQ ID NO: 2136709 - RNA, 19 nt, Artificial Sequence
  Description of Artificial Sequence: Synthetic oligonucleotide
  Antisense strand to SEQ ID NO: 2136708
aucugucaagggagcaagc

SEQ ID NO: 2136710 - RNA, 19 nt, Artificial Sequence
  Description of Artificial Sequence: Synthetic oligonucleotide
  Sense strand starting at position 1824 of SEQ ID NO: 1882638
cagggcuacucgcuauuau

SEQ ID NO: 2136711 - RNA, 19 nt, Artificial Sequence
  Description of Artificial Sequence: Synthetic oligonucleotide
  Antisense strand to SEQ ID NO: 2136710
auaauagcgaguagcccug

SEQ ID NO: 2136712 - RNA, 19 nt, Artificial Sequence
  Description of Artificial Sequence: Synthetic oligonucleotide
  Sense strand starting at position 1825 of SEQ ID NO: 1882638
agggcuacucgcuauuauc

SEQ ID NO: 2136713 - RNA, 19 nt, Artificial Sequence
  Description of Artificial Sequence: Synthetic oligonucleotide
  Antisense strand to SEQ ID NO: 2136712
gauaauagcgaguagcccu

SEQ ID NO: 2136714 - RNA, 19 nt, Artificial Sequence
  Description of Artificial Sequence: Synthetic oligonucleotide
  Sense strand starting at position 2628 of SEQ ID NO: 1882638
cugguucucuucccugaga

SEQ ID NO: 2136715 - RNA, 19 nt, Artificial Sequence
  Description of Artificial Sequence: Synthetic oligonucleotide
  Antisense strand to SEQ ID NO: 2136714
ucucagggaagagaaccag

SEQ ID NO: 2136716 - RNA, 19 nt, Artificial Sequence
  Description of Artificial Sequence: Synthetic oligonucleotide
  Sense strand starting at position 2630 of SEQ ID NO: 1882638
gguucucuucccugagagu

SEQ ID NO: 2136717 - RNA, 19 nt, Artificial Sequence
  Description of Artificial Sequence: Synthetic oligonucleotide
  Antisense strand to SEQ ID NO: 2136716
acucucagggaagagaacc

SEQ ID NO: 2136718 - RNA, 19 nt, Artificial Sequence
  Description of Artificial Sequence: Synthetic oligonucleotide
  Sense strand starting at position 2631 of SEQ ID NO: 1882638
guucucuucccugagaguu

SEQ ID NO: 2136719 - RNA, 19 nt, Artificial Sequence
  Description of Artificial Sequence: Synthetic oligonucleotide
  Antisense strand to SEQ ID NO: 2136718
aacucucagggaagagaac

SEQ ID NO: 2136720 - RNA, 19 nt, Artificial Sequence
  Description of Artificial Sequence: Synthetic oligonucleotide
  Sense strand starting at position 2973 of SEQ ID NO: 1882638
gcugccgucagcuaugaua

SEQ ID NO: 2136721 - RNA, 19 nt, Artificial Sequence
  Description of Artificial Sequence: Synthetic oligonucleotide
  Antisense strand to SEQ ID NO: 2136720
uaucauagcugacggcagc

SEQ ID NO: 2136722 - RNA, 19 nt, Artificial Sequence
  Description of Artificial Sequence: Synthetic oligonucleotide
  Sense strand starting at position 2975 of SEQ ID NO: 1882638
ugccgucagcuaugauaug

SEQ ID NO: 2136723 - RNA, 19 nt, Artificial Sequence
  Description of Artificial Sequence: Synthetic oligonucleotide
  Antisense strand to SEQ ID NO: 2136722
cauaucauagcugacggca

SEQ ID NO: 2136724 - RNA, 19 nt, Artificial Sequence
  Description of Artificial Sequence: Synthetic oligonucleotide
  Sense strand starting at position 3102 of SEQ ID NO: 1882638
gugcaagacucuguaccua

SEQ ID NO: 2136725 - RNA, 19 nt, Artificial Sequence
  Description of Artificial Sequence: Synthetic oligonucleotide
  Antisense strand to SEQ ID NO: 2136724
uagguacagagucuugcac

SEQ ID NO: 2136726 - RNA, 19 nt, Artificial Sequence
  Description of Artificial Sequence: Synthetic oligonucleotide
  Sense strand starting at position 3153 of SEQ ID NO: 1882638
gagcuuccaguuuguuuau

SEQ ID NO: 2136727 - RNA, 19 nt, Artificial Sequence
  Description of Artificial Sequence: Synthetic oligonucleotide
  Antisense strand to SEQ ID NO: 2136726
auaaacaaacuggaagcuc

SEQ ID NO: 2136728 - RNA, 19 nt, Artificial Sequence
  Description of Artificial Sequence: Synthetic oligonucleotide
  Sense strand starting at position 3155 of SEQ ID NO: 1882638
gcuuccaguuuguuuauuu

SEQ ID NO: 2136729 - RNA, 19 nt, Artificial Sequence
  Description of Artificial Sequence: Synthetic oligonucleotide
  Antisense strand to SEQ ID NO: 2136728
aaauaaacaaacuggaagc

SEQ ID NO: 2136730 - RNA, 19 nt, Artificial Sequence
  Description of Artificial Sequence: Synthetic oligonucleotide
  Sense strand starting at position 3584 of SEQ ID NO: 1882638
gauuauagucguccgccau

SEQ ID NO: 2136731 - RNA, 19 nt, Artificial Sequence
  Description of Artificial Sequence: Synthetic oligonucleotide
  Antisense strand to SEQ ID NO: 2136730
auggcggacgacuauaauc

SEQ ID NO: 2136732 - RNA, 19 nt, Artificial Sequence
  Description of Artificial Sequence: Synthetic oligonucleotide
  Sense strand starting at position 12 of SEQ ID NO: 1882639
ccugaugguugauccuuua

SEQ ID NO: 2136733 - RNA, 19 nt, Artificial Sequence
  Description of Artificial Sequence: Synthetic oligonucleotide
  Antisense strand to SEQ ID NO: 2136732
uaaaggaucaaccaucagg

SEQ ID NO: 2136734 - RNA, 19 nt, Artificial Sequence
  Description of Artificial Sequence: Synthetic oligonucleotide
  Sense strand starting at position 15 of SEQ ID NO: 1882639
gaugguugauccuuuaauc

SEQ ID NO: 2136735 - RNA, 19 nt, Artificial Sequence
  Description of Artificial Sequence: Synthetic oligonucleotide
  Antisense strand to SEQ ID NO: 2136734
gauuaaaggaucaaccauc

SEQ ID NO: 2136736 - RNA, 19 nt, Artificial Sequence
  Description of Artificial Sequence: Synthetic oligonucleotide
  Sense strand starting at position 113 of SEQ ID NO: 1882639
uggaaaugcuguuaaauuu

SEQ ID NO: 2136737 - RNA, 19 nt, Artificial Sequence
  Description of Artificial Sequence: Synthetic oligonucleotide
  Antisense strand to SEQ ID NO: 2136736
aaauuuaacagcauuucca

SEQ ID NO: 2136738 - RNA, 19 nt, Artificial Sequence
  Description of Artificial Sequence: Synthetic oligonucleotide
  Sense strand starting at position 2613 of SEQ ID NO: 1882639
agagguauccuuuaaucuu

SEQ ID NO: 2136739 - RNA, 19 nt, Artificial Sequence
  Description of Artificial Sequence: Synthetic oligonucleotide
  Antisense strand to SEQ ID NO: 2136738
aagauuaaaggauaccucu

SEQ ID NO: 2136740 - RNA, 19 nt, Artificial Sequence
  Description of Artificial Sequence: Synthetic oligonucleotide
  Sense strand starting at position 2625 of SEQ ID NO: 1882639
uaaucuuucuaggacaggu

SEQ ID NO: 2136741 - RNA, 19 nt, Artificial Sequence
  Description of Artificial Sequence: Synthetic oligonucleotide
  Antisense strand to SEQ ID NO: 2136740
accuguccuagaaagauua

SEQ ID NO: 2136742 - RNA, 19 nt, Artificial Sequence
  Description of Artificial Sequence: Synthetic oligonucleotide
  Sense strand starting at position 2919 of SEQ ID NO: 1882639
agagcaagcuccuaucuca

SEQ ID NO: 2136743 - RNA, 19 nt, Artificial Sequence
  Description of Artificial Sequence: Synthetic oligonucleotide
  Antisense strand to SEQ ID NO: 2136742
ugagauaggagcuugcucu

SEQ ID NO: 2136744 - RNA, 19 nt, Artificial Sequence
  Description of Artificial Sequence: Synthetic oligonucleotide
  Sense strand starting at position 2955 of SEQ ID NO: 1882639
agauaaucuuucuaggacu

SEQ ID NO: 2136745 - RNA, 19 nt, Artificial Sequence
  Description of Artificial Sequence: Synthetic oligonucleotide
  Antisense strand to SEQ ID NO: 2136744
aguccuagaaagauuaucu

SEQ ID NO: 2136746 - RNA, 19 nt, Artificial Sequence
  Description of Artificial Sequence: Synthetic oligonucleotide
  Sense strand starting at position 3018 of SEQ ID NO: 1882639
ggcucugagucuuccuguu

SEQ ID NO: 2136747 - RNA, 19 nt, Artificial Sequence
  Description of Artificial Sequence: Synthetic oligonucleotide
  Antisense strand to SEQ ID NO: 2136746
aacaggaagacucagagcc

SEQ ID NO: 2136748 - RNA, 19 nt, Artificial Sequence
  Description of Artificial Sequence: Synthetic oligonucleotide
  Sense strand starting at position 3061 of SEQ ID NO: 1882639
ggaggucauucuguaucau

SEQ ID NO: 2136749 - RNA, 19 nt, Artificial Sequence
  Description of Artificial Sequence: Synthetic oligonucleotide
  Antisense strand to SEQ ID NO: 2136748
augauacagaaugaccucc

SEQ ID NO: 2136750 - RNA, 19 nt, Artificial Sequence
  Description of Artificial Sequence: Synthetic oligonucleotide
  Sense strand starting at position 3062 of SEQ ID NO: 1882639
gaggucauucuguaucaug

SEQ ID NO: 2136751 - RNA, 19 nt, Artificial Sequence
  Description of Artificial Sequence: Synthetic oligonucleotide
  Antisense strand to SEQ ID NO: 2136750
caugauacagaaugaccuc

SEQ ID NO: 2136752 - RNA, 19 nt, Artificial Sequence
  Description of Artificial Sequence: Synthetic oligonucleotide
  Sense strand starting at position 3072 of SEQ ID NO: 1882639
uguaucaugucacuugcuu

SEQ ID NO: 2136753 - RNA, 19 nt, Artificial Sequence
  Description of Artificial Sequence: Synthetic oligonucleotide
  Antisense strand to SEQ ID NO: 2136752
aagcaagugacaugauaca

SEQ ID NO: 2136754 - RNA, 19 nt, Artificial Sequence
  Description of Artificial Sequence: Synthetic oligonucleotide
  Sense strand starting at position 3101 of SEQ ID NO: 1882639
acccauggaugaugaaaca

SEQ ID NO: 2136755 - RNA, 19 nt, Artificial Sequence
  Description of Artificial Sequence: Synthetic oligonucleotide
  Antisense strand to SEQ ID NO: 2136754
uguuucaucauccaugggu

SEQ ID NO: 2136756 - RNA, 19 nt, Artificial Sequence
  Description of Artificial Sequence: Synthetic oligonucleotide
  Sense strand starting at position 3149 of SEQ ID NO: 1882639
gagagagucucgcuuccca

SEQ ID NO: 2136757 - RNA, 19 nt, Artificial Sequence
  Description of Artificial Sequence: Synthetic oligonucleotide
  Antisense strand to SEQ ID NO: 2136756
ugggaagcgagacucucuc

SEQ ID NO: 2136758 - RNA, 19 nt, Artificial Sequence
  Description of Artificial Sequence: Synthetic oligonucleotide
  Sense strand starting at position 3170 of SEQ ID NO: 1882639
ccaucuggcuuacugugaa

SEQ ID NO: 2136759 - RNA, 19 nt, Artificial Sequence
  Description of Artificial Sequence: Synthetic oligonucleotide
  Antisense strand to SEQ ID NO: 2136758
uucacaguaagccagaugg

SEQ ID NO: 2136760 - RNA, 19 nt, Artificial Sequence
  Description of Artificial Sequence: Synthetic oligonucleotide
  Sense strand starting at position 3361 of SEQ ID NO: 1882639
gagugcagguguuguguuu

SEQ ID NO: 2136761 - RNA, 19 nt, Artificial Sequence
  Description of Artificial Sequence: Synthetic oligonucleotide
  Antisense strand to SEQ ID NO: 2136760
aaacacaacaccugcacuc

SEQ ID NO: 2136762 - RNA, 19 nt, Artificial Sequence
  Description of Artificial Sequence: Synthetic oligonucleotide
  Sense strand starting at position 3372 of SEQ ID NO: 1882639
uuguguuucucucugacau

SEQ ID NO: 2136763 - RNA, 19 nt, Artificial Sequence
  Description of Artificial Sequence: Synthetic oligonucleotide
  Antisense strand to SEQ ID NO: 2136762
augucagagagaaacacaa

SEQ ID NO: 2136764 - RNA, 19 nt, Artificial Sequence
  Description of Artificial Sequence: Synthetic oligonucleotide
  Sense strand starting at position 3373 of SEQ ID NO: 1882639
uguguuucucucugacaug

SEQ ID NO: 2136765 - RNA, 19 nt, Artificial Sequence
  Description of Artificial Sequence: Synthetic oligonucleotide
  Antisense strand to SEQ ID NO: 2136764
caugucagagagaaacaca

SEQ ID NO: 2136766 - RNA, 19 nt, Artificial Sequence
  Description of Artificial Sequence: Synthetic oligonucleotide
  Sense strand starting at position 3374 of SEQ ID NO: 1882639
guguuucucucugacaugu

SEQ ID NO: 2136767 - RNA, 19 nt, Artificial Sequence
  Description of Artificial Sequence: Synthetic oligonucleotide
  Antisense strand to SEQ ID NO: 2136766
acaugucagagagaaacac

SEQ ID NO: 2136768 - RNA, 19 nt, Artificial Sequence
  Description of Artificial Sequence: Synthetic oligonucleotide
  Sense strand starting at position 3376 of SEQ ID NO: 1882639
guuucucucugacauguaa

SEQ ID NO: 2136769 - RNA, 19 nt, Artificial Sequence
  Description of Artificial Sequence: Synthetic oligonucleotide
  Antisense strand to SEQ ID NO: 2136768
uuacaugucagagagaaac

SEQ ID NO: 2136770 - RNA, 19 nt, Artificial Sequence
  Description of Artificial Sequence: Synthetic oligonucleotide
  Sense strand starting at position 3391 of SEQ ID NO: 1882639
guaaacauaugucuuucua

SEQ ID NO: 2136771 - RNA, 19 nt, Artificial Sequence
  Description of Artificial Sequence: Synthetic oligonucleotide
  Antisense strand to SEQ ID NO: 2136770
uagaaagacauauguuuac

SEQ ID NO: 2136772 - RNA, 19 nt, Artificial Sequence
  Description of Artificial Sequence: Synthetic oligonucleotide
  Sense strand starting at position 3395 of SEQ ID NO: 1882639
acauaugucuuucuagaca

SEQ ID NO: 2136773 - RNA, 19 nt, Artificial Sequence
  Description of Artificial Sequence: Synthetic oligonucleotide
  Antisense strand to SEQ ID NO: 2136772
ugucuagaaagacauaugu

SEQ ID NO: 2136774 - RNA, 19 nt, Artificial Sequence
  Description of Artificial Sequence: Synthetic oligonucleotide
  Sense strand starting at position 3579 of SEQ ID NO: 1882639
ggaagcagcuucuuuggua

SEQ ID NO: 2136775 - RNA, 19 nt, Artificial Sequence
  Description of Artificial Sequence: Synthetic oligonucleotide
  Antisense strand to SEQ ID NO: 2136774
uaccaaagaagcugcuucc

SEQ ID NO: 2136776 - RNA, 19 nt, Artificial Sequence
  Description of Artificial Sequence: Synthetic oligonucleotide
  Sense strand starting at position 3582 of SEQ ID NO: 1882639
agcagcuucuuugguacau

SEQ ID NO: 2136777 - RNA, 19 nt, Artificial Sequence
  Description of Artificial Sequence: Synthetic oligonucleotide
  Antisense strand to SEQ ID NO: 2136776
auguaccaaagaagcugcu

SEQ ID NO: 2136778 - RNA, 19 nt, Artificial Sequence
  Description of Artificial Sequence: Synthetic oligonucleotide
  Sense strand starting at position 3592 of SEQ ID NO: 1882639
uugguacaugcagaaaguu

SEQ ID NO: 2136779 - RNA, 19 nt, Artificial Sequence
  Description of Artificial Sequence: Synthetic oligonucleotide
  Antisense strand to SEQ ID NO: 2136778
aacuuucugcauguaccaa

SEQ ID NO: 2136780 - RNA, 19 nt, Artificial Sequence
  Description of Artificial Sequence: Synthetic oligonucleotide
  Sense strand starting at position 3600 of SEQ ID NO: 1882639
ugcagaaaguucuagaaag

SEQ ID NO: 2136781 - RNA, 19 nt, Artificial Sequence
  Description of Artificial Sequence: Synthetic oligonucleotide
  Antisense strand to SEQ ID NO: 2136780
cuuucuagaacuuucugca

SEQ ID NO: 2136782 - RNA, 19 nt, Artificial Sequence
  Description of Artificial Sequence: Synthetic oligonucleotide
  Sense strand starting at position 3626 of SEQ ID NO: 1882639
ggcuuagaauccuagcucu

SEQ ID NO: 2136783 - RNA, 19 nt, Artificial Sequence
  Description of Artificial Sequence: Synthetic oligonucleotide
  Antisense strand to SEQ ID NO: 2136782
agagcuaggauucuaagcc

SEQ ID NO: 2136784 - RNA, 19 nt, Artificial Sequence
  Description of Artificial Sequence: Synthetic oligonucleotide
  Sense strand starting at position 3794 of SEQ ID NO: 1882639
gcaagugcuuacuuaguau

SEQ ID NO: 2136785 - RNA, 19 nt, Artificial Sequence
  Description of Artificial Sequence: Synthetic oligonucleotide
  Antisense strand to SEQ ID NO: 2136784
auacuaaguaagcacuugc

SEQ ID NO: 2136786 - RNA, 19 nt, Artificial Sequence
  Description of Artificial Sequence: Synthetic oligonucleotide
  Sense strand starting at position 3798 of SEQ ID NO: 1882639
gugcuuacuuaguauuugu

SEQ ID NO: 2136787 - RNA, 19 nt, Artificial Sequence
  Description of Artificial Sequence: Synthetic oligonucleotide
  Antisense strand to SEQ ID NO: 2136786
acaaauacuaaguaagcac

SEQ ID NO: 2136788 - RNA, 19 nt, Artificial Sequence
  Description of Artificial Sequence: Synthetic oligonucleotide
  Sense strand starting at position 3808 of SEQ ID NO: 1882639
aguauuuguugguuccuga

SEQ ID NO: 2136789 - RNA, 19 nt, Artificial Sequence
  Description of Artificial Sequence: Synthetic oligonucleotide
  Antisense strand to SEQ ID NO: 2136788
ucaggaaccaacaaauacu

SEQ ID NO: 2136790 - RNA, 19 nt, Artificial Sequence
  Description of Artificial Sequence: Synthetic oligonucleotide
  Sense strand starting at position 3812 of SEQ ID NO: 1882639
uuuguugguuccugauaca

SEQ ID NO: 2136791 - RNA, 19 nt, Artificial Sequence
  Description of Artificial Sequence: Synthetic oligonucleotide
  Antisense strand to SEQ ID NO: 2136790
uguaucaggaaccaacaaa

SEQ ID NO: 2136792 - RNA, 19 nt, Artificial Sequence
  Description of Artificial Sequence: Synthetic oligonucleotide
  Sense strand starting at position 3815 of SEQ ID NO: 1882639
guugguuccugauacacag

SEQ ID NO: 2136793 - RNA, 19 nt, Artificial Sequence
  Description of Artificial Sequence: Synthetic oligonucleotide
  Antisense strand to SEQ ID NO: 2136792
cuguguaucaggaaccaac

SEQ ID NO: 2136794 - RNA, 19 nt, Artificial Sequence
  Description of Artificial Sequence: Synthetic oligonucleotide
  Sense strand starting at position 3832 of SEQ ID NO: 1882639
agaaaucucugugauccaa

SEQ ID NO: 2136795 - RNA, 19 nt, Artificial Sequence
  Description of Artificial Sequence: Synthetic oligonucleotide
  Antisense strand to SEQ ID NO: 2136794
uuggaucacagagauuucu

SEQ ID NO: 2136796 - RNA, 19 nt, Artificial Sequence
  Description of Artificial Sequence: Synthetic oligonucleotide
  Sense strand starting at position 3840 of SEQ ID NO: 1882639
cugugauccaagcaguguu

SEQ ID NO: 2136797 - RNA, 19 nt, Artificial Sequence
  Description of Artificial Sequence: Synthetic oligonucleotide
  Antisense strand to SEQ ID NO: 2136796
aacacugcuuggaucacag

SEQ ID NO: 2136798 - RNA, 19 nt, Artificial Sequence
  Description of Artificial Sequence: Synthetic oligonucleotide
  Sense strand starting at position 3850 of SEQ ID NO: 1882639
agcaguguuucucccauag

SEQ ID NO: 2136799 - RNA, 19 nt, Artificial Sequence
  Description of Artificial Sequence: Synthetic oligonucleotide
  Antisense strand to SEQ ID NO: 2136798
cuaugggagaaacacugcu

SEQ ID NO: 2136800 - RNA, 19 nt, Artificial Sequence
  Description of Artificial Sequence: Synthetic oligonucleotide
  Sense strand starting at position 3852 of SEQ ID NO: 1882639
caguguuucucccauagga

SEQ ID NO: 2136801 - RNA, 19 nt, Artificial Sequence
  Description of Artificial Sequence: Synthetic oligonucleotide
  Antisense strand to SEQ ID NO: 2136800
uccuaugggagaaacacug

SEQ ID NO: 2136802 - RNA, 19 nt, Artificial Sequence
  Description of Artificial Sequence: Synthetic oligonucleotide
  Sense strand starting at position 3854 of SEQ ID NO: 1882639
guguuucucccauaggacu

SEQ ID NO: 2136803 - RNA, 19 nt, Artificial Sequence
  Description of Artificial Sequence: Synthetic oligonucleotide
  Antisense strand to SEQ ID NO: 2136802
aguccuaugggagaaacac

SEQ ID NO: 2136804 - RNA, 19 nt, Artificial Sequence
  Description of Artificial Sequence: Synthetic oligonucleotide
  Sense strand starting at position 3909 of SEQ ID NO: 1882639
gcucgcuaacugugaaacu

SEQ ID NO: 2136805 - RNA, 19 nt, Artificial Sequence
  Description of Artificial Sequence: Synthetic oligonucleotide
  Antisense strand to SEQ ID NO: 2136804
aguuucacaguuagcgagc

SEQ ID NO: 2136806 - RNA, 19 nt, Artificial Sequence
  Description of Artificial Sequence: Synthetic oligonucleotide
  Sense strand starting at position 3932 of SEQ ID NO: 1882639
cggacauccugugaucacu

SEQ ID NO: 2136807 - RNA, 19 nt, Artificial Sequence
  Description of Artificial Sequence: Synthetic oligonucleotide
  Antisense strand to SEQ ID NO: 2136806
agugaucacaggauguccg

SEQ ID NO: 2136808 - RNA, 19 nt, Artificial Sequence
  Description of Artificial Sequence: Synthetic oligonucleotide
  Sense strand starting at position 3940 of SEQ ID NO: 1882639
cugugaucacuccaacgcu

SEQ ID NO: 2136809 - RNA, 19 nt, Artificial Sequence
  Description of Artificial Sequence: Synthetic oligonucleotide
  Antisense strand to SEQ ID NO: 2136808
agcguuggagugaucacag

SEQ ID NO: 2136810 - RNA, 19 nt, Artificial Sequence
  Description of Artificial Sequence: Synthetic oligonucleotide
  Sense strand starting at position 3943 of SEQ ID NO: 1882639
ugaucacuccaacgcuuua

SEQ ID NO: 2136811 - RNA, 19 nt, Artificial Sequence
  Description of Artificial Sequence: Synthetic oligonucleotide
  Antisense strand to SEQ ID NO: 2136810
uaaagcguuggagugauca

SEQ ID NO: 2136812 - RNA, 19 nt, Artificial Sequence
  Description of Artificial Sequence: Synthetic oligonucleotide
  Sense strand starting at position 20 of SEQ ID NO: 1882640
uuaugaaucuguuucuaga

SEQ ID NO: 2136813 - RNA, 19 nt, Artificial Sequence
  Description of Artificial Sequence: Synthetic oligonucleotide
  Antisense strand to SEQ ID NO: 2136812
ucuagaaacagauucauaa

SEQ ID NO: 2136814 - RNA, 19 nt, Artificial Sequence
  Description of Artificial Sequence: Synthetic oligonucleotide
  Sense strand starting at position 22 of SEQ ID NO: 1882640
augaaucuguuucuagaaa

SEQ ID NO: 2136815 - RNA, 19 nt, Artificial Sequence
  Description of Artificial Sequence: Synthetic oligonucleotide
  Antisense strand to SEQ ID NO: 2136814
uuucuagaaacagauucau

SEQ ID NO: 2136816 - RNA, 19 nt, Artificial Sequence
  Description of Artificial Sequence: Synthetic oligonucleotide
  Sense strand starting at position 67 of SEQ ID NO: 1882640
uuucuagguagauguuaga

SEQ ID NO: 2136817 - RNA, 19 nt, Artificial Sequence
  Description of Artificial Sequence: Synthetic oligonucleotide
  Antisense strand to SEQ ID NO: 2136816
ucuaacaucuaccuagaaa

SEQ ID NO: 2136818 - RNA, 19 nt, Artificial Sequence
  Description of Artificial Sequence: Synthetic oligonucleotide
  Sense strand starting at position 186 of SEQ ID NO: 1882640
gcugcuauccucgaggaac

SEQ ID NO: 2136819 - RNA, 19 nt, Artificial Sequence
  Description of Artificial Sequence: Synthetic oligonucleotide
  Antisense strand to SEQ ID NO: 2136818
guuccucgaggauagcagc

SEQ ID NO: 2136820 - RNA, 19 nt, Artificial Sequence
  Description of Artificial Sequence: Synthetic oligonucleotide
  Sense strand starting at position 294 of SEQ ID NO: 1882640
cccaauuauguguaugcau

SEQ ID NO: 2136821 - RNA, 19 nt, Artificial Sequence
  Description of Artificial Sequence: Synthetic oligonucleotide
  Antisense strand to SEQ ID NO: 2136820
augcauacacauaauuggg

SEQ ID NO: 2136822 - RNA, 19 nt, Artificial Sequence
  Description of Artificial Sequence: Synthetic oligonucleotide
  Sense strand starting at position 332 of SEQ ID NO: 1882640
ucacauguuccaggagguu

SEQ ID NO: 2136823 - RNA, 19 nt, Artificial Sequence
  Description of Artificial Sequence: Synthetic oligonucleotide
  Antisense strand to SEQ ID NO: 2136822
aaccuccuggaacauguga

SEQ ID NO: 2136824 - RNA, 19 nt, Artificial Sequence
  Description of Artificial Sequence: Synthetic oligonucleotide
  Sense strand starting at position 378 of SEQ ID NO: 1882640
ggguuucuuccgcaugaua

SEQ ID NO: 2136825 - RNA, 19 nt, Artificial Sequence
  Description of Artificial Sequence: Synthetic oligonucleotide
  Antisense strand to SEQ ID NO: 2136824
uaucaugcggaagaaaccc

SEQ ID NO: 2136826 - RNA, 19 nt, Artificial Sequence
  Description of Artificial Sequence: Synthetic oligonucleotide
  Sense strand starting at position 381 of SEQ ID NO: 1882640
uuucuuccgcaugauacua

SEQ ID NO: 2136827 - RNA, 19 nt, Artificial Sequence
  Description of Artificial Sequence: Synthetic oligonucleotide
  Antisense strand to SEQ ID NO: 2136826
uaguaucaugcggaagaaa

SEQ ID NO: 2136828 - RNA, 19 nt, Artificial Sequence
  Description of Artificial Sequence: Synthetic oligonucleotide
  Sense strand starting at position 389 of SEQ ID NO: 1882640
gcaugauacuauguuauaa

SEQ ID NO: 2136829 - RNA, 19 nt, Artificial Sequence
  Description of Artificial Sequence: Synthetic oligonucleotide
  Antisense strand to SEQ ID NO: 2136828
uuauaacauaguaucaugc

SEQ ID NO: 2136830 - RNA, 19 nt, Artificial Sequence
  Description of Artificial Sequence: Synthetic oligonucleotide
  Sense strand starting at position 464 of SEQ ID NO: 1882640
uuacuacuugcuugaacag

SEQ ID NO: 2136831 - RNA, 19 nt, Artificial Sequence
  Description of Artificial Sequence: Synthetic oligonucleotide
  Antisense strand to SEQ ID NO: 2136830
cuguucaagcaaguaguaa

SEQ ID NO: 2136832 - RNA, 19 nt, Artificial Sequence
  Description of Artificial Sequence: Synthetic oligonucleotide
  Sense strand starting at position 520 of SEQ ID NO: 1882640
uuuguuauacacugagaug

SEQ ID NO: 2136833 - RNA, 19 nt, Artificial Sequence
  Description of Artificial Sequence: Synthetic oligonucleotide
  Antisense strand to SEQ ID NO: 2136832
caucucaguguauaacaaa

SEQ ID NO: 2136834 - RNA, 19 nt, Artificial Sequence
  Description of Artificial Sequence: Synthetic oligonucleotide
  Sense strand starting at position 645 of SEQ ID NO: 1882640
uugcuaaaggcaggaaaua

SEQ ID NO: 2136835 - RNA, 19 nt, Artificial Sequence
  Description of Artificial Sequence: Synthetic oligonucleotide
  Antisense strand to SEQ ID NO: 2136834
uauuuccugccuuuagcaa

SEQ ID NO: 2136836 - RNA, 19 nt, Artificial Sequence
  Description of Artificial Sequence: Synthetic oligonucleotide
  Sense strand starting at position 688 of SEQ ID NO: 1882640
ucagauguuagugaaagcu

SEQ ID NO: 2136837 - RNA, 19 nt, Artificial Sequence
  Description of Artificial Sequence: Synthetic oligonucleotide
  Antisense strand to SEQ ID NO: 2136836
agcuuucacuaacaucuga

SEQ ID NO: 2136838 - RNA, 19 nt, Artificial Sequence
  Description of Artificial Sequence: Synthetic oligonucleotide
  Sense strand starting at position 879 of SEQ ID NO: 1882640
caauacuacucuguaggga

SEQ ID NO: 2136839 - RNA, 19 nt, Artificial Sequence
  Description of Artificial Sequence: Synthetic oligonucleotide
  Antisense strand to SEQ ID NO: 2136838
ucccuacagaguaguauug

SEQ ID NO: 2136840 - RNA, 19 nt, Artificial Sequence
  Description of Artificial Sequence: Synthetic oligonucleotide
  Sense strand starting at position 1088 of SEQ ID NO: 1882640
guuggauuaagaggcuaau

SEQ ID NO: 2136841 - RNA, 19 nt, Artificial Sequence
  Description of Artificial Sequence: Synthetic oligonucleotide
  Antisense strand to SEQ ID NO: 2136840
auuagccucuuaauccaac

SEQ ID NO: 2136842 - RNA, 19 nt, Artificial Sequence
  Description of Artificial Sequence: Synthetic oligonucleotide
  Sense strand starting at position 1293 of SEQ ID NO: 1882640
aguguaaauuguuuccaaa

SEQ ID NO: 2136843 - RNA, 19 nt, Artificial Sequence
  Description of Artificial Sequence: Synthetic oligonucleotide
  Antisense strand to SEQ ID NO: 2136842
uuuggaaacaauuuacacu

SEQ ID NO: 2136844 - RNA, 19 nt, Artificial Sequence
  Description of Artificial Sequence: Synthetic oligonucleotide
  Sense strand starting at position 1295 of SEQ ID NO: 1882640
uguaaauuguuuccaaaca

SEQ ID NO: 2136845 - RNA, 19 nt, Artificial Sequence
  Description of Artificial Sequence: Synthetic oligonucleotide
  Antisense strand to SEQ ID NO: 2136844
uguuuggaaacaauuuaca

SEQ ID NO: 2136846 - RNA, 19 nt, Artificial Sequence
  Description of Artificial Sequence: Synthetic oligonucleotide
  Sense strand starting at position 2128 of SEQ ID NO: 1882640
aacugccagcuguagaauu

SEQ ID NO: 2136847 - RNA, 19 nt, Artificial Sequence
  Description of Artificial Sequence: Synthetic oligonucleotide
  Antisense strand to SEQ ID NO: 2136846
aauucuacagcuggcaguu

SEQ ID NO: 2136848 - RNA, 19 nt, Artificial Sequence
  Description of Artificial Sequence: Synthetic oligonucleotide
  Sense strand starting at position 2153 of SEQ ID NO: 1882640
auuacauguggcgaaauau

SEQ ID NO: 2136849 - RNA, 19 nt, Artificial Sequence
  Description of Artificial Sequence: Synthetic oligonucleotide
  Antisense strand to SEQ ID NO: 2136848
auauuucgccacauguaau

SEQ ID NO: 2136850 - RNA, 19 nt, Artificial Sequence
  Description of Artificial Sequence: Synthetic oligonucleotide
  Sense strand starting at position 2478 of SEQ ID NO: 1882640
gcggcuggcguucccaaua

SEQ ID NO: 2136851 - RNA, 19 nt, Artificial Sequence
  Description of Artificial Sequence: Synthetic oligonucleotide
  Antisense strand to SEQ ID NO: 2136850
uauugggaacgccagccgc

SEQ ID NO: 2136852 - RNA, 19 nt, Artificial Sequence
  Description of Artificial Sequence: Synthetic oligonucleotide
  Sense strand starting at position 2609 of SEQ ID NO: 1882640
acuggaagucaucgggaaa

SEQ ID NO: 2136853 - RNA, 19 nt, Artificial Sequence
  Description of Artificial Sequence: Synthetic oligonucleotide
  Antisense strand to SEQ ID NO: 2136852
uuucccgaugacuuccagu

SEQ ID NO: 2136854 - RNA, 19 nt, Artificial Sequence
  Description of Artificial Sequence: Synthetic oligonucleotide
  Sense strand starting at position 2610 of SEQ ID NO: 1882640
cuggaagucaucgggaaag

SEQ ID NO: 2136855 - RNA, 19 nt, Artificial Sequence
  Description of Artificial Sequence: Synthetic oligonucleotide
  Antisense strand to SEQ ID NO: 2136854
cuuucccgaugacuuccag

SEQ ID NO: 2136856 - RNA, 19 nt, Artificial Sequence
  Description of Artificial Sequence: Synthetic oligonucleotide
  Sense strand starting at position 2767 of SEQ ID NO: 1882640
cucccuuuggucugggaaa

SEQ ID NO: 2136857 - RNA, 19 nt, Artificial Sequence
  Description of Artificial Sequence: Synthetic oligonucleotide
  Antisense strand to SEQ ID NO: 2136856
uuucccagaccaaagggag

SEQ ID NO: 2136858 - RNA, 19 nt, Artificial Sequence
  Description of Artificial Sequence: Synthetic oligonucleotide
  Sense strand starting at position 2976 of SEQ ID NO: 1882640
cggucaguccugguaguuu

SEQ ID NO: 2136859 - RNA, 19 nt, Artificial Sequence
  Description of Artificial Sequence: Synthetic oligonucleotide
  Antisense strand to SEQ ID NO: 2136858
aaacuaccaggacugaccg

SEQ ID NO: 2136860 - RNA, 19 nt, Artificial Sequence
  Description of Artificial Sequence: Synthetic oligonucleotide
  Sense strand starting at position 3010 of SEQ ID NO: 1882640
gugucuaaaugacccuuua

SEQ ID NO: 2136861 - RNA, 19 nt, Artificial Sequence
  Description of Artificial Sequence: Synthetic oligonucleotide
  Antisense strand to SEQ ID NO: 2136860
uaaagggucauuuagacac

SEQ ID NO: 2136862 - RNA, 19 nt, Artificial Sequence
  Description of Artificial Sequence: Synthetic oligonucleotide
  Sense strand starting at position 3041 of SEQ ID NO: 1882640
ccgaaugaucuggauccuu

SEQ ID NO: 2136863 - RNA, 19 nt, Artificial Sequence
  Description of Artificial Sequence: Synthetic oligonucleotide
  Antisense strand to SEQ ID NO: 2136862
aaggauccagaucauucgg

SEQ ID NO: 2136864 - RNA, 19 nt, Artificial Sequence
  Description of Artificial Sequence: Synthetic oligonucleotide
  Sense strand starting at position 3126 of SEQ ID NO: 1882640
cagaacuaggucuguaauu

SEQ ID NO: 2136865 - RNA, 19 nt, Artificial Sequence
  Description of Artificial Sequence: Synthetic oligonucleotide
  Antisense strand to SEQ ID NO: 2136864
aauuacagaccuaguucug

SEQ ID NO: 2136866 - RNA, 19 nt, Artificial Sequence
  Description of Artificial Sequence: Synthetic oligonucleotide
  Sense strand starting at position 3135 of SEQ ID NO: 1882640
gucuguaauuugcugcauu

SEQ ID NO: 2136867 - RNA, 19 nt, Artificial Sequence
  Description of Artificial Sequence: Synthetic oligonucleotide
  Antisense strand to SEQ ID NO: 2136866
aaugcagcaaauuacagac

SEQ ID NO: 2136868 - RNA, 19 nt, Artificial Sequence
  Description of Artificial Sequence: Synthetic oligonucleotide
  Sense strand starting at position 3152 of SEQ ID NO: 1882640
uugagacuuccguauccag

SEQ ID NO: 2136869 - RNA, 19 nt, Artificial Sequence
  Description of Artificial Sequence: Synthetic oligonucleotide
  Antisense strand to SEQ ID NO: 2136868
cuggauacggaagucucaa

SEQ ID NO: 2136870 - RNA, 19 nt, Artificial Sequence
  Description of Artificial Sequence: Synthetic oligonucleotide
  Sense strand starting at position 3520 of SEQ ID NO: 1882640
gggcaauuaauguggugau

SEQ ID NO: 2136871 - RNA, 19 nt, Artificial Sequence
  Description of Artificial Sequence: Synthetic oligonucleotide
  Antisense strand to SEQ ID NO: 2136870
aucaccacauuaauugccc

SEQ ID NO: 2136872 - RNA, 19 nt, Artificial Sequence
  Description of Artificial Sequence: Synthetic oligonucleotide
  Sense strand starting at position 3582 of SEQ ID NO: 1882640
agagaugccagucauugca

SEQ ID NO: 2136873 - RNA, 19 nt, Artificial Sequence
  Description of Artificial Sequence: Synthetic oligonucleotide
  Antisense strand to SEQ ID NO: 2136872
ugcaaugacuggcaucucu

SEQ ID NO: 2136874 - RNA, 19 nt, Artificial Sequence
  Description of Artificial Sequence: Synthetic oligonucleotide
  Sense strand starting at position 3644 of SEQ ID NO: 1882640
ggcugaaauguggaauccu

SEQ ID NO: 2136875 - RNA, 19 nt, Artificial Sequence
  Description of Artificial Sequence: Synthetic oligonucleotide
  Antisense strand to SEQ ID NO: 2136874
aggauuccacauuucagcc

SEQ ID NO: 2136876 - RNA, 19 nt, Artificial Sequence
  Description of Artificial Sequence: Synthetic oligonucleotide
  Sense strand starting at position 3820 of SEQ ID NO: 1882640
uguucuuugccuggaauuu

SEQ ID NO: 2136877 - RNA, 19 nt, Artificial Sequence
  Description of Artificial Sequence: Synthetic oligonucleotide
  Antisense strand to SEQ ID NO: 2136876
aaauuccaggcaaagaaca

SEQ ID NO: 2136878 - RNA, 19 nt, Artificial Sequence
  Description of Artificial Sequence: Synthetic oligonucleotide
  Sense strand starting at position 3841 of SEQ ID NO: 1882640
ggauuuggguuagaguuua

SEQ ID NO: 2136879 - RNA, 19 nt, Artificial Sequence
  Description of Artificial Sequence: Synthetic oligonucleotide
  Antisense strand to SEQ ID NO: 2136878
uaaacucuaacccaaaucc

SEQ ID NO: 2136880 - RNA, 19 nt, Artificial Sequence
  Description of Artificial Sequence: Synthetic oligonucleotide
  Sense strand starting at position 3851 of SEQ ID NO: 1882640
uagaguuuagauuguugua

SEQ ID NO: 2136881 - RNA, 19 nt, Artificial Sequence
  Description of Artificial Sequence: Synthetic oligonucleotide
  Antisense strand to SEQ ID NO: 2136880
uacaacaaucuaaacucua

SEQ ID NO: 2136882 - RNA, 19 nt, Artificial Sequence
  Description of Artificial Sequence: Synthetic oligonucleotide
  Sense strand starting at position 3876 of SEQ ID NO: 1882640
gguucuugcugaccuauuu

SEQ ID NO: 2136883 - RNA, 19 nt, Artificial Sequence
  Description of Artificial Sequence: Synthetic oligonucleotide
  Antisense strand to SEQ ID NO: 2136882
aaauaggucagcaagaacc

SEQ ID NO: 2136884 - RNA, 19 nt, Artificial Sequence
  Description of Artificial Sequence: Synthetic oligonucleotide
  Sense strand starting at position 3914 of SEQ ID NO: 1882640
ucuuccugucucuagguaa

SEQ ID NO: 2136885 - RNA, 19 nt, Artificial Sequence
  Description of Artificial Sequence: Synthetic oligonucleotide
  Antisense strand to SEQ ID NO: 2136884
uuaccuagagacaggaaga

SEQ ID NO: 2136886 - RNA, 19 nt, Artificial Sequence
  Description of Artificial Sequence: Synthetic oligonucleotide
  Sense strand starting at position 3917 of SEQ ID NO: 1882640
uccugucucuagguaauuu

SEQ ID NO: 2136887 - RNA, 19 nt, Artificial Sequence
  Description of Artificial Sequence: Synthetic oligonucleotide
  Antisense strand to SEQ ID NO: 2136886
aaauuaccuagagacagga

SEQ ID NO: 2136888 - RNA, 19 nt, Artificial Sequence
  Description of Artificial Sequence: Synthetic oligonucleotide
  Sense strand starting at position 3928 of SEQ ID NO: 1882640
gguaauuucucccugccuu

SEQ ID NO: 2136889 - RNA, 19 nt, Artificial Sequence
  Description of Artificial Sequence: Synthetic oligonucleotide
  Antisense strand to SEQ ID NO: 2136888
aaggcagggagaaauuacc

SEQ ID NO: 2136890 - RNA, 19 nt, Artificial Sequence
  Description of Artificial Sequence: Synthetic oligonucleotide
  Sense strand starting at position 3944 of SEQ ID NO: 1882640
cuuugauggcucugggauu

SEQ ID NO: 2136891 - RNA, 19 nt, Artificial Sequence
  Description of Artificial Sequence: Synthetic oligonucleotide
  Antisense strand to SEQ ID NO: 2136890
aaucccagagccaucaaag

SEQ ID NO: 2136892 - RNA, 19 nt, Artificial Sequence
  Description of Artificial Sequence: Synthetic oligonucleotide
  Sense strand starting at position 13 of SEQ ID NO: 1882641
ggcugaagccaguaagaga

SEQ ID NO: 2136893 - RNA, 19 nt, Artificial Sequence
  Description of Artificial Sequence: Synthetic oligonucleotide
  Antisense strand to SEQ ID NO: 2136892
ucucuuacuggcuucagcc

SEQ ID NO: 2136894 - RNA, 19 nt, Artificial Sequence
  Description of Artificial Sequence: Synthetic oligonucleotide
  Sense strand starting at position 162 of SEQ ID NO: 1882641
aggcccucaccucaugaua

SEQ ID NO: 2136895 - RNA, 19 nt, Artificial Sequence
  Description of Artificial Sequence: Synthetic oligonucleotide
  Antisense strand to SEQ ID NO: 2136894
uaucaugaggugagggccu

SEQ ID NO: 2136896 - RNA, 19 nt, Artificial Sequence
  Description of Artificial Sequence: Synthetic oligonucleotide
  Sense strand starting at position 285 of SEQ ID NO: 1882641
uuggccuaccuagauauau

SEQ ID NO: 2136897 - RNA, 19 nt, Artificial Sequence
  Description of Artificial Sequence: Synthetic oligonucleotide
  Antisense strand to SEQ ID NO: 2136896
auauaucuagguaggccaa

SEQ ID NO: 2136898 - RNA, 19 nt, Artificial Sequence
  Description of Artificial Sequence: Synthetic oligonucleotide
  Sense strand starting at position 438 of SEQ ID NO: 1882641
aggagcucaugguuuagga

SEQ ID NO: 2136899 - RNA, 19 nt, Artificial Sequence
  Description of Artificial Sequence: Synthetic oligonucleotide
  Antisense strand to SEQ ID NO: 2136898
uccuaaaccaugagcuccu

SEQ ID NO: 2136900 - RNA, 19 nt, Artificial Sequence
  Description of Artificial Sequence: Synthetic oligonucleotide
  Sense strand starting at position 454 of SEQ ID NO: 1882641
ggaagaugagcuugccaaa

SEQ ID NO: 2136901 - RNA, 19 nt, Artificial Sequence
  Description of Artificial Sequence: Synthetic oligonucleotide
  Antisense strand to SEQ ID NO: 2136900
uuuggcaagcucaucuucc

SEQ ID NO: 2136902 - RNA, 19 nt, Artificial Sequence
  Description of Artificial Sequence: Synthetic oligonucleotide
  Sense strand starting at position 541 of SEQ ID NO: 1882641
accauuuauggcuguuauc

SEQ ID NO: 2136903 - RNA, 19 nt, Artificial Sequence
  Description of Artificial Sequence: Synthetic oligonucleotide
  Antisense strand to SEQ ID NO: 2136902
gauaacagccauaaauggu

SEQ ID NO: 2136904 - RNA, 19 nt, Artificial Sequence
  Description of Artificial Sequence: Synthetic oligonucleotide
  Sense strand starting at position 627 of SEQ ID NO: 1882641
agucuaaguugguugguaa

SEQ ID NO: 2136905 - RNA, 19 nt, Artificial Sequence
  Description of Artificial Sequence: Synthetic oligonucleotide
  Antisense strand to SEQ ID NO: 2136904
uuaccaaccaacuuagacu

SEQ ID NO: 2136906 - RNA, 19 nt, Artificial Sequence
  Description of Artificial Sequence: Synthetic oligonucleotide
  Sense strand starting at position 916 of SEQ ID NO: 1882641
ggcugugauccuuaagaga

SEQ ID NO: 2136907 - RNA, 19 nt, Artificial Sequence
  Description of Artificial Sequence: Synthetic oligonucleotide
  Antisense strand to SEQ ID NO: 2136906
ucucuuaaggaucacagcc

SEQ ID NO: 2136908 - RNA, 19 nt, Artificial Sequence
  Description of Artificial Sequence: Synthetic oligonucleotide
  Sense strand starting at position 1086 of SEQ ID NO: 1882641
cgagucuucccgagcaggu

SEQ ID NO: 2136909 - RNA, 19 nt, Artificial Sequence
  Description of Artificial Sequence: Synthetic oligonucleotide
  Antisense strand to SEQ ID NO: 2136908
accugcucgggaagacucg

SEQ ID NO: 2136910 - RNA, 19 nt, Artificial Sequence
  Description of Artificial Sequence: Synthetic oligonucleotide
  Sense strand starting at position 1226 of SEQ ID NO: 1882641
auuuguggcgucgaguaaa

SEQ ID NO: 2136911 - RNA, 19 nt, Artificial Sequence
  Description of Artificial Sequence: Synthetic oligonucleotide
  Antisense strand to SEQ ID NO: 2136910
uuuacucgacgccacaaau

SEQ ID NO: 2136912 - RNA, 19 nt, Artificial Sequence
  Description of Artificial Sequence: Synthetic oligonucleotide
  Sense strand starting at position 2385 of SEQ ID NO: 1882641
cgaauuuacggcugccuaa

SEQ ID NO: 2136913 - RNA, 19 nt, Artificial Sequence
  Description of Artificial Sequence: Synthetic oligonucleotide
  Antisense strand to SEQ ID NO: 2136912
uuaggcagccguaaauucg

SEQ ID NO: 2136914 - RNA, 19 nt, Artificial Sequence
  Description of Artificial Sequence: Synthetic oligonucleotide
  Sense strand starting at position 2397 of SEQ ID NO: 1882641
ugccuaaagccuuagaaca

SEQ ID NO: 2136915 - RNA, 19 nt, Artificial Sequence
  Description of Artificial Sequence: Synthetic oligonucleotide
  Antisense strand to SEQ ID NO: 2136914
uguucuaaggcuuuaggca

SEQ ID NO: 2136916 - RNA, 19 nt, Artificial Sequence
  Description of Artificial Sequence: Synthetic oligonucleotide
  Sense strand starting at position 2418 of SEQ ID NO: 1882641
gaucccacgucgguaauuu

SEQ ID NO: 2136917 - RNA, 19 nt, Artificial Sequence
  Description of Artificial Sequence: Synthetic oligonucleotide
  Antisense strand to SEQ ID NO: 2136916
aaauuaccgacgugggauc

SEQ ID NO: 2136918 - RNA, 19 nt, Artificial Sequence
  Description of Artificial Sequence: Synthetic oligonucleotide
  Sense strand starting at position 2488 of SEQ ID NO: 1882641
ucagcuuugagaggaauug

SEQ ID NO: 2136919 - RNA, 19 nt, Artificial Sequence
  Description of Artificial Sequence: Synthetic oligonucleotide
  Antisense strand to SEQ ID NO: 2136918
caauuccucucaaagcuga

SEQ ID NO: 2136920 - RNA, 19 nt, Artificial Sequence
  Description of Artificial Sequence: Synthetic oligonucleotide
  Sense strand starting at position 2619 of SEQ ID NO: 1882641
guaggcuuggucucgugua

SEQ ID NO: 2136921 - RNA, 19 nt, Artificial Sequence
  Description of Artificial Sequence: Synthetic oligonucleotide
  Antisense strand to SEQ ID NO: 2136920
uacacgagaccaagccuac

SEQ ID NO: 2136922 - RNA, 19 nt, Artificial Sequence
  Description of Artificial Sequence: Synthetic oligonucleotide
  Sense strand starting at position 2621 of SEQ ID NO: 1882641
aggcuuggucucguguauu

SEQ ID NO: 2136923 - RNA, 19 nt, Artificial Sequence
  Description of Artificial Sequence: Synthetic oligonucleotide
  Antisense strand to SEQ ID NO: 2136922
aauacacgagaccaagccu

SEQ ID NO: 2136924 - RNA, 19 nt, Artificial Sequence
  Description of Artificial Sequence: Synthetic oligonucleotide
  Sense strand starting at position 2652 of SEQ ID NO: 1882641
guuuaauuagcugagguua

SEQ ID NO: 2136925 - RNA, 19 nt, Artificial Sequence
  Description of Artificial Sequence: Synthetic oligonucleotide
  Antisense strand to SEQ ID NO: 2136924
uaaccucagcuaauuaaac

SEQ ID NO: 2136926 - RNA, 19 nt, Artificial Sequence
  Description of Artificial Sequence: Synthetic oligonucleotide
  Sense strand starting at position 2712 of SEQ ID NO: 1882641
ugccucuugagcguuuaau

SEQ ID NO: 2136927 - RNA, 19 nt, Artificial Sequence
  Description of Artificial Sequence: Synthetic oligonucleotide
  Antisense strand to SEQ ID NO: 2136926
auuaaacgcucaagaggca

SEQ ID NO: 2136928 - RNA, 19 nt, Artificial Sequence
  Description of Artificial Sequence: Synthetic oligonucleotide
  Sense strand starting at position 2722 of SEQ ID NO: 1882641
gcguuuaauacugggauuu

SEQ ID NO: 2136929 - RNA, 19 nt, Artificial Sequence
  Description of Artificial Sequence: Synthetic oligonucleotide
  Antisense strand to SEQ ID NO: 2136928
aaaucccaguauuaaacgc

SEQ ID NO: 2136930 - RNA, 19 nt, Artificial Sequence
  Description of Artificial Sequence: Synthetic oligonucleotide
  Sense strand starting at position 2724 of SEQ ID NO: 1882641
guuuaauacugggauuuac

SEQ ID NO: 2136931 - RNA, 19 nt, Artificial Sequence
  Description of Artificial Sequence: Synthetic oligonucleotide
  Antisense strand to SEQ ID NO: 2136930
guaaaucccaguauuaaac

SEQ ID NO: 2136932 - RNA, 19 nt, Artificial Sequence
  Description of Artificial Sequence: Synthetic oligonucleotide
  Sense strand starting at position 2993 of SEQ ID NO: 1882641
uauuaaugacaguggucua

SEQ ID NO: 2136933 - RNA, 19 nt, Artificial Sequence
  Description of Artificial Sequence: Synthetic oligonucleotide
  Antisense strand to SEQ ID NO: 2136932
uagaccacugucauuaaua

SEQ ID NO: 2136934 - RNA, 19 nt, Artificial Sequence
  Description of Artificial Sequence: Synthetic oligonucleotide
  Sense strand starting at position 3003 of SEQ ID NO: 1882641
aguggucuacuguguagaa

SEQ ID NO: 2136935 - RNA, 19 nt, Artificial Sequence
  Description of Artificial Sequence: Synthetic oligonucleotide
  Antisense strand to SEQ ID NO: 2136934
uucuacacaguagaccacu

SEQ ID NO: 2136936 - RNA, 19 nt, Artificial Sequence
  Description of Artificial Sequence: Synthetic oligonucleotide
  Sense strand starting at position 3004 of SEQ ID NO: 1882641
guggucuacuguguagaaa

SEQ ID NO: 2136937 - RNA, 19 nt, Artificial Sequence
  Description of Artificial Sequence: Synthetic oligonucleotide
  Antisense strand to SEQ ID NO: 2136936
uuucuacacaguagaccac

SEQ ID NO: 2136938 - RNA, 19 nt, Artificial Sequence
  Description of Artificial Sequence: Synthetic oligonucleotide
  Sense strand starting at position 3005 of SEQ ID NO: 1882641
uggucuacuguguagaaac

SEQ ID NO: 2136939 - RNA, 19 nt, Artificial Sequence
  Description of Artificial Sequence: Synthetic oligonucleotide
  Antisense strand to SEQ ID NO: 2136938
guuucuacacaguagacca

SEQ ID NO: 2136940 - RNA, 19 nt, Artificial Sequence
  Description of Artificial Sequence: Synthetic oligonucleotide
  Sense strand starting at position 3007 of SEQ ID NO: 1882641
gucuacuguguagaaacuu

SEQ ID NO: 2136941 - RNA, 19 nt, Artificial Sequence
  Description of Artificial Sequence: Synthetic oligonucleotide
  Antisense strand to SEQ ID NO: 2136940
aaguuucuacacaguagac

SEQ ID NO: 2136942 - RNA, 19 nt, Artificial Sequence
  Description of Artificial Sequence: Synthetic oligonucleotide
  Sense strand starting at position 3013 of SEQ ID NO: 1882641
uguguagaaacuugagauu

SEQ ID NO: 2136943 - RNA, 19 nt, Artificial Sequence
  Description of Artificial Sequence: Synthetic oligonucleotide
  Antisense strand to SEQ ID NO: 2136942
aaucucaaguuucuacaca

SEQ ID NO: 2136944 - RNA, 19 nt, Artificial Sequence
  Description of Artificial Sequence: Synthetic oligonucleotide
  Sense strand starting at position 3045 of SEQ ID NO: 1882641
cagcuaugaccggaccauu

SEQ ID NO: 2136945 - RNA, 19 nt, Artificial Sequence
  Description of Artificial Sequence: Synthetic oligonucleotide
  Antisense strand to SEQ ID NO: 2136944
aaugguccggucauagcug

SEQ ID NO: 2136946 - RNA, 19 nt, Artificial Sequence
  Description of Artificial Sequence: Synthetic oligonucleotide
  Sense strand starting at position 3080 of SEQ ID NO: 1882641
cuguaucuucugcagguua

SEQ ID NO: 2136947 - RNA, 19 nt, Artificial Sequence
  Description of Artificial Sequence: Synthetic oligonucleotide
  Antisense strand to SEQ ID NO: 2136946
uaaccugcagaagauacag

SEQ ID NO: 2136948 - RNA, 19 nt, Artificial Sequence
  Description of Artificial Sequence: Synthetic oligonucleotide
  Sense strand starting at position 3126 of SEQ ID NO: 1882641
aaauucuggcagugaucuu

SEQ ID NO: 2136949 - RNA, 19 nt, Artificial Sequence
  Description of Artificial Sequence: Synthetic oligonucleotide
  Antisense strand to SEQ ID NO: 2136948
aagaucacugccagaauuu

SEQ ID NO: 2136950 - RNA, 19 nt, Artificial Sequence
  Description of Artificial Sequence: Synthetic oligonucleotide
  Sense strand starting at position 3179 of SEQ ID NO: 1882641
aguugucuugaugagauac

SEQ ID NO: 2136951 - RNA, 19 nt, Artificial Sequence
  Description of Artificial Sequence: Synthetic oligonucleotide
  Antisense strand to SEQ ID NO: 2136950
guaucucaucaagacaacu

SEQ ID NO: 2136952 - RNA, 19 nt, Artificial Sequence
  Description of Artificial Sequence: Synthetic oligonucleotide
  Sense strand starting at position 3323 of SEQ ID NO: 1882641
cuggauaucucagagauuu

SEQ ID NO: 2136953 - RNA, 19 nt, Artificial Sequence
  Description of Artificial Sequence: Synthetic oligonucleotide
  Antisense strand to SEQ ID NO: 2136952
aaaucucugagauauccag

SEQ ID NO: 2136954 - RNA, 19 nt, Artificial Sequence
  Description of Artificial Sequence: Synthetic oligonucleotide
  Sense strand starting at position 3401 of SEQ ID NO: 1882641
ggaguaauuuaauacaagu

SEQ ID NO: 2136955 - RNA, 19 nt, Artificial Sequence
  Description of Artificial Sequence: Synthetic oligonucleotide
  Antisense strand to SEQ ID NO: 2136954
acuuguauuaaauuacucc

SEQ ID NO: 2136956 - RNA, 19 nt, Artificial Sequence
  Description of Artificial Sequence: Synthetic oligonucleotide
  Sense strand starting at position 3412 of SEQ ID NO: 1882641
auacaaguguuaguccuua

SEQ ID NO: 2136957 - RNA, 19 nt, Artificial Sequence
  Description of Artificial Sequence: Synthetic oligonucleotide
  Antisense strand to SEQ ID NO: 2136956
uaaggacuaacacuuguau

SEQ ID NO: 2136958 - RNA, 19 nt, Artificial Sequence
  Description of Artificial Sequence: Synthetic oligonucleotide
  Sense strand starting at position 3416 of SEQ ID NO: 1882641
aaguguuaguccuuagaaa

SEQ ID NO: 2136959 - RNA, 19 nt, Artificial Sequence
  Description of Artificial Sequence: Synthetic oligonucleotide
  Antisense strand to SEQ ID NO: 2136958
uuucuaaggacuaacacuu

SEQ ID NO: 2136960 - RNA, 19 nt, Artificial Sequence
  Description of Artificial Sequence: Synthetic oligonucleotide
  Sense strand starting at position 3417 of SEQ ID NO: 1882641
aguguuaguccuuagaaau

SEQ ID NO: 2136961 - RNA, 19 nt, Artificial Sequence
  Description of Artificial Sequence: Synthetic oligonucleotide
  Antisense strand to SEQ ID NO: 2136960
auuucuaaggacuaacacu

SEQ ID NO: 2136962 - RNA, 19 nt, Artificial Sequence
  Description of Artificial Sequence: Synthetic oligonucleotide
  Sense strand starting at position 3466 of SEQ ID NO: 1882641
gaguuaggcccucaacaca

SEQ ID NO: 2136963 - RNA, 19 nt, Artificial Sequence
  Description of Artificial Sequence: Synthetic oligonucleotide
  Antisense strand to SEQ ID NO: 2136962
uguguugagggccuaacuc

SEQ ID NO: 2136964 - RNA, 19 nt, Artificial Sequence
  Description of Artificial Sequence: Synthetic oligonucleotide
  Sense strand starting at position 3529 of SEQ ID NO: 1882641
gcuuuaagccaugcagugu

SEQ ID NO: 2136965 - RNA, 19 nt, Artificial Sequence
  Description of Artificial Sequence: Synthetic oligonucleotide
  Antisense strand to SEQ ID NO: 2136964
acacugcauggcuuaaagc

SEQ ID NO: 2136966 - RNA, 19 nt, Artificial Sequence
  Description of Artificial Sequence: Synthetic oligonucleotide
  Sense strand starting at position 3606 of SEQ ID NO: 1882641
gcacauuccuggucacaaa

SEQ ID NO: 2136967 - RNA, 19 nt, Artificial Sequence
  Description of Artificial Sequence: Synthetic oligonucleotide
  Antisense strand to SEQ ID NO: 2136966
uuugugaccaggaaugugc

SEQ ID NO: 2136968 - RNA, 19 nt, Artificial Sequence
  Description of Artificial Sequence: Synthetic oligonucleotide
  Sense strand starting at position 3724 of SEQ ID NO: 1882641
uggugaauccaugagugac

SEQ ID NO: 2136969 - RNA, 19 nt, Artificial Sequence
  Description of Artificial Sequence: Synthetic oligonucleotide
  Antisense strand to SEQ ID NO: 2136968
gucacucauggauucacca

SEQ ID NO: 2136970 - RNA, 19 nt, Artificial Sequence
  Description of Artificial Sequence: Synthetic oligonucleotide
  Sense strand starting at position 3756 of SEQ ID NO: 1882641
ggcuguguuaaagauaaug

SEQ ID NO: 2136971 - RNA, 19 nt, Artificial Sequence
  Description of Artificial Sequence: Synthetic oligonucleotide
  Antisense strand to SEQ ID NO: 2136970
cauuaucuuuaacacagcc

SEQ ID NO: 2136972 - RNA, 19 nt, Artificial Sequence
  Description of Artificial Sequence: Synthetic oligonucleotide
  Sense strand starting at position 195 of SEQ ID NO: 1882642
gcacuuauuuauccucagu

SEQ ID NO: 2136973 - RNA, 19 nt, Artificial Sequence
  Description of Artificial Sequence: Synthetic oligonucleotide
  Antisense strand to SEQ ID NO: 2136972
acugaggauaaauaagugc

SEQ ID NO: 2136974 - RNA, 19 nt, Artificial Sequence
  Description of Artificial Sequence: Synthetic oligonucleotide
  Sense strand starting at position 273 of SEQ ID NO: 1882642
aucugauucuuccuguuua

SEQ ID NO: 2136975 - RNA, 19 nt, Artificial Sequence
  Description of Artificial Sequence: Synthetic oligonucleotide
  Antisense strand to SEQ ID NO: 2136974
uaaacaggaagaaucagau

SEQ ID NO: 2136976 - RNA, 19 nt, Artificial Sequence
  Description of Artificial Sequence: Synthetic oligonucleotide
  Sense strand starting at position 343 of SEQ ID NO: 1882642
gaauuugaguucuaagauu

SEQ ID NO: 2136977 - RNA, 19 nt, Artificial Sequence
  Description of Artificial Sequence: Synthetic oligonucleotide
  Antisense strand to SEQ ID NO: 2136976
aaucuuagaacucaaauuc

SEQ ID NO: 2136978 - RNA, 19 nt, Artificial Sequence
  Description of Artificial Sequence: Synthetic oligonucleotide
  Sense strand starting at position 380 of SEQ ID NO: 1882642
ggcucagaaauucgacagu

SEQ ID NO: 2136979 - RNA, 19 nt, Artificial Sequence
  Description of Artificial Sequence: Synthetic oligonucleotide
  Antisense strand to SEQ ID NO: 2136978
acugucgaauuucugagcc

SEQ ID NO: 2136980 - RNA, 19 nt, Artificial Sequence
  Description of Artificial Sequence: Synthetic oligonucleotide
  Sense strand starting at position 519 of SEQ ID NO: 1882642
gaggaaauuguuggccaga

SEQ ID NO: 2136981 - RNA, 19 nt, Artificial Sequence
  Description of Artificial Sequence: Synthetic oligonucleotide
  Antisense strand to SEQ ID NO: 2136980
ucuggccaacaauuuccuc

SEQ ID NO: 2136982 - RNA, 19 nt, Artificial Sequence
  Description of Artificial Sequence: Synthetic oligonucleotide
  Sense strand starting at position 520 of SEQ ID NO: 1882642
aggaaauuguuggccagau

SEQ ID NO: 2136983 - RNA, 19 nt, Artificial Sequence
  Description of Artificial Sequence: Synthetic oligonucleotide
  Antisense strand to SEQ ID NO: 2136982
aucuggccaacaauuuccu

SEQ ID NO: 2136984 - RNA, 19 nt, Artificial Sequence
  Description of Artificial Sequence: Synthetic oligonucleotide
  Sense strand starting at position 521 of SEQ ID NO: 1882642
ggaaauuguuggccagaug

SEQ ID NO: 2136985 - RNA, 19 nt, Artificial Sequence
  Description of Artificial Sequence: Synthetic oligonucleotide
  Antisense strand to SEQ ID NO: 2136984
caucuggccaacaauuucc

SEQ ID NO: 2136986 - RNA, 19 nt, Artificial Sequence
  Description of Artificial Sequence: Synthetic oligonucleotide
  Sense strand starting at position 753 of SEQ ID NO: 1882642
gaguuuaugccagagcaug

SEQ ID NO: 2136987 - RNA, 19 nt, Artificial Sequence
  Description of Artificial Sequence: Synthetic oligonucleotide
  Antisense strand to SEQ ID NO: 2136986
caugcucuggcauaaacuc

SEQ ID NO: 2136988 - RNA, 19 nt, Artificial Sequence
  Description of Artificial Sequence: Synthetic oligonucleotide
  Sense strand starting at position 784 of SEQ ID NO: 1882642
uggguugguuuggucagaa

SEQ ID NO: 2136989 - RNA, 19 nt, Artificial Sequence
  Description of Artificial Sequence: Synthetic oligonucleotide
  Antisense strand to SEQ ID NO: 2136988
uucugaccaaaccaaccca

SEQ ID NO: 2136990 - RNA, 19 nt, Artificial Sequence
  Description of Artificial Sequence: Synthetic oligonucleotide
  Sense strand starting at position 817 of SEQ ID NO: 1882642
gaggguuggccucagaaau

SEQ ID NO: 2136991 - RNA, 19 nt, Artificial Sequence
  Description of Artificial Sequence: Synthetic oligonucleotide
  Antisense strand to SEQ ID NO: 2136990
auuucugaggccaacccuc

SEQ ID NO: 2136992 - RNA, 19 nt, Artificial Sequence
  Description of Artificial Sequence: Synthetic oligonucleotide
  Sense strand starting at position 827 of SEQ ID NO: 1882642
cucagaaaugcaggaauua

SEQ ID NO: 2136993 - RNA, 19 nt, Artificial Sequence
  Description of Artificial Sequence: Synthetic oligonucleotide
  Antisense strand to SEQ ID NO: 2136992
uaauuccugcauuucugag

SEQ ID NO: 2136994 - RNA, 19 nt, Artificial Sequence
  Description of Artificial Sequence: Synthetic oligonucleotide
  Sense strand starting at position 1617 of SEQ ID NO: 1882642
aaaguaaaguuggcauauu

SEQ ID NO: 2136995 - RNA, 19 nt, Artificial Sequence
  Description of Artificial Sequence: Synthetic oligonucleotide
  Antisense strand to SEQ ID NO: 2136994
aauaugccaacuuuacuuu

SEQ ID NO: 2136996 - RNA, 19 nt, Artificial Sequence
  Description of Artificial Sequence: Synthetic oligonucleotide
  Sense strand starting at position 1618 of SEQ ID NO: 1882642
aaguaaaguuggcauauuu

SEQ ID NO: 2136997 - RNA, 19 nt, Artificial Sequence
  Description of Artificial Sequence: Synthetic oligonucleotide
  Antisense strand to SEQ ID NO: 2136996
aaauaugccaacuuuacuu

SEQ ID NO: 2136998 - RNA, 19 nt, Artificial Sequence
  Description of Artificial Sequence: Synthetic oligonucleotide
  Sense strand starting at position 1627 of SEQ ID NO: 1882642
uggcauauuucgcuuuguu

SEQ ID NO: 2136999 - RNA, 19 nt, Artificial Sequence
  Description of Artificial Sequence: Synthetic oligonucleotide
  Antisense strand to SEQ ID NO: 2136998
aacaaagcgaaauaugcca

SEQ ID NO: 2137000 - RNA, 19 nt, Artificial Sequence
  Description of Artificial Sequence: Synthetic oligonucleotide
  Sense strand starting at position 1630 of SEQ ID NO: 1882642
cauauuucgcuuuguuuag

SEQ ID NO: 2137001 - RNA, 19 nt, Artificial Sequence
  Description of Artificial Sequence: Synthetic oligonucleotide
  Antisense strand to SEQ ID NO: 2137000
cuaaacaaagcgaaauaug

SEQ ID NO: 2137002 - RNA, 19 nt, Artificial Sequence
  Description of Artificial Sequence: Synthetic oligonucleotide
  Sense strand starting at position 1631 of SEQ ID NO: 1882642
auauuucgcuuuguuuaga

SEQ ID NO: 2137003 - RNA, 19 nt, Artificial Sequence
  Description of Artificial Sequence: Synthetic oligonucleotide
  Antisense strand to SEQ ID NO: 2137002
ucuaaacaaagcgaaauau

SEQ ID NO: 2137004 - RNA, 19 nt, Artificial Sequence
  Description of Artificial Sequence: Synthetic oligonucleotide
  Sense strand starting at position 1632 of SEQ ID NO: 1882642
uauuucgcuuuguuuagaa

SEQ ID NO: 2137005 - RNA, 19 nt, Artificial Sequence
  Description of Artificial Sequence: Synthetic oligonucleotide
  Antisense strand to SEQ ID NO: 2137004
uucuaaacaaagcgaaaua

SEQ ID NO: 2137006 - RNA, 19 nt, Artificial Sequence
  Description of Artificial Sequence: Synthetic oligonucleotide
  Sense strand starting at position 1634 of SEQ ID NO: 1882642
uuucgcuuuguuuagaaag

SEQ ID NO: 2137007 - RNA, 19 nt, Artificial Sequence
  Description of Artificial Sequence: Synthetic oligonucleotide
  Antisense strand to SEQ ID NO: 2137006
cuuucuaaacaaagcgaaa

SEQ ID NO: 2137008 - RNA, 19 nt, Artificial Sequence
  Description of Artificial Sequence: Synthetic oligonucleotide
  Sense strand starting at position 2473 of SEQ ID NO: 1882642
ccuggagucggagguugua

SEQ ID NO: 2137009 - RNA, 19 nt, Artificial Sequence
  Description of Artificial Sequence: Synthetic oligonucleotide
  Antisense strand to SEQ ID NO: 2137008
uacaaccuccgacuccagg

SEQ ID NO: 2137010 - RNA, 19 nt, Artificial Sequence
  Description of Artificial Sequence: Synthetic oligonucleotide
  Sense strand starting at position 2582 of SEQ ID NO: 1882642
ugaauuggugcgucagcga

SEQ ID NO: 2137011 - RNA, 19 nt, Artificial Sequence
  Description of Artificial Sequence: Synthetic oligonucleotide
  Antisense strand to SEQ ID NO: 2137010
ucgcugacgcaccaauuca

SEQ ID NO: 2137012 - RNA, 19 nt, Artificial Sequence
  Description of Artificial Sequence: Synthetic oligonucleotide
  Sense strand starting at position 2622 of SEQ ID NO: 1882642
guaauaguacauugauuag

SEQ ID NO: 2137013 - RNA, 19 nt, Artificial Sequence
  Description of Artificial Sequence: Synthetic oligonucleotide
  Antisense strand to SEQ ID NO: 2137012
cuaaucaauguacuauuac

SEQ ID NO: 2137014 - RNA, 19 nt, Artificial Sequence
  Description of Artificial Sequence: Synthetic oligonucleotide
  Sense strand starting at position 2676 of SEQ ID NO: 1882642
uucuguuccuaauuguaua

SEQ ID NO: 2137015 - RNA, 19 nt, Artificial Sequence
  Description of Artificial Sequence: Synthetic oligonucleotide
  Antisense strand to SEQ ID NO: 2137014
uauacaauuaggaacagaa

SEQ ID NO: 2137016 - RNA, 19 nt, Artificial Sequence
  Description of Artificial Sequence: Synthetic oligonucleotide
  Sense strand starting at position 2681 of SEQ ID NO: 1882642
uuccuaauuguauaacgaa

SEQ ID NO: 2137017 - RNA, 19 nt, Artificial Sequence
  Description of Artificial Sequence: Synthetic oligonucleotide
  Antisense strand to SEQ ID NO: 2137016
uucguuauacaauuaggaa

SEQ ID NO: 2137018 - RNA, 19 nt, Artificial Sequence
  Description of Artificial Sequence: Synthetic oligonucleotide
  Sense strand starting at position 2893 of SEQ ID NO: 1882642
ugauauucccucugccuga

SEQ ID NO: 2137019 - RNA, 19 nt, Artificial Sequence
  Description of Artificial Sequence: Synthetic oligonucleotide
  Antisense strand to SEQ ID NO: 2137018
ucaggcagagggaauauca

SEQ ID NO: 2137020 - RNA, 19 nt, Artificial Sequence
  Description of Artificial Sequence: Synthetic oligonucleotide
  Sense strand starting at position 2962 of SEQ ID NO: 1882642
acuccagaagucuagguua

SEQ ID NO: 2137021 - RNA, 19 nt, Artificial Sequence
  Description of Artificial Sequence: Synthetic oligonucleotide
  Antisense strand to SEQ ID NO: 2137020
uaaccuagacuucuggagu

SEQ ID NO: 2137022 - RNA, 19 nt, Artificial Sequence
  Description of Artificial Sequence: Synthetic oligonucleotide
  Sense strand starting at position 2964 of SEQ ID NO: 1882642
uccagaagucuagguuaga

SEQ ID NO: 2137023 - RNA, 19 nt, Artificial Sequence
  Description of Artificial Sequence: Synthetic oligonucleotide
  Antisense strand to SEQ ID NO: 2137022
ucuaaccuagacuucugga

SEQ ID NO: 2137024 - RNA, 19 nt, Artificial Sequence
  Description of Artificial Sequence: Synthetic oligonucleotide
  Sense strand starting at position 2965 of SEQ ID NO: 1882642
ccagaagucuagguuagac

SEQ ID NO: 2137025 - RNA, 19 nt, Artificial Sequence
  Description of Artificial Sequence: Synthetic oligonucleotide
  Antisense strand to SEQ ID NO: 2137024
gucuaaccuagacuucugg

SEQ ID NO: 2137026 - RNA, 19 nt, Artificial Sequence
  Description of Artificial Sequence: Synthetic oligonucleotide
  Sense strand starting at position 3082 of SEQ ID NO: 1882642
acucuuaauguagguacau

SEQ ID NO: 2137027 - RNA, 19 nt, Artificial Sequence
  Description of Artificial Sequence: Synthetic oligonucleotide
  Antisense strand to SEQ ID NO: 2137026
auguaccuacauuaagagu

SEQ ID NO: 2137028 - RNA, 19 nt, Artificial Sequence
  Description of Artificial Sequence: Synthetic oligonucleotide
  Sense strand starting at position 3102 of SEQ ID NO: 1882642
gccacuacuccauacugua

SEQ ID NO: 2137029 - RNA, 19 nt, Artificial Sequence
  Description of Artificial Sequence: Synthetic oligonucleotide
  Antisense strand to SEQ ID NO: 2137028
uacaguauggaguaguggc

SEQ ID NO: 2137030 - RNA, 19 nt, Artificial Sequence
  Description of Artificial Sequence: Synthetic oligonucleotide
  Sense strand starting at position 3122 of SEQ ID NO: 1882642
uugucagucucuuccauca

SEQ ID NO: 2137031 - RNA, 19 nt, Artificial Sequence
  Description of Artificial Sequence: Synthetic oligonucleotide
  Antisense strand to SEQ ID NO: 2137030
ugauggaagagacugacaa

SEQ ID NO: 2137032 - RNA, 19 nt, Artificial Sequence
  Description of Artificial Sequence: Synthetic oligonucleotide
  Sense strand starting at position 3146 of SEQ ID NO: 1882642
ggaaauuguucagcuccga

SEQ ID NO: 2137033 - RNA, 19 nt, Artificial Sequence
  Description of Artificial Sequence: Synthetic oligonucleotide
  Antisense strand to SEQ ID NO: 2137032
ucggagcugaacaauuucc

SEQ ID NO: 2137034 - RNA, 19 nt, Artificial Sequence
  Description of Artificial Sequence: Synthetic oligonucleotide
  Sense strand starting at position 3200 of SEQ ID NO: 1882642
ccaggcuuauuccuuggua

SEQ ID NO: 2137035 - RNA, 19 nt, Artificial Sequence
  Description of Artificial Sequence: Synthetic oligonucleotide
  Antisense strand to SEQ ID NO: 2137034
uaccaaggaauaagccugg

SEQ ID NO: 2137036 - RNA, 19 nt, Artificial Sequence
  Description of Artificial Sequence: Synthetic oligonucleotide
  Sense strand starting at position 3213 of SEQ ID NO: 1882642
uugguagcauagucauaac

SEQ ID NO: 2137037 - RNA, 19 nt, Artificial Sequence
  Description of Artificial Sequence: Synthetic oligonucleotide
  Antisense strand to SEQ ID NO: 2137036
guuaugacuaugcuaccaa

SEQ ID NO: 2137038 - RNA, 19 nt, Artificial Sequence
  Description of Artificial Sequence: Synthetic oligonucleotide
  Sense strand starting at position 3574 of SEQ ID NO: 1882642
acagacuucuagucuguaa

SEQ ID NO: 2137039 - RNA, 19 nt, Artificial Sequence
  Description of Artificial Sequence: Synthetic oligonucleotide
  Antisense strand to SEQ ID NO: 2137038
uuacagacuagaagucugu

SEQ ID NO: 2137040 - RNA, 19 nt, Artificial Sequence
  Description of Artificial Sequence: Synthetic oligonucleotide
  Sense strand starting at position 3576 of SEQ ID NO: 1882642
agacuucuagucuguaaag

SEQ ID NO: 2137041 - RNA, 19 nt, Artificial Sequence
  Description of Artificial Sequence: Synthetic oligonucleotide
  Antisense strand to SEQ ID NO: 2137040
cuuuacagacuagaagucu

SEQ ID NO: 2137042 - RNA, 19 nt, Artificial Sequence
  Description of Artificial Sequence: Synthetic oligonucleotide
  Sense strand starting at position 3577 of SEQ ID NO: 1882642
gacuucuagucuguaaaga

SEQ ID NO: 2137043 - RNA, 19 nt, Artificial Sequence
  Description of Artificial Sequence: Synthetic oligonucleotide
  Antisense strand to SEQ ID NO: 2137042
ucuuuacagacuagaaguc

SEQ ID NO: 2137044 - RNA, 19 nt, Artificial Sequence
  Description of Artificial Sequence: Synthetic oligonucleotide
  Sense strand starting at position 3578 of SEQ ID NO: 1882642
acuucuagucuguaaagaa

SEQ ID NO: 2137045 - RNA, 19 nt, Artificial Sequence
  Description of Artificial Sequence: Synthetic oligonucleotide
  Antisense strand to SEQ ID NO: 2137044
uucuuuacagacuagaagu

SEQ ID NO: 2137046 - RNA, 19 nt, Artificial Sequence
  Description of Artificial Sequence: Synthetic oligonucleotide
  Sense strand starting at position 3611 of SEQ ID NO: 1882642
gcgauaggauuugaaguua

SEQ ID NO: 2137047 - RNA, 19 nt, Artificial Sequence
  Description of Artificial Sequence: Synthetic oligonucleotide
  Antisense strand to SEQ ID NO: 2137046
uaacuucaaauccuaucgc

SEQ ID NO: 2137048 - RNA, 19 nt, Artificial Sequence
  Description of Artificial Sequence: Synthetic oligonucleotide
  Sense strand starting at position 3794 of SEQ ID NO: 1882642
ccugccuuaucuuuaggaa

SEQ ID NO: 2137049 - RNA, 19 nt, Artificial Sequence
  Description of Artificial Sequence: Synthetic oligonucleotide
  Antisense strand to SEQ ID NO: 2137048
uuccuaaagauaaggcagg

SEQ ID NO: 2137050 - RNA, 19 nt, Artificial Sequence
  Description of Artificial Sequence: Synthetic oligonucleotide
  Sense strand starting at position 3795 of SEQ ID NO: 1882642
cugccuuaucuuuaggaaa

SEQ ID NO: 2137051 - RNA, 19 nt, Artificial Sequence
  Description of Artificial Sequence: Synthetic oligonucleotide
  Antisense strand to SEQ ID NO: 2137050
uuuccuaaagauaaggcag

SEQ ID NO: 2137052 - RNA, 19 nt, Artificial Sequence
  Description of Artificial Sequence: Synthetic oligonucleotide
  Sense strand starting at position 27 of SEQ ID NO: 1882643
guuuacuggaucuggcaau

SEQ ID NO: 2137053 - RNA, 19 nt, Artificial Sequence
  Description of Artificial Sequence: Synthetic oligonucleotide
  Antisense strand to SEQ ID NO: 2137052
auugccagauccaguaaac

SEQ ID NO: 2137054 - RNA, 19 nt, Artificial Sequence
  Description of Artificial Sequence: Synthetic oligonucleotide
  Sense strand starting at position 167 of SEQ ID NO: 1882643
uagcauuuccaguggcuau

SEQ ID NO: 2137055 - RNA, 19 nt, Artificial Sequence
  Description of Artificial Sequence: Synthetic oligonucleotide
  Antisense strand to SEQ ID NO: 2137054
auagccacuggaaaugcua

SEQ ID NO: 2137056 - RNA, 19 nt, Artificial Sequence
  Description of Artificial Sequence: Synthetic oligonucleotide
  Sense strand starting at position 220 of SEQ ID NO: 1882643
guauaccuacguuacagaa

SEQ ID NO: 2137057 - RNA, 19 nt, Artificial Sequence
  Description of Artificial Sequence: Synthetic oligonucleotide
  Antisense strand to SEQ ID NO: 2137056
uucuguaacguagguauac

SEQ ID NO: 2137058 - RNA, 19 nt, Artificial Sequence
  Description of Artificial Sequence: Synthetic oligonucleotide
  Sense strand starting at position 242 of SEQ ID NO: 1882643
cuguguuaacaccaaugua

SEQ ID NO: 2137059 - RNA, 19 nt, Artificial Sequence
  Description of Artificial Sequence: Synthetic oligonucleotide
  Antisense strand to SEQ ID NO: 2137058
uacauugguguuaacacag

SEQ ID NO: 2137060 - RNA, 19 nt, Artificial Sequence
  Description of Artificial Sequence: Synthetic oligonucleotide
  Sense strand starting at position 245 of SEQ ID NO: 1882643
uguuaacaccaauguacua

SEQ ID NO: 2137061 - RNA, 19 nt, Artificial Sequence
  Description of Artificial Sequence: Synthetic oligonucleotide
  Antisense strand to SEQ ID NO: 2137060
uaguacauugguguuaaca

SEQ ID NO: 2137062 - RNA, 19 nt, Artificial Sequence
  Description of Artificial Sequence: Synthetic oligonucleotide
  Sense strand starting at position 273 of SEQ ID NO: 1882643
guuauauaccucuagucuc

SEQ ID NO: 2137063 - RNA, 19 nt, Artificial Sequence
  Description of Artificial Sequence: Synthetic oligonucleotide
  Antisense strand to SEQ ID NO: 2137062
gagacuagagguauauaac

SEQ ID NO: 2137064 - RNA, 19 nt, Artificial Sequence
  Description of Artificial Sequence: Synthetic oligonucleotide
  Sense strand starting at position 420 of SEQ ID NO: 1882643
ccaauacugcucuaaugga

SEQ ID NO: 2137065 - RNA, 19 nt, Artificial Sequence
  Description of Artificial Sequence: Synthetic oligonucleotide
  Antisense strand to SEQ ID NO: 2137064
uccauuagagcaguauugg

SEQ ID NO: 2137066 - RNA, 19 nt, Artificial Sequence
  Description of Artificial Sequence: Synthetic oligonucleotide
  Sense strand starting at position 433 of SEQ ID NO: 1882643
aauggauauuaagugcuau

SEQ ID NO: 2137067 - RNA, 19 nt, Artificial Sequence
  Description of Artificial Sequence: Synthetic oligonucleotide
  Antisense strand to SEQ ID NO: 2137066
auagcacuuaauauccauu

SEQ ID NO: 2137068 - RNA, 19 nt, Artificial Sequence
  Description of Artificial Sequence: Synthetic oligonucleotide
  Sense strand starting at position 495 of SEQ ID NO: 1882643
caaugauuacauugagagu

SEQ ID NO: 2137069 - RNA, 19 nt, Artificial Sequence
  Description of Artificial Sequence: Synthetic oligonucleotide
  Antisense strand to SEQ ID NO: 2137068
acucucaauguaaucauug

SEQ ID NO: 2137070 - RNA, 19 nt, Artificial Sequence
  Description of Artificial Sequence: Synthetic oligonucleotide
  Sense strand starting at position 501 of SEQ ID NO: 1882643
uuacauugagagugacaau

SEQ ID NO: 2137071 - RNA, 19 nt, Artificial Sequence
  Description of Artificial Sequence: Synthetic oligonucleotide
  Antisense strand to SEQ ID NO: 2137070
auugucacucucaauguaa

SEQ ID NO: 2137072 - RNA, 19 nt, Artificial Sequence
  Description of Artificial Sequence: Synthetic oligonucleotide
  Sense strand starting at position 510 of SEQ ID NO: 1882643
gagugacaaugaguugguu

SEQ ID NO: 2137073 - RNA, 19 nt, Artificial Sequence
  Description of Artificial Sequence: Synthetic oligonucleotide
  Antisense strand to SEQ ID NO: 2137072
aaccaacucauugucacuc

SEQ ID NO: 2137074 - RNA, 19 nt, Artificial Sequence
  Description of Artificial Sequence: Synthetic oligonucleotide
  Sense strand starting at position 533 of SEQ ID NO: 1882643
agcuauauugaguacuauu

SEQ ID NO: 2137075 - RNA, 19 nt, Artificial Sequence
  Description of Artificial Sequence: Synthetic oligonucleotide
  Antisense strand to SEQ ID NO: 2137074
aauaguacucaauauagcu

SEQ ID NO: 2137076 - RNA, 19 nt, Artificial Sequence
  Description of Artificial Sequence: Synthetic oligonucleotide
  Sense strand starting at position 659 of SEQ ID NO: 1882643
agauuaggucuuggcaaac

SEQ ID NO: 2137077 - RNA, 19 nt, Artificial Sequence
  Description of Artificial Sequence: Synthetic oligonucleotide
  Antisense strand to SEQ ID NO: 2137076
guuugccaagaccuaaucu

SEQ ID NO: 2137078 - RNA, 19 nt, Artificial Sequence
  Description of Artificial Sequence: Synthetic oligonucleotide
  Sense strand starting at position 751 of SEQ ID NO: 1882643
gugauuacugucguuuggu

SEQ ID NO: 2137079 - RNA, 19 nt, Artificial Sequence
  Description of Artificial Sequence: Synthetic oligonucleotide
  Antisense strand to SEQ ID NO: 2137078
accaaacgacaguaaucac

SEQ ID NO: 2137080 - RNA, 19 nt, Artificial Sequence
  Description of Artificial Sequence: Synthetic oligonucleotide
  Sense strand starting at position 760 of SEQ ID NO: 1882643
gucguuugguauuugguua

SEQ ID NO: 2137081 - RNA, 19 nt, Artificial Sequence
  Description of Artificial Sequence: Synthetic oligonucleotide
  Antisense strand to SEQ ID NO: 2137080
uaaccaaauaccaaacgac

SEQ ID NO: 2137082 - RNA, 19 nt, Artificial Sequence
  Description of Artificial Sequence: Synthetic oligonucleotide
  Sense strand starting at position 761 of SEQ ID NO: 1882643
ucguuugguauuugguuaa

SEQ ID NO: 2137083 - RNA, 19 nt, Artificial Sequence
  Description of Artificial Sequence: Synthetic oligonucleotide
  Antisense strand to SEQ ID NO: 2137082
uuaaccaaauaccaaacga

SEQ ID NO: 2137084 - RNA, 19 nt, Artificial Sequence
  Description of Artificial Sequence: Synthetic oligonucleotide
  Sense strand starting at position 824 of SEQ ID NO: 1882643
aguuccauucuauggcaga

SEQ ID NO: 2137085 - RNA, 19 nt, Artificial Sequence
  Description of Artificial Sequence: Synthetic oligonucleotide
  Antisense strand to SEQ ID NO: 2137084
ucugccauagaauggaacu

SEQ ID NO: 2137086 - RNA, 19 nt, Artificial Sequence
  Description of Artificial Sequence: Synthetic oligonucleotide
  Sense strand starting at position 972 of SEQ ID NO: 1882643
gcaacucaauucucgaaga

SEQ ID NO: 2137087 - RNA, 19 nt, Artificial Sequence
  Description of Artificial Sequence: Synthetic oligonucleotide
  Antisense strand to SEQ ID NO: 2137086
ucuucgagaauugaguugc

SEQ ID NO: 2137088 - RNA, 19 nt, Artificial Sequence
  Description of Artificial Sequence: Synthetic oligonucleotide
  Sense strand starting at position 1126 of SEQ ID NO: 1882643
gcuauagggaauuaaguuu

SEQ ID NO: 2137089 - RNA, 19 nt, Artificial Sequence
  Description of Artificial Sequence: Synthetic oligonucleotide
  Antisense strand to SEQ ID NO: 2137088
aaacuuaauucccuauagc

SEQ ID NO: 2137090 - RNA, 19 nt, Artificial Sequence
  Description of Artificial Sequence: Synthetic oligonucleotide
  Sense strand starting at position 1360 of SEQ ID NO: 1882643
cacccuuuaggugagugaa

SEQ ID NO: 2137091 - RNA, 19 nt, Artificial Sequence
  Description of Artificial Sequence: Synthetic oligonucleotide
  Antisense strand to SEQ ID NO: 2137090
uucacucaccuaaagggug

SEQ ID NO: 2137092 - RNA, 19 nt, Artificial Sequence
  Description of Artificial Sequence: Synthetic oligonucleotide
  Sense strand starting at position 1362 of SEQ ID NO: 1882643
cccuuuaggugagugaaca

SEQ ID NO: 2137093 - RNA, 19 nt, Artificial Sequence
  Description of Artificial Sequence: Synthetic oligonucleotide
  Antisense strand to SEQ ID NO: 2137092
uguucacucaccuaaaggg

SEQ ID NO: 2137094 - RNA, 19 nt, Artificial Sequence
  Description of Artificial Sequence: Synthetic oligonucleotide
  Sense strand starting at position 1550 of SEQ ID NO: 1882643
aguggcgugaccuagagau

SEQ ID NO: 2137095 - RNA, 19 nt, Artificial Sequence
  Description of Artificial Sequence: Synthetic oligonucleotide
  Antisense strand to SEQ ID NO: 2137094
aucucuaggucacgccacu

SEQ ID NO: 2137096 - RNA, 19 nt, Artificial Sequence
  Description of Artificial Sequence: Synthetic oligonucleotide
  Sense strand starting at position 1992 of SEQ ID NO: 1882643
ccgaccaaucaucagcaaa

SEQ ID NO: 2137097 - RNA, 19 nt, Artificial Sequence
  Description of Artificial Sequence: Synthetic oligonucleotide
  Antisense strand to SEQ ID NO: 2137096
uuugcugaugauuggucgg

SEQ ID NO: 2137098 - RNA, 19 nt, Artificial Sequence
  Description of Artificial Sequence: Synthetic oligonucleotide
  Sense strand starting at position 2318 of SEQ ID NO: 1882643
gcggaauuaauccgacuga

SEQ ID NO: 2137099 - RNA, 19 nt, Artificial Sequence
  Description of Artificial Sequence: Synthetic oligonucleotide
  Antisense strand to SEQ ID NO: 2137098
ucagucggauuaauuccgc

SEQ ID NO: 2137100 - RNA, 19 nt, Artificial Sequence
  Description of Artificial Sequence: Synthetic oligonucleotide
  Sense strand starting at position 2548 of SEQ ID NO: 1882643
cuuccucugccaggaauaa

SEQ ID NO: 2137101 - RNA, 19 nt, Artificial Sequence
  Description of Artificial Sequence: Synthetic oligonucleotide
  Antisense strand to SEQ ID NO: 2137100
uuauuccuggcagaggaag

SEQ ID NO: 2137102 - RNA, 19 nt, Artificial Sequence
  Description of Artificial Sequence: Synthetic oligonucleotide
  Sense strand starting at position 2585 of SEQ ID NO: 1882643
cugccuugccaauagaagu

SEQ ID NO: 2137103 - RNA, 19 nt, Artificial Sequence
  Description of Artificial Sequence: Synthetic oligonucleotide
  Antisense strand to SEQ ID NO: 2137102
acuucuauuggcaaggcag

SEQ ID NO: 2137104 - RNA, 19 nt, Artificial Sequence
  Description of Artificial Sequence: Synthetic oligonucleotide
  Sense strand starting at position 2612 of SEQ ID NO: 1882643
agauguuagcucuagaagc

SEQ ID NO: 2137105 - RNA, 19 nt, Artificial Sequence
  Description of Artificial Sequence: Synthetic oligonucleotide
  Antisense strand to SEQ ID NO: 2137104
gcuucuagagcuaacaucu

SEQ ID NO: 2137106 - RNA, 19 nt, Artificial Sequence
  Description of Artificial Sequence: Synthetic oligonucleotide
  Sense strand starting at position 2737 of SEQ ID NO: 1882643
uguccucuucuagaguaag

SEQ ID NO: 2137107 - RNA, 19 nt, Artificial Sequence
  Description of Artificial Sequence: Synthetic oligonucleotide
  Antisense strand to SEQ ID NO: 2137106
cuuacucuagaagaggaca

SEQ ID NO: 2137108 - RNA, 19 nt, Artificial Sequence
  Description of Artificial Sequence: Synthetic oligonucleotide
  Sense strand starting at position 3018 of SEQ ID NO: 1882643
aguuaagcucaugaaagca

SEQ ID NO: 2137109 - RNA, 19 nt, Artificial Sequence
  Description of Artificial Sequence: Synthetic oligonucleotide
  Antisense strand to SEQ ID NO: 2137108
ugcuuucaugagcuuaacu

SEQ ID NO: 2137110 - RNA, 19 nt, Artificial Sequence
  Description of Artificial Sequence: Synthetic oligonucleotide
  Sense strand starting at position 3052 of SEQ ID NO: 1882643
acgugaaagguuuacaacu

SEQ ID NO: 2137111 - RNA, 19 nt, Artificial Sequence
  Description of Artificial Sequence: Synthetic oligonucleotide
  Antisense strand to SEQ ID NO: 2137110
aguuguaaaccuuucacgu

SEQ ID NO: 2137112 - RNA, 19 nt, Artificial Sequence
  Description of Artificial Sequence: Synthetic oligonucleotide
  Sense strand starting at position 3183 of SEQ ID NO: 1882643
caagaagaguaauaggaau

SEQ ID NO: 2137113 - RNA, 19 nt, Artificial Sequence
  Description of Artificial Sequence: Synthetic oligonucleotide
  Antisense strand to SEQ ID NO: 2137112
auuccuauuacucuucuug

SEQ ID NO: 2137114 - RNA, 19 nt, Artificial Sequence
  Description of Artificial Sequence: Synthetic oligonucleotide
  Sense strand starting at position 3216 of SEQ ID NO: 1882643
ggcagagugggagguaaau

SEQ ID NO: 2137115 - RNA, 19 nt, Artificial Sequence
  Description of Artificial Sequence: Synthetic oligonucleotide
  Antisense strand to SEQ ID NO: 2137114
auuuaccucccacucugcc

SEQ ID NO: 2137116 - RNA, 19 nt, Artificial Sequence
  Description of Artificial Sequence: Synthetic oligonucleotide
  Sense strand starting at position 3309 of SEQ ID NO: 1882643
uaaguuuggagagguaaug

SEQ ID NO: 2137117 - RNA, 19 nt, Artificial Sequence
  Description of Artificial Sequence: Synthetic oligonucleotide
  Antisense strand to SEQ ID NO: 2137116
cauuaccucuccaaacuua

SEQ ID NO: 2137118 - RNA, 19 nt, Artificial Sequence
  Description of Artificial Sequence: Synthetic oligonucleotide
  Sense strand starting at position 3327 of SEQ ID NO: 1882643
ggaagaucuugucaauuug

SEQ ID NO: 2137119 - RNA, 19 nt, Artificial Sequence
  Description of Artificial Sequence: Synthetic oligonucleotide
  Antisense strand to SEQ ID NO: 2137118
caaauugacaagaucuucc

SEQ ID NO: 2137120 - RNA, 19 nt, Artificial Sequence
  Description of Artificial Sequence: Synthetic oligonucleotide
  Sense strand starting at position 3376 of SEQ ID NO: 1882643
ugggucuuccugggaaagu

SEQ ID NO: 2137121 - RNA, 19 nt, Artificial Sequence
  Description of Artificial Sequence: Synthetic oligonucleotide
  Antisense strand to SEQ ID NO: 2137120
acuuucccaggaagaccca

SEQ ID NO: 2137122 - RNA, 19 nt, Artificial Sequence
  Description of Artificial Sequence: Synthetic oligonucleotide
  Sense strand starting at position 3385 of SEQ ID NO: 1882643
cugggaaaguuucuaagcu

SEQ ID NO: 2137123 - RNA, 19 nt, Artificial Sequence
  Description of Artificial Sequence: Synthetic oligonucleotide
  Antisense strand to SEQ ID NO: 2137122
agcuuagaaacuuucccag

SEQ ID NO: 2137124 - RNA, 19 nt, Artificial Sequence
  Description of Artificial Sequence: Synthetic oligonucleotide
  Sense strand starting at position 3419 of SEQ ID NO: 1882643
gccaucuaauggguauuaa

SEQ ID NO: 2137125 - RNA, 19 nt, Artificial Sequence
  Description of Artificial Sequence: Synthetic oligonucleotide
  Antisense strand to SEQ ID NO: 2137124
uuaauacccauuagauggc

SEQ ID NO: 2137126 - RNA, 19 nt, Artificial Sequence
  Description of Artificial Sequence: Synthetic oligonucleotide
  Sense strand starting at position 3756 of SEQ ID NO: 1882643
cuguguuaugugcugguga

SEQ ID NO: 2137127 - RNA, 19 nt, Artificial Sequence
  Description of Artificial Sequence: Synthetic oligonucleotide
  Antisense strand to SEQ ID NO: 2137126
ucaccagcacauaacacag

SEQ ID NO: 2137128 - RNA, 19 nt, Artificial Sequence
  Description of Artificial Sequence: Synthetic oligonucleotide
  Sense strand starting at position 3795 of SEQ ID NO: 1882643
cgucccuguccucaaggaa

SEQ ID NO: 2137129 - RNA, 19 nt, Artificial Sequence
  Description of Artificial Sequence: Synthetic oligonucleotide
  Antisense strand to SEQ ID NO: 2137128
uuccuugaggacagggacg

SEQ ID NO: 2137130 - RNA, 19 nt, Artificial Sequence
  Description of Artificial Sequence: Synthetic oligonucleotide
  Sense strand starting at position 3831 of SEQ ID NO: 1882643
ccauccauccuggaauugu

SEQ ID NO: 2137131 - RNA, 19 nt, Artificial Sequence
  Description of Artificial Sequence: Synthetic oligonucleotide
  Antisense strand to SEQ ID NO: 2137130
acaauuccaggauggaugg

SEQ ID NO: 2137132 - RNA, 19 nt, Artificial Sequence
  Description of Artificial Sequence: Synthetic oligonucleotide
  Sense strand starting at position 323 of SEQ ID NO: 1882644
uggaaaugcucuuccucuu

SEQ ID NO: 2137133 - RNA, 19 nt, Artificial Sequence
  Description of Artificial Sequence: Synthetic oligonucleotide
  Antisense strand to SEQ ID NO: 2137132
aagaggaagagcauuucca

SEQ ID NO: 2137134 - RNA, 19 nt, Artificial Sequence
  Description of Artificial Sequence: Synthetic oligonucleotide
  Sense strand starting at position 359 of SEQ ID NO: 1882644
ggguucuucucauccauca

SEQ ID NO: 2137135 - RNA, 19 nt, Artificial Sequence
  Description of Artificial Sequence: Synthetic oligonucleotide
  Antisense strand to SEQ ID NO: 2137134
ugauggaugagaagaaccc

SEQ ID NO: 2137136 - RNA, 19 nt, Artificial Sequence
  Description of Artificial Sequence: Synthetic oligonucleotide
  Sense strand starting at position 419 of SEQ ID NO: 1882644
gaaauuucguccuaugaau

SEQ ID NO: 2137137 - RNA, 19 nt, Artificial Sequence
  Description of Artificial Sequence: Synthetic oligonucleotide
  Antisense strand to SEQ ID NO: 2137136
auucauaggacgaaauuuc

SEQ ID NO: 2137138 - RNA, 19 nt, Artificial Sequence
  Description of Artificial Sequence: Synthetic oligonucleotide
  Sense strand starting at position 591 of SEQ ID NO: 1882644
ucucccgaccuauagauau

SEQ ID NO: 2137139 - RNA, 19 nt, Artificial Sequence
  Description of Artificial Sequence: Synthetic oligonucleotide
  Antisense strand to SEQ ID NO: 2137138
auaucuauaggucgggaga

SEQ ID NO: 2137140 - RNA, 19 nt, Artificial Sequence
  Description of Artificial Sequence: Synthetic oligonucleotide
  Sense strand starting at position 677 of SEQ ID NO: 1882644
ccaaguagauaucugauga

SEQ ID NO: 2137141 - RNA, 19 nt, Artificial Sequence
  Description of Artificial Sequence: Synthetic oligonucleotide
  Antisense strand to SEQ ID NO: 2137140
ucaucagauaucuacuugg

SEQ ID NO: 2137142 - RNA, 19 nt, Artificial Sequence
  Description of Artificial Sequence: Synthetic oligonucleotide
  Sense strand starting at position 743 of SEQ ID NO: 1882644
ugauacggucgcuauaaau

SEQ ID NO: 2137143 - RNA, 19 nt, Artificial Sequence
  Description of Artificial Sequence: Synthetic oligonucleotide
  Antisense strand to SEQ ID NO: 2137142
auuuauagcgaccguauca

SEQ ID NO: 2137144 - RNA, 19 nt, Artificial Sequence
  Description of Artificial Sequence: Synthetic oligonucleotide
  Sense strand starting at position 851 of SEQ ID NO: 1882644
ccacucuuacuuggagaaa

SEQ ID NO: 2137145 - RNA, 19 nt, Artificial Sequence
  Description of Artificial Sequence: Synthetic oligonucleotide
  Antisense strand to SEQ ID NO: 2137144
uuucuccaaguaagagugg

SEQ ID NO: 2137146 - RNA, 19 nt, Artificial Sequence
  Description of Artificial Sequence: Synthetic oligonucleotide
  Sense strand starting at position 871 of SEQ ID NO: 1882644
guaugagaaugccuugauu

SEQ ID NO: 2137147 - RNA, 19 nt, Artificial Sequence
  Description of Artificial Sequence: Synthetic oligonucleotide
  Antisense strand to SEQ ID NO: 2137146
aaucaaggcauucucauac

SEQ ID NO: 2137148 - RNA, 19 nt, Artificial Sequence
  Description of Artificial Sequence: Synthetic oligonucleotide
  Sense strand starting at position 979 of SEQ ID NO: 1882644
cuccgaguuugauuccaaa

SEQ ID NO: 2137149 - RNA, 19 nt, Artificial Sequence
  Description of Artificial Sequence: Synthetic oligonucleotide
  Antisense strand to SEQ ID NO: 2137148
uuuggaaucaaacucggag

SEQ ID NO: 2137150 - RNA, 19 nt, Artificial Sequence
  Description of Artificial Sequence: Synthetic oligonucleotide
  Sense strand starting at position 1099 of SEQ ID NO: 1882644
gcaggaagucuccaaccca

SEQ ID NO: 2137151 - RNA, 19 nt, Artificial Sequence
  Description of Artificial Sequence: Synthetic oligonucleotide
  Antisense strand to SEQ ID NO: 2137150
uggguuggagacuuccugc

SEQ ID NO: 2137152 - RNA, 19 nt, Artificial Sequence
  Description of Artificial Sequence: Synthetic oligonucleotide
  Sense strand starting at position 1381 of SEQ ID NO: 1882644
gaaggcaucugugagauuu

SEQ ID NO: 2137153 - RNA, 19 nt, Artificial Sequence
  Description of Artificial Sequence: Synthetic oligonucleotide
  Antisense strand to SEQ ID NO: 2137152
aaaucucacagaugccuuc

SEQ ID NO: 2137154 - RNA, 19 nt, Artificial Sequence
  Description of Artificial Sequence: Synthetic oligonucleotide
  Sense strand starting at position 1513 of SEQ ID NO: 1882644
ccuccuuaccagugugauc

SEQ ID NO: 2137155 - RNA, 19 nt, Artificial Sequence
  Description of Artificial Sequence: Synthetic oligonucleotide
  Antisense strand to SEQ ID NO: 2137154
gaucacacugguaaggagg

SEQ ID NO: 2137156 - RNA, 19 nt, Artificial Sequence
  Description of Artificial Sequence: Synthetic oligonucleotide
  Sense strand starting at position 1518 of SEQ ID NO: 1882644
uuaccagugugauccauga

SEQ ID NO: 2137157 - RNA, 19 nt, Artificial Sequence
  Description of Artificial Sequence: Synthetic oligonucleotide
  Antisense strand to SEQ ID NO: 2137156
ucauggaucacacugguaa

SEQ ID NO: 2137158 - RNA, 19 nt, Artificial Sequence
  Description of Artificial Sequence: Synthetic oligonucleotide
  Sense strand starting at position 1994 of SEQ ID NO: 1882644
ggaguaacgguuuggaauc

SEQ ID NO: 2137159 - RNA, 19 nt, Artificial Sequence
  Description of Artificial Sequence: Synthetic oligonucleotide
  Antisense strand to SEQ ID NO: 2137158
gauuccaaaccguuacucc

SEQ ID NO: 2137160 - RNA, 19 nt, Artificial Sequence
  Description of Artificial Sequence: Synthetic oligonucleotide
  Sense strand starting at position 2201 of SEQ ID NO: 1882644
cagagcuaacuugguauau

SEQ ID NO: 2137161 - RNA, 19 nt, Artificial Sequence
  Description of Artificial Sequence: Synthetic oligonucleotide
  Antisense strand to SEQ ID NO: 2137160
auauaccaaguuagcucug

SEQ ID NO: 2137162 - RNA, 19 nt, Artificial Sequence
  Description of Artificial Sequence: Synthetic oligonucleotide
  Sense strand starting at position 2202 of SEQ ID NO: 1882644
agagcuaacuugguauaug

SEQ ID NO: 2137163 - RNA, 19 nt, Artificial Sequence
  Description of Artificial Sequence: Synthetic oligonucleotide
  Antisense strand to SEQ ID NO: 2137162
cauauaccaaguuagcucu

SEQ ID NO: 2137164 - RNA, 19 nt, Artificial Sequence
  Description of Artificial Sequence: Synthetic oligonucleotide
  Sense strand starting at position 2235 of SEQ ID NO: 1882644
ucuuaagucucuuuacagu

SEQ ID NO: 2137165 - RNA, 19 nt, Artificial Sequence
  Description of Artificial Sequence: Synthetic oligonucleotide
  Antisense strand to SEQ ID NO: 2137164
acuguaaagagacuuaaga

SEQ ID NO: 2137166 - RNA, 19 nt, Artificial Sequence
  Description of Artificial Sequence: Synthetic oligonucleotide
  Sense strand starting at position 2253 of SEQ ID NO: 1882644
uugaaacacguuuauaaug

SEQ ID NO: 2137167 - RNA, 19 nt, Artificial Sequence
  Description of Artificial Sequence: Synthetic oligonucleotide
  Antisense strand to SEQ ID NO: 2137166
cauuauaaacguguuucaa

SEQ ID NO: 2137168 - RNA, 19 nt, Artificial Sequence
  Description of Artificial Sequence: Synthetic oligonucleotide
  Sense strand starting at position 2300 of SEQ ID NO: 1882644
gcgcuugugacgcuacgaa

SEQ ID NO: 2137169 - RNA, 19 nt, Artificial Sequence
  Description of Artificial Sequence: Synthetic oligonucleotide
  Antisense strand to SEQ ID NO: 2137168
uucguagcgucacaagcgc

SEQ ID NO: 2137170 - RNA, 19 nt, Artificial Sequence
  Description of Artificial Sequence: Synthetic oligonucleotide
  Sense strand starting at position 2482 of SEQ ID NO: 1882644
gccggaaggagagguuaaa

SEQ ID NO: 2137171 - RNA, 19 nt, Artificial Sequence
  Description of Artificial Sequence: Synthetic oligonucleotide
  Antisense strand to SEQ ID NO: 2137170
uuuaaccucuccuuccggc

SEQ ID NO: 2137172 - RNA, 19 nt, Artificial Sequence
  Description of Artificial Sequence: Synthetic oligonucleotide
  Sense strand starting at position 2630 of SEQ ID NO: 1882644
gggcgauuccuaggaccuu

SEQ ID NO: 2137173 - RNA, 19 nt, Artificial Sequence
  Description of Artificial Sequence: Synthetic oligonucleotide
  Antisense strand to SEQ ID NO: 2137172
aagguccuaggaaucgccc

SEQ ID NO: 2137174 - RNA, 19 nt, Artificial Sequence
  Description of Artificial Sequence: Synthetic oligonucleotide
  Sense strand starting at position 2669 of SEQ ID NO: 1882644
ggacuuggcucauuugugu

SEQ ID NO: 2137175 - RNA, 19 nt, Artificial Sequence
  Description of Artificial Sequence: Synthetic oligonucleotide
  Antisense strand to SEQ ID NO: 2137174
acacaaaugagccaagucc

SEQ ID NO: 2137176 - RNA, 19 nt, Artificial Sequence
  Description of Artificial Sequence: Synthetic oligonucleotide
  Sense strand starting at position 2713 of SEQ ID NO: 1882644
cuugaugcucuuggaugaa

SEQ ID NO: 2137177 - RNA, 19 nt, Artificial Sequence
  Description of Artificial Sequence: Synthetic oligonucleotide
  Antisense strand to SEQ ID NO: 2137176
uucauccaagagcaucaag

SEQ ID NO: 2137178 - RNA, 19 nt, Artificial Sequence
  Description of Artificial Sequence: Synthetic oligonucleotide
  Sense strand starting at position 2716 of SEQ ID NO: 1882644
gaugcucuuggaugaauag

SEQ ID NO: 2137179 - RNA, 19 nt, Artificial Sequence
  Description of Artificial Sequence: Synthetic oligonucleotide
  Antisense strand to SEQ ID NO: 2137178
cuauucauccaagagcauc

SEQ ID NO: 2137180 - RNA, 19 nt, Artificial Sequence
  Description of Artificial Sequence: Synthetic oligonucleotide
  Sense strand starting at position 2777 of SEQ ID NO: 1882644
ggauuuggguucuauucuu

SEQ ID NO: 2137181 - RNA, 19 nt, Artificial Sequence
  Description of Artificial Sequence: Synthetic oligonucleotide
  Antisense strand to SEQ ID NO: 2137180
aagaauagaacccaaaucc

SEQ ID NO: 2137182 - RNA, 19 nt, Artificial Sequence
  Description of Artificial Sequence: Synthetic oligonucleotide
  Sense strand starting at position 2813 of SEQ ID NO: 1882644
acaucauuaccuuggguua

SEQ ID NO: 2137183 - RNA, 19 nt, Artificial Sequence
  Description of Artificial Sequence: Synthetic oligonucleotide
  Antisense strand to SEQ ID NO: 2137182
uaacccaagguaaugaugu

SEQ ID NO: 2137184 - RNA, 19 nt, Artificial Sequence
  Description of Artificial Sequence: Synthetic oligonucleotide
  Sense strand starting at position 2928 of SEQ ID NO: 1882644
auguguagcgauguguuau

SEQ ID NO: 2137185 - RNA, 19 nt, Artificial Sequence
  Description of Artificial Sequence: Synthetic oligonucleotide
  Antisense strand to SEQ ID NO: 2137184
auaacacaucgcuacacau

SEQ ID NO: 2137186 - RNA, 19 nt, Artificial Sequence
  Description of Artificial Sequence: Synthetic oligonucleotide
  Sense strand starting at position 2963 of SEQ ID NO: 1882644
gguauuauuugugaaucau

SEQ ID NO: 2137187 - RNA, 19 nt, Artificial Sequence
  Description of Artificial Sequence: Synthetic oligonucleotide
  Antisense strand to SEQ ID NO: 2137186
augauucacaaauaauacc

SEQ ID NO: 2137188 - RNA, 19 nt, Artificial Sequence
  Description of Artificial Sequence: Synthetic oligonucleotide
  Sense strand starting at position 2974 of SEQ ID NO: 1882644
ugaaucaugcugugaugau

SEQ ID NO: 2137189 - RNA, 19 nt, Artificial Sequence
  Description of Artificial Sequence: Synthetic oligonucleotide
  Antisense strand to SEQ ID NO: 2137188
aucaucacagcaugauuca

SEQ ID NO: 2137190 - RNA, 19 nt, Artificial Sequence
  Description of Artificial Sequence: Synthetic oligonucleotide
  Sense strand starting at position 2995 of SEQ ID NO: 1882644
gugcgauuuaagugcacca

SEQ ID NO: 2137191 - RNA, 19 nt, Artificial Sequence
  Description of Artificial Sequence: Synthetic oligonucleotide
  Antisense strand to SEQ ID NO: 2137190
uggugcacuuaaaucgcac

SEQ ID NO: 2137192 - RNA, 19 nt, Artificial Sequence
  Description of Artificial Sequence: Synthetic oligonucleotide
  Sense strand starting at position 3008 of SEQ ID NO: 1882644
gcaccauguuauuugguga

SEQ ID NO: 2137193 - RNA, 19 nt, Artificial Sequence
  Description of Artificial Sequence: Synthetic oligonucleotide
  Antisense strand to SEQ ID NO: 2137192
ucaccaaauaacauggugc

SEQ ID NO: 2137194 - RNA, 19 nt, Artificial Sequence
  Description of Artificial Sequence: Synthetic oligonucleotide
  Sense strand starting at position 3191 of SEQ ID NO: 1882644
aguuucugggauuauuguu

SEQ ID NO: 2137195 - RNA, 19 nt, Artificial Sequence
  Description of Artificial Sequence: Synthetic oligonucleotide
  Antisense strand to SEQ ID NO: 2137194
aacaauaaucccagaaacu

SEQ ID NO: 2137196 - RNA, 19 nt, Artificial Sequence
  Description of Artificial Sequence: Synthetic oligonucleotide
  Sense strand starting at position 3256 of SEQ ID NO: 1882644
uucuaaauacaguguugau

SEQ ID NO: 2137197 - RNA, 19 nt, Artificial Sequence
  Description of Artificial Sequence: Synthetic oligonucleotide
  Antisense strand to SEQ ID NO: 2137196
aucaacacuguauuuagaa

SEQ ID NO: 2137198 - RNA, 19 nt, Artificial Sequence
  Description of Artificial Sequence: Synthetic oligonucleotide
  Sense strand starting at position 3268 of SEQ ID NO: 1882644
uguugauauagucaggcau

SEQ ID NO: 2137199 - RNA, 19 nt, Artificial Sequence
  Description of Artificial Sequence: Synthetic oligonucleotide
  Antisense strand to SEQ ID NO: 2137198
augccugacuauaucaaca

SEQ ID NO: 2137200 - RNA, 19 nt, Artificial Sequence
  Description of Artificial Sequence: Synthetic oligonucleotide
  Sense strand starting at position 3588 of SEQ ID NO: 1882644
auuauuaaugucugcugau

SEQ ID NO: 2137201 - RNA, 19 nt, Artificial Sequence
  Description of Artificial Sequence: Synthetic oligonucleotide
  Antisense strand to SEQ ID NO: 2137200
aucagcagacauuaauaau

SEQ ID NO: 2137202 - RNA, 19 nt, Artificial Sequence
  Description of Artificial Sequence: Synthetic oligonucleotide
  Sense strand starting at position 3589 of SEQ ID NO: 1882644
uuauuaaugucugcugaug

SEQ ID NO: 2137203 - RNA, 19 nt, Artificial Sequence
  Description of Artificial Sequence: Synthetic oligonucleotide
  Antisense strand to SEQ ID NO: 2137202
caucagcagacauuaauaa

SEQ ID NO: 2137204 - RNA, 19 nt, Artificial Sequence
  Description of Artificial Sequence: Synthetic oligonucleotide
  Sense strand starting at position 3726 of SEQ ID NO: 1882644
agauguacuuacuuuagau

SEQ ID NO: 2137205 - RNA, 19 nt, Artificial Sequence
  Description of Artificial Sequence: Synthetic oligonucleotide
  Antisense strand to SEQ ID NO: 2137204
aucuaaaguaaguacaucu

SEQ ID NO: 2137206 - RNA, 19 nt, Artificial Sequence
  Description of Artificial Sequence: Synthetic oligonucleotide
  Sense strand starting at position 3809 of SEQ ID NO: 1882644
gcaucuguggucuguauuu

SEQ ID NO: 2137207 - RNA, 19 nt, Artificial Sequence
  Description of Artificial Sequence: Synthetic oligonucleotide
  Antisense strand to SEQ ID NO: 2137206
aaauacagaccacagaugc

SEQ ID NO: 2137208 - RNA, 19 nt, Artificial Sequence
  Description of Artificial Sequence: Synthetic oligonucleotide
  Sense strand starting at position 3839 of SEQ ID NO: 1882644
ugugguugccuugaauuac

SEQ ID NO: 2137209 - RNA, 19 nt, Artificial Sequence
  Description of Artificial Sequence: Synthetic oligonucleotide
  Antisense strand to SEQ ID NO: 2137208
guaauucaaggcaaccaca

SEQ ID NO: 2137210 - RNA, 19 nt, Artificial Sequence
  Description of Artificial Sequence: Synthetic oligonucleotide
  Sense strand starting at position 3849 of SEQ ID NO: 1882644
uugaauuaccaaugcagua

SEQ ID NO: 2137211 - RNA, 19 nt, Artificial Sequence
  Description of Artificial Sequence: Synthetic oligonucleotide
  Antisense strand to SEQ ID NO: 2137210
uacugcauugguaauucaa

SEQ ID NO: 2137212 - RNA, 19 nt, Artificial Sequence
  Description of Artificial Sequence: Synthetic oligonucleotide
  Sense strand starting at position 34 of SEQ ID NO: 1882645
augagaaacgccugucuga

SEQ ID NO: 2137213 - RNA, 19 nt, Artificial Sequence
  Description of Artificial Sequence: Synthetic oligonucleotide
  Antisense strand to SEQ ID NO: 2137212
ucagacaggcguuucucau

SEQ ID NO: 2137214 - RNA, 19 nt, Artificial Sequence
  Description of Artificial Sequence: Synthetic oligonucleotide
  Sense strand starting at position 132 of SEQ ID NO: 1882645
guauguuauuucucuaucu

SEQ ID NO: 2137215 - RNA, 19 nt, Artificial Sequence
  Description of Artificial Sequence: Synthetic oligonucleotide
  Antisense strand to SEQ ID NO: 2137214
agauagagaaauaacauac

SEQ ID NO: 2137216 - RNA, 19 nt, Artificial Sequence
  Description of Artificial Sequence: Synthetic oligonucleotide
  Sense strand starting at position 148 of SEQ ID NO: 1882645
ucuuccuuccuggauaaug

SEQ ID NO: 2137217 - RNA, 19 nt, Artificial Sequence
  Description of Artificial Sequence: Synthetic oligonucleotide
  Antisense strand to SEQ ID NO: 2137216
cauuauccaggaaggaaga

SEQ ID NO: 2137218 - RNA, 19 nt, Artificial Sequence
  Description of Artificial Sequence: Synthetic oligonucleotide
  Sense strand starting at position 156 of SEQ ID NO: 1882645
ccuggauaaugaucuucuu

SEQ ID NO: 2137219 - RNA, 19 nt, Artificial Sequence
  Description of Artificial Sequence: Synthetic oligonucleotide
  Antisense strand to SEQ ID NO: 2137218
aagaagaucauuauccagg

SEQ ID NO: 2137220 - RNA, 19 nt, Artificial Sequence
  Description of Artificial Sequence: Synthetic oligonucleotide
  Sense strand starting at position 276 of SEQ ID NO: 1882645
cggacaagucacugccaca

SEQ ID NO: 2137221 - RNA, 19 nt, Artificial Sequence
  Description of Artificial Sequence: Synthetic oligonucleotide
  Antisense strand to SEQ ID NO: 2137220
uguggcagugacuuguccg

SEQ ID NO: 2137222 - RNA, 19 nt, Artificial Sequence
  Description of Artificial Sequence: Synthetic oligonucleotide
  Sense strand starting at position 419 of SEQ ID NO: 1882645
cagggagauuaugugacuu

SEQ ID NO: 2137223 - RNA, 19 nt, Artificial Sequence
  Description of Artificial Sequence: Synthetic oligonucleotide
  Antisense strand to SEQ ID NO: 2137222
aagucacauaaucucccug

SEQ ID NO: 2137224 - RNA, 19 nt, Artificial Sequence
  Description of Artificial Sequence: Synthetic oligonucleotide
  Sense strand starting at position 498 of SEQ ID NO: 1882645
cucugugggaauugguuua

SEQ ID NO: 2137225 - RNA, 19 nt, Artificial Sequence
  Description of Artificial Sequence: Synthetic oligonucleotide
  Antisense strand to SEQ ID NO: 2137224
uaaaccaauucccacagag

SEQ ID NO: 2137226 - RNA, 19 nt, Artificial Sequence
  Description of Artificial Sequence: Synthetic oligonucleotide
  Sense strand starting at position 554 of SEQ ID NO: 1882645
uguuaaauuuguccuugca

SEQ ID NO: 2137227 - RNA, 19 nt, Artificial Sequence
  Description of Artificial Sequence: Synthetic oligonucleotide
  Antisense strand to SEQ ID NO: 2137226
ugcaaggacaaauuuaaca

SEQ ID NO: 2137228 - RNA, 19 nt, Artificial Sequence
  Description of Artificial Sequence: Synthetic oligonucleotide
  Sense strand starting at position 699 of SEQ ID NO: 1882645
gugcgauaaagugaguaua

SEQ ID NO: 2137229 - RNA, 19 nt, Artificial Sequence
  Description of Artificial Sequence: Synthetic oligonucleotide
  Antisense strand to SEQ ID NO: 2137228
uauacucacuuuaucgcac

SEQ ID NO: 2137230 - RNA, 19 nt, Artificial Sequence
  Description of Artificial Sequence: Synthetic oligonucleotide
  Sense strand starting at position 701 of SEQ ID NO: 1882645
gcgauaaagugaguauauu

SEQ ID NO: 2137231 - RNA, 19 nt, Artificial Sequence
  Description of Artificial Sequence: Synthetic oligonucleotide
  Antisense strand to SEQ ID NO: 2137230
aauauacucacuuuaucgc

SEQ ID NO: 2137232 - RNA, 19 nt, Artificial Sequence
  Description of Artificial Sequence: Synthetic oligonucleotide
  Sense strand starting at position 702 of SEQ ID NO: 1882645
cgauaaagugaguauauug

SEQ ID NO: 2137233 - RNA, 19 nt, Artificial Sequence
  Description of Artificial Sequence: Synthetic oligonucleotide
  Antisense strand to SEQ ID NO: 2137232
caauauacucacuuuaucg

SEQ ID NO: 2137234 - RNA, 19 nt, Artificial Sequence
  Description of Artificial Sequence: Synthetic oligonucleotide
  Sense strand starting at position 829 of SEQ ID NO: 1882645
agggccuuccaacaucauu

SEQ ID NO: 2137235 - RNA, 19 nt, Artificial Sequence
  Description of Artificial Sequence: Synthetic oligonucleotide
  Antisense strand to SEQ ID NO: 2137234
aaugauguuggaaggcccu

SEQ ID NO: 2137236 - RNA, 19 nt, Artificial Sequence
  Description of Artificial Sequence: Synthetic oligonucleotide
  Sense strand starting at position 2261 of SEQ ID NO: 1882645
ugggaauggugguuucuuu

SEQ ID NO: 2137237 - RNA, 19 nt, Artificial Sequence
  Description of Artificial Sequence: Synthetic oligonucleotide
  Antisense strand to SEQ ID NO: 2137236
aaagaaaccaccauuccca

SEQ ID NO: 2137238 - RNA, 19 nt, Artificial Sequence
  Description of Artificial Sequence: Synthetic oligonucleotide
  Sense strand starting at position 2273 of SEQ ID NO: 1882645
uuucuuucgcucuuugcaa

SEQ ID NO: 2137239 - RNA, 19 nt, Artificial Sequence
  Description of Artificial Sequence: Synthetic oligonucleotide
  Antisense strand to SEQ ID NO: 2137238
uugcaaagagcgaaagaaa

SEQ ID NO: 2137240 - RNA, 19 nt, Artificial Sequence
  Description of Artificial Sequence: Synthetic oligonucleotide
  Sense strand starting at position 2348 of SEQ ID NO: 1882645
gguagaggucuguaguuuc

SEQ ID NO: 2137241 - RNA, 19 nt, Artificial Sequence
  Description of Artificial Sequence: Synthetic oligonucleotide
  Antisense strand to SEQ ID NO: 2137240
gaaacuacagaccucuacc

SEQ ID NO: 2137242 - RNA, 19 nt, Artificial Sequence
  Description of Artificial Sequence: Synthetic oligonucleotide
  Sense strand starting at position 2596 of SEQ ID NO: 1882645
agucacaucuugucacaga

SEQ ID NO: 2137243 - RNA, 19 nt, Artificial Sequence
  Description of Artificial Sequence: Synthetic oligonucleotide
  Antisense strand to SEQ ID NO: 2137242
ucugugacaagaugugacu

SEQ ID NO: 2137244 - RNA, 19 nt, Artificial Sequence
  Description of Artificial Sequence: Synthetic oligonucleotide
  Sense strand starting at position 2678 of SEQ ID NO: 1882645
ggcucuaauugaguuuauc

SEQ ID NO: 2137245 - RNA, 19 nt, Artificial Sequence
  Description of Artificial Sequence: Synthetic oligonucleotide
  Antisense strand to SEQ ID NO: 2137244
gauaaacucaauuagagcc

SEQ ID NO: 2137246 - RNA, 19 nt, Artificial Sequence
  Description of Artificial Sequence: Synthetic oligonucleotide
  Sense strand starting at position 2688 of SEQ ID NO: 1882645
gaguuuaucuaagcaugua

SEQ ID NO: 2137247 - RNA, 19 nt, Artificial Sequence
  Description of Artificial Sequence: Synthetic oligonucleotide
  Antisense strand to SEQ ID NO: 2137246
uacaugcuuagauaaacuc

SEQ ID NO: 2137248 - RNA, 19 nt, Artificial Sequence
  Description of Artificial Sequence: Synthetic oligonucleotide
  Sense strand starting at position 2875 of SEQ ID NO: 1882645
ggauuucucugagauuugc

SEQ ID NO: 2137249 - RNA, 19 nt, Artificial Sequence
  Description of Artificial Sequence: Synthetic oligonucleotide
  Antisense strand to SEQ ID NO: 2137248
gcaaaucucagagaaaucc

SEQ ID NO: 2137250 - RNA, 19 nt, Artificial Sequence
  Description of Artificial Sequence: Synthetic oligonucleotide
  Sense strand starting at position 2893 of SEQ ID NO: 1882645
cgggauaucaaggguguuu

SEQ ID NO: 2137251 - RNA, 19 nt, Artificial Sequence
  Description of Artificial Sequence: Synthetic oligonucleotide
  Antisense strand to SEQ ID NO: 2137250
aaacacccuugauaucccg

SEQ ID NO: 2137252 - RNA, 19 nt, Artificial Sequence
  Description of Artificial Sequence: Synthetic oligonucleotide
  Sense strand starting at position 2943 of SEQ ID NO: 1882645
uuguacauguaguugaaau

SEQ ID NO: 2137253 - RNA, 19 nt, Artificial Sequence
  Description of Artificial Sequence: Synthetic oligonucleotide
  Antisense strand to SEQ ID NO: 2137252
auuucaacuacauguacaa

SEQ ID NO: 2137254 - RNA, 19 nt, Artificial Sequence
  Description of Artificial Sequence: Synthetic oligonucleotide
  Sense strand starting at position 2944 of SEQ ID NO: 1882645
uguacauguaguugaaaua

SEQ ID NO: 2137255 - RNA, 19 nt, Artificial Sequence
  Description of Artificial Sequence: Synthetic oligonucleotide
  Antisense strand to SEQ ID NO: 2137254
uauuucaacuacauguaca

SEQ ID NO: 2137256 - RNA, 19 nt, Artificial Sequence
  Description of Artificial Sequence: Synthetic oligonucleotide
  Sense strand starting at position 2945 of SEQ ID NO: 1882645
guacauguaguugaaauaa

SEQ ID NO: 2137257 - RNA, 19 nt, Artificial Sequence
  Description of Artificial Sequence: Synthetic oligonucleotide
  Antisense strand to SEQ ID NO: 2137256
uuauuucaacuacauguac

SEQ ID NO: 2137258 - RNA, 19 nt, Artificial Sequence
  Description of Artificial Sequence: Synthetic oligonucleotide
  Sense strand starting at position 2974 of SEQ ID NO: 1882645
uguauaauuugggucagcu

SEQ ID NO: 2137259 - RNA, 19 nt, Artificial Sequence
  Description of Artificial Sequence: Synthetic oligonucleotide
  Antisense strand to SEQ ID NO: 2137258
agcugacccaaauuauaca

SEQ ID NO: 2137260 - RNA, 19 nt, Artificial Sequence
  Description of Artificial Sequence: Synthetic oligonucleotide
  Sense strand starting at position 3000 of SEQ ID NO: 1882645
gagucuaagguuugauaua

SEQ ID NO: 2137261 - RNA, 19 nt, Artificial Sequence
  Description of Artificial Sequence: Synthetic oligonucleotide
  Antisense strand to SEQ ID NO: 2137260
uauaucaaaccuuagacuc

SEQ ID NO: 2137262 - RNA, 19 nt, Artificial Sequence
  Description of Artificial Sequence: Synthetic oligonucleotide
  Sense strand starting at position 3130 of SEQ ID NO: 1882645
auaagacauccaggugauu

SEQ ID NO: 2137263 - RNA, 19 nt, Artificial Sequence
  Description of Artificial Sequence: Synthetic oligonucleotide
  Antisense strand to SEQ ID NO: 2137262
aaucaccuggaugucuuau

SEQ ID NO: 2137264 - RNA, 19 nt, Artificial Sequence
  Description of Artificial Sequence: Synthetic oligonucleotide
  Sense strand starting at position 3139 of SEQ ID NO: 1882645
ccaggugauuaugcacauu

SEQ ID NO: 2137265 - RNA, 19 nt, Artificial Sequence
  Description of Artificial Sequence: Synthetic oligonucleotide
  Antisense strand to SEQ ID NO: 2137264
aaugugcauaaucaccugg

SEQ ID NO: 2137266 - RNA, 19 nt, Artificial Sequence
  Description of Artificial Sequence: Synthetic oligonucleotide
  Sense strand starting at position 3142 of SEQ ID NO: 1882645
ggugauuaugcacauuaua

SEQ ID NO: 2137267 - RNA, 19 nt, Artificial Sequence
  Description of Artificial Sequence: Synthetic oligonucleotide
  Antisense strand to SEQ ID NO: 2137266
uauaaugugcauaaucacc

SEQ ID NO: 2137268 - RNA, 19 nt, Artificial Sequence
  Description of Artificial Sequence: Synthetic oligonucleotide
  Sense strand starting at position 3177 of SEQ ID NO: 1882645
gaggguuuauuauuaaucu

SEQ ID NO: 2137269 - RNA, 19 nt, Artificial Sequence
  Description of Artificial Sequence: Synthetic oligonucleotide
  Antisense strand to SEQ ID NO: 2137268
agauuaauaauaaacccuc

SEQ ID NO: 2137270 - RNA, 19 nt, Artificial Sequence
  Description of Artificial Sequence: Synthetic oligonucleotide
  Sense strand starting at position 3249 of SEQ ID NO: 1882645
cacugaaauucguccaagu

SEQ ID NO: 2137271 - RNA, 19 nt, Artificial Sequence
  Description of Artificial Sequence: Synthetic oligonucleotide
  Antisense strand to SEQ ID NO: 2137270
acuuggacgaauuucagug

SEQ ID NO: 2137272 - RNA, 19 nt, Artificial Sequence
  Description of Artificial Sequence: Synthetic oligonucleotide
  Sense strand starting at position 3251 of SEQ ID NO: 1882645
cugaaauucguccaaguug

SEQ ID NO: 2137273 - RNA, 19 nt, Artificial Sequence
  Description of Artificial Sequence: Synthetic oligonucleotide
  Antisense strand to SEQ ID NO: 2137272
caacuuggacgaauuucag

SEQ ID NO: 2137274 - RNA, 19 nt, Artificial Sequence
  Description of Artificial Sequence: Synthetic oligonucleotide
  Sense strand starting at position 3260 of SEQ ID NO: 1882645
guccaaguugggcauuaau

SEQ ID NO: 2137275 - RNA, 19 nt, Artificial Sequence
  Description of Artificial Sequence: Synthetic oligonucleotide
  Antisense strand to SEQ ID NO: 2137274
auuaaugcccaacuuggac

SEQ ID NO: 2137276 - RNA, 19 nt, Artificial Sequence
  Description of Artificial Sequence: Synthetic oligonucleotide
  Sense strand starting at position 3269 of SEQ ID NO: 1882645
gggcauuaauaccauauuu

SEQ ID NO: 2137277 - RNA, 19 nt, Artificial Sequence
  Description of Artificial Sequence: Synthetic oligonucleotide
  Antisense strand to SEQ ID NO: 2137276
aaauaugguauuaaugccc

SEQ ID NO: 2137278 - RNA, 19 nt, Artificial Sequence
  Description of Artificial Sequence: Synthetic oligonucleotide
  Sense strand starting at position 3297 of SEQ ID NO: 1882645
ccauuaaugugguuaauac

SEQ ID NO: 2137279 - RNA, 19 nt, Artificial Sequence
  Description of Artificial Sequence: Synthetic oligonucleotide
  Antisense strand to SEQ ID NO: 2137278
guauuaaccacauuaaugg

SEQ ID NO: 2137280 - RNA, 19 nt, Artificial Sequence
  Description of Artificial Sequence: Synthetic oligonucleotide
  Sense strand starting at position 3329 of SEQ ID NO: 1882645
cugcaaggucaauguuuaa

SEQ ID NO: 2137281 - RNA, 19 nt, Artificial Sequence
  Description of Artificial Sequence: Synthetic oligonucleotide
  Antisense strand to SEQ ID NO: 2137280
uuaaacauugaccuugcag

SEQ ID NO: 2137282 - RNA, 19 nt, Artificial Sequence
  Description of Artificial Sequence: Synthetic oligonucleotide
  Sense strand starting at position 3550 of SEQ ID NO: 1882645
ccaucauucuuucuguaga

SEQ ID NO: 2137283 - RNA, 19 nt, Artificial Sequence
  Description of Artificial Sequence: Synthetic oligonucleotide
  Antisense strand to SEQ ID NO: 2137282
ucuacagaaagaaugaugg

SEQ ID NO: 2137284 - RNA, 19 nt, Artificial Sequence
  Description of Artificial Sequence: Synthetic oligonucleotide
  Sense strand starting at position 3552 of SEQ ID NO: 1882645
aucauucuuucuguagaua

SEQ ID NO: 2137285 - RNA, 19 nt, Artificial Sequence
  Description of Artificial Sequence: Synthetic oligonucleotide
  Antisense strand to SEQ ID NO: 2137284
uaucuacagaaagaaugau

SEQ ID NO: 2137286 - RNA, 19 nt, Artificial Sequence
  Description of Artificial Sequence: Synthetic oligonucleotide
  Sense strand starting at position 3726 of SEQ ID NO: 1882645
gacaucaugguauguccaa

SEQ ID NO: 2137287 - RNA, 19 nt, Artificial Sequence
  Description of Artificial Sequence: Synthetic oligonucleotide
  Antisense strand to SEQ ID NO: 2137286
uuggacauaccaugauguc

SEQ ID NO: 2137288 - RNA, 19 nt, Artificial Sequence
  Description of Artificial Sequence: Synthetic oligonucleotide
  Sense strand starting at position 3819 of SEQ ID NO: 1882645
cuggaaugcaauggugaua

SEQ ID NO: 2137289 - RNA, 19 nt, Artificial Sequence
  Description of Artificial Sequence: Synthetic oligonucleotide
  Antisense strand to SEQ ID NO: 2137288
uaucaccauugcauuccag

SEQ ID NO: 2137290 - RNA, 19 nt, Artificial Sequence
  Description of Artificial Sequence: Synthetic oligonucleotide
  Sense strand starting at position 3822 of SEQ ID NO: 1882645
gaaugcaauggugauaucu

SEQ ID NO: 2137291 - RNA, 19 nt, Artificial Sequence
  Description of Artificial Sequence: Synthetic oligonucleotide
  Antisense strand to SEQ ID NO: 2137290
agauaucaccauugcauuc

SEQ ID NO: 2137292 - RNA, 19 nt, Artificial Sequence
  Description of Artificial Sequence: Synthetic oligonucleotide
  Sense strand starting at position 109 of SEQ ID NO: 1882646
gcacaaugaggucaucagu

SEQ ID NO: 2137293 - RNA, 19 nt, Artificial Sequence
  Description of Artificial Sequence: Synthetic oligonucleotide
  Antisense strand to SEQ ID NO: 2137292
acugaugaccucauugugc

SEQ ID NO: 2137294 - RNA, 19 nt, Artificial Sequence
  Description of Artificial Sequence: Synthetic oligonucleotide
  Sense strand starting at position 170 of SEQ ID NO: 1882646
gcucacuuuccgcaaagcu

SEQ ID NO: 2137295 - RNA, 19 nt, Artificial Sequence
  Description of Artificial Sequence: Synthetic oligonucleotide
  Antisense strand to SEQ ID NO: 2137294
agcuuugcggaaagugagc

SEQ ID NO: 2137296 - RNA, 19 nt, Artificial Sequence
  Description of Artificial Sequence: Synthetic oligonucleotide
  Sense strand starting at position 208 of SEQ ID NO: 1882646
gccugauggucccuacuaa

SEQ ID NO: 2137297 - RNA, 19 nt, Artificial Sequence
  Description of Artificial Sequence: Synthetic oligonucleotide
  Antisense strand to SEQ ID NO: 2137296
uuaguagggaccaucaggc

SEQ ID NO: 2137298 - RNA, 19 nt, Artificial Sequence
  Description of Artificial Sequence: Synthetic oligonucleotide
  Sense strand starting at position 375 of SEQ ID NO: 1882646
uguagauaaccgcaaauua

SEQ ID NO: 2137299 - RNA, 19 nt, Artificial Sequence
  Description of Artificial Sequence: Synthetic oligonucleotide
  Antisense strand to SEQ ID NO: 2137298
uaauuugcgguuaucuaca

SEQ ID NO: 2137300 - RNA, 19 nt, Artificial Sequence
  Description of Artificial Sequence: Synthetic oligonucleotide
  Sense strand starting at position 540 of SEQ ID NO: 1882646
gguggugaguagcugucaa

SEQ ID NO: 2137301 - RNA, 19 nt, Artificial Sequence
  Description of Artificial Sequence: Synthetic oligonucleotide
  Antisense strand to SEQ ID NO: 2137300
uugacagcuacucaccacc

SEQ ID NO: 2137302 - RNA, 19 nt, Artificial Sequence
  Description of Artificial Sequence: Synthetic oligonucleotide
  Sense strand starting at position 548 of SEQ ID NO: 1882646
guagcugucaauuaaagga

SEQ ID NO: 2137303 - RNA, 19 nt, Artificial Sequence
  Description of Artificial Sequence: Synthetic oligonucleotide
  Antisense strand to SEQ ID NO: 2137302
uccuuuaauugacagcuac

SEQ ID NO: 2137304 - RNA, 19 nt, Artificial Sequence
  Description of Artificial Sequence: Synthetic oligonucleotide
  Sense strand starting at position 565 of SEQ ID NO: 1882646
gacacuucccugcagaguu

SEQ ID NO: 2137305 - RNA, 19 nt, Artificial Sequence
  Description of Artificial Sequence: Synthetic oligonucleotide
  Antisense strand to SEQ ID NO: 2137304
aacucugcagggaaguguc

SEQ ID NO: 2137306 - RNA, 19 nt, Artificial Sequence
  Description of Artificial Sequence: Synthetic oligonucleotide
  Sense strand starting at position 575 of SEQ ID NO: 1882646
ugcagaguucaggguagua

SEQ ID NO: 2137307 - RNA, 19 nt, Artificial Sequence
  Description of Artificial Sequence: Synthetic oligonucleotide
  Antisense strand to SEQ ID NO: 2137306
uacuacccugaacucugca

SEQ ID NO: 2137308 - RNA, 19 nt, Artificial Sequence
  Description of Artificial Sequence: Synthetic oligonucleotide
  Sense strand starting at position 603 of SEQ ID NO: 1882646
uuaggaauuaucgaggucu

SEQ ID NO: 2137309 - RNA, 19 nt, Artificial Sequence
  Description of Artificial Sequence: Synthetic oligonucleotide
  Antisense strand to SEQ ID NO: 2137308
agaccucgauaauuccuaa

SEQ ID NO: 2137310 - RNA, 19 nt, Artificial Sequence
  Description of Artificial Sequence: Synthetic oligonucleotide
  Sense strand starting at position 609 of SEQ ID NO: 1882646
auuaucgaggucugcuuua

SEQ ID NO: 2137311 - RNA, 19 nt, Artificial Sequence
  Description of Artificial Sequence: Synthetic oligonucleotide
  Antisense strand to SEQ ID NO: 2137310
uaaagcagaccucgauaau

SEQ ID NO: 2137312 - RNA, 19 nt, Artificial Sequence
  Description of Artificial Sequence: Synthetic oligonucleotide
  Sense strand starting at position 614 of SEQ ID NO: 1882646
cgaggucugcuuuaaacuu

SEQ ID NO: 2137313 - RNA, 19 nt, Artificial Sequence
  Description of Artificial Sequence: Synthetic oligonucleotide
  Antisense strand to SEQ ID NO: 2137312
aaguuuaaagcagaccucg

SEQ ID NO: 2137314 - RNA, 19 nt, Artificial Sequence
  Description of Artificial Sequence: Synthetic oligonucleotide
  Sense strand starting at position 673 of SEQ ID NO: 1882646
uagccaagacgugaagauu

SEQ ID NO: 2137315 - RNA, 19 nt, Artificial Sequence
  Description of Artificial Sequence: Synthetic oligonucleotide
  Antisense strand to SEQ ID NO: 2137314
aaucuucacgucuuggcua

SEQ ID NO: 2137316 - RNA, 19 nt, Artificial Sequence
  Description of Artificial Sequence: Synthetic oligonucleotide
  Sense strand starting at position 853 of SEQ ID NO: 1882646
ggguuugacuaugaacuau

SEQ ID NO: 2137317 - RNA, 19 nt, Artificial Sequence
  Description of Artificial Sequence: Synthetic oligonucleotide
  Antisense strand to SEQ ID NO: 2137316
auaguucauagucaaaccc

SEQ ID NO: 2137318 - RNA, 19 nt, Artificial Sequence
  Description of Artificial Sequence: Synthetic oligonucleotide
  Sense strand starting at position 893 of SEQ ID NO: 1882646
uguagcuagcgucacuaaa

SEQ ID NO: 2137319 - RNA, 19 nt, Artificial Sequence
  Description of Artificial Sequence: Synthetic oligonucleotide
  Antisense strand to SEQ ID NO: 2137318
uuuagugacgcuagcuaca

SEQ ID NO: 2137320 - RNA, 19 nt, Artificial Sequence
  Description of Artificial Sequence: Synthetic oligonucleotide
  Sense strand starting at position 926 of SEQ ID NO: 1882646
uuaggucugagugauagug

SEQ ID NO: 2137321 - RNA, 19 nt, Artificial Sequence
  Description of Artificial Sequence: Synthetic oligonucleotide
  Antisense strand to SEQ ID NO: 2137320
cacuaucacucagaccuaa

SEQ ID NO: 2137322 - RNA, 19 nt, Artificial Sequence
  Description of Artificial Sequence: Synthetic oligonucleotide
  Sense strand starting at position 935 of SEQ ID NO: 1882646
agugauaguggacgaguga

SEQ ID NO: 2137323 - RNA, 19 nt, Artificial Sequence
  Description of Artificial Sequence: Synthetic oligonucleotide
  Antisense strand to SEQ ID NO: 2137322
ucacucguccacuaucacu

SEQ ID NO: 2137324 - RNA, 19 nt, Artificial Sequence
  Description of Artificial Sequence: Synthetic oligonucleotide
  Sense strand starting at position 1018 of SEQ ID NO: 1882646
agcaaacgucuccacguua

SEQ ID NO: 2137325 - RNA, 19 nt, Artificial Sequence
  Description of Artificial Sequence: Synthetic oligonucleotide
  Antisense strand to SEQ ID NO: 2137324
uaacguggagacguuugcu

SEQ ID NO: 2137326 - RNA, 19 nt, Artificial Sequence
  Description of Artificial Sequence: Synthetic oligonucleotide
  Sense strand starting at position 2229 of SEQ ID NO: 1882646
ucuaguacuucucuguuau

SEQ ID NO: 2137327 - RNA, 19 nt, Artificial Sequence
  Description of Artificial Sequence: Synthetic oligonucleotide
  Antisense strand to SEQ ID NO: 2137326
auaacagagaaguacuaga

SEQ ID NO: 2137328 - RNA, 19 nt, Artificial Sequence
  Description of Artificial Sequence: Synthetic oligonucleotide
  Sense strand starting at position 2230 of SEQ ID NO: 1882646
cuaguacuucucuguuaua

SEQ ID NO: 2137329 - RNA, 19 nt, Artificial Sequence
  Description of Artificial Sequence: Synthetic oligonucleotide
  Antisense strand to SEQ ID NO: 2137328
uauaacagagaaguacuag

SEQ ID NO: 2137330 - RNA, 19 nt, Artificial Sequence
  Description of Artificial Sequence: Synthetic oligonucleotide
  Sense strand starting at position 2251 of SEQ ID NO: 1882646
gucugccugccuuagacaa

SEQ ID NO: 2137331 - RNA, 19 nt, Artificial Sequence
  Description of Artificial Sequence: Synthetic oligonucleotide
  Antisense strand to SEQ ID NO: 2137330
uugucuaaggcaggcagac

SEQ ID NO: 2137332 - RNA, 19 nt, Artificial Sequence
  Description of Artificial Sequence: Synthetic oligonucleotide
  Sense strand starting at position 2306 of SEQ ID NO: 1882646
ugcagacccuaucagaaua

SEQ ID NO: 2137333 - RNA, 19 nt, Artificial Sequence
  Description of Artificial Sequence: Synthetic oligonucleotide
  Antisense strand to SEQ ID NO: 2137332
uauucugauagggucugca

SEQ ID NO: 2137334 - RNA, 19 nt, Artificial Sequence
  Description of Artificial Sequence: Synthetic oligonucleotide
  Sense strand starting at position 2329 of SEQ ID NO: 1882646
cguagaaccuuaccaguca

SEQ ID NO: 2137335 - RNA, 19 nt, Artificial Sequence
  Description of Artificial Sequence: Synthetic oligonucleotide
  Antisense strand to SEQ ID NO: 2137334
ugacugguaagguucuacg

SEQ ID NO: 2137336 - RNA, 19 nt, Artificial Sequence
  Description of Artificial Sequence: Synthetic oligonucleotide
  Sense strand starting at position 2341 of SEQ ID NO: 1882646
ccagucauccgguauaauu

SEQ ID NO: 2137337 - RNA, 19 nt, Artificial Sequence
  Description of Artificial Sequence: Synthetic oligonucleotide
  Antisense strand to SEQ ID NO: 2137336
aauuauaccggaugacugg

SEQ ID NO: 2137338 - RNA, 19 nt, Artificial Sequence
  Description of Artificial Sequence: Synthetic oligonucleotide
  Sense strand starting at position 2350 of SEQ ID NO: 1882646
cgguauaauuuccacauuu

SEQ ID NO: 2137339 - RNA, 19 nt, Artificial Sequence
  Description of Artificial Sequence: Synthetic oligonucleotide
  Antisense strand to SEQ ID NO: 2137338
aaauguggaaauuauaccg

SEQ ID NO: 2137340 - RNA, 19 nt, Artificial Sequence
  Description of Artificial Sequence: Synthetic oligonucleotide
  Sense strand starting at position 2455 of SEQ ID NO: 1882646
aaccaaucugccgguaaga

SEQ ID NO: 2137341 - RNA, 19 nt, Artificial Sequence
  Description of Artificial Sequence: Synthetic oligonucleotide
  Antisense strand to SEQ ID NO: 2137340
ucuuaccggcagauugguu

SEQ ID NO: 2137342 - RNA, 19 nt, Artificial Sequence
  Description of Artificial Sequence: Synthetic oligonucleotide
  Sense strand starting at position 2466 of SEQ ID NO: 1882646
cgguaagaacuuuguagca

SEQ ID NO: 2137343 - RNA, 19 nt, Artificial Sequence
  Description of Artificial Sequence: Synthetic oligonucleotide
  Antisense strand to SEQ ID NO: 2137342
ugcuacaaaguucuuaccg

SEQ ID NO: 2137344 - RNA, 19 nt, Artificial Sequence
  Description of Artificial Sequence: Synthetic oligonucleotide
  Sense strand starting at position 2834 of SEQ ID NO: 1882646
guguuucugucuccugacu

SEQ ID NO: 2137345 - RNA, 19 nt, Artificial Sequence
  Description of Artificial Sequence: Synthetic oligonucleotide
  Antisense strand to SEQ ID NO: 2137344
agucaggagacagaaacac

SEQ ID NO: 2137346 - RNA, 19 nt, Artificial Sequence
  Description of Artificial Sequence: Synthetic oligonucleotide
  Sense strand starting at position 2846 of SEQ ID NO: 1882646
ccugacugggccuauguua

SEQ ID NO: 2137347 - RNA, 19 nt, Artificial Sequence
  Description of Artificial Sequence: Synthetic oligonucleotide
  Antisense strand to SEQ ID NO: 2137346
uaacauaggcccagucagg

SEQ ID NO: 2137348 - RNA, 19 nt, Artificial Sequence
  Description of Artificial Sequence: Synthetic oligonucleotide
  Sense strand starting at position 2879 of SEQ ID NO: 1882646
agaaauacuuggucucuag

SEQ ID NO: 2137349 - RNA, 19 nt, Artificial Sequence
  Description of Artificial Sequence: Synthetic oligonucleotide
  Antisense strand to SEQ ID NO: 2137348
cuagagaccaaguauuucu

SEQ ID NO: 2137350 - RNA, 19 nt, Artificial Sequence
  Description of Artificial Sequence: Synthetic oligonucleotide
  Sense strand starting at position 2901 of SEQ ID NO: 1882646
ucuccaaaggcauaaguau

SEQ ID NO: 2137351 - RNA, 19 nt, Artificial Sequence
  Description of Artificial Sequence: Synthetic oligonucleotide
  Antisense strand to SEQ ID NO: 2137350
auacuuaugccuuuggaga

SEQ ID NO: 2137352 - RNA, 19 nt, Artificial Sequence
  Description of Artificial Sequence: Synthetic oligonucleotide
  Sense strand starting at position 3019 of SEQ ID NO: 1882646
gcgcaucugguugucauua

SEQ ID NO: 2137353 - RNA, 19 nt, Artificial Sequence
  Description of Artificial Sequence: Synthetic oligonucleotide
  Antisense strand to SEQ ID NO: 2137352
uaaugacaaccagaugcgc

SEQ ID NO: 2137354 - RNA, 19 nt, Artificial Sequence
  Description of Artificial Sequence: Synthetic oligonucleotide
  Sense strand starting at position 3020 of SEQ ID NO: 1882646
cgcaucugguugucauuau

SEQ ID NO: 2137355 - RNA, 19 nt, Artificial Sequence
  Description of Artificial Sequence: Synthetic oligonucleotide
  Antisense strand to SEQ ID NO: 2137354
auaaugacaaccagaugcg

SEQ ID NO: 2137356 - RNA, 19 nt, Artificial Sequence
  Description of Artificial Sequence: Synthetic oligonucleotide
  Sense strand starting at position 3054 of SEQ ID NO: 1882646
agaacaaaggccugauauu

SEQ ID NO: 2137357 - RNA, 19 nt, Artificial Sequence
  Description of Artificial Sequence: Synthetic oligonucleotide
  Antisense strand to SEQ ID NO: 2137356
aauaucaggccuuuguucu

SEQ ID NO: 2137358 - RNA, 19 nt, Artificial Sequence
  Description of Artificial Sequence: Synthetic oligonucleotide
  Sense strand starting at position 3271 of SEQ ID NO: 1882646
ggugauaacugggaauaaa

SEQ ID NO: 2137359 - RNA, 19 nt, Artificial Sequence
  Description of Artificial Sequence: Synthetic oligonucleotide
  Antisense strand to SEQ ID NO: 2137358
uuuauucccaguuaucacc

SEQ ID NO: 2137360 - RNA, 19 nt, Artificial Sequence
  Description of Artificial Sequence: Synthetic oligonucleotide
  Sense strand starting at position 3319 of SEQ ID NO: 1882646
guuagcuugcuauaacaag

SEQ ID NO: 2137361 - RNA, 19 nt, Artificial Sequence
  Description of Artificial Sequence: Synthetic oligonucleotide
  Antisense strand to SEQ ID NO: 2137360
cuuguuauagcaagcuaac

SEQ ID NO: 2137362 - RNA, 19 nt, Artificial Sequence
  Description of Artificial Sequence: Synthetic oligonucleotide
  Sense strand starting at position 3358 of SEQ ID NO: 1882646
guauuuggaugagacucaa

SEQ ID NO: 2137363 - RNA, 19 nt, Artificial Sequence
  Description of Artificial Sequence: Synthetic oligonucleotide
  Antisense strand to SEQ ID NO: 2137362
uugagucucauccaaauac

SEQ ID NO: 2137364 - RNA, 19 nt, Artificial Sequence
  Description of Artificial Sequence: Synthetic oligonucleotide
  Sense strand starting at position 3391 of SEQ ID NO: 1882646
guggguaagcuuuauagug

SEQ ID NO: 2137365 - RNA, 19 nt, Artificial Sequence
  Description of Artificial Sequence: Synthetic oligonucleotide
  Antisense strand to SEQ ID NO: 2137364
cacuauaaagcuuacccac

SEQ ID NO: 2137366 - RNA, 19 nt, Artificial Sequence
  Description of Artificial Sequence: Synthetic oligonucleotide
  Sense strand starting at position 3476 of SEQ ID NO: 1882646
caucccaagugauugguua

SEQ ID NO: 2137367 - RNA, 19 nt, Artificial Sequence
  Description of Artificial Sequence: Synthetic oligonucleotide
  Antisense strand to SEQ ID NO: 2137366
uaaccaaucacuugggaug

SEQ ID NO: 2137368 - RNA, 19 nt, Artificial Sequence
  Description of Artificial Sequence: Synthetic oligonucleotide
  Sense strand starting at position 3497 of SEQ ID NO: 1882646
ggcacauauuugucuuucu

SEQ ID NO: 2137369 - RNA, 19 nt, Artificial Sequence
  Description of Artificial Sequence: Synthetic oligonucleotide
  Antisense strand to SEQ ID NO: 2137368
agaaagacaaauaugugcc

SEQ ID NO: 2137370 - RNA, 19 nt, Artificial Sequence
  Description of Artificial Sequence: Synthetic oligonucleotide
  Sense strand starting at position 3924 of SEQ ID NO: 1882646
guacaugugauuugugugu

SEQ ID NO: 2137371 - RNA, 19 nt, Artificial Sequence
  Description of Artificial Sequence: Synthetic oligonucleotide
  Antisense strand to SEQ ID NO: 2137370
acacacaaaucacauguac

SEQ ID NO: 2137372 - RNA, 19 nt, Artificial Sequence
  Description of Artificial Sequence: Synthetic oligonucleotide
  Sense strand starting at position 678 of SEQ ID NO: 1882647
uguuacaugucacuucuga

SEQ ID NO: 2137373 - RNA, 19 nt, Artificial Sequence
  Description of Artificial Sequence: Synthetic oligonucleotide
  Antisense strand to SEQ ID NO: 2137372
ucagaagugacauguaaca

SEQ ID NO: 2137374 - RNA, 19 nt, Artificial Sequence
  Description of Artificial Sequence: Synthetic oligonucleotide
  Sense strand starting at position 697 of SEQ ID NO: 1882647
auguucuccuaccuugaga

SEQ ID NO: 2137375 - RNA, 19 nt, Artificial Sequence
  Description of Artificial Sequence: Synthetic oligonucleotide
  Antisense strand to SEQ ID NO: 2137374
ucucaagguaggagaacau

SEQ ID NO: 2137376 - RNA, 19 nt, Artificial Sequence
  Description of Artificial Sequence: Synthetic oligonucleotide
  Sense strand starting at position 699 of SEQ ID NO: 1882647
guucuccuaccuugagaau

SEQ ID NO: 2137377 - RNA, 19 nt, Artificial Sequence
  Description of Artificial Sequence: Synthetic oligonucleotide
  Antisense strand to SEQ ID NO: 2137376
auucucaagguaggagaac

SEQ ID NO: 2137378 - RNA, 19 nt, Artificial Sequence
  Description of Artificial Sequence: Synthetic oligonucleotide
  Sense strand starting at position 890 of SEQ ID NO: 1882647
cgucaacuccugugucuuu

SEQ ID NO: 2137379 - RNA, 19 nt, Artificial Sequence
  Description of Artificial Sequence: Synthetic oligonucleotide
  Antisense strand to SEQ ID NO: 2137378
aaagacacaggaguugacg

SEQ ID NO: 2137380 - RNA, 19 nt, Artificial Sequence
  Description of Artificial Sequence: Synthetic oligonucleotide
  Sense strand starting at position 895 of SEQ ID NO: 1882647
acuccugugucuuuaguaa

SEQ ID NO: 2137381 - RNA, 19 nt, Artificial Sequence
  Description of Artificial Sequence: Synthetic oligonucleotide
  Antisense strand to SEQ ID NO: 2137380
uuacuaaagacacaggagu

SEQ ID NO: 2137382 - RNA, 19 nt, Artificial Sequence
  Description of Artificial Sequence: Synthetic oligonucleotide
  Sense strand starting at position 1408 of SEQ ID NO: 1882647
gggauauggagcuaguuau

SEQ ID NO: 2137383 - RNA, 19 nt, Artificial Sequence
  Description of Artificial Sequence: Synthetic oligonucleotide
  Antisense strand to SEQ ID NO: 2137382
auaacuagcuccauauccc

SEQ ID NO: 2137384 - RNA, 19 nt, Artificial Sequence
  Description of Artificial Sequence: Synthetic oligonucleotide
  Sense strand starting at position 1414 of SEQ ID NO: 1882647
uggagcuaguuaucaacga

SEQ ID NO: 2137385 - RNA, 19 nt, Artificial Sequence
  Description of Artificial Sequence: Synthetic oligonucleotide
  Antisense strand to SEQ ID NO: 2137384
ucguugauaacuagcucca

SEQ ID NO: 2137386 - RNA, 19 nt, Artificial Sequence
  Description of Artificial Sequence: Synthetic oligonucleotide
  Sense strand starting at position 1476 of SEQ ID NO: 1882647
aucuuagggagccgagaau

SEQ ID NO: 2137387 - RNA, 19 nt, Artificial Sequence
  Description of Artificial Sequence: Synthetic oligonucleotide
  Antisense strand to SEQ ID NO: 2137386
auucucggcucccuaagau

SEQ ID NO: 2137388 - RNA, 19 nt, Artificial Sequence
  Description of Artificial Sequence: Synthetic oligonucleotide
  Sense strand starting at position 1502 of SEQ ID NO: 1882647
uaguuaucucccgcaggcu

SEQ ID NO: 2137389 - RNA, 19 nt, Artificial Sequence
  Description of Artificial Sequence: Synthetic oligonucleotide
  Antisense strand to SEQ ID NO: 2137388
agccugcgggagauaacua

SEQ ID NO: 2137390 - RNA, 19 nt, Artificial Sequence
  Description of Artificial Sequence: Synthetic oligonucleotide
  Sense strand starting at position 1551 of SEQ ID NO: 1882647
cgcagagauugugcagagu

SEQ ID NO: 2137391 - RNA, 19 nt, Artificial Sequence
  Description of Artificial Sequence: Synthetic oligonucleotide
  Antisense strand to SEQ ID NO: 2137390
acucugcacaaucucugcg

SEQ ID NO: 2137392 - RNA, 19 nt, Artificial Sequence
  Description of Artificial Sequence: Synthetic oligonucleotide
  Sense strand starting at position 2455 of SEQ ID NO: 1882647
cacacaggcuagucugaua

SEQ ID NO: 2137393 - RNA, 19 nt, Artificial Sequence
  Description of Artificial Sequence: Synthetic oligonucleotide
  Antisense strand to SEQ ID NO: 2137392
uaucagacuagccugugug

SEQ ID NO: 2137394 - RNA, 19 nt, Artificial Sequence
  Description of Artificial Sequence: Synthetic oligonucleotide
  Sense strand starting at position 2487 of SEQ ID NO: 1882647
ggaaucaugcggugcugua

SEQ ID NO: 2137395 - RNA, 19 nt, Artificial Sequence
  Description of Artificial Sequence: Synthetic oligonucleotide
  Antisense strand to SEQ ID NO: 2137394
uacagcaccgcaugauucc

SEQ ID NO: 2137396 - RNA, 19 nt, Artificial Sequence
  Description of Artificial Sequence: Synthetic oligonucleotide
  Sense strand starting at position 2499 of SEQ ID NO: 1882647
ugcuguaaggacuaacgaa

SEQ ID NO: 2137397 - RNA, 19 nt, Artificial Sequence
  Description of Artificial Sequence: Synthetic oligonucleotide
  Antisense strand to SEQ ID NO: 2137396
uucguuaguccuuacagca

SEQ ID NO: 2137398 - RNA, 19 nt, Artificial Sequence
  Description of Artificial Sequence: Synthetic oligonucleotide
  Sense strand starting at position 2546 of SEQ ID NO: 1882647
gcuggaugccuuuagaaag

SEQ ID NO: 2137399 - RNA, 19 nt, Artificial Sequence
  Description of Artificial Sequence: Synthetic oligonucleotide
  Antisense strand to SEQ ID NO: 2137398
cuuucuaaaggcauccagc

SEQ ID NO: 2137400 - RNA, 19 nt, Artificial Sequence
  Description of Artificial Sequence: Synthetic oligonucleotide
  Sense strand starting at position 2584 of SEQ ID NO: 1882647
ggaguugagucauaaccug

SEQ ID NO: 2137401 - RNA, 19 nt, Artificial Sequence
  Description of Artificial Sequence: Synthetic oligonucleotide
  Antisense strand to SEQ ID NO: 2137400
cagguuaugacucaacucc

SEQ ID NO: 2137402 - RNA, 19 nt, Artificial Sequence
  Description of Artificial Sequence: Synthetic oligonucleotide
  Sense strand starting at position 2592 of SEQ ID NO: 1882647
gucauaaccuguccgucau

SEQ ID NO: 2137403 - RNA, 19 nt, Artificial Sequence
  Description of Artificial Sequence: Synthetic oligonucleotide
  Antisense strand to SEQ ID NO: 2137402
augacggacagguuaugac

SEQ ID NO: 2137404 - RNA, 19 nt, Artificial Sequence
  Description of Artificial Sequence: Synthetic oligonucleotide
  Sense strand starting at position 2593 of SEQ ID NO: 1882647
ucauaaccuguccgucauu

SEQ ID NO: 2137405 - RNA, 19 nt, Artificial Sequence
  Description of Artificial Sequence: Synthetic oligonucleotide
  Antisense strand to SEQ ID NO: 2137404
aaugacggacagguuauga

SEQ ID NO: 2137406 - RNA, 19 nt, Artificial Sequence
  Description of Artificial Sequence: Synthetic oligonucleotide
  Sense strand starting at position 2638 of SEQ ID NO: 1882647
aggcuucuaugguagauuu

SEQ ID NO: 2137407 - RNA, 19 nt, Artificial Sequence
  Description of Artificial Sequence: Synthetic oligonucleotide
  Antisense strand to SEQ ID NO: 2137406
aaaucuaccauagaagccu

SEQ ID NO: 2137408 - RNA, 19 nt, Artificial Sequence
  Description of Artificial Sequence: Synthetic oligonucleotide
  Sense strand starting at position 2674 of SEQ ID NO: 1882647
gagugaugguguccagccu

SEQ ID NO: 2137409 - RNA, 19 nt, Artificial Sequence
  Description of Artificial Sequence: Synthetic oligonucleotide
  Antisense strand to SEQ ID NO: 2137408
aggcuggacaccaucacuc

SEQ ID NO: 2137410 - RNA, 19 nt, Artificial Sequence
  Description of Artificial Sequence: Synthetic oligonucleotide
  Sense strand starting at position 2731 of SEQ ID NO: 1882647
uccacaauuguuuacagua

SEQ ID NO: 2137411 - RNA, 19 nt, Artificial Sequence
  Description of Artificial Sequence: Synthetic oligonucleotide
  Antisense strand to SEQ ID NO: 2137410
uacuguaaacaauugugga

SEQ ID NO: 2137412 - RNA, 19 nt, Artificial Sequence
  Description of Artificial Sequence: Synthetic oligonucleotide
  Sense strand starting at position 2759 of SEQ ID NO: 1882647
cgccaaauuccagggauuc

SEQ ID NO: 2137413 - RNA, 19 nt, Artificial Sequence
  Description of Artificial Sequence: Synthetic oligonucleotide
  Antisense strand to SEQ ID NO: 2137412
gaaucccuggaauuuggcg

SEQ ID NO: 2137414 - RNA, 19 nt, Artificial Sequence
  Description of Artificial Sequence: Synthetic oligonucleotide
  Sense strand starting at position 2868 of SEQ ID NO: 1882647
agugauacugcugagcuca

SEQ ID NO: 2137415 - RNA, 19 nt, Artificial Sequence
  Description of Artificial Sequence: Synthetic oligonucleotide
  Antisense strand to SEQ ID NO: 2137414
ugagcucagcaguaucacu

SEQ ID NO: 2137416 - RNA, 19 nt, Artificial Sequence
  Description of Artificial Sequence: Synthetic oligonucleotide
  Sense strand starting at position 3007 of SEQ ID NO: 1882647
gggcaugugguggaaauua

SEQ ID NO: 2137417 - RNA, 19 nt, Artificial Sequence
  Description of Artificial Sequence: Synthetic oligonucleotide
  Antisense strand to SEQ ID NO: 2137416
uaauuuccaccacaugccc

SEQ ID NO: 2137418 - RNA, 19 nt, Artificial Sequence
  Description of Artificial Sequence: Synthetic oligonucleotide
  Sense strand starting at position 3169 of SEQ ID NO: 1882647
cacuguaggguguguuaua

SEQ ID NO: 2137419 - RNA, 19 nt, Artificial Sequence
  Description of Artificial Sequence: Synthetic oligonucleotide
  Antisense strand to SEQ ID NO: 2137418
uauaacacacccuacagug

SEQ ID NO: 2137420 - RNA, 19 nt, Artificial Sequence
  Description of Artificial Sequence: Synthetic oligonucleotide
  Sense strand starting at position 3189 of SEQ ID NO: 1882647
uuuaaaugucuuggagagu

SEQ ID NO: 2137421 - RNA, 19 nt, Artificial Sequence
  Description of Artificial Sequence: Synthetic oligonucleotide
  Antisense strand to SEQ ID NO: 2137420
acucuccaagacauuuaaa

SEQ ID NO: 2137422 - RNA, 19 nt, Artificial Sequence
  Description of Artificial Sequence: Synthetic oligonucleotide
  Sense strand starting at position 3190 of SEQ ID NO: 1882647
uuaaaugucuuggagagug

SEQ ID NO: 2137423 - RNA, 19 nt, Artificial Sequence
  Description of Artificial Sequence: Synthetic oligonucleotide
  Antisense strand to SEQ ID NO: 2137422
cacucuccaagacauuuaa

SEQ ID NO: 2137424 - RNA, 19 nt, Artificial Sequence
  Description of Artificial Sequence: Synthetic oligonucleotide
  Sense strand starting at position 3202 of SEQ ID NO: 1882647
gagagugugccauaucaag

SEQ ID NO: 2137425 - RNA, 19 nt, Artificial Sequence
  Description of Artificial Sequence: Synthetic oligonucleotide
  Antisense strand to SEQ ID NO: 2137424
cuugauauggcacacucuc

SEQ ID NO: 2137426 - RNA, 19 nt, Artificial Sequence
  Description of Artificial Sequence: Synthetic oligonucleotide
  Sense strand starting at position 3246 of SEQ ID NO: 1882647
cugcgugauguucuucgua

SEQ ID NO: 2137427 - RNA, 19 nt, Artificial Sequence
  Description of Artificial Sequence: Synthetic oligonucleotide
  Antisense strand to SEQ ID NO: 2137426
uacgaagaacaucacgcag

SEQ ID NO: 2137428 - RNA, 19 nt, Artificial Sequence
  Description of Artificial Sequence: Synthetic oligonucleotide
  Sense strand starting at position 3249 of SEQ ID NO: 1882647
cgugauguucuucguaaga

SEQ ID NO: 2137429 - RNA, 19 nt, Artificial Sequence
  Description of Artificial Sequence: Synthetic oligonucleotide
  Antisense strand to SEQ ID NO: 2137428
ucuuacgaagaacaucacg

SEQ ID NO: 2137430 - RNA, 19 nt, Artificial Sequence
  Description of Artificial Sequence: Synthetic oligonucleotide
  Sense strand starting at position 3260 of SEQ ID NO: 1882647
ucguaagaauuacacaacu

SEQ ID NO: 2137431 - RNA, 19 nt, Artificial Sequence
  Description of Artificial Sequence: Synthetic oligonucleotide
  Antisense strand to SEQ ID NO: 2137430
aguuguguaauucuuacga

SEQ ID NO: 2137432 - RNA, 19 nt, Artificial Sequence
  Description of Artificial Sequence: Synthetic oligonucleotide
  Sense strand starting at position 3303 of SEQ ID NO: 1882647
gacuguaaucccgacacuu

SEQ ID NO: 2137433 - RNA, 19 nt, Artificial Sequence
  Description of Artificial Sequence: Synthetic oligonucleotide
  Antisense strand to SEQ ID NO: 2137432
aagugucgggauuacaguc

SEQ ID NO: 2137434 - RNA, 19 nt, Artificial Sequence
  Description of Artificial Sequence: Synthetic oligonucleotide
  Sense strand starting at position 3469 of SEQ ID NO: 1882647
gugggaggaucgccagaau

SEQ ID NO: 2137435 - RNA, 19 nt, Artificial Sequence
  Description of Artificial Sequence: Synthetic oligonucleotide
  Antisense strand to SEQ ID NO: 2137434
auucuggcgauccucccac

SEQ ID NO: 2137436 - RNA, 19 nt, Artificial Sequence
  Description of Artificial Sequence: Synthetic oligonucleotide
  Sense strand starting at position 3501 of SEQ ID NO: 1882647
guugcagucagcuauguca

SEQ ID NO: 2137437 - RNA, 19 nt, Artificial Sequence
  Description of Artificial Sequence: Synthetic oligonucleotide
  Antisense strand to SEQ ID NO: 2137436
ugacauagcugacugcaac

SEQ ID NO: 2137438 - RNA, 19 nt, Artificial Sequence
  Description of Artificial Sequence: Synthetic oligonucleotide
  Sense strand starting at position 3508 of SEQ ID NO: 1882647
ucagcuaugucagcuauga

SEQ ID NO: 2137439 - RNA, 19 nt, Artificial Sequence
  Description of Artificial Sequence: Synthetic oligonucleotide
  Antisense strand to SEQ ID NO: 2137438
ucauagcugacauagcuga

SEQ ID NO: 2137440 - RNA, 19 nt, Artificial Sequence
  Description of Artificial Sequence: Synthetic oligonucleotide
  Sense strand starting at position 3512 of SEQ ID NO: 1882647
cuaugucagcuaugauauu

SEQ ID NO: 2137441 - RNA, 19 nt, Artificial Sequence
  Description of Artificial Sequence: Synthetic oligonucleotide
  Antisense strand to SEQ ID NO: 2137440
aauaucauagcugacauag

SEQ ID NO: 2137442 - RNA, 19 nt, Artificial Sequence
  Description of Artificial Sequence: Synthetic oligonucleotide
  Sense strand starting at position 3627 of SEQ ID NO: 1882647
cagugaauaucgguauaug

SEQ ID NO: 2137443 - RNA, 19 nt, Artificial Sequence
  Description of Artificial Sequence: Synthetic oligonucleotide
  Antisense strand to SEQ ID NO: 2137442
cauauaccgauauucacug

SEQ ID NO: 2137444 - RNA, 19 nt, Artificial Sequence
  Description of Artificial Sequence: Synthetic oligonucleotide
  Sense strand starting at position 3628 of SEQ ID NO: 1882647
agugaauaucgguauauga

SEQ ID NO: 2137445 - RNA, 19 nt, Artificial Sequence
  Description of Artificial Sequence: Synthetic oligonucleotide
  Antisense strand to SEQ ID NO: 2137444
ucauauaccgauauucacu

SEQ ID NO: 2137446 - RNA, 19 nt, Artificial Sequence
  Description of Artificial Sequence: Synthetic oligonucleotide
  Sense strand starting at position 3660 of SEQ ID NO: 1882647
auuuguguauuugagaauc

SEQ ID NO: 2137447 - RNA, 19 nt, Artificial Sequence
  Description of Artificial Sequence: Synthetic oligonucleotide
  Antisense strand to SEQ ID NO: 2137446
gauucucaaauacacaaau

SEQ ID NO: 2137448 - RNA, 19 nt, Artificial Sequence
  Description of Artificial Sequence: Synthetic oligonucleotide
  Sense strand starting at position 3687 of SEQ ID NO: 1882647
aucuauauaugugacuaga

SEQ ID NO: 2137449 - RNA, 19 nt, Artificial Sequence
  Description of Artificial Sequence: Synthetic oligonucleotide
  Antisense strand to SEQ ID NO: 2137448
ucuagucacauauauagau

SEQ ID NO: 2137450 - RNA, 19 nt, Artificial Sequence
  Description of Artificial Sequence: Synthetic oligonucleotide
  Sense strand starting at position 3689 of SEQ ID NO: 1882647
cuauauaugugacuagaag

SEQ ID NO: 2137451 - RNA, 19 nt, Artificial Sequence
  Description of Artificial Sequence: Synthetic oligonucleotide
  Antisense strand to SEQ ID NO: 2137450
cuucuagucacauauauag

SEQ ID NO: 2137452 - RNA, 19 nt, Artificial Sequence
  Description of Artificial Sequence: Synthetic oligonucleotide
  Sense strand starting at position 118 of SEQ ID NO: 1882648
cuugaaaugugcugcugca

SEQ ID NO: 2137453 - RNA, 19 nt, Artificial Sequence
  Description of Artificial Sequence: Synthetic oligonucleotide
  Antisense strand to SEQ ID NO: 2137452
ugcagcagcacauuucaag

SEQ ID NO: 2137454 - RNA, 19 nt, Artificial Sequence
  Description of Artificial Sequence: Synthetic oligonucleotide
  Sense strand starting at position 165 of SEQ ID NO: 1882648
caacuaacuuuggguggaa

SEQ ID NO: 2137455 - RNA, 19 nt, Artificial Sequence
  Description of Artificial Sequence: Synthetic oligonucleotide
  Antisense strand to SEQ ID NO: 2137454
uuccacccaaaguuaguug

SEQ ID NO: 2137456 - RNA, 19 nt, Artificial Sequence
  Description of Artificial Sequence: Synthetic oligonucleotide
  Sense strand starting at position 178 of SEQ ID NO: 1882648
guggaagguacuuguaagu

SEQ ID NO: 2137457 - RNA, 19 nt, Artificial Sequence
  Description of Artificial Sequence: Synthetic oligonucleotide
  Antisense strand to SEQ ID NO: 2137456
acuuacaaguaccuuccac

SEQ ID NO: 2137458 - RNA, 19 nt, Artificial Sequence
  Description of Artificial Sequence: Synthetic oligonucleotide
  Sense strand starting at position 258 of SEQ ID NO: 1882648
guucucaaagcguaucuga

SEQ ID NO: 2137459 - RNA, 19 nt, Artificial Sequence
  Description of Artificial Sequence: Synthetic oligonucleotide
  Antisense strand to SEQ ID NO: 2137458
ucagauacgcuuugagaac

SEQ ID NO: 2137460 - RNA, 19 nt, Artificial Sequence
  Description of Artificial Sequence: Synthetic oligonucleotide
  Sense strand starting at position 265 of SEQ ID NO: 1882648
aagcguaucugagagucua

SEQ ID NO: 2137461 - RNA, 19 nt, Artificial Sequence
  Description of Artificial Sequence: Synthetic oligonucleotide
  Antisense strand to SEQ ID NO: 2137460
uagacucucagauacgcuu

SEQ ID NO: 2137462 - RNA, 19 nt, Artificial Sequence
  Description of Artificial Sequence: Synthetic oligonucleotide
  Sense strand starting at position 466 of SEQ ID NO: 1882648
gacagaguaucugguccau

SEQ ID NO: 2137463 - RNA, 19 nt, Artificial Sequence
  Description of Artificial Sequence: Synthetic oligonucleotide
  Antisense strand to SEQ ID NO: 2137462
auggaccagauacucuguc

SEQ ID NO: 2137464 - RNA, 19 nt, Artificial Sequence
  Description of Artificial Sequence: Synthetic oligonucleotide
  Sense strand starting at position 468 of SEQ ID NO: 1882648
cagaguaucugguccauga

SEQ ID NO: 2137465 - RNA, 19 nt, Artificial Sequence
  Description of Artificial Sequence: Synthetic oligonucleotide
  Antisense strand to SEQ ID NO: 2137464
ucauggaccagauacucug

SEQ ID NO: 2137466 - RNA, 19 nt, Artificial Sequence
  Description of Artificial Sequence: Synthetic oligonucleotide
  Sense strand starting at position 502 of SEQ ID NO: 1882648
aagaucaguucccugaagu

SEQ ID NO: 2137467 - RNA, 19 nt, Artificial Sequence
  Description of Artificial Sequence: Synthetic oligonucleotide
  Antisense strand to SEQ ID NO: 2137466
acuucagggaacugaucuu

SEQ ID NO: 2137468 - RNA, 19 nt, Artificial Sequence
  Description of Artificial Sequence: Synthetic oligonucleotide
  Sense strand starting at position 503 of SEQ ID NO: 1882648
agaucaguucccugaaguu

SEQ ID NO: 2137469 - RNA, 19 nt, Artificial Sequence
  Description of Artificial Sequence: Synthetic oligonucleotide
  Antisense strand to SEQ ID NO: 2137468
aacuucagggaacugaucu

SEQ ID NO: 2137470 - RNA, 19 nt, Artificial Sequence
  Description of Artificial Sequence: Synthetic oligonucleotide
  Sense strand starting at position 512 of SEQ ID NO: 1882648
cccugaaguuuguaaccaa

SEQ ID NO: 2137471 - RNA, 19 nt, Artificial Sequence
  Description of Artificial Sequence: Synthetic oligonucleotide
  Antisense strand to SEQ ID NO: 2137470
uugguuacaaacuucaggg

SEQ ID NO: 2137472 - RNA, 19 nt, Artificial Sequence
  Description of Artificial Sequence: Synthetic oligonucleotide
  Sense strand starting at position 515 of SEQ ID NO: 1882648
ugaaguuuguaaccaauaa

SEQ ID NO: 2137473 - RNA, 19 nt, Artificial Sequence
  Description of Artificial Sequence: Synthetic oligonucleotide
  Antisense strand to SEQ ID NO: 2137472
uuauugguuacaaacuuca

SEQ ID NO: 2137474 - RNA, 19 nt, Artificial Sequence
  Description of Artificial Sequence: Synthetic oligonucleotide
  Sense strand starting at position 950 of SEQ ID NO: 1882648
aucuguuguggguauccua

SEQ ID NO: 2137475 - RNA, 19 nt, Artificial Sequence
  Description of Artificial Sequence: Synthetic oligonucleotide
  Antisense strand to SEQ ID NO: 2137474
uaggauacccacaacagau

SEQ ID NO: 2137476 - RNA, 19 nt, Artificial Sequence
  Description of Artificial Sequence: Synthetic oligonucleotide
  Sense strand starting at position 953 of SEQ ID NO: 1882648
uguuguggguauccuauua

SEQ ID NO: 2137477 - RNA, 19 nt, Artificial Sequence
  Description of Artificial Sequence: Synthetic oligonucleotide
  Antisense strand to SEQ ID NO: 2137476
uaauaggauacccacaaca

SEQ ID NO: 2137478 - RNA, 19 nt, Artificial Sequence
  Description of Artificial Sequence: Synthetic oligonucleotide
  Sense strand starting at position 958 of SEQ ID NO: 1882648
uggguauccuauuauacua

SEQ ID NO: 2137479 - RNA, 19 nt, Artificial Sequence
  Description of Artificial Sequence: Synthetic oligonucleotide
  Antisense strand to SEQ ID NO: 2137478
uaguauaauaggauaccca

SEQ ID NO: 2137480 - RNA, 19 nt, Artificial Sequence
  Description of Artificial Sequence: Synthetic oligonucleotide
  Sense strand starting at position 1138 of SEQ ID NO: 1882648
auguuaagugcugguaucu

SEQ ID NO: 2137481 - RNA, 19 nt, Artificial Sequence
  Description of Artificial Sequence: Synthetic oligonucleotide
  Antisense strand to SEQ ID NO: 2137480
agauaccagcacuuaacau

SEQ ID NO: 2137482 - RNA, 19 nt, Artificial Sequence
  Description of Artificial Sequence: Synthetic oligonucleotide
  Sense strand starting at position 1147 of SEQ ID NO: 1882648
gcugguaucuucuuccaca

SEQ ID NO: 2137483 - RNA, 19 nt, Artificial Sequence
  Description of Artificial Sequence: Synthetic oligonucleotide
  Antisense strand to SEQ ID NO: 2137482
uguggaagaagauaccagc

SEQ ID NO: 2137484 - RNA, 19 nt, Artificial Sequence
  Description of Artificial Sequence: Synthetic oligonucleotide
  Sense strand starting at position 1176 of SEQ ID NO: 1882648
auuuguguuugccagcuaa

SEQ ID NO: 2137485 - RNA, 19 nt, Artificial Sequence
  Description of Artificial Sequence: Synthetic oligonucleotide
  Antisense strand to SEQ ID NO: 2137484
uuagcuggcaaacacaaau

SEQ ID NO: 2137486 - RNA, 19 nt, Artificial Sequence
  Description of Artificial Sequence: Synthetic oligonucleotide
  Sense strand starting at position 1179 of SEQ ID NO: 1882648
uguguuugccagcuaaugu

SEQ ID NO: 2137487 - RNA, 19 nt, Artificial Sequence
  Description of Artificial Sequence: Synthetic oligonucleotide
  Antisense strand to SEQ ID NO: 2137486
acauuagcuggcaaacaca

SEQ ID NO: 2137488 - RNA, 19 nt, Artificial Sequence
  Description of Artificial Sequence: Synthetic oligonucleotide
  Sense strand starting at position 1180 of SEQ ID NO: 1882648
guguuugccagcuaauguc

SEQ ID NO: 2137489 - RNA, 19 nt, Artificial Sequence
  Description of Artificial Sequence: Synthetic oligonucleotide
  Antisense strand to SEQ ID NO: 2137488
gacauuagcuggcaaacac

SEQ ID NO: 2137490 - RNA, 19 nt, Artificial Sequence
  Description of Artificial Sequence: Synthetic oligonucleotide
  Sense strand starting at position 1204 of SEQ ID NO: 1882648
cccaguaagucugcaaauu

SEQ ID NO: 2137491 - RNA, 19 nt, Artificial Sequence
  Description of Artificial Sequence: Synthetic oligonucleotide
  Antisense strand to SEQ ID NO: 2137490
aauuugcagacuuacuggg

SEQ ID NO: 2137492 - RNA, 19 nt, Artificial Sequence
  Description of Artificial Sequence: Synthetic oligonucleotide
  Sense strand starting at position 1205 of SEQ ID NO: 1882648
ccaguaagucugcaaauuc

SEQ ID NO: 2137493 - RNA, 19 nt, Artificial Sequence
  Description of Artificial Sequence: Synthetic oligonucleotide
  Antisense strand to SEQ ID NO: 2137492
gaauuugcagacuuacugg

SEQ ID NO: 2137494 - RNA, 19 nt, Artificial Sequence
  Description of Artificial Sequence: Synthetic oligonucleotide
  Sense strand starting at position 2571 of SEQ ID NO: 1882648
cucuguucgaccugugcaa

SEQ ID NO: 2137495 - RNA, 19 nt, Artificial Sequence
  Description of Artificial Sequence: Synthetic oligonucleotide
  Antisense strand to SEQ ID NO: 2137494
uugcacaggucgaacagag

SEQ ID NO: 2137496 - RNA, 19 nt, Artificial Sequence
  Description of Artificial Sequence: Synthetic oligonucleotide
  Sense strand starting at position 2985 of SEQ ID NO: 1882648
augccuugcuucuccguaa

SEQ ID NO: 2137497 - RNA, 19 nt, Artificial Sequence
  Description of Artificial Sequence: Synthetic oligonucleotide
  Antisense strand to SEQ ID NO: 2137496
uuacggagaagcaaggcau

SEQ ID NO: 2137498 - RNA, 19 nt, Artificial Sequence
  Description of Artificial Sequence: Synthetic oligonucleotide
  Sense strand starting at position 3059 of SEQ ID NO: 1882648
cuaauacaaucaggaugaa

SEQ ID NO: 2137499 - RNA, 19 nt, Artificial Sequence
  Description of Artificial Sequence: Synthetic oligonucleotide
  Antisense strand to SEQ ID NO: 2137498
uucauccugauuguauuag

SEQ ID NO: 2137500 - RNA, 19 nt, Artificial Sequence
  Description of Artificial Sequence: Synthetic oligonucleotide
  Sense strand starting at position 3348 of SEQ ID NO: 1882648
uuguauucguuaucuauuc

SEQ ID NO: 2137501 - RNA, 19 nt, Artificial Sequence
  Description of Artificial Sequence: Synthetic oligonucleotide
  Antisense strand to SEQ ID NO: 2137500
gaauagauaacgaauacaa

SEQ ID NO: 2137502 - RNA, 19 nt, Artificial Sequence
  Description of Artificial Sequence: Synthetic oligonucleotide
  Sense strand starting at position 3355 of SEQ ID NO: 1882648
cguuaucuauucuugggua

SEQ ID NO: 2137503 - RNA, 19 nt, Artificial Sequence
  Description of Artificial Sequence: Synthetic oligonucleotide
  Antisense strand to SEQ ID NO: 2137502
uacccaagaauagauaacg

SEQ ID NO: 2137504 - RNA, 19 nt, Artificial Sequence
  Description of Artificial Sequence: Synthetic oligonucleotide
  Sense strand starting at position 3356 of SEQ ID NO: 1882648
guuaucuauucuuggguaa

SEQ ID NO: 2137505 - RNA, 19 nt, Artificial Sequence
  Description of Artificial Sequence: Synthetic oligonucleotide
  Antisense strand to SEQ ID NO: 2137504
uuacccaagaauagauaac

SEQ ID NO: 2137506 - RNA, 19 nt, Artificial Sequence
  Description of Artificial Sequence: Synthetic oligonucleotide
  Sense strand starting at position 3357 of SEQ ID NO: 1882648
uuaucuauucuuggguaaa

SEQ ID NO: 2137507 - RNA, 19 nt, Artificial Sequence
  Description of Artificial Sequence: Synthetic oligonucleotide
  Antisense strand to SEQ ID NO: 2137506
uuuacccaagaauagauaa

SEQ ID NO: 2137508 - RNA, 19 nt, Artificial Sequence
  Description of Artificial Sequence: Synthetic oligonucleotide
  Sense strand starting at position 3623 of SEQ ID NO: 1882648
cuuccaccucuugguaaga

SEQ ID NO: 2137509 - RNA, 19 nt, Artificial Sequence
  Description of Artificial Sequence: Synthetic oligonucleotide
  Antisense strand to SEQ ID NO: 2137508
ucuuaccaagagguggaag

SEQ ID NO: 2137510 - RNA, 19 nt, Artificial Sequence
  Description of Artificial Sequence: Synthetic oligonucleotide
  Sense strand starting at position 3761 of SEQ ID NO: 1882648
uacguagucuauugcuacu

SEQ ID NO: 2137511 - RNA, 19 nt, Artificial Sequence
  Description of Artificial Sequence: Synthetic oligonucleotide
  Antisense strand to SEQ ID NO: 2137510
aguagcaauagacuacgua

SEQ ID NO: 2137512 - RNA, 19 nt, Artificial Sequence
  Description of Artificial Sequence: Synthetic oligonucleotide
  Sense strand starting at position 3763 of SEQ ID NO: 1882648
cguagucuauugcuacuua

SEQ ID NO: 2137513 - RNA, 19 nt, Artificial Sequence
  Description of Artificial Sequence: Synthetic oligonucleotide
  Antisense strand to SEQ ID NO: 2137512
uaaguagcaauagacuacg

SEQ ID NO: 2137514 - RNA, 19 nt, Artificial Sequence
  Description of Artificial Sequence: Synthetic oligonucleotide
  Sense strand starting at position 10 of SEQ ID NO: 1882649
caguuaaaugcaugaggcu

SEQ ID NO: 2137515 - RNA, 19 nt, Artificial Sequence
  Description of Artificial Sequence: Synthetic oligonucleotide
  Antisense strand to SEQ ID NO: 2137514
agccucaugcauuuaacug

SEQ ID NO: 2137516 - RNA, 19 nt, Artificial Sequence
  Description of Artificial Sequence: Synthetic oligonucleotide
  Sense strand starting at position 26 of SEQ ID NO: 1882649
gcugaaguucugcaauaug

SEQ ID NO: 2137517 - RNA, 19 nt, Artificial Sequence
  Description of Artificial Sequence: Synthetic oligonucleotide
  Antisense strand to SEQ ID NO: 2137516
cauauugcagaacuucagc

SEQ ID NO: 2137518 - RNA, 19 nt, Artificial Sequence
  Description of Artificial Sequence: Synthetic oligonucleotide
  Sense strand starting at position 29 of SEQ ID NO: 1882649
gaaguucugcaauauguua

SEQ ID NO: 2137519 - RNA, 19 nt, Artificial Sequence
  Description of Artificial Sequence: Synthetic oligonucleotide
  Antisense strand to SEQ ID NO: 2137518
uaacauauugcagaacuuc

SEQ ID NO: 2137520 - RNA, 19 nt, Artificial Sequence
  Description of Artificial Sequence: Synthetic oligonucleotide
  Sense strand starting at position 36 of SEQ ID NO: 1882649
ugcaauauguuagcaauaa

SEQ ID NO: 2137521 - RNA, 19 nt, Artificial Sequence
  Description of Artificial Sequence: Synthetic oligonucleotide
  Antisense strand to SEQ ID NO: 2137520
uuauugcuaacauauugca

SEQ ID NO: 2137522 - RNA, 19 nt, Artificial Sequence
  Description of Artificial Sequence: Synthetic oligonucleotide
  Sense strand starting at position 489 of SEQ ID NO: 1882649
caaucaacguuucugauga

SEQ ID NO: 2137523 - RNA, 19 nt, Artificial Sequence
  Description of Artificial Sequence: Synthetic oligonucleotide
  Antisense strand to SEQ ID NO: 2137522
ucaucagaaacguugauug

SEQ ID NO: 2137524 - RNA, 19 nt, Artificial Sequence
  Description of Artificial Sequence: Synthetic oligonucleotide
  Sense strand starting at position 500 of SEQ ID NO: 1882649
ucugaugagugagugugua

SEQ ID NO: 2137525 - RNA, 19 nt, Artificial Sequence
  Description of Artificial Sequence: Synthetic oligonucleotide
  Antisense strand to SEQ ID NO: 2137524
uacacacucacucaucaga

SEQ ID NO: 2137526 - RNA, 19 nt, Artificial Sequence
  Description of Artificial Sequence: Synthetic oligonucleotide
  Sense strand starting at position 518 of SEQ ID NO: 1882649
agcuaauucgaauaagcua

SEQ ID NO: 2137527 - RNA, 19 nt, Artificial Sequence
  Description of Artificial Sequence: Synthetic oligonucleotide
  Antisense strand to SEQ ID NO: 2137526
uagcuuauucgaauuagcu

SEQ ID NO: 2137528 - RNA, 19 nt, Artificial Sequence
  Description of Artificial Sequence: Synthetic oligonucleotide
  Sense strand starting at position 544 of SEQ ID NO: 1882649
agaugaauucuagguuguu

SEQ ID NO: 2137529 - RNA, 19 nt, Artificial Sequence
  Description of Artificial Sequence: Synthetic oligonucleotide
  Antisense strand to SEQ ID NO: 2137528
aacaaccuagaauucaucu

SEQ ID NO: 2137530 - RNA, 19 nt, Artificial Sequence
  Description of Artificial Sequence: Synthetic oligonucleotide
  Sense strand starting at position 545 of SEQ ID NO: 1882649
gaugaauucuagguuguug

SEQ ID NO: 2137531 - RNA, 19 nt, Artificial Sequence
  Description of Artificial Sequence: Synthetic oligonucleotide
  Antisense strand to SEQ ID NO: 2137530
caacaaccuagaauucauc

SEQ ID NO: 2137532 - RNA, 19 nt, Artificial Sequence
  Description of Artificial Sequence: Synthetic oligonucleotide
  Sense strand starting at position 631 of SEQ ID NO: 1882649
uguucugcauauuucugaa

SEQ ID NO: 2137533 - RNA, 19 nt, Artificial Sequence
  Description of Artificial Sequence: Synthetic oligonucleotide
  Antisense strand to SEQ ID NO: 2137532
uucagaaauaugcagaaca

SEQ ID NO: 2137534 - RNA, 19 nt, Artificial Sequence
  Description of Artificial Sequence: Synthetic oligonucleotide
  Sense strand starting at position 701 of SEQ ID NO: 1882649
agaugagauuauuacacau

SEQ ID NO: 2137535 - RNA, 19 nt, Artificial Sequence
  Description of Artificial Sequence: Synthetic oligonucleotide
  Antisense strand to SEQ ID NO: 2137534
auguguaauaaucucaucu

SEQ ID NO: 2137536 - RNA, 19 nt, Artificial Sequence
  Description of Artificial Sequence: Synthetic oligonucleotide
  Sense strand starting at position 927 of SEQ ID NO: 1882649
ccaacaugcucuuuggaca

SEQ ID NO: 2137537 - RNA, 19 nt, Artificial Sequence
  Description of Artificial Sequence: Synthetic oligonucleotide
  Antisense strand to SEQ ID NO: 2137536
uguccaaagagcauguugg

SEQ ID NO: 2137538 - RNA, 19 nt, Artificial Sequence
  Description of Artificial Sequence: Synthetic oligonucleotide
  Sense strand starting at position 932 of SEQ ID NO: 1882649
augcucuuuggacauaacu

SEQ ID NO: 2137539 - RNA, 19 nt, Artificial Sequence
  Description of Artificial Sequence: Synthetic oligonucleotide
  Antisense strand to SEQ ID NO: 2137538
aguuauguccaaagagcau

SEQ ID NO: 2137540 - RNA, 19 nt, Artificial Sequence
  Description of Artificial Sequence: Synthetic oligonucleotide
  Sense strand starting at position 1074 of SEQ ID NO: 1882649
agucgcaucauauagaguu

SEQ ID NO: 2137541 - RNA, 19 nt, Artificial Sequence
  Description of Artificial Sequence: Synthetic oligonucleotide
  Antisense strand to SEQ ID NO: 2137540
aacucuauaugaugcgacu

SEQ ID NO: 2137542 - RNA, 19 nt, Artificial Sequence
  Description of Artificial Sequence: Synthetic oligonucleotide
  Sense strand starting at position 1134 of SEQ ID NO: 1882649
agcaguuaccaugaaauau

SEQ ID NO: 2137543 - RNA, 19 nt, Artificial Sequence
  Description of Artificial Sequence: Synthetic oligonucleotide
  Antisense strand to SEQ ID NO: 2137542
auauuucaugguaacugcu

SEQ ID NO: 2137544 - RNA, 19 nt, Artificial Sequence
  Description of Artificial Sequence: Synthetic oligonucleotide
  Sense strand starting at position 1207 of SEQ ID NO: 1882649
aggcauauucuuuggacua

SEQ ID NO: 2137545 - RNA, 19 nt, Artificial Sequence
  Description of Artificial Sequence: Synthetic oligonucleotide
  Antisense strand to SEQ ID NO: 2137544
uaguccaaagaauaugccu

SEQ ID NO: 2137546 - RNA, 19 nt, Artificial Sequence
  Description of Artificial Sequence: Synthetic oligonucleotide
  Sense strand starting at position 1721 of SEQ ID NO: 1882649
ggagaacucucacccucau

SEQ ID NO: 2137547 - RNA, 19 nt, Artificial Sequence
  Description of Artificial Sequence: Synthetic oligonucleotide
  Antisense strand to SEQ ID NO: 2137546
augagggugagaguucucc

SEQ ID NO: 2137548 - RNA, 19 nt, Artificial Sequence
  Description of Artificial Sequence: Synthetic oligonucleotide
  Sense strand starting at position 1871 of SEQ ID NO: 1882649
augauaagcaaguauggua

SEQ ID NO: 2137549 - RNA, 19 nt, Artificial Sequence
  Description of Artificial Sequence: Synthetic oligonucleotide
  Antisense strand to SEQ ID NO: 2137548
uaccauacuugcuuaucau

SEQ ID NO: 2137550 - RNA, 19 nt, Artificial Sequence
  Description of Artificial Sequence: Synthetic oligonucleotide
  Sense strand starting at position 1994 of SEQ ID NO: 1882649
uuggaaagcuaucugugaa

SEQ ID NO: 2137551 - RNA, 19 nt, Artificial Sequence
  Description of Artificial Sequence: Synthetic oligonucleotide
  Antisense strand to SEQ ID NO: 2137550
uucacagauagcuuuccaa

SEQ ID NO: 2137552 - RNA, 19 nt, Artificial Sequence
  Description of Artificial Sequence: Synthetic oligonucleotide
  Sense strand starting at position 1995 of SEQ ID NO: 1882649
uggaaagcuaucugugaaa

SEQ ID NO: 2137553 - RNA, 19 nt, Artificial Sequence
  Description of Artificial Sequence: Synthetic oligonucleotide
  Antisense strand to SEQ ID NO: 2137552
uuucacagauagcuuucca

SEQ ID NO: 2137554 - RNA, 19 nt, Artificial Sequence
  Description of Artificial Sequence: Synthetic oligonucleotide
  Sense strand starting at position 2061 of SEQ ID NO: 1882649
cugggacacucucuaauau

SEQ ID NO: 2137555 - RNA, 19 nt, Artificial Sequence
  Description of Artificial Sequence: Synthetic oligonucleotide
  Antisense strand to SEQ ID NO: 2137554
auauuagagagugucccag

SEQ ID NO: 2137556 - RNA, 19 nt, Artificial Sequence
  Description of Artificial Sequence: Synthetic oligonucleotide
  Sense strand starting at position 2140 of SEQ ID NO: 1882649
cugaauggcuuguccuaaa

SEQ ID NO: 2137557 - RNA, 19 nt, Artificial Sequence
  Description of Artificial Sequence: Synthetic oligonucleotide
  Antisense strand to SEQ ID NO: 2137556
uuuaggacaagccauucag

SEQ ID NO: 2137558 - RNA, 19 nt, Artificial Sequence
  Description of Artificial Sequence: Synthetic oligonucleotide
  Sense strand starting at position 2264 of SEQ ID NO: 1882649
uguagaggaugucuuguuu

SEQ ID NO: 2137559 - RNA, 19 nt, Artificial Sequence
  Description of Artificial Sequence: Synthetic oligonucleotide
  Antisense strand to SEQ ID NO: 2137558
aaacaagacauccucuaca

SEQ ID NO: 2137560 - RNA, 19 nt, Artificial Sequence
  Description of Artificial Sequence: Synthetic oligonucleotide
  Sense strand starting at position 2293 of SEQ ID NO: 1882649
auugcucucuuacugaaga

SEQ ID NO: 2137561 - RNA, 19 nt, Artificial Sequence
  Description of Artificial Sequence: Synthetic oligonucleotide
  Antisense strand to SEQ ID NO: 2137560
ucuucaguaagagagcaau

SEQ ID NO: 2137562 - RNA, 19 nt, Artificial Sequence
  Description of Artificial Sequence: Synthetic oligonucleotide
  Sense strand starting at position 2737 of SEQ ID NO: 1882649
cagccauaguaugugauua

SEQ ID NO: 2137563 - RNA, 19 nt, Artificial Sequence
  Description of Artificial Sequence: Synthetic oligonucleotide
  Antisense strand to SEQ ID NO: 2137562
uaaucacauacuauggcug

SEQ ID NO: 2137564 - RNA, 19 nt, Artificial Sequence
  Description of Artificial Sequence: Synthetic oligonucleotide
  Sense strand starting at position 3204 of SEQ ID NO: 1882649
guuggcgugucauuuauag

SEQ ID NO: 2137565 - RNA, 19 nt, Artificial Sequence
  Description of Artificial Sequence: Synthetic oligonucleotide
  Antisense strand to SEQ ID NO: 2137564
cuauaaaugacacgccaac

SEQ ID NO: 2137566 - RNA, 19 nt, Artificial Sequence
  Description of Artificial Sequence: Synthetic oligonucleotide
  Sense strand starting at position 3206 of SEQ ID NO: 1882649
uggcgugucauuuauaguc

SEQ ID NO: 2137567 - RNA, 19 nt, Artificial Sequence
  Description of Artificial Sequence: Synthetic oligonucleotide
  Antisense strand to SEQ ID NO: 2137566
gacuauaaaugacacgcca

SEQ ID NO: 2137568 - RNA, 19 nt, Artificial Sequence
  Description of Artificial Sequence: Synthetic oligonucleotide
  Sense strand starting at position 3231 of SEQ ID NO: 1882649
cgcuuuauaguuuauaaac

SEQ ID NO: 2137569 - RNA, 19 nt, Artificial Sequence
  Description of Artificial Sequence: Synthetic oligonucleotide
  Antisense strand to SEQ ID NO: 2137568
guuuauaaacuauaaagcg

SEQ ID NO: 2137570 - RNA, 19 nt, Artificial Sequence
  Description of Artificial Sequence: Synthetic oligonucleotide
  Sense strand starting at position 3486 of SEQ ID NO: 1882649
auauuaccuguagagcuaa

SEQ ID NO: 2137571 - RNA, 19 nt, Artificial Sequence
  Description of Artificial Sequence: Synthetic oligonucleotide
  Antisense strand to SEQ ID NO: 2137570
uuagcucuacagguaauau

SEQ ID NO: 2137572 - RNA, 19 nt, Artificial Sequence
  Description of Artificial Sequence: Synthetic oligonucleotide
  Sense strand starting at position 3594 of SEQ ID NO: 1882649
ucccuuaaccuuugggauu

SEQ ID NO: 2137573 - RNA, 19 nt, Artificial Sequence
  Description of Artificial Sequence: Synthetic oligonucleotide
  Antisense strand to SEQ ID NO: 2137572
aaucccaaagguuaaggga

SEQ ID NO: 2137574 - RNA, 19 nt, Artificial Sequence
  Description of Artificial Sequence: Synthetic oligonucleotide
  Sense strand starting at position 3636 of SEQ ID NO: 1882649
auaggauacuuuccaguau

SEQ ID NO: 2137575 - RNA, 19 nt, Artificial Sequence
  Description of Artificial Sequence: Synthetic oligonucleotide
  Antisense strand to SEQ ID NO: 2137574
auacuggaaaguauccuau

SEQ ID NO: 2137576 - RNA, 19 nt, Artificial Sequence
  Description of Artificial Sequence: Synthetic oligonucleotide
  Sense strand starting at position 3684 of SEQ ID NO: 1882649
caucaaggucuuggugauu

SEQ ID NO: 2137577 - RNA, 19 nt, Artificial Sequence
  Description of Artificial Sequence: Synthetic oligonucleotide
  Antisense strand to SEQ ID NO: 2137576
aaucaccaagaccuugaug

SEQ ID NO: 2137578 - RNA, 19 nt, Artificial Sequence
  Description of Artificial Sequence: Synthetic oligonucleotide
  Sense strand starting at position 3687 of SEQ ID NO: 1882649
caaggucuuggugauuaag

SEQ ID NO: 2137579 - RNA, 19 nt, Artificial Sequence
  Description of Artificial Sequence: Synthetic oligonucleotide
  Antisense strand to SEQ ID NO: 2137578
cuuaaucaccaagaccuug

SEQ ID NO: 2137580 - RNA, 19 nt, Artificial Sequence
  Description of Artificial Sequence: Synthetic oligonucleotide
  Sense strand starting at position 3689 of SEQ ID NO: 1882649
aggucuuggugauuaagaa

SEQ ID NO: 2137581 - RNA, 19 nt, Artificial Sequence
  Description of Artificial Sequence: Synthetic oligonucleotide
  Antisense strand to SEQ ID NO: 2137580
uucuuaaucaccaagaccu

SEQ ID NO: 2137582 - RNA, 19 nt, Artificial Sequence
  Description of Artificial Sequence: Synthetic oligonucleotide
  Sense strand starting at position 3874 of SEQ ID NO: 1882649
uuggaaaucguauaccaug

SEQ ID NO: 2137583 - RNA, 19 nt, Artificial Sequence
  Description of Artificial Sequence: Synthetic oligonucleotide
  Antisense strand to SEQ ID NO: 2137582
caugguauacgauuuccaa

SEQ ID NO: 2137584 - RNA, 19 nt, Artificial Sequence
  Description of Artificial Sequence: Synthetic oligonucleotide
  Sense strand starting at position 3920 of SEQ ID NO: 1882649
guccuaaugcaauggaaug

SEQ ID NO: 2137585 - RNA, 19 nt, Artificial Sequence
  Description of Artificial Sequence: Synthetic oligonucleotide
  Antisense strand to SEQ ID NO: 2137584
cauuccauugcauuaggac

SEQ ID NO: 2137586 - RNA, 19 nt, Artificial Sequence
  Description of Artificial Sequence: Synthetic oligonucleotide
  Sense strand starting at position 3925 of SEQ ID NO: 1882649
aaugcaauggaaugaguaa

SEQ ID NO: 2137587 - RNA, 19 nt, Artificial Sequence
  Description of Artificial Sequence: Synthetic oligonucleotide
  Antisense strand to SEQ ID NO: 2137586
uuacucauuccauugcauu

SEQ ID NO: 2137588 - RNA, 19 nt, Artificial Sequence
  Description of Artificial Sequence: Synthetic oligonucleotide
  Sense strand starting at position 3943 of SEQ ID NO: 1882649
auuuaaugcugguaaucag

SEQ ID NO: 2137589 - RNA, 19 nt, Artificial Sequence
  Description of Artificial Sequence: Synthetic oligonucleotide
  Antisense strand to SEQ ID NO: 2137588
cugauuaccagcauuaaau

SEQ ID NO: 2137590 - RNA, 19 nt, Artificial Sequence
  Description of Artificial Sequence: Synthetic oligonucleotide
  Sense strand starting at position 3950 of SEQ ID NO: 1882649
gcugguaaucaggacugga

SEQ ID NO: 2137591 - RNA, 19 nt, Artificial Sequence
  Description of Artificial Sequence: Synthetic oligonucleotide
  Antisense strand to SEQ ID NO: 2137590
uccaguccugauuaccagc

SEQ ID NO: 2137592 - RNA, 19 nt, Artificial Sequence
  Description of Artificial Sequence: Synthetic oligonucleotide
  Sense strand starting at position 3954 of SEQ ID NO: 1882649
guaaucaggacuggauauu

SEQ ID NO: 2137593 - RNA, 19 nt, Artificial Sequence
  Description of Artificial Sequence: Synthetic oligonucleotide
  Antisense strand to SEQ ID NO: 2137592
aauauccaguccugauuac

SEQ ID NO: 2137594 - RNA, 19 nt, Artificial Sequence
  Description of Artificial Sequence: Synthetic oligonucleotide
  Sense strand starting at position 2244 of SEQ ID NO: 1882650
caacaaaguguuggaugaa

SEQ ID NO: 2137595 - RNA, 19 nt, Artificial Sequence
  Description of Artificial Sequence: Synthetic oligonucleotide
  Antisense strand to SEQ ID NO: 2137594
uucauccaacacuuuguug

SEQ ID NO: 2137596 - RNA, 19 nt, Artificial Sequence
  Description of Artificial Sequence: Synthetic oligonucleotide
  Sense strand starting at position 2247 of SEQ ID NO: 1882650
caaaguguuggaugaauaa

SEQ ID NO: 2137597 - RNA, 19 nt, Artificial Sequence
  Description of Artificial Sequence: Synthetic oligonucleotide
  Antisense strand to SEQ ID NO: 2137596
uuauucauccaacacuuug

SEQ ID NO: 2137598 - RNA, 19 nt, Artificial Sequence
  Description of Artificial Sequence: Synthetic oligonucleotide
  Sense strand starting at position 2258 of SEQ ID NO: 1882650
augaauaagucaucaugcu

SEQ ID NO: 2137599 - RNA, 19 nt, Artificial Sequence
  Description of Artificial Sequence: Synthetic oligonucleotide
  Antisense strand to SEQ ID NO: 2137598
agcaugaugacuuauucau

SEQ ID NO: 2137600 - RNA, 19 nt, Artificial Sequence
  Description of Artificial Sequence: Synthetic oligonucleotide
  Sense strand starting at position 2309 of SEQ ID NO: 1882650
cucuccagucucuggaaau

SEQ ID NO: 2137601 - RNA, 19 nt, Artificial Sequence
  Description of Artificial Sequence: Synthetic oligonucleotide
  Antisense strand to SEQ ID NO: 2137600
auuuccagagacuggagag

SEQ ID NO: 2137602 - RNA, 19 nt, Artificial Sequence
  Description of Artificial Sequence: Synthetic oligonucleotide
  Sense strand starting at position 2341 of SEQ ID NO: 1882650
uguuacuucgaguaugacu

SEQ ID NO: 2137603 - RNA, 19 nt, Artificial Sequence
  Description of Artificial Sequence: Synthetic oligonucleotide
  Antisense strand to SEQ ID NO: 2137602
agucauacucgaaguaaca

SEQ ID NO: 2137604 - RNA, 19 nt, Artificial Sequence
  Description of Artificial Sequence: Synthetic oligonucleotide
  Sense strand starting at position 2343 of SEQ ID NO: 1882650
uuacuucgaguaugacuuu

SEQ ID NO: 2137605 - RNA, 19 nt, Artificial Sequence
  Description of Artificial Sequence: Synthetic oligonucleotide
  Antisense strand to SEQ ID NO: 2137604
aaagucauacucgaaguaa

SEQ ID NO: 2137606 - RNA, 19 nt, Artificial Sequence
  Description of Artificial Sequence: Synthetic oligonucleotide
  Sense strand starting at position 2346 of SEQ ID NO: 1882650
cuucgaguaugacuuuauu

SEQ ID NO: 2137607 - RNA, 19 nt, Artificial Sequence
  Description of Artificial Sequence: Synthetic oligonucleotide
  Antisense strand to SEQ ID NO: 2137606
aauaaagucauacucgaag

SEQ ID NO: 2137608 - RNA, 19 nt, Artificial Sequence
  Description of Artificial Sequence: Synthetic oligonucleotide
  Sense strand starting at position 2387 of SEQ ID NO: 1882650
gcacucauuuaggauccau

SEQ ID NO: 2137609 - RNA, 19 nt, Artificial Sequence
  Description of Artificial Sequence: Synthetic oligonucleotide
  Antisense strand to SEQ ID NO: 2137608
auggauccuaaaugagugc

SEQ ID NO: 2137610 - RNA, 19 nt, Artificial Sequence
  Description of Artificial Sequence: Synthetic oligonucleotide
  Sense strand starting at position 2421 of SEQ ID NO: 1882650
gugaccauuugauauugaa

SEQ ID NO: 2137611 - RNA, 19 nt, Artificial Sequence
  Description of Artificial Sequence: Synthetic oligonucleotide
  Antisense strand to SEQ ID NO: 2137610
uucaauaucaaauggucac

SEQ ID NO: 2137612 - RNA, 19 nt, Artificial Sequence
  Description of Artificial Sequence: Synthetic oligonucleotide
  Sense strand starting at position 2440 of SEQ ID NO: 1882650
agucaugccugcuuggaga

SEQ ID NO: 2137613 - RNA, 19 nt, Artificial Sequence
  Description of Artificial Sequence: Synthetic oligonucleotide
  Antisense strand to SEQ ID NO: 2137612
ucuccaagcaggcaugacu

SEQ ID NO: 2137614 - RNA, 19 nt, Artificial Sequence
  Description of Artificial Sequence: Synthetic oligonucleotide
  Sense strand starting at position 2524 of SEQ ID NO: 1882650
gccacaagauaguuaaaua

SEQ ID NO: 2137615 - RNA, 19 nt, Artificial Sequence
  Description of Artificial Sequence: Synthetic oligonucleotide
  Antisense strand to SEQ ID NO: 2137614
uauuuaacuaucuuguggc

SEQ ID NO: 2137616 - RNA, 19 nt, Artificial Sequence
  Description of Artificial Sequence: Synthetic oligonucleotide
  Sense strand starting at position 2611 of SEQ ID NO: 1882650
gcuaaacaauguguguaga

SEQ ID NO: 2137617 - RNA, 19 nt, Artificial Sequence
  Description of Artificial Sequence: Synthetic oligonucleotide
  Antisense strand to SEQ ID NO: 2137616
ucuacacacauuguuuagc

SEQ ID NO: 2137618 - RNA, 19 nt, Artificial Sequence
  Description of Artificial Sequence: Synthetic oligonucleotide
  Sense strand starting at position 2612 of SEQ ID NO: 1882650
cuaaacaauguguguagaa

SEQ ID NO: 2137619 - RNA, 19 nt, Artificial Sequence
  Description of Artificial Sequence: Synthetic oligonucleotide
  Antisense strand to SEQ ID NO: 2137618
uucuacacacauuguuuag

SEQ ID NO: 2137620 - RNA, 19 nt, Artificial Sequence
  Description of Artificial Sequence: Synthetic oligonucleotide
  Sense strand starting at position 2794 of SEQ ID NO: 1882650
agaggacugauggguuguu

SEQ ID NO: 2137621 - RNA, 19 nt, Artificial Sequence
  Description of Artificial Sequence: Synthetic oligonucleotide
  Antisense strand to SEQ ID NO: 2137620
aacaacccaucaguccucu

SEQ ID NO: 2137622 - RNA, 19 nt, Artificial Sequence
  Description of Artificial Sequence: Synthetic oligonucleotide
  Sense strand starting at position 2804 of SEQ ID NO: 1882650
uggguuguucuugagcuua

SEQ ID NO: 2137623 - RNA, 19 nt, Artificial Sequence
  Description of Artificial Sequence: Synthetic oligonucleotide
  Antisense strand to SEQ ID NO: 2137622
uaagcucaagaacaaccca

SEQ ID NO: 2137624 - RNA, 19 nt, Artificial Sequence
  Description of Artificial Sequence: Synthetic oligonucleotide
  Sense strand starting at position 2809 of SEQ ID NO: 1882650
uguucuugagcuuacuacu

SEQ ID NO: 2137625 - RNA, 19 nt, Artificial Sequence
  Description of Artificial Sequence: Synthetic oligonucleotide
  Antisense strand to SEQ ID NO: 2137624
aguaguaagcucaagaaca

SEQ ID NO: 2137626 - RNA, 19 nt, Artificial Sequence
  Description of Artificial Sequence: Synthetic oligonucleotide
  Sense strand starting at position 2920 of SEQ ID NO: 1882650
ccaauuagauaggcuuuau

SEQ ID NO: 2137627 - RNA, 19 nt, Artificial Sequence
  Description of Artificial Sequence: Synthetic oligonucleotide
  Antisense strand to SEQ ID NO: 2137626
auaaagccuaucuaauugg

SEQ ID NO: 2137628 - RNA, 19 nt, Artificial Sequence
  Description of Artificial Sequence: Synthetic oligonucleotide
  Sense strand starting at position 3140 of SEQ ID NO: 1882650
cagugaaugcauuguauuu

SEQ ID NO: 2137629 - RNA, 19 nt, Artificial Sequence
  Description of Artificial Sequence: Synthetic oligonucleotide
  Antisense strand to SEQ ID NO: 2137628
aaauacaaugcauucacug

SEQ ID NO: 2137630 - RNA, 19 nt, Artificial Sequence
  Description of Artificial Sequence: Synthetic oligonucleotide
  Sense strand starting at position 3164 of SEQ ID NO: 1882650
ucuccaguuucuguuggaa

SEQ ID NO: 2137631 - RNA, 19 nt, Artificial Sequence
  Description of Artificial Sequence: Synthetic oligonucleotide
  Antisense strand to SEQ ID NO: 2137630
uuccaacagaaacuggaga

SEQ ID NO: 2137632 - RNA, 19 nt, Artificial Sequence
  Description of Artificial Sequence: Synthetic oligonucleotide
  Sense strand starting at position 3167 of SEQ ID NO: 1882650
ccaguuucuguuggaauac

SEQ ID NO: 2137633 - RNA, 19 nt, Artificial Sequence
  Description of Artificial Sequence: Synthetic oligonucleotide
  Antisense strand to SEQ ID NO: 2137632
guauuccaacagaaacugg

SEQ ID NO: 2137634 - RNA, 19 nt, Artificial Sequence
  Description of Artificial Sequence: Synthetic oligonucleotide
  Sense strand starting at position 3177 of SEQ ID NO: 1882650
uuggaauacccguaucuga

SEQ ID NO: 2137635 - RNA, 19 nt, Artificial Sequence
  Description of Artificial Sequence: Synthetic oligonucleotide
  Antisense strand to SEQ ID NO: 2137634
ucagauacggguauuccaa

SEQ ID NO: 2137636 - RNA, 19 nt, Artificial Sequence
  Description of Artificial Sequence: Synthetic oligonucleotide
  Sense strand starting at position 3186 of SEQ ID NO: 1882650
ccguaucugauaggaaaca

SEQ ID NO: 2137637 - RNA, 19 nt, Artificial Sequence
  Description of Artificial Sequence: Synthetic oligonucleotide
  Antisense strand to SEQ ID NO: 2137636
uguuuccuaucagauacgg

SEQ ID NO: 2137638 - RNA, 19 nt, Artificial Sequence
  Description of Artificial Sequence: Synthetic oligonucleotide
  Sense strand starting at position 3231 of SEQ ID NO: 1882650
guugauuucccuugccuuu

SEQ ID NO: 2137639 - RNA, 19 nt, Artificial Sequence
  Description of Artificial Sequence: Synthetic oligonucleotide
  Antisense strand to SEQ ID NO: 2137638
aaaggcaagggaaaucaac

SEQ ID NO: 2137640 - RNA, 19 nt, Artificial Sequence
  Description of Artificial Sequence: Synthetic oligonucleotide
  Sense strand starting at position 3294 of SEQ ID NO: 1882650
ugcucuuugcuagagaccu

SEQ ID NO: 2137641 - RNA, 19 nt, Artificial Sequence
  Description of Artificial Sequence: Synthetic oligonucleotide
  Antisense strand to SEQ ID NO: 2137640
aggucucuagcaaagagca

SEQ ID NO: 2137642 - RNA, 19 nt, Artificial Sequence
  Description of Artificial Sequence: Synthetic oligonucleotide
  Sense strand starting at position 3306 of SEQ ID NO: 1882650
gagaccugguucuugcuaa

SEQ ID NO: 2137643 - RNA, 19 nt, Artificial Sequence
  Description of Artificial Sequence: Synthetic oligonucleotide
  Antisense strand to SEQ ID NO: 2137642
uuagcaagaaccaggucuc

SEQ ID NO: 2137644 - RNA, 19 nt, Artificial Sequence
  Description of Artificial Sequence: Synthetic oligonucleotide
  Sense strand starting at position 3349 of SEQ ID NO: 1882650
agucuugcucuuggaauuu

SEQ ID NO: 2137645 - RNA, 19 nt, Artificial Sequence
  Description of Artificial Sequence: Synthetic oligonucleotide
  Antisense strand to SEQ ID NO: 2137644
aaauuccaagagcaagacu

SEQ ID NO: 2137646 - RNA, 19 nt, Artificial Sequence
  Description of Artificial Sequence: Synthetic oligonucleotide
  Sense strand starting at position 3369 of SEQ ID NO: 1882650
cuuguauagucaccacacu

SEQ ID NO: 2137647 - RNA, 19 nt, Artificial Sequence
  Description of Artificial Sequence: Synthetic oligonucleotide
  Antisense strand to SEQ ID NO: 2137646
aguguggugacuauacaag

SEQ ID NO: 2137648 - RNA, 19 nt, Artificial Sequence
  Description of Artificial Sequence: Synthetic oligonucleotide
  Sense strand starting at position 3370 of SEQ ID NO: 1882650
uuguauagucaccacacua

SEQ ID NO: 2137649 - RNA, 19 nt, Artificial Sequence
  Description of Artificial Sequence: Synthetic oligonucleotide
  Antisense strand to SEQ ID NO: 2137648
uaguguggugacuauacaa

SEQ ID NO: 2137650 - RNA, 19 nt, Artificial Sequence
  Description of Artificial Sequence: Synthetic oligonucleotide
  Sense strand starting at position 3545 of SEQ ID NO: 1882650
gagugaaaugcucauguaa

SEQ ID NO: 2137651 - RNA, 19 nt, Artificial Sequence
  Description of Artificial Sequence: Synthetic oligonucleotide
  Antisense strand to SEQ ID NO: 2137650
uuacaugagcauuucacuc

SEQ ID NO: 2137652 - RNA, 19 nt, Artificial Sequence
  Description of Artificial Sequence: Synthetic oligonucleotide
  Sense strand starting at position 3607 of SEQ ID NO: 1882650
cugagaaggccaugcuucu

SEQ ID NO: 2137653 - RNA, 19 nt, Artificial Sequence
  Description of Artificial Sequence: Synthetic oligonucleotide
  Antisense strand to SEQ ID NO: 2137652
agaagcauggccuucucag

SEQ ID NO: 2137654 - RNA, 19 nt, Artificial Sequence
  Description of Artificial Sequence: Synthetic oligonucleotide
  Sense strand starting at position 3725 of SEQ ID NO: 1882650
gugguuucccucuaguuau

SEQ ID NO: 2137655 - RNA, 19 nt, Artificial Sequence
  Description of Artificial Sequence: Synthetic oligonucleotide
  Antisense strand to SEQ ID NO: 2137654
auaacuagagggaaaccac

SEQ ID NO: 2137656 - RNA, 19 nt, Artificial Sequence
  Description of Artificial Sequence: Synthetic oligonucleotide
  Sense strand starting at position 3749 of SEQ ID NO: 1882650
uuugcuucucaagagaucu

SEQ ID NO: 2137657 - RNA, 19 nt, Artificial Sequence
  Description of Artificial Sequence: Synthetic oligonucleotide
  Antisense strand to SEQ ID NO: 2137656
agaucucuugagaagcaaa

SEQ ID NO: 2137658 - RNA, 19 nt, Artificial Sequence
  Description of Artificial Sequence: Synthetic oligonucleotide
  Sense strand starting at position 3771 of SEQ ID NO: 1882650
ccuuaaguuccggagauac

SEQ ID NO: 2137659 - RNA, 19 nt, Artificial Sequence
  Description of Artificial Sequence: Synthetic oligonucleotide
  Antisense strand to SEQ ID NO: 2137658
guaucuccggaacuuaagg

SEQ ID NO: 2137660 - RNA, 19 nt, Artificial Sequence
  Description of Artificial Sequence: Synthetic oligonucleotide
  Sense strand starting at position 3773 of SEQ ID NO: 1882650
uuaaguuccggagauacua

SEQ ID NO: 2137661 - RNA, 19 nt, Artificial Sequence
  Description of Artificial Sequence: Synthetic oligonucleotide
  Antisense strand to SEQ ID NO: 2137660
uaguaucuccggaacuuaa

SEQ ID NO: 2137662 - RNA, 19 nt, Artificial Sequence
  Description of Artificial Sequence: Synthetic oligonucleotide
  Sense strand starting at position 3781 of SEQ ID NO: 1882650
cggagauacuaucuuauuc

SEQ ID NO: 2137663 - RNA, 19 nt, Artificial Sequence
  Description of Artificial Sequence: Synthetic oligonucleotide
  Antisense strand to SEQ ID NO: 2137662
gaauaagauaguaucuccg

SEQ ID NO: 2137664 - RNA, 19 nt, Artificial Sequence
  Description of Artificial Sequence: Synthetic oligonucleotide
  Sense strand starting at position 3823 of SEQ ID NO: 1882650
uugucuggcuagucugaga

SEQ ID NO: 2137665 - RNA, 19 nt, Artificial Sequence
  Description of Artificial Sequence: Synthetic oligonucleotide
  Antisense strand to SEQ ID NO: 2137664
ucucagacuagccagacaa

SEQ ID NO: 2137666 - RNA, 19 nt, Artificial Sequence
  Description of Artificial Sequence: Synthetic oligonucleotide
  Sense strand starting at position 3836 of SEQ ID NO: 1882650
cugagaguguuuguaucua

SEQ ID NO: 2137667 - RNA, 19 nt, Artificial Sequence
  Description of Artificial Sequence: Synthetic oligonucleotide
  Antisense strand to SEQ ID NO: 2137666
uagauacaaacacucucag

SEQ ID NO: 2137668 - RNA, 19 nt, Artificial Sequence
  Description of Artificial Sequence: Synthetic oligonucleotide
  Sense strand starting at position 3840 of SEQ ID NO: 1882650
gaguguuuguaucuacaac

SEQ ID NO: 2137669 - RNA, 19 nt, Artificial Sequence
  Description of Artificial Sequence: Synthetic oligonucleotide
  Antisense strand to SEQ ID NO: 2137668
guuguagauacaaacacuc

SEQ ID NO: 2137670 - RNA, 19 nt, Artificial Sequence
  Description of Artificial Sequence: Synthetic oligonucleotide
  Sense strand starting at position 3864 of SEQ ID NO: 1882650
gauuucugccuaggucuuu

SEQ ID NO: 2137671 - RNA, 19 nt, Artificial Sequence
  Description of Artificial Sequence: Synthetic oligonucleotide
  Antisense strand to SEQ ID NO: 2137670
aaagaccuaggcagaaauc

SEQ ID NO: 2137672 - RNA, 19 nt, Artificial Sequence
  Description of Artificial Sequence: Synthetic oligonucleotide
  Sense strand starting at position 3944 of SEQ ID NO: 1882650
cgcuucucugugggaggaa

SEQ ID NO: 2137673 - RNA, 19 nt, Artificial Sequence
  Description of Artificial Sequence: Synthetic oligonucleotide
  Antisense strand to SEQ ID NO: 2137672
uuccucccacagagaagcg

SEQ ID NO: 2137674 - RNA, 19 nt, Artificial Sequence
  Description of Artificial Sequence: Synthetic oligonucleotide
  Sense strand starting at position 86 of SEQ ID NO: 1882651
guguuucuguuaucaggaa

SEQ ID NO: 2137675 - RNA, 19 nt, Artificial Sequence
  Description of Artificial Sequence: Synthetic oligonucleotide
  Antisense strand to SEQ ID NO: 2137674
uuccugauaacagaaacac

SEQ ID NO: 2137676 - RNA, 19 nt, Artificial Sequence
  Description of Artificial Sequence: Synthetic oligonucleotide
  Sense strand starting at position 90 of SEQ ID NO: 1882651
uucuguuaucaggaagccu

SEQ ID NO: 2137677 - RNA, 19 nt, Artificial Sequence
  Description of Artificial Sequence: Synthetic oligonucleotide
  Antisense strand to SEQ ID NO: 2137676
aggcuuccugauaacagaa

SEQ ID NO: 2137678 - RNA, 19 nt, Artificial Sequence
  Description of Artificial Sequence: Synthetic oligonucleotide
  Sense strand starting at position 232 of SEQ ID NO: 1882651
caugcugugccagagaucu

SEQ ID NO: 2137679 - RNA, 19 nt, Artificial Sequence
  Description of Artificial Sequence: Synthetic oligonucleotide
  Antisense strand to SEQ ID NO: 2137678
agaucucuggcacagcaug

SEQ ID NO: 2137680 - RNA, 19 nt, Artificial Sequence
  Description of Artificial Sequence: Synthetic oligonucleotide
  Sense strand starting at position 234 of SEQ ID NO: 1882651
ugcugugccagagaucuca

SEQ ID NO: 2137681 - RNA, 19 nt, Artificial Sequence
  Description of Artificial Sequence: Synthetic oligonucleotide
  Antisense strand to SEQ ID NO: 2137680
ugagaucucuggcacagca

SEQ ID NO: 2137682 - RNA, 19 nt, Artificial Sequence
  Description of Artificial Sequence: Synthetic oligonucleotide
  Sense strand starting at position 366 of SEQ ID NO: 1882651
cuucuaugagcuggacuuu

SEQ ID NO: 2137683 - RNA, 19 nt, Artificial Sequence
  Description of Artificial Sequence: Synthetic oligonucleotide
  Antisense strand to SEQ ID NO: 2137682
aaaguccagcucauagaag

SEQ ID NO: 2137684 - RNA, 19 nt, Artificial Sequence
  Description of Artificial Sequence: Synthetic oligonucleotide
  Sense strand starting at position 524 of SEQ ID NO: 1882651
acuccuauuugggauaaag

SEQ ID NO: 2137685 - RNA, 19 nt, Artificial Sequence
  Description of Artificial Sequence: Synthetic oligonucleotide
  Antisense strand to SEQ ID NO: 2137684
cuuuaucccaaauaggagu

SEQ ID NO: 2137686 - RNA, 19 nt, Artificial Sequence
  Description of Artificial Sequence: Synthetic oligonucleotide
  Sense strand starting at position 627 of SEQ ID NO: 1882651
cuguucuacccgggaugau

SEQ ID NO: 2137687 - RNA, 19 nt, Artificial Sequence
  Description of Artificial Sequence: Synthetic oligonucleotide
  Antisense strand to SEQ ID NO: 2137686
aucaucccggguagaacag

SEQ ID NO: 2137688 - RNA, 19 nt, Artificial Sequence
  Description of Artificial Sequence: Synthetic oligonucleotide
  Sense strand starting at position 628 of SEQ ID NO: 1882651
uguucuacccgggaugaug

SEQ ID NO: 2137689 - RNA, 19 nt, Artificial Sequence
  Description of Artificial Sequence: Synthetic oligonucleotide
  Antisense strand to SEQ ID NO: 2137688
caucaucccggguagaaca

SEQ ID NO: 2137690 - RNA, 19 nt, Artificial Sequence
  Description of Artificial Sequence: Synthetic oligonucleotide
  Sense strand starting at position 829 of SEQ ID NO: 1882651
gagacagagucgcucuuau

SEQ ID NO: 2137691 - RNA, 19 nt, Artificial Sequence
  Description of Artificial Sequence: Synthetic oligonucleotide
  Antisense strand to SEQ ID NO: 2137690
auaagagcgacucugucuc

SEQ ID NO: 2137692 - RNA, 19 nt, Artificial Sequence
  Description of Artificial Sequence: Synthetic oligonucleotide
  Sense strand starting at position 1176 of SEQ ID NO: 1882651
ggaaguuuccaauaacguu

SEQ ID NO: 2137693 - RNA, 19 nt, Artificial Sequence
  Description of Artificial Sequence: Synthetic oligonucleotide
  Antisense strand to SEQ ID NO: 2137692
aacguuauuggaaacuucc

SEQ ID NO: 2137694 - RNA, 19 nt, Artificial Sequence
  Description of Artificial Sequence: Synthetic oligonucleotide
  Sense strand starting at position 1183 of SEQ ID NO: 1882651
uccaauaacguuuguugaa

SEQ ID NO: 2137695 - RNA, 19 nt, Artificial Sequence
  Description of Artificial Sequence: Synthetic oligonucleotide
  Antisense strand to SEQ ID NO: 2137694
uucaacaaacguuauugga

SEQ ID NO: 2137696 - RNA, 19 nt, Artificial Sequence
  Description of Artificial Sequence: Synthetic oligonucleotide
  Sense strand starting at position 1184 of SEQ ID NO: 1882651
ccaauaacguuuguugaaa

SEQ ID NO: 2137697 - RNA, 19 nt, Artificial Sequence
  Description of Artificial Sequence: Synthetic oligonucleotide
  Antisense strand to SEQ ID NO: 2137696
uuucaacaaacguuauugg

SEQ ID NO: 2137698 - RNA, 19 nt, Artificial Sequence
  Description of Artificial Sequence: Synthetic oligonucleotide
  Sense strand starting at position 1185 of SEQ ID NO: 1882651
caauaacguuuguugaaac

SEQ ID NO: 2137699 - RNA, 19 nt, Artificial Sequence
  Description of Artificial Sequence: Synthetic oligonucleotide
  Antisense strand to SEQ ID NO: 2137698
guuucaacaaacguuauug

SEQ ID NO: 2137700 - RNA, 19 nt, Artificial Sequence
  Description of Artificial Sequence: Synthetic oligonucleotide
  Sense strand starting at position 1421 of SEQ ID NO: 1882651
cugucacuccgagacugua

SEQ ID NO: 2137701 - RNA, 19 nt, Artificial Sequence
  Description of Artificial Sequence: Synthetic oligonucleotide
  Antisense strand to SEQ ID NO: 2137700
uacagucucggagugacag

SEQ ID NO: 2137702 - RNA, 19 nt, Artificial Sequence
  Description of Artificial Sequence: Synthetic oligonucleotide
  Sense strand starting at position 2097 of SEQ ID NO: 1882651
gcuugagagccgggacaaa

SEQ ID NO: 2137703 - RNA, 19 nt, Artificial Sequence
  Description of Artificial Sequence: Synthetic oligonucleotide
  Antisense strand to SEQ ID NO: 2137702
uuugucccggcucucaagc

SEQ ID NO: 2137704 - RNA, 19 nt, Artificial Sequence
  Description of Artificial Sequence: Synthetic oligonucleotide
  Sense strand starting at position 2226 of SEQ ID NO: 1882651
gggaauauuauaugggcca

SEQ ID NO: 2137705 - RNA, 19 nt, Artificial Sequence
  Description of Artificial Sequence: Synthetic oligonucleotide
  Antisense strand to SEQ ID NO: 2137704
uggcccauauaauauuccc

SEQ ID NO: 2137706 - RNA, 19 nt, Artificial Sequence
  Description of Artificial Sequence: Synthetic oligonucleotide
  Sense strand starting at position 2244 of SEQ ID NO: 1882651
aggguuguucagcagaaau

SEQ ID NO: 2137707 - RNA, 19 nt, Artificial Sequence
  Description of Artificial Sequence: Synthetic oligonucleotide
  Antisense strand to SEQ ID NO: 2137706
auuucugcugaacaacccu

SEQ ID NO: 2137708 - RNA, 19 nt, Artificial Sequence
  Description of Artificial Sequence: Synthetic oligonucleotide
  Sense strand starting at position 2263 of SEQ ID NO: 1882651
gggagaguaugguuuauua

SEQ ID NO: 2137709 - RNA, 19 nt, Artificial Sequence
  Description of Artificial Sequence: Synthetic oligonucleotide
  Antisense strand to SEQ ID NO: 2137708
uaauaaaccauacucuccc

SEQ ID NO: 2137710 - RNA, 19 nt, Artificial Sequence
  Description of Artificial Sequence: Synthetic oligonucleotide
  Sense strand starting at position 2265 of SEQ ID NO: 1882651
gagaguaugguuuauuauu

SEQ ID NO: 2137711 - RNA, 19 nt, Artificial Sequence
  Description of Artificial Sequence: Synthetic oligonucleotide
  Antisense strand to SEQ ID NO: 2137710
aauaauaaaccauacucuc

SEQ ID NO: 2137712 - RNA, 19 nt, Artificial Sequence
  Description of Artificial Sequence: Synthetic oligonucleotide
  Sense strand starting at position 2366 of SEQ ID NO: 1882651
gcuauagagcgacauccuu

SEQ ID NO: 2137713 - RNA, 19 nt, Artificial Sequence
  Description of Artificial Sequence: Synthetic oligonucleotide
  Antisense strand to SEQ ID NO: 2137712
aaggaugucgcucuauagc

SEQ ID NO: 2137714 - RNA, 19 nt, Artificial Sequence
  Description of Artificial Sequence: Synthetic oligonucleotide
  Sense strand starting at position 2375 of SEQ ID NO: 1882651
cgacauccuuaauugcaaa

SEQ ID NO: 2137715 - RNA, 19 nt, Artificial Sequence
  Description of Artificial Sequence: Synthetic oligonucleotide
  Antisense strand to SEQ ID NO: 2137714
uuugcaauuaaggaugucg

SEQ ID NO: 2137716 - RNA, 19 nt, Artificial Sequence
  Description of Artificial Sequence: Synthetic oligonucleotide
  Sense strand starting at position 2466 of SEQ ID NO: 1882651
guaggucuuguggagaaug

SEQ ID NO: 2137717 - RNA, 19 nt, Artificial Sequence
  Description of Artificial Sequence: Synthetic oligonucleotide
  Antisense strand to SEQ ID NO: 2137716
cauucuccacaagaccuac

SEQ ID NO: 2137718 - RNA, 19 nt, Artificial Sequence
  Description of Artificial Sequence: Synthetic oligonucleotide
  Sense strand starting at position 2514 of SEQ ID NO: 1882651
cauggaaaccauugugacu

SEQ ID NO: 2137719 - RNA, 19 nt, Artificial Sequence
  Description of Artificial Sequence: Synthetic oligonucleotide
  Antisense strand to SEQ ID NO: 2137718
agucacaaugguuuccaug

SEQ ID NO: 2137720 - RNA, 19 nt, Artificial Sequence
  Description of Artificial Sequence: Synthetic oligonucleotide
  Sense strand starting at position 2611 of SEQ ID NO: 1882651
caguuugacuuggcuccua

SEQ ID NO: 2137721 - RNA, 19 nt, Artificial Sequence
  Description of Artificial Sequence: Synthetic oligonucleotide
  Antisense strand to SEQ ID NO: 2137720
uaggagccaagucaaacug

SEQ ID NO: 2137722 - RNA, 19 nt, Artificial Sequence
  Description of Artificial Sequence: Synthetic oligonucleotide
  Sense strand starting at position 2685 of SEQ ID NO: 1882651
acaguaacccuuuguccuu

SEQ ID NO: 2137723 - RNA, 19 nt, Artificial Sequence
  Description of Artificial Sequence: Synthetic oligonucleotide
  Antisense strand to SEQ ID NO: 2137722
aaggacaaaggguuacugu

SEQ ID NO: 2137724 - RNA, 19 nt, Artificial Sequence
  Description of Artificial Sequence: Synthetic oligonucleotide
  Sense strand starting at position 2800 of SEQ ID NO: 1882651
acuucagggucugugagau

SEQ ID NO: 2137725 - RNA, 19 nt, Artificial Sequence
  Description of Artificial Sequence: Synthetic oligonucleotide
  Antisense strand to SEQ ID NO: 2137724
aucucacagacccugaagu

SEQ ID NO: 2137726 - RNA, 19 nt, Artificial Sequence
  Description of Artificial Sequence: Synthetic oligonucleotide
  Sense strand starting at position 2884 of SEQ ID NO: 1882651
gggcuacaccuuggaucau

SEQ ID NO: 2137727 - RNA, 19 nt, Artificial Sequence
  Description of Artificial Sequence: Synthetic oligonucleotide
  Antisense strand to SEQ ID NO: 2137726
augauccaagguguagccc

SEQ ID NO: 2137728 - RNA, 19 nt, Artificial Sequence
  Description of Artificial Sequence: Synthetic oligonucleotide
  Sense strand starting at position 3192 of SEQ ID NO: 1882651
gcaccuuguggguaaccau

SEQ ID NO: 2137729 - RNA, 19 nt, Artificial Sequence
  Description of Artificial Sequence: Synthetic oligonucleotide
  Antisense strand to SEQ ID NO: 2137728
augguuacccacaaggugc

SEQ ID NO: 2137730 - RNA, 19 nt, Artificial Sequence
  Description of Artificial Sequence: Synthetic oligonucleotide
  Sense strand starting at position 3195 of SEQ ID NO: 1882651
ccuuguggguaaccauaga

SEQ ID NO: 2137731 - RNA, 19 nt, Artificial Sequence
  Description of Artificial Sequence: Synthetic oligonucleotide
  Antisense strand to SEQ ID NO: 2137730
ucuaugguuacccacaagg

SEQ ID NO: 2137732 - RNA, 19 nt, Artificial Sequence
  Description of Artificial Sequence: Synthetic oligonucleotide
  Sense strand starting at position 3300 of SEQ ID NO: 1882651
uuuaaagacguguagguaa

SEQ ID NO: 2137733 - RNA, 19 nt, Artificial Sequence
  Description of Artificial Sequence: Synthetic oligonucleotide
  Antisense strand to SEQ ID NO: 2137732
uuaccuacacgucuuuaaa

SEQ ID NO: 2137734 - RNA, 19 nt, Artificial Sequence
  Description of Artificial Sequence: Synthetic oligonucleotide
  Sense strand starting at position 3368 of SEQ ID NO: 1882651
caucaaagauggcuauagu

SEQ ID NO: 2137735 - RNA, 19 nt, Artificial Sequence
  Description of Artificial Sequence: Synthetic oligonucleotide
  Antisense strand to SEQ ID NO: 2137734
acuauagccaucuuugaug

SEQ ID NO: 2137736 - RNA, 19 nt, Artificial Sequence
  Description of Artificial Sequence: Synthetic oligonucleotide
  Sense strand starting at position 3371 of SEQ ID NO: 1882651
caaagauggcuauaguuuc

SEQ ID NO: 2137737 - RNA, 19 nt, Artificial Sequence
  Description of Artificial Sequence: Synthetic oligonucleotide
  Antisense strand to SEQ ID NO: 2137736
gaaacuauagccaucuuug

SEQ ID NO: 2137738 - RNA, 19 nt, Artificial Sequence
  Description of Artificial Sequence: Synthetic oligonucleotide
  Sense strand starting at position 3377 of SEQ ID NO: 1882651
uggcuauaguuucucuaac

SEQ ID NO: 2137739 - RNA, 19 nt, Artificial Sequence
  Description of Artificial Sequence: Synthetic oligonucleotide
  Antisense strand to SEQ ID NO: 2137738
guuagagaaacuauagcca

SEQ ID NO: 2137740 - RNA, 19 nt, Artificial Sequence
  Description of Artificial Sequence: Synthetic oligonucleotide
  Sense strand starting at position 3378 of SEQ ID NO: 1882651
ggcuauaguuucucuaacu

SEQ ID NO: 2137741 - RNA, 19 nt, Artificial Sequence
  Description of Artificial Sequence: Synthetic oligonucleotide
  Antisense strand to SEQ ID NO: 2137740
aguuagagaaacuauagcc

SEQ ID NO: 2137742 - RNA, 19 nt, Artificial Sequence
  Description of Artificial Sequence: Synthetic oligonucleotide
  Sense strand starting at position 3404 of SEQ ID NO: 1882651
cugaguagaugggcgauaa

SEQ ID NO: 2137743 - RNA, 19 nt, Artificial Sequence
  Description of Artificial Sequence: Synthetic oligonucleotide
  Antisense strand to SEQ ID NO: 2137742
uuaucgcccaucuacucag

SEQ ID NO: 2137744 - RNA, 19 nt, Artificial Sequence
  Description of Artificial Sequence: Synthetic oligonucleotide
  Sense strand starting at position 3405 of SEQ ID NO: 1882651
ugaguagaugggcgauaau

SEQ ID NO: 2137745 - RNA, 19 nt, Artificial Sequence
  Description of Artificial Sequence: Synthetic oligonucleotide
  Antisense strand to SEQ ID NO: 2137744
auuaucgcccaucuacuca

SEQ ID NO: 2137746 - RNA, 19 nt, Artificial Sequence
  Description of Artificial Sequence: Synthetic oligonucleotide
  Sense strand starting at position 3416 of SEQ ID NO: 1882651
gcgauaaugcauuaaucaa

SEQ ID NO: 2137747 - RNA, 19 nt, Artificial Sequence
  Description of Artificial Sequence: Synthetic oligonucleotide
  Antisense strand to SEQ ID NO: 2137746
uugauuaaugcauuaucgc

SEQ ID NO: 2137748 - RNA, 19 nt, Artificial Sequence
  Description of Artificial Sequence: Synthetic oligonucleotide
  Sense strand starting at position 3559 of SEQ ID NO: 1882651
gagaacaucugguuuacuu

SEQ ID NO: 2137749 - RNA, 19 nt, Artificial Sequence
  Description of Artificial Sequence: Synthetic oligonucleotide
  Antisense strand to SEQ ID NO: 2137748
aaguaaaccagauguucuc

SEQ ID NO: 2137750 - RNA, 19 nt, Artificial Sequence
  Description of Artificial Sequence: Synthetic oligonucleotide
  Sense strand starting at position 3902 of SEQ ID NO: 1882651
uggauccugcuaugccaaa

SEQ ID NO: 2137751 - RNA, 19 nt, Artificial Sequence
  Description of Artificial Sequence: Synthetic oligonucleotide
  Antisense strand to SEQ ID NO: 2137750
uuuggcauagcaggaucca

SEQ ID NO: 2137752 - RNA, 19 nt, Artificial Sequence
  Description of Artificial Sequence: Synthetic oligonucleotide
  Sense strand starting at position 3939 of SEQ ID NO: 1882651
ccaagugcuuacuuugaaa

SEQ ID NO: 2137753 - RNA, 19 nt, Artificial Sequence
  Description of Artificial Sequence: Synthetic oligonucleotide
  Antisense strand to SEQ ID NO: 2137752
uuucaaaguaagcacuugg

SEQ ID NO: 2137754 - RNA, 19 nt, Artificial Sequence
  Description of Artificial Sequence: Synthetic oligonucleotide
  Sense strand starting at position 134 of SEQ ID NO: 1882652
ggaccuaugcaaugcaauu

SEQ ID NO: 2137755 - RNA, 19 nt, Artificial Sequence
  Description of Artificial Sequence: Synthetic oligonucleotide
  Antisense strand to SEQ ID NO: 2137754
aauugcauugcauaggucc

SEQ ID NO: 2137756 - RNA, 19 nt, Artificial Sequence
  Description of Artificial Sequence: Synthetic oligonucleotide
  Sense strand starting at position 171 of SEQ ID NO: 1882652
uauguagggcuguauaauu

SEQ ID NO: 2137757 - RNA, 19 nt, Artificial Sequence
  Description of Artificial Sequence: Synthetic oligonucleotide
  Antisense strand to SEQ ID NO: 2137756
aauuauacagcccuacaua

SEQ ID NO: 2137758 - RNA, 19 nt, Artificial Sequence
  Description of Artificial Sequence: Synthetic oligonucleotide
  Sense strand starting at position 365 of SEQ ID NO: 1882652
aggguuaucuaauuccaag

SEQ ID NO: 2137759 - RNA, 19 nt, Artificial Sequence
  Description of Artificial Sequence: Synthetic oligonucleotide
  Antisense strand to SEQ ID NO: 2137758
cuuggaauuagauaacccu

SEQ ID NO: 2137760 - RNA, 19 nt, Artificial Sequence
  Description of Artificial Sequence: Synthetic oligonucleotide
  Sense strand starting at position 379 of SEQ ID NO: 1882652
ccaagagucacuuggguua

SEQ ID NO: 2137761 - RNA, 19 nt, Artificial Sequence
  Description of Artificial Sequence: Synthetic oligonucleotide
  Antisense strand to SEQ ID NO: 2137760
uaacccaagugacucuugg

SEQ ID NO: 2137762 - RNA, 19 nt, Artificial Sequence
  Description of Artificial Sequence: Synthetic oligonucleotide
  Sense strand starting at position 390 of SEQ ID NO: 1882652
uuggguuacugacccuaaa

SEQ ID NO: 2137763 - RNA, 19 nt, Artificial Sequence
  Description of Artificial Sequence: Synthetic oligonucleotide
  Antisense strand to SEQ ID NO: 2137762
uuuagggucaguaacccaa

SEQ ID NO: 2137764 - RNA, 19 nt, Artificial Sequence
  Description of Artificial Sequence: Synthetic oligonucleotide
  Sense strand starting at position 528 of SEQ ID NO: 1882652
gggugaagccucuaacucu

SEQ ID NO: 2137765 - RNA, 19 nt, Artificial Sequence
  Description of Artificial Sequence: Synthetic oligonucleotide
  Antisense strand to SEQ ID NO: 2137764
agaguuagaggcuucaccc

SEQ ID NO: 2137766 - RNA, 19 nt, Artificial Sequence
  Description of Artificial Sequence: Synthetic oligonucleotide
  Sense strand starting at position 706 of SEQ ID NO: 1882652
gucuuuccaguuuauaaau

SEQ ID NO: 2137767 - RNA, 19 nt, Artificial Sequence
  Description of Artificial Sequence: Synthetic oligonucleotide
  Antisense strand to SEQ ID NO: 2137766
auuuauaaacuggaaagac

SEQ ID NO: 2137768 - RNA, 19 nt, Artificial Sequence
  Description of Artificial Sequence: Synthetic oligonucleotide
  Sense strand starting at position 791 of SEQ ID NO: 1882652
ggauaaaggcugugaccaa

SEQ ID NO: 2137769 - RNA, 19 nt, Artificial Sequence
  Description of Artificial Sequence: Synthetic oligonucleotide
  Antisense strand to SEQ ID NO: 2137768
uuggucacagccuuuaucc

SEQ ID NO: 2137770 - RNA, 19 nt, Artificial Sequence
  Description of Artificial Sequence: Synthetic oligonucleotide
  Sense strand starting at position 890 of SEQ ID NO: 1882652
ggugucuacgcauaaagga

SEQ ID NO: 2137771 - RNA, 19 nt, Artificial Sequence
  Description of Artificial Sequence: Synthetic oligonucleotide
  Antisense strand to SEQ ID NO: 2137770
uccuuuaugcguagacacc

SEQ ID NO: 2137772 - RNA, 19 nt, Artificial Sequence
  Description of Artificial Sequence: Synthetic oligonucleotide
  Sense strand starting at position 979 of SEQ ID NO: 1882652
cggagacagcaauauucuu

SEQ ID NO: 2137773 - RNA, 19 nt, Artificial Sequence
  Description of Artificial Sequence: Synthetic oligonucleotide
  Antisense strand to SEQ ID NO: 2137772
aagaauauugcugucuccg

SEQ ID NO: 2137774 - RNA, 19 nt, Artificial Sequence
  Description of Artificial Sequence: Synthetic oligonucleotide
  Sense strand starting at position 992 of SEQ ID NO: 1882652
auucuuuacugaguggaaa

SEQ ID NO: 2137775 - RNA, 19 nt, Artificial Sequence
  Description of Artificial Sequence: Synthetic oligonucleotide
  Antisense strand to SEQ ID NO: 2137774
uuuccacucaguaaagaau

SEQ ID NO: 2137776 - RNA, 19 nt, Artificial Sequence
  Description of Artificial Sequence: Synthetic oligonucleotide
  Sense strand starting at position 1029 of SEQ ID NO: 1882652
gcagaacaucucugacuga

SEQ ID NO: 2137777 - RNA, 19 nt, Artificial Sequence
  Description of Artificial Sequence: Synthetic oligonucleotide
  Antisense strand to SEQ ID NO: 2137776
ucagucagagauguucugc

SEQ ID NO: 2137778 - RNA, 19 nt, Artificial Sequence
  Description of Artificial Sequence: Synthetic oligonucleotide
  Sense strand starting at position 2116 of SEQ ID NO: 1882652
ccugaugacuguuuaaucu

SEQ ID NO: 2137779 - RNA, 19 nt, Artificial Sequence
  Description of Artificial Sequence: Synthetic oligonucleotide
  Antisense strand to SEQ ID NO: 2137778
agauuaaacagucaucagg

SEQ ID NO: 2137780 - RNA, 19 nt, Artificial Sequence
  Description of Artificial Sequence: Synthetic oligonucleotide
  Sense strand starting at position 2221 of SEQ ID NO: 1882652
ggaacagucugagcaccaa

SEQ ID NO: 2137781 - RNA, 19 nt, Artificial Sequence
  Description of Artificial Sequence: Synthetic oligonucleotide
  Antisense strand to SEQ ID NO: 2137780
uuggugcucagacuguucc

SEQ ID NO: 2137782 - RNA, 19 nt, Artificial Sequence
  Description of Artificial Sequence: Synthetic oligonucleotide
  Sense strand starting at position 2307 of SEQ ID NO: 1882652
gaugucuugccucaggaca

SEQ ID NO: 2137783 - RNA, 19 nt, Artificial Sequence
  Description of Artificial Sequence: Synthetic oligonucleotide
  Antisense strand to SEQ ID NO: 2137782
uguccugaggcaagacauc

SEQ ID NO: 2137784 - RNA, 19 nt, Artificial Sequence
  Description of Artificial Sequence: Synthetic oligonucleotide
  Sense strand starting at position 2354 of SEQ ID NO: 1882652
cgaacaaacucugcucaaa

SEQ ID NO: 2137785 - RNA, 19 nt, Artificial Sequence
  Description of Artificial Sequence: Synthetic oligonucleotide
  Antisense strand to SEQ ID NO: 2137784
uuugagcagaguuuguucg

SEQ ID NO: 2137786 - RNA, 19 nt, Artificial Sequence
  Description of Artificial Sequence: Synthetic oligonucleotide
  Sense strand starting at position 2579 of SEQ ID NO: 1882652
uccugaugucuugggagua

SEQ ID NO: 2137787 - RNA, 19 nt, Artificial Sequence
  Description of Artificial Sequence: Synthetic oligonucleotide
  Antisense strand to SEQ ID NO: 2137786
uacucccaagacaucagga

SEQ ID NO: 2137788 - RNA, 19 nt, Artificial Sequence
  Description of Artificial Sequence: Synthetic oligonucleotide
  Sense strand starting at position 2593 of SEQ ID NO: 1882652
gaguacuccugacucauug

SEQ ID NO: 2137789 - RNA, 19 nt, Artificial Sequence
  Description of Artificial Sequence: Synthetic oligonucleotide
  Antisense strand to SEQ ID NO: 2137788
caaugagucaggaguacuc

SEQ ID NO: 2137790 - RNA, 19 nt, Artificial Sequence
  Description of Artificial Sequence: Synthetic oligonucleotide
  Sense strand starting at position 2597 of SEQ ID NO: 1882652
acuccugacucauugguga

SEQ ID NO: 2137791 - RNA, 19 nt, Artificial Sequence
  Description of Artificial Sequence: Synthetic oligonucleotide
  Antisense strand to SEQ ID NO: 2137790
ucaccaaugagucaggagu

SEQ ID NO: 2137792 - RNA, 19 nt, Artificial Sequence
  Description of Artificial Sequence: Synthetic oligonucleotide
  Sense strand starting at position 2599 of SEQ ID NO: 1882652
uccugacucauuggugaag

SEQ ID NO: 2137793 - RNA, 19 nt, Artificial Sequence
  Description of Artificial Sequence: Synthetic oligonucleotide
  Antisense strand to SEQ ID NO: 2137792
cuucaccaaugagucagga

SEQ ID NO: 2137794 - RNA, 19 nt, Artificial Sequence
  Description of Artificial Sequence: Synthetic oligonucleotide
  Sense strand starting at position 2600 of SEQ ID NO: 1882652
ccugacucauuggugaaga

SEQ ID NO: 2137795 - RNA, 19 nt, Artificial Sequence
  Description of Artificial Sequence: Synthetic oligonucleotide
  Antisense strand to SEQ ID NO: 2137794
ucuucaccaaugagucagg

SEQ ID NO: 2137796 - RNA, 19 nt, Artificial Sequence
  Description of Artificial Sequence: Synthetic oligonucleotide
  Sense strand starting at position 2625 of SEQ ID NO: 1882652
cagcuaaugccagacagua

SEQ ID NO: 2137797 - RNA, 19 nt, Artificial Sequence
  Description of Artificial Sequence: Synthetic oligonucleotide
  Antisense strand to SEQ ID NO: 2137796
uacugucuggcauuagcug

SEQ ID NO: 2137798 - RNA, 19 nt, Artificial Sequence
  Description of Artificial Sequence: Synthetic oligonucleotide
  Sense strand starting at position 2676 of SEQ ID NO: 1882652
cuagauaacugggccuuua

SEQ ID NO: 2137799 - RNA, 19 nt, Artificial Sequence
  Description of Artificial Sequence: Synthetic oligonucleotide
  Antisense strand to SEQ ID NO: 2137798
uaaaggcccaguuaucuag

SEQ ID NO: 2137800 - RNA, 19 nt, Artificial Sequence
  Description of Artificial Sequence: Synthetic oligonucleotide
  Sense strand starting at position 2901 of SEQ ID NO: 1882652
uuaagcuauugagcacaau

SEQ ID NO: 2137801 - RNA, 19 nt, Artificial Sequence
  Description of Artificial Sequence: Synthetic oligonucleotide
  Antisense strand to SEQ ID NO: 2137800
auugugcucaauagcuuaa

SEQ ID NO: 2137802 - RNA, 19 nt, Artificial Sequence
  Description of Artificial Sequence: Synthetic oligonucleotide
  Sense strand starting at position 2904 of SEQ ID NO: 1882652
agcuauugagcacaauaau

SEQ ID NO: 2137803 - RNA, 19 nt, Artificial Sequence
  Description of Artificial Sequence: Synthetic oligonucleotide
  Antisense strand to SEQ ID NO: 2137802
auuauugugcucaauagcu

SEQ ID NO: 2137804 - RNA, 19 nt, Artificial Sequence
  Description of Artificial Sequence: Synthetic oligonucleotide
  Sense strand starting at position 2917 of SEQ ID NO: 1882652
aauaauuuacgcuguguca

SEQ ID NO: 2137805 - RNA, 19 nt, Artificial Sequence
  Description of Artificial Sequence: Synthetic oligonucleotide
  Antisense strand to SEQ ID NO: 2137804
ugacacagcguaaauuauu

SEQ ID NO: 2137806 - RNA, 19 nt, Artificial Sequence
  Description of Artificial Sequence: Synthetic oligonucleotide
  Sense strand starting at position 2919 of SEQ ID NO: 1882652
uaauuuacgcugugucaga

SEQ ID NO: 2137807 - RNA, 19 nt, Artificial Sequence
  Description of Artificial Sequence: Synthetic oligonucleotide
  Antisense strand to SEQ ID NO: 2137806
ucugacacagcguaaauua

SEQ ID NO: 2137808 - RNA, 19 nt, Artificial Sequence
  Description of Artificial Sequence: Synthetic oligonucleotide
  Sense strand starting at position 2932 of SEQ ID NO: 1882652
gucagaggacguuagaaug

SEQ ID NO: 2137809 - RNA, 19 nt, Artificial Sequence
  Description of Artificial Sequence: Synthetic oligonucleotide
  Antisense strand to SEQ ID NO: 2137808
cauucuaacguccucugac

SEQ ID NO: 2137810 - RNA, 19 nt, Artificial Sequence
  Description of Artificial Sequence: Synthetic oligonucleotide
  Sense strand starting at position 2988 of SEQ ID NO: 1882652
gggugugaggagcaagauu

SEQ ID NO: 2137811 - RNA, 19 nt, Artificial Sequence
  Description of Artificial Sequence: Synthetic oligonucleotide
  Antisense strand to SEQ ID NO: 2137810
aaucuugcuccucacaccc

SEQ ID NO: 2137812 - RNA, 19 nt, Artificial Sequence
  Description of Artificial Sequence: Synthetic oligonucleotide
  Sense strand starting at position 3069 of SEQ ID NO: 1882652
ggacaugcagccuaguuua

SEQ ID NO: 2137813 - RNA, 19 nt, Artificial Sequence
  Description of Artificial Sequence: Synthetic oligonucleotide
  Antisense strand to SEQ ID NO: 2137812
uaaacuaggcugcaugucc

SEQ ID NO: 2137814 - RNA, 19 nt, Artificial Sequence
  Description of Artificial Sequence: Synthetic oligonucleotide
  Sense strand starting at position 3191 of SEQ ID NO: 1882652
gccaucaguccugacaaau

SEQ ID NO: 2137815 - RNA, 19 nt, Artificial Sequence
  Description of Artificial Sequence: Synthetic oligonucleotide
  Antisense strand to SEQ ID NO: 2137814
auuugucaggacugauggc

SEQ ID NO: 2137816 - RNA, 19 nt, Artificial Sequence
  Description of Artificial Sequence: Synthetic oligonucleotide
  Sense strand starting at position 3444 of SEQ ID NO: 1882652
acaucucuucugugacaua

SEQ ID NO: 2137817 - RNA, 19 nt, Artificial Sequence
  Description of Artificial Sequence: Synthetic oligonucleotide
  Antisense strand to SEQ ID NO: 2137816
uaugucacagaagagaugu

SEQ ID NO: 2137818 - RNA, 19 nt, Artificial Sequence
  Description of Artificial Sequence: Synthetic oligonucleotide
  Sense strand starting at position 3486 of SEQ ID NO: 1882652
ugcucuguucuuuagaaua

SEQ ID NO: 2137819 - RNA, 19 nt, Artificial Sequence
  Description of Artificial Sequence: Synthetic oligonucleotide
  Antisense strand to SEQ ID NO: 2137818
uauucuaaagaacagagca

SEQ ID NO: 2137820 - RNA, 19 nt, Artificial Sequence
  Description of Artificial Sequence: Synthetic oligonucleotide
  Sense strand starting at position 3606 of SEQ ID NO: 1882652
ccaacuguguccucugaaa

SEQ ID NO: 2137821 - RNA, 19 nt, Artificial Sequence
  Description of Artificial Sequence: Synthetic oligonucleotide
  Antisense strand to SEQ ID NO: 2137820
uuucagaggacacaguugg

SEQ ID NO: 2137822 - RNA, 19 nt, Artificial Sequence
  Description of Artificial Sequence: Synthetic oligonucleotide
  Sense strand starting at position 3618 of SEQ ID NO: 1882652
ucugaaaucccauaguguu

SEQ ID NO: 2137823 - RNA, 19 nt, Artificial Sequence
  Description of Artificial Sequence: Synthetic oligonucleotide
  Antisense strand to SEQ ID NO: 2137822
aacacuaugggauuucaga

SEQ ID NO: 2137824 - RNA, 19 nt, Artificial Sequence
  Description of Artificial Sequence: Synthetic oligonucleotide
  Sense strand starting at position 3678 of SEQ ID NO: 1882652
guauuauagugacuauaac

SEQ ID NO: 2137825 - RNA, 19 nt, Artificial Sequence
  Description of Artificial Sequence: Synthetic oligonucleotide
  Antisense strand to SEQ ID NO: 2137824
guuauagucacuauaauac

SEQ ID NO: 2137826 - RNA, 19 nt, Artificial Sequence
  Description of Artificial Sequence: Synthetic oligonucleotide
  Sense strand starting at position 3716 of SEQ ID NO: 1882652
cugagaacucacugugaca

SEQ ID NO: 2137827 - RNA, 19 nt, Artificial Sequence
  Description of Artificial Sequence: Synthetic oligonucleotide
  Antisense strand to SEQ ID NO: 2137826
ugucacagugaguucucag

SEQ ID NO: 2137828 - RNA, 19 nt, Artificial Sequence
  Description of Artificial Sequence: Synthetic oligonucleotide
  Sense strand starting at position 3718 of SEQ ID NO: 1882652
gagaacucacugugacaug

SEQ ID NO: 2137829 - RNA, 19 nt, Artificial Sequence
  Description of Artificial Sequence: Synthetic oligonucleotide
  Antisense strand to SEQ ID NO: 2137828
caugucacagugaguucuc

SEQ ID NO: 2137830 - RNA, 19 nt, Artificial Sequence
  Description of Artificial Sequence: Synthetic oligonucleotide
  Sense strand starting at position 3785 of SEQ ID NO: 1882652
gaguccuugccacaguaga

SEQ ID NO: 2137831 - RNA, 19 nt, Artificial Sequence
  Description of Artificial Sequence: Synthetic oligonucleotide
  Antisense strand to SEQ ID NO: 2137830
ucuacuguggcaaggacuc

SEQ ID NO: 2137832 - RNA, 19 nt, Artificial Sequence
  Description of Artificial Sequence: Synthetic oligonucleotide
  Sense strand starting at position 3861 of SEQ ID NO: 1882652
ggaagaaggugugcaaaga

SEQ ID NO: 2137833 - RNA, 19 nt, Artificial Sequence
  Description of Artificial Sequence: Synthetic oligonucleotide
  Antisense strand to SEQ ID NO: 2137832
ucuuugcacaccuucuucc

SEQ ID NO: 2137834 - RNA, 19 nt, Artificial Sequence
  Description of Artificial Sequence: Synthetic oligonucleotide
  Sense strand starting at position 38 of SEQ ID NO: 1882653
uuguguaagucuuccauaa

SEQ ID NO: 2137835 - RNA, 19 nt, Artificial Sequence
  Description of Artificial Sequence: Synthetic oligonucleotide
  Antisense strand to SEQ ID NO: 2137834
uuauggaagacuuacacaa

SEQ ID NO: 2137836 - RNA, 19 nt, Artificial Sequence
  Description of Artificial Sequence: Synthetic oligonucleotide
  Sense strand starting at position 160 of SEQ ID NO: 1882653
cgagaacugucaucaggaa

SEQ ID NO: 2137837 - RNA, 19 nt, Artificial Sequence
  Description of Artificial Sequence: Synthetic oligonucleotide
  Antisense strand to SEQ ID NO: 2137836
uuccugaugacaguucucg

SEQ ID NO: 2137838 - RNA, 19 nt, Artificial Sequence
  Description of Artificial Sequence: Synthetic oligonucleotide
  Sense strand starting at position 182 of SEQ ID NO: 1882653
ccauaauggcacuguuacu

SEQ ID NO: 2137839 - RNA, 19 nt, Artificial Sequence
  Description of Artificial Sequence: Synthetic oligonucleotide
  Antisense strand to SEQ ID NO: 2137838
aguaacagugccauuaugg

SEQ ID NO: 2137840 - RNA, 19 nt, Artificial Sequence
  Description of Artificial Sequence: Synthetic oligonucleotide
  Sense strand starting at position 315 of SEQ ID NO: 1882653
cgcugucuccaagaaaccu

SEQ ID NO: 2137841 - RNA, 19 nt, Artificial Sequence
  Description of Artificial Sequence: Synthetic oligonucleotide
  Antisense strand to SEQ ID NO: 2137840
agguuucuuggagacagcg

SEQ ID NO: 2137842 - RNA, 19 nt, Artificial Sequence
  Description of Artificial Sequence: Synthetic oligonucleotide
  Sense strand starting at position 517 of SEQ ID NO: 1882653
acugaaggcucccuguuaa

SEQ ID NO: 2137843 - RNA, 19 nt, Artificial Sequence
  Description of Artificial Sequence: Synthetic oligonucleotide
  Antisense strand to SEQ ID NO: 2137842
uuaacagggagccuucagu

SEQ ID NO: 2137844 - RNA, 19 nt, Artificial Sequence
  Description of Artificial Sequence: Synthetic oligonucleotide
  Sense strand starting at position 1163 of SEQ ID NO: 1882653
auagguucuuacuugauca

SEQ ID NO: 2137845 - RNA, 19 nt, Artificial Sequence
  Description of Artificial Sequence: Synthetic oligonucleotide
  Antisense strand to SEQ ID NO: 2137844
ugaucaaguaagaaccuau

SEQ ID NO: 2137846 - RNA, 19 nt, Artificial Sequence
  Description of Artificial Sequence: Synthetic oligonucleotide
  Sense strand starting at position 1167 of SEQ ID NO: 1882653
guucuuacuugaucaucuu

SEQ ID NO: 2137847 - RNA, 19 nt, Artificial Sequence
  Description of Artificial Sequence: Synthetic oligonucleotide
  Antisense strand to SEQ ID NO: 2137846
aagaugaucaaguaagaac

SEQ ID NO: 2137848 - RNA, 19 nt, Artificial Sequence
  Description of Artificial Sequence: Synthetic oligonucleotide
  Sense strand starting at position 1223 of SEQ ID NO: 1882653
guugguagaucuuugauca

SEQ ID NO: 2137849 - RNA, 19 nt, Artificial Sequence
  Description of Artificial Sequence: Synthetic oligonucleotide
  Antisense strand to SEQ ID NO: 2137848
ugaucaaagaucuaccaac

SEQ ID NO: 2137850 - RNA, 19 nt, Artificial Sequence
  Description of Artificial Sequence: Synthetic oligonucleotide
  Sense strand starting at position 1224 of SEQ ID NO: 1882653
uugguagaucuuugaucac

SEQ ID NO: 2137851 - RNA, 19 nt, Artificial Sequence
  Description of Artificial Sequence: Synthetic oligonucleotide
  Antisense strand to SEQ ID NO: 2137850
gugaucaaagaucuaccaa

SEQ ID NO: 2137852 - RNA, 19 nt, Artificial Sequence
  Description of Artificial Sequence: Synthetic oligonucleotide
  Sense strand starting at position 1227 of SEQ ID NO: 1882653
guagaucuuugaucacuga

SEQ ID NO: 2137853 - RNA, 19 nt, Artificial Sequence
  Description of Artificial Sequence: Synthetic oligonucleotide
  Antisense strand to SEQ ID NO: 2137852
ucagugaucaaagaucuac

SEQ ID NO: 2137854 - RNA, 19 nt, Artificial Sequence
  Description of Artificial Sequence: Synthetic oligonucleotide
  Sense strand starting at position 1231 of SEQ ID NO: 1882653
aucuuugaucacugauaag

SEQ ID NO: 2137855 - RNA, 19 nt, Artificial Sequence
  Description of Artificial Sequence: Synthetic oligonucleotide
  Antisense strand to SEQ ID NO: 2137854
cuuaucagugaucaaagau

SEQ ID NO: 2137856 - RNA, 19 nt, Artificial Sequence
  Description of Artificial Sequence: Synthetic oligonucleotide
  Sense strand starting at position 1290 of SEQ ID NO: 1882653
cugccuucugcagaaagau

SEQ ID NO: 2137857 - RNA, 19 nt, Artificial Sequence
  Description of Artificial Sequence: Synthetic oligonucleotide
  Antisense strand to SEQ ID NO: 2137856
aucuuucugcagaaggcag

SEQ ID NO: 2137858 - RNA, 19 nt, Artificial Sequence
  Description of Artificial Sequence: Synthetic oligonucleotide
  Sense strand starting at position 1341 of SEQ ID NO: 1882653
gaggcagaaaucuggcagu

SEQ ID NO: 2137859 - RNA, 19 nt, Artificial Sequence
  Description of Artificial Sequence: Synthetic oligonucleotide
  Antisense strand to SEQ ID NO: 2137858
acugccagauuucugccuc

SEQ ID NO: 2137860 - RNA, 19 nt, Artificial Sequence
  Description of Artificial Sequence: Synthetic oligonucleotide
  Sense strand starting at position 1440 of SEQ ID NO: 1882653
uuauguaagcacgagcuau

SEQ ID NO: 2137861 - RNA, 19 nt, Artificial Sequence
  Description of Artificial Sequence: Synthetic oligonucleotide
  Antisense strand to SEQ ID NO: 2137860
auagcucgugcuuacauaa

SEQ ID NO: 2137862 - RNA, 19 nt, Artificial Sequence
  Description of Artificial Sequence: Synthetic oligonucleotide
  Sense strand starting at position 1506 of SEQ ID NO: 1882653
guugguaaagguuguauga

SEQ ID NO: 2137863 - RNA, 19 nt, Artificial Sequence
  Description of Artificial Sequence: Synthetic oligonucleotide
  Antisense strand to SEQ ID NO: 2137862
ucauacaaccuuuaccaac

SEQ ID NO: 2137864 - RNA, 19 nt, Artificial Sequence
  Description of Artificial Sequence: Synthetic oligonucleotide
  Sense strand starting at position 1520 of SEQ ID NO: 1882653
uaugaaagugcaugcauau

SEQ ID NO: 2137865 - RNA, 19 nt, Artificial Sequence
  Description of Artificial Sequence: Synthetic oligonucleotide
  Antisense strand to SEQ ID NO: 2137864
auaugcaugcacuuucaua

SEQ ID NO: 2137866 - RNA, 19 nt, Artificial Sequence
  Description of Artificial Sequence: Synthetic oligonucleotide
  Sense strand starting at position 1531 of SEQ ID NO: 1882653
augcauaucucucuaagug

SEQ ID NO: 2137867 - RNA, 19 nt, Artificial Sequence
  Description of Artificial Sequence: Synthetic oligonucleotide
  Antisense strand to SEQ ID NO: 2137866
cacuuagagagauaugcau

SEQ ID NO: 2137868 - RNA, 19 nt, Artificial Sequence
  Description of Artificial Sequence: Synthetic oligonucleotide
  Sense strand starting at position 2165 of SEQ ID NO: 1882653
gggaauucccucugcugag

SEQ ID NO: 2137869 - RNA, 19 nt, Artificial Sequence
  Description of Artificial Sequence: Synthetic oligonucleotide
  Antisense strand to SEQ ID NO: 2137868
cucagcagagggaauuccc

SEQ ID NO: 2137870 - RNA, 19 nt, Artificial Sequence
  Description of Artificial Sequence: Synthetic oligonucleotide
  Sense strand starting at position 2201 of SEQ ID NO: 1882653
cuucuuagucaccaguagu

SEQ ID NO: 2137871 - RNA, 19 nt, Artificial Sequence
  Description of Artificial Sequence: Synthetic oligonucleotide
  Antisense strand to SEQ ID NO: 2137870
acuacuggugacuaagaag

SEQ ID NO: 2137872 - RNA, 19 nt, Artificial Sequence
  Description of Artificial Sequence: Synthetic oligonucleotide
  Sense strand starting at position 2235 of SEQ ID NO: 1882653
ugucacuggucccucuaua

SEQ ID NO: 2137873 - RNA, 19 nt, Artificial Sequence
  Description of Artificial Sequence: Synthetic oligonucleotide
  Antisense strand to SEQ ID NO: 2137872
uauagagggaccagugaca

SEQ ID NO: 2137874 - RNA, 19 nt, Artificial Sequence
  Description of Artificial Sequence: Synthetic oligonucleotide
  Sense strand starting at position 2251 of SEQ ID NO: 1882653
auaaauaucgccuggacca

SEQ ID NO: 2137875 - RNA, 19 nt, Artificial Sequence
  Description of Artificial Sequence: Synthetic oligonucleotide
  Antisense strand to SEQ ID NO: 2137874
ugguccaggcgauauuuau

SEQ ID NO: 2137876 - RNA, 19 nt, Artificial Sequence
  Description of Artificial Sequence: Synthetic oligonucleotide
  Sense strand starting at position 2293 of SEQ ID NO: 1882653
ucucaaaccuauguguaga

SEQ ID NO: 2137877 - RNA, 19 nt, Artificial Sequence
  Description of Artificial Sequence: Synthetic oligonucleotide
  Antisense strand to SEQ ID NO: 2137876
ucuacacauagguuugaga

SEQ ID NO: 2137878 - RNA, 19 nt, Artificial Sequence
  Description of Artificial Sequence: Synthetic oligonucleotide
  Sense strand starting at position 2376 of SEQ ID NO: 1882653
gugggugcuggauaaagau

SEQ ID NO: 2137879 - RNA, 19 nt, Artificial Sequence
  Description of Artificial Sequence: Synthetic oligonucleotide
  Antisense strand to SEQ ID NO: 2137878
aucuuuauccagcacccac

SEQ ID NO: 2137880 - RNA, 19 nt, Artificial Sequence
  Description of Artificial Sequence: Synthetic oligonucleotide
  Sense strand starting at position 2392 of SEQ ID NO: 1882653
gaugaagcgacucgaaguu

SEQ ID NO: 2137881 - RNA, 19 nt, Artificial Sequence
  Description of Artificial Sequence: Synthetic oligonucleotide
  Antisense strand to SEQ ID NO: 2137880
aacuucgagucgcuucauc

SEQ ID NO: 2137882 - RNA, 19 nt, Artificial Sequence
  Description of Artificial Sequence: Synthetic oligonucleotide
  Sense strand starting at position 2428 of SEQ ID NO: 1882653
uuaacucaccugggaaagu

SEQ ID NO: 2137883 - RNA, 19 nt, Artificial Sequence
  Description of Artificial Sequence: Synthetic oligonucleotide
  Antisense strand to SEQ ID NO: 2137882
acuuucccaggugaguuaa

SEQ ID NO: 2137884 - RNA, 19 nt, Artificial Sequence
  Description of Artificial Sequence: Synthetic oligonucleotide
  Sense strand starting at position 3022 of SEQ ID NO: 1882653
ugacaugucuucccuauga

SEQ ID NO: 2137885 - RNA, 19 nt, Artificial Sequence
  Description of Artificial Sequence: Synthetic oligonucleotide
  Antisense strand to SEQ ID NO: 2137884
ucauagggaagacauguca

SEQ ID NO: 2137886 - RNA, 19 nt, Artificial Sequence
  Description of Artificial Sequence: Synthetic oligonucleotide
  Sense strand starting at position 3081 of SEQ ID NO: 1882653
uaaaguuuaggaugcauua

SEQ ID NO: 2137887 - RNA, 19 nt, Artificial Sequence
  Description of Artificial Sequence: Synthetic oligonucleotide
  Antisense strand to SEQ ID NO: 2137886
uaaugcauccuaaacuuua

SEQ ID NO: 2137888 - RNA, 19 nt, Artificial Sequence
  Description of Artificial Sequence: Synthetic oligonucleotide
  Sense strand starting at position 3107 of SEQ ID NO: 1882653
gggucugucccaggacagu

SEQ ID NO: 2137889 - RNA, 19 nt, Artificial Sequence
  Description of Artificial Sequence: Synthetic oligonucleotide
  Antisense strand to SEQ ID NO: 2137888
acuguccugggacagaccc

SEQ ID NO: 2137890 - RNA, 19 nt, Artificial Sequence
  Description of Artificial Sequence: Synthetic oligonucleotide
  Sense strand starting at position 3162 of SEQ ID NO: 1882653
ucuggucuacaaugugauu

SEQ ID NO: 2137891 - RNA, 19 nt, Artificial Sequence
  Description of Artificial Sequence: Synthetic oligonucleotide
  Antisense strand to SEQ ID NO: 2137890
aaucacauuguagaccaga

SEQ ID NO: 2137892 - RNA, 19 nt, Artificial Sequence
  Description of Artificial Sequence: Synthetic oligonucleotide
  Sense strand starting at position 3249 of SEQ ID NO: 1882653
gggccucaacaucauuaau

SEQ ID NO: 2137893 - RNA, 19 nt, Artificial Sequence
  Description of Artificial Sequence: Synthetic oligonucleotide
  Antisense strand to SEQ ID NO: 2137892
auuaaugauguugaggccc

SEQ ID NO: 2137894 - RNA, 19 nt, Artificial Sequence
  Description of Artificial Sequence: Synthetic oligonucleotide
  Sense strand starting at position 3291 of SEQ ID NO: 1882653
gcaauaucgccucauaccu

SEQ ID NO: 2137895 - RNA, 19 nt, Artificial Sequence
  Description of Artificial Sequence: Synthetic oligonucleotide
  Antisense strand to SEQ ID NO: 2137894
agguaugaggcgauauugc

SEQ ID NO: 2137896 - RNA, 19 nt, Artificial Sequence
  Description of Artificial Sequence: Synthetic oligonucleotide
  Sense strand starting at position 3345 of SEQ ID NO: 1882653
ccauuauuauggcuaugga

SEQ ID NO: 2137897 - RNA, 19 nt, Artificial Sequence
  Description of Artificial Sequence: Synthetic oligonucleotide
  Antisense strand to SEQ ID NO: 2137896
uccauagccauaauaaugg

SEQ ID NO: 2137898 - RNA, 19 nt, Artificial Sequence
  Description of Artificial Sequence: Synthetic oligonucleotide
  Sense strand starting at position 3346 of SEQ ID NO: 1882653
cauuauuauggcuauggau

SEQ ID NO: 2137899 - RNA, 19 nt, Artificial Sequence
  Description of Artificial Sequence: Synthetic oligonucleotide
  Antisense strand to SEQ ID NO: 2137898
auccauagccauaauaaug

SEQ ID NO: 2137900 - RNA, 19 nt, Artificial Sequence
  Description of Artificial Sequence: Synthetic oligonucleotide
  Sense strand starting at position 3348 of SEQ ID NO: 1882653
uuauuauggcuauggauau

SEQ ID NO: 2137901 - RNA, 19 nt, Artificial Sequence
  Description of Artificial Sequence: Synthetic oligonucleotide
  Antisense strand to SEQ ID NO: 2137900
auauccauagccauaauaa

SEQ ID NO: 2137902 - RNA, 19 nt, Artificial Sequence
  Description of Artificial Sequence: Synthetic oligonucleotide
  Sense strand starting at position 3379 of SEQ ID NO: 1882653
uuauaaucccagcaaugug

SEQ ID NO: 2137903 - RNA, 19 nt, Artificial Sequence
  Description of Artificial Sequence: Synthetic oligonucleotide
  Antisense strand to SEQ ID NO: 2137902
cacauugcugggauuauaa

SEQ ID NO: 2137904 - RNA, 19 nt, Artificial Sequence
  Description of Artificial Sequence: Synthetic oligonucleotide
  Sense strand starting at position 3388 of SEQ ID NO: 1882653
cagcaaugugggugaccaa

SEQ ID NO: 2137905 - RNA, 19 nt, Artificial Sequence
  Description of Artificial Sequence: Synthetic oligonucleotide
  Antisense strand to SEQ ID NO: 2137904
uuggucacccacauugcug

SEQ ID NO: 2137906 - RNA, 19 nt, Artificial Sequence
  Description of Artificial Sequence: Synthetic oligonucleotide
  Sense strand starting at position 3612 of SEQ ID NO: 1882653
uggucuacagagugagauu

SEQ ID NO: 2137907 - RNA, 19 nt, Artificial Sequence
  Description of Artificial Sequence: Synthetic oligonucleotide
  Antisense strand to SEQ ID NO: 2137906
aaucucacucuguagacca

SEQ ID NO: 2137908 - RNA, 19 nt, Artificial Sequence
  Description of Artificial Sequence: Synthetic oligonucleotide
  Sense strand starting at position 3657 of SEQ ID NO: 1882653
agaugagauaaauguuagu

SEQ ID NO: 2137909 - RNA, 19 nt, Artificial Sequence
  Description of Artificial Sequence: Synthetic oligonucleotide
  Antisense strand to SEQ ID NO: 2137908
acuaacauuuaucucaucu

SEQ ID NO: 2137910 - RNA, 19 nt, Artificial Sequence
  Description of Artificial Sequence: Synthetic oligonucleotide
  Sense strand starting at position 3720 of SEQ ID NO: 1882653
uguaaacugguauagucau

SEQ ID NO: 2137911 - RNA, 19 nt, Artificial Sequence
  Description of Artificial Sequence: Synthetic oligonucleotide
  Antisense strand to SEQ ID NO: 2137910
augacuauaccaguuuaca

SEQ ID NO: 2137912 - RNA, 19 nt, Artificial Sequence
  Description of Artificial Sequence: Synthetic oligonucleotide
  Sense strand starting at position 3726 of SEQ ID NO: 1882653
cugguauagucauuaugaa

SEQ ID NO: 2137913 - RNA, 19 nt, Artificial Sequence
  Description of Artificial Sequence: Synthetic oligonucleotide
  Antisense strand to SEQ ID NO: 2137912
uucauaaugacuauaccag

SEQ ID NO: 2137914 - RNA, 19 nt, Artificial Sequence
  Description of Artificial Sequence: Synthetic oligonucleotide
  Sense strand starting at position 120 of SEQ ID NO: 1882654
uguguaagcuuccugagga

SEQ ID NO: 2137915 - RNA, 19 nt, Artificial Sequence
  Description of Artificial Sequence: Synthetic oligonucleotide
  Antisense strand to SEQ ID NO: 2137914
uccucaggaagcuuacaca

SEQ ID NO: 2137916 - RNA, 19 nt, Artificial Sequence
  Description of Artificial Sequence: Synthetic oligonucleotide
  Sense strand starting at position 190 of SEQ ID NO: 1882654
ggucaaaugaagcauguua

SEQ ID NO: 2137917 - RNA, 19 nt, Artificial Sequence
  Description of Artificial Sequence: Synthetic oligonucleotide
  Antisense strand to SEQ ID NO: 2137916
uaacaugcuucauuugacc

SEQ ID NO: 2137918 - RNA, 19 nt, Artificial Sequence
  Description of Artificial Sequence: Synthetic oligonucleotide
  Sense strand starting at position 192 of SEQ ID NO: 1882654
ucaaaugaagcauguuauu

SEQ ID NO: 2137919 - RNA, 19 nt, Artificial Sequence
  Description of Artificial Sequence: Synthetic oligonucleotide
  Antisense strand to SEQ ID NO: 2137918
aauaacaugcuucauuuga

SEQ ID NO: 2137920 - RNA, 19 nt, Artificial Sequence
  Description of Artificial Sequence: Synthetic oligonucleotide
  Sense strand starting at position 314 of SEQ ID NO: 1882654
ggguggaaaguguguagau

SEQ ID NO: 2137921 - RNA, 19 nt, Artificial Sequence
  Description of Artificial Sequence: Synthetic oligonucleotide
  Antisense strand to SEQ ID NO: 2137920
aucuacacacuuuccaccc

SEQ ID NO: 2137922 - RNA, 19 nt, Artificial Sequence
  Description of Artificial Sequence: Synthetic oligonucleotide
  Sense strand starting at position 315 of SEQ ID NO: 1882654
gguggaaaguguguagaug

SEQ ID NO: 2137923 - RNA, 19 nt, Artificial Sequence
  Description of Artificial Sequence: Synthetic oligonucleotide
  Antisense strand to SEQ ID NO: 2137922
caucuacacacuuuccacc

SEQ ID NO: 2137924 - RNA, 19 nt, Artificial Sequence
  Description of Artificial Sequence: Synthetic oligonucleotide
  Sense strand starting at position 331 of SEQ ID NO: 1882654
auggaauagcauuauguac

SEQ ID NO: 2137925 - RNA, 19 nt, Artificial Sequence
  Description of Artificial Sequence: Synthetic oligonucleotide
  Antisense strand to SEQ ID NO: 2137924
guacauaaugcuauuccau

SEQ ID NO: 2137926 - RNA, 19 nt, Artificial Sequence
  Description of Artificial Sequence: Synthetic oligonucleotide
  Sense strand starting at position 436 of SEQ ID NO: 1882654
agugaacucuggcucuguu

SEQ ID NO: 2137927 - RNA, 19 nt, Artificial Sequence
  Description of Artificial Sequence: Synthetic oligonucleotide
  Antisense strand to SEQ ID NO: 2137926
aacagagccagaguucacu

SEQ ID NO: 2137928 - RNA, 19 nt, Artificial Sequence
  Description of Artificial Sequence: Synthetic oligonucleotide
  Sense strand starting at position 486 of SEQ ID NO: 1882654
cuggacacucacugcuaua

SEQ ID NO: 2137929 - RNA, 19 nt, Artificial Sequence
  Description of Artificial Sequence: Synthetic oligonucleotide
  Antisense strand to SEQ ID NO: 2137928
uauagcagugaguguccag

SEQ ID NO: 2137930 - RNA, 19 nt, Artificial Sequence
  Description of Artificial Sequence: Synthetic oligonucleotide
  Sense strand starting at position 542 of SEQ ID NO: 1882654
cugauauccugacuggagu

SEQ ID NO: 2137931 - RNA, 19 nt, Artificial Sequence
  Description of Artificial Sequence: Synthetic oligonucleotide
  Antisense strand to SEQ ID NO: 2137930
acuccagucaggauaucag

SEQ ID NO: 2137932 - RNA, 19 nt, Artificial Sequence
  Description of Artificial Sequence: Synthetic oligonucleotide
  Sense strand starting at position 633 of SEQ ID NO: 1882654
gccgcugagcugguucaua

SEQ ID NO: 2137933 - RNA, 19 nt, Artificial Sequence
  Description of Artificial Sequence: Synthetic oligonucleotide
  Antisense strand to SEQ ID NO: 2137932
uaugaaccagcucagcggc

SEQ ID NO: 2137934 - RNA, 19 nt, Artificial Sequence
  Description of Artificial Sequence: Synthetic oligonucleotide
  Sense strand starting at position 843 of SEQ ID NO: 1882654
ccaagauccuuuccaucgu

SEQ ID NO: 2137935 - RNA, 19 nt, Artificial Sequence
  Description of Artificial Sequence: Synthetic oligonucleotide
  Antisense strand to SEQ ID NO: 2137934
acgauggaaaggaucuugg

SEQ ID NO: 2137936 - RNA, 19 nt, Artificial Sequence
  Description of Artificial Sequence: Synthetic oligonucleotide
  Sense strand starting at position 897 of SEQ ID NO: 1882654
gggugaagcccacauagua

SEQ ID NO: 2137937 - RNA, 19 nt, Artificial Sequence
  Description of Artificial Sequence: Synthetic oligonucleotide
  Antisense strand to SEQ ID NO: 2137936
uacuaugugggcuucaccc

SEQ ID NO: 2137938 - RNA, 19 nt, Artificial Sequence
  Description of Artificial Sequence: Synthetic oligonucleotide
  Sense strand starting at position 1098 of SEQ ID NO: 1882654
gcuucuucucuagguugua

SEQ ID NO: 2137939 - RNA, 19 nt, Artificial Sequence
  Description of Artificial Sequence: Synthetic oligonucleotide
  Antisense strand to SEQ ID NO: 2137938
uacaaccuagagaagaagc

SEQ ID NO: 2137940 - RNA, 19 nt, Artificial Sequence
  Description of Artificial Sequence: Synthetic oligonucleotide
  Sense strand starting at position 1179 of SEQ ID NO: 1882654
gcuuguuaucauggaggaa

SEQ ID NO: 2137941 - RNA, 19 nt, Artificial Sequence
  Description of Artificial Sequence: Synthetic oligonucleotide
  Antisense strand to SEQ ID NO: 2137940
uuccuccaugauaacaagc

SEQ ID NO: 2137942 - RNA, 19 nt, Artificial Sequence
  Description of Artificial Sequence: Synthetic oligonucleotide
  Sense strand starting at position 1373 of SEQ ID NO: 1882654
gggucuuucucguugauuu

SEQ ID NO: 2137943 - RNA, 19 nt, Artificial Sequence
  Description of Artificial Sequence: Synthetic oligonucleotide
  Antisense strand to SEQ ID NO: 2137942
aaaucaacgagaaagaccc

SEQ ID NO: 2137944 - RNA, 19 nt, Artificial Sequence
  Description of Artificial Sequence: Synthetic oligonucleotide
  Sense strand starting at position 1412 of SEQ ID NO: 1882654
agucgagcugcuuccuuau

SEQ ID NO: 2137945 - RNA, 19 nt, Artificial Sequence
  Description of Artificial Sequence: Synthetic oligonucleotide
  Antisense strand to SEQ ID NO: 2137944
auaaggaagcagcucgacu

SEQ ID NO: 2137946 - RNA, 19 nt, Artificial Sequence
  Description of Artificial Sequence: Synthetic oligonucleotide
  Sense strand starting at position 1415 of SEQ ID NO: 1882654
cgagcugcuuccuuauacu

SEQ ID NO: 2137947 - RNA, 19 nt, Artificial Sequence
  Description of Artificial Sequence: Synthetic oligonucleotide
  Antisense strand to SEQ ID NO: 2137946
aguauaaggaagcagcucg

SEQ ID NO: 2137948 - RNA, 19 nt, Artificial Sequence
  Description of Artificial Sequence: Synthetic oligonucleotide
  Sense strand starting at position 1758 of SEQ ID NO: 1882654
cuccgauaguguucacagu

SEQ ID NO: 2137949 - RNA, 19 nt, Artificial Sequence
  Description of Artificial Sequence: Synthetic oligonucleotide
  Antisense strand to SEQ ID NO: 2137948
acugugaacacuaucggag

SEQ ID NO: 2137950 - RNA, 19 nt, Artificial Sequence
  Description of Artificial Sequence: Synthetic oligonucleotide
  Sense strand starting at position 1759 of SEQ ID NO: 1882654
uccgauaguguucacagua

SEQ ID NO: 2137951 - RNA, 19 nt, Artificial Sequence
  Description of Artificial Sequence: Synthetic oligonucleotide
  Antisense strand to SEQ ID NO: 2137950
uacugugaacacuaucgga

SEQ ID NO: 2137952 - RNA, 19 nt, Artificial Sequence
  Description of Artificial Sequence: Synthetic oligonucleotide
  Sense strand starting at position 2060 of SEQ ID NO: 1882654
ucaguaguccuggguaucu

SEQ ID NO: 2137953 - RNA, 19 nt, Artificial Sequence
  Description of Artificial Sequence: Synthetic oligonucleotide
  Antisense strand to SEQ ID NO: 2137952
agauacccaggacuacuga

SEQ ID NO: 2137954 - RNA, 19 nt, Artificial Sequence
  Description of Artificial Sequence: Synthetic oligonucleotide
  Sense strand starting at position 2223 of SEQ ID NO: 1882654
gcugaauuaccaugcgauu

SEQ ID NO: 2137955 - RNA, 19 nt, Artificial Sequence
  Description of Artificial Sequence: Synthetic oligonucleotide
  Antisense strand to SEQ ID NO: 2137954
aaucgcaugguaauucagc

SEQ ID NO: 2137956 - RNA, 19 nt, Artificial Sequence
  Description of Artificial Sequence: Synthetic oligonucleotide
  Sense strand starting at position 2229 of SEQ ID NO: 1882654
uuaccaugcgauugguaau

SEQ ID NO: 2137957 - RNA, 19 nt, Artificial Sequence
  Description of Artificial Sequence: Synthetic oligonucleotide
  Antisense strand to SEQ ID NO: 2137956
auuaccaaucgcaugguaa

SEQ ID NO: 2137958 - RNA, 19 nt, Artificial Sequence
  Description of Artificial Sequence: Synthetic oligonucleotide
  Sense strand starting at position 2261 of SEQ ID NO: 1882654
gacuuagcacauuguggaa

SEQ ID NO: 2137959 - RNA, 19 nt, Artificial Sequence
  Description of Artificial Sequence: Synthetic oligonucleotide
  Antisense strand to SEQ ID NO: 2137958
uuccacaaugugcuaaguc

SEQ ID NO: 2137960 - RNA, 19 nt, Artificial Sequence
  Description of Artificial Sequence: Synthetic oligonucleotide
  Sense strand starting at position 2284 of SEQ ID NO: 1882654
auaggaaaucgucaggcga

SEQ ID NO: 2137961 - RNA, 19 nt, Artificial Sequence
  Description of Artificial Sequence: Synthetic oligonucleotide
  Antisense strand to SEQ ID NO: 2137960
ucgccugacgauuuccuau

SEQ ID NO: 2137962 - RNA, 19 nt, Artificial Sequence
  Description of Artificial Sequence: Synthetic oligonucleotide
  Sense strand starting at position 2297 of SEQ ID NO: 1882654
aggcgaagucauuaaauuc

SEQ ID NO: 2137963 - RNA, 19 nt, Artificial Sequence
  Description of Artificial Sequence: Synthetic oligonucleotide
  Antisense strand to SEQ ID NO: 2137962
gaauuuaaugacuucgccu

SEQ ID NO: 2137964 - RNA, 19 nt, Artificial Sequence
  Description of Artificial Sequence: Synthetic oligonucleotide
  Sense strand starting at position 2334 of SEQ ID NO: 1882654
agcuuuagugcccucugua

SEQ ID NO: 2137965 - RNA, 19 nt, Artificial Sequence
  Description of Artificial Sequence: Synthetic oligonucleotide
  Antisense strand to SEQ ID NO: 2137964
uacagagggcacuaaagcu

SEQ ID NO: 2137966 - RNA, 19 nt, Artificial Sequence
  Description of Artificial Sequence: Synthetic oligonucleotide
  Sense strand starting at position 2335 of SEQ ID NO: 1882654
gcuuuagugcccucuguaa

SEQ ID NO: 2137967 - RNA, 19 nt, Artificial Sequence
  Description of Artificial Sequence: Synthetic oligonucleotide
  Antisense strand to SEQ ID NO: 2137966
uuacagagggcacuaaagc

SEQ ID NO: 2137968 - RNA, 19 nt, Artificial Sequence
  Description of Artificial Sequence: Synthetic oligonucleotide
  Sense strand starting at position 2337 of SEQ ID NO: 1882654
uuuagugcccucuguaaau

SEQ ID NO: 2137969 - RNA, 19 nt, Artificial Sequence
  Description of Artificial Sequence: Synthetic oligonucleotide
  Antisense strand to SEQ ID NO: 2137968
auuuacagagggcacuaaa

SEQ ID NO: 2137970 - RNA, 19 nt, Artificial Sequence
  Description of Artificial Sequence: Synthetic oligonucleotide
  Sense strand starting at position 2346 of SEQ ID NO: 1882654
cucuguaaauuaucuggga

SEQ ID NO: 2137971 - RNA, 19 nt, Artificial Sequence
  Description of Artificial Sequence: Synthetic oligonucleotide
  Antisense strand to SEQ ID NO: 2137970
ucccagauaauuuacagag

SEQ ID NO: 2137972 - RNA, 19 nt, Artificial Sequence
  Description of Artificial Sequence: Synthetic oligonucleotide
  Sense strand starting at position 2351 of SEQ ID NO: 1882654
uaaauuaucugggagggag

SEQ ID NO: 2137973 - RNA, 19 nt, Artificial Sequence
  Description of Artificial Sequence: Synthetic oligonucleotide
  Antisense strand to SEQ ID NO: 2137972
cucccucccagauaauuua

SEQ ID NO: 2137974 - RNA, 19 nt, Artificial Sequence
  Description of Artificial Sequence: Synthetic oligonucleotide
  Sense strand starting at position 2463 of SEQ ID NO: 1882654
uaaacaaauuguuugggua

SEQ ID NO: 2137975 - RNA, 19 nt, Artificial Sequence
  Description of Artificial Sequence: Synthetic oligonucleotide
  Antisense strand to SEQ ID NO: 2137974
uacccaaacaauuuguuua

SEQ ID NO: 2137976 - RNA, 19 nt, Artificial Sequence
  Description of Artificial Sequence: Synthetic oligonucleotide
  Sense strand starting at position 2558 of SEQ ID NO: 1882654
ucuugacagucagauaaau

SEQ ID NO: 2137977 - RNA, 19 nt, Artificial Sequence
  Description of Artificial Sequence: Synthetic oligonucleotide
  Antisense strand to SEQ ID NO: 2137976
auuuaucugacugucaaga

SEQ ID NO: 2137978 - RNA, 19 nt, Artificial Sequence
  Description of Artificial Sequence: Synthetic oligonucleotide
  Sense strand starting at position 2612 of SEQ ID NO: 1882654
cugaucucagcucaguauu

SEQ ID NO: 2137979 - RNA, 19 nt, Artificial Sequence
  Description of Artificial Sequence: Synthetic oligonucleotide
  Antisense strand to SEQ ID NO: 2137978
aauacugagcugagaucag

SEQ ID NO: 2137980 - RNA, 19 nt, Artificial Sequence
  Description of Artificial Sequence: Synthetic oligonucleotide
  Sense strand starting at position 2620 of SEQ ID NO: 1882654
agcucaguauucucuccua

SEQ ID NO: 2137981 - RNA, 19 nt, Artificial Sequence
  Description of Artificial Sequence: Synthetic oligonucleotide
  Antisense strand to SEQ ID NO: 2137980
uaggagagaauacugagcu

SEQ ID NO: 2137982 - RNA, 19 nt, Artificial Sequence
  Description of Artificial Sequence: Synthetic oligonucleotide
  Sense strand starting at position 3437 of SEQ ID NO: 1882654
cccaaaguaugaggauuaa

SEQ ID NO: 2137983 - RNA, 19 nt, Artificial Sequence
  Description of Artificial Sequence: Synthetic oligonucleotide
  Antisense strand to SEQ ID NO: 2137982
uuaauccucauacuuuggg

SEQ ID NO: 2137984 - RNA, 19 nt, Artificial Sequence
  Description of Artificial Sequence: Synthetic oligonucleotide
  Sense strand starting at position 3855 of SEQ ID NO: 1882654
gagguuaguccggaguucu

SEQ ID NO: 2137985 - RNA, 19 nt, Artificial Sequence
  Description of Artificial Sequence: Synthetic oligonucleotide
  Antisense strand to SEQ ID NO: 2137984
agaacuccggacuaaccuc

SEQ ID NO: 2137986 - RNA, 19 nt, Artificial Sequence
  Description of Artificial Sequence: Synthetic oligonucleotide
  Sense strand starting at position 3885 of SEQ ID NO: 1882654
caggaaaucugaggaauac

SEQ ID NO: 2137987 - RNA, 19 nt, Artificial Sequence
  Description of Artificial Sequence: Synthetic oligonucleotide
  Antisense strand to SEQ ID NO: 2137986
guauuccucagauuuccug

SEQ ID NO: 2137988 - RNA, 19 nt, Artificial Sequence
  Description of Artificial Sequence: Synthetic oligonucleotide
  Sense strand starting at position 3907 of SEQ ID NO: 1882654
aggacugagcugugucaua

SEQ ID NO: 2137989 - RNA, 19 nt, Artificial Sequence
  Description of Artificial Sequence: Synthetic oligonucleotide
  Antisense strand to SEQ ID NO: 2137988
uaugacacagcucaguccu

SEQ ID NO: 2137990 - RNA, 19 nt, Artificial Sequence
  Description of Artificial Sequence: Synthetic oligonucleotide
  Sense strand starting at position 3918 of SEQ ID NO: 1882654
gugucauauucugccuuau

SEQ ID NO: 2137991 - RNA, 19 nt, Artificial Sequence
  Description of Artificial Sequence: Synthetic oligonucleotide
  Antisense strand to SEQ ID NO: 2137990
auaaggcagaauaugacac

SEQ ID NO: 2137992 - RNA, 19 nt, Artificial Sequence
  Description of Artificial Sequence: Synthetic oligonucleotide
  Sense strand starting at position 3941 of SEQ ID NO: 1882654
aagaauguaggcugaacau

SEQ ID NO: 2137993 - RNA, 19 nt, Artificial Sequence
  Description of Artificial Sequence: Synthetic oligonucleotide
  Antisense strand to SEQ ID NO: 2137992
auguucagccuacauucuu

SEQ ID NO: 2137994 - RNA, 19 nt, Artificial Sequence
  Description of Artificial Sequence: Synthetic oligonucleotide
  Sense strand starting at position 140 of SEQ ID NO: 1882655
uugcuuagggcuuagaaug

SEQ ID NO: 2137995 - RNA, 19 nt, Artificial Sequence
  Description of Artificial Sequence: Synthetic oligonucleotide
  Antisense strand to SEQ ID NO: 2137994
cauucuaagcccuaagcaa

SEQ ID NO: 2137996 - RNA, 19 nt, Artificial Sequence
  Description of Artificial Sequence: Synthetic oligonucleotide
  Sense strand starting at position 260 of SEQ ID NO: 1882655
cugaaugcagcauauuaaa

SEQ ID NO: 2137997 - RNA, 19 nt, Artificial Sequence
  Description of Artificial Sequence: Synthetic oligonucleotide
  Antisense strand to SEQ ID NO: 2137996
uuuaauaugcugcauucag

SEQ ID NO: 2137998 - RNA, 19 nt, Artificial Sequence
  Description of Artificial Sequence: Synthetic oligonucleotide
  Sense strand starting at position 307 of SEQ ID NO: 1882655
auuggagucugucugaaau

SEQ ID NO: 2137999 - RNA, 19 nt, Artificial Sequence
  Description of Artificial Sequence: Synthetic oligonucleotide
  Antisense strand to SEQ ID NO: 2137998
auuucagacagacuccaau

SEQ ID NO: 2138000 - RNA, 19 nt, Artificial Sequence
  Description of Artificial Sequence: Synthetic oligonucleotide
  Sense strand starting at position 373 of SEQ ID NO: 1882655
uaugaugaugguuguacaa

SEQ ID NO: 2138001 - RNA, 19 nt, Artificial Sequence
  Description of Artificial Sequence: Synthetic oligonucleotide
  Antisense strand to SEQ ID NO: 2138000
uuguacaaccaucaucaua

SEQ ID NO: 2138002 - RNA, 19 nt, Artificial Sequence
  Description of Artificial Sequence: Synthetic oligonucleotide
  Sense strand starting at position 734 of SEQ ID NO: 1882655
aauggugaacucuacggua

SEQ ID NO: 2138003 - RNA, 19 nt, Artificial Sequence
  Description of Artificial Sequence: Synthetic oligonucleotide
  Antisense strand to SEQ ID NO: 2138002
uaccguagaguucaccauu

SEQ ID NO: 2138004 - RNA, 19 nt, Artificial Sequence
  Description of Artificial Sequence: Synthetic oligonucleotide
  Sense strand starting at position 951 of SEQ ID NO: 1882655
auuaaauuaccguagacug

SEQ ID NO: 2138005 - RNA, 19 nt, Artificial Sequence
  Description of Artificial Sequence: Synthetic oligonucleotide
  Antisense strand to SEQ ID NO: 2138004
cagucuacgguaauuuaau

SEQ ID NO: 2138006 - RNA, 19 nt, Artificial Sequence
  Description of Artificial Sequence: Synthetic oligonucleotide
  Sense strand starting at position 1065 of SEQ ID NO: 1882655
ccuugaaguuaggcuaaga

SEQ ID NO: 2138007 - RNA, 19 nt, Artificial Sequence
  Description of Artificial Sequence: Synthetic oligonucleotide
  Antisense strand to SEQ ID NO: 2138006
ucuuagccuaacuucaagg

SEQ ID NO: 2138008 - RNA, 19 nt, Artificial Sequence
  Description of Artificial Sequence: Synthetic oligonucleotide
  Sense strand starting at position 1076 of SEQ ID NO: 1882655
ggcuaagaaauguguauua

SEQ ID NO: 2138009 - RNA, 19 nt, Artificial Sequence
  Description of Artificial Sequence: Synthetic oligonucleotide
  Antisense strand to SEQ ID NO: 2138008
uaauacacauuucuuagcc

SEQ ID NO: 2138010 - RNA, 19 nt, Artificial Sequence
  Description of Artificial Sequence: Synthetic oligonucleotide
  Sense strand starting at position 1078 of SEQ ID NO: 1882655
cuaagaaauguguauuauc

SEQ ID NO: 2138011 - RNA, 19 nt, Artificial Sequence
  Description of Artificial Sequence: Synthetic oligonucleotide
  Antisense strand to SEQ ID NO: 2138010
gauaauacacauuucuuag

SEQ ID NO: 2138012 - RNA, 19 nt, Artificial Sequence
  Description of Artificial Sequence: Synthetic oligonucleotide
  Sense strand starting at position 1087 of SEQ ID NO: 1882655
guguauuauccugaaagca

SEQ ID NO: 2138013 - RNA, 19 nt, Artificial Sequence
  Description of Artificial Sequence: Synthetic oligonucleotide
  Antisense strand to SEQ ID NO: 2138012
ugcuuucaggauaauacac

SEQ ID NO: 2138014 - RNA, 19 nt, Artificial Sequence
  Description of Artificial Sequence: Synthetic oligonucleotide
  Sense strand starting at position 1351 of SEQ ID NO: 1882655
acugauaggcacugauaua

SEQ ID NO: 2138015 - RNA, 19 nt, Artificial Sequence
  Description of Artificial Sequence: Synthetic oligonucleotide
  Antisense strand to SEQ ID NO: 2138014
uauaucagugccuaucagu

SEQ ID NO: 2138016 - RNA, 19 nt, Artificial Sequence
  Description of Artificial Sequence: Synthetic oligonucleotide
  Sense strand starting at position 1879 of SEQ ID NO: 1882655
gagacuaaccugugagcaa

SEQ ID NO: 2138017 - RNA, 19 nt, Artificial Sequence
  Description of Artificial Sequence: Synthetic oligonucleotide
  Antisense strand to SEQ ID NO: 2138016
uugcucacagguuagucuc

SEQ ID NO: 2138018 - RNA, 19 nt, Artificial Sequence
  Description of Artificial Sequence: Synthetic oligonucleotide
  Sense strand starting at position 1930 of SEQ ID NO: 1882655
uucuuccaggcuugggaaa

SEQ ID NO: 2138019 - RNA, 19 nt, Artificial Sequence
  Description of Artificial Sequence: Synthetic oligonucleotide
  Antisense strand to SEQ ID NO: 2138018
uuucccaagccuggaagaa

SEQ ID NO: 2138020 - RNA, 19 nt, Artificial Sequence
  Description of Artificial Sequence: Synthetic oligonucleotide
  Sense strand starting at position 1942 of SEQ ID NO: 1882655
ugggaaagcacggguaaau

SEQ ID NO: 2138021 - RNA, 19 nt, Artificial Sequence
  Description of Artificial Sequence: Synthetic oligonucleotide
  Antisense strand to SEQ ID NO: 2138020
auuuacccgugcuuuccca

SEQ ID NO: 2138022 - RNA, 19 nt, Artificial Sequence
  Description of Artificial Sequence: Synthetic oligonucleotide
  Sense strand starting at position 2096 of SEQ ID NO: 1882655
ccggcugauccagaacuua

SEQ ID NO: 2138023 - RNA, 19 nt, Artificial Sequence
  Description of Artificial Sequence: Synthetic oligonucleotide
  Antisense strand to SEQ ID NO: 2138022
uaaguucuggaucagccgg

SEQ ID NO: 2138024 - RNA, 19 nt, Artificial Sequence
  Description of Artificial Sequence: Synthetic oligonucleotide
  Sense strand starting at position 2244 of SEQ ID NO: 1882655
agcacuagcccaggaaaua

SEQ ID NO: 2138025 - RNA, 19 nt, Artificial Sequence
  Description of Artificial Sequence: Synthetic oligonucleotide
  Antisense strand to SEQ ID NO: 2138024
uauuuccugggcuagugcu

SEQ ID NO: 2138026 - RNA, 19 nt, Artificial Sequence
  Description of Artificial Sequence: Synthetic oligonucleotide
  Sense strand starting at position 2245 of SEQ ID NO: 1882655
gcacuagcccaggaaauau

SEQ ID NO: 2138027 - RNA, 19 nt, Artificial Sequence
  Description of Artificial Sequence: Synthetic oligonucleotide
  Antisense strand to SEQ ID NO: 2138026
auauuuccugggcuagugc

SEQ ID NO: 2138028 - RNA, 19 nt, Artificial Sequence
  Description of Artificial Sequence: Synthetic oligonucleotide
  Sense strand starting at position 2436 of SEQ ID NO: 1882655
caguuaacaccagggagua

SEQ ID NO: 2138029 - RNA, 19 nt, Artificial Sequence
  Description of Artificial Sequence: Synthetic oligonucleotide
  Antisense strand to SEQ ID NO: 2138028
uacucccugguguuaacug

SEQ ID NO: 2138030 - RNA, 19 nt, Artificial Sequence
  Description of Artificial Sequence: Synthetic oligonucleotide
  Sense strand starting at position 2507 of SEQ ID NO: 1882655
uaaauuuguuaugaggaug

SEQ ID NO: 2138031 - RNA, 19 nt, Artificial Sequence
  Description of Artificial Sequence: Synthetic oligonucleotide
  Antisense strand to SEQ ID NO: 2138030
cauccucauaacaaauuua

SEQ ID NO: 2138032 - RNA, 19 nt, Artificial Sequence
  Description of Artificial Sequence: Synthetic oligonucleotide
  Sense strand starting at position 2512 of SEQ ID NO: 1882655
uuguuaugaggaugugaag

SEQ ID NO: 2138033 - RNA, 19 nt, Artificial Sequence
  Description of Artificial Sequence: Synthetic oligonucleotide
  Antisense strand to SEQ ID NO: 2138032
cuucacauccucauaacaa

SEQ ID NO: 2138034 - RNA, 19 nt, Artificial Sequence
  Description of Artificial Sequence: Synthetic oligonucleotide
  Sense strand starting at position 2523 of SEQ ID NO: 1882655
augugaagcacuuagagua

SEQ ID NO: 2138035 - RNA, 19 nt, Artificial Sequence
  Description of Artificial Sequence: Synthetic oligonucleotide
  Antisense strand to SEQ ID NO: 2138034
uacucuaagugcuucacau

SEQ ID NO: 2138036 - RNA, 19 nt, Artificial Sequence
  Description of Artificial Sequence: Synthetic oligonucleotide
  Sense strand starting at position 2552 of SEQ ID NO: 1882655
guuuguaggcgcucaguaa

SEQ ID NO: 2138037 - RNA, 19 nt, Artificial Sequence
  Description of Artificial Sequence: Synthetic oligonucleotide
  Antisense strand to SEQ ID NO: 2138036
uuacugagcgccuacaaac

SEQ ID NO: 2138038 - RNA, 19 nt, Artificial Sequence
  Description of Artificial Sequence: Synthetic oligonucleotide
  Sense strand starting at position 2595 of SEQ ID NO: 1882655
uugauuauuccauagucac

SEQ ID NO: 2138039 - RNA, 19 nt, Artificial Sequence
  Description of Artificial Sequence: Synthetic oligonucleotide
  Antisense strand to SEQ ID NO: 2138038
gugacuauggaauaaucaa

SEQ ID NO: 2138040 - RNA, 19 nt, Artificial Sequence
  Description of Artificial Sequence: Synthetic oligonucleotide
  Sense strand starting at position 2892 of SEQ ID NO: 1882655
acaauuagguugccaaaca

SEQ ID NO: 2138041 - RNA, 19 nt, Artificial Sequence
  Description of Artificial Sequence: Synthetic oligonucleotide
  Antisense strand to SEQ ID NO: 2138040
uguuuggcaaccuaauugu

SEQ ID NO: 2138042 - RNA, 19 nt, Artificial Sequence
  Description of Artificial Sequence: Synthetic oligonucleotide
  Sense strand starting at position 2924 of SEQ ID NO: 1882655
ucuggaauccacuagcuaa

SEQ ID NO: 2138043 - RNA, 19 nt, Artificial Sequence
  Description of Artificial Sequence: Synthetic oligonucleotide
  Antisense strand to SEQ ID NO: 2138042
uuagcuaguggauuccaga

SEQ ID NO: 2138044 - RNA, 19 nt, Artificial Sequence
  Description of Artificial Sequence: Synthetic oligonucleotide
  Sense strand starting at position 2938 of SEQ ID NO: 1882655
gcuaaaugagcacauuauc

SEQ ID NO: 2138045 - RNA, 19 nt, Artificial Sequence
  Description of Artificial Sequence: Synthetic oligonucleotide
  Antisense strand to SEQ ID NO: 2138044
gauaaugugcucauuuagc

SEQ ID NO: 2138046 - RNA, 19 nt, Artificial Sequence
  Description of Artificial Sequence: Synthetic oligonucleotide
  Sense strand starting at position 3090 of SEQ ID NO: 1882655
auaggcauccacugaguaa

SEQ ID NO: 2138047 - RNA, 19 nt, Artificial Sequence
  Description of Artificial Sequence: Synthetic oligonucleotide
  Antisense strand to SEQ ID NO: 2138046
uuacucaguggaugccuau

SEQ ID NO: 2138048 - RNA, 19 nt, Artificial Sequence
  Description of Artificial Sequence: Synthetic oligonucleotide
  Sense strand starting at position 3093 of SEQ ID NO: 1882655
ggcauccacugaguaauau

SEQ ID NO: 2138049 - RNA, 19 nt, Artificial Sequence
  Description of Artificial Sequence: Synthetic oligonucleotide
  Antisense strand to SEQ ID NO: 2138048
auauuacucaguggaugcc

SEQ ID NO: 2138050 - RNA, 19 nt, Artificial Sequence
  Description of Artificial Sequence: Synthetic oligonucleotide
  Sense strand starting at position 3094 of SEQ ID NO: 1882655
gcauccacugaguaauauu

SEQ ID NO: 2138051 - RNA, 19 nt, Artificial Sequence
  Description of Artificial Sequence: Synthetic oligonucleotide
  Antisense strand to SEQ ID NO: 2138050
aauauuacucaguggaugc

SEQ ID NO: 2138052 - RNA, 19 nt, Artificial Sequence
  Description of Artificial Sequence: Synthetic oligonucleotide
  Sense strand starting at position 3118 of SEQ ID NO: 1882655
augcaacauugauuauuga

SEQ ID NO: 2138053 - RNA, 19 nt, Artificial Sequence
  Description of Artificial Sequence: Synthetic oligonucleotide
  Antisense strand to SEQ ID NO: 2138052
ucaauaaucaauguugcau

SEQ ID NO: 2138054 - RNA, 19 nt, Artificial Sequence
  Description of Artificial Sequence: Synthetic oligonucleotide
  Sense strand starting at position 3221 of SEQ ID NO: 1882655
uuaugagguuugguauaug

SEQ ID NO: 2138055 - RNA, 19 nt, Artificial Sequence
  Description of Artificial Sequence: Synthetic oligonucleotide
  Antisense strand to SEQ ID NO: 2138054
cauauaccaaaccucauaa

SEQ ID NO: 2138056 - RNA, 19 nt, Artificial Sequence
  Description of Artificial Sequence: Synthetic oligonucleotide
  Sense strand starting at position 3289 of SEQ ID NO: 1882655
cguucuguaccagaaagag

SEQ ID NO: 2138057 - RNA, 19 nt, Artificial Sequence
  Description of Artificial Sequence: Synthetic oligonucleotide
  Antisense strand to SEQ ID NO: 2138056
cucuuucugguacagaacg

SEQ ID NO: 2138058 - RNA, 19 nt, Artificial Sequence
  Description of Artificial Sequence: Synthetic oligonucleotide
  Sense strand starting at position 3396 of SEQ ID NO: 1882655
ggacuuaaaucugcuaaag

SEQ ID NO: 2138059 - RNA, 19 nt, Artificial Sequence
  Description of Artificial Sequence: Synthetic oligonucleotide
  Antisense strand to SEQ ID NO: 2138058
cuuuagcagauuuaagucc

SEQ ID NO: 2138060 - RNA, 19 nt, Artificial Sequence
  Description of Artificial Sequence: Synthetic oligonucleotide
  Sense strand starting at position 3446 of SEQ ID NO: 1882655
cucuauagugaauaauguu

SEQ ID NO: 2138061 - RNA, 19 nt, Artificial Sequence
  Description of Artificial Sequence: Synthetic oligonucleotide
  Antisense strand to SEQ ID NO: 2138060
aacauuauucacuauagag

SEQ ID NO: 2138062 - RNA, 19 nt, Artificial Sequence
  Description of Artificial Sequence: Synthetic oligonucleotide
  Sense strand starting at position 3760 of SEQ ID NO: 1882655
uggaaauaguugcuaauca

SEQ ID NO: 2138063 - RNA, 19 nt, Artificial Sequence
  Description of Artificial Sequence: Synthetic oligonucleotide
  Antisense strand to SEQ ID NO: 2138062
ugauuagcaacuauuucca

SEQ ID NO: 2138064 - RNA, 19 nt, Artificial Sequence
  Description of Artificial Sequence: Synthetic oligonucleotide
  Sense strand starting at position 3836 of SEQ ID NO: 1882655
ucaugcucaggagaaaguu

SEQ ID NO: 2138065 - RNA, 19 nt, Artificial Sequence
  Description of Artificial Sequence: Synthetic oligonucleotide
  Antisense strand to SEQ ID NO: 2138064
aacuuucuccugagcauga

SEQ ID NO: 2138066 - RNA, 19 nt, Artificial Sequence
  Description of Artificial Sequence: Synthetic oligonucleotide
  Sense strand starting at position 3868 of SEQ ID NO: 1882655
ccucuugacgucgaaacau

SEQ ID NO: 2138067 - RNA, 19 nt, Artificial Sequence
  Description of Artificial Sequence: Synthetic oligonucleotide
  Antisense strand to SEQ ID NO: 2138066
auguuucgacgucaagagg

SEQ ID NO: 2138068 - RNA, 19 nt, Artificial Sequence
  Description of Artificial Sequence: Synthetic oligonucleotide
  Sense strand starting at position 3916 of SEQ ID NO: 1882655
ugcccaucacaaggaauaa

SEQ ID NO: 2138069 - RNA, 19 nt, Artificial Sequence
  Description of Artificial Sequence: Synthetic oligonucleotide
  Antisense strand to SEQ ID NO: 2138068
uuauuccuugugaugggca

SEQ ID NO: 2138070 - RNA, 19 nt, Artificial Sequence
  Description of Artificial Sequence: Synthetic oligonucleotide
  Sense strand starting at position 3975 of SEQ ID NO: 1882655
aaacaauguccuuggugac

SEQ ID NO: 2138071 - RNA, 19 nt, Artificial Sequence
  Description of Artificial Sequence: Synthetic oligonucleotide
  Antisense strand to SEQ ID NO: 2138070
gucaccaaggacauuguuu

SEQ ID NO: 2138072 - RNA, 19 nt, Artificial Sequence
  Description of Artificial Sequence: Synthetic oligonucleotide
  Sense strand starting at position 3976 of SEQ ID NO: 1882655
aacaauguccuuggugaca

SEQ ID NO: 2138073 - RNA, 19 nt, Artificial Sequence
  Description of Artificial Sequence: Synthetic oligonucleotide
  Antisense strand to SEQ ID NO: 2138072
ugucaccaaggacauuguu

SEQ ID NO: 2138074 - RNA, 19 nt, Artificial Sequence
  Description of Artificial Sequence: Synthetic oligonucleotide
  Sense strand starting at position 2008 of SEQ ID NO: 1882656
aaguguuucccucaaggag

SEQ ID NO: 2138075 - RNA, 19 nt, Artificial Sequence
  Description of Artificial Sequence: Synthetic oligonucleotide
  Antisense strand to SEQ ID NO: 2138074
cuccuugagggaaacacuu

SEQ ID NO: 2138076 - RNA, 19 nt, Artificial Sequence
  Description of Artificial Sequence: Synthetic oligonucleotide
  Sense strand starting at position 2086 of SEQ ID NO: 1882656
gccauuauuccauacugug

SEQ ID NO: 2138077 - RNA, 19 nt, Artificial Sequence
  Description of Artificial Sequence: Synthetic oligonucleotide
  Antisense strand to SEQ ID NO: 2138076
cacaguauggaauaauggc

SEQ ID NO: 2138078 - RNA, 19 nt, Artificial Sequence
  Description of Artificial Sequence: Synthetic oligonucleotide
  Sense strand starting at position 2092 of SEQ ID NO: 1882656
auuccauacuguggaucaa

SEQ ID NO: 2138079 - RNA, 19 nt, Artificial Sequence
  Description of Artificial Sequence: Synthetic oligonucleotide
  Antisense strand to SEQ ID NO: 2138078
uugauccacaguauggaau

SEQ ID NO: 2138080 - RNA, 19 nt, Artificial Sequence
  Description of Artificial Sequence: Synthetic oligonucleotide
  Sense strand starting at position 2151 of SEQ ID NO: 1882656
aucccaaagugguuuaaac

SEQ ID NO: 2138081 - RNA, 19 nt, Artificial Sequence
  Description of Artificial Sequence: Synthetic oligonucleotide
  Antisense strand to SEQ ID NO: 2138080
guuuaaaccacuuugggau

SEQ ID NO: 2138082 - RNA, 19 nt, Artificial Sequence
  Description of Artificial Sequence: Synthetic oligonucleotide
  Sense strand starting at position 2158 of SEQ ID NO: 1882656
agugguuuaaacuguauac

SEQ ID NO: 2138083 - RNA, 19 nt, Artificial Sequence
  Description of Artificial Sequence: Synthetic oligonucleotide
  Antisense strand to SEQ ID NO: 2138082
guauacaguuuaaaccacu

SEQ ID NO: 2138084 - RNA, 19 nt, Artificial Sequence
  Description of Artificial Sequence: Synthetic oligonucleotide
  Sense strand starting at position 2430 of SEQ ID NO: 1882656
ugaaguaguuaccaugaca

SEQ ID NO: 2138085 - RNA, 19 nt, Artificial Sequence
  Description of Artificial Sequence: Synthetic oligonucleotide
  Antisense strand to SEQ ID NO: 2138084
ugucaugguaacuacuuca

SEQ ID NO: 2138086 - RNA, 19 nt, Artificial Sequence
  Description of Artificial Sequence: Synthetic oligonucleotide
  Sense strand starting at position 2433 of SEQ ID NO: 1882656
aguaguuaccaugacaggu

SEQ ID NO: 2138087 - RNA, 19 nt, Artificial Sequence
  Description of Artificial Sequence: Synthetic oligonucleotide
  Antisense strand to SEQ ID NO: 2138086
accugucaugguaacuacu

SEQ ID NO: 2138088 - RNA, 19 nt, Artificial Sequence
  Description of Artificial Sequence: Synthetic oligonucleotide
  Sense strand starting at position 2435 of SEQ ID NO: 1882656
uaguuaccaugacagguaa

SEQ ID NO: 2138089 - RNA, 19 nt, Artificial Sequence
  Description of Artificial Sequence: Synthetic oligonucleotide
  Antisense strand to SEQ ID NO: 2138088
uuaccugucaugguaacua

SEQ ID NO: 2138090 - RNA, 19 nt, Artificial Sequence
  Description of Artificial Sequence: Synthetic oligonucleotide
  Sense strand starting at position 2468 of SEQ ID NO: 1882656
acucgcuugucgucuagga

SEQ ID NO: 2138091 - RNA, 19 nt, Artificial Sequence
  Description of Artificial Sequence: Synthetic oligonucleotide
  Antisense strand to SEQ ID NO: 2138090
uccuagacgacaagcgagu

SEQ ID NO: 2138092 - RNA, 19 nt, Artificial Sequence
  Description of Artificial Sequence: Synthetic oligonucleotide
  Sense strand starting at position 2469 of SEQ ID NO: 1882656
cucgcuugucgucuaggau

SEQ ID NO: 2138093 - RNA, 19 nt, Artificial Sequence
  Description of Artificial Sequence: Synthetic oligonucleotide
  Antisense strand to SEQ ID NO: 2138092
auccuagacgacaagcgag

SEQ ID NO: 2138094 - RNA, 19 nt, Artificial Sequence
  Description of Artificial Sequence: Synthetic oligonucleotide
  Sense strand starting at position 2470 of SEQ ID NO: 1882656
ucgcuugucgucuaggauu

SEQ ID NO: 2138095 - RNA, 19 nt, Artificial Sequence
  Description of Artificial Sequence: Synthetic oligonucleotide
  Antisense strand to SEQ ID NO: 2138094
aauccuagacgacaagcga

SEQ ID NO: 2138096 - RNA, 19 nt, Artificial Sequence
  Description of Artificial Sequence: Synthetic oligonucleotide
  Sense strand starting at position 2472 of SEQ ID NO: 1882656
gcuugucgucuaggauuua

SEQ ID NO: 2138097 - RNA, 19 nt, Artificial Sequence
  Description of Artificial Sequence: Synthetic oligonucleotide
  Antisense strand to SEQ ID NO: 2138096
uaaauccuagacgacaagc

SEQ ID NO: 2138098 - RNA, 19 nt, Artificial Sequence
  Description of Artificial Sequence: Synthetic oligonucleotide
  Sense strand starting at position 2473 of SEQ ID NO: 1882656
cuugucgucuaggauuuaa

SEQ ID NO: 2138099 - RNA, 19 nt, Artificial Sequence
  Description of Artificial Sequence: Synthetic oligonucleotide
  Antisense strand to SEQ ID NO: 2138098
uuaaauccuagacgacaag

SEQ ID NO: 2138100 - RNA, 19 nt, Artificial Sequence
  Description of Artificial Sequence: Synthetic oligonucleotide
  Sense strand starting at position 2578 of SEQ ID NO: 1882656
uugggaacucugcauucca

SEQ ID NO: 2138101 - RNA, 19 nt, Artificial Sequence
  Description of Artificial Sequence: Synthetic oligonucleotide
  Antisense strand to SEQ ID NO: 2138100
uggaaugcagaguucccaa

SEQ ID NO: 2138102 - RNA, 19 nt, Artificial Sequence
  Description of Artificial Sequence: Synthetic oligonucleotide
  Sense strand starting at position 2754 of SEQ ID NO: 1882656
ucucucauuccauguggua

SEQ ID NO: 2138103 - RNA, 19 nt, Artificial Sequence
  Description of Artificial Sequence: Synthetic oligonucleotide
  Antisense strand to SEQ ID NO: 2138102
uaccacauggaaugagaga

SEQ ID NO: 2138104 - RNA, 19 nt, Artificial Sequence
  Description of Artificial Sequence: Synthetic oligonucleotide
  Sense strand starting at position 2767 of SEQ ID NO: 1882656
gugguaugccaguguaaau

SEQ ID NO: 2138105 - RNA, 19 nt, Artificial Sequence
  Description of Artificial Sequence: Synthetic oligonucleotide
  Antisense strand to SEQ ID NO: 2138104
auuuacacuggcauaccac

SEQ ID NO: 2138106 - RNA, 19 nt, Artificial Sequence
  Description of Artificial Sequence: Synthetic oligonucleotide
  Sense strand starting at position 2776 of SEQ ID NO: 1882656
caguguaaauuugcacagu

SEQ ID NO: 2138107 - RNA, 19 nt, Artificial Sequence
  Description of Artificial Sequence: Synthetic oligonucleotide
  Antisense strand to SEQ ID NO: 2138106
acugugcaaauuuacacug

SEQ ID NO: 2138108 - RNA, 19 nt, Artificial Sequence
  Description of Artificial Sequence: Synthetic oligonucleotide
  Sense strand starting at position 2896 of SEQ ID NO: 1882656
ucaggaaucuguccugaac

SEQ ID NO: 2138109 - RNA, 19 nt, Artificial Sequence
  Description of Artificial Sequence: Synthetic oligonucleotide
  Antisense strand to SEQ ID NO: 2138108
guucaggacagauuccuga

SEQ ID NO: 2138110 - RNA, 19 nt, Artificial Sequence
  Description of Artificial Sequence: Synthetic oligonucleotide
  Sense strand starting at position 2898 of SEQ ID NO: 1882656
aggaaucuguccugaacuc

SEQ ID NO: 2138111 - RNA, 19 nt, Artificial Sequence
  Description of Artificial Sequence: Synthetic oligonucleotide
  Antisense strand to SEQ ID NO: 2138110
gaguucaggacagauuccu

SEQ ID NO: 2138112 - RNA, 19 nt, Artificial Sequence
  Description of Artificial Sequence: Synthetic oligonucleotide
  Sense strand starting at position 2899 of SEQ ID NO: 1882656
ggaaucuguccugaacucu

SEQ ID NO: 2138113 - RNA, 19 nt, Artificial Sequence
  Description of Artificial Sequence: Synthetic oligonucleotide
  Antisense strand to SEQ ID NO: 2138112
agaguucaggacagauucc

SEQ ID NO: 2138114 - RNA, 19 nt, Artificial Sequence
  Description of Artificial Sequence: Synthetic oligonucleotide
  Sense strand starting at position 3834 of SEQ ID NO: 1882656
gggaacaucugccucugaa

SEQ ID NO: 2138115 - RNA, 19 nt, Artificial Sequence
  Description of Artificial Sequence: Synthetic oligonucleotide
  Antisense strand to SEQ ID NO: 2138114
uucagaggcagauguuccc

SEQ ID NO: 2138116 - RNA, 19 nt, Artificial Sequence
  Description of Artificial Sequence: Synthetic oligonucleotide
  Sense strand starting at position 6 of SEQ ID NO: 1882657
cccguagaccagugaggau

SEQ ID NO: 2138117 - RNA, 19 nt, Artificial Sequence
  Description of Artificial Sequence: Synthetic oligonucleotide
  Antisense strand to SEQ ID NO: 2138116
auccucacuggucuacggg

SEQ ID NO: 2138118 - RNA, 19 nt, Artificial Sequence
  Description of Artificial Sequence: Synthetic oligonucleotide
  Sense strand starting at position 156 of SEQ ID NO: 1882657
ucucuaaagcaggguugua

SEQ ID NO: 2138119 - RNA, 19 nt, Artificial Sequence
  Description of Artificial Sequence: Synthetic oligonucleotide
  Antisense strand to SEQ ID NO: 2138118
uacaacccugcuuuagaga

SEQ ID NO: 2138120 - RNA, 19 nt, Artificial Sequence
  Description of Artificial Sequence: Synthetic oligonucleotide
  Sense strand starting at position 169 of SEQ ID NO: 1882657
guuguaugcucacaggaaa

SEQ ID NO: 2138121 - RNA, 19 nt, Artificial Sequence
  Description of Artificial Sequence: Synthetic oligonucleotide
  Antisense strand to SEQ ID NO: 2138120
uuuccugugagcauacaac

SEQ ID NO: 2138122 - RNA, 19 nt, Artificial Sequence
  Description of Artificial Sequence: Synthetic oligonucleotide
  Sense strand starting at position 215 of SEQ ID NO: 1882657
aaugauggcuuggacuaga

SEQ ID NO: 2138123 - RNA, 19 nt, Artificial Sequence
  Description of Artificial Sequence: Synthetic oligonucleotide
  Antisense strand to SEQ ID NO: 2138122
ucuaguccaagccaucauu

SEQ ID NO: 2138124 - RNA, 19 nt, Artificial Sequence
  Description of Artificial Sequence: Synthetic oligonucleotide
  Sense strand starting at position 218 of SEQ ID NO: 1882657
gauggcuuggacuagagua

SEQ ID NO: 2138125 - RNA, 19 nt, Artificial Sequence
  Description of Artificial Sequence: Synthetic oligonucleotide
  Antisense strand to SEQ ID NO: 2138124
uacucuaguccaagccauc

SEQ ID NO: 2138126 - RNA, 19 nt, Artificial Sequence
  Description of Artificial Sequence: Synthetic oligonucleotide
  Sense strand starting at position 255 of SEQ ID NO: 1882657
uuagguugcagaugaaauc

SEQ ID NO: 2138127 - RNA, 19 nt, Artificial Sequence
  Description of Artificial Sequence: Synthetic oligonucleotide
  Antisense strand to SEQ ID NO: 2138126
gauuucaucugcaaccuaa

SEQ ID NO: 2138128 - RNA, 19 nt, Artificial Sequence
  Description of Artificial Sequence: Synthetic oligonucleotide
  Sense strand starting at position 627 of SEQ ID NO: 1882657
uagacaauaugagagugua

SEQ ID NO: 2138129 - RNA, 19 nt, Artificial Sequence
  Description of Artificial Sequence: Synthetic oligonucleotide
  Antisense strand to SEQ ID NO: 2138128
uacacucucauauugucua

SEQ ID NO: 2138130 - RNA, 19 nt, Artificial Sequence
  Description of Artificial Sequence: Synthetic oligonucleotide
  Sense strand starting at position 637 of SEQ ID NO: 1882657
gagaguguacgccacacau

SEQ ID NO: 2138131 - RNA, 19 nt, Artificial Sequence
  Description of Artificial Sequence: Synthetic oligonucleotide
  Antisense strand to SEQ ID NO: 2138130
auguguggcguacacucuc

SEQ ID NO: 2138132 - RNA, 19 nt, Artificial Sequence
  Description of Artificial Sequence: Synthetic oligonucleotide
  Sense strand starting at position 639 of SEQ ID NO: 1882657
gaguguacgccacacauua

SEQ ID NO: 2138133 - RNA, 19 nt, Artificial Sequence
  Description of Artificial Sequence: Synthetic oligonucleotide
  Antisense strand to SEQ ID NO: 2138132
uaauguguggcguacacuc

SEQ ID NO: 2138134 - RNA, 19 nt, Artificial Sequence
  Description of Artificial Sequence: Synthetic oligonucleotide
  Sense strand starting at position 687 of SEQ ID NO: 1882657
acagacauauuguguuuaa

SEQ ID NO: 2138135 - RNA, 19 nt, Artificial Sequence
  Description of Artificial Sequence: Synthetic oligonucleotide
  Antisense strand to SEQ ID NO: 2138134
uuaaacacaauaugucugu

SEQ ID NO: 2138136 - RNA, 19 nt, Artificial Sequence
  Description of Artificial Sequence: Synthetic oligonucleotide
  Sense strand starting at position 751 of SEQ ID NO: 1882657
ccaggacuuugggaguaca

SEQ ID NO: 2138137 - RNA, 19 nt, Artificial Sequence
  Description of Artificial Sequence: Synthetic oligonucleotide
  Antisense strand to SEQ ID NO: 2138136
uguacucccaaaguccugg

SEQ ID NO: 2138138 - RNA, 19 nt, Artificial Sequence
  Description of Artificial Sequence: Synthetic oligonucleotide
  Sense strand starting at position 1025 of SEQ ID NO: 1882657
ugugaaaugccauaguaca

SEQ ID NO: 2138139 - RNA, 19 nt, Artificial Sequence
  Description of Artificial Sequence: Synthetic oligonucleotide
  Antisense strand to SEQ ID NO: 2138138
uguacuauggcauuucaca

SEQ ID NO: 2138140 - RNA, 19 nt, Artificial Sequence
  Description of Artificial Sequence: Synthetic oligonucleotide
  Sense strand starting at position 1077 of SEQ ID NO: 1882657
aggaaacuguaucaaauaa

SEQ ID NO: 2138141 - RNA, 19 nt, Artificial Sequence
  Description of Artificial Sequence: Synthetic oligonucleotide
  Antisense strand to SEQ ID NO: 2138140
uuauuugauacaguuuccu

SEQ ID NO: 2138142 - RNA, 19 nt, Artificial Sequence
  Description of Artificial Sequence: Synthetic oligonucleotide
  Sense strand starting at position 1784 of SEQ ID NO: 1882657
ucagcucucagcggucaaa

SEQ ID NO: 2138143 - RNA, 19 nt, Artificial Sequence
  Description of Artificial Sequence: Synthetic oligonucleotide
  Antisense strand to SEQ ID NO: 2138142
uuugaccgcugagagcuga

SEQ ID NO: 2138144 - RNA, 19 nt, Artificial Sequence
  Description of Artificial Sequence: Synthetic oligonucleotide
  Sense strand starting at position 2100 of SEQ ID NO: 1882657
agcguuugcggacaggauu

SEQ ID NO: 2138145 - RNA, 19 nt, Artificial Sequence
  Description of Artificial Sequence: Synthetic oligonucleotide
  Antisense strand to SEQ ID NO: 2138144
aauccuguccgcaaacgcu

SEQ ID NO: 2138146 - RNA, 19 nt, Artificial Sequence
  Description of Artificial Sequence: Synthetic oligonucleotide
  Sense strand starting at position 2101 of SEQ ID NO: 1882657
gcguuugcggacaggauua

SEQ ID NO: 2138147 - RNA, 19 nt, Artificial Sequence
  Description of Artificial Sequence: Synthetic oligonucleotide
  Antisense strand to SEQ ID NO: 2138146
uaauccuguccgcaaacgc

SEQ ID NO: 2138148 - RNA, 19 nt, Artificial Sequence
  Description of Artificial Sequence: Synthetic oligonucleotide
  Sense strand starting at position 2769 of SEQ ID NO: 1882657
aucagcugaaguugugaga

SEQ ID NO: 2138149 - RNA, 19 nt, Artificial Sequence
  Description of Artificial Sequence: Synthetic oligonucleotide
  Antisense strand to SEQ ID NO: 2138148
ucucacaacuucagcugau

SEQ ID NO: 2138150 - RNA, 19 nt, Artificial Sequence
  Description of Artificial Sequence: Synthetic oligonucleotide
  Sense strand starting at position 2773 of SEQ ID NO: 1882657
gcugaaguugugagacgug

SEQ ID NO: 2138151 - RNA, 19 nt, Artificial Sequence
  Description of Artificial Sequence: Synthetic oligonucleotide
  Antisense strand to SEQ ID NO: 2138150
cacgucucacaacuucagc

SEQ ID NO: 2138152 - RNA, 19 nt, Artificial Sequence
  Description of Artificial Sequence: Synthetic oligonucleotide
  Sense strand starting at position 2776 of SEQ ID NO: 1882657
gaaguugugagacgugauc

SEQ ID NO: 2138153 - RNA, 19 nt, Artificial Sequence
  Description of Artificial Sequence: Synthetic oligonucleotide
  Antisense strand to SEQ ID NO: 2138152
gaucacgucucacaacuuc

SEQ ID NO: 2138154 - RNA, 19 nt, Artificial Sequence
  Description of Artificial Sequence: Synthetic oligonucleotide
  Sense strand starting at position 2782 of SEQ ID NO: 1882657
gugagacgugaucggguua

SEQ ID NO: 2138155 - RNA, 19 nt, Artificial Sequence
  Description of Artificial Sequence: Synthetic oligonucleotide
  Antisense strand to SEQ ID NO: 2138154
uaacccgaucacgucucac

SEQ ID NO: 2138156 - RNA, 19 nt, Artificial Sequence
  Description of Artificial Sequence: Synthetic oligonucleotide
  Sense strand starting at position 2802 of SEQ ID NO: 1882657
ugggccuuugcauguuaaa

SEQ ID NO: 2138157 - RNA, 19 nt, Artificial Sequence
  Description of Artificial Sequence: Synthetic oligonucleotide
  Antisense strand to SEQ ID NO: 2138156
uuuaacaugcaaaggccca

SEQ ID NO: 2138158 - RNA, 19 nt, Artificial Sequence
  Description of Artificial Sequence: Synthetic oligonucleotide
  Sense strand starting at position 2865 of SEQ ID NO: 1882657
ccagaaacauugcaguuua

SEQ ID NO: 2138159 - RNA, 19 nt, Artificial Sequence
  Description of Artificial Sequence: Synthetic oligonucleotide
  Antisense strand to SEQ ID NO: 2138158
uaaacugcaauguuucugg

SEQ ID NO: 2138160 - RNA, 19 nt, Artificial Sequence
  Description of Artificial Sequence: Synthetic oligonucleotide
  Sense strand starting at position 3091 of SEQ ID NO: 1882657
agaucagucucacucuguu

SEQ ID NO: 2138161 - RNA, 19 nt, Artificial Sequence
  Description of Artificial Sequence: Synthetic oligonucleotide
  Antisense strand to SEQ ID NO: 2138160
aacagagugagacugaucu

SEQ ID NO: 2138162 - RNA, 19 nt, Artificial Sequence
  Description of Artificial Sequence: Synthetic oligonucleotide
  Sense strand starting at position 3405 of SEQ ID NO: 1882657
uccaaagagucagcuacaa

SEQ ID NO: 2138163 - RNA, 19 nt, Artificial Sequence
  Description of Artificial Sequence: Synthetic oligonucleotide
  Antisense strand to SEQ ID NO: 2138162
uuguagcugacucuuugga

SEQ ID NO: 2138164 - RNA, 19 nt, Artificial Sequence
  Description of Artificial Sequence: Synthetic oligonucleotide
  Sense strand starting at position 3562 of SEQ ID NO: 1882657
uguugccuacuuuguaaau

SEQ ID NO: 2138165 - RNA, 19 nt, Artificial Sequence
  Description of Artificial Sequence: Synthetic oligonucleotide
  Antisense strand to SEQ ID NO: 2138164
auuuacaaaguaggcaaca

SEQ ID NO: 2138166 - RNA, 19 nt, Artificial Sequence
  Description of Artificial Sequence: Synthetic oligonucleotide
  Sense strand starting at position 3563 of SEQ ID NO: 1882657
guugccuacuuuguaaaua

SEQ ID NO: 2138167 - RNA, 19 nt, Artificial Sequence
  Description of Artificial Sequence: Synthetic oligonucleotide
  Antisense strand to SEQ ID NO: 2138166
uauuuacaaaguaggcaac

SEQ ID NO: 2138168 - RNA, 19 nt, Artificial Sequence
  Description of Artificial Sequence: Synthetic oligonucleotide
  Sense strand starting at position 3575 of SEQ ID NO: 1882657
guaaauaauaaggguguua

SEQ ID NO: 2138169 - RNA, 19 nt, Artificial Sequence
  Description of Artificial Sequence: Synthetic oligonucleotide
  Antisense strand to SEQ ID NO: 2138168
uaacacccuuauuauuuac

SEQ ID NO: 2138170 - RNA, 19 nt, Artificial Sequence
  Description of Artificial Sequence: Synthetic oligonucleotide
  Sense strand starting at position 3587 of SEQ ID NO: 1882657
gguguuaaauaauccuuau

SEQ ID NO: 2138171 - RNA, 19 nt, Artificial Sequence
  Description of Artificial Sequence: Synthetic oligonucleotide
  Antisense strand to SEQ ID NO: 2138170
auaaggauuauuuaacacc

SEQ ID NO: 2138172 - RNA, 19 nt, Artificial Sequence
  Description of Artificial Sequence: Synthetic oligonucleotide
  Sense strand starting at position 3623 of SEQ ID NO: 1882657
auuaauuacuguggcaaua

SEQ ID NO: 2138173 - RNA, 19 nt, Artificial Sequence
  Description of Artificial Sequence: Synthetic oligonucleotide
  Antisense strand to SEQ ID NO: 2138172
uauugccacaguaauuaau

SEQ ID NO: 2138174 - RNA, 19 nt, Artificial Sequence
  Description of Artificial Sequence: Synthetic oligonucleotide
  Sense strand starting at position 3646 of SEQ ID NO: 1882657
caugacucucuaugaggua

SEQ ID NO: 2138175 - RNA, 19 nt, Artificial Sequence
  Description of Artificial Sequence: Synthetic oligonucleotide
  Antisense strand to SEQ ID NO: 2138174
uaccucauagagagucaug

SEQ ID NO: 2138176 - RNA, 19 nt, Artificial Sequence
  Description of Artificial Sequence: Synthetic oligonucleotide
  Sense strand starting at position 3649 of SEQ ID NO: 1882657
gacucucuaugagguacau

SEQ ID NO: 2138177 - RNA, 19 nt, Artificial Sequence
  Description of Artificial Sequence: Synthetic oligonucleotide
  Antisense strand to SEQ ID NO: 2138176
auguaccucauagagaguc

SEQ ID NO: 2138178 - RNA, 19 nt, Artificial Sequence
  Description of Artificial Sequence: Synthetic oligonucleotide
  Sense strand starting at position 3658 of SEQ ID NO: 1882657
ugagguacauugcauuauu

SEQ ID NO: 2138179 - RNA, 19 nt, Artificial Sequence
  Description of Artificial Sequence: Synthetic oligonucleotide
  Antisense strand to SEQ ID NO: 2138178
aauaaugcaauguaccuca

SEQ ID NO: 2138180 - RNA, 19 nt, Artificial Sequence
  Description of Artificial Sequence: Synthetic oligonucleotide
  Sense strand starting at position 3661 of SEQ ID NO: 1882657
gguacauugcauuauuauu

SEQ ID NO: 2138181 - RNA, 19 nt, Artificial Sequence
  Description of Artificial Sequence: Synthetic oligonucleotide
  Antisense strand to SEQ ID NO: 2138180
aauaauaaugcaauguacc

SEQ ID NO: 2138182 - RNA, 19 nt, Artificial Sequence
  Description of Artificial Sequence: Synthetic oligonucleotide
  Sense strand starting at position 3703 of SEQ ID NO: 1882657
gaggcagacuuggagagau

SEQ ID NO: 2138183 - RNA, 19 nt, Artificial Sequence
  Description of Artificial Sequence: Synthetic oligonucleotide
  Antisense strand to SEQ ID NO: 2138182
aucucuccaagucugccuc

SEQ ID NO: 2138184 - RNA, 19 nt, Artificial Sequence
  Description of Artificial Sequence: Synthetic oligonucleotide
  Sense strand starting at position 3713 of SEQ ID NO: 1882657
uggagagauuaugauuuac

SEQ ID NO: 2138185 - RNA, 19 nt, Artificial Sequence
  Description of Artificial Sequence: Synthetic oligonucleotide
  Antisense strand to SEQ ID NO: 2138184
guaaaucauaaucucucca

SEQ ID NO: 2138186 - RNA, 19 nt, Artificial Sequence
  Description of Artificial Sequence: Synthetic oligonucleotide
  Sense strand starting at position 3737 of SEQ ID NO: 1882657
gucacucaucuaggaaguu

SEQ ID NO: 2138187 - RNA, 19 nt, Artificial Sequence
  Description of Artificial Sequence: Synthetic oligonucleotide
  Antisense strand to SEQ ID NO: 2138186
aacuuccuagaugagugac

SEQ ID NO: 2138188 - RNA, 19 nt, Artificial Sequence
  Description of Artificial Sequence: Synthetic oligonucleotide
  Sense strand starting at position 3750 of SEQ ID NO: 1882657
gaaguuguccaguggguau

SEQ ID NO: 2138189 - RNA, 19 nt, Artificial Sequence
  Description of Artificial Sequence: Synthetic oligonucleotide
  Antisense strand to SEQ ID NO: 2138188
auacccacuggacaacuuc

SEQ ID NO: 2138190 - RNA, 19 nt, Artificial Sequence
  Description of Artificial Sequence: Synthetic oligonucleotide
  Sense strand starting at position 3754 of SEQ ID NO: 1882657
uuguccaguggguauugaa

SEQ ID NO: 2138191 - RNA, 19 nt, Artificial Sequence
  Description of Artificial Sequence: Synthetic oligonucleotide
  Antisense strand to SEQ ID NO: 2138190
uucaauacccacuggacaa

SEQ ID NO: 2138192 - RNA, 19 nt, Artificial Sequence
  Description of Artificial Sequence: Synthetic oligonucleotide
  Sense strand starting at position 3838 of SEQ ID NO: 1882657
ugugcuacauuugugcaau

SEQ ID NO: 2138193 - RNA, 19 nt, Artificial Sequence
  Description of Artificial Sequence: Synthetic oligonucleotide
  Antisense strand to SEQ ID NO: 2138192
auugcacaaauguagcaca

SEQ ID NO: 2138194 - RNA, 19 nt, Artificial Sequence
  Description of Artificial Sequence: Synthetic oligonucleotide
  Sense strand starting at position 3839 of SEQ ID NO: 1882657
gugcuacauuugugcaaug

SEQ ID NO: 2138195 - RNA, 19 nt, Artificial Sequence
  Description of Artificial Sequence: Synthetic oligonucleotide
  Antisense strand to SEQ ID NO: 2138194
cauugcacaaauguagcac

SEQ ID NO: 2138196 - RNA, 19 nt, Artificial Sequence
  Description of Artificial Sequence: Synthetic oligonucleotide
  Sense strand starting at position 75 of SEQ ID NO: 1882658
uacuaaagcugaguugaug

SEQ ID NO: 2138197 - RNA, 19 nt, Artificial Sequence
  Description of Artificial Sequence: Synthetic oligonucleotide
  Antisense strand to SEQ ID NO: 2138196
caucaacucagcuuuagua

SEQ ID NO: 2138198 - RNA, 19 nt, Artificial Sequence
  Description of Artificial Sequence: Synthetic oligonucleotide
  Sense strand starting at position 126 of SEQ ID NO: 1882658
gucgcaaggaaucacauua

SEQ ID NO: 2138199 - RNA, 19 nt, Artificial Sequence
  Description of Artificial Sequence: Synthetic oligonucleotide
  Antisense strand to SEQ ID NO: 2138198
uaaugugauuccuugcgac

SEQ ID NO: 2138200 - RNA, 19 nt, Artificial Sequence
  Description of Artificial Sequence: Synthetic oligonucleotide
  Sense strand starting at position 228 of SEQ ID NO: 1882658
gucugcugucaugaaagau

SEQ ID NO: 2138201 - RNA, 19 nt, Artificial Sequence
  Description of Artificial Sequence: Synthetic oligonucleotide
  Antisense strand to SEQ ID NO: 2138200
aucuuucaugacagcagac

SEQ ID NO: 2138202 - RNA, 19 nt, Artificial Sequence
  Description of Artificial Sequence: Synthetic oligonucleotide
  Sense strand starting at position 232 of SEQ ID NO: 1882658
gcugucaugaaagauaggu

SEQ ID NO: 2138203 - RNA, 19 nt, Artificial Sequence
  Description of Artificial Sequence: Synthetic oligonucleotide
  Antisense strand to SEQ ID NO: 2138202
accuaucuuucaugacagc

SEQ ID NO: 2138204 - RNA, 19 nt, Artificial Sequence
  Description of Artificial Sequence: Synthetic oligonucleotide
  Sense strand starting at position 236 of SEQ ID NO: 1882658
ucaugaaagauaggucugu

SEQ ID NO: 2138205 - RNA, 19 nt, Artificial Sequence
  Description of Artificial Sequence: Synthetic oligonucleotide
  Antisense strand to SEQ ID NO: 2138204
acagaccuaucuuucauga

SEQ ID NO: 2138206 - RNA, 19 nt, Artificial Sequence
  Description of Artificial Sequence: Synthetic oligonucleotide
  Sense strand starting at position 237 of SEQ ID NO: 1882658
caugaaagauaggucugua

SEQ ID NO: 2138207 - RNA, 19 nt, Artificial Sequence
  Description of Artificial Sequence: Synthetic oligonucleotide
  Antisense strand to SEQ ID NO: 2138206
uacagaccuaucuuucaug

SEQ ID NO: 2138208 - RNA, 19 nt, Artificial Sequence
  Description of Artificial Sequence: Synthetic oligonucleotide
  Sense strand starting at position 240 of SEQ ID NO: 1882658
gaaagauaggucuguauau

SEQ ID NO: 2138209 - RNA, 19 nt, Artificial Sequence
  Description of Artificial Sequence: Synthetic oligonucleotide
  Antisense strand to SEQ ID NO: 2138208
auauacagaccuaucuuuc

SEQ ID NO: 2138210 - RNA, 19 nt, Artificial Sequence
  Description of Artificial Sequence: Synthetic oligonucleotide
  Sense strand starting at position 241 of SEQ ID NO: 1882658
aaagauaggucuguauaug

SEQ ID NO: 2138211 - RNA, 19 nt, Artificial Sequence
  Description of Artificial Sequence: Synthetic oligonucleotide
  Antisense strand to SEQ ID NO: 2138210
cauauacagaccuaucuuu

SEQ ID NO: 2138212 - RNA, 19 nt, Artificial Sequence
  Description of Artificial Sequence: Synthetic oligonucleotide
  Sense strand starting at position 328 of SEQ ID NO: 1882658
uuagcagacuaguuucuga

SEQ ID NO: 2138213 - RNA, 19 nt, Artificial Sequence
  Description of Artificial Sequence: Synthetic oligonucleotide
  Antisense strand to SEQ ID NO: 2138212
ucagaaacuagucugcuaa

SEQ ID NO: 2138214 - RNA, 19 nt, Artificial Sequence
  Description of Artificial Sequence: Synthetic oligonucleotide
  Sense strand starting at position 411 of SEQ ID NO: 1882658
agagguaggcaauggugau

SEQ ID NO: 2138215 - RNA, 19 nt, Artificial Sequence
  Description of Artificial Sequence: Synthetic oligonucleotide
  Antisense strand to SEQ ID NO: 2138214
aucaccauugccuaccucu

SEQ ID NO: 2138216 - RNA, 19 nt, Artificial Sequence
  Description of Artificial Sequence: Synthetic oligonucleotide
  Sense strand starting at position 417 of SEQ ID NO: 1882658
aggcaauggugaucugaca

SEQ ID NO: 2138217 - RNA, 19 nt, Artificial Sequence
  Description of Artificial Sequence: Synthetic oligonucleotide
  Antisense strand to SEQ ID NO: 2138216
ugucagaucaccauugccu

SEQ ID NO: 2138218 - RNA, 19 nt, Artificial Sequence
  Description of Artificial Sequence: Synthetic oligonucleotide
  Sense strand starting at position 490 of SEQ ID NO: 1882658
guugcaauuucucuggagu

SEQ ID NO: 2138219 - RNA, 19 nt, Artificial Sequence
  Description of Artificial Sequence: Synthetic oligonucleotide
  Antisense strand to SEQ ID NO: 2138218
acuccagagaaauugcaac

SEQ ID NO: 2138220 - RNA, 19 nt, Artificial Sequence
  Description of Artificial Sequence: Synthetic oligonucleotide
  Sense strand starting at position 491 of SEQ ID NO: 1882658
uugcaauuucucuggaguc

SEQ ID NO: 2138221 - RNA, 19 nt, Artificial Sequence
  Description of Artificial Sequence: Synthetic oligonucleotide
  Antisense strand to SEQ ID NO: 2138220
gacuccagagaaauugcaa

SEQ ID NO: 2138222 - RNA, 19 nt, Artificial Sequence
  Description of Artificial Sequence: Synthetic oligonucleotide
  Sense strand starting at position 503 of SEQ ID NO: 1882658
uggagucugcucuaucaca

SEQ ID NO: 2138223 - RNA, 19 nt, Artificial Sequence
  Description of Artificial Sequence: Synthetic oligonucleotide
  Antisense strand to SEQ ID NO: 2138222
ugugauagagcagacucca

SEQ ID NO: 2138224 - RNA, 19 nt, Artificial Sequence
  Description of Artificial Sequence: Synthetic oligonucleotide
  Sense strand starting at position 642 of SEQ ID NO: 1882658
ggguacauguucuuaagac

SEQ ID NO: 2138225 - RNA, 19 nt, Artificial Sequence
  Description of Artificial Sequence: Synthetic oligonucleotide
  Antisense strand to SEQ ID NO: 2138224
gucuuaagaacauguaccc

SEQ ID NO: 2138226 - RNA, 19 nt, Artificial Sequence
  Description of Artificial Sequence: Synthetic oligonucleotide
  Sense strand starting at position 719 of SEQ ID NO: 1882658
ucaaguauuguacagaguu

SEQ ID NO: 2138227 - RNA, 19 nt, Artificial Sequence
  Description of Artificial Sequence: Synthetic oligonucleotide
  Antisense strand to SEQ ID NO: 2138226
aacucuguacaauacuuga

SEQ ID NO: 2138228 - RNA, 19 nt, Artificial Sequence
  Description of Artificial Sequence: Synthetic oligonucleotide
  Sense strand starting at position 829 of SEQ ID NO: 1882658
ugaaucucuugggugguua

SEQ ID NO: 2138229 - RNA, 19 nt, Artificial Sequence
  Description of Artificial Sequence: Synthetic oligonucleotide
  Antisense strand to SEQ ID NO: 2138228
uaaccacccaagagauuca

SEQ ID NO: 2138230 - RNA, 19 nt, Artificial Sequence
  Description of Artificial Sequence: Synthetic oligonucleotide
  Sense strand starting at position 884 of SEQ ID NO: 1882658
gcuggaggcccacaauaua

SEQ ID NO: 2138231 - RNA, 19 nt, Artificial Sequence
  Description of Artificial Sequence: Synthetic oligonucleotide
  Antisense strand to SEQ ID NO: 2138230
uauauugugggccuccagc

SEQ ID NO: 2138232 - RNA, 19 nt, Artificial Sequence
  Description of Artificial Sequence: Synthetic oligonucleotide
  Sense strand starting at position 1051 of SEQ ID NO: 1882658
gagauaaagucucucaggu

SEQ ID NO: 2138233 - RNA, 19 nt, Artificial Sequence
  Description of Artificial Sequence: Synthetic oligonucleotide
  Antisense strand to SEQ ID NO: 2138232
accugagagacuuuaucuc

SEQ ID NO: 2138234 - RNA, 19 nt, Artificial Sequence
  Description of Artificial Sequence: Synthetic oligonucleotide
  Sense strand starting at position 1176 of SEQ ID NO: 1882658
uuuggaagaucuucccuua

SEQ ID NO: 2138235 - RNA, 19 nt, Artificial Sequence
  Description of Artificial Sequence: Synthetic oligonucleotide
  Antisense strand to SEQ ID NO: 2138234
uaagggaagaucuuccaaa

SEQ ID NO: 2138236 - RNA, 19 nt, Artificial Sequence
  Description of Artificial Sequence: Synthetic oligonucleotide
  Sense strand starting at position 1179 of SEQ ID NO: 1882658
ggaagaucuucccuuaguc

SEQ ID NO: 2138237 - RNA, 19 nt, Artificial Sequence
  Description of Artificial Sequence: Synthetic oligonucleotide
  Antisense strand to SEQ ID NO: 2138236
gacuaagggaagaucuucc

SEQ ID NO: 2138238 - RNA, 19 nt, Artificial Sequence
  Description of Artificial Sequence: Synthetic oligonucleotide
  Sense strand starting at position 1184 of SEQ ID NO: 1882658
aucuucccuuagucagaua

SEQ ID NO: 2138239 - RNA, 19 nt, Artificial Sequence
  Description of Artificial Sequence: Synthetic oligonucleotide
  Antisense strand to SEQ ID NO: 2138238
uaucugacuaagggaagau

SEQ ID NO: 2138240 - RNA, 19 nt, Artificial Sequence
  Description of Artificial Sequence: Synthetic oligonucleotide
  Sense strand starting at position 2021 of SEQ ID NO: 1882658
gcgauauuuaugugcugga

SEQ ID NO: 2138241 - RNA, 19 nt, Artificial Sequence
  Description of Artificial Sequence: Synthetic oligonucleotide
  Antisense strand to SEQ ID NO: 2138240
uccagcacauaaauaucgc

SEQ ID NO: 2138242 - RNA, 19 nt, Artificial Sequence
  Description of Artificial Sequence: Synthetic oligonucleotide
  Sense strand starting at position 2162 of SEQ ID NO: 1882658
ggccuccuuugauuuccua

SEQ ID NO: 2138243 - RNA, 19 nt, Artificial Sequence
  Description of Artificial Sequence: Synthetic oligonucleotide
  Antisense strand to SEQ ID NO: 2138242
uaggaaaucaaaggaggcc

SEQ ID NO: 2138244 - RNA, 19 nt, Artificial Sequence
  Description of Artificial Sequence: Synthetic oligonucleotide
  Sense strand starting at position 2184 of SEQ ID NO: 1882658
ugugaacaaucaguaaaca

SEQ ID NO: 2138245 - RNA, 19 nt, Artificial Sequence
  Description of Artificial Sequence: Synthetic oligonucleotide
  Antisense strand to SEQ ID NO: 2138244
uguuuacugauuguucaca

SEQ ID NO: 2138246 - RNA, 19 nt, Artificial Sequence
  Description of Artificial Sequence: Synthetic oligonucleotide
  Sense strand starting at position 2232 of SEQ ID NO: 1882658
gguuauagauucucaggaa

SEQ ID NO: 2138247 - RNA, 19 nt, Artificial Sequence
  Description of Artificial Sequence: Synthetic oligonucleotide
  Antisense strand to SEQ ID NO: 2138246
uuccugagaaucuauaacc

SEQ ID NO: 2138248 - RNA, 19 nt, Artificial Sequence
  Description of Artificial Sequence: Synthetic oligonucleotide
  Sense strand starting at position 2414 of SEQ ID NO: 1882658
ccugaauaagcacauaguu

SEQ ID NO: 2138249 - RNA, 19 nt, Artificial Sequence
  Description of Artificial Sequence: Synthetic oligonucleotide
  Antisense strand to SEQ ID NO: 2138248
aacuaugugcuuauucagg

SEQ ID NO: 2138250 - RNA, 19 nt, Artificial Sequence
  Description of Artificial Sequence: Synthetic oligonucleotide
  Sense strand starting at position 2694 of SEQ ID NO: 1882658
aaaucuguaccugggaauu

SEQ ID NO: 2138251 - RNA, 19 nt, Artificial Sequence
  Description of Artificial Sequence: Synthetic oligonucleotide
  Antisense strand to SEQ ID NO: 2138250
aauucccagguacagauuu

SEQ ID NO: 2138252 - RNA, 19 nt, Artificial Sequence
  Description of Artificial Sequence: Synthetic oligonucleotide
  Sense strand starting at position 2774 of SEQ ID NO: 1882658
uuaagagacaugugacuug

SEQ ID NO: 2138253 - RNA, 19 nt, Artificial Sequence
  Description of Artificial Sequence: Synthetic oligonucleotide
  Antisense strand to SEQ ID NO: 2138252
caagucacaugucucuuaa

SEQ ID NO: 2138254 - RNA, 19 nt, Artificial Sequence
  Description of Artificial Sequence: Synthetic oligonucleotide
  Sense strand starting at position 2796 of SEQ ID NO: 1882658
cuuaaaggcugucuaauca

SEQ ID NO: 2138255 - RNA, 19 nt, Artificial Sequence
  Description of Artificial Sequence: Synthetic oligonucleotide
  Antisense strand to SEQ ID NO: 2138254
ugauuagacagccuuuaag

SEQ ID NO: 2138256 - RNA, 19 nt, Artificial Sequence
  Description of Artificial Sequence: Synthetic oligonucleotide
  Sense strand starting at position 2939 of SEQ ID NO: 1882658
cccucuguccuccacagau

SEQ ID NO: 2138257 - RNA, 19 nt, Artificial Sequence
  Description of Artificial Sequence: Synthetic oligonucleotide
  Antisense strand to SEQ ID NO: 2138256
aucuguggaggacagaggg

SEQ ID NO: 2138258 - RNA, 19 nt, Artificial Sequence
  Description of Artificial Sequence: Synthetic oligonucleotide
  Sense strand starting at position 3150 of SEQ ID NO: 1882658
ggaugaggucuugaggucu

SEQ ID NO: 2138259 - RNA, 19 nt, Artificial Sequence
  Description of Artificial Sequence: Synthetic oligonucleotide
  Antisense strand to SEQ ID NO: 2138258
agaccucaagaccucaucc

SEQ ID NO: 2138260 - RNA, 19 nt, Artificial Sequence
  Description of Artificial Sequence: Synthetic oligonucleotide
  Sense strand starting at position 3368 of SEQ ID NO: 1882658
aggugagggcuaugcauaa

SEQ ID NO: 2138261 - RNA, 19 nt, Artificial Sequence
  Description of Artificial Sequence: Synthetic oligonucleotide
  Antisense strand to SEQ ID NO: 2138260
uuaugcauagcccucaccu

SEQ ID NO: 2138262 - RNA, 19 nt, Artificial Sequence
  Description of Artificial Sequence: Synthetic oligonucleotide
  Sense strand starting at position 3372 of SEQ ID NO: 1882658
gagggcuaugcauaaccua

SEQ ID NO: 2138263 - RNA, 19 nt, Artificial Sequence
  Description of Artificial Sequence: Synthetic oligonucleotide
  Antisense strand to SEQ ID NO: 2138262
uagguuaugcauagcccuc

SEQ ID NO: 2138264 - RNA, 19 nt, Artificial Sequence
  Description of Artificial Sequence: Synthetic oligonucleotide
  Sense strand starting at position 3379 of SEQ ID NO: 1882658
augcauaaccuagguccua

SEQ ID NO: 2138265 - RNA, 19 nt, Artificial Sequence
  Description of Artificial Sequence: Synthetic oligonucleotide
  Antisense strand to SEQ ID NO: 2138264
uaggaccuagguuaugcau

SEQ ID NO: 2138266 - RNA, 19 nt, Artificial Sequence
  Description of Artificial Sequence: Synthetic oligonucleotide
  Sense strand starting at position 3497 of SEQ ID NO: 1882658
aagguaaaggcucgacaga

SEQ ID NO: 2138267 - RNA, 19 nt, Artificial Sequence
  Description of Artificial Sequence: Synthetic oligonucleotide
  Antisense strand to SEQ ID NO: 2138266
ucugucgagccuuuaccuu

SEQ ID NO: 2138268 - RNA, 19 nt, Artificial Sequence
  Description of Artificial Sequence: Synthetic oligonucleotide
  Sense strand starting at position 3549 of SEQ ID NO: 1882658
cgaagcaugcaaugaggau

SEQ ID NO: 2138269 - RNA, 19 nt, Artificial Sequence
  Description of Artificial Sequence: Synthetic oligonucleotide
  Antisense strand to SEQ ID NO: 2138268
auccucauugcaugcuucg

SEQ ID NO: 2138270 - RNA, 19 nt, Artificial Sequence
  Description of Artificial Sequence: Synthetic oligonucleotide
  Sense strand starting at position 3681 of SEQ ID NO: 1882658
agaguuaacccaugucuca

SEQ ID NO: 2138271 - RNA, 19 nt, Artificial Sequence
  Description of Artificial Sequence: Synthetic oligonucleotide
  Antisense strand to SEQ ID NO: 2138270
ugagacauggguuaacucu

SEQ ID NO: 2138272 - RNA, 19 nt, Artificial Sequence
  Description of Artificial Sequence: Synthetic oligonucleotide
  Sense strand starting at position 3730 of SEQ ID NO: 1882658
uggagagucccauaucuuc

SEQ ID NO: 2138273 - RNA, 19 nt, Artificial Sequence
  Description of Artificial Sequence: Synthetic oligonucleotide
  Antisense strand to SEQ ID NO: 2138272
gaagauaugggacucucca

SEQ ID NO: 2138274 - RNA, 19 nt, Artificial Sequence
  Description of Artificial Sequence: Synthetic oligonucleotide
  Sense strand starting at position 3798 of SEQ ID NO: 1882658
ugucuuugucuggaacauu

SEQ ID NO: 2138275 - RNA, 19 nt, Artificial Sequence
  Description of Artificial Sequence: Synthetic oligonucleotide
  Antisense strand to SEQ ID NO: 2138274
aauguuccagacaaagaca

SEQ ID NO: 2138276 - RNA, 19 nt, Artificial Sequence
  Description of Artificial Sequence: Synthetic oligonucleotide
  Sense strand starting at position 495 of SEQ ID NO: 1882659
agguauacauuugugcauu

SEQ ID NO: 2138277 - RNA, 19 nt, Artificial Sequence
  Description of Artificial Sequence: Synthetic oligonucleotide
  Antisense strand to SEQ ID NO: 2138276
aaugcacaaauguauaccu

SEQ ID NO: 2138278 - RNA, 19 nt, Artificial Sequence
  Description of Artificial Sequence: Synthetic oligonucleotide
  Sense strand starting at position 931 of SEQ ID NO: 1882659
ccuccuguacuguaacaua

SEQ ID NO: 2138279 - RNA, 19 nt, Artificial Sequence
  Description of Artificial Sequence: Synthetic oligonucleotide
  Antisense strand to SEQ ID NO: 2138278
uauguuacaguacaggagg

SEQ ID NO: 2138280 - RNA, 19 nt, Artificial Sequence
  Description of Artificial Sequence: Synthetic oligonucleotide
  Sense strand starting at position 1011 of SEQ ID NO: 1882659
guagauucccauuagguga

SEQ ID NO: 2138281 - RNA, 19 nt, Artificial Sequence
  Description of Artificial Sequence: Synthetic oligonucleotide
  Antisense strand to SEQ ID NO: 2138280
ucaccuaaugggaaucuac

SEQ ID NO: 2138282 - RNA, 19 nt, Artificial Sequence
  Description of Artificial Sequence: Synthetic oligonucleotide
  Sense strand starting at position 1100 of SEQ ID NO: 1882659
cucgaaacuuccuccaggu

SEQ ID NO: 2138283 - RNA, 19 nt, Artificial Sequence
  Description of Artificial Sequence: Synthetic oligonucleotide
  Antisense strand to SEQ ID NO: 2138282
accuggaggaaguuucgag

SEQ ID NO: 2138284 - RNA, 19 nt, Artificial Sequence
  Description of Artificial Sequence: Synthetic oligonucleotide
  Sense strand starting at position 1118 of SEQ ID NO: 1882659
ucuccuuugcucuagaggu

SEQ ID NO: 2138285 - RNA, 19 nt, Artificial Sequence
  Description of Artificial Sequence: Synthetic oligonucleotide
  Antisense strand to SEQ ID NO: 2138284
accucuagagcaaaggaga

SEQ ID NO: 2138286 - RNA, 19 nt, Artificial Sequence
  Description of Artificial Sequence: Synthetic oligonucleotide
  Sense strand starting at position 1120 of SEQ ID NO: 1882659
uccuuugcucuagagguua

SEQ ID NO: 2138287 - RNA, 19 nt, Artificial Sequence
  Description of Artificial Sequence: Synthetic oligonucleotide
  Antisense strand to SEQ ID NO: 2138286
uaaccucuagagcaaagga

SEQ ID NO: 2138288 - RNA, 19 nt, Artificial Sequence
  Description of Artificial Sequence: Synthetic oligonucleotide
  Sense strand starting at position 1125 of SEQ ID NO: 1882659
ugcucuagagguuaaucau

SEQ ID NO: 2138289 - RNA, 19 nt, Artificial Sequence
  Description of Artificial Sequence: Synthetic oligonucleotide
  Antisense strand to SEQ ID NO: 2138288
augauuaaccucuagagca

SEQ ID NO: 2138290 - RNA, 19 nt, Artificial Sequence
  Description of Artificial Sequence: Synthetic oligonucleotide
  Sense strand starting at position 1131 of SEQ ID NO: 1882659
agagguuaaucauugcaag

SEQ ID NO: 2138291 - RNA, 19 nt, Artificial Sequence
  Description of Artificial Sequence: Synthetic oligonucleotide
  Antisense strand to SEQ ID NO: 2138290
cuugcaaugauuaaccucu

SEQ ID NO: 2138292 - RNA, 19 nt, Artificial Sequence
  Description of Artificial Sequence: Synthetic oligonucleotide
  Sense strand starting at position 1132 of SEQ ID NO: 1882659
gagguuaaucauugcaaga

SEQ ID NO: 2138293 - RNA, 19 nt, Artificial Sequence
  Description of Artificial Sequence: Synthetic oligonucleotide
  Antisense strand to SEQ ID NO: 2138292
ucuugcaaugauuaaccuc

SEQ ID NO: 2138294 - RNA, 19 nt, Artificial Sequence
  Description of Artificial Sequence: Synthetic oligonucleotide
  Sense strand starting at position 1244 of SEQ ID NO: 1882659
gacagcuucccaugaaguc

SEQ ID NO: 2138295 - RNA, 19 nt, Artificial Sequence
  Description of Artificial Sequence: Synthetic oligonucleotide
  Antisense strand to SEQ ID NO: 2138294
gacuucaugggaagcuguc

SEQ ID NO: 2138296 - RNA, 19 nt, Artificial Sequence
  Description of Artificial Sequence: Synthetic oligonucleotide
  Sense strand starting at position 1288 of SEQ ID NO: 1882659
aaugauauccuggguugga

SEQ ID NO: 2138297 - RNA, 19 nt, Artificial Sequence
  Description of Artificial Sequence: Synthetic oligonucleotide
  Antisense strand to SEQ ID NO: 2138296
uccaacccaggauaucauu

SEQ ID NO: 2138298 - RNA, 19 nt, Artificial Sequence
  Description of Artificial Sequence: Synthetic oligonucleotide
  Sense strand starting at position 1289 of SEQ ID NO: 1882659
augauauccuggguuggaa

SEQ ID NO: 2138299 - RNA, 19 nt, Artificial Sequence
  Description of Artificial Sequence: Synthetic oligonucleotide
  Antisense strand to SEQ ID NO: 2138298
uuccaacccaggauaucau

SEQ ID NO: 2138300 - RNA, 19 nt, Artificial Sequence
  Description of Artificial Sequence: Synthetic oligonucleotide
  Sense strand starting at position 1456 of SEQ ID NO: 1882659
ggaucacacuguccaucau

SEQ ID NO: 2138301 - RNA, 19 nt, Artificial Sequence
  Description of Artificial Sequence: Synthetic oligonucleotide
  Antisense strand to SEQ ID NO: 2138300
augauggacagugugaucc

SEQ ID NO: 2138302 - RNA, 19 nt, Artificial Sequence
  Description of Artificial Sequence: Synthetic oligonucleotide
  Sense strand starting at position 1515 of SEQ ID NO: 1882659
auuagucuucgucagaucu

SEQ ID NO: 2138303 - RNA, 19 nt, Artificial Sequence
  Description of Artificial Sequence: Synthetic oligonucleotide
  Antisense strand to SEQ ID NO: 2138302
agaucugacgaagacuaau

SEQ ID NO: 2138304 - RNA, 19 nt, Artificial Sequence
  Description of Artificial Sequence: Synthetic oligonucleotide
  Sense strand starting at position 1597 of SEQ ID NO: 1882659
gaagguggaugggagaaau

SEQ ID NO: 2138305 - RNA, 19 nt, Artificial Sequence
  Description of Artificial Sequence: Synthetic oligonucleotide
  Antisense strand to SEQ ID NO: 2138304
auuucucccauccaccuuc

SEQ ID NO: 2138306 - RNA, 19 nt, Artificial Sequence
  Description of Artificial Sequence: Synthetic oligonucleotide
  Sense strand starting at position 1664 of SEQ ID NO: 1882659
gcguuuguagcguccaaca

SEQ ID NO: 2138307 - RNA, 19 nt, Artificial Sequence
  Description of Artificial Sequence: Synthetic oligonucleotide
  Antisense strand to SEQ ID NO: 2138306
uguuggacgcuacaaacgc

SEQ ID NO: 2138308 - RNA, 19 nt, Artificial Sequence
  Description of Artificial Sequence: Synthetic oligonucleotide
  Sense strand starting at position 1978 of SEQ ID NO: 1882659
agccaagcugcugaaagau

SEQ ID NO: 2138309 - RNA, 19 nt, Artificial Sequence
  Description of Artificial Sequence: Synthetic oligonucleotide
  Antisense strand to SEQ ID NO: 2138308
aucuuucagcagcuuggcu

SEQ ID NO: 2138310 - RNA, 19 nt, Artificial Sequence
  Description of Artificial Sequence: Synthetic oligonucleotide
  Sense strand starting at position 2166 of SEQ ID NO: 1882659
gagccauuggcaugaaauc

SEQ ID NO: 2138311 - RNA, 19 nt, Artificial Sequence
  Description of Artificial Sequence: Synthetic oligonucleotide
  Antisense strand to SEQ ID NO: 2138310
gauuucaugccaauggcuc

SEQ ID NO: 2138312 - RNA, 19 nt, Artificial Sequence
  Description of Artificial Sequence: Synthetic oligonucleotide
  Sense strand starting at position 2167 of SEQ ID NO: 1882659
agccauuggcaugaaaucu

SEQ ID NO: 2138313 - RNA, 19 nt, Artificial Sequence
  Description of Artificial Sequence: Synthetic oligonucleotide
  Antisense strand to SEQ ID NO: 2138312
agauuucaugccaauggcu

SEQ ID NO: 2138314 - RNA, 19 nt, Artificial Sequence
  Description of Artificial Sequence: Synthetic oligonucleotide
  Sense strand starting at position 2304 of SEQ ID NO: 1882659
accugugcccucuagauga

SEQ ID NO: 2138315 - RNA, 19 nt, Artificial Sequence
  Description of Artificial Sequence: Synthetic oligonucleotide
  Antisense strand to SEQ ID NO: 2138314
ucaucuagagggcacaggu

SEQ ID NO: 2138316 - RNA, 19 nt, Artificial Sequence
  Description of Artificial Sequence: Synthetic oligonucleotide
  Sense strand starting at position 2469 of SEQ ID NO: 1882659
ccaccauuguaaguuucua

SEQ ID NO: 2138317 - RNA, 19 nt, Artificial Sequence
  Description of Artificial Sequence: Synthetic oligonucleotide
  Antisense strand to SEQ ID NO: 2138316
uagaaacuuacaauggugg

SEQ ID NO: 2138318 - RNA, 19 nt, Artificial Sequence
  Description of Artificial Sequence: Synthetic oligonucleotide
  Sense strand starting at position 2584 of SEQ ID NO: 1882659
guggguaaccaggaauguu

SEQ ID NO: 2138319 - RNA, 19 nt, Artificial Sequence
  Description of Artificial Sequence: Synthetic oligonucleotide
  Antisense strand to SEQ ID NO: 2138318
aacauuccugguuacccac

SEQ ID NO: 2138320 - RNA, 19 nt, Artificial Sequence
  Description of Artificial Sequence: Synthetic oligonucleotide
  Sense strand starting at position 2592 of SEQ ID NO: 1882659
ccaggaauguugguggagu

SEQ ID NO: 2138321 - RNA, 19 nt, Artificial Sequence
  Description of Artificial Sequence: Synthetic oligonucleotide
  Antisense strand to SEQ ID NO: 2138320
acuccaccaacauuccugg

SEQ ID NO: 2138322 - RNA, 19 nt, Artificial Sequence
  Description of Artificial Sequence: Synthetic oligonucleotide
  Sense strand starting at position 2595 of SEQ ID NO: 1882659
ggaauguugguggaguugu

SEQ ID NO: 2138323 - RNA, 19 nt, Artificial Sequence
  Description of Artificial Sequence: Synthetic oligonucleotide
  Antisense strand to SEQ ID NO: 2138322
acaacuccaccaacauucc

SEQ ID NO: 2138324 - RNA, 19 nt, Artificial Sequence
  Description of Artificial Sequence: Synthetic oligonucleotide
  Sense strand starting at position 2669 of SEQ ID NO: 1882659
gacuaaugguugcuuggga

SEQ ID NO: 2138325 - RNA, 19 nt, Artificial Sequence
  Description of Artificial Sequence: Synthetic oligonucleotide
  Antisense strand to SEQ ID NO: 2138324
ucccaagcaaccauuaguc

SEQ ID NO: 2138326 - RNA, 19 nt, Artificial Sequence
  Description of Artificial Sequence: Synthetic oligonucleotide
  Sense strand starting at position 2815 of SEQ ID NO: 1882659
gagaguuguacugaaucug

SEQ ID NO: 2138327 - RNA, 19 nt, Artificial Sequence
  Description of Artificial Sequence: Synthetic oligonucleotide
  Antisense strand to SEQ ID NO: 2138326
cagauucaguacaacucuc

SEQ ID NO: 2138328 - RNA, 19 nt, Artificial Sequence
  Description of Artificial Sequence: Synthetic oligonucleotide
  Sense strand starting at position 2838 of SEQ ID NO: 1882659
ggaagauacuguguaucag

SEQ ID NO: 2138329 - RNA, 19 nt, Artificial Sequence
  Description of Artificial Sequence: Synthetic oligonucleotide
  Antisense strand to SEQ ID NO: 2138328
cugauacacaguaucuucc

SEQ ID NO: 2138330 - RNA, 19 nt, Artificial Sequence
  Description of Artificial Sequence: Synthetic oligonucleotide
  Sense strand starting at position 2938 of SEQ ID NO: 1882659
ccaguacuuggguacaaca

SEQ ID NO: 2138331 - RNA, 19 nt, Artificial Sequence
  Description of Artificial Sequence: Synthetic oligonucleotide
  Antisense strand to SEQ ID NO: 2138330
uguuguacccaaguacugg

SEQ ID NO: 2138332 - RNA, 19 nt, Artificial Sequence
  Description of Artificial Sequence: Synthetic oligonucleotide
  Sense strand starting at position 2969 of SEQ ID NO: 1882659
cagacauuagcucaguugu

SEQ ID NO: 2138333 - RNA, 19 nt, Artificial Sequence
  Description of Artificial Sequence: Synthetic oligonucleotide
  Antisense strand to SEQ ID NO: 2138332
acaacugagcuaaugucug

SEQ ID NO: 2138334 - RNA, 19 nt, Artificial Sequence
  Description of Artificial Sequence: Synthetic oligonucleotide
  Sense strand starting at position 3015 of SEQ ID NO: 1882659
gagaacuugcaauaucugu

SEQ ID NO: 2138335 - RNA, 19 nt, Artificial Sequence
  Description of Artificial Sequence: Synthetic oligonucleotide
  Antisense strand to SEQ ID NO: 2138334
acagauauugcaaguucuc

SEQ ID NO: 2138336 - RNA, 19 nt, Artificial Sequence
  Description of Artificial Sequence: Synthetic oligonucleotide
  Sense strand starting at position 3138 of SEQ ID NO: 1882659
cauuguguauaauuggagu

SEQ ID NO: 2138337 - RNA, 19 nt, Artificial Sequence
  Description of Artificial Sequence: Synthetic oligonucleotide
  Antisense strand to SEQ ID NO: 2138336
acuccaauuauacacaaug

SEQ ID NO: 2138338 - RNA, 19 nt, Artificial Sequence
  Description of Artificial Sequence: Synthetic oligonucleotide
  Sense strand starting at position 3144 of SEQ ID NO: 1882659
guauaauuggaguacuuuc

SEQ ID NO: 2138339 - RNA, 19 nt, Artificial Sequence
  Description of Artificial Sequence: Synthetic oligonucleotide
  Antisense strand to SEQ ID NO: 2138338
gaaaguacuccaauuauac

SEQ ID NO: 2138340 - RNA, 19 nt, Artificial Sequence
  Description of Artificial Sequence: Synthetic oligonucleotide
  Sense strand starting at position 3152 of SEQ ID NO: 1882659
ggaguacuuucuuuaucca

SEQ ID NO: 2138341 - RNA, 19 nt, Artificial Sequence
  Description of Artificial Sequence: Synthetic oligonucleotide
  Antisense strand to SEQ ID NO: 2138340
uggauaaagaaaguacucc

SEQ ID NO: 2138342 - RNA, 19 nt, Artificial Sequence
  Description of Artificial Sequence: Synthetic oligonucleotide
  Sense strand starting at position 3226 of SEQ ID NO: 1882659
ggcuauugugaauauugga

SEQ ID NO: 2138343 - RNA, 19 nt, Artificial Sequence
  Description of Artificial Sequence: Synthetic oligonucleotide
  Antisense strand to SEQ ID NO: 2138342
uccaauauucacaauagcc

SEQ ID NO: 2138344 - RNA, 19 nt, Artificial Sequence
  Description of Artificial Sequence: Synthetic oligonucleotide
  Sense strand starting at position 3234 of SEQ ID NO: 1882659
ugaauauuggagugauguu

SEQ ID NO: 2138345 - RNA, 19 nt, Artificial Sequence
  Description of Artificial Sequence: Synthetic oligonucleotide
  Antisense strand to SEQ ID NO: 2138344
aacaucacuccaauauuca

SEQ ID NO: 2138346 - RNA, 19 nt, Artificial Sequence
  Description of Artificial Sequence: Synthetic oligonucleotide
  Sense strand starting at position 3272 of SEQ ID NO: 1882659
uccuuucuuccagguauau

SEQ ID NO: 2138347 - RNA, 19 nt, Artificial Sequence
  Description of Artificial Sequence: Synthetic oligonucleotide
  Antisense strand to SEQ ID NO: 2138346
auauaccuggaagaaagga

SEQ ID NO: 2138348 - RNA, 19 nt, Artificial Sequence
  Description of Artificial Sequence: Synthetic oligonucleotide
  Sense strand starting at position 3649 of SEQ ID NO: 1882659
guuguuugagcgcuucaug

SEQ ID NO: 2138349 - RNA, 19 nt, Artificial Sequence
  Description of Artificial Sequence: Synthetic oligonucleotide
  Antisense strand to SEQ ID NO: 2138348
caugaagcgcucaaacaac

SEQ ID NO: 2138350 - RNA, 19 nt, Artificial Sequence
  Description of Artificial Sequence: Synthetic oligonucleotide
  Sense strand starting at position 3650 of SEQ ID NO: 1882659
uuguuugagcgcuucaugu

SEQ ID NO: 2138351 - RNA, 19 nt, Artificial Sequence
  Description of Artificial Sequence: Synthetic oligonucleotide
  Antisense strand to SEQ ID NO: 2138350
acaugaagcgcucaaacaa

SEQ ID NO: 2138352 - RNA, 19 nt, Artificial Sequence
  Description of Artificial Sequence: Synthetic oligonucleotide
  Sense strand starting at position 3665 of SEQ ID NO: 1882659
auguauucuggcuauuaau

SEQ ID NO: 2138353 - RNA, 19 nt, Artificial Sequence
  Description of Artificial Sequence: Synthetic oligonucleotide
  Antisense strand to SEQ ID NO: 2138352
auuaauagccagaauacau

SEQ ID NO: 2138354 - RNA, 19 nt, Artificial Sequence
  Description of Artificial Sequence: Synthetic oligonucleotide
  Sense strand starting at position 3689 of SEQ ID NO: 1882659
gucagagugugacuuugaa

SEQ ID NO: 2138355 - RNA, 19 nt, Artificial Sequence
  Description of Artificial Sequence: Synthetic oligonucleotide
  Antisense strand to SEQ ID NO: 2138354
uucaaagucacacucugac

SEQ ID NO: 2138356 - RNA, 19 nt, Artificial Sequence
  Description of Artificial Sequence: Synthetic oligonucleotide
  Sense strand starting at position 528 of SEQ ID NO: 1882660
ggaugaguguuagcucucu

SEQ ID NO: 2138357 - RNA, 19 nt, Artificial Sequence
  Description of Artificial Sequence: Synthetic oligonucleotide
  Antisense strand to SEQ ID NO: 2138356
agagagcuaacacucaucc

SEQ ID NO: 2138358 - RNA, 19 nt, Artificial Sequence
  Description of Artificial Sequence: Synthetic oligonucleotide
  Sense strand starting at position 534 of SEQ ID NO: 1882660
guguuagcucucuagguag

SEQ ID NO: 2138359 - RNA, 19 nt, Artificial Sequence
  Description of Artificial Sequence: Synthetic oligonucleotide
  Antisense strand to SEQ ID NO: 2138358
cuaccuagagagcuaacac

SEQ ID NO: 2138360 - RNA, 19 nt, Artificial Sequence
  Description of Artificial Sequence: Synthetic oligonucleotide
  Sense strand starting at position 551 of SEQ ID NO: 1882660
agagguguuccgcaggcaa

SEQ ID NO: 2138361 - RNA, 19 nt, Artificial Sequence
  Description of Artificial Sequence: Synthetic oligonucleotide
  Antisense strand to SEQ ID NO: 2138360
uugccugcggaacaccucu

SEQ ID NO: 2138362 - RNA, 19 nt, Artificial Sequence
  Description of Artificial Sequence: Synthetic oligonucleotide
  Sense strand starting at position 569 of SEQ ID NO: 1882660
acugguguugcgggacaaa

SEQ ID NO: 2138363 - RNA, 19 nt, Artificial Sequence
  Description of Artificial Sequence: Synthetic oligonucleotide
  Antisense strand to SEQ ID NO: 2138362
uuugucccgcaacaccagu

SEQ ID NO: 2138364 - RNA, 19 nt, Artificial Sequence
  Description of Artificial Sequence: Synthetic oligonucleotide
  Sense strand starting at position 572 of SEQ ID NO: 1882660
gguguugcgggacaaauca

SEQ ID NO: 2138365 - RNA, 19 nt, Artificial Sequence
  Description of Artificial Sequence: Synthetic oligonucleotide
  Antisense strand to SEQ ID NO: 2138364
ugauuugucccgcaacacc

SEQ ID NO: 2138366 - RNA, 19 nt, Artificial Sequence
  Description of Artificial Sequence: Synthetic oligonucleotide
  Sense strand starting at position 621 of SEQ ID NO: 1882660
gagccuuuauuauuaaggu

SEQ ID NO: 2138367 - RNA, 19 nt, Artificial Sequence
  Description of Artificial Sequence: Synthetic oligonucleotide
  Antisense strand to SEQ ID NO: 2138366
accuuaauaauaaaggcuc

SEQ ID NO: 2138368 - RNA, 19 nt, Artificial Sequence
  Description of Artificial Sequence: Synthetic oligonucleotide
  Sense strand starting at position 737 of SEQ ID NO: 1882660
caugaaguguacuugcaga

SEQ ID NO: 2138369 - RNA, 19 nt, Artificial Sequence
  Description of Artificial Sequence: Synthetic oligonucleotide
  Antisense strand to SEQ ID NO: 2138368
ucugcaaguacacuucaug

SEQ ID NO: 2138370 - RNA, 19 nt, Artificial Sequence
  Description of Artificial Sequence: Synthetic oligonucleotide
  Sense strand starting at position 802 of SEQ ID NO: 1882660
ugucuuacguccuugggaa

SEQ ID NO: 2138371 - RNA, 19 nt, Artificial Sequence
  Description of Artificial Sequence: Synthetic oligonucleotide
  Antisense strand to SEQ ID NO: 2138370
uucccaaggacguaagaca

SEQ ID NO: 2138372 - RNA, 19 nt, Artificial Sequence
  Description of Artificial Sequence: Synthetic oligonucleotide
  Sense strand starting at position 803 of SEQ ID NO: 1882660
gucuuacguccuugggaau

SEQ ID NO: 2138373 - RNA, 19 nt, Artificial Sequence
  Description of Artificial Sequence: Synthetic oligonucleotide
  Antisense strand to SEQ ID NO: 2138372
auucccaaggacguaagac

SEQ ID NO: 2138374 - RNA, 19 nt, Artificial Sequence
  Description of Artificial Sequence: Synthetic oligonucleotide
  Sense strand starting at position 804 of SEQ ID NO: 1882660
ucuuacguccuugggaaua

SEQ ID NO: 2138375 - RNA, 19 nt, Artificial Sequence
  Description of Artificial Sequence: Synthetic oligonucleotide
  Antisense strand to SEQ ID NO: 2138374
uauucccaaggacguaaga

SEQ ID NO: 2138376 - RNA, 19 nt, Artificial Sequence
  Description of Artificial Sequence: Synthetic oligonucleotide
  Sense strand starting at position 897 of SEQ ID NO: 1882660
ugccucaaggaaugugaaa

SEQ ID NO: 2138377 - RNA, 19 nt, Artificial Sequence
  Description of Artificial Sequence: Synthetic oligonucleotide
  Antisense strand to SEQ ID NO: 2138376
uuucacauuccuugaggca

SEQ ID NO: 2138378 - RNA, 19 nt, Artificial Sequence
  Description of Artificial Sequence: Synthetic oligonucleotide
  Sense strand starting at position 1037 of SEQ ID NO: 1882660
acuucuugauuaguauacu

SEQ ID NO: 2138379 - RNA, 19 nt, Artificial Sequence
  Description of Artificial Sequence: Synthetic oligonucleotide
  Antisense strand to SEQ ID NO: 2138378
aguauacuaaucaagaagu

SEQ ID NO: 2138380 - RNA, 19 nt, Artificial Sequence
  Description of Artificial Sequence: Synthetic oligonucleotide
  Sense strand starting at position 1211 of SEQ ID NO: 1882660
ggugaucuggaaggaguua

SEQ ID NO: 2138381 - RNA, 19 nt, Artificial Sequence
  Description of Artificial Sequence: Synthetic oligonucleotide
  Antisense strand to SEQ ID NO: 2138380
uaacuccuuccagaucacc

SEQ ID NO: 2138382 - RNA, 19 nt, Artificial Sequence
  Description of Artificial Sequence: Synthetic oligonucleotide
  Sense strand starting at position 1225 of SEQ ID NO: 1882660
aguuaaauuugguagucau

SEQ ID NO: 2138383 - RNA, 19 nt, Artificial Sequence
  Description of Artificial Sequence: Synthetic oligonucleotide
  Antisense strand to SEQ ID NO: 2138382
augacuaccaaauuuaacu

SEQ ID NO: 2138384 - RNA, 19 nt, Artificial Sequence
  Description of Artificial Sequence: Synthetic oligonucleotide
  Sense strand starting at position 1261 of SEQ ID NO: 1882660
agccauaggagcgaagauu

SEQ ID NO: 2138385 - RNA, 19 nt, Artificial Sequence
  Description of Artificial Sequence: Synthetic oligonucleotide
  Antisense strand to SEQ ID NO: 2138384
aaucuucgcuccuauggcu

SEQ ID NO: 2138386 - RNA, 19 nt, Artificial Sequence
  Description of Artificial Sequence: Synthetic oligonucleotide
  Sense strand starting at position 1323 of SEQ ID NO: 1882660
ccgcuaaaccuacagacua

SEQ ID NO: 2138387 - RNA, 19 nt, Artificial Sequence
  Description of Artificial Sequence: Synthetic oligonucleotide
  Antisense strand to SEQ ID NO: 2138386
uagucuguagguuuagcgg

SEQ ID NO: 2138388 - RNA, 19 nt, Artificial Sequence
  Description of Artificial Sequence: Synthetic oligonucleotide
  Sense strand starting at position 2182 of SEQ ID NO: 1882660
guguuuccgacggagugaa

SEQ ID NO: 2138389 - RNA, 19 nt, Artificial Sequence
  Description of Artificial Sequence: Synthetic oligonucleotide
  Antisense strand to SEQ ID NO: 2138388
uucacuccgucggaaacac

SEQ ID NO: 2138390 - RNA, 19 nt, Artificial Sequence
  Description of Artificial Sequence: Synthetic oligonucleotide
  Sense strand starting at position 2650 of SEQ ID NO: 1882660
cuguguaucugauccuaga

SEQ ID NO: 2138391 - RNA, 19 nt, Artificial Sequence
  Description of Artificial Sequence: Synthetic oligonucleotide
  Antisense strand to SEQ ID NO: 2138390
ucuaggaucagauacacag

SEQ ID NO: 2138392 - RNA, 19 nt, Artificial Sequence
  Description of Artificial Sequence: Synthetic oligonucleotide
  Sense strand starting at position 2691 of SEQ ID NO: 1882660
gugguuguagcggucugua

SEQ ID NO: 2138393 - RNA, 19 nt, Artificial Sequence
  Description of Artificial Sequence: Synthetic oligonucleotide
  Antisense strand to SEQ ID NO: 2138392
uacagaccgcuacaaccac

SEQ ID NO: 2138394 - RNA, 19 nt, Artificial Sequence
  Description of Artificial Sequence: Synthetic oligonucleotide
  Sense strand starting at position 2887 of SEQ ID NO: 1882660
cccuaauggugguuuauac

SEQ ID NO: 2138395 - RNA, 19 nt, Artificial Sequence
  Description of Artificial Sequence: Synthetic oligonucleotide
  Antisense strand to SEQ ID NO: 2138394
guauaaaccaccauuaggg

SEQ ID NO: 2138396 - RNA, 19 nt, Artificial Sequence
  Description of Artificial Sequence: Synthetic oligonucleotide
  Sense strand starting at position 2894 of SEQ ID NO: 1882660
ggugguuuauacccauauu

SEQ ID NO: 2138397 - RNA, 19 nt, Artificial Sequence
  Description of Artificial Sequence: Synthetic oligonucleotide
  Antisense strand to SEQ ID NO: 2138396
aauauggguauaaaccacc

SEQ ID NO: 2138398 - RNA, 19 nt, Artificial Sequence
  Description of Artificial Sequence: Synthetic oligonucleotide
  Sense strand starting at position 2918 of SEQ ID NO: 1882660
ggauguguagaguguggua

SEQ ID NO: 2138399 - RNA, 19 nt, Artificial Sequence
  Description of Artificial Sequence: Synthetic oligonucleotide
  Antisense strand to SEQ ID NO: 2138398
uaccacacucuacacaucc

SEQ ID NO: 2138400 - RNA, 19 nt, Artificial Sequence
  Description of Artificial Sequence: Synthetic oligonucleotide
  Sense strand starting at position 2920 of SEQ ID NO: 1882660
auguguagagugugguaau

SEQ ID NO: 2138401 - RNA, 19 nt, Artificial Sequence
  Description of Artificial Sequence: Synthetic oligonucleotide
  Antisense strand to SEQ ID NO: 2138400
auuaccacacucuacacau

SEQ ID NO: 2138402 - RNA, 19 nt, Artificial Sequence
  Description of Artificial Sequence: Synthetic oligonucleotide
  Sense strand starting at position 3417 of SEQ ID NO: 1882660
cugacaaugcaauguacaa

SEQ ID NO: 2138403 - RNA, 19 nt, Artificial Sequence
  Description of Artificial Sequence: Synthetic oligonucleotide
  Antisense strand to SEQ ID NO: 2138402
uuguacauugcauugucag

SEQ ID NO: 2138404 - RNA, 19 nt, Artificial Sequence
  Description of Artificial Sequence: Synthetic oligonucleotide
  Sense strand starting at position 3549 of SEQ ID NO: 1882660
auuugucucugggaagaca

SEQ ID NO: 2138405 - RNA, 19 nt, Artificial Sequence
  Description of Artificial Sequence: Synthetic oligonucleotide
  Antisense strand to SEQ ID NO: 2138404
ugucuucccagagacaaau

SEQ ID NO: 2138406 - RNA, 19 nt, Artificial Sequence
  Description of Artificial Sequence: Synthetic oligonucleotide
  Sense strand starting at position 3579 of SEQ ID NO: 1882660
aguguuuaaagauaguucu

SEQ ID NO: 2138407 - RNA, 19 nt, Artificial Sequence
  Description of Artificial Sequence: Synthetic oligonucleotide
  Antisense strand to SEQ ID NO: 2138406
agaacuaucuuuaaacacu

SEQ ID NO: 2138408 - RNA, 19 nt, Artificial Sequence
  Description of Artificial Sequence: Synthetic oligonucleotide
  Sense strand starting at position 3593 of SEQ ID NO: 1882660
guucuauuagcugaggugu

SEQ ID NO: 2138409 - RNA, 19 nt, Artificial Sequence
  Description of Artificial Sequence: Synthetic oligonucleotide
  Antisense strand to SEQ ID NO: 2138408
acaccucagcuaauagaac

SEQ ID NO: 2138410 - RNA, 19 nt, Artificial Sequence
  Description of Artificial Sequence: Synthetic oligonucleotide
  Sense strand starting at position 3604 of SEQ ID NO: 1882660
ugagguguacugugagguu

SEQ ID NO: 2138411 - RNA, 19 nt, Artificial Sequence
  Description of Artificial Sequence: Synthetic oligonucleotide
  Antisense strand to SEQ ID NO: 2138410
aaccucacaguacaccuca

SEQ ID NO: 2138412 - RNA, 19 nt, Artificial Sequence
  Description of Artificial Sequence: Synthetic oligonucleotide
  Sense strand starting at position 3709 of SEQ ID NO: 1882660
uguuguaaucugcaggucu

SEQ ID NO: 2138413 - RNA, 19 nt, Artificial Sequence
  Description of Artificial Sequence: Synthetic oligonucleotide
  Antisense strand to SEQ ID NO: 2138412
agaccugcagauuacaaca

SEQ ID NO: 2138414 - RNA, 19 nt, Artificial Sequence
  Description of Artificial Sequence: Synthetic oligonucleotide
  Sense strand starting at position 3756 of SEQ ID NO: 1882660
ugaagaaugcuagaguucu

SEQ ID NO: 2138415 - RNA, 19 nt, Artificial Sequence
  Description of Artificial Sequence: Synthetic oligonucleotide
  Antisense strand to SEQ ID NO: 2138414
agaacucuagcauucuuca

SEQ ID NO: 2138416 - RNA, 19 nt, Artificial Sequence
  Description of Artificial Sequence: Synthetic oligonucleotide
  Sense strand starting at position 3762 of SEQ ID NO: 1882660
augcuagaguucuugcuag

SEQ ID NO: 2138417 - RNA, 19 nt, Artificial Sequence
  Description of Artificial Sequence: Synthetic oligonucleotide
  Antisense strand to SEQ ID NO: 2138416
cuagcaagaacucuagcau

SEQ ID NO: 2138418 - RNA, 19 nt, Artificial Sequence
  Description of Artificial Sequence: Synthetic oligonucleotide
  Sense strand starting at position 3768 of SEQ ID NO: 1882660
gaguucuugcuagagcuga

SEQ ID NO: 2138419 - RNA, 19 nt, Artificial Sequence
  Description of Artificial Sequence: Synthetic oligonucleotide
  Antisense strand to SEQ ID NO: 2138418
ucagcucuagcaagaacuc

SEQ ID NO: 2138420 - RNA, 19 nt, Artificial Sequence
  Description of Artificial Sequence: Synthetic oligonucleotide
  Sense strand starting at position 3823 of SEQ ID NO: 1882660
guucacuugcagugagaga

SEQ ID NO: 2138421 - RNA, 19 nt, Artificial Sequence
  Description of Artificial Sequence: Synthetic oligonucleotide
  Antisense strand to SEQ ID NO: 2138420
ucucucacugcaagugaac

SEQ ID NO: 2138422 - RNA, 19 nt, Artificial Sequence
  Description of Artificial Sequence: Synthetic oligonucleotide
  Sense strand starting at position 3834 of SEQ ID NO: 1882660
gugagagaagcaugagauu

SEQ ID NO: 2138423 - RNA, 19 nt, Artificial Sequence
  Description of Artificial Sequence: Synthetic oligonucleotide
  Antisense strand to SEQ ID NO: 2138422
aaucucaugcuucucucac

SEQ ID NO: 2138424 - RNA, 19 nt, Artificial Sequence
  Description of Artificial Sequence: Synthetic oligonucleotide
  Sense strand starting at position 3837 of SEQ ID NO: 1882660
agagaagcaugagauugau

SEQ ID NO: 2138425 - RNA, 19 nt, Artificial Sequence
  Description of Artificial Sequence: Synthetic oligonucleotide
  Antisense strand to SEQ ID NO: 2138424
aucaaucucaugcuucucu

SEQ ID NO: 2138426 - RNA, 19 nt, Artificial Sequence
  Description of Artificial Sequence: Synthetic oligonucleotide
  Sense strand starting at position 3840 of SEQ ID NO: 1882660
gaagcaugagauugauugu

SEQ ID NO: 2138427 - RNA, 19 nt, Artificial Sequence
  Description of Artificial Sequence: Synthetic oligonucleotide
  Antisense strand to SEQ ID NO: 2138426
acaaucaaucucaugcuuc

SEQ ID NO: 2138428 - RNA, 19 nt, Artificial Sequence
  Description of Artificial Sequence: Synthetic oligonucleotide
  Sense strand starting at position 3846 of SEQ ID NO: 1882660
ugagauugauuguuuacug

SEQ ID NO: 2138429 - RNA, 19 nt, Artificial Sequence
  Description of Artificial Sequence: Synthetic oligonucleotide
  Antisense strand to SEQ ID NO: 2138428
caguaaacaaucaaucuca

SEQ ID NO: 2138430 - RNA, 19 nt, Artificial Sequence
  Description of Artificial Sequence: Synthetic oligonucleotide
  Sense strand starting at position 3847 of SEQ ID NO: 1882660
gagauugauuguuuacuga

SEQ ID NO: 2138431 - RNA, 19 nt, Artificial Sequence
  Description of Artificial Sequence: Synthetic oligonucleotide
  Antisense strand to SEQ ID NO: 2138430
ucaguaaacaaucaaucuc

SEQ ID NO: 2138432 - RNA, 19 nt, Artificial Sequence
  Description of Artificial Sequence: Synthetic oligonucleotide
  Sense strand starting at position 3977 of SEQ ID NO: 1882660
aguaguaguaaguagugaa

SEQ ID NO: 2138433 - RNA, 19 nt, Artificial Sequence
  Description of Artificial Sequence: Synthetic oligonucleotide
  Antisense strand to SEQ ID NO: 2138432
uucacuacuuacuacuacu

SEQ ID NO: 2138434 - RNA, 19 nt, Artificial Sequence
  Description of Artificial Sequence: Synthetic oligonucleotide
  Sense strand starting at position 3981 of SEQ ID NO: 1882660
guaguaaguagugaagaaa

SEQ ID NO: 2138435 - RNA, 19 nt, Artificial Sequence
  Description of Artificial Sequence: Synthetic oligonucleotide
  Antisense strand to SEQ ID NO: 2138434
uuucuucacuacuuacuac

SEQ ID NO: 2138436 - RNA, 19 nt, Artificial Sequence
  Description of Artificial Sequence: Synthetic oligonucleotide
  Sense strand starting at position 55 of SEQ ID NO: 1882661
uuggguaccucuuccauga

SEQ ID NO: 2138437 - RNA, 19 nt, Artificial Sequence
  Description of Artificial Sequence: Synthetic oligonucleotide
  Antisense strand to SEQ ID NO: 2138436
ucauggaagagguacccaa

SEQ ID NO: 2138438 - RNA, 19 nt, Artificial Sequence
  Description of Artificial Sequence: Synthetic oligonucleotide
  Sense strand starting at position 145 of SEQ ID NO: 1882661
ccacaugauuaugugauua

SEQ ID NO: 2138439 - RNA, 19 nt, Artificial Sequence
  Description of Artificial Sequence: Synthetic oligonucleotide
  Antisense strand to SEQ ID NO: 2138438
uaaucacauaaucaugugg

SEQ ID NO: 2138440 - RNA, 19 nt, Artificial Sequence
  Description of Artificial Sequence: Synthetic oligonucleotide
  Sense strand starting at position 149 of SEQ ID NO: 1882661
augauuaugugauuaugga

SEQ ID NO: 2138441 - RNA, 19 nt, Artificial Sequence
  Description of Artificial Sequence: Synthetic oligonucleotide
  Antisense strand to SEQ ID NO: 2138440
uccauaaucacauaaucau

SEQ ID NO: 2138442 - RNA, 19 nt, Artificial Sequence
  Description of Artificial Sequence: Synthetic oligonucleotide
  Sense strand starting at position 552 of SEQ ID NO: 1882661
ucuacaugugaauauaugu

SEQ ID NO: 2138443 - RNA, 19 nt, Artificial Sequence
  Description of Artificial Sequence: Synthetic oligonucleotide
  Antisense strand to SEQ ID NO: 2138442
acauauauucacauguaga

SEQ ID NO: 2138444 - RNA, 19 nt, Artificial Sequence
  Description of Artificial Sequence: Synthetic oligonucleotide
  Sense strand starting at position 589 of SEQ ID NO: 1882661
ugauacuacgcauauggau

SEQ ID NO: 2138445 - RNA, 19 nt, Artificial Sequence
  Description of Artificial Sequence: Synthetic oligonucleotide
  Antisense strand to SEQ ID NO: 2138444
auccauaugcguaguauca

SEQ ID NO: 2138446 - RNA, 19 nt, Artificial Sequence
  Description of Artificial Sequence: Synthetic oligonucleotide
  Sense strand starting at position 638 of SEQ ID NO: 1882661
uugugagcauuucccacua

SEQ ID NO: 2138447 - RNA, 19 nt, Artificial Sequence
  Description of Artificial Sequence: Synthetic oligonucleotide
  Antisense strand to SEQ ID NO: 2138446
uagugggaaaugcucacaa

SEQ ID NO: 2138448 - RNA, 19 nt, Artificial Sequence
  Description of Artificial Sequence: Synthetic oligonucleotide
  Sense strand starting at position 737 of SEQ ID NO: 1882661
uaagauauuuguguugcau

SEQ ID NO: 2138449 - RNA, 19 nt, Artificial Sequence
  Description of Artificial Sequence: Synthetic oligonucleotide
  Antisense strand to SEQ ID NO: 2138448
augcaacacaaauaucuua

SEQ ID NO: 2138450 - RNA, 19 nt, Artificial Sequence
  Description of Artificial Sequence: Synthetic oligonucleotide
  Sense strand starting at position 808 of SEQ ID NO: 1882661
gugcaacaaucuuccaaga

SEQ ID NO: 2138451 - RNA, 19 nt, Artificial Sequence
  Description of Artificial Sequence: Synthetic oligonucleotide
  Antisense strand to SEQ ID NO: 2138450
ucuuggaagauuguugcac

SEQ ID NO: 2138452 - RNA, 19 nt, Artificial Sequence
  Description of Artificial Sequence: Synthetic oligonucleotide
  Sense strand starting at position 974 of SEQ ID NO: 1882661
agcagaugauuccucuaau

SEQ ID NO: 2138453 - RNA, 19 nt, Artificial Sequence
  Description of Artificial Sequence: Synthetic oligonucleotide
  Antisense strand to SEQ ID NO: 2138452
auuagaggaaucaucugcu

SEQ ID NO: 2138454 - RNA, 19 nt, Artificial Sequence
  Description of Artificial Sequence: Synthetic oligonucleotide
  Sense strand starting at position 975 of SEQ ID NO: 1882661
gcagaugauuccucuaauu

SEQ ID NO: 2138455 - RNA, 19 nt, Artificial Sequence
  Description of Artificial Sequence: Synthetic oligonucleotide
  Antisense strand to SEQ ID NO: 2138454
aauuagaggaaucaucugc

SEQ ID NO: 2138456 - RNA, 19 nt, Artificial Sequence
  Description of Artificial Sequence: Synthetic oligonucleotide
  Sense strand starting at position 1032 of SEQ ID NO: 1882661
auaagcugugucuauuaua

SEQ ID NO: 2138457 - RNA, 19 nt, Artificial Sequence
  Description of Artificial Sequence: Synthetic oligonucleotide
  Antisense strand to SEQ ID NO: 2138456
uauaauagacacagcuuau

SEQ ID NO: 2138458 - RNA, 19 nt, Artificial Sequence
  Description of Artificial Sequence: Synthetic oligonucleotide
  Sense strand starting at position 1110 of SEQ ID NO: 1882661
uugugcuuuguguuauugu

SEQ ID NO: 2138459 - RNA, 19 nt, Artificial Sequence
  Description of Artificial Sequence: Synthetic oligonucleotide
  Antisense strand to SEQ ID NO: 2138458
acaauaacacaaagcacaa

SEQ ID NO: 2138460 - RNA, 19 nt, Artificial Sequence
  Description of Artificial Sequence: Synthetic oligonucleotide
  Sense strand starting at position 1199 of SEQ ID NO: 1882661
gucccagaaaguuaguaga

SEQ ID NO: 2138461 - RNA, 19 nt, Artificial Sequence
  Description of Artificial Sequence: Synthetic oligonucleotide
  Antisense strand to SEQ ID NO: 2138460
ucuacuaacuuucugggac

SEQ ID NO: 2138462 - RNA, 19 nt, Artificial Sequence
  Description of Artificial Sequence: Synthetic oligonucleotide
  Sense strand starting at position 1270 of SEQ ID NO: 1882661
cagaguuaugacuguuaca

SEQ ID NO: 2138463 - RNA, 19 nt, Artificial Sequence
  Description of Artificial Sequence: Synthetic oligonucleotide
  Antisense strand to SEQ ID NO: 2138462
uguaacagucauaacucug

SEQ ID NO: 2138464 - RNA, 19 nt, Artificial Sequence
  Description of Artificial Sequence: Synthetic oligonucleotide
  Sense strand starting at position 1312 of SEQ ID NO: 1882661
uuggguugguguccagaga

SEQ ID NO: 2138465 - RNA, 19 nt, Artificial Sequence
  Description of Artificial Sequence: Synthetic oligonucleotide
  Antisense strand to SEQ ID NO: 2138464
ucucuggacaccaacccaa

SEQ ID NO: 2138466 - RNA, 19 nt, Artificial Sequence
  Description of Artificial Sequence: Synthetic oligonucleotide
  Sense strand starting at position 1313 of SEQ ID NO: 1882661
uggguugguguccagagau

SEQ ID NO: 2138467 - RNA, 19 nt, Artificial Sequence
  Description of Artificial Sequence: Synthetic oligonucleotide
  Antisense strand to SEQ ID NO: 2138466
aucucuggacaccaaccca

SEQ ID NO: 2138468 - RNA, 19 nt, Artificial Sequence
  Description of Artificial Sequence: Synthetic oligonucleotide
  Sense strand starting at position 1323 of SEQ ID NO: 1882661
uccagagaugugcaugcua

SEQ ID NO: 2138469 - RNA, 19 nt, Artificial Sequence
  Description of Artificial Sequence: Synthetic oligonucleotide
  Antisense strand to SEQ ID NO: 2138468
uagcaugcacaucucugga

SEQ ID NO: 2138470 - RNA, 19 nt, Artificial Sequence
  Description of Artificial Sequence: Synthetic oligonucleotide
  Sense strand starting at position 1414 of SEQ ID NO: 1882661
guaggaauauuccuggcau

SEQ ID NO: 2138471 - RNA, 19 nt, Artificial Sequence
  Description of Artificial Sequence: Synthetic oligonucleotide
  Antisense strand to SEQ ID NO: 2138470
augccaggaauauuccuac

SEQ ID NO: 2138472 - RNA, 19 nt, Artificial Sequence
  Description of Artificial Sequence: Synthetic oligonucleotide
  Sense strand starting at position 1416 of SEQ ID NO: 1882661
aggaauauuccuggcaucu

SEQ ID NO: 2138473 - RNA, 19 nt, Artificial Sequence
  Description of Artificial Sequence: Synthetic oligonucleotide
  Antisense strand to SEQ ID NO: 2138472
agaugccaggaauauuccu

SEQ ID NO: 2138474 - RNA, 19 nt, Artificial Sequence
  Description of Artificial Sequence: Synthetic oligonucleotide
  Sense strand starting at position 1503 of SEQ ID NO: 1882661
agaaaugggaucuguguuu

SEQ ID NO: 2138475 - RNA, 19 nt, Artificial Sequence
  Description of Artificial Sequence: Synthetic oligonucleotide
  Antisense strand to SEQ ID NO: 2138474
aaacacagaucccauuucu

SEQ ID NO: 2138476 - RNA, 19 nt, Artificial Sequence
  Description of Artificial Sequence: Synthetic oligonucleotide
  Sense strand starting at position 1555 of SEQ ID NO: 1882661
gcugauugucuguaauugg

SEQ ID NO: 2138477 - RNA, 19 nt, Artificial Sequence
  Description of Artificial Sequence: Synthetic oligonucleotide
  Antisense strand to SEQ ID NO: 2138476
ccaauuacagacaaucagc

SEQ ID NO: 2138478 - RNA, 19 nt, Artificial Sequence
  Description of Artificial Sequence: Synthetic oligonucleotide
  Sense strand starting at position 1635 of SEQ ID NO: 1882661
cccucagagcuguaaucac

SEQ ID NO: 2138479 - RNA, 19 nt, Artificial Sequence
  Description of Artificial Sequence: Synthetic oligonucleotide
  Antisense strand to SEQ ID NO: 2138478
gugauuacagcucugaggg

SEQ ID NO: 2138480 - RNA, 19 nt, Artificial Sequence
  Description of Artificial Sequence: Synthetic oligonucleotide
  Sense strand starting at position 1671 of SEQ ID NO: 1882661
cagugaugcgugucugagu

SEQ ID NO: 2138481 - RNA, 19 nt, Artificial Sequence
  Description of Artificial Sequence: Synthetic oligonucleotide
  Antisense strand to SEQ ID NO: 2138480
acucagacacgcaucacug

SEQ ID NO: 2138482 - RNA, 19 nt, Artificial Sequence
  Description of Artificial Sequence: Synthetic oligonucleotide
  Sense strand starting at position 1682 of SEQ ID NO: 1882661
gucugagucaaauggcaaa

SEQ ID NO: 2138483 - RNA, 19 nt, Artificial Sequence
  Description of Artificial Sequence: Synthetic oligonucleotide
  Antisense strand to SEQ ID NO: 2138482
uuugccauuugacucagac

SEQ ID NO: 2138484 - RNA, 19 nt, Artificial Sequence
  Description of Artificial Sequence: Synthetic oligonucleotide
  Sense strand starting at position 1705 of SEQ ID NO: 1882661
uguugugaggcuggacaaa

SEQ ID NO: 2138485 - RNA, 19 nt, Artificial Sequence
  Description of Artificial Sequence: Synthetic oligonucleotide
  Antisense strand to SEQ ID NO: 2138484
uuuguccagccucacaaca

SEQ ID NO: 2138486 - RNA, 19 nt, Artificial Sequence
  Description of Artificial Sequence: Synthetic oligonucleotide
  Sense strand starting at position 1717 of SEQ ID NO: 1882661
ggacaaauguggucuggga

SEQ ID NO: 2138487 - RNA, 19 nt, Artificial Sequence
  Description of Artificial Sequence: Synthetic oligonucleotide
  Antisense strand to SEQ ID NO: 2138486
ucccagaccacauuugucc

SEQ ID NO: 2138488 - RNA, 19 nt, Artificial Sequence
  Description of Artificial Sequence: Synthetic oligonucleotide
  Sense strand starting at position 1719 of SEQ ID NO: 1882661
acaaauguggucugggaaa

SEQ ID NO: 2138489 - RNA, 19 nt, Artificial Sequence
  Description of Artificial Sequence: Synthetic oligonucleotide
  Antisense strand to SEQ ID NO: 2138488
uuucccagaccacauuugu

SEQ ID NO: 2138490 - RNA, 19 nt, Artificial Sequence
  Description of Artificial Sequence: Synthetic oligonucleotide
  Sense strand starting at position 2074 of SEQ ID NO: 1882661
agaugugcuacugacgauu

SEQ ID NO: 2138491 - RNA, 19 nt, Artificial Sequence
  Description of Artificial Sequence: Synthetic oligonucleotide
  Antisense strand to SEQ ID NO: 2138490
aaucgucaguagcacaucu

SEQ ID NO: 2138492 - RNA, 19 nt, Artificial Sequence
  Description of Artificial Sequence: Synthetic oligonucleotide
  Sense strand starting at position 2189 of SEQ ID NO: 1882661
aagccauaaugaguuguca

SEQ ID NO: 2138493 - RNA, 19 nt, Artificial Sequence
  Description of Artificial Sequence: Synthetic oligonucleotide
  Antisense strand to SEQ ID NO: 2138492
ugacaacucauuauggcuu

SEQ ID NO: 2138494 - RNA, 19 nt, Artificial Sequence
  Description of Artificial Sequence: Synthetic oligonucleotide
  Sense strand starting at position 2345 of SEQ ID NO: 1882661
agggaauugugccuuccac

SEQ ID NO: 2138495 - RNA, 19 nt, Artificial Sequence
  Description of Artificial Sequence: Synthetic oligonucleotide
  Antisense strand to SEQ ID NO: 2138494
guggaaggcacaauucccu

SEQ ID NO: 2138496 - RNA, 19 nt, Artificial Sequence
  Description of Artificial Sequence: Synthetic oligonucleotide
  Sense strand starting at position 2479 of SEQ ID NO: 1882661
ggagaaguguaaguaaggu

SEQ ID NO: 2138497 - RNA, 19 nt, Artificial Sequence
  Description of Artificial Sequence: Synthetic oligonucleotide
  Antisense strand to SEQ ID NO: 2138496
accuuacuuacacuucucc

SEQ ID NO: 2138498 - RNA, 19 nt, Artificial Sequence
  Description of Artificial Sequence: Synthetic oligonucleotide
  Sense strand starting at position 2485 of SEQ ID NO: 1882661
guguaaguaagguacaaug

SEQ ID NO: 2138499 - RNA, 19 nt, Artificial Sequence
  Description of Artificial Sequence: Synthetic oligonucleotide
  Antisense strand to SEQ ID NO: 2138498
cauuguaccuuacuuacac

SEQ ID NO: 2138500 - RNA, 19 nt, Artificial Sequence
  Description of Artificial Sequence: Synthetic oligonucleotide
  Sense strand starting at position 2679 of SEQ ID NO: 1882661
gcugaauuaagagacgcau

SEQ ID NO: 2138501 - RNA, 19 nt, Artificial Sequence
  Description of Artificial Sequence: Synthetic oligonucleotide
  Antisense strand to SEQ ID NO: 2138500
augcgucucuuaauucagc

SEQ ID NO: 2138502 - RNA, 19 nt, Artificial Sequence
  Description of Artificial Sequence: Synthetic oligonucleotide
  Sense strand starting at position 2685 of SEQ ID NO: 1882661
uuaagagacgcauauaucu

SEQ ID NO: 2138503 - RNA, 19 nt, Artificial Sequence
  Description of Artificial Sequence: Synthetic oligonucleotide
  Antisense strand to SEQ ID NO: 2138502
agauauaugcgucucuuaa

SEQ ID NO: 2138504 - RNA, 19 nt, Artificial Sequence
  Description of Artificial Sequence: Synthetic oligonucleotide
  Sense strand starting at position 2720 of SEQ ID NO: 1882661
ccauuagugcuacagaaac

SEQ ID NO: 2138505 - RNA, 19 nt, Artificial Sequence
  Description of Artificial Sequence: Synthetic oligonucleotide
  Antisense strand to SEQ ID NO: 2138504
guuucuguagcacuaaugg

SEQ ID NO: 2138506 - RNA, 19 nt, Artificial Sequence
  Description of Artificial Sequence: Synthetic oligonucleotide
  Sense strand starting at position 2782 of SEQ ID NO: 1882661
ggauguggguuggcucaaa

SEQ ID NO: 2138507 - RNA, 19 nt, Artificial Sequence
  Description of Artificial Sequence: Synthetic oligonucleotide
  Antisense strand to SEQ ID NO: 2138506
uuugagccaacccacaucc

SEQ ID NO: 2138508 - RNA, 19 nt, Artificial Sequence
  Description of Artificial Sequence: Synthetic oligonucleotide
  Sense strand starting at position 3028 of SEQ ID NO: 1882661
uucuacgacuuacuuaaga

SEQ ID NO: 2138509 - RNA, 19 nt, Artificial Sequence
  Description of Artificial Sequence: Synthetic oligonucleotide
  Antisense strand to SEQ ID NO: 2138508
ucuuaaguaagucguagaa

SEQ ID NO: 2138510 - RNA, 19 nt, Artificial Sequence
  Description of Artificial Sequence: Synthetic oligonucleotide
  Sense strand starting at position 3250 of SEQ ID NO: 1882661
cccugaauccauuaguuug

SEQ ID NO: 2138511 - RNA, 19 nt, Artificial Sequence
  Description of Artificial Sequence: Synthetic oligonucleotide
  Antisense strand to SEQ ID NO: 2138510
caaacuaauggauucaggg

SEQ ID NO: 2138512 - RNA, 19 nt, Artificial Sequence
  Description of Artificial Sequence: Synthetic oligonucleotide
  Sense strand starting at position 3298 of SEQ ID NO: 1882661
cuggguggaucgaagaaga

SEQ ID NO: 2138513 - RNA, 19 nt, Artificial Sequence
  Description of Artificial Sequence: Synthetic oligonucleotide
  Antisense strand to SEQ ID NO: 2138512
ucuucuucgauccacccag

SEQ ID NO: 2138514 - RNA, 19 nt, Artificial Sequence
  Description of Artificial Sequence: Synthetic oligonucleotide
  Sense strand starting at position 3752 of SEQ ID NO: 1882661
cugggauuauaggcaaauu

SEQ ID NO: 2138515 - RNA, 19 nt, Artificial Sequence
  Description of Artificial Sequence: Synthetic oligonucleotide
  Antisense strand to SEQ ID NO: 2138514
aauuugccuauaaucccag

SEQ ID NO: 2138516 - RNA, 19 nt, Artificial Sequence
  Description of Artificial Sequence: Synthetic oligonucleotide
  Sense strand starting at position 22 of SEQ ID NO: 1882662
auuucugccuuugugaagu

SEQ ID NO: 2138517 - RNA, 19 nt, Artificial Sequence
  Description of Artificial Sequence: Synthetic oligonucleotide
  Antisense strand to SEQ ID NO: 2138516
acuucacaaaggcagaaau

SEQ ID NO: 2138518 - RNA, 19 nt, Artificial Sequence
  Description of Artificial Sequence: Synthetic oligonucleotide
  Sense strand starting at position 106 of SEQ ID NO: 1882662
uguccauccuguguuuagu

SEQ ID NO: 2138519 - RNA, 19 nt, Artificial Sequence
  Description of Artificial Sequence: Synthetic oligonucleotide
  Antisense strand to SEQ ID NO: 2138518
acuaaacacaggauggaca

SEQ ID NO: 2138520 - RNA, 19 nt, Artificial Sequence
  Description of Artificial Sequence: Synthetic oligonucleotide
  Sense strand starting at position 164 of SEQ ID NO: 1882662
cuaauaaaguuucgaacuu

SEQ ID NO: 2138521 - RNA, 19 nt, Artificial Sequence
  Description of Artificial Sequence: Synthetic oligonucleotide
  Antisense strand to SEQ ID NO: 2138520
aaguucgaaacuuuauuag

SEQ ID NO: 2138522 - RNA, 19 nt, Artificial Sequence
  Description of Artificial Sequence: Synthetic oligonucleotide
  Sense strand starting at position 584 of SEQ ID NO: 1882662
acaguugauuucugugauc

SEQ ID NO: 2138523 - RNA, 19 nt, Artificial Sequence
  Description of Artificial Sequence: Synthetic oligonucleotide
  Antisense strand to SEQ ID NO: 2138522
gaucacagaaaucaacugu

SEQ ID NO: 2138524 - RNA, 19 nt, Artificial Sequence
  Description of Artificial Sequence: Synthetic oligonucleotide
  Sense strand starting at position 587 of SEQ ID NO: 1882662
guugauuucugugaucauu

SEQ ID NO: 2138525 - RNA, 19 nt, Artificial Sequence
  Description of Artificial Sequence: Synthetic oligonucleotide
  Antisense strand to SEQ ID NO: 2138524
aaugaucacagaaaucaac

SEQ ID NO: 2138526 - RNA, 19 nt, Artificial Sequence
  Description of Artificial Sequence: Synthetic oligonucleotide
  Sense strand starting at position 648 of SEQ ID NO: 1882662
uuaauuaaucucuguguac

SEQ ID NO: 2138527 - RNA, 19 nt, Artificial Sequence
  Description of Artificial Sequence: Synthetic oligonucleotide
  Antisense strand to SEQ ID NO: 2138526
guacacagagauuaauuaa

SEQ ID NO: 2138528 - RNA, 19 nt, Artificial Sequence
  Description of Artificial Sequence: Synthetic oligonucleotide
  Sense strand starting at position 651 of SEQ ID NO: 1882662
auuaaucucuguguacaca

SEQ ID NO: 2138529 - RNA, 19 nt, Artificial Sequence
  Description of Artificial Sequence: Synthetic oligonucleotide
  Antisense strand to SEQ ID NO: 2138528
uguguacacagagauuaau

SEQ ID NO: 2138530 - RNA, 19 nt, Artificial Sequence
  Description of Artificial Sequence: Synthetic oligonucleotide
  Sense strand starting at position 668 of SEQ ID NO: 1882662
cagugaacucuuugguauu

SEQ ID NO: 2138531 - RNA, 19 nt, Artificial Sequence
  Description of Artificial Sequence: Synthetic oligonucleotide
  Antisense strand to SEQ ID NO: 2138530
aauaccaaagaguucacug

SEQ ID NO: 2138532 - RNA, 19 nt, Artificial Sequence
  Description of Artificial Sequence: Synthetic oligonucleotide
  Sense strand starting at position 669 of SEQ ID NO: 1882662
agugaacucuuugguauua

SEQ ID NO: 2138533 - RNA, 19 nt, Artificial Sequence
  Description of Artificial Sequence: Synthetic oligonucleotide
  Antisense strand to SEQ ID NO: 2138532
uaauaccaaagaguucacu

SEQ ID NO: 2138534 - RNA, 19 nt, Artificial Sequence
  Description of Artificial Sequence: Synthetic oligonucleotide
  Sense strand starting at position 670 of SEQ ID NO: 1882662
gugaacucuuugguauuaa

SEQ ID NO: 2138535 - RNA, 19 nt, Artificial Sequence
  Description of Artificial Sequence: Synthetic oligonucleotide
  Antisense strand to SEQ ID NO: 2138534
uuaauaccaaagaguucac

SEQ ID NO: 2138536 - RNA, 19 nt, Artificial Sequence
  Description of Artificial Sequence: Synthetic oligonucleotide
  Sense strand starting at position 671 of SEQ ID NO: 1882662
ugaacucuuugguauuaaa

SEQ ID NO: 2138537 - RNA, 19 nt, Artificial Sequence
  Description of Artificial Sequence: Synthetic oligonucleotide
  Antisense strand to SEQ ID NO: 2138536
uuuaauaccaaagaguuca

SEQ ID NO: 2138538 - RNA, 19 nt, Artificial Sequence
  Description of Artificial Sequence: Synthetic oligonucleotide
  Sense strand starting at position 693 of SEQ ID NO: 1882662
acauguauaugucuugaaa

SEQ ID NO: 2138539 - RNA, 19 nt, Artificial Sequence
  Description of Artificial Sequence: Synthetic oligonucleotide
  Antisense strand to SEQ ID NO: 2138538
uuucaagacauauacaugu

SEQ ID NO: 2138540 - RNA, 19 nt, Artificial Sequence
  Description of Artificial Sequence: Synthetic oligonucleotide
  Sense strand starting at position 860 of SEQ ID NO: 1882662
ugaaauuuaugugauguac

SEQ ID NO: 2138541 - RNA, 19 nt, Artificial Sequence
  Description of Artificial Sequence: Synthetic oligonucleotide
  Antisense strand to SEQ ID NO: 2138540
guacaucacauaaauuuca

SEQ ID NO: 2138542 - RNA, 19 nt, Artificial Sequence
  Description of Artificial Sequence: Synthetic oligonucleotide
  Sense strand starting at position 882 of SEQ ID NO: 1882662
uauuaauacuuaggaggua

SEQ ID NO: 2138543 - RNA, 19 nt, Artificial Sequence
  Description of Artificial Sequence: Synthetic oligonucleotide
  Antisense strand to SEQ ID NO: 2138542
uaccuccuaaguauuaaua

SEQ ID NO: 2138544 - RNA, 19 nt, Artificial Sequence
  Description of Artificial Sequence: Synthetic oligonucleotide
  Sense strand starting at position 2036 of SEQ ID NO: 1882662
gggcuugguucuguccuau

SEQ ID NO: 2138545 - RNA, 19 nt, Artificial Sequence
  Description of Artificial Sequence: Synthetic oligonucleotide
  Antisense strand to SEQ ID NO: 2138544
auaggacagaaccaagccc

SEQ ID NO: 2138546 - RNA, 19 nt, Artificial Sequence
  Description of Artificial Sequence: Synthetic oligonucleotide
  Sense strand starting at position 2206 of SEQ ID NO: 1882662
auaaaugcuuaacuggaau

SEQ ID NO: 2138547 - RNA, 19 nt, Artificial Sequence
  Description of Artificial Sequence: Synthetic oligonucleotide
  Antisense strand to SEQ ID NO: 2138546
auuccaguuaagcauuuau

SEQ ID NO: 2138548 - RNA, 19 nt, Artificial Sequence
  Description of Artificial Sequence: Synthetic oligonucleotide
  Sense strand starting at position 2423 of SEQ ID NO: 1882662
ggaggaaucugaugccuug

SEQ ID NO: 2138549 - RNA, 19 nt, Artificial Sequence
  Description of Artificial Sequence: Synthetic oligonucleotide
  Antisense strand to SEQ ID NO: 2138548
caaggcaucagauuccucc

SEQ ID NO: 2138550 - RNA, 19 nt, Artificial Sequence
  Description of Artificial Sequence: Synthetic oligonucleotide
  Sense strand starting at position 2533 of SEQ ID NO: 1882662
uugcccacucuucgugaaa

SEQ ID NO: 2138551 - RNA, 19 nt, Artificial Sequence
  Description of Artificial Sequence: Synthetic oligonucleotide
  Antisense strand to SEQ ID NO: 2138550
uuucacgaagagugggcaa

SEQ ID NO: 2138552 - RNA, 19 nt, Artificial Sequence
  Description of Artificial Sequence: Synthetic oligonucleotide
  Sense strand starting at position 2608 of SEQ ID NO: 1882662
acuggaaacuuccagaauc

SEQ ID NO: 2138553 - RNA, 19 nt, Artificial Sequence
  Description of Artificial Sequence: Synthetic oligonucleotide
  Antisense strand to SEQ ID NO: 2138552
gauucuggaaguuuccagu

SEQ ID NO: 2138554 - RNA, 19 nt, Artificial Sequence
  Description of Artificial Sequence: Synthetic oligonucleotide
  Sense strand starting at position 2642 of SEQ ID NO: 1882662
ccuuuagagucacccuaag

SEQ ID NO: 2138555 - RNA, 19 nt, Artificial Sequence
  Description of Artificial Sequence: Synthetic oligonucleotide
  Antisense strand to SEQ ID NO: 2138554
cuuagggugacucuaaagg

SEQ ID NO: 2138556 - RNA, 19 nt, Artificial Sequence
  Description of Artificial Sequence: Synthetic oligonucleotide
  Sense strand starting at position 2657 of SEQ ID NO: 1882662
uaaggucugucucaccaga

SEQ ID NO: 2138557 - RNA, 19 nt, Artificial Sequence
  Description of Artificial Sequence: Synthetic oligonucleotide
  Antisense strand to SEQ ID NO: 2138556
ucuggugagacagaccuua

SEQ ID NO: 2138558 - RNA, 19 nt, Artificial Sequence
  Description of Artificial Sequence: Synthetic oligonucleotide
  Sense strand starting at position 2673 of SEQ ID NO: 1882662
agagcaucuucuguccaca

SEQ ID NO: 2138559 - RNA, 19 nt, Artificial Sequence
  Description of Artificial Sequence: Synthetic oligonucleotide
  Antisense strand to SEQ ID NO: 2138558
uguggacagaagaugcucu

SEQ ID NO: 2138560 - RNA, 19 nt, Artificial Sequence
  Description of Artificial Sequence: Synthetic oligonucleotide
  Sense strand starting at position 2678 of SEQ ID NO: 1882662
aucuucuguccacaaaugu

SEQ ID NO: 2138561 - RNA, 19 nt, Artificial Sequence
  Description of Artificial Sequence: Synthetic oligonucleotide
  Antisense strand to SEQ ID NO: 2138560
acauuuguggacagaagau

SEQ ID NO: 2138562 - RNA, 19 nt, Artificial Sequence
  Description of Artificial Sequence: Synthetic oligonucleotide
  Sense strand starting at position 2692 of SEQ ID NO: 1882662
aaugucucauugggucuaa

SEQ ID NO: 2138563 - RNA, 19 nt, Artificial Sequence
  Description of Artificial Sequence: Synthetic oligonucleotide
  Antisense strand to SEQ ID NO: 2138562
uuagacccaaugagacauu

SEQ ID NO: 2138564 - RNA, 19 nt, Artificial Sequence
  Description of Artificial Sequence: Synthetic oligonucleotide
  Sense strand starting at position 2693 of SEQ ID NO: 1882662
augucucauugggucuaaa

SEQ ID NO: 2138565 - RNA, 19 nt, Artificial Sequence
  Description of Artificial Sequence: Synthetic oligonucleotide
  Antisense strand to SEQ ID NO: 2138564
uuuagacccaaugagacau

SEQ ID NO: 2138566 - RNA, 19 nt, Artificial Sequence
  Description of Artificial Sequence: Synthetic oligonucleotide
  Sense strand starting at position 2712 of SEQ ID NO: 1882662
aaggaauccucacagaggu

SEQ ID NO: 2138567 - RNA, 19 nt, Artificial Sequence
  Description of Artificial Sequence: Synthetic oligonucleotide
  Antisense strand to SEQ ID NO: 2138566
accucugugaggauuccuu

SEQ ID NO: 2138568 - RNA, 19 nt, Artificial Sequence
  Description of Artificial Sequence: Synthetic oligonucleotide
  Sense strand starting at position 2742 of SEQ ID NO: 1882662
cacggucacuccuacugaa

SEQ ID NO: 2138569 - RNA, 19 nt, Artificial Sequence
  Description of Artificial Sequence: Synthetic oligonucleotide
  Antisense strand to SEQ ID NO: 2138568
uucaguaggagugaccgug

SEQ ID NO: 2138570 - RNA, 19 nt, Artificial Sequence
  Description of Artificial Sequence: Synthetic oligonucleotide
  Sense strand starting at position 2968 of SEQ ID NO: 1882662
cuuuccuggcuuuggaaau

SEQ ID NO: 2138571 - RNA, 19 nt, Artificial Sequence
  Description of Artificial Sequence: Synthetic oligonucleotide
  Antisense strand to SEQ ID NO: 2138570
auuuccaaagccaggaaag

SEQ ID NO: 2138572 - RNA, 19 nt, Artificial Sequence
  Description of Artificial Sequence: Synthetic oligonucleotide
  Sense strand starting at position 2974 of SEQ ID NO: 1882662
uggcuuuggaaaugaagua

SEQ ID NO: 2138573 - RNA, 19 nt, Artificial Sequence
  Description of Artificial Sequence: Synthetic oligonucleotide
  Antisense strand to SEQ ID NO: 2138572
uacuucauuuccaaagcca

SEQ ID NO: 2138574 - RNA, 19 nt, Artificial Sequence
  Description of Artificial Sequence: Synthetic oligonucleotide
  Sense strand starting at position 3055 of SEQ ID NO: 1882662
acucuugugucuguucuga

SEQ ID NO: 2138575 - RNA, 19 nt, Artificial Sequence
  Description of Artificial Sequence: Synthetic oligonucleotide
  Antisense strand to SEQ ID NO: 2138574
ucagaacagacacaagagu

SEQ ID NO: 2138576 - RNA, 19 nt, Artificial Sequence
  Description of Artificial Sequence: Synthetic oligonucleotide
  Sense strand starting at position 3321 of SEQ ID NO: 1882662
cagccuacugccuagagau

SEQ ID NO: 2138577 - RNA, 19 nt, Artificial Sequence
  Description of Artificial Sequence: Synthetic oligonucleotide
  Antisense strand to SEQ ID NO: 2138576
aucucuaggcaguaggcug

SEQ ID NO: 2138578 - RNA, 19 nt, Artificial Sequence
  Description of Artificial Sequence: Synthetic oligonucleotide
  Sense strand starting at position 3323 of SEQ ID NO: 1882662
gccuacugccuagagaucu

SEQ ID NO: 2138579 - RNA, 19 nt, Artificial Sequence
  Description of Artificial Sequence: Synthetic oligonucleotide
  Antisense strand to SEQ ID NO: 2138578
agaucucuaggcaguaggc

SEQ ID NO: 2138580 - RNA, 19 nt, Artificial Sequence
  Description of Artificial Sequence: Synthetic oligonucleotide
  Sense strand starting at position 3329 of SEQ ID NO: 1882662
ugccuagagaucuggccuu

SEQ ID NO: 2138581 - RNA, 19 nt, Artificial Sequence
  Description of Artificial Sequence: Synthetic oligonucleotide
  Antisense strand to SEQ ID NO: 2138580
aaggccagaucucuaggca

SEQ ID NO: 2138582 - RNA, 19 nt, Artificial Sequence
  Description of Artificial Sequence: Synthetic oligonucleotide
  Sense strand starting at position 3335 of SEQ ID NO: 1882662
gagaucuggccuugggaag

SEQ ID NO: 2138583 - RNA, 19 nt, Artificial Sequence
  Description of Artificial Sequence: Synthetic oligonucleotide
  Antisense strand to SEQ ID NO: 2138582
cuucccaaggccagaucuc

SEQ ID NO: 2138584 - RNA, 19 nt, Artificial Sequence
  Description of Artificial Sequence: Synthetic oligonucleotide
  Sense strand starting at position 3415 of SEQ ID NO: 1882662
ucugcuccuuccuugaaga

SEQ ID NO: 2138585 - RNA, 19 nt, Artificial Sequence
  Description of Artificial Sequence: Synthetic oligonucleotide
  Antisense strand to SEQ ID NO: 2138584
ucuucaaggaaggagcaga

SEQ ID NO: 2138586 - RNA, 19 nt, Artificial Sequence
  Description of Artificial Sequence: Synthetic oligonucleotide
  Sense strand starting at position 3417 of SEQ ID NO: 1882662
ugcuccuuccuugaagaca

SEQ ID NO: 2138587 - RNA, 19 nt, Artificial Sequence
  Description of Artificial Sequence: Synthetic oligonucleotide
  Antisense strand to SEQ ID NO: 2138586
ugucuucaaggaaggagca

SEQ ID NO: 2138588 - RNA, 19 nt, Artificial Sequence
  Description of Artificial Sequence: Synthetic oligonucleotide
  Sense strand starting at position 3480 of SEQ ID NO: 1882662
cagugcuugcuugauggga

SEQ ID NO: 2138589 - RNA, 19 nt, Artificial Sequence
  Description of Artificial Sequence: Synthetic oligonucleotide
  Antisense strand to SEQ ID NO: 2138588
ucccaucaagcaagcacug

SEQ ID NO: 2138590 - RNA, 19 nt, Artificial Sequence
  Description of Artificial Sequence: Synthetic oligonucleotide
  Sense strand starting at position 3539 of SEQ ID NO: 1882662
gagucuggcuccuccagaa

SEQ ID NO: 2138591 - RNA, 19 nt, Artificial Sequence
  Description of Artificial Sequence: Synthetic oligonucleotide
  Antisense strand to SEQ ID NO: 2138590
uucuggaggagccagacuc

SEQ ID NO: 2138592 - RNA, 19 nt, Artificial Sequence
  Description of Artificial Sequence: Synthetic oligonucleotide
  Sense strand starting at position 3694 of SEQ ID NO: 1882662
gacucaucuugggagagca

SEQ ID NO: 2138593 - RNA, 19 nt, Artificial Sequence
  Description of Artificial Sequence: Synthetic oligonucleotide
  Antisense strand to SEQ ID NO: 2138592
ugcucucccaagaugaguc

SEQ ID NO: 2138594 - RNA, 19 nt, Artificial Sequence
  Description of Artificial Sequence: Synthetic oligonucleotide
  Sense strand starting at position 3736 of SEQ ID NO: 1882662
ggucacauuugauggauau

SEQ ID NO: 2138595 - RNA, 19 nt, Artificial Sequence
  Description of Artificial Sequence: Synthetic oligonucleotide
  Antisense strand to SEQ ID NO: 2138594
auauccaucaaaugugacc

SEQ ID NO: 2138596 - RNA, 19 nt, Artificial Sequence
  Description of Artificial Sequence: Synthetic oligonucleotide
  Sense strand starting at position 2010 of SEQ ID NO: 1882663
acaaguauaccauguagca

SEQ ID NO: 2138597 - RNA, 19 nt, Artificial Sequence
  Description of Artificial Sequence: Synthetic oligonucleotide
  Antisense strand to SEQ ID NO: 2138596
ugcuacaugguauacuugu

SEQ ID NO: 2138598 - RNA, 19 nt, Artificial Sequence
  Description of Artificial Sequence: Synthetic oligonucleotide
  Sense strand starting at position 2066 of SEQ ID NO: 1882663
augaaaugaucugggaaga

SEQ ID NO: 2138599 - RNA, 19 nt, Artificial Sequence
  Description of Artificial Sequence: Synthetic oligonucleotide
  Antisense strand to SEQ ID NO: 2138598
ucuucccagaucauuucau

SEQ ID NO: 2138600 - RNA, 19 nt, Artificial Sequence
  Description of Artificial Sequence: Synthetic oligonucleotide
  Sense strand starting at position 2190 of SEQ ID NO: 1882663
gacaaauguuggcaugcua

SEQ ID NO: 2138601 - RNA, 19 nt, Artificial Sequence
  Description of Artificial Sequence: Synthetic oligonucleotide
  Antisense strand to SEQ ID NO: 2138600
uagcaugccaacauuuguc

SEQ ID NO: 2138602 - RNA, 19 nt, Artificial Sequence
  Description of Artificial Sequence: Synthetic oligonucleotide
  Sense strand starting at position 2340 of SEQ ID NO: 1882663
cuagaagacuuccagcaag

SEQ ID NO: 2138603 - RNA, 19 nt, Artificial Sequence
  Description of Artificial Sequence: Synthetic oligonucleotide
  Antisense strand to SEQ ID NO: 2138602
cuugcuggaagucuucuag

SEQ ID NO: 2138604 - RNA, 19 nt, Artificial Sequence
  Description of Artificial Sequence: Synthetic oligonucleotide
  Sense strand starting at position 2414 of SEQ ID NO: 1882663
aguucucagcaaugugauu

SEQ ID NO: 2138605 - RNA, 19 nt, Artificial Sequence
  Description of Artificial Sequence: Synthetic oligonucleotide
  Antisense strand to SEQ ID NO: 2138604
aaucacauugcugagaacu

SEQ ID NO: 2138606 - RNA, 19 nt, Artificial Sequence
  Description of Artificial Sequence: Synthetic oligonucleotide
  Sense strand starting at position 2438 of SEQ ID NO: 1882663
gagcgcuuccucuauggaa

SEQ ID NO: 2138607 - RNA, 19 nt, Artificial Sequence
  Description of Artificial Sequence: Synthetic oligonucleotide
  Antisense strand to SEQ ID NO: 2138606
uuccauagaggaagcgcuc

SEQ ID NO: 2138608 - RNA, 19 nt, Artificial Sequence
  Description of Artificial Sequence: Synthetic oligonucleotide
  Sense strand starting at position 2440 of SEQ ID NO: 1882663
gcgcuuccucuauggaaga

SEQ ID NO: 2138609 - RNA, 19 nt, Artificial Sequence
  Description of Artificial Sequence: Synthetic oligonucleotide
  Antisense strand to SEQ ID NO: 2138608
ucuuccauagaggaagcgc

SEQ ID NO: 2138610 - RNA, 19 nt, Artificial Sequence
  Description of Artificial Sequence: Synthetic oligonucleotide
  Sense strand starting at position 2441 of SEQ ID NO: 1882663
cgcuuccucuauggaagaa

SEQ ID NO: 2138611 - RNA, 19 nt, Artificial Sequence
  Description of Artificial Sequence: Synthetic oligonucleotide
  Antisense strand to SEQ ID NO: 2138610
uucuuccauagaggaagcg

SEQ ID NO: 2138612 - RNA, 19 nt, Artificial Sequence
  Description of Artificial Sequence: Synthetic oligonucleotide
  Sense strand starting at position 2451 of SEQ ID NO: 1882663
auggaagaauaagaugauu

SEQ ID NO: 2138613 - RNA, 19 nt, Artificial Sequence
  Description of Artificial Sequence: Synthetic oligonucleotide
  Antisense strand to SEQ ID NO: 2138612
aaucaucuuauucuuccau

SEQ ID NO: 2138614 - RNA, 19 nt, Artificial Sequence
  Description of Artificial Sequence: Synthetic oligonucleotide
  Sense strand starting at position 2471 of SEQ ID NO: 1882663
ggauauuacuaucaaugca

SEQ ID NO: 2138615 - RNA, 19 nt, Artificial Sequence
  Description of Artificial Sequence: Synthetic oligonucleotide
  Antisense strand to SEQ ID NO: 2138614
ugcauugauaguaauaucc

SEQ ID NO: 2138616 - RNA, 19 nt, Artificial Sequence
  Description of Artificial Sequence: Synthetic oligonucleotide
  Sense strand starting at position 2499 of SEQ ID NO: 1882663
ugccaauuagaugguaaau

SEQ ID NO: 2138617 - RNA, 19 nt, Artificial Sequence
  Description of Artificial Sequence: Synthetic oligonucleotide
  Antisense strand to SEQ ID NO: 2138616
auuuaccaucuaauuggca

SEQ ID NO: 2138618 - RNA, 19 nt, Artificial Sequence
  Description of Artificial Sequence: Synthetic oligonucleotide
  Sense strand starting at position 2501 of SEQ ID NO: 1882663
ccaauuagaugguaaauuc

SEQ ID NO: 2138619 - RNA, 19 nt, Artificial Sequence
  Description of Artificial Sequence: Synthetic oligonucleotide
  Antisense strand to SEQ ID NO: 2138618
gaauuuaccaucuaauugg

SEQ ID NO: 2138620 - RNA, 19 nt, Artificial Sequence
  Description of Artificial Sequence: Synthetic oligonucleotide
  Sense strand starting at position 2673 of SEQ ID NO: 1882663
caguauaucuugcuguaag

SEQ ID NO: 2138621 - RNA, 19 nt, Artificial Sequence
  Description of Artificial Sequence: Synthetic oligonucleotide
  Antisense strand to SEQ ID NO: 2138620
cuuacagcaagauauacug

SEQ ID NO: 2138622 - RNA, 19 nt, Artificial Sequence
  Description of Artificial Sequence: Synthetic oligonucleotide
  Sense strand starting at position 2702 of SEQ ID NO: 1882663
aagugauuguuguuaacuu

SEQ ID NO: 2138623 - RNA, 19 nt, Artificial Sequence
  Description of Artificial Sequence: Synthetic oligonucleotide
  Antisense strand to SEQ ID NO: 2138622
aaguuaacaacaaucacuu

SEQ ID NO: 2138624 - RNA, 19 nt, Artificial Sequence
  Description of Artificial Sequence: Synthetic oligonucleotide
  Sense strand starting at position 2703 of SEQ ID NO: 1882663
agugauuguuguuaacuuc

SEQ ID NO: 2138625 - RNA, 19 nt, Artificial Sequence
  Description of Artificial Sequence: Synthetic oligonucleotide
  Antisense strand to SEQ ID NO: 2138624
gaaguuaacaacaaucacu

SEQ ID NO: 2138626 - RNA, 19 nt, Artificial Sequence
  Description of Artificial Sequence: Synthetic oligonucleotide
  Sense strand starting at position 2736 of SEQ ID NO: 1882663
uagcaauauggcugugagu

SEQ ID NO: 2138627 - RNA, 19 nt, Artificial Sequence
  Description of Artificial Sequence: Synthetic oligonucleotide
  Antisense strand to SEQ ID NO: 2138626
acucacagccauauugcua

SEQ ID NO: 2138628 - RNA, 19 nt, Artificial Sequence
  Description of Artificial Sequence: Synthetic oligonucleotide
  Sense strand starting at position 2738 of SEQ ID NO: 1882663
gcaauauggcugugaguca

SEQ ID NO: 2138629 - RNA, 19 nt, Artificial Sequence
  Description of Artificial Sequence: Synthetic oligonucleotide
  Antisense strand to SEQ ID NO: 2138628
ugacucacagccauauugc

SEQ ID NO: 2138630 - RNA, 19 nt, Artificial Sequence
  Description of Artificial Sequence: Synthetic oligonucleotide
  Sense strand starting at position 2739 of SEQ ID NO: 1882663
caauauggcugugagucaa

SEQ ID NO: 2138631 - RNA, 19 nt, Artificial Sequence
  Description of Artificial Sequence: Synthetic oligonucleotide
  Antisense strand to SEQ ID NO: 2138630
uugacucacagccauauug

SEQ ID NO: 2138632 - RNA, 19 nt, Artificial Sequence
  Description of Artificial Sequence: Synthetic oligonucleotide
  Sense strand starting at position 2797 of SEQ ID NO: 1882663
uucugacuguaaucuuuga

SEQ ID NO: 2138633 - RNA, 19 nt, Artificial Sequence
  Description of Artificial Sequence: Synthetic oligonucleotide
  Antisense strand to SEQ ID NO: 2138632
ucaaagauuacagucagaa

SEQ ID NO: 2138634 - RNA, 19 nt, Artificial Sequence
  Description of Artificial Sequence: Synthetic oligonucleotide
  Sense strand starting at position 2813 of SEQ ID NO: 1882663
ugaaauacauauggcagau

SEQ ID NO: 2138635 - RNA, 19 nt, Artificial Sequence
  Description of Artificial Sequence: Synthetic oligonucleotide
  Antisense strand to SEQ ID NO: 2138634
aucugccauauguauuuca

SEQ ID NO: 2138636 - RNA, 19 nt, Artificial Sequence
  Description of Artificial Sequence: Synthetic oligonucleotide
  Sense strand starting at position 2922 of SEQ ID NO: 1882663
auauaagucuugcacuaag

SEQ ID NO: 2138637 - RNA, 19 nt, Artificial Sequence
  Description of Artificial Sequence: Synthetic oligonucleotide
  Antisense strand to SEQ ID NO: 2138636
cuuagugcaagacuuauau

SEQ ID NO: 2138638 - RNA, 19 nt, Artificial Sequence
  Description of Artificial Sequence: Synthetic oligonucleotide
  Sense strand starting at position 3095 of SEQ ID NO: 1882663
agacuauucuuaguuugua

SEQ ID NO: 2138639 - RNA, 19 nt, Artificial Sequence
  Description of Artificial Sequence: Synthetic oligonucleotide
  Antisense strand to SEQ ID NO: 2138638
uacaaacuaagaauagucu

SEQ ID NO: 2138640 - RNA, 19 nt, Artificial Sequence
  Description of Artificial Sequence: Synthetic oligonucleotide
  Sense strand starting at position 3105 of SEQ ID NO: 1882663
uaguuuguaucucuggcaa

SEQ ID NO: 2138641 - RNA, 19 nt, Artificial Sequence
  Description of Artificial Sequence: Synthetic oligonucleotide
  Antisense strand to SEQ ID NO: 2138640
uugccagagauacaaacua

SEQ ID NO: 2138642 - RNA, 19 nt, Artificial Sequence
  Description of Artificial Sequence: Synthetic oligonucleotide
  Sense strand starting at position 3248 of SEQ ID NO: 1882663
guggcacuaaagugaaauu

SEQ ID NO: 2138643 - RNA, 19 nt, Artificial Sequence
  Description of Artificial Sequence: Synthetic oligonucleotide
  Antisense strand to SEQ ID NO: 2138642
aauuucacuuuagugccac

SEQ ID NO: 2138644 - RNA, 19 nt, Artificial Sequence
  Description of Artificial Sequence: Synthetic oligonucleotide
  Sense strand starting at position 3283 of SEQ ID NO: 1882663
ucuauauaugcacguguga

SEQ ID NO: 2138645 - RNA, 19 nt, Artificial Sequence
  Description of Artificial Sequence: Synthetic oligonucleotide
  Antisense strand to SEQ ID NO: 2138644
ucacacgugcauauauaga

SEQ ID NO: 2138646 - RNA, 19 nt, Artificial Sequence
  Description of Artificial Sequence: Synthetic oligonucleotide
  Sense strand starting at position 3290 of SEQ ID NO: 1882663
augcacgugugaucuuauu

SEQ ID NO: 2138647 - RNA, 19 nt, Artificial Sequence
  Description of Artificial Sequence: Synthetic oligonucleotide
  Antisense strand to SEQ ID NO: 2138646
aauaagaucacacgugcau

SEQ ID NO: 2138648 - RNA, 19 nt, Artificial Sequence
  Description of Artificial Sequence: Synthetic oligonucleotide
  Sense strand starting at position 3297 of SEQ ID NO: 1882663
ugugaucuuauuugaacgu

SEQ ID NO: 2138649 - RNA, 19 nt, Artificial Sequence
  Description of Artificial Sequence: Synthetic oligonucleotide
  Antisense strand to SEQ ID NO: 2138648
acguucaaauaagaucaca

SEQ ID NO: 2138650 - RNA, 19 nt, Artificial Sequence
  Description of Artificial Sequence: Synthetic oligonucleotide
  Sense strand starting at position 3322 of SEQ ID NO: 1882663
uuacaaagauucuagaaag

SEQ ID NO: 2138651 - RNA, 19 nt, Artificial Sequence
  Description of Artificial Sequence: Synthetic oligonucleotide
  Antisense strand to SEQ ID NO: 2138650
cuuucuagaaucuuuguaa

SEQ ID NO: 2138652 - RNA, 19 nt, Artificial Sequence
  Description of Artificial Sequence: Synthetic oligonucleotide
  Sense strand starting at position 3387 of SEQ ID NO: 1882663
ccauaauaauuaguuguca

SEQ ID NO: 2138653 - RNA, 19 nt, Artificial Sequence
  Description of Artificial Sequence: Synthetic oligonucleotide
  Antisense strand to SEQ ID NO: 2138652
ugacaacuaauuauuaugg

SEQ ID NO: 2138654 - RNA, 19 nt, Artificial Sequence
  Description of Artificial Sequence: Synthetic oligonucleotide
  Sense strand starting at position 3391 of SEQ ID NO: 1882663
aauaauuaguugucagaag

SEQ ID NO: 2138655 - RNA, 19 nt, Artificial Sequence
  Description of Artificial Sequence: Synthetic oligonucleotide
  Antisense strand to SEQ ID NO: 2138654
cuucugacaacuaauuauu

SEQ ID NO: 2138656 - RNA, 19 nt, Artificial Sequence
  Description of Artificial Sequence: Synthetic oligonucleotide
  Sense strand starting at position 3392 of SEQ ID NO: 1882663
auaauuaguugucagaagu

SEQ ID NO: 2138657 - RNA, 19 nt, Artificial Sequence
  Description of Artificial Sequence: Synthetic oligonucleotide
  Antisense strand to SEQ ID NO: 2138656
acuucugacaacuaauuau

SEQ ID NO: 2138658 - RNA, 19 nt, Artificial Sequence
  Description of Artificial Sequence: Synthetic oligonucleotide
  Sense strand starting at position 3538 of SEQ ID NO: 1882663
cgacuuugacuuugaauaa

SEQ ID NO: 2138659 - RNA, 19 nt, Artificial Sequence
  Description of Artificial Sequence: Synthetic oligonucleotide
  Antisense strand to SEQ ID NO: 2138658
uuauucaaagucaaagucg

SEQ ID NO: 2138660 - RNA, 19 nt, Artificial Sequence
  Description of Artificial Sequence: Synthetic oligonucleotide
  Sense strand starting at position 3617 of SEQ ID NO: 1882663
ggaagucacugauagagau

SEQ ID NO: 2138661 - RNA, 19 nt, Artificial Sequence
  Description of Artificial Sequence: Synthetic oligonucleotide
  Antisense strand to SEQ ID NO: 2138660
aucucuaucagugacuucc

SEQ ID NO: 2138662 - RNA, 19 nt, Artificial Sequence
  Description of Artificial Sequence: Synthetic oligonucleotide
  Sense strand starting at position 3697 of SEQ ID NO: 1882663
gacuuaagugaauacuguu

SEQ ID NO: 2138663 - RNA, 19 nt, Artificial Sequence
  Description of Artificial Sequence: Synthetic oligonucleotide
  Antisense strand to SEQ ID NO: 2138662
aacaguauucacuuaaguc

SEQ ID NO: 2138664 - RNA, 19 nt, Artificial Sequence
  Description of Artificial Sequence: Synthetic oligonucleotide
  Sense strand starting at position 3700 of SEQ ID NO: 1882663
uuaagugaauacuguucca

SEQ ID NO: 2138665 - RNA, 19 nt, Artificial Sequence
  Description of Artificial Sequence: Synthetic oligonucleotide
  Antisense strand to SEQ ID NO: 2138664
uggaacaguauucacuuaa

SEQ ID NO: 2138666 - RNA, 19 nt, Artificial Sequence
  Description of Artificial Sequence: Synthetic oligonucleotide
  Sense strand starting at position 3703 of SEQ ID NO: 1882663
agugaauacuguuccagac

SEQ ID NO: 2138667 - RNA, 19 nt, Artificial Sequence
  Description of Artificial Sequence: Synthetic oligonucleotide
  Antisense strand to SEQ ID NO: 2138666
gucuggaacaguauucacu

SEQ ID NO: 2138668 - RNA, 19 nt, Artificial Sequence
  Description of Artificial Sequence: Synthetic oligonucleotide
  Sense strand starting at position 3705 of SEQ ID NO: 1882663
ugaauacuguuccagacaa

SEQ ID NO: 2138669 - RNA, 19 nt, Artificial Sequence
  Description of Artificial Sequence: Synthetic oligonucleotide
  Antisense strand to SEQ ID NO: 2138668
uugucuggaacaguauuca

SEQ ID NO: 2138670 - RNA, 19 nt, Artificial Sequence
  Description of Artificial Sequence: Synthetic oligonucleotide
  Sense strand starting at position 3739 of SEQ ID NO: 1882663
agcacuugacacugacaaa

SEQ ID NO: 2138671 - RNA, 19 nt, Artificial Sequence
  Description of Artificial Sequence: Synthetic oligonucleotide
  Antisense strand to SEQ ID NO: 2138670
uuugucagugucaagugcu

SEQ ID NO: 2138672 - RNA, 19 nt, Artificial Sequence
  Description of Artificial Sequence: Synthetic oligonucleotide
  Sense strand starting at position 3784 of SEQ ID NO: 1882663
gagcuucuauuguagcaaa

SEQ ID NO: 2138673 - RNA, 19 nt, Artificial Sequence
  Description of Artificial Sequence: Synthetic oligonucleotide
  Antisense strand to SEQ ID NO: 2138672
uuugcuacaauagaagcuc

SEQ ID NO: 2138674 - RNA, 19 nt, Artificial Sequence
  Description of Artificial Sequence: Synthetic oligonucleotide
  Sense strand starting at position 3880 of SEQ ID NO: 1882663
acuauuaaauuggcgcaaa

SEQ ID NO: 2138675 - RNA, 19 nt, Artificial Sequence
  Description of Artificial Sequence: Synthetic oligonucleotide
  Antisense strand to SEQ ID NO: 2138674
uuugcgccaauuuaauagu

SEQ ID NO: 2138676 - RNA, 19 nt, Artificial Sequence
  Description of Artificial Sequence: Synthetic oligonucleotide
  Sense strand starting at position 191 of SEQ ID NO: 1882664
gagggaaauuauucuguua

SEQ ID NO: 2138677 - RNA, 19 nt, Artificial Sequence
  Description of Artificial Sequence: Synthetic oligonucleotide
  Antisense strand to SEQ ID NO: 2138676
uaacagaauaauuucccuc

SEQ ID NO: 2138678 - RNA, 19 nt, Artificial Sequence
  Description of Artificial Sequence: Synthetic oligonucleotide
  Sense strand starting at position 395 of SEQ ID NO: 1882664
ucaccagaugcaugccaaa

SEQ ID NO: 2138679 - RNA, 19 nt, Artificial Sequence
  Description of Artificial Sequence: Synthetic oligonucleotide
  Antisense strand to SEQ ID NO: 2138678
uuuggcaugcaucugguga

SEQ ID NO: 2138680 - RNA, 19 nt, Artificial Sequence
  Description of Artificial Sequence: Synthetic oligonucleotide
  Sense strand starting at position 527 of SEQ ID NO: 1882664
acaagaaauucugccaagu

SEQ ID NO: 2138681 - RNA, 19 nt, Artificial Sequence
  Description of Artificial Sequence: Synthetic oligonucleotide
  Antisense strand to SEQ ID NO: 2138680
acuuggcagaauuucuugu

SEQ ID NO: 2138682 - RNA, 19 nt, Artificial Sequence
  Description of Artificial Sequence: Synthetic oligonucleotide
  Sense strand starting at position 631 of SEQ ID NO: 1882664
auguauugacccuauggua

SEQ ID NO: 2138683 - RNA, 19 nt, Artificial Sequence
  Description of Artificial Sequence: Synthetic oligonucleotide
  Antisense strand to SEQ ID NO: 2138682
uaccauagggucaauacau

SEQ ID NO: 2138684 - RNA, 19 nt, Artificial Sequence
  Description of Artificial Sequence: Synthetic oligonucleotide
  Sense strand starting at position 774 of SEQ ID NO: 1882664
ccuaguucugaccguauuu

SEQ ID NO: 2138685 - RNA, 19 nt, Artificial Sequence
  Description of Artificial Sequence: Synthetic oligonucleotide
  Antisense strand to SEQ ID NO: 2138684
aaauacggucagaacuagg

SEQ ID NO: 2138686 - RNA, 19 nt, Artificial Sequence
  Description of Artificial Sequence: Synthetic oligonucleotide
  Sense strand starting at position 1278 of SEQ ID NO: 1882664
ggguucagaggccaguuau

SEQ ID NO: 2138687 - RNA, 19 nt, Artificial Sequence
  Description of Artificial Sequence: Synthetic oligonucleotide
  Antisense strand to SEQ ID NO: 2138686
auaacuggccucugaaccc

SEQ ID NO: 2138688 - RNA, 19 nt, Artificial Sequence
  Description of Artificial Sequence: Synthetic oligonucleotide
  Sense strand starting at position 1289 of SEQ ID NO: 1882664
ccaguuauuccggaaaccu

SEQ ID NO: 2138689 - RNA, 19 nt, Artificial Sequence
  Description of Artificial Sequence: Synthetic oligonucleotide
  Antisense strand to SEQ ID NO: 2138688
agguuuccggaauaacugg

SEQ ID NO: 2138690 - RNA, 19 nt, Artificial Sequence
  Description of Artificial Sequence: Synthetic oligonucleotide
  Sense strand starting at position 1337 of SEQ ID NO: 1882664
ggcuucaccguccagagau

SEQ ID NO: 2138691 - RNA, 19 nt, Artificial Sequence
  Description of Artificial Sequence: Synthetic oligonucleotide
  Antisense strand to SEQ ID NO: 2138690
aucucuggacggugaagcc

SEQ ID NO: 2138692 - RNA, 19 nt, Artificial Sequence
  Description of Artificial Sequence: Synthetic oligonucleotide
  Sense strand starting at position 1416 of SEQ ID NO: 1882664
ucgcgagcuccguuugaua

SEQ ID NO: 2138693 - RNA, 19 nt, Artificial Sequence
  Description of Artificial Sequence: Synthetic oligonucleotide
  Antisense strand to SEQ ID NO: 2138692
uaucaaacggagcucgcga

SEQ ID NO: 2138694 - RNA, 19 nt, Artificial Sequence
  Description of Artificial Sequence: Synthetic oligonucleotide
  Sense strand starting at position 1427 of SEQ ID NO: 1882664
guuugauaucuugucgccu

SEQ ID NO: 2138695 - RNA, 19 nt, Artificial Sequence
  Description of Artificial Sequence: Synthetic oligonucleotide
  Antisense strand to SEQ ID NO: 2138694
aggcgacaagauaucaaac

SEQ ID NO: 2138696 - RNA, 19 nt, Artificial Sequence
  Description of Artificial Sequence: Synthetic oligonucleotide
  Sense strand starting at position 1548 of SEQ ID NO: 1882664
agagucucuccacaccuua

SEQ ID NO: 2138697 - RNA, 19 nt, Artificial Sequence
  Description of Artificial Sequence: Synthetic oligonucleotide
  Antisense strand to SEQ ID NO: 2138696
uaagguguggagagacucu

SEQ ID NO: 2138698 - RNA, 19 nt, Artificial Sequence
  Description of Artificial Sequence: Synthetic oligonucleotide
  Sense strand starting at position 1756 of SEQ ID NO: 1882664
aaaguuguagcccaugaua

SEQ ID NO: 2138699 - RNA, 19 nt, Artificial Sequence
  Description of Artificial Sequence: Synthetic oligonucleotide
  Antisense strand to SEQ ID NO: 2138698
uaucaugggcuacaacuuu

SEQ ID NO: 2138700 - RNA, 19 nt, Artificial Sequence
  Description of Artificial Sequence: Synthetic oligonucleotide
  Sense strand starting at position 1759 of SEQ ID NO: 1882664
guuguagcccaugauaaau

SEQ ID NO: 2138701 - RNA, 19 nt, Artificial Sequence
  Description of Artificial Sequence: Synthetic oligonucleotide
  Antisense strand to SEQ ID NO: 2138700
auuuaucaugggcuacaac

SEQ ID NO: 2138702 - RNA, 19 nt, Artificial Sequence
  Description of Artificial Sequence: Synthetic oligonucleotide
  Sense strand starting at position 1784 of SEQ ID NO: 1882664
ggcaacauguaucuuggaa

SEQ ID NO: 2138703 - RNA, 19 nt, Artificial Sequence
  Description of Artificial Sequence: Synthetic oligonucleotide
  Antisense strand to SEQ ID NO: 2138702
uuccaagauacauguugcc

SEQ ID NO: 2138704 - RNA, 19 nt, Artificial Sequence
  Description of Artificial Sequence: Synthetic oligonucleotide
  Sense strand starting at position 1793 of SEQ ID NO: 1882664
uaucuuggaaagugugaga

SEQ ID NO: 2138705 - RNA, 19 nt, Artificial Sequence
  Description of Artificial Sequence: Synthetic oligonucleotide
  Antisense strand to SEQ ID NO: 2138704
ucucacacuuuccaagaua

SEQ ID NO: 2138706 - RNA, 19 nt, Artificial Sequence
  Description of Artificial Sequence: Synthetic oligonucleotide
  Sense strand starting at position 1820 of SEQ ID NO: 1882664
aagaacuguuccuugaagu

SEQ ID NO: 2138707 - RNA, 19 nt, Artificial Sequence
  Description of Artificial Sequence: Synthetic oligonucleotide
  Antisense strand to SEQ ID NO: 2138706
acuucaaggaacaguucuu

SEQ ID NO: 2138708 - RNA, 19 nt, Artificial Sequence
  Description of Artificial Sequence: Synthetic oligonucleotide
  Sense strand starting at position 1821 of SEQ ID NO: 1882664
agaacuguuccuugaagua

SEQ ID NO: 2138709 - RNA, 19 nt, Artificial Sequence
  Description of Artificial Sequence: Synthetic oligonucleotide
  Antisense strand to SEQ ID NO: 2138708
uacuucaaggaacaguucu

SEQ ID NO: 2138710 - RNA, 19 nt, Artificial Sequence
  Description of Artificial Sequence: Synthetic oligonucleotide
  Sense strand starting at position 1828 of SEQ ID NO: 1882664
uuccuugaaguaugcaaga

SEQ ID NO: 2138711 - RNA, 19 nt, Artificial Sequence
  Description of Artificial Sequence: Synthetic oligonucleotide
  Antisense strand to SEQ ID NO: 2138710
ucuugcauacuucaaggaa

SEQ ID NO: 2138712 - RNA, 19 nt, Artificial Sequence
  Description of Artificial Sequence: Synthetic oligonucleotide
  Sense strand starting at position 1963 of SEQ ID NO: 1882664
uauauucuugguugaguga

SEQ ID NO: 2138713 - RNA, 19 nt, Artificial Sequence
  Description of Artificial Sequence: Synthetic oligonucleotide
  Antisense strand to SEQ ID NO: 2138712
ucacucaaccaagaauaua

SEQ ID NO: 2138714 - RNA, 19 nt, Artificial Sequence
  Description of Artificial Sequence: Synthetic oligonucleotide
  Sense strand starting at position 2154 of SEQ ID NO: 1882664
auuguaaacguccagauua

SEQ ID NO: 2138715 - RNA, 19 nt, Artificial Sequence
  Description of Artificial Sequence: Synthetic oligonucleotide
  Antisense strand to SEQ ID NO: 2138714
uaaucuggacguuuacaau

SEQ ID NO: 2138716 - RNA, 19 nt, Artificial Sequence
  Description of Artificial Sequence: Synthetic oligonucleotide
  Sense strand starting at position 2156 of SEQ ID NO: 1882664
uguaaacguccagauuaug

SEQ ID NO: 2138717 - RNA, 19 nt, Artificial Sequence
  Description of Artificial Sequence: Synthetic oligonucleotide
  Antisense strand to SEQ ID NO: 2138716
cauaaucuggacguuuaca

SEQ ID NO: 2138718 - RNA, 19 nt, Artificial Sequence
  Description of Artificial Sequence: Synthetic oligonucleotide
  Sense strand starting at position 2206 of SEQ ID NO: 1882664
auuauuacagaguguuaca

SEQ ID NO: 2138719 - RNA, 19 nt, Artificial Sequence
  Description of Artificial Sequence: Synthetic oligonucleotide
  Antisense strand to SEQ ID NO: 2138718
uguaacacucuguaauaau

SEQ ID NO: 2138720 - RNA, 19 nt, Artificial Sequence
  Description of Artificial Sequence: Synthetic oligonucleotide
  Sense strand starting at position 2323 of SEQ ID NO: 1882664
cagggcacucaaugaguaa

SEQ ID NO: 2138721 - RNA, 19 nt, Artificial Sequence
  Description of Artificial Sequence: Synthetic oligonucleotide
  Antisense strand to SEQ ID NO: 2138720
uuacucauugagugcccug

SEQ ID NO: 2138722 - RNA, 19 nt, Artificial Sequence
  Description of Artificial Sequence: Synthetic oligonucleotide
  Sense strand starting at position 2327 of SEQ ID NO: 1882664
gcacucaaugaguaauggu

SEQ ID NO: 2138723 - RNA, 19 nt, Artificial Sequence
  Description of Artificial Sequence: Synthetic oligonucleotide
  Antisense strand to SEQ ID NO: 2138722
accauuacucauugagugc

SEQ ID NO: 2138724 - RNA, 19 nt, Artificial Sequence
  Description of Artificial Sequence: Synthetic oligonucleotide
  Sense strand starting at position 2371 of SEQ ID NO: 1882664
aaaugugaacaguagcgau

SEQ ID NO: 2138725 - RNA, 19 nt, Artificial Sequence
  Description of Artificial Sequence: Synthetic oligonucleotide
  Antisense strand to SEQ ID NO: 2138724
aucgcuacuguucacauuu

SEQ ID NO: 2138726 - RNA, 19 nt, Artificial Sequence
  Description of Artificial Sequence: Synthetic oligonucleotide
  Sense strand starting at position 2375 of SEQ ID NO: 1882664
gugaacaguagcgaucaaa

SEQ ID NO: 2138727 - RNA, 19 nt, Artificial Sequence
  Description of Artificial Sequence: Synthetic oligonucleotide
  Antisense strand to SEQ ID NO: 2138726
uuugaucgcuacuguucac

SEQ ID NO: 2138728 - RNA, 19 nt, Artificial Sequence
  Description of Artificial Sequence: Synthetic oligonucleotide
  Sense strand starting at position 2378 of SEQ ID NO: 1882664
aacaguagcgaucaaauca

SEQ ID NO: 2138729 - RNA, 19 nt, Artificial Sequence
  Description of Artificial Sequence: Synthetic oligonucleotide
  Antisense strand to SEQ ID NO: 2138728
ugauuugaucgcuacuguu

SEQ ID NO: 2138730 - RNA, 19 nt, Artificial Sequence
  Description of Artificial Sequence: Synthetic oligonucleotide
  Sense strand starting at position 2461 of SEQ ID NO: 1882664
gcaaaucaguggucugaag

SEQ ID NO: 2138731 - RNA, 19 nt, Artificial Sequence
  Description of Artificial Sequence: Synthetic oligonucleotide
  Antisense strand to SEQ ID NO: 2138730
cuucagaccacugauuugc

SEQ ID NO: 2138732 - RNA, 19 nt, Artificial Sequence
  Description of Artificial Sequence: Synthetic oligonucleotide
  Sense strand starting at position 2463 of SEQ ID NO: 1882664
aaaucaguggucugaagca

SEQ ID NO: 2138733 - RNA, 19 nt, Artificial Sequence
  Description of Artificial Sequence: Synthetic oligonucleotide
  Antisense strand to SEQ ID NO: 2138732
ugcuucagaccacugauuu

SEQ ID NO: 2138734 - RNA, 19 nt, Artificial Sequence
  Description of Artificial Sequence: Synthetic oligonucleotide
  Sense strand starting at position 2720 of SEQ ID NO: 1882664
cugucacuuguuuaugaac

SEQ ID NO: 2138735 - RNA, 19 nt, Artificial Sequence
  Description of Artificial Sequence: Synthetic oligonucleotide
  Antisense strand to SEQ ID NO: 2138734
guucauaaacaagugacag

SEQ ID NO: 2138736 - RNA, 19 nt, Artificial Sequence
  Description of Artificial Sequence: Synthetic oligonucleotide
  Sense strand starting at position 3147 of SEQ ID NO: 1882664
ggacuaugcuggucccaga

SEQ ID NO: 2138737 - RNA, 19 nt, Artificial Sequence
  Description of Artificial Sequence: Synthetic oligonucleotide
  Antisense strand to SEQ ID NO: 2138736
ucugggaccagcauagucc

SEQ ID NO: 2138738 - RNA, 19 nt, Artificial Sequence
  Description of Artificial Sequence: Synthetic oligonucleotide
  Sense strand starting at position 3190 of SEQ ID NO: 1882664
cuguuucuuccaggaggau

SEQ ID NO: 2138739 - RNA, 19 nt, Artificial Sequence
  Description of Artificial Sequence: Synthetic oligonucleotide
  Antisense strand to SEQ ID NO: 2138738
auccuccuggaagaaacag

SEQ ID NO: 2138740 - RNA, 19 nt, Artificial Sequence
  Description of Artificial Sequence: Synthetic oligonucleotide
  Sense strand starting at position 3191 of SEQ ID NO: 1882664
uguuucuuccaggaggaug

SEQ ID NO: 2138741 - RNA, 19 nt, Artificial Sequence
  Description of Artificial Sequence: Synthetic oligonucleotide
  Antisense strand to SEQ ID NO: 2138740
cauccuccuggaagaaaca

SEQ ID NO: 2138742 - RNA, 19 nt, Artificial Sequence
  Description of Artificial Sequence: Synthetic oligonucleotide
  Sense strand starting at position 3258 of SEQ ID NO: 1882664
gggaccuccuagucaaaga

SEQ ID NO: 2138743 - RNA, 19 nt, Artificial Sequence
  Description of Artificial Sequence: Synthetic oligonucleotide
  Antisense strand to SEQ ID NO: 2138742
ucuuugacuaggagguccc

SEQ ID NO: 2138744 - RNA, 19 nt, Artificial Sequence
  Description of Artificial Sequence: Synthetic oligonucleotide
  Sense strand starting at position 3506 of SEQ ID NO: 1882664
cuguuuauagaugaaaguu

SEQ ID NO: 2138745 - RNA, 19 nt, Artificial Sequence
  Description of Artificial Sequence: Synthetic oligonucleotide
  Antisense strand to SEQ ID NO: 2138744
aacuuucaucuauaaacag

SEQ ID NO: 2138746 - RNA, 19 nt, Artificial Sequence
  Description of Artificial Sequence: Synthetic oligonucleotide
  Sense strand starting at position 3790 of SEQ ID NO: 1882664
aggguauguguguagaaug

SEQ ID NO: 2138747 - RNA, 19 nt, Artificial Sequence
  Description of Artificial Sequence: Synthetic oligonucleotide
  Antisense strand to SEQ ID NO: 2138746
cauucuacacacauacccu

SEQ ID NO: 2138748 - RNA, 19 nt, Artificial Sequence
  Description of Artificial Sequence: Synthetic oligonucleotide
  Sense strand starting at position 3877 of SEQ ID NO: 1882664
uauaaaucuugguuuagga

SEQ ID NO: 2138749 - RNA, 19 nt, Artificial Sequence
  Description of Artificial Sequence: Synthetic oligonucleotide
  Antisense strand to SEQ ID NO: 2138748
uccuaaaccaagauuuaua

SEQ ID NO: 2138750 - RNA, 19 nt, Artificial Sequence
  Description of Artificial Sequence: Synthetic oligonucleotide
  Sense strand starting at position 3884 of SEQ ID NO: 1882664
cuugguuuaggauguggaa

SEQ ID NO: 2138751 - RNA, 19 nt, Artificial Sequence
  Description of Artificial Sequence: Synthetic oligonucleotide
  Antisense strand to SEQ ID NO: 2138750
uuccacauccuaaaccaag

SEQ ID NO: 2138752 - RNA, 19 nt, Artificial Sequence
  Description of Artificial Sequence: Synthetic oligonucleotide
  Sense strand starting at position 3886 of SEQ ID NO: 1882664
ugguuuaggauguggaaca

SEQ ID NO: 2138753 - RNA, 19 nt, Artificial Sequence
  Description of Artificial Sequence: Synthetic oligonucleotide
  Antisense strand to SEQ ID NO: 2138752
uguuccacauccuaaacca

SEQ ID NO: 2138754 - RNA, 19 nt, Artificial Sequence
  Description of Artificial Sequence: Synthetic oligonucleotide
  Sense strand starting at position 3930 of SEQ ID NO: 1882664
caaagagacuccuucggau

SEQ ID NO: 2138755 - RNA, 19 nt, Artificial Sequence
  Description of Artificial Sequence: Synthetic oligonucleotide
  Antisense strand to SEQ ID NO: 2138754
auccgaaggagucucuuug

SEQ ID NO: 2138756 - RNA, 19 nt, Artificial Sequence
  Description of Artificial Sequence: Synthetic oligonucleotide
  Sense strand starting at position 19 of SEQ ID NO: 1882665
gcaccuaguaucgagaguu

SEQ ID NO: 2138757 - RNA, 19 nt, Artificial Sequence
  Description of Artificial Sequence: Synthetic oligonucleotide
  Antisense strand to SEQ ID NO: 2138756
aacucucgauacuaggugc

SEQ ID NO: 2138758 - RNA, 19 nt, Artificial Sequence
  Description of Artificial Sequence: Synthetic oligonucleotide
  Sense strand starting at position 126 of SEQ ID NO: 1882665
uugugcuuucuguauggaa

SEQ ID NO: 2138759 - RNA, 19 nt, Artificial Sequence
  Description of Artificial Sequence: Synthetic oligonucleotide
  Antisense strand to SEQ ID NO: 2138758
uuccauacagaaagcacaa

SEQ ID NO: 2138760 - RNA, 19 nt, Artificial Sequence
  Description of Artificial Sequence: Synthetic oligonucleotide
  Sense strand starting at position 130 of SEQ ID NO: 1882665
gcuuucuguauggaagaaa

SEQ ID NO: 2138761 - RNA, 19 nt, Artificial Sequence
  Description of Artificial Sequence: Synthetic oligonucleotide
  Antisense strand to SEQ ID NO: 2138760
uuucuuccauacagaaagc

SEQ ID NO: 2138762 - RNA, 19 nt, Artificial Sequence
  Description of Artificial Sequence: Synthetic oligonucleotide
  Sense strand starting at position 171 of SEQ ID NO: 1882665
ggauucucucagcaugaca

SEQ ID NO: 2138763 - RNA, 19 nt, Artificial Sequence
  Description of Artificial Sequence: Synthetic oligonucleotide
  Antisense strand to SEQ ID NO: 2138762
ugucaugcugagagaaucc

SEQ ID NO: 2138764 - RNA, 19 nt, Artificial Sequence
  Description of Artificial Sequence: Synthetic oligonucleotide
  Sense strand starting at position 269 of SEQ ID NO: 1882665
augaaauccugucucuaag

SEQ ID NO: 2138765 - RNA, 19 nt, Artificial Sequence
  Description of Artificial Sequence: Synthetic oligonucleotide
  Antisense strand to SEQ ID NO: 2138764
cuuagagacaggauuucau

SEQ ID NO: 2138766 - RNA, 19 nt, Artificial Sequence
  Description of Artificial Sequence: Synthetic oligonucleotide
  Sense strand starting at position 345 of SEQ ID NO: 1882665
uguuaaagugauggcaaau

SEQ ID NO: 2138767 - RNA, 19 nt, Artificial Sequence
  Description of Artificial Sequence: Synthetic oligonucleotide
  Antisense strand to SEQ ID NO: 2138766
auuugccaucacuuuaaca

SEQ ID NO: 2138768 - RNA, 19 nt, Artificial Sequence
  Description of Artificial Sequence: Synthetic oligonucleotide
  Sense strand starting at position 591 of SEQ ID NO: 1882665
uccaaauggcgucacuuua

SEQ ID NO: 2138769 - RNA, 19 nt, Artificial Sequence
  Description of Artificial Sequence: Synthetic oligonucleotide
  Antisense strand to SEQ ID NO: 2138768
uaaagugacgccauuugga

SEQ ID NO: 2138770 - RNA, 19 nt, Artificial Sequence
  Description of Artificial Sequence: Synthetic oligonucleotide
  Sense strand starting at position 743 of SEQ ID NO: 1882665
agaugaaugaguugcgaaa

SEQ ID NO: 2138771 - RNA, 19 nt, Artificial Sequence
  Description of Artificial Sequence: Synthetic oligonucleotide
  Antisense strand to SEQ ID NO: 2138770
uuucgcaacucauucaucu

SEQ ID NO: 2138772 - RNA, 19 nt, Artificial Sequence
  Description of Artificial Sequence: Synthetic oligonucleotide
  Sense strand starting at position 914 of SEQ ID NO: 1882665
ucaaaucugcucuggagau

SEQ ID NO: 2138773 - RNA, 19 nt, Artificial Sequence
  Description of Artificial Sequence: Synthetic oligonucleotide
  Antisense strand to SEQ ID NO: 2138772
aucuccagagcagauuuga

SEQ ID NO: 2138774 - RNA, 19 nt, Artificial Sequence
  Description of Artificial Sequence: Synthetic oligonucleotide
  Sense strand starting at position 1015 of SEQ ID NO: 1882665
uuaagaacuuucucggaac

SEQ ID NO: 2138775 - RNA, 19 nt, Artificial Sequence
  Description of Artificial Sequence: Synthetic oligonucleotide
  Antisense strand to SEQ ID NO: 2138774
guuccgagaaaguucuuaa

SEQ ID NO: 2138776 - RNA, 19 nt, Artificial Sequence
  Description of Artificial Sequence: Synthetic oligonucleotide
  Sense strand starting at position 1026 of SEQ ID NO: 1882665
cucggaacucggcacaaua

SEQ ID NO: 2138777 - RNA, 19 nt, Artificial Sequence
  Description of Artificial Sequence: Synthetic oligonucleotide
  Antisense strand to SEQ ID NO: 2138776
uauugugccgaguuccgag

SEQ ID NO: 2138778 - RNA, 19 nt, Artificial Sequence
  Description of Artificial Sequence: Synthetic oligonucleotide
  Sense strand starting at position 1434 of SEQ ID NO: 1882665
ggcccaguucucuacucaa

SEQ ID NO: 2138779 - RNA, 19 nt, Artificial Sequence
  Description of Artificial Sequence: Synthetic oligonucleotide
  Antisense strand to SEQ ID NO: 2138778
uugaguagagaacugggcc

SEQ ID NO: 2138780 - RNA, 19 nt, Artificial Sequence
  Description of Artificial Sequence: Synthetic oligonucleotide
  Sense strand starting at position 2132 of SEQ ID NO: 1882665
ugacuaucccacugcugau

SEQ ID NO: 2138781 - RNA, 19 nt, Artificial Sequence
  Description of Artificial Sequence: Synthetic oligonucleotide
  Antisense strand to SEQ ID NO: 2138780
aucagcagugggauaguca

SEQ ID NO: 2138782 - RNA, 19 nt, Artificial Sequence
  Description of Artificial Sequence: Synthetic oligonucleotide
  Sense strand starting at position 2159 of SEQ ID NO: 1882665
agagguccuucugcuauga

SEQ ID NO: 2138783 - RNA, 19 nt, Artificial Sequence
  Description of Artificial Sequence: Synthetic oligonucleotide
  Antisense strand to SEQ ID NO: 2138782
ucauagcagaaggaccucu

SEQ ID NO: 2138784 - RNA, 19 nt, Artificial Sequence
  Description of Artificial Sequence: Synthetic oligonucleotide
  Sense strand starting at position 2280 of SEQ ID NO: 1882665
gggaaccagugaucucagu

SEQ ID NO: 2138785 - RNA, 19 nt, Artificial Sequence
  Description of Artificial Sequence: Synthetic oligonucleotide
  Antisense strand to SEQ ID NO: 2138784
acugagaucacugguuccc

SEQ ID NO: 2138786 - RNA, 19 nt, Artificial Sequence
  Description of Artificial Sequence: Synthetic oligonucleotide
  Sense strand starting at position 2331 of SEQ ID NO: 1882665
cuugauuugccuuaccgca

SEQ ID NO: 2138787 - RNA, 19 nt, Artificial Sequence
  Description of Artificial Sequence: Synthetic oligonucleotide
  Antisense strand to SEQ ID NO: 2138786
ugcgguaaggcaaaucaag

SEQ ID NO: 2138788 - RNA, 19 nt, Artificial Sequence
  Description of Artificial Sequence: Synthetic oligonucleotide
  Sense strand starting at position 2379 of SEQ ID NO: 1882665
uaagucguucuugaugaaa

SEQ ID NO: 2138789 - RNA, 19 nt, Artificial Sequence
  Description of Artificial Sequence: Synthetic oligonucleotide
  Antisense strand to SEQ ID NO: 2138788
uuucaucaagaacgacuua

SEQ ID NO: 2138790 - RNA, 19 nt, Artificial Sequence
  Description of Artificial Sequence: Synthetic oligonucleotide
  Sense strand starting at position 2602 of SEQ ID NO: 1882665
guaugugacagguaaaugu

SEQ ID NO: 2138791 - RNA, 19 nt, Artificial Sequence
  Description of Artificial Sequence: Synthetic oligonucleotide
  Antisense strand to SEQ ID NO: 2138790
acauuuaccugucacauac

SEQ ID NO: 2138792 - RNA, 19 nt, Artificial Sequence
  Description of Artificial Sequence: Synthetic oligonucleotide
  Sense strand starting at position 2716 of SEQ ID NO: 1882665
agugaaggaauguguccaa

SEQ ID NO: 2138793 - RNA, 19 nt, Artificial Sequence
  Description of Artificial Sequence: Synthetic oligonucleotide
  Antisense strand to SEQ ID NO: 2138792
uuggacacauuccuucacu

SEQ ID NO: 2138794 - RNA, 19 nt, Artificial Sequence
  Description of Artificial Sequence: Synthetic oligonucleotide
  Sense strand starting at position 2877 of SEQ ID NO: 1882665
cuuugcuuuacuggaggau

SEQ ID NO: 2138795 - RNA, 19 nt, Artificial Sequence
  Description of Artificial Sequence: Synthetic oligonucleotide
  Antisense strand to SEQ ID NO: 2138794
auccuccaguaaagcaaag

SEQ ID NO: 2138796 - RNA, 19 nt, Artificial Sequence
  Description of Artificial Sequence: Synthetic oligonucleotide
  Sense strand starting at position 2880 of SEQ ID NO: 1882665
ugcuuuacuggaggaucga

SEQ ID NO: 2138797 - RNA, 19 nt, Artificial Sequence
  Description of Artificial Sequence: Synthetic oligonucleotide
  Antisense strand to SEQ ID NO: 2138796
ucgauccuccaguaaagca

SEQ ID NO: 2138798 - RNA, 19 nt, Artificial Sequence
  Description of Artificial Sequence: Synthetic oligonucleotide
  Sense strand starting at position 2889 of SEQ ID NO: 1882665
ggaggaucgacauguuuga

SEQ ID NO: 2138799 - RNA, 19 nt, Artificial Sequence
  Description of Artificial Sequence: Synthetic oligonucleotide
  Antisense strand to SEQ ID NO: 2138798
ucaaacaugucgauccucc

SEQ ID NO: 2138800 - RNA, 19 nt, Artificial Sequence
  Description of Artificial Sequence: Synthetic oligonucleotide
  Sense strand starting at position 2893 of SEQ ID NO: 1882665
gaucgacauguuugacuaa

SEQ ID NO: 2138801 - RNA, 19 nt, Artificial Sequence
  Description of Artificial Sequence: Synthetic oligonucleotide
  Antisense strand to SEQ ID NO: 2138800
uuagucaaacaugucgauc

SEQ ID NO: 2138802 - RNA, 19 nt, Artificial Sequence
  Description of Artificial Sequence: Synthetic oligonucleotide
  Sense strand starting at position 2989 of SEQ ID NO: 1882665
guuggaguuaagccgugua

SEQ ID NO: 2138803 - RNA, 19 nt, Artificial Sequence
  Description of Artificial Sequence: Synthetic oligonucleotide
  Antisense strand to SEQ ID NO: 2138802
uacacggcuuaacuccaac

SEQ ID NO: 2138804 - RNA, 19 nt, Artificial Sequence
  Description of Artificial Sequence: Synthetic oligonucleotide
  Sense strand starting at position 3093 of SEQ ID NO: 1882665
gucagaccugagugugaau

SEQ ID NO: 2138805 - RNA, 19 nt, Artificial Sequence
  Description of Artificial Sequence: Synthetic oligonucleotide
  Antisense strand to SEQ ID NO: 2138804
auucacacucaggucugac

SEQ ID NO: 2138806 - RNA, 19 nt, Artificial Sequence
  Description of Artificial Sequence: Synthetic oligonucleotide
  Sense strand starting at position 3159 of SEQ ID NO: 1882665
cuuuguuuacuuuaggagu

SEQ ID NO: 2138807 - RNA, 19 nt, Artificial Sequence
  Description of Artificial Sequence: Synthetic oligonucleotide
  Antisense strand to SEQ ID NO: 2138806
acuccuaaaguaaacaaag

SEQ ID NO: 2138808 - RNA, 19 nt, Artificial Sequence
  Description of Artificial Sequence: Synthetic oligonucleotide
  Sense strand starting at position 3173 of SEQ ID NO: 1882665
ggaguaauaagauguaccu

SEQ ID NO: 2138809 - RNA, 19 nt, Artificial Sequence
  Description of Artificial Sequence: Synthetic oligonucleotide
  Antisense strand to SEQ ID NO: 2138808
agguacaucuuauuacucc

SEQ ID NO: 2138810 - RNA, 19 nt, Artificial Sequence
  Description of Artificial Sequence: Synthetic oligonucleotide
  Sense strand starting at position 3196 of SEQ ID NO: 1882665
gaauauuguagacagcgua

SEQ ID NO: 2138811 - RNA, 19 nt, Artificial Sequence
  Description of Artificial Sequence: Synthetic oligonucleotide
  Antisense strand to SEQ ID NO: 2138810
uacgcugucuacaauauuc

SEQ ID NO: 2138812 - RNA, 19 nt, Artificial Sequence
  Description of Artificial Sequence: Synthetic oligonucleotide
  Sense strand starting at position 3222 of SEQ ID NO: 1882665
uggaaucugacguguauua

SEQ ID NO: 2138813 - RNA, 19 nt, Artificial Sequence
  Description of Artificial Sequence: Synthetic oligonucleotide
  Antisense strand to SEQ ID NO: 2138812
uaauacacgucagauucca

SEQ ID NO: 2138814 - RNA, 19 nt, Artificial Sequence
  Description of Artificial Sequence: Synthetic oligonucleotide
  Sense strand starting at position 3224 of SEQ ID NO: 1882665
gaaucugacguguauuaag

SEQ ID NO: 2138815 - RNA, 19 nt, Artificial Sequence
  Description of Artificial Sequence: Synthetic oligonucleotide
  Antisense strand to SEQ ID NO: 2138814
cuuaauacacgucagauuc

SEQ ID NO: 2138816 - RNA, 19 nt, Artificial Sequence
  Description of Artificial Sequence: Synthetic oligonucleotide
  Sense strand starting at position 3352 of SEQ ID NO: 1882665
uugauaaggugguuccuaa

SEQ ID NO: 2138817 - RNA, 19 nt, Artificial Sequence
  Description of Artificial Sequence: Synthetic oligonucleotide
  Antisense strand to SEQ ID NO: 2138816
uuaggaaccaccuuaucaa

SEQ ID NO: 2138818 - RNA, 19 nt, Artificial Sequence
  Description of Artificial Sequence: Synthetic oligonucleotide
  Sense strand starting at position 3362 of SEQ ID NO: 1882665
gguuccuaaugagccauau

SEQ ID NO: 2138819 - RNA, 19 nt, Artificial Sequence
  Description of Artificial Sequence: Synthetic oligonucleotide
  Antisense strand to SEQ ID NO: 2138818
auauggcucauuaggaacc

SEQ ID NO: 2138820 - RNA, 19 nt, Artificial Sequence
  Description of Artificial Sequence: Synthetic oligonucleotide
  Sense strand starting at position 3438 of SEQ ID NO: 1882665
auaaauuauagucgggcua

SEQ ID NO: 2138821 - RNA, 19 nt, Artificial Sequence
  Description of Artificial Sequence: Synthetic oligonucleotide
  Antisense strand to SEQ ID NO: 2138820
uagcccgacuauaauuuau

SEQ ID NO: 2138822 - RNA, 19 nt, Artificial Sequence
  Description of Artificial Sequence: Synthetic oligonucleotide
  Sense strand starting at position 3712 of SEQ ID NO: 1882665
acuugauuccuagagcaau

SEQ ID NO: 2138823 - RNA, 19 nt, Artificial Sequence
  Description of Artificial Sequence: Synthetic oligonucleotide
  Antisense strand to SEQ ID NO: 2138822
auugcucuaggaaucaagu

SEQ ID NO: 2138824 - RNA, 19 nt, Artificial Sequence
  Description of Artificial Sequence: Synthetic oligonucleotide
  Sense strand starting at position 3753 of SEQ ID NO: 1882665
uuauccguaccucauuauu

SEQ ID NO: 2138825 - RNA, 19 nt, Artificial Sequence
  Description of Artificial Sequence: Synthetic oligonucleotide
  Antisense strand to SEQ ID NO: 2138824
aauaaugagguacggauaa

SEQ ID NO: 2138826 - RNA, 19 nt, Artificial Sequence
  Description of Artificial Sequence: Synthetic oligonucleotide
  Sense strand starting at position 3767 of SEQ ID NO: 1882665
uuauuuagucaauguguac

SEQ ID NO: 2138827 - RNA, 19 nt, Artificial Sequence
  Description of Artificial Sequence: Synthetic oligonucleotide
  Antisense strand to SEQ ID NO: 2138826
guacacauugacuaaauaa

SEQ ID NO: 2138828 - RNA, 19 nt, Artificial Sequence
  Description of Artificial Sequence: Synthetic oligonucleotide
  Sense strand starting at position 3957 of SEQ ID NO: 1882665
acuccaggugucuauaaca

SEQ ID NO: 2138829 - RNA, 19 nt, Artificial Sequence
  Description of Artificial Sequence: Synthetic oligonucleotide
  Antisense strand to SEQ ID NO: 2138828
uguuauagacaccuggagu

SEQ ID NO: 2138830 - RNA, 19 nt, Artificial Sequence
  Description of Artificial Sequence: Synthetic oligonucleotide
  Sense strand starting at position 3979 of SEQ ID NO: 1882665
uugugaaccucaucaguga

SEQ ID NO: 2138831 - RNA, 19 nt, Artificial Sequence
  Description of Artificial Sequence: Synthetic oligonucleotide
  Antisense strand to SEQ ID NO: 2138830
ucacugaugagguucacaa

SEQ ID NO: 2138832 - RNA, 19 nt, Artificial Sequence
  Description of Artificial Sequence: Synthetic oligonucleotide
  Sense strand starting at position 3980 of SEQ ID NO: 1882665
ugugaaccucaucagugau

SEQ ID NO: 2138833 - RNA, 19 nt, Artificial Sequence
  Description of Artificial Sequence: Synthetic oligonucleotide
  Antisense strand to SEQ ID NO: 2138832
aucacugaugagguucaca

SEQ ID NO: 2138834 - RNA, 19 nt, Artificial Sequence
  Description of Artificial Sequence: Synthetic oligonucleotide
  Sense strand starting at position 3983 of SEQ ID NO: 1882665
gaaccucaucagugauuga

SEQ ID NO: 2138835 - RNA, 19 nt, Artificial Sequence
  Description of Artificial Sequence: Synthetic oligonucleotide
  Antisense strand to SEQ ID NO: 2138834
ucaaucacugaugagguuc

SEQ ID NO: 2138836 - RNA, 19 nt, Artificial Sequence
  Description of Artificial Sequence: Synthetic oligonucleotide
  Sense strand starting at position 65 of SEQ ID NO: 1882666
uagggaagugguugaggau

SEQ ID NO: 2138837 - RNA, 19 nt, Artificial Sequence
  Description of Artificial Sequence: Synthetic oligonucleotide
  Antisense strand to SEQ ID NO: 2138836
auccucaaccacuucccua

SEQ ID NO: 2138838 - RNA, 19 nt, Artificial Sequence
  Description of Artificial Sequence: Synthetic oligonucleotide
  Sense strand starting at position 68 of SEQ ID NO: 1882666
ggaagugguugaggaugaa

SEQ ID NO: 2138839 - RNA, 19 nt, Artificial Sequence
  Description of Artificial Sequence: Synthetic oligonucleotide
  Antisense strand to SEQ ID NO: 2138838
uucauccucaaccacuucc

SEQ ID NO: 2138840 - RNA, 19 nt, Artificial Sequence
  Description of Artificial Sequence: Synthetic oligonucleotide
  Sense strand starting at position 107 of SEQ ID NO: 1882666
aggaauucucaauggccau

SEQ ID NO: 2138841 - RNA, 19 nt, Artificial Sequence
  Description of Artificial Sequence: Synthetic oligonucleotide
  Antisense strand to SEQ ID NO: 2138840
auggccauugagaauuccu

SEQ ID NO: 2138842 - RNA, 19 nt, Artificial Sequence
  Description of Artificial Sequence: Synthetic oligonucleotide
  Sense strand starting at position 162 of SEQ ID NO: 1882666
ggaguucuggaccauguga

SEQ ID NO: 2138843 - RNA, 19 nt, Artificial Sequence
  Description of Artificial Sequence: Synthetic oligonucleotide
  Antisense strand to SEQ ID NO: 2138842
ucacaugguccagaacucc

SEQ ID NO: 2138844 - RNA, 19 nt, Artificial Sequence
  Description of Artificial Sequence: Synthetic oligonucleotide
  Sense strand starting at position 164 of SEQ ID NO: 1882666
aguucuggaccaugugaaa

SEQ ID NO: 2138845 - RNA, 19 nt, Artificial Sequence
  Description of Artificial Sequence: Synthetic oligonucleotide
  Antisense strand to SEQ ID NO: 2138844
uuucacaugguccagaacu

SEQ ID NO: 2138846 - RNA, 19 nt, Artificial Sequence
  Description of Artificial Sequence: Synthetic oligonucleotide
  Sense strand starting at position 186 of SEQ ID NO: 1882666
aaaguuaaccaacguggaa

SEQ ID NO: 2138847 - RNA, 19 nt, Artificial Sequence
  Description of Artificial Sequence: Synthetic oligonucleotide
  Antisense strand to SEQ ID NO: 2138846
uuccacguugguuaacuuu

SEQ ID NO: 2138848 - RNA, 19 nt, Artificial Sequence
  Description of Artificial Sequence: Synthetic oligonucleotide
  Sense strand starting at position 188 of SEQ ID NO: 1882666
aguuaaccaacguggaaau

SEQ ID NO: 2138849 - RNA, 19 nt, Artificial Sequence
  Description of Artificial Sequence: Synthetic oligonucleotide
  Antisense strand to SEQ ID NO: 2138848
auuuccacguugguuaacu

SEQ ID NO: 2138850 - RNA, 19 nt, Artificial Sequence
  Description of Artificial Sequence: Synthetic oligonucleotide
  Sense strand starting at position 198 of SEQ ID NO: 1882666
cguggaaaucucggcauuu

SEQ ID NO: 2138851 - RNA, 19 nt, Artificial Sequence
  Description of Artificial Sequence: Synthetic oligonucleotide
  Antisense strand to SEQ ID NO: 2138850
aaaugccgagauuuccacg

SEQ ID NO: 2138852 - RNA, 19 nt, Artificial Sequence
  Description of Artificial Sequence: Synthetic oligonucleotide
  Sense strand starting at position 199 of SEQ ID NO: 1882666
guggaaaucucggcauuuc

SEQ ID NO: 2138853 - RNA, 19 nt, Artificial Sequence
  Description of Artificial Sequence: Synthetic oligonucleotide
  Antisense strand to SEQ ID NO: 2138852
gaaaugccgagauuuccac

SEQ ID NO: 2138854 - RNA, 19 nt, Artificial Sequence
  Description of Artificial Sequence: Synthetic oligonucleotide
  Sense strand starting at position 245 of SEQ ID NO: 1882666
ggaaucuauucuccacgca

SEQ ID NO: 2138855 - RNA, 19 nt, Artificial Sequence
  Description of Artificial Sequence: Synthetic oligonucleotide
  Antisense strand to SEQ ID NO: 2138854
ugcguggagaauagauucc

SEQ ID NO: 2138856 - RNA, 19 nt, Artificial Sequence
  Description of Artificial Sequence: Synthetic oligonucleotide
  Sense strand starting at position 292 of SEQ ID NO: 1882666
ucgggucuaucacuucuau

SEQ ID NO: 2138857 - RNA, 19 nt, Artificial Sequence
  Description of Artificial Sequence: Synthetic oligonucleotide
  Antisense strand to SEQ ID NO: 2138856
auagaagugauagacccga

SEQ ID NO: 2138858 - RNA, 19 nt, Artificial Sequence
  Description of Artificial Sequence: Synthetic oligonucleotide
  Sense strand starting at position 415 of SEQ ID NO: 1882666
acggauuuauagcaucagu

SEQ ID NO: 2138859 - RNA, 19 nt, Artificial Sequence
  Description of Artificial Sequence: Synthetic oligonucleotide
  Antisense strand to SEQ ID NO: 2138858
acugaugcuauaaauccgu

SEQ ID NO: 2138860 - RNA, 19 nt, Artificial Sequence
  Description of Artificial Sequence: Synthetic oligonucleotide
  Sense strand starting at position 426 of SEQ ID NO: 1882666
gcaucaguguucccuccuu

SEQ ID NO: 2138861 - RNA, 19 nt, Artificial Sequence
  Description of Artificial Sequence: Synthetic oligonucleotide
  Antisense strand to SEQ ID NO: 2138860
aaggagggaacacugaugc

SEQ ID NO: 2138862 - RNA, 19 nt, Artificial Sequence
  Description of Artificial Sequence: Synthetic oligonucleotide
  Sense strand starting at position 431 of SEQ ID NO: 1882666
aguguucccuccuucggaa

SEQ ID NO: 2138863 - RNA, 19 nt, Artificial Sequence
  Description of Artificial Sequence: Synthetic oligonucleotide
  Antisense strand to SEQ ID NO: 2138862
uuccgaaggagggaacacu

SEQ ID NO: 2138864 - RNA, 19 nt, Artificial Sequence
  Description of Artificial Sequence: Synthetic oligonucleotide
  Sense strand starting at position 808 of SEQ ID NO: 1882666
caggaauuucugcgguggu

SEQ ID NO: 2138865 - RNA, 19 nt, Artificial Sequence
  Description of Artificial Sequence: Synthetic oligonucleotide
  Antisense strand to SEQ ID NO: 2138864
accaccgcagaaauuccug

SEQ ID NO: 2138866 - RNA, 19 nt, Artificial Sequence
  Description of Artificial Sequence: Synthetic oligonucleotide
  Sense strand starting at position 2022 of SEQ ID NO: 1882666
gcgacucucagcgcagauu

SEQ ID NO: 2138867 - RNA, 19 nt, Artificial Sequence
  Description of Artificial Sequence: Synthetic oligonucleotide
  Antisense strand to SEQ ID NO: 2138866
aaucugcgcugagagucgc

SEQ ID NO: 2138868 - RNA, 19 nt, Artificial Sequence
  Description of Artificial Sequence: Synthetic oligonucleotide
  Sense strand starting at position 2023 of SEQ ID NO: 1882666
cgacucucagcgcagauua

SEQ ID NO: 2138869 - RNA, 19 nt, Artificial Sequence
  Description of Artificial Sequence: Synthetic oligonucleotide
  Antisense strand to SEQ ID NO: 2138868
uaaucugcgcugagagucg

SEQ ID NO: 2138870 - RNA, 19 nt, Artificial Sequence
  Description of Artificial Sequence: Synthetic oligonucleotide
  Sense strand starting at position 2482 of SEQ ID NO: 1882666
gcagccugucauuagaucu

SEQ ID NO: 2138871 - RNA, 19 nt, Artificial Sequence
  Description of Artificial Sequence: Synthetic oligonucleotide
  Antisense strand to SEQ ID NO: 2138870
agaucuaaugacaggcugc

SEQ ID NO: 2138872 - RNA, 19 nt, Artificial Sequence
  Description of Artificial Sequence: Synthetic oligonucleotide
  Sense strand starting at position 2512 of SEQ ID NO: 1882666
gcccaauagguucgccuua

SEQ ID NO: 2138873 - RNA, 19 nt, Artificial Sequence
  Description of Artificial Sequence: Synthetic oligonucleotide
  Antisense strand to SEQ ID NO: 2138872
uaaggcgaaccuauugggc

SEQ ID NO: 2138874 - RNA, 19 nt, Artificial Sequence
  Description of Artificial Sequence: Synthetic oligonucleotide
  Sense strand starting at position 2514 of SEQ ID NO: 1882666
ccaauagguucgccuuacu

SEQ ID NO: 2138875 - RNA, 19 nt, Artificial Sequence
  Description of Artificial Sequence: Synthetic oligonucleotide
  Antisense strand to SEQ ID NO: 2138874
aguaaggcgaaccuauugg

SEQ ID NO: 2138876 - RNA, 19 nt, Artificial Sequence
  Description of Artificial Sequence: Synthetic oligonucleotide
  Sense strand starting at position 2581 of SEQ ID NO: 1882666
gaguuuaaugcaugcagaa

SEQ ID NO: 2138877 - RNA, 19 nt, Artificial Sequence
  Description of Artificial Sequence: Synthetic oligonucleotide
  Antisense strand to SEQ ID NO: 2138876
uucugcaugcauuaaacuc

SEQ ID NO: 2138878 - RNA, 19 nt, Artificial Sequence
  Description of Artificial Sequence: Synthetic oligonucleotide
  Sense strand starting at position 2651 of SEQ ID NO: 1882666
ggagcuuuauugcucaaac

SEQ ID NO: 2138879 - RNA, 19 nt, Artificial Sequence
  Description of Artificial Sequence: Synthetic oligonucleotide
  Antisense strand to SEQ ID NO: 2138878
guuugagcaauaaagcucc

SEQ ID NO: 2138880 - RNA, 19 nt, Artificial Sequence
  Description of Artificial Sequence: Synthetic oligonucleotide
  Sense strand starting at position 2691 of SEQ ID NO: 1882666
ugggucaucuaaggauaau

SEQ ID NO: 2138881 - RNA, 19 nt, Artificial Sequence
  Description of Artificial Sequence: Synthetic oligonucleotide
  Antisense strand to SEQ ID NO: 2138880
auuauccuuagaugaccca

SEQ ID NO: 2138882 - RNA, 19 nt, Artificial Sequence
  Description of Artificial Sequence: Synthetic oligonucleotide
  Sense strand starting at position 2701 of SEQ ID NO: 1882666
aaggauaauuaggcaggua

SEQ ID NO: 2138883 - RNA, 19 nt, Artificial Sequence
  Description of Artificial Sequence: Synthetic oligonucleotide
  Antisense strand to SEQ ID NO: 2138882
uaccugccuaauuauccuu

SEQ ID NO: 2138884 - RNA, 19 nt, Artificial Sequence
  Description of Artificial Sequence: Synthetic oligonucleotide
  Sense strand starting at position 2728 of SEQ ID NO: 1882666
gggagagggcagugcuuau

SEQ ID NO: 2138885 - RNA, 19 nt, Artificial Sequence
  Description of Artificial Sequence: Synthetic oligonucleotide
  Antisense strand to SEQ ID NO: 2138884
auaagcacugcccucuccc

SEQ ID NO: 2138886 - RNA, 19 nt, Artificial Sequence
  Description of Artificial Sequence: Synthetic oligonucleotide
  Sense strand starting at position 2826 of SEQ ID NO: 1882666
cugguugagccagauuagu

SEQ ID NO: 2138887 - RNA, 19 nt, Artificial Sequence
  Description of Artificial Sequence: Synthetic oligonucleotide
  Antisense strand to SEQ ID NO: 2138886
acuaaucuggcucaaccag

SEQ ID NO: 2138888 - RNA, 19 nt, Artificial Sequence
  Description of Artificial Sequence: Synthetic oligonucleotide
  Sense strand starting at position 2914 of SEQ ID NO: 1882666
guugaugauagugguguua

SEQ ID NO: 2138889 - RNA, 19 nt, Artificial Sequence
  Description of Artificial Sequence: Synthetic oligonucleotide
  Antisense strand to SEQ ID NO: 2138888
uaacaccacuaucaucaac

SEQ ID NO: 2138890 - RNA, 19 nt, Artificial Sequence
  Description of Artificial Sequence: Synthetic oligonucleotide
  Sense strand starting at position 3158 of SEQ ID NO: 1882666
caaggcagcuuggaaauua

SEQ ID NO: 2138891 - RNA, 19 nt, Artificial Sequence
  Description of Artificial Sequence: Synthetic oligonucleotide
  Antisense strand to SEQ ID NO: 2138890
uaauuuccaagcugccuug

SEQ ID NO: 2138892 - RNA, 19 nt, Artificial Sequence
  Description of Artificial Sequence: Synthetic oligonucleotide
  Sense strand starting at position 3215 of SEQ ID NO: 1882666
ggacuugaguggagacaga

SEQ ID NO: 2138893 - RNA, 19 nt, Artificial Sequence
  Description of Artificial Sequence: Synthetic oligonucleotide
  Antisense strand to SEQ ID NO: 2138892
ucugucuccacucaagucc

SEQ ID NO: 2138894 - RNA, 19 nt, Artificial Sequence
  Description of Artificial Sequence: Synthetic oligonucleotide
  Sense strand starting at position 3335 of SEQ ID NO: 1882666
aggcacuucucaucuguga

SEQ ID NO: 2138895 - RNA, 19 nt, Artificial Sequence
  Description of Artificial Sequence: Synthetic oligonucleotide
  Antisense strand to SEQ ID NO: 2138894
ucacagaugagaagugccu

SEQ ID NO: 2138896 - RNA, 19 nt, Artificial Sequence
  Description of Artificial Sequence: Synthetic oligonucleotide
  Sense strand starting at position 3339 of SEQ ID NO: 1882666
acuucucaucugugaccau

SEQ ID NO: 2138897 - RNA, 19 nt, Artificial Sequence
  Description of Artificial Sequence: Synthetic oligonucleotide
  Antisense strand to SEQ ID NO: 2138896
auggucacagaugagaagu

SEQ ID NO: 2138898 - RNA, 19 nt, Artificial Sequence
  Description of Artificial Sequence: Synthetic oligonucleotide
  Sense strand starting at position 3350 of SEQ ID NO: 1882666
gugaccaugcacugaguuu

SEQ ID NO: 2138899 - RNA, 19 nt, Artificial Sequence
  Description of Artificial Sequence: Synthetic oligonucleotide
  Antisense strand to SEQ ID NO: 2138898
aaacucagugcauggucac

SEQ ID NO: 2138900 - RNA, 19 nt, Artificial Sequence
  Description of Artificial Sequence: Synthetic oligonucleotide
  Sense strand starting at position 3373 of SEQ ID NO: 1882666
aaggcagaauguguguaau

SEQ ID NO: 2138901 - RNA, 19 nt, Artificial Sequence
  Description of Artificial Sequence: Synthetic oligonucleotide
  Antisense strand to SEQ ID NO: 2138900
auuacacacauucugccuu

SEQ ID NO: 2138902 - RNA, 19 nt, Artificial Sequence
  Description of Artificial Sequence: Synthetic oligonucleotide
  Sense strand starting at position 3375 of SEQ ID NO: 1882666
ggcagaauguguguaauuu

SEQ ID NO: 2138903 - RNA, 19 nt, Artificial Sequence
  Description of Artificial Sequence: Synthetic oligonucleotide
  Antisense strand to SEQ ID NO: 2138902
aaauuacacacauucugcc

SEQ ID NO: 2138904 - RNA, 19 nt, Artificial Sequence
  Description of Artificial Sequence: Synthetic oligonucleotide
  Sense strand starting at position 3430 of SEQ ID NO: 1882666
guugaucuucguguugcaa

SEQ ID NO: 2138905 - RNA, 19 nt, Artificial Sequence
  Description of Artificial Sequence: Synthetic oligonucleotide
  Antisense strand to SEQ ID NO: 2138904
uugcaacacgaagaucaac

SEQ ID NO: 2138906 - RNA, 19 nt, Artificial Sequence
  Description of Artificial Sequence: Synthetic oligonucleotide
  Sense strand starting at position 3767 of SEQ ID NO: 1882666
gcccaucaguacuucugaa

SEQ ID NO: 2138907 - RNA, 19 nt, Artificial Sequence
  Description of Artificial Sequence: Synthetic oligonucleotide
  Antisense strand to SEQ ID NO: 2138906
uucagaaguacugaugggc

SEQ ID NO: 2138908 - RNA, 19 nt, Artificial Sequence
  Description of Artificial Sequence: Synthetic oligonucleotide
  Sense strand starting at position 3838 of SEQ ID NO: 1882666
gcauuuguuugaccaggca

SEQ ID NO: 2138909 - RNA, 19 nt, Artificial Sequence
  Description of Artificial Sequence: Synthetic oligonucleotide
  Antisense strand to SEQ ID NO: 2138908
ugccuggucaaacaaaugc

SEQ ID NO: 2138910 - RNA, 19 nt, Artificial Sequence
  Description of Artificial Sequence: Synthetic oligonucleotide
  Sense strand starting at position 3878 of SEQ ID NO: 1882666
ggaugacaaugauguagaa

SEQ ID NO: 2138911 - RNA, 19 nt, Artificial Sequence
  Description of Artificial Sequence: Synthetic oligonucleotide
  Antisense strand to SEQ ID NO: 2138910
uucuacaucauugucaucc

SEQ ID NO: 2138912 - RNA, 19 nt, Artificial Sequence
  Description of Artificial Sequence: Synthetic oligonucleotide
  Sense strand starting at position 3930 of SEQ ID NO: 1882666
ggucuugcaggaugagaua

SEQ ID NO: 2138913 - RNA, 19 nt, Artificial Sequence
  Description of Artificial Sequence: Synthetic oligonucleotide
  Antisense strand to SEQ ID NO: 2138912
uaucucauccugcaagacc

SEQ ID NO: 2138914 - RNA, 19 nt, Artificial Sequence
  Description of Artificial Sequence: Synthetic oligonucleotide
  Sense strand starting at position 3969 of SEQ ID NO: 1882666
uuaguauguguuuaaccgu

SEQ ID NO: 2138915 - RNA, 19 nt, Artificial Sequence
  Description of Artificial Sequence: Synthetic oligonucleotide
  Antisense strand to SEQ ID NO: 2138914
acgguuaaacacauacuaa

SEQ ID NO: 2138916 - RNA, 19 nt, Artificial Sequence
  Description of Artificial Sequence: Synthetic oligonucleotide
  Sense strand starting at position 12 of SEQ ID NO: 1882667
ugaauugucuauucuugac

SEQ ID NO: 2138917 - RNA, 19 nt, Artificial Sequence
  Description of Artificial Sequence: Synthetic oligonucleotide
  Antisense strand to SEQ ID NO: 2138916
gucaagaauagacaauuca

SEQ ID NO: 2138918 - RNA, 19 nt, Artificial Sequence
  Description of Artificial Sequence: Synthetic oligonucleotide
  Sense strand starting at position 640 of SEQ ID NO: 1882667
agcauaucugaagaagugu

SEQ ID NO: 2138919 - RNA, 19 nt, Artificial Sequence
  Description of Artificial Sequence: Synthetic oligonucleotide
  Antisense strand to SEQ ID NO: 2138918
acacuucuucagauaugcu

SEQ ID NO: 2138920 - RNA, 19 nt, Artificial Sequence
  Description of Artificial Sequence: Synthetic oligonucleotide
  Sense strand starting at position 770 of SEQ ID NO: 1882667
agagaaaccacgcaucugu

SEQ ID NO: 2138921 - RNA, 19 nt, Artificial Sequence
  Description of Artificial Sequence: Synthetic oligonucleotide
  Antisense strand to SEQ ID NO: 2138920
acagaugcgugguuucucu

SEQ ID NO: 2138922 - RNA, 19 nt, Artificial Sequence
  Description of Artificial Sequence: Synthetic oligonucleotide
  Sense strand starting at position 827 of SEQ ID NO: 1882667
acagcuuuggagcaauaua

SEQ ID NO: 2138923 - RNA, 19 nt, Artificial Sequence
  Description of Artificial Sequence: Synthetic oligonucleotide
  Antisense strand to SEQ ID NO: 2138922
uauauugcuccaaagcugu

SEQ ID NO: 2138924 - RNA, 19 nt, Artificial Sequence
  Description of Artificial Sequence: Synthetic oligonucleotide
  Sense strand starting at position 1063 of SEQ ID NO: 1882667
cuuguaacaccauaguauu

SEQ ID NO: 2138925 - RNA, 19 nt, Artificial Sequence
  Description of Artificial Sequence: Synthetic oligonucleotide
  Antisense strand to SEQ ID NO: 2138924
aauacuaugguguuacaag

SEQ ID NO: 2138926 - RNA, 19 nt, Artificial Sequence
  Description of Artificial Sequence: Synthetic oligonucleotide
  Sense strand starting at position 1217 of SEQ ID NO: 1882667
uguauaaucaggugagaaa

SEQ ID NO: 2138927 - RNA, 19 nt, Artificial Sequence
  Description of Artificial Sequence: Synthetic oligonucleotide
  Antisense strand to SEQ ID NO: 2138926
uuucucaccugauuauaca

SEQ ID NO: 2138928 - RNA, 19 nt, Artificial Sequence
  Description of Artificial Sequence: Synthetic oligonucleotide
  Sense strand starting at position 1230 of SEQ ID NO: 1882667
gagaaauguugccucuuaa

SEQ ID NO: 2138929 - RNA, 19 nt, Artificial Sequence
  Description of Artificial Sequence: Synthetic oligonucleotide
  Antisense strand to SEQ ID NO: 2138928
uuaagaggcaacauuucuc

SEQ ID NO: 2138930 - RNA, 19 nt, Artificial Sequence
  Description of Artificial Sequence: Synthetic oligonucleotide
  Sense strand starting at position 1283 of SEQ ID NO: 1882667
ugcgcauaacuggaaauca

SEQ ID NO: 2138931 - RNA, 19 nt, Artificial Sequence
  Description of Artificial Sequence: Synthetic oligonucleotide
  Antisense strand to SEQ ID NO: 2138930
ugauuuccaguuaugcgca

SEQ ID NO: 2138932 - RNA, 19 nt, Artificial Sequence
  Description of Artificial Sequence: Synthetic oligonucleotide
  Sense strand starting at position 1469 of SEQ ID NO: 1882667
gaauuugacuuagaggcau

SEQ ID NO: 2138933 - RNA, 19 nt, Artificial Sequence
  Description of Artificial Sequence: Synthetic oligonucleotide
  Antisense strand to SEQ ID NO: 2138932
augccucuaagucaaauuc

SEQ ID NO: 2138934 - RNA, 19 nt, Artificial Sequence
  Description of Artificial Sequence: Synthetic oligonucleotide
  Sense strand starting at position 1487 of SEQ ID NO: 1882667
ucgugacauguauauuaaa

SEQ ID NO: 2138935 - RNA, 19 nt, Artificial Sequence
  Description of Artificial Sequence: Synthetic oligonucleotide
  Antisense strand to SEQ ID NO: 2138934
uuuaauauacaugucacga

SEQ ID NO: 2138936 - RNA, 19 nt, Artificial Sequence
  Description of Artificial Sequence: Synthetic oligonucleotide
  Sense strand starting at position 1545 of SEQ ID NO: 1882667
gauagauuguauccuaaag

SEQ ID NO: 2138937 - RNA, 19 nt, Artificial Sequence
  Description of Artificial Sequence: Synthetic oligonucleotide
  Antisense strand to SEQ ID NO: 2138936
cuuuaggauacaaucuauc

SEQ ID NO: 2138938 - RNA, 19 nt, Artificial Sequence
  Description of Artificial Sequence: Synthetic oligonucleotide
  Sense strand starting at position 1632 of SEQ ID NO: 1882667
gugacaugcggguaacaau

SEQ ID NO: 2138939 - RNA, 19 nt, Artificial Sequence
  Description of Artificial Sequence: Synthetic oligonucleotide
  Antisense strand to SEQ ID NO: 2138938
auuguuacccgcaugucac

SEQ ID NO: 2138940 - RNA, 19 nt, Artificial Sequence
  Description of Artificial Sequence: Synthetic oligonucleotide
  Sense strand starting at position 1643 of SEQ ID NO: 1882667
guaacaauggguugugaaa

SEQ ID NO: 2138941 - RNA, 19 nt, Artificial Sequence
  Description of Artificial Sequence: Synthetic oligonucleotide
  Antisense strand to SEQ ID NO: 2138940
uuucacaacccauuguuac

SEQ ID NO: 2138942 - RNA, 19 nt, Artificial Sequence
  Description of Artificial Sequence: Synthetic oligonucleotide
  Sense strand starting at position 1827 of SEQ ID NO: 1882667
acacuuuggcauugaauga

SEQ ID NO: 2138943 - RNA, 19 nt, Artificial Sequence
  Description of Artificial Sequence: Synthetic oligonucleotide
  Antisense strand to SEQ ID NO: 2138942
ucauucaaugccaaagugu

SEQ ID NO: 2138944 - RNA, 19 nt, Artificial Sequence
  Description of Artificial Sequence: Synthetic oligonucleotide
  Sense strand starting at position 1832 of SEQ ID NO: 1882667
uuggcauugaaugagguua

SEQ ID NO: 2138945 - RNA, 19 nt, Artificial Sequence
  Description of Artificial Sequence: Synthetic oligonucleotide
  Antisense strand to SEQ ID NO: 2138944
uaaccucauucaaugccaa

SEQ ID NO: 2138946 - RNA, 19 nt, Artificial Sequence
  Description of Artificial Sequence: Synthetic oligonucleotide
  Sense strand starting at position 1862 of SEQ ID NO: 1882667
uuaaauuggucucuaagaa

SEQ ID NO: 2138947 - RNA, 19 nt, Artificial Sequence
  Description of Artificial Sequence: Synthetic oligonucleotide
  Antisense strand to SEQ ID NO: 2138946
uucuuagagaccaauuuaa

SEQ ID NO: 2138948 - RNA, 19 nt, Artificial Sequence
  Description of Artificial Sequence: Synthetic oligonucleotide
  Sense strand starting at position 2011 of SEQ ID NO: 1882667
uuucuagaacucugaguug

SEQ ID NO: 2138949 - RNA, 19 nt, Artificial Sequence
  Description of Artificial Sequence: Synthetic oligonucleotide
  Antisense strand to SEQ ID NO: 2138948
caacucagaguucuagaaa

SEQ ID NO: 2138950 - RNA, 19 nt, Artificial Sequence
  Description of Artificial Sequence: Synthetic oligonucleotide
  Sense strand starting at position 2014 of SEQ ID NO: 1882667
cuagaacucugaguugaag

SEQ ID NO: 2138951 - RNA, 19 nt, Artificial Sequence
  Description of Artificial Sequence: Synthetic oligonucleotide
  Antisense strand to SEQ ID NO: 2138950
cuucaacucagaguucuag

SEQ ID NO: 2138952 - RNA, 19 nt, Artificial Sequence
  Description of Artificial Sequence: Synthetic oligonucleotide
  Sense strand starting at position 2016 of SEQ ID NO: 1882667
agaacucugaguugaagcu

SEQ ID NO: 2138953 - RNA, 19 nt, Artificial Sequence
  Description of Artificial Sequence: Synthetic oligonucleotide
  Antisense strand to SEQ ID NO: 2138952
agcuucaacucagaguucu

SEQ ID NO: 2138954 - RNA, 19 nt, Artificial Sequence
  Description of Artificial Sequence: Synthetic oligonucleotide
  Sense strand starting at position 2017 of SEQ ID NO: 1882667
gaacucugaguugaagcua

SEQ ID NO: 2138955 - RNA, 19 nt, Artificial Sequence
  Description of Artificial Sequence: Synthetic oligonucleotide
  Antisense strand to SEQ ID NO: 2138954
uagcuucaacucagaguuc

SEQ ID NO: 2138956 - RNA, 19 nt, Artificial Sequence
  Description of Artificial Sequence: Synthetic oligonucleotide
  Sense strand starting at position 2022 of SEQ ID NO: 1882667
cugaguugaagcuaugaau

SEQ ID NO: 2138957 - RNA, 19 nt, Artificial Sequence
  Description of Artificial Sequence: Synthetic oligonucleotide
  Antisense strand to SEQ ID NO: 2138956
auucauagcuucaacucag

SEQ ID NO: 2138958 - RNA, 19 nt, Artificial Sequence
  Description of Artificial Sequence: Synthetic oligonucleotide
  Sense strand starting at position 2100 of SEQ ID NO: 1882667
acuugagaccauuguccua

SEQ ID NO: 2138959 - RNA, 19 nt, Artificial Sequence
  Description of Artificial Sequence: Synthetic oligonucleotide
  Antisense strand to SEQ ID NO: 2138958
uaggacaauggucucaagu

SEQ ID NO: 2138960 - RNA, 19 nt, Artificial Sequence
  Description of Artificial Sequence: Synthetic oligonucleotide
  Sense strand starting at position 2102 of SEQ ID NO: 1882667
uugagaccauuguccuaua

SEQ ID NO: 2138961 - RNA, 19 nt, Artificial Sequence
  Description of Artificial Sequence: Synthetic oligonucleotide
  Antisense strand to SEQ ID NO: 2138960
uauaggacaauggucucaa

SEQ ID NO: 2138962 - RNA, 19 nt, Artificial Sequence
  Description of Artificial Sequence: Synthetic oligonucleotide
  Sense strand starting at position 2103 of SEQ ID NO: 1882667
ugagaccauuguccuauau

SEQ ID NO: 2138963 - RNA, 19 nt, Artificial Sequence
  Description of Artificial Sequence: Synthetic oligonucleotide
  Antisense strand to SEQ ID NO: 2138962
auauaggacaauggucuca

SEQ ID NO: 2138964 - RNA, 19 nt, Artificial Sequence
  Description of Artificial Sequence: Synthetic oligonucleotide
  Sense strand starting at position 2197 of SEQ ID NO: 1882667
ugcuauagcagauagagua

SEQ ID NO: 2138965 - RNA, 19 nt, Artificial Sequence
  Description of Artificial Sequence: Synthetic oligonucleotide
  Antisense strand to SEQ ID NO: 2138964
uacucuaucugcuauagca

SEQ ID NO: 2138966 - RNA, 19 nt, Artificial Sequence
  Description of Artificial Sequence: Synthetic oligonucleotide
  Sense strand starting at position 2204 of SEQ ID NO: 1882667
gcagauagaguauauuauu

SEQ ID NO: 2138967 - RNA, 19 nt, Artificial Sequence
  Description of Artificial Sequence: Synthetic oligonucleotide
  Antisense strand to SEQ ID NO: 2138966
aauaauauacucuaucugc

SEQ ID NO: 2138968 - RNA, 19 nt, Artificial Sequence
  Description of Artificial Sequence: Synthetic oligonucleotide
  Sense strand starting at position 2303 of SEQ ID NO: 1882667
uagggucccuuucuagaga

SEQ ID NO: 2138969 - RNA, 19 nt, Artificial Sequence
  Description of Artificial Sequence: Synthetic oligonucleotide
  Antisense strand to SEQ ID NO: 2138968
ucucuagaaagggacccua

SEQ ID NO: 2138970 - RNA, 19 nt, Artificial Sequence
  Description of Artificial Sequence: Synthetic oligonucleotide
  Sense strand starting at position 2430 of SEQ ID NO: 1882667
ugaguugaauacguaauga

SEQ ID NO: 2138971 - RNA, 19 nt, Artificial Sequence
  Description of Artificial Sequence: Synthetic oligonucleotide
  Antisense strand to SEQ ID NO: 2138970
ucauuacguauucaacuca

SEQ ID NO: 2138972 - RNA, 19 nt, Artificial Sequence
  Description of Artificial Sequence: Synthetic oligonucleotide
  Sense strand starting at position 2463 of SEQ ID NO: 1882667
uucucuugggcuuauccaa

SEQ ID NO: 2138973 - RNA, 19 nt, Artificial Sequence
  Description of Artificial Sequence: Synthetic oligonucleotide
  Antisense strand to SEQ ID NO: 2138972
uuggauaagcccaagagaa

SEQ ID NO: 2138974 - RNA, 19 nt, Artificial Sequence
  Description of Artificial Sequence: Synthetic oligonucleotide
  Sense strand starting at position 2479 of SEQ ID NO: 1882667
caaguacaacuuggagauu

SEQ ID NO: 2138975 - RNA, 19 nt, Artificial Sequence
  Description of Artificial Sequence: Synthetic oligonucleotide
  Antisense strand to SEQ ID NO: 2138974
aaucuccaaguuguacuug

SEQ ID NO: 2138976 - RNA, 19 nt, Artificial Sequence
  Description of Artificial Sequence: Synthetic oligonucleotide
  Sense strand starting at position 2579 of SEQ ID NO: 1882667
ggaucauuacagggugauu

SEQ ID NO: 2138977 - RNA, 19 nt, Artificial Sequence
  Description of Artificial Sequence: Synthetic oligonucleotide
  Antisense strand to SEQ ID NO: 2138976
aaucacccuguaaugaucc

SEQ ID NO: 2138978 - RNA, 19 nt, Artificial Sequence
  Description of Artificial Sequence: Synthetic oligonucleotide
  Sense strand starting at position 2609 of SEQ ID NO: 1882667
ggguauguauauuccucaa

SEQ ID NO: 2138979 - RNA, 19 nt, Artificial Sequence
  Description of Artificial Sequence: Synthetic oligonucleotide
  Antisense strand to SEQ ID NO: 2138978
uugaggaauauacauaccc

SEQ ID NO: 2138980 - RNA, 19 nt, Artificial Sequence
  Description of Artificial Sequence: Synthetic oligonucleotide
  Sense strand starting at position 2644 of SEQ ID NO: 1882667
gagggagccuugguauaua

SEQ ID NO: 2138981 - RNA, 19 nt, Artificial Sequence
  Description of Artificial Sequence: Synthetic oligonucleotide
  Antisense strand to SEQ ID NO: 2138980
uauauaccaaggcucccuc

SEQ ID NO: 2138982 - RNA, 19 nt, Artificial Sequence
  Description of Artificial Sequence: Synthetic oligonucleotide
  Sense strand starting at position 2684 of SEQ ID NO: 1882667
gcuugcuggugauuucaga

SEQ ID NO: 2138983 - RNA, 19 nt, Artificial Sequence
  Description of Artificial Sequence: Synthetic oligonucleotide
  Antisense strand to SEQ ID NO: 2138982
ucugaaaucaccagcaagc

SEQ ID NO: 2138984 - RNA, 19 nt, Artificial Sequence
  Description of Artificial Sequence: Synthetic oligonucleotide
  Sense strand starting at position 3077 of SEQ ID NO: 1882667
agaagauaucauggucugu

SEQ ID NO: 2138985 - RNA, 19 nt, Artificial Sequence
  Description of Artificial Sequence: Synthetic oligonucleotide
  Antisense strand to SEQ ID NO: 2138984
acagaccaugauaucuucu

SEQ ID NO: 2138986 - RNA, 19 nt, Artificial Sequence
  Description of Artificial Sequence: Synthetic oligonucleotide
  Sense strand starting at position 3237 of SEQ ID NO: 1882667
acauuaauuuagcaagaug

SEQ ID NO: 2138987 - RNA, 19 nt, Artificial Sequence
  Description of Artificial Sequence: Synthetic oligonucleotide
  Antisense strand to SEQ ID NO: 2138986
caucuugcuaaauuaaugu

SEQ ID NO: 2138988 - RNA, 19 nt, Artificial Sequence
  Description of Artificial Sequence: Synthetic oligonucleotide
  Sense strand starting at position 3353 of SEQ ID NO: 1882667
cgguuacaagaauguuaaa

SEQ ID NO: 2138989 - RNA, 19 nt, Artificial Sequence
  Description of Artificial Sequence: Synthetic oligonucleotide
  Antisense strand to SEQ ID NO: 2138988
uuuaacauucuuguaaccg

SEQ ID NO: 2138990 - RNA, 19 nt, Artificial Sequence
  Description of Artificial Sequence: Synthetic oligonucleotide
  Sense strand starting at position 3384 of SEQ ID NO: 1882667
guuucuguucuagauacau

SEQ ID NO: 2138991 - RNA, 19 nt, Artificial Sequence
  Description of Artificial Sequence: Synthetic oligonucleotide
  Antisense strand to SEQ ID NO: 2138990
auguaucuagaacagaaac

SEQ ID NO: 2138992 - RNA, 19 nt, Artificial Sequence
  Description of Artificial Sequence: Synthetic oligonucleotide
  Sense strand starting at position 3518 of SEQ ID NO: 1882667
cuaaacaugucacuguaua

SEQ ID NO: 2138993 - RNA, 19 nt, Artificial Sequence
  Description of Artificial Sequence: Synthetic oligonucleotide
  Antisense strand to SEQ ID NO: 2138992
uauacagugacauguuuag

SEQ ID NO: 2138994 - RNA, 19 nt, Artificial Sequence
  Description of Artificial Sequence: Synthetic oligonucleotide
  Sense strand starting at position 3882 of SEQ ID NO: 1882667
uuguuacagccauaaagac

SEQ ID NO: 2138995 - RNA, 19 nt, Artificial Sequence
  Description of Artificial Sequence: Synthetic oligonucleotide
  Antisense strand to SEQ ID NO: 2138994
gucuuuauggcuguaacaa

SEQ ID NO: 2138996 - RNA, 19 nt, Artificial Sequence
  Description of Artificial Sequence: Synthetic oligonucleotide
  Sense strand starting at position 58 of SEQ ID NO: 1882668
ccaugagaguuucuaugua

SEQ ID NO: 2138997 - RNA, 19 nt, Artificial Sequence
  Description of Artificial Sequence: Synthetic oligonucleotide
  Antisense strand to SEQ ID NO: 2138996
uacauagaaacucucaugg

SEQ ID NO: 2138998 - RNA, 19 nt, Artificial Sequence
  Description of Artificial Sequence: Synthetic oligonucleotide
  Sense strand starting at position 62 of SEQ ID NO: 1882668
gagaguuucuauguaacaa

SEQ ID NO: 2138999 - RNA, 19 nt, Artificial Sequence
  Description of Artificial Sequence: Synthetic oligonucleotide
  Antisense strand to SEQ ID NO: 2138998
uuguuacauagaaacucuc

SEQ ID NO: 2139000 - RNA, 19 nt, Artificial Sequence
  Description of Artificial Sequence: Synthetic oligonucleotide
  Sense strand starting at position 112 of SEQ ID NO: 1882668
agcuaagauugccucagau

SEQ ID NO: 2139001 - RNA, 19 nt, Artificial Sequence
  Description of Artificial Sequence: Synthetic oligonucleotide
  Antisense strand to SEQ ID NO: 2139000
aucugaggcaaucuuagcu

SEQ ID NO: 2139002 - RNA, 19 nt, Artificial Sequence
  Description of Artificial Sequence: Synthetic oligonucleotide
  Sense strand starting at position 201 of SEQ ID NO: 1882668
augugaugcauguaacgaa

SEQ ID NO: 2139003 - RNA, 19 nt, Artificial Sequence
  Description of Artificial Sequence: Synthetic oligonucleotide
  Antisense strand to SEQ ID NO: 2139002
uucguuacaugcaucacau

SEQ ID NO: 2139004 - RNA, 19 nt, Artificial Sequence
  Description of Artificial Sequence: Synthetic oligonucleotide
  Sense strand starting at position 256 of SEQ ID NO: 1882668
cuaagacguaugggucaga

SEQ ID NO: 2139005 - RNA, 19 nt, Artificial Sequence
  Description of Artificial Sequence: Synthetic oligonucleotide
  Antisense strand to SEQ ID NO: 2139004
ucugacccauacgucuuag

SEQ ID NO: 2139006 - RNA, 19 nt, Artificial Sequence
  Description of Artificial Sequence: Synthetic oligonucleotide
  Sense strand starting at position 259 of SEQ ID NO: 1882668
agacguaugggucagagua

SEQ ID NO: 2139007 - RNA, 19 nt, Artificial Sequence
  Description of Artificial Sequence: Synthetic oligonucleotide
  Antisense strand to SEQ ID NO: 2139006
uacucugacccauacgucu

SEQ ID NO: 2139008 - RNA, 19 nt, Artificial Sequence
  Description of Artificial Sequence: Synthetic oligonucleotide
  Sense strand starting at position 351 of SEQ ID NO: 1882668
agaaguuauugcuccucuu

SEQ ID NO: 2139009 - RNA, 19 nt, Artificial Sequence
  Description of Artificial Sequence: Synthetic oligonucleotide
  Antisense strand to SEQ ID NO: 2139008
aagaggagcaauaacuucu

SEQ ID NO: 2139010 - RNA, 19 nt, Artificial Sequence
  Description of Artificial Sequence: Synthetic oligonucleotide
  Sense strand starting at position 354 of SEQ ID NO: 1882668
aguuauugcuccucuucca

SEQ ID NO: 2139011 - RNA, 19 nt, Artificial Sequence
  Description of Artificial Sequence: Synthetic oligonucleotide
  Antisense strand to SEQ ID NO: 2139010
uggaagaggagcaauaacu

SEQ ID NO: 2139012 - RNA, 19 nt, Artificial Sequence
  Description of Artificial Sequence: Synthetic oligonucleotide
  Sense strand starting at position 431 of SEQ ID NO: 1882668
ccaacaguugucuggcaca

SEQ ID NO: 2139013 - RNA, 19 nt, Artificial Sequence
  Description of Artificial Sequence: Synthetic oligonucleotide
  Antisense strand to SEQ ID NO: 2139012
ugugccagacaacuguugg

SEQ ID NO: 2139014 - RNA, 19 nt, Artificial Sequence
  Description of Artificial Sequence: Synthetic oligonucleotide
  Sense strand starting at position 436 of SEQ ID NO: 1882668
aguugucuggcacacucaa

SEQ ID NO: 2139015 - RNA, 19 nt, Artificial Sequence
  Description of Artificial Sequence: Synthetic oligonucleotide
  Antisense strand to SEQ ID NO: 2139014
uugagugugccagacaacu

SEQ ID NO: 2139016 - RNA, 19 nt, Artificial Sequence
  Description of Artificial Sequence: Synthetic oligonucleotide
  Sense strand starting at position 486 of SEQ ID NO: 1882668
guugaaugucaaugcauuu

SEQ ID NO: 2139017 - RNA, 19 nt, Artificial Sequence
  Description of Artificial Sequence: Synthetic oligonucleotide
  Antisense strand to SEQ ID NO: 2139016
aaaugcauugacauucaac

SEQ ID NO: 2139018 - RNA, 19 nt, Artificial Sequence
  Description of Artificial Sequence: Synthetic oligonucleotide
  Sense strand starting at position 918 of SEQ ID NO: 1882668
cuaugaaaccugugucaua

SEQ ID NO: 2139019 - RNA, 19 nt, Artificial Sequence
  Description of Artificial Sequence: Synthetic oligonucleotide
  Antisense strand to SEQ ID NO: 2139018
uaugacacagguuucauag

SEQ ID NO: 2139020 - RNA, 19 nt, Artificial Sequence
  Description of Artificial Sequence: Synthetic oligonucleotide
  Sense strand starting at position 921 of SEQ ID NO: 1882668
ugaaaccugugucauaacu

SEQ ID NO: 2139021 - RNA, 19 nt, Artificial Sequence
  Description of Artificial Sequence: Synthetic oligonucleotide
  Antisense strand to SEQ ID NO: 2139020
aguuaugacacagguuuca

SEQ ID NO: 2139022 - RNA, 19 nt, Artificial Sequence
  Description of Artificial Sequence: Synthetic oligonucleotide
  Sense strand starting at position 1002 of SEQ ID NO: 1882668
cucagcaucuaacagagua

SEQ ID NO: 2139023 - RNA, 19 nt, Artificial Sequence
  Description of Artificial Sequence: Synthetic oligonucleotide
  Antisense strand to SEQ ID NO: 2139022
uacucuguuagaugcugag

SEQ ID NO: 2139024 - RNA, 19 nt, Artificial Sequence
  Description of Artificial Sequence: Synthetic oligonucleotide
  Sense strand starting at position 1015 of SEQ ID NO: 1882668
agaguauggacaugguaua

SEQ ID NO: 2139025 - RNA, 19 nt, Artificial Sequence
  Description of Artificial Sequence: Synthetic oligonucleotide
  Antisense strand to SEQ ID NO: 2139024
uauaccauguccauacucu

SEQ ID NO: 2139026 - RNA, 19 nt, Artificial Sequence
  Description of Artificial Sequence: Synthetic oligonucleotide
  Sense strand starting at position 1016 of SEQ ID NO: 1882668
gaguauggacaugguauau

SEQ ID NO: 2139027 - RNA, 19 nt, Artificial Sequence
  Description of Artificial Sequence: Synthetic oligonucleotide
  Antisense strand to SEQ ID NO: 2139026
auauaccauguccauacuc

SEQ ID NO: 2139028 - RNA, 19 nt, Artificial Sequence
  Description of Artificial Sequence: Synthetic oligonucleotide
  Sense strand starting at position 1045 of SEQ ID NO: 1882668
uguugaauguauccaucgu

SEQ ID NO: 2139029 - RNA, 19 nt, Artificial Sequence
  Description of Artificial Sequence: Synthetic oligonucleotide
  Antisense strand to SEQ ID NO: 2139028
acgauggauacauucaaca

SEQ ID NO: 2139030 - RNA, 19 nt, Artificial Sequence
  Description of Artificial Sequence: Synthetic oligonucleotide
  Sense strand starting at position 1046 of SEQ ID NO: 1882668
guugaauguauccaucgua

SEQ ID NO: 2139031 - RNA, 19 nt, Artificial Sequence
  Description of Artificial Sequence: Synthetic oligonucleotide
  Antisense strand to SEQ ID NO: 2139030
uacgauggauacauucaac

SEQ ID NO: 2139032 - RNA, 19 nt, Artificial Sequence
  Description of Artificial Sequence: Synthetic oligonucleotide
  Sense strand starting at position 1049 of SEQ ID NO: 1882668
gaauguauccaucguauuu

SEQ ID NO: 2139033 - RNA, 19 nt, Artificial Sequence
  Description of Artificial Sequence: Synthetic oligonucleotide
  Antisense strand to SEQ ID NO: 2139032
aaauacgauggauacauuc

SEQ ID NO: 2139034 - RNA, 19 nt, Artificial Sequence
  Description of Artificial Sequence: Synthetic oligonucleotide
  Sense strand starting at position 1051 of SEQ ID NO: 1882668
auguauccaucguauuuga

SEQ ID NO: 2139035 - RNA, 19 nt, Artificial Sequence
  Description of Artificial Sequence: Synthetic oligonucleotide
  Antisense strand to SEQ ID NO: 2139034
ucaaauacgauggauacau

SEQ ID NO: 2139036 - RNA, 19 nt, Artificial Sequence
  Description of Artificial Sequence: Synthetic oligonucleotide
  Sense strand starting at position 1268 of SEQ ID NO: 1882668
gggagugcaaugcauacaa

SEQ ID NO: 2139037 - RNA, 19 nt, Artificial Sequence
  Description of Artificial Sequence: Synthetic oligonucleotide
  Antisense strand to SEQ ID NO: 2139036
uuguaugcauugcacuccc

SEQ ID NO: 2139038 - RNA, 19 nt, Artificial Sequence
  Description of Artificial Sequence: Synthetic oligonucleotide
  Sense strand starting at position 1338 of SEQ ID NO: 1882668
cuguuaacacuguauugua

SEQ ID NO: 2139039 - RNA, 19 nt, Artificial Sequence
  Description of Artificial Sequence: Synthetic oligonucleotide
  Antisense strand to SEQ ID NO: 2139038
uacaauacaguguuaacag

SEQ ID NO: 2139040 - RNA, 19 nt, Artificial Sequence
  Description of Artificial Sequence: Synthetic oligonucleotide
  Sense strand starting at position 1681 of SEQ ID NO: 1882668
ugugcaugacgugauucaa

SEQ ID NO: 2139041 - RNA, 19 nt, Artificial Sequence
  Description of Artificial Sequence: Synthetic oligonucleotide
  Antisense strand to SEQ ID NO: 2139040
uugaaucacgucaugcaca

SEQ ID NO: 2139042 - RNA, 19 nt, Artificial Sequence
  Description of Artificial Sequence: Synthetic oligonucleotide
  Sense strand starting at position 1890 of SEQ ID NO: 1882668
uauuguuucgaugaguaua

SEQ ID NO: 2139043 - RNA, 19 nt, Artificial Sequence
  Description of Artificial Sequence: Synthetic oligonucleotide
  Antisense strand to SEQ ID NO: 2139042
uauacucaucgaaacaaua

SEQ ID NO: 2139044 - RNA, 19 nt, Artificial Sequence
  Description of Artificial Sequence: Synthetic oligonucleotide
  Sense strand starting at position 1892 of SEQ ID NO: 1882668
uuguuucgaugaguauauu

SEQ ID NO: 2139045 - RNA, 19 nt, Artificial Sequence
  Description of Artificial Sequence: Synthetic oligonucleotide
  Antisense strand to SEQ ID NO: 2139044
aauauacucaucgaaacaa

SEQ ID NO: 2139046 - RNA, 19 nt, Artificial Sequence
  Description of Artificial Sequence: Synthetic oligonucleotide
  Sense strand starting at position 1901 of SEQ ID NO: 1882668
ugaguauauuucuuuguuc

SEQ ID NO: 2139047 - RNA, 19 nt, Artificial Sequence
  Description of Artificial Sequence: Synthetic oligonucleotide
  Antisense strand to SEQ ID NO: 2139046
gaacaaagaaauauacuca

SEQ ID NO: 2139048 - RNA, 19 nt, Artificial Sequence
  Description of Artificial Sequence: Synthetic oligonucleotide
  Sense strand starting at position 1903 of SEQ ID NO: 1882668
aguauauuucuuuguuccu

SEQ ID NO: 2139049 - RNA, 19 nt, Artificial Sequence
  Description of Artificial Sequence: Synthetic oligonucleotide
  Antisense strand to SEQ ID NO: 2139048
aggaacaaagaaauauacu

SEQ ID NO: 2139050 - RNA, 19 nt, Artificial Sequence
  Description of Artificial Sequence: Synthetic oligonucleotide
  Sense strand starting at position 2164 of SEQ ID NO: 1882668
ugugguugaugcuuaaauc

SEQ ID NO: 2139051 - RNA, 19 nt, Artificial Sequence
  Description of Artificial Sequence: Synthetic oligonucleotide
  Antisense strand to SEQ ID NO: 2139050
gauuuaagcaucaaccaca

SEQ ID NO: 2139052 - RNA, 19 nt, Artificial Sequence
  Description of Artificial Sequence: Synthetic oligonucleotide
  Sense strand starting at position 2173 of SEQ ID NO: 1882668
ugcuuaaauccugaaugua

SEQ ID NO: 2139053 - RNA, 19 nt, Artificial Sequence
  Description of Artificial Sequence: Synthetic oligonucleotide
  Antisense strand to SEQ ID NO: 2139052
uacauucaggauuuaagca

SEQ ID NO: 2139054 - RNA, 19 nt, Artificial Sequence
  Description of Artificial Sequence: Synthetic oligonucleotide
  Sense strand starting at position 2760 of SEQ ID NO: 1882668
uuacuugagucccagacaa

SEQ ID NO: 2139055 - RNA, 19 nt, Artificial Sequence
  Description of Artificial Sequence: Synthetic oligonucleotide
  Antisense strand to SEQ ID NO: 2139054
uugucugggacucaaguaa

SEQ ID NO: 2139056 - RNA, 19 nt, Artificial Sequence
  Description of Artificial Sequence: Synthetic oligonucleotide
  Sense strand starting at position 2778 of SEQ ID NO: 1882668
agcaauaaugccgaauaca

SEQ ID NO: 2139057 - RNA, 19 nt, Artificial Sequence
  Description of Artificial Sequence: Synthetic oligonucleotide
  Antisense strand to SEQ ID NO: 2139056
uguauucggcauuauugcu

SEQ ID NO: 2139058 - RNA, 19 nt, Artificial Sequence
  Description of Artificial Sequence: Synthetic oligonucleotide
  Sense strand starting at position 3231 of SEQ ID NO: 1882668
guacuuuaaugagcuuaua

SEQ ID NO: 2139059 - RNA, 19 nt, Artificial Sequence
  Description of Artificial Sequence: Synthetic oligonucleotide
  Antisense strand to SEQ ID NO: 2139058
uauaagcucauuaaaguac

SEQ ID NO: 2139060 - RNA, 19 nt, Artificial Sequence
  Description of Artificial Sequence: Synthetic oligonucleotide
  Sense strand starting at position 3346 of SEQ ID NO: 1882668
gagaaaugauuauacuguc

SEQ ID NO: 2139061 - RNA, 19 nt, Artificial Sequence
  Description of Artificial Sequence: Synthetic oligonucleotide
  Antisense strand to SEQ ID NO: 2139060
gacaguauaaucauuucuc

SEQ ID NO: 2139062 - RNA, 19 nt, Artificial Sequence
  Description of Artificial Sequence: Synthetic oligonucleotide
  Sense strand starting at position 3654 of SEQ ID NO: 1882668
aauggauauuuggguucuu

SEQ ID NO: 2139063 - RNA, 19 nt, Artificial Sequence
  Description of Artificial Sequence: Synthetic oligonucleotide
  Antisense strand to SEQ ID NO: 2139062
aagaacccaaauauccauu

SEQ ID NO: 2139064 - RNA, 19 nt, Artificial Sequence
  Description of Artificial Sequence: Synthetic oligonucleotide
  Sense strand starting at position 3749 of SEQ ID NO: 1882668
ugggaauauguauguuaaa

SEQ ID NO: 2139065 - RNA, 19 nt, Artificial Sequence
  Description of Artificial Sequence: Synthetic oligonucleotide
  Antisense strand to SEQ ID NO: 2139064
uuuaacauacauauuccca

SEQ ID NO: 2139066 - RNA, 19 nt, Artificial Sequence
  Description of Artificial Sequence: Synthetic oligonucleotide
  Sense strand starting at position 3750 of SEQ ID NO: 1882668
gggaauauguauguuaaau

SEQ ID NO: 2139067 - RNA, 19 nt, Artificial Sequence
  Description of Artificial Sequence: Synthetic oligonucleotide
  Antisense strand to SEQ ID NO: 2139066
auuuaacauacauauuccc

SEQ ID NO: 2139068 - RNA, 19 nt, Artificial Sequence
  Description of Artificial Sequence: Synthetic oligonucleotide
  Sense strand starting at position 3767 of SEQ ID NO: 1882668
auuacaauugcugaguuau

SEQ ID NO: 2139069 - RNA, 19 nt, Artificial Sequence
  Description of Artificial Sequence: Synthetic oligonucleotide
  Antisense strand to SEQ ID NO: 2139068
auaacucagcaauuguaau

SEQ ID NO: 2139070 - RNA, 19 nt, Artificial Sequence
  Description of Artificial Sequence: Synthetic oligonucleotide
  Sense strand starting at position 3913 of SEQ ID NO: 1882668
ucacuaugguuugaauuua

SEQ ID NO: 2139071 - RNA, 19 nt, Artificial Sequence
  Description of Artificial Sequence: Synthetic oligonucleotide
  Antisense strand to SEQ ID NO: 2139070
uaaauucaaaccauaguga

SEQ ID NO: 2139072 - RNA, 19 nt, Artificial Sequence
  Description of Artificial Sequence: Synthetic oligonucleotide
  Sense strand starting at position 3944 of SEQ ID NO: 1882668
aacaaaugaugguggucaa

SEQ ID NO: 2139073 - RNA, 19 nt, Artificial Sequence
  Description of Artificial Sequence: Synthetic oligonucleotide
  Antisense strand to SEQ ID NO: 2139072
uugaccaccaucauuuguu

SEQ ID NO: 2139074 - RNA, 19 nt, Artificial Sequence
  Description of Artificial Sequence: Synthetic oligonucleotide
  Sense strand starting at position 3947 of SEQ ID NO: 1882668
aaaugaugguggucaacuu

SEQ ID NO: 2139075 - RNA, 19 nt, Artificial Sequence
  Description of Artificial Sequence: Synthetic oligonucleotide
  Antisense strand to SEQ ID NO: 2139074
aaguugaccaccaucauuu

SEQ ID NO: 2139076 - RNA, 19 nt, Artificial Sequence
  Description of Artificial Sequence: Synthetic oligonucleotide
  Sense strand starting at position 542 of SEQ ID NO: 1882669
uuaaacacuucccggaaga

SEQ ID NO: 2139077 - RNA, 19 nt, Artificial Sequence
  Description of Artificial Sequence: Synthetic oligonucleotide
  Antisense strand to SEQ ID NO: 2139076
ucuuccgggaaguguuuaa

SEQ ID NO: 2139078 - RNA, 19 nt, Artificial Sequence
  Description of Artificial Sequence: Synthetic oligonucleotide
  Sense strand starting at position 668 of SEQ ID NO: 1882669
uuguaaagaugcucauaac

SEQ ID NO: 2139079 - RNA, 19 nt, Artificial Sequence
  Description of Artificial Sequence: Synthetic oligonucleotide
  Antisense strand to SEQ ID NO: 2139078
guuaugagcaucuuuacaa

SEQ ID NO: 2139080 - RNA, 19 nt, Artificial Sequence
  Description of Artificial Sequence: Synthetic oligonucleotide
  Sense strand starting at position 669 of SEQ ID NO: 1882669
uguaaagaugcucauaacu

SEQ ID NO: 2139081 - RNA, 19 nt, Artificial Sequence
  Description of Artificial Sequence: Synthetic oligonucleotide
  Antisense strand to SEQ ID NO: 2139080
aguuaugagcaucuuuaca

SEQ ID NO: 2139082 - RNA, 19 nt, Artificial Sequence
  Description of Artificial Sequence: Synthetic oligonucleotide
  Sense strand starting at position 678 of SEQ ID NO: 1882669
gcucauaacuguuuauuag

SEQ ID NO: 2139083 - RNA, 19 nt, Artificial Sequence
  Description of Artificial Sequence: Synthetic oligonucleotide
  Antisense strand to SEQ ID NO: 2139082
cuaauaaacaguuaugagc

SEQ ID NO: 2139084 - RNA, 19 nt, Artificial Sequence
  Description of Artificial Sequence: Synthetic oligonucleotide
  Sense strand starting at position 1857 of SEQ ID NO: 1882669
ggguuuacuccuuguuucu

SEQ ID NO: 2139085 - RNA, 19 nt, Artificial Sequence
  Description of Artificial Sequence: Synthetic oligonucleotide
  Antisense strand to SEQ ID NO: 2139084
agaaacaaggaguaaaccc

SEQ ID NO: 2139086 - RNA, 19 nt, Artificial Sequence
  Description of Artificial Sequence: Synthetic oligonucleotide
  Sense strand starting at position 2512 of SEQ ID NO: 1882669
ugaagaacuuccugugguu

SEQ ID NO: 2139087 - RNA, 19 nt, Artificial Sequence
  Description of Artificial Sequence: Synthetic oligonucleotide
  Antisense strand to SEQ ID NO: 2139086
aaccacaggaaguucuuca

SEQ ID NO: 2139088 - RNA, 19 nt, Artificial Sequence
  Description of Artificial Sequence: Synthetic oligonucleotide
  Sense strand starting at position 2546 of SEQ ID NO: 1882669
gguuuagucuuagcucuga

SEQ ID NO: 2139089 - RNA, 19 nt, Artificial Sequence
  Description of Artificial Sequence: Synthetic oligonucleotide
  Antisense strand to SEQ ID NO: 2139088
ucagagcuaagacuaaacc

SEQ ID NO: 2139090 - RNA, 19 nt, Artificial Sequence
  Description of Artificial Sequence: Synthetic oligonucleotide
  Sense strand starting at position 2696 of SEQ ID NO: 1882669
uuaggaaagucucuacgau

SEQ ID NO: 2139091 - RNA, 19 nt, Artificial Sequence
  Description of Artificial Sequence: Synthetic oligonucleotide
  Antisense strand to SEQ ID NO: 2139090
aucguagagacuuuccuaa

SEQ ID NO: 2139092 - RNA, 19 nt, Artificial Sequence
  Description of Artificial Sequence: Synthetic oligonucleotide
  Sense strand starting at position 2697 of SEQ ID NO: 1882669
uaggaaagucucuacgauc

SEQ ID NO: 2139093 - RNA, 19 nt, Artificial Sequence
  Description of Artificial Sequence: Synthetic oligonucleotide
  Antisense strand to SEQ ID NO: 2139092
gaucguagagacuuuccua

SEQ ID NO: 2139094 - RNA, 19 nt, Artificial Sequence
  Description of Artificial Sequence: Synthetic oligonucleotide
  Sense strand starting at position 2706 of SEQ ID NO: 1882669
cucuacgaucgcugaggua

SEQ ID NO: 2139095 - RNA, 19 nt, Artificial Sequence
  Description of Artificial Sequence: Synthetic oligonucleotide
  Antisense strand to SEQ ID NO: 2139094
uaccucagcgaucguagag

SEQ ID NO: 2139096 - RNA, 19 nt, Artificial Sequence
  Description of Artificial Sequence: Synthetic oligonucleotide
  Sense strand starting at position 2719 of SEQ ID NO: 1882669
gagguaucgggcagucagu

SEQ ID NO: 2139097 - RNA, 19 nt, Artificial Sequence
  Description of Artificial Sequence: Synthetic oligonucleotide
  Antisense strand to SEQ ID NO: 2139096
acugacugcccgauaccuc

SEQ ID NO: 2139098 - RNA, 19 nt, Artificial Sequence
  Description of Artificial Sequence: Synthetic oligonucleotide
  Sense strand starting at position 2892 of SEQ ID NO: 1882669
caaugagguuccucagaag

SEQ ID NO: 2139099 - RNA, 19 nt, Artificial Sequence
  Description of Artificial Sequence: Synthetic oligonucleotide
  Antisense strand to SEQ ID NO: 2139098
cuucugaggaaccucauug

SEQ ID NO: 2139100 - RNA, 19 nt, Artificial Sequence
  Description of Artificial Sequence: Synthetic oligonucleotide
  Sense strand starting at position 2895 of SEQ ID NO: 1882669
ugagguuccucagaaguca

SEQ ID NO: 2139101 - RNA, 19 nt, Artificial Sequence
  Description of Artificial Sequence: Synthetic oligonucleotide
  Antisense strand to SEQ ID NO: 2139100
ugacuucugaggaaccuca

SEQ ID NO: 2139102 - RNA, 19 nt, Artificial Sequence
  Description of Artificial Sequence: Synthetic oligonucleotide
  Sense strand starting at position 2904 of SEQ ID NO: 1882669
ucagaagucaucggcccua

SEQ ID NO: 2139103 - RNA, 19 nt, Artificial Sequence
  Description of Artificial Sequence: Synthetic oligonucleotide
  Antisense strand to SEQ ID NO: 2139102
uagggccgaugacuucuga

SEQ ID NO: 2139104 - RNA, 19 nt, Artificial Sequence
  Description of Artificial Sequence: Synthetic oligonucleotide
  Sense strand starting at position 3102 of SEQ ID NO: 1882669
cuugccaucuguuugauga

SEQ ID NO: 2139105 - RNA, 19 nt, Artificial Sequence
  Description of Artificial Sequence: Synthetic oligonucleotide
  Antisense strand to SEQ ID NO: 2139104
ucaucaaacagauggcaag

SEQ ID NO: 2139106 - RNA, 19 nt, Artificial Sequence
  Description of Artificial Sequence: Synthetic oligonucleotide
  Sense strand starting at position 3103 of SEQ ID NO: 1882669
uugccaucuguuugaugau

SEQ ID NO: 2139107 - RNA, 19 nt, Artificial Sequence
  Description of Artificial Sequence: Synthetic oligonucleotide
  Antisense strand to SEQ ID NO: 2139106
aucaucaaacagauggcaa

SEQ ID NO: 2139108 - RNA, 19 nt, Artificial Sequence
  Description of Artificial Sequence: Synthetic oligonucleotide
  Sense strand starting at position 3104 of SEQ ID NO: 1882669
ugccaucuguuugaugaug

SEQ ID NO: 2139109 - RNA, 19 nt, Artificial Sequence
  Description of Artificial Sequence: Synthetic oligonucleotide
  Antisense strand to SEQ ID NO: 2139108
caucaucaaacagauggca

SEQ ID NO: 2139110 - RNA, 19 nt, Artificial Sequence
  Description of Artificial Sequence: Synthetic oligonucleotide
  Sense strand starting at position 3513 of SEQ ID NO: 1882669
gcacuuaaccgacaguacu

SEQ ID NO: 2139111 - RNA, 19 nt, Artificial Sequence
  Description of Artificial Sequence: Synthetic oligonucleotide
  Antisense strand to SEQ ID NO: 2139110
aguacugucgguuaagugc

SEQ ID NO: 2139112 - RNA, 19 nt, Artificial Sequence
  Description of Artificial Sequence: Synthetic oligonucleotide
  Sense strand starting at position 3533 of SEQ ID NO: 1882669
uuuaucuugucacucaguu

SEQ ID NO: 2139113 - RNA, 19 nt, Artificial Sequence
  Description of Artificial Sequence: Synthetic oligonucleotide
  Antisense strand to SEQ ID NO: 2139112
aacugagugacaagauaaa

SEQ ID NO: 2139114 - RNA, 19 nt, Artificial Sequence
  Description of Artificial Sequence: Synthetic oligonucleotide
  Sense strand starting at position 3537 of SEQ ID NO: 1882669
ucuugucacucaguuaaau

SEQ ID NO: 2139115 - RNA, 19 nt, Artificial Sequence
  Description of Artificial Sequence: Synthetic oligonucleotide
  Antisense strand to SEQ ID NO: 2139114
auuuaacugagugacaaga

SEQ ID NO: 2139116 - RNA, 19 nt, Artificial Sequence
  Description of Artificial Sequence: Synthetic oligonucleotide
  Sense strand starting at position 3662 of SEQ ID NO: 1882669
augcaauaacuguaugcaa

SEQ ID NO: 2139117 - RNA, 19 nt, Artificial Sequence
  Description of Artificial Sequence: Synthetic oligonucleotide
  Antisense strand to SEQ ID NO: 2139116
uugcauacaguuauugcau

SEQ ID NO: 2139118 - RNA, 19 nt, Artificial Sequence
  Description of Artificial Sequence: Synthetic oligonucleotide
  Sense strand starting at position 3664 of SEQ ID NO: 1882669
gcaauaacuguaugcaaau

SEQ ID NO: 2139119 - RNA, 19 nt, Artificial Sequence
  Description of Artificial Sequence: Synthetic oligonucleotide
  Antisense strand to SEQ ID NO: 2139118
auuugcauacaguuauugc

SEQ ID NO: 2139120 - RNA, 19 nt, Artificial Sequence
  Description of Artificial Sequence: Synthetic oligonucleotide
  Sense strand starting at position 3767 of SEQ ID NO: 1882669
caaaguauuuacugugguu

SEQ ID NO: 2139121 - RNA, 19 nt, Artificial Sequence
  Description of Artificial Sequence: Synthetic oligonucleotide
  Antisense strand to SEQ ID NO: 2139120
aaccacaguaaauacuuug

SEQ ID NO: 2139122 - RNA, 19 nt, Artificial Sequence
  Description of Artificial Sequence: Synthetic oligonucleotide
  Sense strand starting at position 3770 of SEQ ID NO: 1882669
aguauuuacugugguugau

SEQ ID NO: 2139123 - RNA, 19 nt, Artificial Sequence
  Description of Artificial Sequence: Synthetic oligonucleotide
  Antisense strand to SEQ ID NO: 2139122
aucaaccacaguaaauacu

SEQ ID NO: 2139124 - RNA, 19 nt, Artificial Sequence
  Description of Artificial Sequence: Synthetic oligonucleotide
  Sense strand starting at position 3774 of SEQ ID NO: 1882669
uuuacugugguugaugaga

SEQ ID NO: 2139125 - RNA, 19 nt, Artificial Sequence
  Description of Artificial Sequence: Synthetic oligonucleotide
  Antisense strand to SEQ ID NO: 2139124
ucucaucaaccacaguaaa

SEQ ID NO: 2139126 - RNA, 19 nt, Artificial Sequence
  Description of Artificial Sequence: Synthetic oligonucleotide
  Sense strand starting at position 3776 of SEQ ID NO: 1882669
uacugugguugaugagaau

SEQ ID NO: 2139127 - RNA, 19 nt, Artificial Sequence
  Description of Artificial Sequence: Synthetic oligonucleotide
  Antisense strand to SEQ ID NO: 2139126
auucucaucaaccacagua

SEQ ID NO: 2139128 - RNA, 19 nt, Artificial Sequence
  Description of Artificial Sequence: Synthetic oligonucleotide
  Sense strand starting at position 3953 of SEQ ID NO: 1882669
guguccuggugggauacaa

SEQ ID NO: 2139129 - RNA, 19 nt, Artificial Sequence
  Description of Artificial Sequence: Synthetic oligonucleotide
  Antisense strand to SEQ ID NO: 2139128
uuguaucccaccaggacac

SEQ ID NO: 2139130 - RNA, 19 nt, Artificial Sequence
  Description of Artificial Sequence: Synthetic oligonucleotide
  Sense strand starting at position 507 of SEQ ID NO: 1882670
uuaaacacuucucggaaga

SEQ ID NO: 2139131 - RNA, 19 nt, Artificial Sequence
  Description of Artificial Sequence: Synthetic oligonucleotide
  Antisense strand to SEQ ID NO: 2139130
ucuuccgagaaguguuuaa

SEQ ID NO: 2139132 - RNA, 19 nt, Artificial Sequence
  Description of Artificial Sequence: Synthetic oligonucleotide
  Sense strand starting at position 634 of SEQ ID NO: 1882670
uguaaagaugcucauuaau

SEQ ID NO: 2139133 - RNA, 19 nt, Artificial Sequence
  Description of Artificial Sequence: Synthetic oligonucleotide
  Antisense strand to SEQ ID NO: 2139132
auuaaugagcaucuuuaca

SEQ ID NO: 2139134 - RNA, 19 nt, Artificial Sequence
  Description of Artificial Sequence: Synthetic oligonucleotide
  Sense strand starting at position 1818 of SEQ ID NO: 1882670
gggcuuacuccuuguuucu

SEQ ID NO: 2139135 - RNA, 19 nt, Artificial Sequence
  Description of Artificial Sequence: Synthetic oligonucleotide
  Antisense strand to SEQ ID NO: 2139134
agaaacaaggaguaagccc

SEQ ID NO: 2139136 - RNA, 19 nt, Artificial Sequence
  Description of Artificial Sequence: Synthetic oligonucleotide
  Sense strand starting at position 1838 of SEQ ID NO: 1882670
cauaauuccuaguggagcu

SEQ ID NO: 2139137 - RNA, 19 nt, Artificial Sequence
  Description of Artificial Sequence: Synthetic oligonucleotide
  Antisense strand to SEQ ID NO: 2139136
agcuccacuaggaauuaug

SEQ ID NO: 2139138 - RNA, 19 nt, Artificial Sequence
  Description of Artificial Sequence: Synthetic oligonucleotide
  Sense strand starting at position 2493 of SEQ ID NO: 1882670
cgcguuuagucuuagcucu

SEQ ID NO: 2139139 - RNA, 19 nt, Artificial Sequence
  Description of Artificial Sequence: Synthetic oligonucleotide
  Antisense strand to SEQ ID NO: 2139138
agagcuaagacuaaacgcg

SEQ ID NO: 2139140 - RNA, 19 nt, Artificial Sequence
  Description of Artificial Sequence: Synthetic oligonucleotide
  Sense strand starting at position 2495 of SEQ ID NO: 1882670
cguuuagucuuagcucuga

SEQ ID NO: 2139141 - RNA, 19 nt, Artificial Sequence
  Description of Artificial Sequence: Synthetic oligonucleotide
  Antisense strand to SEQ ID NO: 2139140
ucagagcuaagacuaaacg

SEQ ID NO: 2139142 - RNA, 19 nt, Artificial Sequence
  Description of Artificial Sequence: Synthetic oligonucleotide
  Sense strand starting at position 2536 of SEQ ID NO: 1882670
guuaauuaacgagguauug

SEQ ID NO: 2139143 - RNA, 19 nt, Artificial Sequence
  Description of Artificial Sequence: Synthetic oligonucleotide
  Antisense strand to SEQ ID NO: 2139142
caauaccucguuaauuaac

SEQ ID NO: 2139144 - RNA, 19 nt, Artificial Sequence
  Description of Artificial Sequence: Synthetic oligonucleotide
  Sense strand starting at position 2629 of SEQ ID NO: 1882670
gguggugcuccgggcauua

SEQ ID NO: 2139145 - RNA, 19 nt, Artificial Sequence
  Description of Artificial Sequence: Synthetic oligonucleotide
  Antisense strand to SEQ ID NO: 2139144
uaaugcccggagcaccacc

SEQ ID NO: 2139146 - RNA, 19 nt, Artificial Sequence
  Description of Artificial Sequence: Synthetic oligonucleotide
  Sense strand starting at position 3059 of SEQ ID NO: 1882670
cuuuccaucuguuugauga

SEQ ID NO: 2139147 - RNA, 19 nt, Artificial Sequence
  Description of Artificial Sequence: Synthetic oligonucleotide
  Antisense strand to SEQ ID NO: 2139146
ucaucaaacagauggaaag

SEQ ID NO: 2139148 - RNA, 19 nt, Artificial Sequence
  Description of Artificial Sequence: Synthetic oligonucleotide
  Sense strand starting at position 3060 of SEQ ID NO: 1882670
uuuccaucuguuugaugau

SEQ ID NO: 2139149 - RNA, 19 nt, Artificial Sequence
  Description of Artificial Sequence: Synthetic oligonucleotide
  Antisense strand to SEQ ID NO: 2139148
aucaucaaacagauggaaa

SEQ ID NO: 2139150 - RNA, 19 nt, Artificial Sequence
  Description of Artificial Sequence: Synthetic oligonucleotide
  Sense strand starting at position 3067 of SEQ ID NO: 1882670
cuguuugaugauggaucaa

SEQ ID NO: 2139151 - RNA, 19 nt, Artificial Sequence
  Description of Artificial Sequence: Synthetic oligonucleotide
  Antisense strand to SEQ ID NO: 2139150
uugauccaucaucaaacag

SEQ ID NO: 2139152 - RNA, 19 nt, Artificial Sequence
  Description of Artificial Sequence: Synthetic oligonucleotide
  Sense strand starting at position 3811 of SEQ ID NO: 1882670
acacuuugcugagaaugcu

SEQ ID NO: 2139153 - RNA, 19 nt, Artificial Sequence
  Description of Artificial Sequence: Synthetic oligonucleotide
  Antisense strand to SEQ ID NO: 2139152
agcauucucagcaaagugu

SEQ ID NO: 2139154 - RNA, 19 nt, Artificial Sequence
  Description of Artificial Sequence: Synthetic oligonucleotide
  Sense strand starting at position 353 of SEQ ID NO: 1882671
uuaaacacuucucggaaga

SEQ ID NO: 2139155 - RNA, 19 nt, Artificial Sequence
  Description of Artificial Sequence: Synthetic oligonucleotide
  Antisense strand to SEQ ID NO: 2139154
ucuuccgagaaguguuuaa

SEQ ID NO: 2139156 - RNA, 19 nt, Artificial Sequence
  Description of Artificial Sequence: Synthetic oligonucleotide
  Sense strand starting at position 480 of SEQ ID NO: 1882671
uguaaagaugcucauuaau

SEQ ID NO: 2139157 - RNA, 19 nt, Artificial Sequence
  Description of Artificial Sequence: Synthetic oligonucleotide
  Antisense strand to SEQ ID NO: 2139156
auuaaugagcaucuuuaca

SEQ ID NO: 2139158 - RNA, 19 nt, Artificial Sequence
  Description of Artificial Sequence: Synthetic oligonucleotide
  Sense strand starting at position 1664 of SEQ ID NO: 1882671
gggcuuacuccuuguuucu

SEQ ID NO: 2139159 - RNA, 19 nt, Artificial Sequence
  Description of Artificial Sequence: Synthetic oligonucleotide
  Antisense strand to SEQ ID NO: 2139158
agaaacaaggaguaagccc

SEQ ID NO: 2139160 - RNA, 19 nt, Artificial Sequence
  Description of Artificial Sequence: Synthetic oligonucleotide
  Sense strand starting at position 1684 of SEQ ID NO: 1882671
cauaauuccuaguggagcu

SEQ ID NO: 2139161 - RNA, 19 nt, Artificial Sequence
  Description of Artificial Sequence: Synthetic oligonucleotide
  Antisense strand to SEQ ID NO: 2139160
agcuccacuaggaauuaug

SEQ ID NO: 2139162 - RNA, 19 nt, Artificial Sequence
  Description of Artificial Sequence: Synthetic oligonucleotide
  Sense strand starting at position 2339 of SEQ ID NO: 1882671
cgcguuuagucuuagcucu

SEQ ID NO: 2139163 - RNA, 19 nt, Artificial Sequence
  Description of Artificial Sequence: Synthetic oligonucleotide
  Antisense strand to SEQ ID NO: 2139162
agagcuaagacuaaacgcg

SEQ ID NO: 2139164 - RNA, 19 nt, Artificial Sequence
  Description of Artificial Sequence: Synthetic oligonucleotide
  Sense strand starting at position 2341 of SEQ ID NO: 1882671
cguuuagucuuagcucuga

SEQ ID NO: 2139165 - RNA, 19 nt, Artificial Sequence
  Description of Artificial Sequence: Synthetic oligonucleotide
  Antisense strand to SEQ ID NO: 2139164
ucagagcuaagacuaaacg

SEQ ID NO: 2139166 - RNA, 19 nt, Artificial Sequence
  Description of Artificial Sequence: Synthetic oligonucleotide
  Sense strand starting at position 2382 of SEQ ID NO: 1882671
guuaauuaacgagguauug

SEQ ID NO: 2139167 - RNA, 19 nt, Artificial Sequence
  Description of Artificial Sequence: Synthetic oligonucleotide
  Antisense strand to SEQ ID NO: 2139166
caauaccucguuaauuaac

SEQ ID NO: 2139168 - RNA, 19 nt, Artificial Sequence
  Description of Artificial Sequence: Synthetic oligonucleotide
  Sense strand starting at position 2475 of SEQ ID NO: 1882671
gguggugcuccgggcauua

SEQ ID NO: 2139169 - RNA, 19 nt, Artificial Sequence
  Description of Artificial Sequence: Synthetic oligonucleotide
  Antisense strand to SEQ ID NO: 2139168
uaaugcccggagcaccacc

SEQ ID NO: 2139170 - RNA, 19 nt, Artificial Sequence
  Description of Artificial Sequence: Synthetic oligonucleotide
  Sense strand starting at position 2905 of SEQ ID NO: 1882671
cuuuccaucuguuugauga

SEQ ID NO: 2139171 - RNA, 19 nt, Artificial Sequence
  Description of Artificial Sequence: Synthetic oligonucleotide
  Antisense strand to SEQ ID NO: 2139170
ucaucaaacagauggaaag

SEQ ID NO: 2139172 - RNA, 19 nt, Artificial Sequence
  Description of Artificial Sequence: Synthetic oligonucleotide
  Sense strand starting at position 2906 of SEQ ID NO: 1882671
uuuccaucuguuugaugau

SEQ ID NO: 2139173 - RNA, 19 nt, Artificial Sequence
  Description of Artificial Sequence: Synthetic oligonucleotide
  Antisense strand to SEQ ID NO: 2139172
aucaucaaacagauggaaa

SEQ ID NO: 2139174 - RNA, 19 nt, Artificial Sequence
  Description of Artificial Sequence: Synthetic oligonucleotide
  Sense strand starting at position 2913 of SEQ ID NO: 1882671
cuguuugaugauggaucaa

SEQ ID NO: 2139175 - RNA, 19 nt, Artificial Sequence
  Description of Artificial Sequence: Synthetic oligonucleotide
  Antisense strand to SEQ ID NO: 2139174
uugauccaucaucaaacag

SEQ ID NO: 2139176 - RNA, 19 nt, Artificial Sequence
  Description of Artificial Sequence: Synthetic oligonucleotide
  Sense strand starting at position 3657 of SEQ ID NO: 1882671
acacuuugcugagaaugcu

SEQ ID NO: 2139177 - RNA, 19 nt, Artificial Sequence
  Description of Artificial Sequence: Synthetic oligonucleotide
  Antisense strand to SEQ ID NO: 2139176
agcauucucagcaaagugu

SEQ ID NO: 2139178 - RNA, 19 nt, Artificial Sequence
  Description of Artificial Sequence: Synthetic oligonucleotide
  Sense strand starting at position 423 of SEQ ID NO: 1882672
cuauacauucugggaaacu

SEQ ID NO: 2139179 - RNA, 19 nt, Artificial Sequence
  Description of Artificial Sequence: Synthetic oligonucleotide
  Antisense strand to SEQ ID NO: 2139178
aguuucccagaauguauag

SEQ ID NO: 2139180 - RNA, 19 nt, Artificial Sequence
  Description of Artificial Sequence: Synthetic oligonucleotide
  Sense strand starting at position 435 of SEQ ID NO: 1882672
ggaaacuaaugugaaauca

SEQ ID NO: 2139181 - RNA, 19 nt, Artificial Sequence
  Description of Artificial Sequence: Synthetic oligonucleotide
  Antisense strand to SEQ ID NO: 2139180
ugauuucacauuaguuucc

SEQ ID NO: 2139182 - RNA, 19 nt, Artificial Sequence
  Description of Artificial Sequence: Synthetic oligonucleotide
  Sense strand starting at position 857 of SEQ ID NO: 1882672
uggugauuaucuuuccagu

SEQ ID NO: 2139183 - RNA, 19 nt, Artificial Sequence
  Description of Artificial Sequence: Synthetic oligonucleotide
  Antisense strand to SEQ ID NO: 2139182
acuggaaagauaaucacca

SEQ ID NO: 2139184 - RNA, 19 nt, Artificial Sequence
  Description of Artificial Sequence: Synthetic oligonucleotide
  Sense strand starting at position 1079 of SEQ ID NO: 1882672
aaguuauaguuuccauggu

SEQ ID NO: 2139185 - RNA, 19 nt, Artificial Sequence
  Description of Artificial Sequence: Synthetic oligonucleotide
  Antisense strand to SEQ ID NO: 2139184
accauggaaacuauaacuu

SEQ ID NO: 2139186 - RNA, 19 nt, Artificial Sequence
  Description of Artificial Sequence: Synthetic oligonucleotide
  Sense strand starting at position 1175 of SEQ ID NO: 1882672
gagauaagcgcucacauau

SEQ ID NO: 2139187 - RNA, 19 nt, Artificial Sequence
  Description of Artificial Sequence: Synthetic oligonucleotide
  Antisense strand to SEQ ID NO: 2139186
auaugugagcgcuuaucuc

SEQ ID NO: 2139188 - RNA, 19 nt, Artificial Sequence
  Description of Artificial Sequence: Synthetic oligonucleotide
  Sense strand starting at position 1205 of SEQ ID NO: 1882672
uguccuauauguccuaagu

SEQ ID NO: 2139189 - RNA, 19 nt, Artificial Sequence
  Description of Artificial Sequence: Synthetic oligonucleotide
  Antisense strand to SEQ ID NO: 2139188
acuuaggacauauaggaca

SEQ ID NO: 2139190 - RNA, 19 nt, Artificial Sequence
  Description of Artificial Sequence: Synthetic oligonucleotide
  Sense strand starting at position 1233 of SEQ ID NO: 1882672
gcauauaguaugcagugaa

SEQ ID NO: 2139191 - RNA, 19 nt, Artificial Sequence
  Description of Artificial Sequence: Synthetic oligonucleotide
  Antisense strand to SEQ ID NO: 2139190
uucacugcauacuauaugc

SEQ ID NO: 2139192 - RNA, 19 nt, Artificial Sequence
  Description of Artificial Sequence: Synthetic oligonucleotide
  Sense strand starting at position 2520 of SEQ ID NO: 1882672
ggucuccauccugggaaga

SEQ ID NO: 2139193 - RNA, 19 nt, Artificial Sequence
  Description of Artificial Sequence: Synthetic oligonucleotide
  Antisense strand to SEQ ID NO: 2139192
ucuucccaggauggagacc

SEQ ID NO: 2139194 - RNA, 19 nt, Artificial Sequence
  Description of Artificial Sequence: Synthetic oligonucleotide
  Sense strand starting at position 2521 of SEQ ID NO: 1882672
gucuccauccugggaagaa

SEQ ID NO: 2139195 - RNA, 19 nt, Artificial Sequence
  Description of Artificial Sequence: Synthetic oligonucleotide
  Antisense strand to SEQ ID NO: 2139194
uucuucccaggauggagac

SEQ ID NO: 2139196 - RNA, 19 nt, Artificial Sequence
  Description of Artificial Sequence: Synthetic oligonucleotide
  Sense strand starting at position 2621 of SEQ ID NO: 1882672
gcggguacucaguagagau

SEQ ID NO: 2139197 - RNA, 19 nt, Artificial Sequence
  Description of Artificial Sequence: Synthetic oligonucleotide
  Antisense strand to SEQ ID NO: 2139196
aucucuacugaguacccgc

SEQ ID NO: 2139198 - RNA, 19 nt, Artificial Sequence
  Description of Artificial Sequence: Synthetic oligonucleotide
  Sense strand starting at position 2736 of SEQ ID NO: 1882672
ggaggagacgguugcuaaa

SEQ ID NO: 2139199 - RNA, 19 nt, Artificial Sequence
  Description of Artificial Sequence: Synthetic oligonucleotide
  Antisense strand to SEQ ID NO: 2139198
uuuagcaaccgucuccucc

SEQ ID NO: 2139200 - RNA, 19 nt, Artificial Sequence
  Description of Artificial Sequence: Synthetic oligonucleotide
  Sense strand starting at position 2748 of SEQ ID NO: 1882672
ugcuaaauguaguucuauc

SEQ ID NO: 2139201 - RNA, 19 nt, Artificial Sequence
  Description of Artificial Sequence: Synthetic oligonucleotide
  Antisense strand to SEQ ID NO: 2139200
gauagaacuacauuuagca

SEQ ID NO: 2139202 - RNA, 19 nt, Artificial Sequence
  Description of Artificial Sequence: Synthetic oligonucleotide
  Sense strand starting at position 2815 of SEQ ID NO: 1882672
ucaaaugaacucugaguua

SEQ ID NO: 2139203 - RNA, 19 nt, Artificial Sequence
  Description of Artificial Sequence: Synthetic oligonucleotide
  Antisense strand to SEQ ID NO: 2139202
uaacucagaguucauuuga

SEQ ID NO: 2139204 - RNA, 19 nt, Artificial Sequence
  Description of Artificial Sequence: Synthetic oligonucleotide
  Sense strand starting at position 2870 of SEQ ID NO: 1882672
ccuuaaaucugugucagua

SEQ ID NO: 2139205 - RNA, 19 nt, Artificial Sequence
  Description of Artificial Sequence: Synthetic oligonucleotide
  Antisense strand to SEQ ID NO: 2139204
uacugacacagauuuaagg

SEQ ID NO: 2139206 - RNA, 19 nt, Artificial Sequence
  Description of Artificial Sequence: Synthetic oligonucleotide
  Sense strand starting at position 2912 of SEQ ID NO: 1882672
auuggaugaaugcguuaau

SEQ ID NO: 2139207 - RNA, 19 nt, Artificial Sequence
  Description of Artificial Sequence: Synthetic oligonucleotide
  Antisense strand to SEQ ID NO: 2139206
auuaacgcauucauccaau

SEQ ID NO: 2139208 - RNA, 19 nt, Artificial Sequence
  Description of Artificial Sequence: Synthetic oligonucleotide
  Sense strand starting at position 2915 of SEQ ID NO: 1882672
ggaugaaugcguuaaugaa

SEQ ID NO: 2139209 - RNA, 19 nt, Artificial Sequence
  Description of Artificial Sequence: Synthetic oligonucleotide
  Antisense strand to SEQ ID NO: 2139208
uucauuaacgcauucaucc

SEQ ID NO: 2139210 - RNA, 19 nt, Artificial Sequence
  Description of Artificial Sequence: Synthetic oligonucleotide
  Sense strand starting at position 2961 of SEQ ID NO: 1882672
gcuacuuaagaucacaguu

SEQ ID NO: 2139211 - RNA, 19 nt, Artificial Sequence
  Description of Artificial Sequence: Synthetic oligonucleotide
  Antisense strand to SEQ ID NO: 2139210
aacugugaucuuaaguagc

SEQ ID NO: 2139212 - RNA, 19 nt, Artificial Sequence
  Description of Artificial Sequence: Synthetic oligonucleotide
  Sense strand starting at position 2990 of SEQ ID NO: 1882672
cugcuuaauuuggaaagca

SEQ ID NO: 2139213 - RNA, 19 nt, Artificial Sequence
  Description of Artificial Sequence: Synthetic oligonucleotide
  Antisense strand to SEQ ID NO: 2139212
ugcuuuccaaauuaagcag

SEQ ID NO: 2139214 - RNA, 19 nt, Artificial Sequence
  Description of Artificial Sequence: Synthetic oligonucleotide
  Sense strand starting at position 3070 of SEQ ID NO: 1882672
aguaauuggcuagguucuu

SEQ ID NO: 2139215 - RNA, 19 nt, Artificial Sequence
  Description of Artificial Sequence: Synthetic oligonucleotide
  Antisense strand to SEQ ID NO: 2139214
aagaaccuagccaauuacu

SEQ ID NO: 2139216 - RNA, 19 nt, Artificial Sequence
  Description of Artificial Sequence: Synthetic oligonucleotide
  Sense strand starting at position 3095 of SEQ ID NO: 1882672
agcaguguugacuagaguu

SEQ ID NO: 2139217 - RNA, 19 nt, Artificial Sequence
  Description of Artificial Sequence: Synthetic oligonucleotide
  Antisense strand to SEQ ID NO: 2139216
aacucuagucaacacugcu

SEQ ID NO: 2139218 - RNA, 19 nt, Artificial Sequence
  Description of Artificial Sequence: Synthetic oligonucleotide
  Sense strand starting at position 3097 of SEQ ID NO: 1882672
caguguugacuagaguuaa

SEQ ID NO: 2139219 - RNA, 19 nt, Artificial Sequence
  Description of Artificial Sequence: Synthetic oligonucleotide
  Antisense strand to SEQ ID NO: 2139218
uuaacucuagucaacacug

SEQ ID NO: 2139220 - RNA, 19 nt, Artificial Sequence
  Description of Artificial Sequence: Synthetic oligonucleotide
  Sense strand starting at position 3156 of SEQ ID NO: 1882672
aaugaugugcuuuacugua

SEQ ID NO: 2139221 - RNA, 19 nt, Artificial Sequence
  Description of Artificial Sequence: Synthetic oligonucleotide
  Antisense strand to SEQ ID NO: 2139220
uacaguaaagcacaucauu

SEQ ID NO: 2139222 - RNA, 19 nt, Artificial Sequence
  Description of Artificial Sequence: Synthetic oligonucleotide
  Sense strand starting at position 3158 of SEQ ID NO: 1882672
ugaugugcuuuacuguaga

SEQ ID NO: 2139223 - RNA, 19 nt, Artificial Sequence
  Description of Artificial Sequence: Synthetic oligonucleotide
  Antisense strand to SEQ ID NO: 2139222
ucuacaguaaagcacauca

SEQ ID NO: 2139224 - RNA, 19 nt, Artificial Sequence
  Description of Artificial Sequence: Synthetic oligonucleotide
  Sense strand starting at position 3161 of SEQ ID NO: 1882672
ugugcuuuacuguagaaac

SEQ ID NO: 2139225 - RNA, 19 nt, Artificial Sequence
  Description of Artificial Sequence: Synthetic oligonucleotide
  Antisense strand to SEQ ID NO: 2139224
guuucuacaguaaagcaca

SEQ ID NO: 2139226 - RNA, 19 nt, Artificial Sequence
  Description of Artificial Sequence: Synthetic oligonucleotide
  Sense strand starting at position 3288 of SEQ ID NO: 1882672
cccuucccgcuuuaugaaa

SEQ ID NO: 2139227 - RNA, 19 nt, Artificial Sequence
  Description of Artificial Sequence: Synthetic oligonucleotide
  Antisense strand to SEQ ID NO: 2139226
uuucauaaagcgggaaggg

SEQ ID NO: 2139228 - RNA, 19 nt, Artificial Sequence
  Description of Artificial Sequence: Synthetic oligonucleotide
  Sense strand starting at position 3345 of SEQ ID NO: 1882672
cgcauuauguaucugauau

SEQ ID NO: 2139229 - RNA, 19 nt, Artificial Sequence
  Description of Artificial Sequence: Synthetic oligonucleotide
  Antisense strand to SEQ ID NO: 2139228
auaucagauacauaaugcg

SEQ ID NO: 2139230 - RNA, 19 nt, Artificial Sequence
  Description of Artificial Sequence: Synthetic oligonucleotide
  Sense strand starting at position 3442 of SEQ ID NO: 1882672
uuuguaaacguaggaacuu

SEQ ID NO: 2139231 - RNA, 19 nt, Artificial Sequence
  Description of Artificial Sequence: Synthetic oligonucleotide
  Antisense strand to SEQ ID NO: 2139230
aaguuccuacguuuacaaa

SEQ ID NO: 2139232 - RNA, 19 nt, Artificial Sequence
  Description of Artificial Sequence: Synthetic oligonucleotide
  Sense strand starting at position 3454 of SEQ ID NO: 1882672
ggaacuuugaguggagacu

SEQ ID NO: 2139233 - RNA, 19 nt, Artificial Sequence
  Description of Artificial Sequence: Synthetic oligonucleotide
  Antisense strand to SEQ ID NO: 2139232
agucuccacucaaaguucc

SEQ ID NO: 2139234 - RNA, 19 nt, Artificial Sequence
  Description of Artificial Sequence: Synthetic oligonucleotide
  Sense strand starting at position 3463 of SEQ ID NO: 1882672
aguggagacuuaguaaagu

SEQ ID NO: 2139235 - RNA, 19 nt, Artificial Sequence
  Description of Artificial Sequence: Synthetic oligonucleotide
  Antisense strand to SEQ ID NO: 2139234
acuuuacuaagucuccacu

SEQ ID NO: 2139236 - RNA, 19 nt, Artificial Sequence
  Description of Artificial Sequence: Synthetic oligonucleotide
  Sense strand starting at position 3481 of SEQ ID NO: 1882672
uggaauacguaguaauuua

SEQ ID NO: 2139237 - RNA, 19 nt, Artificial Sequence
  Description of Artificial Sequence: Synthetic oligonucleotide
  Antisense strand to SEQ ID NO: 2139236
uaaauuacuacguauucca

SEQ ID NO: 2139238 - RNA, 19 nt, Artificial Sequence
  Description of Artificial Sequence: Synthetic oligonucleotide
  Sense strand starting at position 3489 of SEQ ID NO: 1882672
guaguaauuuaucuguugu

SEQ ID NO: 2139239 - RNA, 19 nt, Artificial Sequence
  Description of Artificial Sequence: Synthetic oligonucleotide
  Antisense strand to SEQ ID NO: 2139238
acaacagauaaauuacuac

SEQ ID NO: 2139240 - RNA, 19 nt, Artificial Sequence
  Description of Artificial Sequence: Synthetic oligonucleotide
  Sense strand starting at position 3729 of SEQ ID NO: 1882672
cuccacuggugucuuuaaa

SEQ ID NO: 2139241 - RNA, 19 nt, Artificial Sequence
  Description of Artificial Sequence: Synthetic oligonucleotide
  Antisense strand to SEQ ID NO: 2139240
uuuaaagacaccaguggag

SEQ ID NO: 2139242 - RNA, 19 nt, Artificial Sequence
  Description of Artificial Sequence: Synthetic oligonucleotide
  Sense strand starting at position 3737 of SEQ ID NO: 1882672
gugucuuuaaagugauuug

SEQ ID NO: 2139243 - RNA, 19 nt, Artificial Sequence
  Description of Artificial Sequence: Synthetic oligonucleotide
  Antisense strand to SEQ ID NO: 2139242
caaaucacuuuaaagacac

SEQ ID NO: 2139244 - RNA, 19 nt, Artificial Sequence
  Description of Artificial Sequence: Synthetic oligonucleotide
  Sense strand starting at position 3748 of SEQ ID NO: 1882672
gugauuugaucacaacuaa

SEQ ID NO: 2139245 - RNA, 19 nt, Artificial Sequence
  Description of Artificial Sequence: Synthetic oligonucleotide
  Antisense strand to SEQ ID NO: 2139244
uuaguugugaucaaaucac

SEQ ID NO: 2139246 - RNA, 19 nt, Artificial Sequence
  Description of Artificial Sequence: Synthetic oligonucleotide
  Sense strand starting at position 3782 of SEQ ID NO: 1882672
ugcuguaguccacacugaa

SEQ ID NO: 2139247 - RNA, 19 nt, Artificial Sequence
  Description of Artificial Sequence: Synthetic oligonucleotide
  Antisense strand to SEQ ID NO: 2139246
uucaguguggacuacagca

SEQ ID NO: 2139248 - RNA, 19 nt, Artificial Sequence
  Description of Artificial Sequence: Synthetic oligonucleotide
  Sense strand starting at position 3785 of SEQ ID NO: 1882672
uguaguccacacugaagaa

SEQ ID NO: 2139249 - RNA, 19 nt, Artificial Sequence
  Description of Artificial Sequence: Synthetic oligonucleotide
  Antisense strand to SEQ ID NO: 2139248
uucuucaguguggacuaca

SEQ ID NO: 2139250 - RNA, 19 nt, Artificial Sequence
  Description of Artificial Sequence: Synthetic oligonucleotide
  Sense strand starting at position 3815 of SEQ ID NO: 1882672
guuucugagaauuggugau

SEQ ID NO: 2139251 - RNA, 19 nt, Artificial Sequence
  Description of Artificial Sequence: Synthetic oligonucleotide
  Antisense strand to SEQ ID NO: 2139250
aucaccaauucucagaaac

SEQ ID NO: 2139252 - RNA, 19 nt, Artificial Sequence
  Description of Artificial Sequence: Synthetic oligonucleotide
  Sense strand starting at position 3817 of SEQ ID NO: 1882672
uucugagaauuggugauua

SEQ ID NO: 2139253 - RNA, 19 nt, Artificial Sequence
  Description of Artificial Sequence: Synthetic oligonucleotide
  Antisense strand to SEQ ID NO: 2139252
uaaucaccaauucucagaa

SEQ ID NO: 2139254 - RNA, 19 nt, Artificial Sequence
  Description of Artificial Sequence: Synthetic oligonucleotide
  Sense strand starting at position 3819 of SEQ ID NO: 1882672
cugagaauuggugauuagu

SEQ ID NO: 2139255 - RNA, 19 nt, Artificial Sequence
  Description of Artificial Sequence: Synthetic oligonucleotide
  Antisense strand to SEQ ID NO: 2139254
acuaaucaccaauucucag

SEQ ID NO: 2139256 - RNA, 19 nt, Artificial Sequence
  Description of Artificial Sequence: Synthetic oligonucleotide
  Sense strand starting at position 3932 of SEQ ID NO: 1882672
uugcuaaagaagggucaau

SEQ ID NO: 2139257 - RNA, 19 nt, Artificial Sequence
  Description of Artificial Sequence: Synthetic oligonucleotide
  Antisense strand to SEQ ID NO: 2139256
auugacccuucuuuagcaa

SEQ ID NO: 2139258 - RNA, 19 nt, Artificial Sequence
  Description of Artificial Sequence: Synthetic oligonucleotide
  Sense strand starting at position 315 of SEQ ID NO: 1882673
cuuggcaagucaucuuaca

SEQ ID NO: 2139259 - RNA, 19 nt, Artificial Sequence
  Description of Artificial Sequence: Synthetic oligonucleotide
  Antisense strand to SEQ ID NO: 2139258
uguaagaugacuugccaag

SEQ ID NO: 2139260 - RNA, 19 nt, Artificial Sequence
  Description of Artificial Sequence: Synthetic oligonucleotide
  Sense strand starting at position 564 of SEQ ID NO: 1882673
aaguauggcccauggugua

SEQ ID NO: 2139261 - RNA, 19 nt, Artificial Sequence
  Description of Artificial Sequence: Synthetic oligonucleotide
  Antisense strand to SEQ ID NO: 2139260
uacaccaugggccauacuu

SEQ ID NO: 2139262 - RNA, 19 nt, Artificial Sequence
  Description of Artificial Sequence: Synthetic oligonucleotide
  Sense strand starting at position 598 of SEQ ID NO: 1882673
caagcacgguugcuauaau

SEQ ID NO: 2139263 - RNA, 19 nt, Artificial Sequence
  Description of Artificial Sequence: Synthetic oligonucleotide
  Antisense strand to SEQ ID NO: 2139262
auuauagcaaccgugcuug

SEQ ID NO: 2139264 - RNA, 19 nt, Artificial Sequence
  Description of Artificial Sequence: Synthetic oligonucleotide
  Sense strand starting at position 633 of SEQ ID NO: 1882673
acuuuaaaugguuguaaag

SEQ ID NO: 2139265 - RNA, 19 nt, Artificial Sequence
  Description of Artificial Sequence: Synthetic oligonucleotide
  Antisense strand to SEQ ID NO: 2139264
cuuuacaaccauuuaaagu

SEQ ID NO: 2139266 - RNA, 19 nt, Artificial Sequence
  Description of Artificial Sequence: Synthetic oligonucleotide
  Sense strand starting at position 644 of SEQ ID NO: 1882673
uuguaaagaugcucauuaa

SEQ ID NO: 2139267 - RNA, 19 nt, Artificial Sequence
  Description of Artificial Sequence: Synthetic oligonucleotide
  Antisense strand to SEQ ID NO: 2139266
uuaaugagcaucuuuacaa

SEQ ID NO: 2139268 - RNA, 19 nt, Artificial Sequence
  Description of Artificial Sequence: Synthetic oligonucleotide
  Sense strand starting at position 645 of SEQ ID NO: 1882673
uguaaagaugcucauuaac

SEQ ID NO: 2139269 - RNA, 19 nt, Artificial Sequence
  Description of Artificial Sequence: Synthetic oligonucleotide
  Antisense strand to SEQ ID NO: 2139268
guuaaugagcaucuuuaca

SEQ ID NO: 2139270 - RNA, 19 nt, Artificial Sequence
  Description of Artificial Sequence: Synthetic oligonucleotide
  Sense strand starting at position 906 of SEQ ID NO: 1882673
caacgaugccaguauucua

SEQ ID NO: 2139271 - RNA, 19 nt, Artificial Sequence
  Description of Artificial Sequence: Synthetic oligonucleotide
  Antisense strand to SEQ ID NO: 2139270
uagaauacuggcaucguug

SEQ ID NO: 2139272 - RNA, 19 nt, Artificial Sequence
  Description of Artificial Sequence: Synthetic oligonucleotide
  Sense strand starting at position 951 of SEQ ID NO: 1882673
cuuuccaagcugugacaga

SEQ ID NO: 2139273 - RNA, 19 nt, Artificial Sequence
  Description of Artificial Sequence: Synthetic oligonucleotide
  Antisense strand to SEQ ID NO: 2139272
ucugucacagcuuggaaag

SEQ ID NO: 2139274 - RNA, 19 nt, Artificial Sequence
  Description of Artificial Sequence: Synthetic oligonucleotide
  Sense strand starting at position 1247 of SEQ ID NO: 1882673
uuggaaucuuaaucugauc

SEQ ID NO: 2139275 - RNA, 19 nt, Artificial Sequence
  Description of Artificial Sequence: Synthetic oligonucleotide
  Antisense strand to SEQ ID NO: 2139274
gaucagauuaagauuccaa

SEQ ID NO: 2139276 - RNA, 19 nt, Artificial Sequence
  Description of Artificial Sequence: Synthetic oligonucleotide
  Sense strand starting at position 2453 of SEQ ID NO: 1882673
gacgacugagucugaagaa

SEQ ID NO: 2139277 - RNA, 19 nt, Artificial Sequence
  Description of Artificial Sequence: Synthetic oligonucleotide
  Antisense strand to SEQ ID NO: 2139276
uucuucagacucagucguc

SEQ ID NO: 2139278 - RNA, 19 nt, Artificial Sequence
  Description of Artificial Sequence: Synthetic oligonucleotide
  Sense strand starting at position 2530 of SEQ ID NO: 1882673
aagguuacacguuaauuaa

SEQ ID NO: 2139279 - RNA, 19 nt, Artificial Sequence
  Description of Artificial Sequence: Synthetic oligonucleotide
  Antisense strand to SEQ ID NO: 2139278
uuaauuaacguguaaccuu

SEQ ID NO: 2139280 - RNA, 19 nt, Artificial Sequence
  Description of Artificial Sequence: Synthetic oligonucleotide
  Sense strand starting at position 2533 of SEQ ID NO: 1882673
guuacacguuaauuaacga

SEQ ID NO: 2139281 - RNA, 19 nt, Artificial Sequence
  Description of Artificial Sequence: Synthetic oligonucleotide
  Antisense strand to SEQ ID NO: 2139280
ucguuaauuaacguguaac

SEQ ID NO: 2139282 - RNA, 19 nt, Artificial Sequence
  Description of Artificial Sequence: Synthetic oligonucleotide
  Sense strand starting at position 2538 of SEQ ID NO: 1882673
acguuaauuaacgagguau

SEQ ID NO: 2139283 - RNA, 19 nt, Artificial Sequence
  Description of Artificial Sequence: Synthetic oligonucleotide
  Antisense strand to SEQ ID NO: 2139282
auaccucguuaauuaacgu

SEQ ID NO: 2139284 - RNA, 19 nt, Artificial Sequence
  Description of Artificial Sequence: Synthetic oligonucleotide
  Sense strand starting at position 2540 of SEQ ID NO: 1882673
guuaauuaacgagguauua

SEQ ID NO: 2139285 - RNA, 19 nt, Artificial Sequence
  Description of Artificial Sequence: Synthetic oligonucleotide
  Antisense strand to SEQ ID NO: 2139284
uaauaccucguuaauuaac

SEQ ID NO: 2139286 - RNA, 19 nt, Artificial Sequence
  Description of Artificial Sequence: Synthetic oligonucleotide
  Sense strand starting at position 2582 of SEQ ID NO: 1882673
aaaugacuguaggaaguau

SEQ ID NO: 2139287 - RNA, 19 nt, Artificial Sequence
  Description of Artificial Sequence: Synthetic oligonucleotide
  Antisense strand to SEQ ID NO: 2139286
auacuuccuacagucauuu

SEQ ID NO: 2139288 - RNA, 19 nt, Artificial Sequence
  Description of Artificial Sequence: Synthetic oligonucleotide
  Sense strand starting at position 2586 of SEQ ID NO: 1882673
gacuguaggaaguauguca

SEQ ID NO: 2139289 - RNA, 19 nt, Artificial Sequence
  Description of Artificial Sequence: Synthetic oligonucleotide
  Antisense strand to SEQ ID NO: 2139288
ugacauacuuccuacaguc

SEQ ID NO: 2139290 - RNA, 19 nt, Artificial Sequence
  Description of Artificial Sequence: Synthetic oligonucleotide
  Sense strand starting at position 2591 of SEQ ID NO: 1882673
uaggaaguaugucagggaa

SEQ ID NO: 2139291 - RNA, 19 nt, Artificial Sequence
  Description of Artificial Sequence: Synthetic oligonucleotide
  Antisense strand to SEQ ID NO: 2139290
uucccugacauacuuccua

SEQ ID NO: 2139292 - RNA, 19 nt, Artificial Sequence
  Description of Artificial Sequence: Synthetic oligonucleotide
  Sense strand starting at position 2693 of SEQ ID NO: 1882673
gucagugcccguuaccaaa

SEQ ID NO: 2139293 - RNA, 19 nt, Artificial Sequence
  Description of Artificial Sequence: Synthetic oligonucleotide
  Antisense strand to SEQ ID NO: 2139292
uuugguaacgggcacugac

SEQ ID NO: 2139294 - RNA, 19 nt, Artificial Sequence
  Description of Artificial Sequence: Synthetic oligonucleotide
  Sense strand starting at position 2813 of SEQ ID NO: 1882673
cgggacagcguuuacugaa

SEQ ID NO: 2139295 - RNA, 19 nt, Artificial Sequence
  Description of Artificial Sequence: Synthetic oligonucleotide
  Antisense strand to SEQ ID NO: 2139294
uucaguaaacgcugucccg

SEQ ID NO: 2139296 - RNA, 19 nt, Artificial Sequence
  Description of Artificial Sequence: Synthetic oligonucleotide
  Sense strand starting at position 2852 of SEQ ID NO: 1882673
ccaauaagguuccucagaa

SEQ ID NO: 2139297 - RNA, 19 nt, Artificial Sequence
  Description of Artificial Sequence: Synthetic oligonucleotide
  Antisense strand to SEQ ID NO: 2139296
uucugaggaaccuuauugg

SEQ ID NO: 2139298 - RNA, 19 nt, Artificial Sequence
  Description of Artificial Sequence: Synthetic oligonucleotide
  Sense strand starting at position 3063 of SEQ ID NO: 1882673
cuucccaucuguuugauga

SEQ ID NO: 2139299 - RNA, 19 nt, Artificial Sequence
  Description of Artificial Sequence: Synthetic oligonucleotide
  Antisense strand to SEQ ID NO: 2139298
ucaucaaacagaugggaag

SEQ ID NO: 2139300 - RNA, 19 nt, Artificial Sequence
  Description of Artificial Sequence: Synthetic oligonucleotide
  Sense strand starting at position 3064 of SEQ ID NO: 1882673
uucccaucuguuugaugau

SEQ ID NO: 2139301 - RNA, 19 nt, Artificial Sequence
  Description of Artificial Sequence: Synthetic oligonucleotide
  Antisense strand to SEQ ID NO: 2139300
aucaucaaacagaugggaa

SEQ ID NO: 2139302 - RNA, 19 nt, Artificial Sequence
  Description of Artificial Sequence: Synthetic oligonucleotide
  Sense strand starting at position 3071 of SEQ ID NO: 1882673
cuguuugaugauggaucaa

SEQ ID NO: 2139303 - RNA, 19 nt, Artificial Sequence
  Description of Artificial Sequence: Synthetic oligonucleotide
  Antisense strand to SEQ ID NO: 2139302
uugauccaucaucaaacag

SEQ ID NO: 2139304 - RNA, 19 nt, Artificial Sequence
  Description of Artificial Sequence: Synthetic oligonucleotide
  Sense strand starting at position 3129 of SEQ ID NO: 1882673
gcucauuguggccagguua

SEQ ID NO: 2139305 - RNA, 19 nt, Artificial Sequence
  Description of Artificial Sequence: Synthetic oligonucleotide
  Antisense strand to SEQ ID NO: 2139304
uaaccuggccacaaugagc

SEQ ID NO: 2139306 - RNA, 19 nt, Artificial Sequence
  Description of Artificial Sequence: Synthetic oligonucleotide
  Sense strand starting at position 3174 of SEQ ID NO: 1882673
aaauguucguggcccacaa

SEQ ID NO: 2139307 - RNA, 19 nt, Artificial Sequence
  Description of Artificial Sequence: Synthetic oligonucleotide
  Antisense strand to SEQ ID NO: 2139306
uugugggccacgaacauuu

SEQ ID NO: 2139308 - RNA, 19 nt, Artificial Sequence
  Description of Artificial Sequence: Synthetic oligonucleotide
  Sense strand starting at position 3176 of SEQ ID NO: 1882673
auguucguggcccacaaau

SEQ ID NO: 2139309 - RNA, 19 nt, Artificial Sequence
  Description of Artificial Sequence: Synthetic oligonucleotide
  Antisense strand to SEQ ID NO: 2139308
auuugugggccacgaacau

SEQ ID NO: 2139310 - RNA, 19 nt, Artificial Sequence
  Description of Artificial Sequence: Synthetic oligonucleotide
  Sense strand starting at position 3178 of SEQ ID NO: 1882673
guucguggcccacaaauca

SEQ ID NO: 2139311 - RNA, 19 nt, Artificial Sequence
  Description of Artificial Sequence: Synthetic oligonucleotide
  Antisense strand to SEQ ID NO: 2139310
ugauuugugggccacgaac

SEQ ID NO: 2139312 - RNA, 19 nt, Artificial Sequence
  Description of Artificial Sequence: Synthetic oligonucleotide
  Sense strand starting at position 3307 of SEQ ID NO: 1882673
aguccacagccugagacau

SEQ ID NO: 2139313 - RNA, 19 nt, Artificial Sequence
  Description of Artificial Sequence: Synthetic oligonucleotide
  Antisense strand to SEQ ID NO: 2139312
augucucaggcuguggacu

SEQ ID NO: 2139314 - RNA, 19 nt, Artificial Sequence
  Description of Artificial Sequence: Synthetic oligonucleotide
  Sense strand starting at position 3330 of SEQ ID NO: 1882673
accgcugaauuccuuuauu

SEQ ID NO: 2139315 - RNA, 19 nt, Artificial Sequence
  Description of Artificial Sequence: Synthetic oligonucleotide
  Antisense strand to SEQ ID NO: 2139314
aauaaaggaauucagcggu

SEQ ID NO: 2139316 - RNA, 19 nt, Artificial Sequence
  Description of Artificial Sequence: Synthetic oligonucleotide
  Sense strand starting at position 3494 of SEQ ID NO: 1882673
uuuaucuugucacuuaguu

SEQ ID NO: 2139317 - RNA, 19 nt, Artificial Sequence
  Description of Artificial Sequence: Synthetic oligonucleotide
  Antisense strand to SEQ ID NO: 2139316
aacuaagugacaagauaaa

SEQ ID NO: 2139318 - RNA, 19 nt, Artificial Sequence
  Description of Artificial Sequence: Synthetic oligonucleotide
  Sense strand starting at position 3627 of SEQ ID NO: 1882673
uugcaauaacuguaugcaa

SEQ ID NO: 2139319 - RNA, 19 nt, Artificial Sequence
  Description of Artificial Sequence: Synthetic oligonucleotide
  Antisense strand to SEQ ID NO: 2139318
uugcauacaguuauugcaa

SEQ ID NO: 2139320 - RNA, 19 nt, Artificial Sequence
  Description of Artificial Sequence: Synthetic oligonucleotide
  Sense strand starting at position 3665 of SEQ ID NO: 1882673
ggauguaguuauuugccca

SEQ ID NO: 2139321 - RNA, 19 nt, Artificial Sequence
  Description of Artificial Sequence: Synthetic oligonucleotide
  Antisense strand to SEQ ID NO: 2139320
ugggcaaauaacuacaucc

SEQ ID NO: 2139322 - RNA, 19 nt, Artificial Sequence
  Description of Artificial Sequence: Synthetic oligonucleotide
  Sense strand starting at position 3668 of SEQ ID NO: 1882673
uguaguuauuugcccaagu

SEQ ID NO: 2139323 - RNA, 19 nt, Artificial Sequence
  Description of Artificial Sequence: Synthetic oligonucleotide
  Antisense strand to SEQ ID NO: 2139322
acuugggcaaauaacuaca

SEQ ID NO: 2139324 - RNA, 19 nt, Artificial Sequence
  Description of Artificial Sequence: Synthetic oligonucleotide
  Sense strand starting at position 3669 of SEQ ID NO: 1882673
guaguuauuugcccaaguu

SEQ ID NO: 2139325 - RNA, 19 nt, Artificial Sequence
  Description of Artificial Sequence: Synthetic oligonucleotide
  Antisense strand to SEQ ID NO: 2139324
aacuugggcaaauaacuac

SEQ ID NO: 2139326 - RNA, 19 nt, Artificial Sequence
  Description of Artificial Sequence: Synthetic oligonucleotide
  Sense strand starting at position 3735 of SEQ ID NO: 1882673
aaguauuuacggugguuga

SEQ ID NO: 2139327 - RNA, 19 nt, Artificial Sequence
  Description of Artificial Sequence: Synthetic oligonucleotide
  Antisense strand to SEQ ID NO: 2139326
ucaaccaccguaaauacuu

SEQ ID NO: 2139328 - RNA, 19 nt, Artificial Sequence
  Description of Artificial Sequence: Synthetic oligonucleotide
  Sense strand starting at position 3736 of SEQ ID NO: 1882673
aguauuuacggugguugau

SEQ ID NO: 2139329 - RNA, 19 nt, Artificial Sequence
  Description of Artificial Sequence: Synthetic oligonucleotide
  Antisense strand to SEQ ID NO: 2139328
aucaaccaccguaaauacu

SEQ ID NO: 2139330 - RNA, 19 nt, Artificial Sequence
  Description of Artificial Sequence: Synthetic oligonucleotide
  Sense strand starting at position 3745 of SEQ ID NO: 1882673
ggugguugauaagaauaua

SEQ ID NO: 2139331 - RNA, 19 nt, Artificial Sequence
  Description of Artificial Sequence: Synthetic oligonucleotide
  Antisense strand to SEQ ID NO: 2139330
uauauucuuaucaaccacc

SEQ ID NO: 2139332 - RNA, 19 nt, Artificial Sequence
  Description of Artificial Sequence: Synthetic oligonucleotide
  Sense strand starting at position 3939 of SEQ ID NO: 1882673
augcucuuaccauggucua

SEQ ID NO: 2139333 - RNA, 19 nt, Artificial Sequence
  Description of Artificial Sequence: Synthetic oligonucleotide
  Antisense strand to SEQ ID NO: 2139332
uagaccaugguaagagcau

SEQ ID NO: 2139334 - RNA, 19 nt, Artificial Sequence
  Description of Artificial Sequence: Synthetic oligonucleotide
  Sense strand starting at position 3951 of SEQ ID NO: 1882673
uggucuagcccuugaaagu

SEQ ID NO: 2139335 - RNA, 19 nt, Artificial Sequence
  Description of Artificial Sequence: Synthetic oligonucleotide
  Antisense strand to SEQ ID NO: 2139334
acuuucaagggcuagacca

SEQ ID NO: 2139336 - RNA, 19 nt, Artificial Sequence
  Description of Artificial Sequence: Synthetic oligonucleotide
  Sense strand starting at position 3952 of SEQ ID NO: 1882673
ggucuagcccuugaaagua

SEQ ID NO: 2139337 - RNA, 19 nt, Artificial Sequence
  Description of Artificial Sequence: Synthetic oligonucleotide
  Antisense strand to SEQ ID NO: 2139336
uacuuucaagggcuagacc

SEQ ID NO: 2139338 - RNA, 19 nt, Artificial Sequence
  Description of Artificial Sequence: Synthetic oligonucleotide
  Sense strand starting at position 1289 of SEQ ID NO: 1882674
gccuuuaacugcuccaugu

SEQ ID NO: 2139339 - RNA, 19 nt, Artificial Sequence
  Description of Artificial Sequence: Synthetic oligonucleotide
  Antisense strand to SEQ ID NO: 2139338
acauggagcaguuaaaggc

SEQ ID NO: 2139340 - RNA, 19 nt, Artificial Sequence
  Description of Artificial Sequence: Synthetic oligonucleotide
  Sense strand starting at position 1312 of SEQ ID NO: 1882674
gcccuuaaucaucgugagu

SEQ ID NO: 2139341 - RNA, 19 nt, Artificial Sequence
  Description of Artificial Sequence: Synthetic oligonucleotide
  Antisense strand to SEQ ID NO: 2139340
acucacgaugauuaagggc

SEQ ID NO: 2139342 - RNA, 19 nt, Artificial Sequence
  Description of Artificial Sequence: Synthetic oligonucleotide
  Sense strand starting at position 1314 of SEQ ID NO: 1882674
ccuuaaucaucgugaguga

SEQ ID NO: 2139343 - RNA, 19 nt, Artificial Sequence
  Description of Artificial Sequence: Synthetic oligonucleotide
  Antisense strand to SEQ ID NO: 2139342
ucacucacgaugauuaagg

SEQ ID NO: 2139344 - RNA, 19 nt, Artificial Sequence
  Description of Artificial Sequence: Synthetic oligonucleotide
  Sense strand starting at position 1315 of SEQ ID NO: 1882674
cuuaaucaucgugagugaa

SEQ ID NO: 2139345 - RNA, 19 nt, Artificial Sequence
  Description of Artificial Sequence: Synthetic oligonucleotide
  Antisense strand to SEQ ID NO: 2139344
uucacucacgaugauuaag

SEQ ID NO: 2139346 - RNA, 19 nt, Artificial Sequence
  Description of Artificial Sequence: Synthetic oligonucleotide
  Sense strand starting at position 1317 of SEQ ID NO: 1882674
uaaucaucgugagugaaag

SEQ ID NO: 2139347 - RNA, 19 nt, Artificial Sequence
  Description of Artificial Sequence: Synthetic oligonucleotide
  Antisense strand to SEQ ID NO: 2139346
cuuucacucacgaugauua

SEQ ID NO: 2139348 - RNA, 19 nt, Artificial Sequence
  Description of Artificial Sequence: Synthetic oligonucleotide
  Sense strand starting at position 1495 of SEQ ID NO: 1882674
gggugagucuucccagcua

SEQ ID NO: 2139349 - RNA, 19 nt, Artificial Sequence
  Description of Artificial Sequence: Synthetic oligonucleotide
  Antisense strand to SEQ ID NO: 2139348
uagcugggaagacucaccc

SEQ ID NO: 2139350 - RNA, 19 nt, Artificial Sequence
  Description of Artificial Sequence: Synthetic oligonucleotide
  Sense strand starting at position 2219 of SEQ ID NO: 1882674
accaaagguuagucugcua

SEQ ID NO: 2139351 - RNA, 19 nt, Artificial Sequence
  Description of Artificial Sequence: Synthetic oligonucleotide
  Antisense strand to SEQ ID NO: 2139350
uagcagacuaaccuuuggu

SEQ ID NO: 2139352 - RNA, 19 nt, Artificial Sequence
  Description of Artificial Sequence: Synthetic oligonucleotide
  Sense strand starting at position 2598 of SEQ ID NO: 1882674
gucugcuaucuuugucagu

SEQ ID NO: 2139353 - RNA, 19 nt, Artificial Sequence
  Description of Artificial Sequence: Synthetic oligonucleotide
  Antisense strand to SEQ ID NO: 2139352
acugacaaagauagcagac

SEQ ID NO: 2139354 - RNA, 19 nt, Artificial Sequence
  Description of Artificial Sequence: Synthetic oligonucleotide
  Sense strand starting at position 2599 of SEQ ID NO: 1882674
ucugcuaucuuugucaguu

SEQ ID NO: 2139355 - RNA, 19 nt, Artificial Sequence
  Description of Artificial Sequence: Synthetic oligonucleotide
  Antisense strand to SEQ ID NO: 2139354
aacugacaaagauagcaga

SEQ ID NO: 2139356 - RNA, 19 nt, Artificial Sequence
  Description of Artificial Sequence: Synthetic oligonucleotide
  Sense strand starting at position 2600 of SEQ ID NO: 1882674
cugcuaucuuugucaguug

SEQ ID NO: 2139357 - RNA, 19 nt, Artificial Sequence
  Description of Artificial Sequence: Synthetic oligonucleotide
  Antisense strand to SEQ ID NO: 2139356
caacugacaaagauagcag

SEQ ID NO: 2139358 - RNA, 19 nt, Artificial Sequence
  Description of Artificial Sequence: Synthetic oligonucleotide
  Sense strand starting at position 2601 of SEQ ID NO: 1882674
ugcuaucuuugucaguuga

SEQ ID NO: 2139359 - RNA, 19 nt, Artificial Sequence
  Description of Artificial Sequence: Synthetic oligonucleotide
  Antisense strand to SEQ ID NO: 2139358
ucaacugacaaagauagca

SEQ ID NO: 2139360 - RNA, 19 nt, Artificial Sequence
  Description of Artificial Sequence: Synthetic oligonucleotide
  Sense strand starting at position 2603 of SEQ ID NO: 1882674
cuaucuuugucaguugacu

SEQ ID NO: 2139361 - RNA, 19 nt, Artificial Sequence
  Description of Artificial Sequence: Synthetic oligonucleotide
  Antisense strand to SEQ ID NO: 2139360
agucaacugacaaagauag

SEQ ID NO: 2139362 - RNA, 19 nt, Artificial Sequence
  Description of Artificial Sequence: Synthetic oligonucleotide
  Sense strand starting at position 3911 of SEQ ID NO: 1882674
cgcccagauaugugcgaga

SEQ ID NO: 2139363 - RNA, 19 nt, Artificial Sequence
  Description of Artificial Sequence: Synthetic oligonucleotide
  Antisense strand to SEQ ID NO: 2139362
ucucgcacauaucugggcg

SEQ ID NO: 2139364 - RNA, 19 nt, Artificial Sequence
  Description of Artificial Sequence: Synthetic oligonucleotide
  Sense strand starting at position 15 of SEQ ID NO: 1882675
gcaacaaggucauuaguga

SEQ ID NO: 2139365 - RNA, 19 nt, Artificial Sequence
  Description of Artificial Sequence: Synthetic oligonucleotide
  Antisense strand to SEQ ID NO: 2139364
ucacuaaugaccuuguugc

SEQ ID NO: 2139366 - RNA, 19 nt, Artificial Sequence
  Description of Artificial Sequence: Synthetic oligonucleotide
  Sense strand starting at position 655 of SEQ ID NO: 1882675
uuguuuaaauggguuccua

SEQ ID NO: 2139367 - RNA, 19 nt, Artificial Sequence
  Description of Artificial Sequence: Synthetic oligonucleotide
  Antisense strand to SEQ ID NO: 2139366
uaggaacccauuuaaacaa

SEQ ID NO: 2139368 - RNA, 19 nt, Artificial Sequence
  Description of Artificial Sequence: Synthetic oligonucleotide
  Sense strand starting at position 694 of SEQ ID NO: 1882675
uagaauauggauugagucu

SEQ ID NO: 2139369 - RNA, 19 nt, Artificial Sequence
  Description of Artificial Sequence: Synthetic oligonucleotide
  Antisense strand to SEQ ID NO: 2139368
agacucaauccauauucua

SEQ ID NO: 2139370 - RNA, 19 nt, Artificial Sequence
  Description of Artificial Sequence: Synthetic oligonucleotide
  Sense strand starting at position 755 of SEQ ID NO: 1882675
aaacuuucgcuguaugaau

SEQ ID NO: 2139371 - RNA, 19 nt, Artificial Sequence
  Description of Artificial Sequence: Synthetic oligonucleotide
  Antisense strand to SEQ ID NO: 2139370
auucauacagcgaaaguuu

SEQ ID NO: 2139372 - RNA, 19 nt, Artificial Sequence
  Description of Artificial Sequence: Synthetic oligonucleotide
  Sense strand starting at position 762 of SEQ ID NO: 1882675
cgcuguaugaaugaauauu

SEQ ID NO: 2139373 - RNA, 19 nt, Artificial Sequence
  Description of Artificial Sequence: Synthetic oligonucleotide
  Antisense strand to SEQ ID NO: 2139372
aauauucauucauacagcg

SEQ ID NO: 2139374 - RNA, 19 nt, Artificial Sequence
  Description of Artificial Sequence: Synthetic oligonucleotide
  Sense strand starting at position 933 of SEQ ID NO: 1882675
ugcaguguagcauaagacu

SEQ ID NO: 2139375 - RNA, 19 nt, Artificial Sequence
  Description of Artificial Sequence: Synthetic oligonucleotide
  Antisense strand to SEQ ID NO: 2139374
agucuuaugcuacacugca

SEQ ID NO: 2139376 - RNA, 19 nt, Artificial Sequence
  Description of Artificial Sequence: Synthetic oligonucleotide
  Sense strand starting at position 944 of SEQ ID NO: 1882675
auaagacuugcuuaccuga

SEQ ID NO: 2139377 - RNA, 19 nt, Artificial Sequence
  Description of Artificial Sequence: Synthetic oligonucleotide
  Antisense strand to SEQ ID NO: 2139376
ucagguaagcaagucuuau

SEQ ID NO: 2139378 - RNA, 19 nt, Artificial Sequence
  Description of Artificial Sequence: Synthetic oligonucleotide
  Sense strand starting at position 962 of SEQ ID NO: 1882675
agguguuaugaguaugaaa

SEQ ID NO: 2139379 - RNA, 19 nt, Artificial Sequence
  Description of Artificial Sequence: Synthetic oligonucleotide
  Antisense strand to SEQ ID NO: 2139378
uuucauacucauaacaccu

SEQ ID NO: 2139380 - RNA, 19 nt, Artificial Sequence
  Description of Artificial Sequence: Synthetic oligonucleotide
  Sense strand starting at position 964 of SEQ ID NO: 1882675
guguuaugaguaugaaaug

SEQ ID NO: 2139381 - RNA, 19 nt, Artificial Sequence
  Description of Artificial Sequence: Synthetic oligonucleotide
  Antisense strand to SEQ ID NO: 2139380
cauuucauacucauaacac

SEQ ID NO: 2139382 - RNA, 19 nt, Artificial Sequence
  Description of Artificial Sequence: Synthetic oligonucleotide
  Sense strand starting at position 974 of SEQ ID NO: 1882675
uaugaaaugcauugaguua

SEQ ID NO: 2139383 - RNA, 19 nt, Artificial Sequence
  Description of Artificial Sequence: Synthetic oligonucleotide
  Antisense strand to SEQ ID NO: 2139382
uaacucaaugcauuucaua

SEQ ID NO: 2139384 - RNA, 19 nt, Artificial Sequence
  Description of Artificial Sequence: Synthetic oligonucleotide
  Sense strand starting at position 1007 of SEQ ID NO: 1882675
cagcgauaagcacaggaua

SEQ ID NO: 2139385 - RNA, 19 nt, Artificial Sequence
  Description of Artificial Sequence: Synthetic oligonucleotide
  Antisense strand to SEQ ID NO: 2139384
uauccugugcuuaucgcug

SEQ ID NO: 2139386 - RNA, 19 nt, Artificial Sequence
  Description of Artificial Sequence: Synthetic oligonucleotide
  Sense strand starting at position 1086 of SEQ ID NO: 1882675
auugguuuccuggauacau

SEQ ID NO: 2139387 - RNA, 19 nt, Artificial Sequence
  Description of Artificial Sequence: Synthetic oligonucleotide
  Antisense strand to SEQ ID NO: 2139386
auguauccaggaaaccaau

SEQ ID NO: 2139388 - RNA, 19 nt, Artificial Sequence
  Description of Artificial Sequence: Synthetic oligonucleotide
  Sense strand starting at position 1088 of SEQ ID NO: 1882675
ugguuuccuggauacauac

SEQ ID NO: 2139389 - RNA, 19 nt, Artificial Sequence
  Description of Artificial Sequence: Synthetic oligonucleotide
  Antisense strand to SEQ ID NO: 2139388
guauguauccaggaaacca

SEQ ID NO: 2139390 - RNA, 19 nt, Artificial Sequence
  Description of Artificial Sequence: Synthetic oligonucleotide
  Sense strand starting at position 1147 of SEQ ID NO: 1882675
ugcgaagaagcuuaagacu

SEQ ID NO: 2139391 - RNA, 19 nt, Artificial Sequence
  Description of Artificial Sequence: Synthetic oligonucleotide
  Antisense strand to SEQ ID NO: 2139390
agucuuaagcuucuucgca

SEQ ID NO: 2139392 - RNA, 19 nt, Artificial Sequence
  Description of Artificial Sequence: Synthetic oligonucleotide
  Sense strand starting at position 1689 of SEQ ID NO: 1882675
uguucugagguuuaauacu

SEQ ID NO: 2139393 - RNA, 19 nt, Artificial Sequence
  Description of Artificial Sequence: Synthetic oligonucleotide
  Antisense strand to SEQ ID NO: 2139392
aguauuaaaccucagaaca

SEQ ID NO: 2139394 - RNA, 19 nt, Artificial Sequence
  Description of Artificial Sequence: Synthetic oligonucleotide
  Sense strand starting at position 2419 of SEQ ID NO: 1882675
uccagcuucccugaaguuu

SEQ ID NO: 2139395 - RNA, 19 nt, Artificial Sequence
  Description of Artificial Sequence: Synthetic oligonucleotide
  Antisense strand to SEQ ID NO: 2139394
aaacuucagggaagcugga

SEQ ID NO: 2139396 - RNA, 19 nt, Artificial Sequence
  Description of Artificial Sequence: Synthetic oligonucleotide
  Sense strand starting at position 2508 of SEQ ID NO: 1882675
agcguucgagcucuucaaa

SEQ ID NO: 2139397 - RNA, 19 nt, Artificial Sequence
  Description of Artificial Sequence: Synthetic oligonucleotide
  Antisense strand to SEQ ID NO: 2139396
uuugaagagcucgaacgcu

SEQ ID NO: 2139398 - RNA, 19 nt, Artificial Sequence
  Description of Artificial Sequence: Synthetic oligonucleotide
  Sense strand starting at position 2526 of SEQ ID NO: 1882675
aaguguaagcucuagaaca

SEQ ID NO: 2139399 - RNA, 19 nt, Artificial Sequence
  Description of Artificial Sequence: Synthetic oligonucleotide
  Antisense strand to SEQ ID NO: 2139398
uguucuagagcuuacacuu

SEQ ID NO: 2139400 - RNA, 19 nt, Artificial Sequence
  Description of Artificial Sequence: Synthetic oligonucleotide
  Sense strand starting at position 2528 of SEQ ID NO: 1882675
guguaagcucuagaacaga

SEQ ID NO: 2139401 - RNA, 19 nt, Artificial Sequence
  Description of Artificial Sequence: Synthetic oligonucleotide
  Antisense strand to SEQ ID NO: 2139400
ucuguucuagagcuuacac

SEQ ID NO: 2139402 - RNA, 19 nt, Artificial Sequence
  Description of Artificial Sequence: Synthetic oligonucleotide
  Sense strand starting at position 2546 of SEQ ID NO: 1882675
acggcagacgcauaaugaa

SEQ ID NO: 2139403 - RNA, 19 nt, Artificial Sequence
  Description of Artificial Sequence: Synthetic oligonucleotide
  Antisense strand to SEQ ID NO: 2139402
uucauuaugcgucugccgu

SEQ ID NO: 2139404 - RNA, 19 nt, Artificial Sequence
  Description of Artificial Sequence: Synthetic oligonucleotide
  Sense strand starting at position 2591 of SEQ ID NO: 1882675
ggaaacgcuuacuccuuua

SEQ ID NO: 2139405 - RNA, 19 nt, Artificial Sequence
  Description of Artificial Sequence: Synthetic oligonucleotide
  Antisense strand to SEQ ID NO: 2139404
uaaaggaguaagcguuucc

SEQ ID NO: 2139406 - RNA, 19 nt, Artificial Sequence
  Description of Artificial Sequence: Synthetic oligonucleotide
  Sense strand starting at position 2668 of SEQ ID NO: 1882675
gaggcaguuaucuacagug

SEQ ID NO: 2139407 - RNA, 19 nt, Artificial Sequence
  Description of Artificial Sequence: Synthetic oligonucleotide
  Antisense strand to SEQ ID NO: 2139406
cacuguagauaacugccuc

SEQ ID NO: 2139408 - RNA, 19 nt, Artificial Sequence
  Description of Artificial Sequence: Synthetic oligonucleotide
  Sense strand starting at position 2670 of SEQ ID NO: 1882675
ggcaguuaucuacagugac

SEQ ID NO: 2139409 - RNA, 19 nt, Artificial Sequence
  Description of Artificial Sequence: Synthetic oligonucleotide
  Antisense strand to SEQ ID NO: 2139408
gucacuguagauaacugcc

SEQ ID NO: 2139410 - RNA, 19 nt, Artificial Sequence
  Description of Artificial Sequence: Synthetic oligonucleotide
  Sense strand starting at position 2711 of SEQ ID NO: 1882675
uuuguucagguugggauua

SEQ ID NO: 2139411 - RNA, 19 nt, Artificial Sequence
  Description of Artificial Sequence: Synthetic oligonucleotide
  Antisense strand to SEQ ID NO: 2139410
uaaucccaaccugaacaaa

SEQ ID NO: 2139412 - RNA, 19 nt, Artificial Sequence
  Description of Artificial Sequence: Synthetic oligonucleotide
  Sense strand starting at position 3035 of SEQ ID NO: 1882675
ugugaauagcaguaucuug

SEQ ID NO: 2139413 - RNA, 19 nt, Artificial Sequence
  Description of Artificial Sequence: Synthetic oligonucleotide
  Antisense strand to SEQ ID NO: 2139412
caagauacugcuauucaca

SEQ ID NO: 2139414 - RNA, 19 nt, Artificial Sequence
  Description of Artificial Sequence: Synthetic oligonucleotide
  Sense strand starting at position 3427 of SEQ ID NO: 1882675
ucuuguagacuauaaaggu

SEQ ID NO: 2139415 - RNA, 19 nt, Artificial Sequence
  Description of Artificial Sequence: Synthetic oligonucleotide
  Antisense strand to SEQ ID NO: 2139414
accuuuauagucuacaaga

SEQ ID NO: 2139416 - RNA, 19 nt, Artificial Sequence
  Description of Artificial Sequence: Synthetic oligonucleotide
  Sense strand starting at position 3447 of SEQ ID NO: 1882675
ggugcuguaauauagugau

SEQ ID NO: 2139417 - RNA, 19 nt, Artificial Sequence
  Description of Artificial Sequence: Synthetic oligonucleotide
  Antisense strand to SEQ ID NO: 2139416
aucacuauauuacagcacc

SEQ ID NO: 2139418 - RNA, 19 nt, Artificial Sequence
  Description of Artificial Sequence: Synthetic oligonucleotide
  Sense strand starting at position 3460 of SEQ ID NO: 1882675
agugauguaagauagcagu

SEQ ID NO: 2139419 - RNA, 19 nt, Artificial Sequence
  Description of Artificial Sequence: Synthetic oligonucleotide
  Antisense strand to SEQ ID NO: 2139418
acugcuaucuuacaucacu

SEQ ID NO: 2139420 - RNA, 19 nt, Artificial Sequence
  Description of Artificial Sequence: Synthetic oligonucleotide
  Sense strand starting at position 3466 of SEQ ID NO: 1882675
guaagauagcaguaggauu

SEQ ID NO: 2139421 - RNA, 19 nt, Artificial Sequence
  Description of Artificial Sequence: Synthetic oligonucleotide
  Antisense strand to SEQ ID NO: 2139420
aauccuacugcuaucuuac

SEQ ID NO: 2139422 - RNA, 19 nt, Artificial Sequence
  Description of Artificial Sequence: Synthetic oligonucleotide
  Sense strand starting at position 3485 of SEQ ID NO: 1882675
gcauauaaaguagagcauu

SEQ ID NO: 2139423 - RNA, 19 nt, Artificial Sequence
  Description of Artificial Sequence: Synthetic oligonucleotide
  Antisense strand to SEQ ID NO: 2139422
aaugcucuacuuuauaugc

SEQ ID NO: 2139424 - RNA, 19 nt, Artificial Sequence
  Description of Artificial Sequence: Synthetic oligonucleotide
  Sense strand starting at position 3530 of SEQ ID NO: 1882675
guuggaaacugguuaggaa

SEQ ID NO: 2139425 - RNA, 19 nt, Artificial Sequence
  Description of Artificial Sequence: Synthetic oligonucleotide
  Antisense strand to SEQ ID NO: 2139424
uuccuaaccaguuuccaac

SEQ ID NO: 2139426 - RNA, 19 nt, Artificial Sequence
  Description of Artificial Sequence: Synthetic oligonucleotide
  Sense strand starting at position 3538 of SEQ ID NO: 1882675
cugguuaggaaaugucaga

SEQ ID NO: 2139427 - RNA, 19 nt, Artificial Sequence
  Description of Artificial Sequence: Synthetic oligonucleotide
  Antisense strand to SEQ ID NO: 2139426
ucugacauuuccuaaccag

SEQ ID NO: 2139428 - RNA, 19 nt, Artificial Sequence
  Description of Artificial Sequence: Synthetic oligonucleotide
  Sense strand starting at position 3558 of SEQ ID NO: 1882675
aaggcuuucuagguggaga

SEQ ID NO: 2139429 - RNA, 19 nt, Artificial Sequence
  Description of Artificial Sequence: Synthetic oligonucleotide
  Antisense strand to SEQ ID NO: 2139428
ucuccaccuagaaagccuu

SEQ ID NO: 2139430 - RNA, 19 nt, Artificial Sequence
  Description of Artificial Sequence: Synthetic oligonucleotide
  Sense strand starting at position 3651 of SEQ ID NO: 1882675
caggaauuguaaucaguuc

SEQ ID NO: 2139431 - RNA, 19 nt, Artificial Sequence
  Description of Artificial Sequence: Synthetic oligonucleotide
  Antisense strand to SEQ ID NO: 2139430
gaacugauuacaauuccug

SEQ ID NO: 2139432 - RNA, 19 nt, Artificial Sequence
  Description of Artificial Sequence: Synthetic oligonucleotide
  Sense strand starting at position 3663 of SEQ ID NO: 1882675
ucaguucuuggacgguaaa

SEQ ID NO: 2139433 - RNA, 19 nt, Artificial Sequence
  Description of Artificial Sequence: Synthetic oligonucleotide
  Antisense strand to SEQ ID NO: 2139432
uuuaccguccaagaacuga

SEQ ID NO: 2139434 - RNA, 19 nt, Artificial Sequence
  Description of Artificial Sequence: Synthetic oligonucleotide
  Sense strand starting at position 3664 of SEQ ID NO: 1882675
caguucuuggacgguaaau

SEQ ID NO: 2139435 - RNA, 19 nt, Artificial Sequence
  Description of Artificial Sequence: Synthetic oligonucleotide
  Antisense strand to SEQ ID NO: 2139434
auuuaccguccaagaacug

SEQ ID NO: 2139436 - RNA, 19 nt, Artificial Sequence
  Description of Artificial Sequence: Synthetic oligonucleotide
  Sense strand starting at position 3666 of SEQ ID NO: 1882675
guucuuggacgguaaauac

SEQ ID NO: 2139437 - RNA, 19 nt, Artificial Sequence
  Description of Artificial Sequence: Synthetic oligonucleotide
  Antisense strand to SEQ ID NO: 2139436
guauuuaccguccaagaac

SEQ ID NO: 2139438 - RNA, 19 nt, Artificial Sequence
  Description of Artificial Sequence: Synthetic oligonucleotide
  Sense strand starting at position 3724 of SEQ ID NO: 1882675
ugccauucuccacagugau

SEQ ID NO: 2139439 - RNA, 19 nt, Artificial Sequence
  Description of Artificial Sequence: Synthetic oligonucleotide
  Antisense strand to SEQ ID NO: 2139438
aucacuguggagaauggca

SEQ ID NO: 2139440 - RNA, 19 nt, Artificial Sequence
  Description of Artificial Sequence: Synthetic oligonucleotide
  Sense strand starting at position 3731 of SEQ ID NO: 1882675
cuccacagugauuguuuaa

SEQ ID NO: 2139441 - RNA, 19 nt, Artificial Sequence
  Description of Artificial Sequence: Synthetic oligonucleotide
  Antisense strand to SEQ ID NO: 2139440
uuaaacaaucacuguggag

SEQ ID NO: 2139442 - RNA, 19 nt, Artificial Sequence
  Description of Artificial Sequence: Synthetic oligonucleotide
  Sense strand starting at position 3824 of SEQ ID NO: 1882675
ggauccaucagaugugaac

SEQ ID NO: 2139443 - RNA, 19 nt, Artificial Sequence
  Description of Artificial Sequence: Synthetic oligonucleotide
  Antisense strand to SEQ ID NO: 2139442
guucacaucugauggaucc

SEQ ID NO: 2139444 - RNA, 19 nt, Artificial Sequence
  Description of Artificial Sequence: Synthetic oligonucleotide
  Sense strand starting at position 5 of SEQ ID NO: 1882676
cuauaaggauuauagauac

SEQ ID NO: 2139445 - RNA, 19 nt, Artificial Sequence
  Description of Artificial Sequence: Synthetic oligonucleotide
  Antisense strand to SEQ ID NO: 2139444
guaucuauaauccuuauag

SEQ ID NO: 2139446 - RNA, 19 nt, Artificial Sequence
  Description of Artificial Sequence: Synthetic oligonucleotide
  Sense strand starting at position 45 of SEQ ID NO: 1882676
ucugaauacugaggauauc

SEQ ID NO: 2139447 - RNA, 19 nt, Artificial Sequence
  Description of Artificial Sequence: Synthetic oligonucleotide
  Antisense strand to SEQ ID NO: 2139446
gauauccucaguauucaga

SEQ ID NO: 2139448 - RNA, 19 nt, Artificial Sequence
  Description of Artificial Sequence: Synthetic oligonucleotide
  Sense strand starting at position 75 of SEQ ID NO: 1882676
cuaaauuuaucuggaagau

SEQ ID NO: 2139449 - RNA, 19 nt, Artificial Sequence
  Description of Artificial Sequence: Synthetic oligonucleotide
  Antisense strand to SEQ ID NO: 2139448
aucuuccagauaaauuuag

SEQ ID NO: 2139450 - RNA, 19 nt, Artificial Sequence
  Description of Artificial Sequence: Synthetic oligonucleotide
  Sense strand starting at position 85 of SEQ ID NO: 1882676
cuggaagaugggugugagu

SEQ ID NO: 2139451 - RNA, 19 nt, Artificial Sequence
  Description of Artificial Sequence: Synthetic oligonucleotide
  Antisense strand to SEQ ID NO: 2139450
acucacacccaucuuccag

SEQ ID NO: 2139452 - RNA, 19 nt, Artificial Sequence
  Description of Artificial Sequence: Synthetic oligonucleotide
  Sense strand starting at position 165 of SEQ ID NO: 1882676
gcuaguaucuaaccuagag

SEQ ID NO: 2139453 - RNA, 19 nt, Artificial Sequence
  Description of Artificial Sequence: Synthetic oligonucleotide
  Antisense strand to SEQ ID NO: 2139452
cucuagguuagauacuagc

SEQ ID NO: 2139454 - RNA, 19 nt, Artificial Sequence
  Description of Artificial Sequence: Synthetic oligonucleotide
  Sense strand starting at position 203 of SEQ ID NO: 1882676
gcaauauaggccuguuauu

SEQ ID NO: 2139455 - RNA, 19 nt, Artificial Sequence
  Description of Artificial Sequence: Synthetic oligonucleotide
  Antisense strand to SEQ ID NO: 2139454
aauaacaggccuauauugc

SEQ ID NO: 2139456 - RNA, 19 nt, Artificial Sequence
  Description of Artificial Sequence: Synthetic oligonucleotide
  Sense strand starting at position 212 of SEQ ID NO: 1882676
gccuguuauuuagaaaucu

SEQ ID NO: 2139457 - RNA, 19 nt, Artificial Sequence
  Description of Artificial Sequence: Synthetic oligonucleotide
  Antisense strand to SEQ ID NO: 2139456
agauuucuaaauaacaggc

SEQ ID NO: 2139458 - RNA, 19 nt, Artificial Sequence
  Description of Artificial Sequence: Synthetic oligonucleotide
  Sense strand starting at position 265 of SEQ ID NO: 1882676
ugaaauuauucugugcaga

SEQ ID NO: 2139459 - RNA, 19 nt, Artificial Sequence
  Description of Artificial Sequence: Synthetic oligonucleotide
  Antisense strand to SEQ ID NO: 2139458
ucugcacagaauaauuuca

SEQ ID NO: 2139460 - RNA, 19 nt, Artificial Sequence
  Description of Artificial Sequence: Synthetic oligonucleotide
  Sense strand starting at position 266 of SEQ ID NO: 1882676
gaaauuauucugugcagaa

SEQ ID NO: 2139461 - RNA, 19 nt, Artificial Sequence
  Description of Artificial Sequence: Synthetic oligonucleotide
  Antisense strand to SEQ ID NO: 2139460
uucugcacagaauaauuuc

SEQ ID NO: 2139462 - RNA, 19 nt, Artificial Sequence
  Description of Artificial Sequence: Synthetic oligonucleotide
  Sense strand starting at position 267 of SEQ ID NO: 1882676
aaauuauucugugcagaag

SEQ ID NO: 2139463 - RNA, 19 nt, Artificial Sequence
  Description of Artificial Sequence: Synthetic oligonucleotide
  Antisense strand to SEQ ID NO: 2139462
cuucugcacagaauaauuu

SEQ ID NO: 2139464 - RNA, 19 nt, Artificial Sequence
  Description of Artificial Sequence: Synthetic oligonucleotide
  Sense strand starting at position 311 of SEQ ID NO: 1882676
uauuauaagcuuuggagua

SEQ ID NO: 2139465 - RNA, 19 nt, Artificial Sequence
  Description of Artificial Sequence: Synthetic oligonucleotide
  Antisense strand to SEQ ID NO: 2139464
uacuccaaagcuuauaaua

SEQ ID NO: 2139466 - RNA, 19 nt, Artificial Sequence
  Description of Artificial Sequence: Synthetic oligonucleotide
  Sense strand starting at position 423 of SEQ ID NO: 1882676
auauaucccuuguuaugau

SEQ ID NO: 2139467 - RNA, 19 nt, Artificial Sequence
  Description of Artificial Sequence: Synthetic oligonucleotide
  Antisense strand to SEQ ID NO: 2139466
aucauaacaagggauauau

SEQ ID NO: 2139468 - RNA, 19 nt, Artificial Sequence
  Description of Artificial Sequence: Synthetic oligonucleotide
  Sense strand starting at position 515 of SEQ ID NO: 1882676
guagcaaucuccgcucaau

SEQ ID NO: 2139469 - RNA, 19 nt, Artificial Sequence
  Description of Artificial Sequence: Synthetic oligonucleotide
  Antisense strand to SEQ ID NO: 2139468
auugagcggagauugcuac

SEQ ID NO: 2139470 - RNA, 19 nt, Artificial Sequence
  Description of Artificial Sequence: Synthetic oligonucleotide
  Sense strand starting at position 716 of SEQ ID NO: 1882676
cccagagcguugguauuau

SEQ ID NO: 2139471 - RNA, 19 nt, Artificial Sequence
  Description of Artificial Sequence: Synthetic oligonucleotide
  Antisense strand to SEQ ID NO: 2139470
auaauaccaacgcucuggg

SEQ ID NO: 2139472 - RNA, 19 nt, Artificial Sequence
  Description of Artificial Sequence: Synthetic oligonucleotide
  Sense strand starting at position 1077 of SEQ ID NO: 1882676
cucugucuccuauacauga

SEQ ID NO: 2139473 - RNA, 19 nt, Artificial Sequence
  Description of Artificial Sequence: Synthetic oligonucleotide
  Antisense strand to SEQ ID NO: 2139472
ucauguauaggagacagag

SEQ ID NO: 2139474 - RNA, 19 nt, Artificial Sequence
  Description of Artificial Sequence: Synthetic oligonucleotide
  Sense strand starting at position 1092 of SEQ ID NO: 1882676
augauauugguuggguguu

SEQ ID NO: 2139475 - RNA, 19 nt, Artificial Sequence
  Description of Artificial Sequence: Synthetic oligonucleotide
  Antisense strand to SEQ ID NO: 2139474
aacacccaaccaauaucau

SEQ ID NO: 2139476 - RNA, 19 nt, Artificial Sequence
  Description of Artificial Sequence: Synthetic oligonucleotide
  Sense strand starting at position 1121 of SEQ ID NO: 1882676
auuggaauguuugguauuu

SEQ ID NO: 2139477 - RNA, 19 nt, Artificial Sequence
  Description of Artificial Sequence: Synthetic oligonucleotide
  Antisense strand to SEQ ID NO: 2139476
aaauaccaaacauuccaau

SEQ ID NO: 2139478 - RNA, 19 nt, Artificial Sequence
  Description of Artificial Sequence: Synthetic oligonucleotide
  Sense strand starting at position 1192 of SEQ ID NO: 1882676
uauggaggucggcaaauua

SEQ ID NO: 2139479 - RNA, 19 nt, Artificial Sequence
  Description of Artificial Sequence: Synthetic oligonucleotide
  Antisense strand to SEQ ID NO: 2139478
uaauuugccgaccuccaua

SEQ ID NO: 2139480 - RNA, 19 nt, Artificial Sequence
  Description of Artificial Sequence: Synthetic oligonucleotide
  Sense strand starting at position 1373 of SEQ ID NO: 1882676
cccuaucaauuguuuaguu

SEQ ID NO: 2139481 - RNA, 19 nt, Artificial Sequence
  Description of Artificial Sequence: Synthetic oligonucleotide
  Antisense strand to SEQ ID NO: 2139480
aacuaaacaauugauaggg

SEQ ID NO: 2139482 - RNA, 19 nt, Artificial Sequence
  Description of Artificial Sequence: Synthetic oligonucleotide
  Sense strand starting at position 1381 of SEQ ID NO: 1882676
auuguuuaguugccagauu

SEQ ID NO: 2139483 - RNA, 19 nt, Artificial Sequence
  Description of Artificial Sequence: Synthetic oligonucleotide
  Antisense strand to SEQ ID NO: 2139482
aaucuggcaacuaaacaau

SEQ ID NO: 2139484 - RNA, 19 nt, Artificial Sequence
  Description of Artificial Sequence: Synthetic oligonucleotide
  Sense strand starting at position 1740 of SEQ ID NO: 1882676
guggaaagcgaauguguaa

SEQ ID NO: 2139485 - RNA, 19 nt, Artificial Sequence
  Description of Artificial Sequence: Synthetic oligonucleotide
  Antisense strand to SEQ ID NO: 2139484
uuacacauucgcuuuccac

SEQ ID NO: 2139486 - RNA, 19 nt, Artificial Sequence
  Description of Artificial Sequence: Synthetic oligonucleotide
  Sense strand starting at position 2203 of SEQ ID NO: 1882676
ucgguacuuguugauccaa

SEQ ID NO: 2139487 - RNA, 19 nt, Artificial Sequence
  Description of Artificial Sequence: Synthetic oligonucleotide
  Antisense strand to SEQ ID NO: 2139486
uuggaucaacaaguaccga

SEQ ID NO: 2139488 - RNA, 19 nt, Artificial Sequence
  Description of Artificial Sequence: Synthetic oligonucleotide
  Sense strand starting at position 2205 of SEQ ID NO: 1882676
gguacuuguugauccaaug

SEQ ID NO: 2139489 - RNA, 19 nt, Artificial Sequence
  Description of Artificial Sequence: Synthetic oligonucleotide
  Antisense strand to SEQ ID NO: 2139488
cauuggaucaacaaguacc

SEQ ID NO: 2139490 - RNA, 19 nt, Artificial Sequence
  Description of Artificial Sequence: Synthetic oligonucleotide
  Sense strand starting at position 2233 of SEQ ID NO: 1882676
gcuugaagugcuggcauca

SEQ ID NO: 2139491 - RNA, 19 nt, Artificial Sequence
  Description of Artificial Sequence: Synthetic oligonucleotide
  Antisense strand to SEQ ID NO: 2139490
ugaugccagcacuucaagc

SEQ ID NO: 2139492 - RNA, 19 nt, Artificial Sequence
  Description of Artificial Sequence: Synthetic oligonucleotide
  Sense strand starting at position 2465 of SEQ ID NO: 1882676
ccuuuaaaggcguauugag

SEQ ID NO: 2139493 - RNA, 19 nt, Artificial Sequence
  Description of Artificial Sequence: Synthetic oligonucleotide
  Antisense strand to SEQ ID NO: 2139492
cucaauacgccuuuaaagg

SEQ ID NO: 2139494 - RNA, 19 nt, Artificial Sequence
  Description of Artificial Sequence: Synthetic oligonucleotide
  Sense strand starting at position 2801 of SEQ ID NO: 1882676
uuugccaucuugugauuua

SEQ ID NO: 2139495 - RNA, 19 nt, Artificial Sequence
  Description of Artificial Sequence: Synthetic oligonucleotide
  Antisense strand to SEQ ID NO: 2139494
uaaaucacaagauggcaaa

SEQ ID NO: 2139496 - RNA, 19 nt, Artificial Sequence
  Description of Artificial Sequence: Synthetic oligonucleotide
  Sense strand starting at position 2802 of SEQ ID NO: 1882676
uugccaucuugugauuuag

SEQ ID NO: 2139497 - RNA, 19 nt, Artificial Sequence
  Description of Artificial Sequence: Synthetic oligonucleotide
  Antisense strand to SEQ ID NO: 2139496
cuaaaucacaagauggcaa

SEQ ID NO: 2139498 - RNA, 19 nt, Artificial Sequence
  Description of Artificial Sequence: Synthetic oligonucleotide
  Sense strand starting at position 2829 of SEQ ID NO: 1882676
gggcaucugcguugguaau

SEQ ID NO: 2139499 - RNA, 19 nt, Artificial Sequence
  Description of Artificial Sequence: Synthetic oligonucleotide
  Antisense strand to SEQ ID NO: 2139498
auuaccaacgcagaugccc

SEQ ID NO: 2139500 - RNA, 19 nt, Artificial Sequence
  Description of Artificial Sequence: Synthetic oligonucleotide
  Sense strand starting at position 2830 of SEQ ID NO: 1882676
ggcaucugcguugguaauu

SEQ ID NO: 2139501 - RNA, 19 nt, Artificial Sequence
  Description of Artificial Sequence: Synthetic oligonucleotide
  Antisense strand to SEQ ID NO: 2139500
aauuaccaacgcagaugcc

SEQ ID NO: 2139502 - RNA, 19 nt, Artificial Sequence
  Description of Artificial Sequence: Synthetic oligonucleotide
  Sense strand starting at position 2835 of SEQ ID NO: 1882676
cugcguugguaauugaagu

SEQ ID NO: 2139503 - RNA, 19 nt, Artificial Sequence
  Description of Artificial Sequence: Synthetic oligonucleotide
  Antisense strand to SEQ ID NO: 2139502
acuucaauuaccaacgcag

SEQ ID NO: 2139504 - RNA, 19 nt, Artificial Sequence
  Description of Artificial Sequence: Synthetic oligonucleotide
  Sense strand starting at position 2836 of SEQ ID NO: 1882676
ugcguugguaauugaaguu

SEQ ID NO: 2139505 - RNA, 19 nt, Artificial Sequence
  Description of Artificial Sequence: Synthetic oligonucleotide
  Antisense strand to SEQ ID NO: 2139504
aacuucaauuaccaacgca

SEQ ID NO: 2139506 - RNA, 19 nt, Artificial Sequence
  Description of Artificial Sequence: Synthetic oligonucleotide
  Sense strand starting at position 3070 of SEQ ID NO: 1882676
gcuggaauacuguggucga

SEQ ID NO: 2139507 - RNA, 19 nt, Artificial Sequence
  Description of Artificial Sequence: Synthetic oligonucleotide
  Antisense strand to SEQ ID NO: 2139506
ucgaccacaguauuccagc

SEQ ID NO: 2139508 - RNA, 19 nt, Artificial Sequence
  Description of Artificial Sequence: Synthetic oligonucleotide
  Sense strand starting at position 3073 of SEQ ID NO: 1882676
ggaauacuguggucgacac

SEQ ID NO: 2139509 - RNA, 19 nt, Artificial Sequence
  Description of Artificial Sequence: Synthetic oligonucleotide
  Antisense strand to SEQ ID NO: 2139508
gugucgaccacaguauucc

SEQ ID NO: 2139510 - RNA, 19 nt, Artificial Sequence
  Description of Artificial Sequence: Synthetic oligonucleotide
  Sense strand starting at position 3120 of SEQ ID NO: 1882676
ggaaccuuugccugcggua

SEQ ID NO: 2139511 - RNA, 19 nt, Artificial Sequence
  Description of Artificial Sequence: Synthetic oligonucleotide
  Antisense strand to SEQ ID NO: 2139510
uaccgcaggcaaagguucc

SEQ ID NO: 2139512 - RNA, 19 nt, Artificial Sequence
  Description of Artificial Sequence: Synthetic oligonucleotide
  Sense strand starting at position 3260 of SEQ ID NO: 1882676
cgucuauaaugguuacgau

SEQ ID NO: 2139513 - RNA, 19 nt, Artificial Sequence
  Description of Artificial Sequence: Synthetic oligonucleotide
  Antisense strand to SEQ ID NO: 2139512
aucguaaccauuauagacg

SEQ ID NO: 2139514 - RNA, 19 nt, Artificial Sequence
  Description of Artificial Sequence: Synthetic oligonucleotide
  Sense strand starting at position 3261 of SEQ ID NO: 1882676
gucuauaaugguuacgauc

SEQ ID NO: 2139515 - RNA, 19 nt, Artificial Sequence
  Description of Artificial Sequence: Synthetic oligonucleotide
  Antisense strand to SEQ ID NO: 2139514
gaucguaaccauuauagac

SEQ ID NO: 2139516 - RNA, 19 nt, Artificial Sequence
  Description of Artificial Sequence: Synthetic oligonucleotide
  Sense strand starting at position 3273 of SEQ ID NO: 1882676
uacgaucugcugcauauuu

SEQ ID NO: 2139517 - RNA, 19 nt, Artificial Sequence
  Description of Artificial Sequence: Synthetic oligonucleotide
  Antisense strand to SEQ ID NO: 2139516
aaauaugcagcagaucgua

SEQ ID NO: 2139518 - RNA, 19 nt, Artificial Sequence
  Description of Artificial Sequence: Synthetic oligonucleotide
  Sense strand starting at position 3311 of SEQ ID NO: 1882676
ccaccaggaucuguaacau

SEQ ID NO: 2139519 - RNA, 19 nt, Artificial Sequence
  Description of Artificial Sequence: Synthetic oligonucleotide
  Antisense strand to SEQ ID NO: 2139518
auguuacagauccuggugg

SEQ ID NO: 2139520 - RNA, 19 nt, Artificial Sequence
  Description of Artificial Sequence: Synthetic oligonucleotide
  Sense strand starting at position 3779 of SEQ ID NO: 1882676
gugguaugacgguaacuag

SEQ ID NO: 2139521 - RNA, 19 nt, Artificial Sequence
  Description of Artificial Sequence: Synthetic oligonucleotide
  Antisense strand to SEQ ID NO: 2139520
cuaguuaccgucauaccac

SEQ ID NO: 2139522 - RNA, 19 nt, Artificial Sequence
  Description of Artificial Sequence: Synthetic oligonucleotide
  Sense strand starting at position 3887 of SEQ ID NO: 1882676
gagaguucuaaguggcauc

SEQ ID NO: 2139523 - RNA, 19 nt, Artificial Sequence
  Description of Artificial Sequence: Synthetic oligonucleotide
  Antisense strand to SEQ ID NO: 2139522
gaugccacuuagaacucuc

SEQ ID NO: 2139524 - RNA, 19 nt, Artificial Sequence
  Description of Artificial Sequence: Synthetic oligonucleotide
  Sense strand starting at position 16 of SEQ ID NO: 1882677
ccgugaguccugcagacca

SEQ ID NO: 2139525 - RNA, 19 nt, Artificial Sequence
  Description of Artificial Sequence: Synthetic oligonucleotide
  Antisense strand to SEQ ID NO: 2139524
uggucugcaggacucacgg

SEQ ID NO: 2139526 - RNA, 19 nt, Artificial Sequence
  Description of Artificial Sequence: Synthetic oligonucleotide
  Sense strand starting at position 18 of SEQ ID NO: 1882677
gugaguccugcagaccaaa

SEQ ID NO: 2139527 - RNA, 19 nt, Artificial Sequence
  Description of Artificial Sequence: Synthetic oligonucleotide
  Antisense strand to SEQ ID NO: 2139526
uuuggucugcaggacucac

SEQ ID NO: 2139528 - RNA, 19 nt, Artificial Sequence
  Description of Artificial Sequence: Synthetic oligonucleotide
  Sense strand starting at position 68 of SEQ ID NO: 1882677
gccucugugggugagaguu

SEQ ID NO: 2139529 - RNA, 19 nt, Artificial Sequence
  Description of Artificial Sequence: Synthetic oligonucleotide
  Antisense strand to SEQ ID NO: 2139528
aacucucacccacagaggc

SEQ ID NO: 2139530 - RNA, 19 nt, Artificial Sequence
  Description of Artificial Sequence: Synthetic oligonucleotide
  Sense strand starting at position 126 of SEQ ID NO: 1882677
gugacucugacugggagau

SEQ ID NO: 2139531 - RNA, 19 nt, Artificial Sequence
  Description of Artificial Sequence: Synthetic oligonucleotide
  Antisense strand to SEQ ID NO: 2139530
aucucccagucagagucac

SEQ ID NO: 2139532 - RNA, 19 nt, Artificial Sequence
  Description of Artificial Sequence: Synthetic oligonucleotide
  Sense strand starting at position 236 of SEQ ID NO: 1882677
gcaagaugguggccaaauu

SEQ ID NO: 2139533 - RNA, 19 nt, Artificial Sequence
  Description of Artificial Sequence: Synthetic oligonucleotide
  Antisense strand to SEQ ID NO: 2139532
aauuuggccaccaucuugc

SEQ ID NO: 2139534 - RNA, 19 nt, Artificial Sequence
  Description of Artificial Sequence: Synthetic oligonucleotide
  Sense strand starting at position 348 of SEQ ID NO: 1882677
gggugcuaucucuacauaa

SEQ ID NO: 2139535 - RNA, 19 nt, Artificial Sequence
  Description of Artificial Sequence: Synthetic oligonucleotide
  Antisense strand to SEQ ID NO: 2139534
uuauguagagauagcaccc

SEQ ID NO: 2139536 - RNA, 19 nt, Artificial Sequence
  Description of Artificial Sequence: Synthetic oligonucleotide
  Sense strand starting at position 430 of SEQ ID NO: 1882677
gucacuugccaagaucuca

SEQ ID NO: 2139537 - RNA, 19 nt, Artificial Sequence
  Description of Artificial Sequence: Synthetic oligonucleotide
  Antisense strand to SEQ ID NO: 2139536
ugagaucuuggcaagugac

SEQ ID NO: 2139538 - RNA, 19 nt, Artificial Sequence
  Description of Artificial Sequence: Synthetic oligonucleotide
  Sense strand starting at position 581 of SEQ ID NO: 1882677
accacuucugucuaggaau

SEQ ID NO: 2139539 - RNA, 19 nt, Artificial Sequence
  Description of Artificial Sequence: Synthetic oligonucleotide
  Antisense strand to SEQ ID NO: 2139538
auuccuagacagaaguggu

SEQ ID NO: 2139540 - RNA, 19 nt, Artificial Sequence
  Description of Artificial Sequence: Synthetic oligonucleotide
  Sense strand starting at position 583 of SEQ ID NO: 1882677
cacuucugucuaggaauag

SEQ ID NO: 2139541 - RNA, 19 nt, Artificial Sequence
  Description of Artificial Sequence: Synthetic oligonucleotide
  Antisense strand to SEQ ID NO: 2139540
cuauuccuagacagaagug

SEQ ID NO: 2139542 - RNA, 19 nt, Artificial Sequence
  Description of Artificial Sequence: Synthetic oligonucleotide
  Sense strand starting at position 715 of SEQ ID NO: 1882677
ggccacagaugcucugaga

SEQ ID NO: 2139543 - RNA, 19 nt, Artificial Sequence
  Description of Artificial Sequence: Synthetic oligonucleotide
  Antisense strand to SEQ ID NO: 2139542
ucucagagcaucuguggcc

SEQ ID NO: 2139544 - RNA, 19 nt, Artificial Sequence
  Description of Artificial Sequence: Synthetic oligonucleotide
  Sense strand starting at position 768 of SEQ ID NO: 1882677
uggugaccacucugcuuaa

SEQ ID NO: 2139545 - RNA, 19 nt, Artificial Sequence
  Description of Artificial Sequence: Synthetic oligonucleotide
  Antisense strand to SEQ ID NO: 2139544
uuaagcagaguggucacca

SEQ ID NO: 2139546 - RNA, 19 nt, Artificial Sequence
  Description of Artificial Sequence: Synthetic oligonucleotide
  Sense strand starting at position 769 of SEQ ID NO: 1882677
ggugaccacucugcuuaaa

SEQ ID NO: 2139547 - RNA, 19 nt, Artificial Sequence
  Description of Artificial Sequence: Synthetic oligonucleotide
  Antisense strand to SEQ ID NO: 2139546
uuuaagcagaguggucacc

SEQ ID NO: 2139548 - RNA, 19 nt, Artificial Sequence
  Description of Artificial Sequence: Synthetic oligonucleotide
  Sense strand starting at position 792 of SEQ ID NO: 1882677
ucaucagauccguaguuuc

SEQ ID NO: 2139549 - RNA, 19 nt, Artificial Sequence
  Description of Artificial Sequence: Synthetic oligonucleotide
  Antisense strand to SEQ ID NO: 2139548
gaaacuacggaucugauga

SEQ ID NO: 2139550 - RNA, 19 nt, Artificial Sequence
  Description of Artificial Sequence: Synthetic oligonucleotide
  Sense strand starting at position 1109 of SEQ ID NO: 1882677
cugguagagguggguuauu

SEQ ID NO: 2139551 - RNA, 19 nt, Artificial Sequence
  Description of Artificial Sequence: Synthetic oligonucleotide
  Antisense strand to SEQ ID NO: 2139550
aauaacccaccucuaccag

SEQ ID NO: 2139552 - RNA, 19 nt, Artificial Sequence
  Description of Artificial Sequence: Synthetic oligonucleotide
  Sense strand starting at position 1277 of SEQ ID NO: 1882677
cuaagucacugcuccauga

SEQ ID NO: 2139553 - RNA, 19 nt, Artificial Sequence
  Description of Artificial Sequence: Synthetic oligonucleotide
  Antisense strand to SEQ ID NO: 2139552
ucauggagcagugacuuag

SEQ ID NO: 2139554 - RNA, 19 nt, Artificial Sequence
  Description of Artificial Sequence: Synthetic oligonucleotide
  Sense strand starting at position 1642 of SEQ ID NO: 1882677
ggaacugaguuuccugaga

SEQ ID NO: 2139555 - RNA, 19 nt, Artificial Sequence
  Description of Artificial Sequence: Synthetic oligonucleotide
  Antisense strand to SEQ ID NO: 2139554
ucucaggaaacucaguucc

SEQ ID NO: 2139556 - RNA, 19 nt, Artificial Sequence
  Description of Artificial Sequence: Synthetic oligonucleotide
  Sense strand starting at position 1680 of SEQ ID NO: 1882677
ugauauuucuuccugcgac

SEQ ID NO: 2139557 - RNA, 19 nt, Artificial Sequence
  Description of Artificial Sequence: Synthetic oligonucleotide
  Antisense strand to SEQ ID NO: 2139556
gucgcaggaagaaauauca

SEQ ID NO: 2139558 - RNA, 19 nt, Artificial Sequence
  Description of Artificial Sequence: Synthetic oligonucleotide
  Sense strand starting at position 1725 of SEQ ID NO: 1882677
ggccguaucgcagcucuua

SEQ ID NO: 2139559 - RNA, 19 nt, Artificial Sequence
  Description of Artificial Sequence: Synthetic oligonucleotide
  Antisense strand to SEQ ID NO: 2139558
uaagagcugcgauacggcc

SEQ ID NO: 2139560 - RNA, 19 nt, Artificial Sequence
  Description of Artificial Sequence: Synthetic oligonucleotide
  Sense strand starting at position 1726 of SEQ ID NO: 1882677
gccguaucgcagcucuuau

SEQ ID NO: 2139561 - RNA, 19 nt, Artificial Sequence
  Description of Artificial Sequence: Synthetic oligonucleotide
  Antisense strand to SEQ ID NO: 2139560
auaagagcugcgauacggc

SEQ ID NO: 2139562 - RNA, 19 nt, Artificial Sequence
  Description of Artificial Sequence: Synthetic oligonucleotide
  Sense strand starting at position 1829 of SEQ ID NO: 1882677
ucaagucuccucuaaguuc

SEQ ID NO: 2139563 - RNA, 19 nt, Artificial Sequence
  Description of Artificial Sequence: Synthetic oligonucleotide
  Antisense strand to SEQ ID NO: 2139562
gaacuuagaggagacuuga

SEQ ID NO: 2139564 - RNA, 19 nt, Artificial Sequence
  Description of Artificial Sequence: Synthetic oligonucleotide
  Sense strand starting at position 1853 of SEQ ID NO: 1882677
ggauucucuccuuguccca

SEQ ID NO: 2139565 - RNA, 19 nt, Artificial Sequence
  Description of Artificial Sequence: Synthetic oligonucleotide
  Antisense strand to SEQ ID NO: 2139564
ugggacaaggagagaaucc

SEQ ID NO: 2139566 - RNA, 19 nt, Artificial Sequence
  Description of Artificial Sequence: Synthetic oligonucleotide
  Sense strand starting at position 1965 of SEQ ID NO: 1882677
cgguguucugaggaaacag

SEQ ID NO: 2139567 - RNA, 19 nt, Artificial Sequence
  Description of Artificial Sequence: Synthetic oligonucleotide
  Antisense strand to SEQ ID NO: 2139566
cuguuuccucagaacaccg

SEQ ID NO: 2139568 - RNA, 19 nt, Artificial Sequence
  Description of Artificial Sequence: Synthetic oligonucleotide
  Sense strand starting at position 2053 of SEQ ID NO: 1882677
gucagcuggauuuguuaga

SEQ ID NO: 2139569 - RNA, 19 nt, Artificial Sequence
  Description of Artificial Sequence: Synthetic oligonucleotide
  Antisense strand to SEQ ID NO: 2139568
ucuaacaaauccagcugac

SEQ ID NO: 2139570 - RNA, 19 nt, Artificial Sequence
  Description of Artificial Sequence: Synthetic oligonucleotide
  Sense strand starting at position 2058 of SEQ ID NO: 1882677
cuggauuuguuagauugac

SEQ ID NO: 2139571 - RNA, 19 nt, Artificial Sequence
  Description of Artificial Sequence: Synthetic oligonucleotide
  Antisense strand to SEQ ID NO: 2139570
gucaaucuaacaaauccag

SEQ ID NO: 2139572 - RNA, 19 nt, Artificial Sequence
  Description of Artificial Sequence: Synthetic oligonucleotide
  Sense strand starting at position 2310 of SEQ ID NO: 1882677
ggguauuuggucugugcag

SEQ ID NO: 2139573 - RNA, 19 nt, Artificial Sequence
  Description of Artificial Sequence: Synthetic oligonucleotide
  Antisense strand to SEQ ID NO: 2139572
cugcacagaccaaauaccc

SEQ ID NO: 2139574 - RNA, 19 nt, Artificial Sequence
  Description of Artificial Sequence: Synthetic oligonucleotide
  Sense strand starting at position 2454 of SEQ ID NO: 1882677
agcugcuaucaccagucau

SEQ ID NO: 2139575 - RNA, 19 nt, Artificial Sequence
  Description of Artificial Sequence: Synthetic oligonucleotide
  Antisense strand to SEQ ID NO: 2139574
augacuggugauagcagcu

SEQ ID NO: 2139576 - RNA, 19 nt, Artificial Sequence
  Description of Artificial Sequence: Synthetic oligonucleotide
  Sense strand starting at position 2887 of SEQ ID NO: 1882677
aggagauagccugggaguu

SEQ ID NO: 2139577 - RNA, 19 nt, Artificial Sequence
  Description of Artificial Sequence: Synthetic oligonucleotide
  Antisense strand to SEQ ID NO: 2139576
aacucccaggcuaucuccu

SEQ ID NO: 2139578 - RNA, 19 nt, Artificial Sequence
  Description of Artificial Sequence: Synthetic oligonucleotide
  Sense strand starting at position 2920 of SEQ ID NO: 1882677
gguagacacucaguugaac

SEQ ID NO: 2139579 - RNA, 19 nt, Artificial Sequence
  Description of Artificial Sequence: Synthetic oligonucleotide
  Antisense strand to SEQ ID NO: 2139578
guucaacugagugucuacc

SEQ ID NO: 2139580 - RNA, 19 nt, Artificial Sequence
  Description of Artificial Sequence: Synthetic oligonucleotide
  Sense strand starting at position 2973 of SEQ ID NO: 1882677
ugggcaggaguucaugaua

SEQ ID NO: 2139581 - RNA, 19 nt, Artificial Sequence
  Description of Artificial Sequence: Synthetic oligonucleotide
  Antisense strand to SEQ ID NO: 2139580
uaucaugaacuccugccca

SEQ ID NO: 2139582 - RNA, 19 nt, Artificial Sequence
  Description of Artificial Sequence: Synthetic oligonucleotide
  Sense strand starting at position 3005 of SEQ ID NO: 1882677
ggccuugcucuguaagaga

SEQ ID NO: 2139583 - RNA, 19 nt, Artificial Sequence
  Description of Artificial Sequence: Synthetic oligonucleotide
  Antisense strand to SEQ ID NO: 2139582
ucucuuacagagcaaggcc

SEQ ID NO: 2139584 - RNA, 19 nt, Artificial Sequence
  Description of Artificial Sequence: Synthetic oligonucleotide
  Sense strand starting at position 3088 of SEQ ID NO: 1882677
ggagcuugccucugaagga

SEQ ID NO: 2139585 - RNA, 19 nt, Artificial Sequence
  Description of Artificial Sequence: Synthetic oligonucleotide
  Antisense strand to SEQ ID NO: 2139584
uccuucagaggcaagcucc

SEQ ID NO: 2139586 - RNA, 19 nt, Artificial Sequence
  Description of Artificial Sequence: Synthetic oligonucleotide
  Sense strand starting at position 3220 of SEQ ID NO: 1882677
cuuccuaaucuggaagugu

SEQ ID NO: 2139587 - RNA, 19 nt, Artificial Sequence
  Description of Artificial Sequence: Synthetic oligonucleotide
  Antisense strand to SEQ ID NO: 2139586
acacuuccagauuaggaag

SEQ ID NO: 2139588 - RNA, 19 nt, Artificial Sequence
  Description of Artificial Sequence: Synthetic oligonucleotide
  Sense strand starting at position 3229 of SEQ ID NO: 1882677
cuggaaguguuguccagag

SEQ ID NO: 2139589 - RNA, 19 nt, Artificial Sequence
  Description of Artificial Sequence: Synthetic oligonucleotide
  Antisense strand to SEQ ID NO: 2139588
cucuggacaacacuuccag

SEQ ID NO: 2139590 - RNA, 19 nt, Artificial Sequence
  Description of Artificial Sequence: Synthetic oligonucleotide
  Sense strand starting at position 3231 of SEQ ID NO: 1882677
ggaaguguuguccagagaa

SEQ ID NO: 2139591 - RNA, 19 nt, Artificial Sequence
  Description of Artificial Sequence: Synthetic oligonucleotide
  Antisense strand to SEQ ID NO: 2139590
uucucuggacaacacuucc

SEQ ID NO: 2139592 - RNA, 19 nt, Artificial Sequence
  Description of Artificial Sequence: Synthetic oligonucleotide
  Sense strand starting at position 3348 of SEQ ID NO: 1882677
aguccauguagucaugaga

SEQ ID NO: 2139593 - RNA, 19 nt, Artificial Sequence
  Description of Artificial Sequence: Synthetic oligonucleotide
  Antisense strand to SEQ ID NO: 2139592
ucucaugacuacauggacu

SEQ ID NO: 2139594 - RNA, 19 nt, Artificial Sequence
  Description of Artificial Sequence: Synthetic oligonucleotide
  Sense strand starting at position 3351 of SEQ ID NO: 1882677
ccauguagucaugagacgu

SEQ ID NO: 2139595 - RNA, 19 nt, Artificial Sequence
  Description of Artificial Sequence: Synthetic oligonucleotide
  Antisense strand to SEQ ID NO: 2139594
acgucucaugacuacaugg

SEQ ID NO: 2139596 - RNA, 19 nt, Artificial Sequence
  Description of Artificial Sequence: Synthetic oligonucleotide
  Sense strand starting at position 3436 of SEQ ID NO: 1882677
agacuaauucugcauagca

SEQ ID NO: 2139597 - RNA, 19 nt, Artificial Sequence
  Description of Artificial Sequence: Synthetic oligonucleotide
  Antisense strand to SEQ ID NO: 2139596
ugcuaugcagaauuagucu

SEQ ID NO: 2139598 - RNA, 19 nt, Artificial Sequence
  Description of Artificial Sequence: Synthetic oligonucleotide
  Sense strand starting at position 3452 of SEQ ID NO: 1882677
gcaucuuugcgagacccua

SEQ ID NO: 2139599 - RNA, 19 nt, Artificial Sequence
  Description of Artificial Sequence: Synthetic oligonucleotide
  Antisense strand to SEQ ID NO: 2139598
uagggucucgcaaagaugc

SEQ ID NO: 2139600 - RNA, 19 nt, Artificial Sequence
  Description of Artificial Sequence: Synthetic oligonucleotide
  Sense strand starting at position 3460 of SEQ ID NO: 1882677
gcgagacccuagguucuua

SEQ ID NO: 2139601 - RNA, 19 nt, Artificial Sequence
  Description of Artificial Sequence: Synthetic oligonucleotide
  Antisense strand to SEQ ID NO: 2139600
uaagaaccuagggucucgc

SEQ ID NO: 2139602 - RNA, 19 nt, Artificial Sequence
  Description of Artificial Sequence: Synthetic oligonucleotide
  Sense strand starting at position 3473 of SEQ ID NO: 1882677
uucuuaugaugacugguuu

SEQ ID NO: 2139603 - RNA, 19 nt, Artificial Sequence
  Description of Artificial Sequence: Synthetic oligonucleotide
  Antisense strand to SEQ ID NO: 2139602
aaaccagucaucauaagaa

SEQ ID NO: 2139604 - RNA, 19 nt, Artificial Sequence
  Description of Artificial Sequence: Synthetic oligonucleotide
  Sense strand starting at position 9 of SEQ ID NO: 1882678
gguggaagaugcucucaua

SEQ ID NO: 2139605 - RNA, 19 nt, Artificial Sequence
  Description of Artificial Sequence: Synthetic oligonucleotide
  Antisense strand to SEQ ID NO: 2139604
uaugagagcaucuuccacc

SEQ ID NO: 2139606 - RNA, 19 nt, Artificial Sequence
  Description of Artificial Sequence: Synthetic oligonucleotide
  Sense strand starting at position 105 of SEQ ID NO: 1882678
gugugcacgauugcuguaa

SEQ ID NO: 2139607 - RNA, 19 nt, Artificial Sequence
  Description of Artificial Sequence: Synthetic oligonucleotide
  Antisense strand to SEQ ID NO: 2139606
uuacagcaaucgugcacac

SEQ ID NO: 2139608 - RNA, 19 nt, Artificial Sequence
  Description of Artificial Sequence: Synthetic oligonucleotide
  Sense strand starting at position 238 of SEQ ID NO: 1882678
ggaugagugaccuggagca

SEQ ID NO: 2139609 - RNA, 19 nt, Artificial Sequence
  Description of Artificial Sequence: Synthetic oligonucleotide
  Antisense strand to SEQ ID NO: 2139608
ugcuccaggucacucaucc

SEQ ID NO: 2139610 - RNA, 19 nt, Artificial Sequence
  Description of Artificial Sequence: Synthetic oligonucleotide
  Sense strand starting at position 366 of SEQ ID NO: 1882678
ggaaguauucugcaauacu

SEQ ID NO: 2139611 - RNA, 19 nt, Artificial Sequence
  Description of Artificial Sequence: Synthetic oligonucleotide
  Antisense strand to SEQ ID NO: 2139610
aguauugcagaauacuucc

SEQ ID NO: 2139612 - RNA, 19 nt, Artificial Sequence
  Description of Artificial Sequence: Synthetic oligonucleotide
  Sense strand starting at position 369 of SEQ ID NO: 1882678
aguauucugcaauacuaug

SEQ ID NO: 2139613 - RNA, 19 nt, Artificial Sequence
  Description of Artificial Sequence: Synthetic oligonucleotide
  Antisense strand to SEQ ID NO: 2139612
cauaguauugcagaauacu

SEQ ID NO: 2139614 - RNA, 19 nt, Artificial Sequence
  Description of Artificial Sequence: Synthetic oligonucleotide
  Sense strand starting at position 459 of SEQ ID NO: 1882678
ccuaucauuugccucugua

SEQ ID NO: 2139615 - RNA, 19 nt, Artificial Sequence
  Description of Artificial Sequence: Synthetic oligonucleotide
  Antisense strand to SEQ ID NO: 2139614
uacagaggcaaaugauagg

SEQ ID NO: 2139616 - RNA, 19 nt, Artificial Sequence
  Description of Artificial Sequence: Synthetic oligonucleotide
  Sense strand starting at position 463 of SEQ ID NO: 1882678
ucauuugccucuguacuca

SEQ ID NO: 2139617 - RNA, 19 nt, Artificial Sequence
  Description of Artificial Sequence: Synthetic oligonucleotide
  Antisense strand to SEQ ID NO: 2139616
ugaguacagaggcaaauga

SEQ ID NO: 2139618 - RNA, 19 nt, Artificial Sequence
  Description of Artificial Sequence: Synthetic oligonucleotide
  Sense strand starting at position 1019 of SEQ ID NO: 1882678
caaaguacuguagguugaa

SEQ ID NO: 2139619 - RNA, 19 nt, Artificial Sequence
  Description of Artificial Sequence: Synthetic oligonucleotide
  Antisense strand to SEQ ID NO: 2139618
uucaaccuacaguacuuug

SEQ ID NO: 2139620 - RNA, 19 nt, Artificial Sequence
  Description of Artificial Sequence: Synthetic oligonucleotide
  Sense strand starting at position 1035 of SEQ ID NO: 1882678
gaaguaguagauuaugguu

SEQ ID NO: 2139621 - RNA, 19 nt, Artificial Sequence
  Description of Artificial Sequence: Synthetic oligonucleotide
  Antisense strand to SEQ ID NO: 2139620
aaccauaaucuacuacuuc

SEQ ID NO: 2139622 - RNA, 19 nt, Artificial Sequence
  Description of Artificial Sequence: Synthetic oligonucleotide
  Sense strand starting at position 1107 of SEQ ID NO: 1882678
cacuguugauagguccaaa

SEQ ID NO: 2139623 - RNA, 19 nt, Artificial Sequence
  Description of Artificial Sequence: Synthetic oligonucleotide
  Antisense strand to SEQ ID NO: 2139622
uuuggaccuaucaacagug

SEQ ID NO: 2139624 - RNA, 19 nt, Artificial Sequence
  Description of Artificial Sequence: Synthetic oligonucleotide
  Sense strand starting at position 1110 of SEQ ID NO: 1882678
uguugauagguccaaagug

SEQ ID NO: 2139625 - RNA, 19 nt, Artificial Sequence
  Description of Artificial Sequence: Synthetic oligonucleotide
  Antisense strand to SEQ ID NO: 2139624
cacuuuggaccuaucaaca

SEQ ID NO: 2139626 - RNA, 19 nt, Artificial Sequence
  Description of Artificial Sequence: Synthetic oligonucleotide
  Sense strand starting at position 1242 of SEQ ID NO: 1882678
gcacaauauggucacaguu

SEQ ID NO: 2139627 - RNA, 19 nt, Artificial Sequence
  Description of Artificial Sequence: Synthetic oligonucleotide
  Antisense strand to SEQ ID NO: 2139626
aacugugaccauauugugc

SEQ ID NO: 2139628 - RNA, 19 nt, Artificial Sequence
  Description of Artificial Sequence: Synthetic oligonucleotide
  Sense strand starting at position 1286 of SEQ ID NO: 1882678
gggcuuucuguucagaaag

SEQ ID NO: 2139629 - RNA, 19 nt, Artificial Sequence
  Description of Artificial Sequence: Synthetic oligonucleotide
  Antisense strand to SEQ ID NO: 2139628
cuuucugaacagaaagccc

SEQ ID NO: 2139630 - RNA, 19 nt, Artificial Sequence
  Description of Artificial Sequence: Synthetic oligonucleotide
  Sense strand starting at position 1305 of SEQ ID NO: 1882678
ucuucugauguugaagagu

SEQ ID NO: 2139631 - RNA, 19 nt, Artificial Sequence
  Description of Artificial Sequence: Synthetic oligonucleotide
  Antisense strand to SEQ ID NO: 2139630
acucuucaacaucagaaga

SEQ ID NO: 2139632 - RNA, 19 nt, Artificial Sequence
  Description of Artificial Sequence: Synthetic oligonucleotide
  Sense strand starting at position 1308 of SEQ ID NO: 1882678
ucugauguugaagagucau

SEQ ID NO: 2139633 - RNA, 19 nt, Artificial Sequence
  Description of Artificial Sequence: Synthetic oligonucleotide
  Antisense strand to SEQ ID NO: 2139632
augacucuucaacaucaga

SEQ ID NO: 2139634 - RNA, 19 nt, Artificial Sequence
  Description of Artificial Sequence: Synthetic oligonucleotide
  Sense strand starting at position 1342 of SEQ ID NO: 1882678
ggcugugcugucuuuggau

SEQ ID NO: 2139635 - RNA, 19 nt, Artificial Sequence
  Description of Artificial Sequence: Synthetic oligonucleotide
  Antisense strand to SEQ ID NO: 2139634
auccaaagacagcacagcc

SEQ ID NO: 2139636 - RNA, 19 nt, Artificial Sequence
  Description of Artificial Sequence: Synthetic oligonucleotide
  Sense strand starting at position 1375 of SEQ ID NO: 1882678
gaucaugucccuggauaac

SEQ ID NO: 2139637 - RNA, 19 nt, Artificial Sequence
  Description of Artificial Sequence: Synthetic oligonucleotide
  Antisense strand to SEQ ID NO: 2139636
guuauccagggacaugauc

SEQ ID NO: 2139638 - RNA, 19 nt, Artificial Sequence
  Description of Artificial Sequence: Synthetic oligonucleotide
  Sense strand starting at position 1386 of SEQ ID NO: 1882678
uggauaacuggaugucauu

SEQ ID NO: 2139639 - RNA, 19 nt, Artificial Sequence
  Description of Artificial Sequence: Synthetic oligonucleotide
  Antisense strand to SEQ ID NO: 2139638
aaugacauccaguuaucca

SEQ ID NO: 2139640 - RNA, 19 nt, Artificial Sequence
  Description of Artificial Sequence: Synthetic oligonucleotide
  Sense strand starting at position 1413 of SEQ ID NO: 1882678
aggagugcuccuuaauauu

SEQ ID NO: 2139641 - RNA, 19 nt, Artificial Sequence
  Description of Artificial Sequence: Synthetic oligonucleotide
  Antisense strand to SEQ ID NO: 2139640
aauauuaaggagcacuccu

SEQ ID NO: 2139642 - RNA, 19 nt, Artificial Sequence
  Description of Artificial Sequence: Synthetic oligonucleotide
  Sense strand starting at position 1515 of SEQ ID NO: 1882678
cccaaauggcacuagugau

SEQ ID NO: 2139643 - RNA, 19 nt, Artificial Sequence
  Description of Artificial Sequence: Synthetic oligonucleotide
  Antisense strand to SEQ ID NO: 2139642
aucacuagugccauuuggg

SEQ ID NO: 2139644 - RNA, 19 nt, Artificial Sequence
  Description of Artificial Sequence: Synthetic oligonucleotide
  Sense strand starting at position 1857 of SEQ ID NO: 1882678
aguaucaugcauuaaugau

SEQ ID NO: 2139645 - RNA, 19 nt, Artificial Sequence
  Description of Artificial Sequence: Synthetic oligonucleotide
  Antisense strand to SEQ ID NO: 2139644
aucauuaaugcaugauacu

SEQ ID NO: 2139646 - RNA, 19 nt, Artificial Sequence
  Description of Artificial Sequence: Synthetic oligonucleotide
  Sense strand starting at position 2193 of SEQ ID NO: 1882678
ugcacuuaugacuagguaa

SEQ ID NO: 2139647 - RNA, 19 nt, Artificial Sequence
  Description of Artificial Sequence: Synthetic oligonucleotide
  Antisense strand to SEQ ID NO: 2139646
uuaccuagucauaagugca

SEQ ID NO: 2139648 - RNA, 19 nt, Artificial Sequence
  Description of Artificial Sequence: Synthetic oligonucleotide
  Sense strand starting at position 2195 of SEQ ID NO: 1882678
cacuuaugacuagguaaug

SEQ ID NO: 2139649 - RNA, 19 nt, Artificial Sequence
  Description of Artificial Sequence: Synthetic oligonucleotide
  Antisense strand to SEQ ID NO: 2139648
cauuaccuagucauaagug

SEQ ID NO: 2139650 - RNA, 19 nt, Artificial Sequence
  Description of Artificial Sequence: Synthetic oligonucleotide
  Sense strand starting at position 2196 of SEQ ID NO: 1882678
acuuaugacuagguaaugu

SEQ ID NO: 2139651 - RNA, 19 nt, Artificial Sequence
  Description of Artificial Sequence: Synthetic oligonucleotide
  Antisense strand to SEQ ID NO: 2139650
acauuaccuagucauaagu

SEQ ID NO: 2139652 - RNA, 19 nt, Artificial Sequence
  Description of Artificial Sequence: Synthetic oligonucleotide
  Sense strand starting at position 2402 of SEQ ID NO: 1882678
guuccuuuccuuuagacau

SEQ ID NO: 2139653 - RNA, 19 nt, Artificial Sequence
  Description of Artificial Sequence: Synthetic oligonucleotide
  Antisense strand to SEQ ID NO: 2139652
augucuaaaggaaaggaac

SEQ ID NO: 2139654 - RNA, 19 nt, Artificial Sequence
  Description of Artificial Sequence: Synthetic oligonucleotide
  Sense strand starting at position 2465 of SEQ ID NO: 1882678
ugugcauaucaacaaguaa

SEQ ID NO: 2139655 - RNA, 19 nt, Artificial Sequence
  Description of Artificial Sequence: Synthetic oligonucleotide
  Antisense strand to SEQ ID NO: 2139654
uuacuuguugauaugcaca

SEQ ID NO: 2139656 - RNA, 19 nt, Artificial Sequence
  Description of Artificial Sequence: Synthetic oligonucleotide
  Sense strand starting at position 2578 of SEQ ID NO: 1882678
uuggcaauuccucauauga

SEQ ID NO: 2139657 - RNA, 19 nt, Artificial Sequence
  Description of Artificial Sequence: Synthetic oligonucleotide
  Antisense strand to SEQ ID NO: 2139656
ucauaugaggaauugccaa

SEQ ID NO: 2139658 - RNA, 19 nt, Artificial Sequence
  Description of Artificial Sequence: Synthetic oligonucleotide
  Sense strand starting at position 2796 of SEQ ID NO: 1882678
agauaauagacgcagcaua

SEQ ID NO: 2139659 - RNA, 19 nt, Artificial Sequence
  Description of Artificial Sequence: Synthetic oligonucleotide
  Antisense strand to SEQ ID NO: 2139658
uaugcugcgucuauuaucu

SEQ ID NO: 2139660 - RNA, 19 nt, Artificial Sequence
  Description of Artificial Sequence: Synthetic oligonucleotide
  Sense strand starting at position 2911 of SEQ ID NO: 1882678
aggucuaaccuguggaaca

SEQ ID NO: 2139661 - RNA, 19 nt, Artificial Sequence
  Description of Artificial Sequence: Synthetic oligonucleotide
  Antisense strand to SEQ ID NO: 2139660
uguuccacagguuagaccu

SEQ ID NO: 2139662 - RNA, 19 nt, Artificial Sequence
  Description of Artificial Sequence: Synthetic oligonucleotide
  Sense strand starting at position 2913 of SEQ ID NO: 1882678
gucuaaccuguggaacaua

SEQ ID NO: 2139663 - RNA, 19 nt, Artificial Sequence
  Description of Artificial Sequence: Synthetic oligonucleotide
  Antisense strand to SEQ ID NO: 2139662
uauguuccacagguuagac

SEQ ID NO: 2139664 - RNA, 19 nt, Artificial Sequence
  Description of Artificial Sequence: Synthetic oligonucleotide
  Sense strand starting at position 2950 of SEQ ID NO: 1882678
uuaugaguucaugggaagu

SEQ ID NO: 2139665 - RNA, 19 nt, Artificial Sequence
  Description of Artificial Sequence: Synthetic oligonucleotide
  Antisense strand to SEQ ID NO: 2139664
acuucccaugaacucauaa

SEQ ID NO: 2139666 - RNA, 19 nt, Artificial Sequence
  Description of Artificial Sequence: Synthetic oligonucleotide
  Sense strand starting at position 3088 of SEQ ID NO: 1882678
accaguuagccagaauugu

SEQ ID NO: 2139667 - RNA, 19 nt, Artificial Sequence
  Description of Artificial Sequence: Synthetic oligonucleotide
  Antisense strand to SEQ ID NO: 2139666
acaauucuggcuaacuggu

SEQ ID NO: 2139668 - RNA, 19 nt, Artificial Sequence
  Description of Artificial Sequence: Synthetic oligonucleotide
  Sense strand starting at position 3096 of SEQ ID NO: 1882678
gccagaauuguccauuaaa

SEQ ID NO: 2139669 - RNA, 19 nt, Artificial Sequence
  Description of Artificial Sequence: Synthetic oligonucleotide
  Antisense strand to SEQ ID NO: 2139668
uuuaauggacaauucuggc

SEQ ID NO: 2139670 - RNA, 19 nt, Artificial Sequence
  Description of Artificial Sequence: Synthetic oligonucleotide
  Sense strand starting at position 3140 of SEQ ID NO: 1882678
gucacaguacaauggaaau

SEQ ID NO: 2139671 - RNA, 19 nt, Artificial Sequence
  Description of Artificial Sequence: Synthetic oligonucleotide
  Antisense strand to SEQ ID NO: 2139670
auuuccauuguacugugac

SEQ ID NO: 2139672 - RNA, 19 nt, Artificial Sequence
  Description of Artificial Sequence: Synthetic oligonucleotide
  Sense strand starting at position 3160 of SEQ ID NO: 1882678
auagauuagccaugacuag

SEQ ID NO: 2139673 - RNA, 19 nt, Artificial Sequence
  Description of Artificial Sequence: Synthetic oligonucleotide
  Antisense strand to SEQ ID NO: 2139672
cuagucauggcuaaucuau

SEQ ID NO: 2139674 - RNA, 19 nt, Artificial Sequence
  Description of Artificial Sequence: Synthetic oligonucleotide
  Sense strand starting at position 3188 of SEQ ID NO: 1882678
aaggguuaugcagacguaa

SEQ ID NO: 2139675 - RNA, 19 nt, Artificial Sequence
  Description of Artificial Sequence: Synthetic oligonucleotide
  Antisense strand to SEQ ID NO: 2139674
uuacgucugcauaacccuu

SEQ ID NO: 2139676 - RNA, 19 nt, Artificial Sequence
  Description of Artificial Sequence: Synthetic oligonucleotide
  Sense strand starting at position 3222 of SEQ ID NO: 1882678
ggucaagacccucauguuu

SEQ ID NO: 2139677 - RNA, 19 nt, Artificial Sequence
  Description of Artificial Sequence: Synthetic oligonucleotide
  Antisense strand to SEQ ID NO: 2139676
aaacaugagggucuugacc

SEQ ID NO: 2139678 - RNA, 19 nt, Artificial Sequence
  Description of Artificial Sequence: Synthetic oligonucleotide
  Sense strand starting at position 3377 of SEQ ID NO: 1882678
gaagaacuguaagugguua

SEQ ID NO: 2139679 - RNA, 19 nt, Artificial Sequence
  Description of Artificial Sequence: Synthetic oligonucleotide
  Antisense strand to SEQ ID NO: 2139678
uaaccacuuacaguucuuc

SEQ ID NO: 2139680 - RNA, 19 nt, Artificial Sequence
  Description of Artificial Sequence: Synthetic oligonucleotide
  Sense strand starting at position 3484 of SEQ ID NO: 1882678
uagucaggugcuuagaaga

SEQ ID NO: 2139681 - RNA, 19 nt, Artificial Sequence
  Description of Artificial Sequence: Synthetic oligonucleotide
  Antisense strand to SEQ ID NO: 2139680
ucuucuaagcaccugacua

SEQ ID NO: 2139682 - RNA, 19 nt, Artificial Sequence
  Description of Artificial Sequence: Synthetic oligonucleotide
  Sense strand starting at position 3818 of SEQ ID NO: 1882678
acuauuccagccuggaaga

SEQ ID NO: 2139683 - RNA, 19 nt, Artificial Sequence
  Description of Artificial Sequence: Synthetic oligonucleotide
  Antisense strand to SEQ ID NO: 2139682
ucuuccaggcuggaauagu

SEQ ID NO: 2139684 - RNA, 19 nt, Artificial Sequence
  Description of Artificial Sequence: Synthetic oligonucleotide
  Sense strand starting at position 1753 of SEQ ID NO: 1882679
ccaccugucucaucucagu

SEQ ID NO: 2139685 - RNA, 19 nt, Artificial Sequence
  Description of Artificial Sequence: Synthetic oligonucleotide
  Antisense strand to SEQ ID NO: 2139684
acugagaugagacaggugg

SEQ ID NO: 2139686 - RNA, 19 nt, Artificial Sequence
  Description of Artificial Sequence: Synthetic oligonucleotide
  Sense strand starting at position 1758 of SEQ ID NO: 1882679
ugucucaucucagugugaa

SEQ ID NO: 2139687 - RNA, 19 nt, Artificial Sequence
  Description of Artificial Sequence: Synthetic oligonucleotide
  Antisense strand to SEQ ID NO: 2139686
uucacacugagaugagaca

SEQ ID NO: 2139688 - RNA, 19 nt, Artificial Sequence
  Description of Artificial Sequence: Synthetic oligonucleotide
  Sense strand starting at position 1872 of SEQ ID NO: 1882679
ggcuuccucuugucacaga

SEQ ID NO: 2139689 - RNA, 19 nt, Artificial Sequence
  Description of Artificial Sequence: Synthetic oligonucleotide
  Antisense strand to SEQ ID NO: 2139688
ucugugacaagaggaagcc

SEQ ID NO: 2139690 - RNA, 19 nt, Artificial Sequence
  Description of Artificial Sequence: Synthetic oligonucleotide
  Sense strand starting at position 1952 of SEQ ID NO: 1882679
cuggaauugucagucuguu

SEQ ID NO: 2139691 - RNA, 19 nt, Artificial Sequence
  Description of Artificial Sequence: Synthetic oligonucleotide
  Antisense strand to SEQ ID NO: 2139690
aacagacugacaauuccag

SEQ ID NO: 2139692 - RNA, 19 nt, Artificial Sequence
  Description of Artificial Sequence: Synthetic oligonucleotide
  Sense strand starting at position 1983 of SEQ ID NO: 1882679
guguaacggcccucuguua

SEQ ID NO: 2139693 - RNA, 19 nt, Artificial Sequence
  Description of Artificial Sequence: Synthetic oligonucleotide
  Antisense strand to SEQ ID NO: 2139692
uaacagagggccguuacac

SEQ ID NO: 2139694 - RNA, 19 nt, Artificial Sequence
  Description of Artificial Sequence: Synthetic oligonucleotide
  Sense strand starting at position 2234 of SEQ ID NO: 1882679
uggucuggucuggaaugaa

SEQ ID NO: 2139695 - RNA, 19 nt, Artificial Sequence
  Description of Artificial Sequence: Synthetic oligonucleotide
  Antisense strand to SEQ ID NO: 2139694
uucauuccagaccagacca

SEQ ID NO: 2139696 - RNA, 19 nt, Artificial Sequence
  Description of Artificial Sequence: Synthetic oligonucleotide
  Sense strand starting at position 2246 of SEQ ID NO: 1882679
gaaugaagagucugagcca

SEQ ID NO: 2139697 - RNA, 19 nt, Artificial Sequence
  Description of Artificial Sequence: Synthetic oligonucleotide
  Antisense strand to SEQ ID NO: 2139696
uggcucagacucuucauuc

SEQ ID NO: 2139698 - RNA, 19 nt, Artificial Sequence
  Description of Artificial Sequence: Synthetic oligonucleotide
  Sense strand starting at position 2342 of SEQ ID NO: 1882679
gcaccagacucuuugacac

SEQ ID NO: 2139699 - RNA, 19 nt, Artificial Sequence
  Description of Artificial Sequence: Synthetic oligonucleotide
  Antisense strand to SEQ ID NO: 2139698
gugucaaagagucuggugc

SEQ ID NO: 2139700 - RNA, 19 nt, Artificial Sequence
  Description of Artificial Sequence: Synthetic oligonucleotide
  Sense strand starting at position 2526 of SEQ ID NO: 1882679
uauggagagucccuagaca

SEQ ID NO: 2139701 - RNA, 19 nt, Artificial Sequence
  Description of Artificial Sequence: Synthetic oligonucleotide
  Antisense strand to SEQ ID NO: 2139700
ugucuagggacucuccaua

SEQ ID NO: 2139702 - RNA, 19 nt, Artificial Sequence
  Description of Artificial Sequence: Synthetic oligonucleotide
  Sense strand starting at position 2576 of SEQ ID NO: 1882679
cagguuguacgcgauauaa

SEQ ID NO: 2139703 - RNA, 19 nt, Artificial Sequence
  Description of Artificial Sequence: Synthetic oligonucleotide
  Antisense strand to SEQ ID NO: 2139702
uuauaucgcguacaaccug

SEQ ID NO: 2139704 - RNA, 19 nt, Artificial Sequence
  Description of Artificial Sequence: Synthetic oligonucleotide
  Sense strand starting at position 2603 of SEQ ID NO: 1882679
acugacugcccgugaggau

SEQ ID NO: 2139705 - RNA, 19 nt, Artificial Sequence
  Description of Artificial Sequence: Synthetic oligonucleotide
  Antisense strand to SEQ ID NO: 2139704
auccucacgggcagucagu

SEQ ID NO: 2139706 - RNA, 19 nt, Artificial Sequence
  Description of Artificial Sequence: Synthetic oligonucleotide
  Sense strand starting at position 2663 of SEQ ID NO: 1882679
gagggucacugguccucaa

SEQ ID NO: 2139707 - RNA, 19 nt, Artificial Sequence
  Description of Artificial Sequence: Synthetic oligonucleotide
  Antisense strand to SEQ ID NO: 2139706
uugaggaccagugacccuc

SEQ ID NO: 2139708 - RNA, 19 nt, Artificial Sequence
  Description of Artificial Sequence: Synthetic oligonucleotide
  Sense strand starting at position 2725 of SEQ ID NO: 1882679
cugugugaccucugagacu

SEQ ID NO: 2139709 - RNA, 19 nt, Artificial Sequence
  Description of Artificial Sequence: Synthetic oligonucleotide
  Antisense strand to SEQ ID NO: 2139708
agucucagaggucacacag

SEQ ID NO: 2139710 - RNA, 19 nt, Artificial Sequence
  Description of Artificial Sequence: Synthetic oligonucleotide
  Sense strand starting at position 2804 of SEQ ID NO: 1882679
augugaaacugcuccacga

SEQ ID NO: 2139711 - RNA, 19 nt, Artificial Sequence
  Description of Artificial Sequence: Synthetic oligonucleotide
  Antisense strand to SEQ ID NO: 2139710
ucguggagcaguuucacau

SEQ ID NO: 2139712 - RNA, 19 nt, Artificial Sequence
  Description of Artificial Sequence: Synthetic oligonucleotide
  Sense strand starting at position 2806 of SEQ ID NO: 1882679
gugaaacugcuccacgaac

SEQ ID NO: 2139713 - RNA, 19 nt, Artificial Sequence
  Description of Artificial Sequence: Synthetic oligonucleotide
  Antisense strand to SEQ ID NO: 2139712
guucguggagcaguuucac

SEQ ID NO: 2139714 - RNA, 19 nt, Artificial Sequence
  Description of Artificial Sequence: Synthetic oligonucleotide
  Sense strand starting at position 2837 of SEQ ID NO: 1882679
ugcacauagaugcgaucau

SEQ ID NO: 2139715 - RNA, 19 nt, Artificial Sequence
  Description of Artificial Sequence: Synthetic oligonucleotide
  Antisense strand to SEQ ID NO: 2139714
augaucgcaucuaugugca

SEQ ID NO: 2139716 - RNA, 19 nt, Artificial Sequence
  Description of Artificial Sequence: Synthetic oligonucleotide
  Sense strand starting at position 2841 of SEQ ID NO: 1882679
cauagaugcgaucauuaag

SEQ ID NO: 2139717 - RNA, 19 nt, Artificial Sequence
  Description of Artificial Sequence: Synthetic oligonucleotide
  Antisense strand to SEQ ID NO: 2139716
cuuaaugaucgcaucuaug

SEQ ID NO: 2139718 - RNA, 19 nt, Artificial Sequence
  Description of Artificial Sequence: Synthetic oligonucleotide
  Sense strand starting at position 2849 of SEQ ID NO: 1882679
cgaucauuaagaugcgaag

SEQ ID NO: 2139719 - RNA, 19 nt, Artificial Sequence
  Description of Artificial Sequence: Synthetic oligonucleotide
  Antisense strand to SEQ ID NO: 2139718
cuucgcaucuuaaugaucg

SEQ ID NO: 2139720 - RNA, 19 nt, Artificial Sequence
  Description of Artificial Sequence: Synthetic oligonucleotide
  Sense strand starting at position 2897 of SEQ ID NO: 1882679
cuguaaagagugggucaaa

SEQ ID NO: 2139721 - RNA, 19 nt, Artificial Sequence
  Description of Artificial Sequence: Synthetic oligonucleotide
  Antisense strand to SEQ ID NO: 2139720
uuugacccacucuuuacag

SEQ ID NO: 2139722 - RNA, 19 nt, Artificial Sequence
  Description of Artificial Sequence: Synthetic oligonucleotide
  Sense strand starting at position 2933 of SEQ ID NO: 1882679
auccaaaguuaugcagaaa

SEQ ID NO: 2139723 - RNA, 19 nt, Artificial Sequence
  Description of Artificial Sequence: Synthetic oligonucleotide
  Antisense strand to SEQ ID NO: 2139722
uuucugcauaacuuuggau

SEQ ID NO: 2139724 - RNA, 19 nt, Artificial Sequence
  Description of Artificial Sequence: Synthetic oligonucleotide
  Sense strand starting at position 2960 of SEQ ID NO: 1882679
agaggucuuacguagcaau

SEQ ID NO: 2139725 - RNA, 19 nt, Artificial Sequence
  Description of Artificial Sequence: Synthetic oligonucleotide
  Antisense strand to SEQ ID NO: 2139724
auugcuacguaagaccucu

SEQ ID NO: 2139726 - RNA, 19 nt, Artificial Sequence
  Description of Artificial Sequence: Synthetic oligonucleotide
  Sense strand starting at position 2970 of SEQ ID NO: 1882679
cguagcaauaccgaacuua

SEQ ID NO: 2139727 - RNA, 19 nt, Artificial Sequence
  Description of Artificial Sequence: Synthetic oligonucleotide
  Antisense strand to SEQ ID NO: 2139726
uaaguucgguauugcuacg

SEQ ID NO: 2139728 - RNA, 19 nt, Artificial Sequence
  Description of Artificial Sequence: Synthetic oligonucleotide
  Sense strand starting at position 3200 of SEQ ID NO: 1882679
auuguaaacccuggauuaa

SEQ ID NO: 2139729 - RNA, 19 nt, Artificial Sequence
  Description of Artificial Sequence: Synthetic oligonucleotide
  Antisense strand to SEQ ID NO: 2139728
uuaauccaggguuuacaau

SEQ ID NO: 2139730 - RNA, 19 nt, Artificial Sequence
  Description of Artificial Sequence: Synthetic oligonucleotide
  Sense strand starting at position 3228 of SEQ ID NO: 1882679
aaaguuuccugucugaguu

SEQ ID NO: 2139731 - RNA, 19 nt, Artificial Sequence
  Description of Artificial Sequence: Synthetic oligonucleotide
  Antisense strand to SEQ ID NO: 2139730
aacucagacaggaaacuuu

SEQ ID NO: 2139732 - RNA, 19 nt, Artificial Sequence
  Description of Artificial Sequence: Synthetic oligonucleotide
  Sense strand starting at position 3341 of SEQ ID NO: 1882679
caccuaguuguuggaaauu

SEQ ID NO: 2139733 - RNA, 19 nt, Artificial Sequence
  Description of Artificial Sequence: Synthetic oligonucleotide
  Antisense strand to SEQ ID NO: 2139732
aauuuccaacaacuaggug

SEQ ID NO: 2139734 - RNA, 19 nt, Artificial Sequence
  Description of Artificial Sequence: Synthetic oligonucleotide
  Sense strand starting at position 3386 of SEQ ID NO: 1882679
aggguugauuuagguuaaa

SEQ ID NO: 2139735 - RNA, 19 nt, Artificial Sequence
  Description of Artificial Sequence: Synthetic oligonucleotide
  Antisense strand to SEQ ID NO: 2139734
uuuaaccuaaaucaacccu

SEQ ID NO: 2139736 - RNA, 19 nt, Artificial Sequence
  Description of Artificial Sequence: Synthetic oligonucleotide
  Sense strand starting at position 3416 of SEQ ID NO: 1882679
auauaaagugcuuaucaug

SEQ ID NO: 2139737 - RNA, 19 nt, Artificial Sequence
  Description of Artificial Sequence: Synthetic oligonucleotide
  Antisense strand to SEQ ID NO: 2139736
caugauaagcacuuuauau

SEQ ID NO: 2139738 - RNA, 19 nt, Artificial Sequence
  Description of Artificial Sequence: Synthetic oligonucleotide
  Sense strand starting at position 3582 of SEQ ID NO: 1882679
ccacgauagugaccuaaca

SEQ ID NO: 2139739 - RNA, 19 nt, Artificial Sequence
  Description of Artificial Sequence: Synthetic oligonucleotide
  Antisense strand to SEQ ID NO: 2139738
uguuaggucacuaucgugg

SEQ ID NO: 2139740 - RNA, 19 nt, Artificial Sequence
  Description of Artificial Sequence: Synthetic oligonucleotide
  Sense strand starting at position 3664 of SEQ ID NO: 1882679
ugauaugccagaugacaug

SEQ ID NO: 2139741 - RNA, 19 nt, Artificial Sequence
  Description of Artificial Sequence: Synthetic oligonucleotide
  Antisense strand to SEQ ID NO: 2139740
caugucaucuggcauauca

SEQ ID NO: 2139742 - RNA, 19 nt, Artificial Sequence
  Description of Artificial Sequence: Synthetic oligonucleotide
  Sense strand starting at position 3711 of SEQ ID NO: 1882679
ugagaucaauugucuaaua

SEQ ID NO: 2139743 - RNA, 19 nt, Artificial Sequence
  Description of Artificial Sequence: Synthetic oligonucleotide
  Antisense strand to SEQ ID NO: 2139742
uauuagacaauugaucuca

SEQ ID NO: 2139744 - RNA, 19 nt, Artificial Sequence
  Description of Artificial Sequence: Synthetic oligonucleotide
  Sense strand starting at position 3712 of SEQ ID NO: 1882679
gagaucaauugucuaauag

SEQ ID NO: 2139745 - RNA, 19 nt, Artificial Sequence
  Description of Artificial Sequence: Synthetic oligonucleotide
  Antisense strand to SEQ ID NO: 2139744
cuauuagacaauugaucuc

SEQ ID NO: 2139746 - RNA, 19 nt, Artificial Sequence
  Description of Artificial Sequence: Synthetic oligonucleotide
  Sense strand starting at position 3713 of SEQ ID NO: 1882679
agaucaauugucuaauagu

SEQ ID NO: 2139747 - RNA, 19 nt, Artificial Sequence
  Description of Artificial Sequence: Synthetic oligonucleotide
  Antisense strand to SEQ ID NO: 2139746
acuauuagacaauugaucu

SEQ ID NO: 2139748 - RNA, 19 nt, Artificial Sequence
  Description of Artificial Sequence: Synthetic oligonucleotide
  Sense strand starting at position 3721 of SEQ ID NO: 1882679
ugucuaauaguugauugau

SEQ ID NO: 2139749 - RNA, 19 nt, Artificial Sequence
  Description of Artificial Sequence: Synthetic oligonucleotide
  Antisense strand to SEQ ID NO: 2139748
aucaaucaacuauuagaca

SEQ ID NO: 2139750 - RNA, 19 nt, Artificial Sequence
  Description of Artificial Sequence: Synthetic oligonucleotide
  Sense strand starting at position 3724 of SEQ ID NO: 1882679
cuaauaguugauugauccu

SEQ ID NO: 2139751 - RNA, 19 nt, Artificial Sequence
  Description of Artificial Sequence: Synthetic oligonucleotide
  Antisense strand to SEQ ID NO: 2139750
aggaucaaucaacuauuag

SEQ ID NO: 2139752 - RNA, 19 nt, Artificial Sequence
  Description of Artificial Sequence: Synthetic oligonucleotide
  Sense strand starting at position 3778 of SEQ ID NO: 1882679
cugauuauauaggcugaaa

SEQ ID NO: 2139753 - RNA, 19 nt, Artificial Sequence
  Description of Artificial Sequence: Synthetic oligonucleotide
  Antisense strand to SEQ ID NO: 2139752
uuucagccuauauaaucag

SEQ ID NO: 2139754 - RNA, 19 nt, Artificial Sequence
  Description of Artificial Sequence: Synthetic oligonucleotide
  Sense strand starting at position 3830 of SEQ ID NO: 1882679
uauggagaauggcuccaaa

SEQ ID NO: 2139755 - RNA, 19 nt, Artificial Sequence
  Description of Artificial Sequence: Synthetic oligonucleotide
  Antisense strand to SEQ ID NO: 2139754
uuuggagccauucuccaua

SEQ ID NO: 2139756 - RNA, 19 nt, Artificial Sequence
  Description of Artificial Sequence: Synthetic oligonucleotide
  Sense strand starting at position 3977 of SEQ ID NO: 1882679
uucccaaguugaguauaau

SEQ ID NO: 2139757 - RNA, 19 nt, Artificial Sequence
  Description of Artificial Sequence: Synthetic oligonucleotide
  Antisense strand to SEQ ID NO: 2139756
auuauacucaacuugggaa

SEQ ID NO: 2139758 - RNA, 19 nt, Artificial Sequence
  Description of Artificial Sequence: Synthetic oligonucleotide
  Sense strand starting at position 3978 of SEQ ID NO: 1882679
ucccaaguugaguauaauc

SEQ ID NO: 2139759 - RNA, 19 nt, Artificial Sequence
  Description of Artificial Sequence: Synthetic oligonucleotide
  Antisense strand to SEQ ID NO: 2139758
gauuauacucaacuuggga

SEQ ID NO: 2139760 - RNA, 19 nt, Artificial Sequence
  Description of Artificial Sequence: Synthetic oligonucleotide
  Sense strand starting at position 3980 of SEQ ID NO: 1882679
ccaaguugaguauaaucau

SEQ ID NO: 2139761 - RNA, 19 nt, Artificial Sequence
  Description of Artificial Sequence: Synthetic oligonucleotide
  Antisense strand to SEQ ID NO: 2139760
augauuauacucaacuugg

SEQ ID NO: 2139762 - RNA, 19 nt, Artificial Sequence
  Description of Artificial Sequence: Synthetic oligonucleotide
  Sense strand starting at position 3983 of SEQ ID NO: 1882679
aguugaguauaaucauauc

SEQ ID NO: 2139763 - RNA, 19 nt, Artificial Sequence
  Description of Artificial Sequence: Synthetic oligonucleotide
  Antisense strand to SEQ ID NO: 2139762
gauaugauuauacucaacu

SEQ ID NO: 2139764 - RNA, 19 nt, Artificial Sequence
  Description of Artificial Sequence: Synthetic oligonucleotide
  Sense strand starting at position 56 of SEQ ID NO: 1882680
gggucugugaaggacagua

SEQ ID NO: 2139765 - RNA, 19 nt, Artificial Sequence
  Description of Artificial Sequence: Synthetic oligonucleotide
  Antisense strand to SEQ ID NO: 2139764
uacuguccuucacagaccc

SEQ ID NO: 2139766 - RNA, 19 nt, Artificial Sequence
  Description of Artificial Sequence: Synthetic oligonucleotide
  Sense strand starting at position 127 of SEQ ID NO: 1882680
cuagaaauguuguuuaaug

SEQ ID NO: 2139767 - RNA, 19 nt, Artificial Sequence
  Description of Artificial Sequence: Synthetic oligonucleotide
  Antisense strand to SEQ ID NO: 2139766
cauuaaacaacauuucuag

SEQ ID NO: 2139768 - RNA, 19 nt, Artificial Sequence
  Description of Artificial Sequence: Synthetic oligonucleotide
  Sense strand starting at position 135 of SEQ ID NO: 1882680
guuguuuaaugaucggauc

SEQ ID NO: 2139769 - RNA, 19 nt, Artificial Sequence
  Description of Artificial Sequence: Synthetic oligonucleotide
  Antisense strand to SEQ ID NO: 2139768
gauccgaucauuaaacaac

SEQ ID NO: 2139770 - RNA, 19 nt, Artificial Sequence
  Description of Artificial Sequence: Synthetic oligonucleotide
  Sense strand starting at position 138 of SEQ ID NO: 1882680
guuuaaugaucggaucgcu

SEQ ID NO: 2139771 - RNA, 19 nt, Artificial Sequence
  Description of Artificial Sequence: Synthetic oligonucleotide
  Antisense strand to SEQ ID NO: 2139770
agcgauccgaucauuaaac

SEQ ID NO: 2139772 - RNA, 19 nt, Artificial Sequence
  Description of Artificial Sequence: Synthetic oligonucleotide
  Sense strand starting at position 218 of SEQ ID NO: 1882680
ucgagagugacuugaguga

SEQ ID NO: 2139773 - RNA, 19 nt, Artificial Sequence
  Description of Artificial Sequence: Synthetic oligonucleotide
  Antisense strand to SEQ ID NO: 2139772
ucacucaagucacucucga

SEQ ID NO: 2139774 - RNA, 19 nt, Artificial Sequence
  Description of Artificial Sequence: Synthetic oligonucleotide
  Sense strand starting at position 222 of SEQ ID NO: 1882680
gagugacuugagugagcga

SEQ ID NO: 2139775 - RNA, 19 nt, Artificial Sequence
  Description of Artificial Sequence: Synthetic oligonucleotide
  Antisense strand to SEQ ID NO: 2139774
ucgcucacucaagucacuc

SEQ ID NO: 2139776 - RNA, 19 nt, Artificial Sequence
  Description of Artificial Sequence: Synthetic oligonucleotide
  Sense strand starting at position 271 of SEQ ID NO: 1882680
guggucuguccagaaccuu

SEQ ID NO: 2139777 - RNA, 19 nt, Artificial Sequence
  Description of Artificial Sequence: Synthetic oligonucleotide
  Antisense strand to SEQ ID NO: 2139776
aagguucuggacagaccac

SEQ ID NO: 2139778 - RNA, 19 nt, Artificial Sequence
  Description of Artificial Sequence: Synthetic oligonucleotide
  Sense strand starting at position 280 of SEQ ID NO: 1882680
ccagaaccuuccuagguga

SEQ ID NO: 2139779 - RNA, 19 nt, Artificial Sequence
  Description of Artificial Sequence: Synthetic oligonucleotide
  Antisense strand to SEQ ID NO: 2139778
ucaccuaggaagguucugg

SEQ ID NO: 2139780 - RNA, 19 nt, Artificial Sequence
  Description of Artificial Sequence: Synthetic oligonucleotide
  Sense strand starting at position 282 of SEQ ID NO: 1882680
agaaccuuccuaggugauu

SEQ ID NO: 2139781 - RNA, 19 nt, Artificial Sequence
  Description of Artificial Sequence: Synthetic oligonucleotide
  Antisense strand to SEQ ID NO: 2139780
aaucaccuaggaagguucu

SEQ ID NO: 2139782 - RNA, 19 nt, Artificial Sequence
  Description of Artificial Sequence: Synthetic oligonucleotide
  Sense strand starting at position 449 of SEQ ID NO: 1882680
cagugugacuucggacaag

SEQ ID NO: 2139783 - RNA, 19 nt, Artificial Sequence
  Description of Artificial Sequence: Synthetic oligonucleotide
  Antisense strand to SEQ ID NO: 2139782
cuuguccgaagucacacug

SEQ ID NO: 2139784 - RNA, 19 nt, Artificial Sequence
  Description of Artificial Sequence: Synthetic oligonucleotide
  Sense strand starting at position 499 of SEQ ID NO: 1882680
uguaaagugagcugcagaa

SEQ ID NO: 2139785 - RNA, 19 nt, Artificial Sequence
  Description of Artificial Sequence: Synthetic oligonucleotide
  Antisense strand to SEQ ID NO: 2139784
uucugcagcucacuuuaca

SEQ ID NO: 2139786 - RNA, 19 nt, Artificial Sequence
  Description of Artificial Sequence: Synthetic oligonucleotide
  Sense strand starting at position 503 of SEQ ID NO: 1882680
aagugagcugcagaaugaa

SEQ ID NO: 2139787 - RNA, 19 nt, Artificial Sequence
  Description of Artificial Sequence: Synthetic oligonucleotide
  Antisense strand to SEQ ID NO: 2139786
uucauucugcagcucacuu

SEQ ID NO: 2139788 - RNA, 19 nt, Artificial Sequence
  Description of Artificial Sequence: Synthetic oligonucleotide
  Sense strand starting at position 1383 of SEQ ID NO: 1882680
gcguguuuccugcaugcau

SEQ ID NO: 2139789 - RNA, 19 nt, Artificial Sequence
  Description of Artificial Sequence: Synthetic oligonucleotide
  Antisense strand to SEQ ID NO: 2139788
augcaugcaggaaacacgc

SEQ ID NO: 2139790 - RNA, 19 nt, Artificial Sequence
  Description of Artificial Sequence: Synthetic oligonucleotide
  Sense strand starting at position 1728 of SEQ ID NO: 1882680
agguauacauguguccaca

SEQ ID NO: 2139791 - RNA, 19 nt, Artificial Sequence
  Description of Artificial Sequence: Synthetic oligonucleotide
  Antisense strand to SEQ ID NO: 2139790
uguggacacauguauaccu

SEQ ID NO: 2139792 - RNA, 19 nt, Artificial Sequence
  Description of Artificial Sequence: Synthetic oligonucleotide
  Sense strand starting at position 1730 of SEQ ID NO: 1882680
guauacauguguccacaaa

SEQ ID NO: 2139793 - RNA, 19 nt, Artificial Sequence
  Description of Artificial Sequence: Synthetic oligonucleotide
  Antisense strand to SEQ ID NO: 2139792
uuuguggacacauguauac

SEQ ID NO: 2139794 - RNA, 19 nt, Artificial Sequence
  Description of Artificial Sequence: Synthetic oligonucleotide
  Sense strand starting at position 1872 of SEQ ID NO: 1882680
gcucuuaggcccuguaauc

SEQ ID NO: 2139795 - RNA, 19 nt, Artificial Sequence
  Description of Artificial Sequence: Synthetic oligonucleotide
  Antisense strand to SEQ ID NO: 2139794
gauuacagggccuaagagc

SEQ ID NO: 2139796 - RNA, 19 nt, Artificial Sequence
  Description of Artificial Sequence: Synthetic oligonucleotide
  Sense strand starting at position 1926 of SEQ ID NO: 1882680
gauuaaaggugauuacgau

SEQ ID NO: 2139797 - RNA, 19 nt, Artificial Sequence
  Description of Artificial Sequence: Synthetic oligonucleotide
  Antisense strand to SEQ ID NO: 2139796
aucguaaucaccuuuaauc

SEQ ID NO: 2139798 - RNA, 19 nt, Artificial Sequence
  Description of Artificial Sequence: Synthetic oligonucleotide
  Sense strand starting at position 1933 of SEQ ID NO: 1882680
ggugauuacgauuguggcu

SEQ ID NO: 2139799 - RNA, 19 nt, Artificial Sequence
  Description of Artificial Sequence: Synthetic oligonucleotide
  Antisense strand to SEQ ID NO: 2139798
agccacaaucguaaucacc

SEQ ID NO: 2139800 - RNA, 19 nt, Artificial Sequence
  Description of Artificial Sequence: Synthetic oligonucleotide
  Sense strand starting at position 2232 of SEQ ID NO: 1882680
cgcugacucccgugauggu

SEQ ID NO: 2139801 - RNA, 19 nt, Artificial Sequence
  Description of Artificial Sequence: Synthetic oligonucleotide
  Antisense strand to SEQ ID NO: 2139800
accaucacgggagucagcg

SEQ ID NO: 2139802 - RNA, 19 nt, Artificial Sequence
  Description of Artificial Sequence: Synthetic oligonucleotide
  Sense strand starting at position 2577 of SEQ ID NO: 1882680
agugcagacuaguugcaaa

SEQ ID NO: 2139803 - RNA, 19 nt, Artificial Sequence
  Description of Artificial Sequence: Synthetic oligonucleotide
  Antisense strand to SEQ ID NO: 2139802
uuugcaacuagucugcacu

SEQ ID NO: 2139804 - RNA, 19 nt, Artificial Sequence
  Description of Artificial Sequence: Synthetic oligonucleotide
  Sense strand starting at position 2590 of SEQ ID NO: 1882680
ugcaaacgucaauaucagu

SEQ ID NO: 2139805 - RNA, 19 nt, Artificial Sequence
  Description of Artificial Sequence: Synthetic oligonucleotide
  Antisense strand to SEQ ID NO: 2139804
acugauauugacguuugca

SEQ ID NO: 2139806 - RNA, 19 nt, Artificial Sequence
  Description of Artificial Sequence: Synthetic oligonucleotide
  Sense strand starting at position 2593 of SEQ ID NO: 1882680
aaacgucaauaucagugaa

SEQ ID NO: 2139807 - RNA, 19 nt, Artificial Sequence
  Description of Artificial Sequence: Synthetic oligonucleotide
  Antisense strand to SEQ ID NO: 2139806
uucacugauauugacguuu

SEQ ID NO: 2139808 - RNA, 19 nt, Artificial Sequence
  Description of Artificial Sequence: Synthetic oligonucleotide
  Sense strand starting at position 2595 of SEQ ID NO: 1882680
acgucaauaucagugaaau

SEQ ID NO: 2139809 - RNA, 19 nt, Artificial Sequence
  Description of Artificial Sequence: Synthetic oligonucleotide
  Antisense strand to SEQ ID NO: 2139808
auuucacugauauugacgu

SEQ ID NO: 2139810 - RNA, 19 nt, Artificial Sequence
  Description of Artificial Sequence: Synthetic oligonucleotide
  Sense strand starting at position 2596 of SEQ ID NO: 1882680
cgucaauaucagugaaaua

SEQ ID NO: 2139811 - RNA, 19 nt, Artificial Sequence
  Description of Artificial Sequence: Synthetic oligonucleotide
  Antisense strand to SEQ ID NO: 2139810
uauuucacugauauugacg

SEQ ID NO: 2139812 - RNA, 19 nt, Artificial Sequence
  Description of Artificial Sequence: Synthetic oligonucleotide
  Sense strand starting at position 2698 of SEQ ID NO: 1882680
uucucuauccugcagggaa

SEQ ID NO: 2139813 - RNA, 19 nt, Artificial Sequence
  Description of Artificial Sequence: Synthetic oligonucleotide
  Antisense strand to SEQ ID NO: 2139812
uucccugcaggauagagaa

SEQ ID NO: 2139814 - RNA, 19 nt, Artificial Sequence
  Description of Artificial Sequence: Synthetic oligonucleotide
  Sense strand starting at position 2757 of SEQ ID NO: 1882680
cccuuaucucgaggguagu

SEQ ID NO: 2139815 - RNA, 19 nt, Artificial Sequence
  Description of Artificial Sequence: Synthetic oligonucleotide
  Antisense strand to SEQ ID NO: 2139814
acuacccucgagauaaggg

SEQ ID NO: 2139816 - RNA, 19 nt, Artificial Sequence
  Description of Artificial Sequence: Synthetic oligonucleotide
  Sense strand starting at position 3087 of SEQ ID NO: 1882680
auguguggagccuggaaau

SEQ ID NO: 2139817 - RNA, 19 nt, Artificial Sequence
  Description of Artificial Sequence: Synthetic oligonucleotide
  Antisense strand to SEQ ID NO: 2139816
auuuccaggcuccacacau

SEQ ID NO: 2139818 - RNA, 19 nt, Artificial Sequence
  Description of Artificial Sequence: Synthetic oligonucleotide
  Sense strand starting at position 3097 of SEQ ID NO: 1882680
ccuggaaauucuccgcaga

SEQ ID NO: 2139819 - RNA, 19 nt, Artificial Sequence
  Description of Artificial Sequence: Synthetic oligonucleotide
  Antisense strand to SEQ ID NO: 2139818
ucugcggagaauuuccagg

SEQ ID NO: 2139820 - RNA, 19 nt, Artificial Sequence
  Description of Artificial Sequence: Synthetic oligonucleotide
  Sense strand starting at position 3098 of SEQ ID NO: 1882680
cuggaaauucuccgcagag

SEQ ID NO: 2139821 - RNA, 19 nt, Artificial Sequence
  Description of Artificial Sequence: Synthetic oligonucleotide
  Antisense strand to SEQ ID NO: 2139820
cucugcggagaauuuccag

SEQ ID NO: 2139822 - RNA, 19 nt, Artificial Sequence
  Description of Artificial Sequence: Synthetic oligonucleotide
  Sense strand starting at position 3100 of SEQ ID NO: 1882680
ggaaauucuccgcagagca

SEQ ID NO: 2139823 - RNA, 19 nt, Artificial Sequence
  Description of Artificial Sequence: Synthetic oligonucleotide
  Antisense strand to SEQ ID NO: 2139822
ugcucugcggagaauuucc

SEQ ID NO: 2139824 - RNA, 19 nt, Artificial Sequence
  Description of Artificial Sequence: Synthetic oligonucleotide
  Sense strand starting at position 3385 of SEQ ID NO: 1882680
gaaggauucuguguugagg

SEQ ID NO: 2139825 - RNA, 19 nt, Artificial Sequence
  Description of Artificial Sequence: Synthetic oligonucleotide
  Antisense strand to SEQ ID NO: 2139824
ccucaacacagaauccuuc

SEQ ID NO: 2139826 - RNA, 19 nt, Artificial Sequence
  Description of Artificial Sequence: Synthetic oligonucleotide
  Sense strand starting at position 3660 of SEQ ID NO: 1882680
ccucgauucugggcuguca

SEQ ID NO: 2139827 - RNA, 19 nt, Artificial Sequence
  Description of Artificial Sequence: Synthetic oligonucleotide
  Antisense strand to SEQ ID NO: 2139826
ugacagcccagaaucgagg

SEQ ID NO: 2139828 - RNA, 19 nt, Artificial Sequence
  Description of Artificial Sequence: Synthetic oligonucleotide
  Sense strand starting at position 3673 of SEQ ID NO: 1882680
cugucaguaccuuggaaca

SEQ ID NO: 2139829 - RNA, 19 nt, Artificial Sequence
  Description of Artificial Sequence: Synthetic oligonucleotide
  Antisense strand to SEQ ID NO: 2139828
uguuccaagguacugacag

SEQ ID NO: 2139830 - RNA, 19 nt, Artificial Sequence
  Description of Artificial Sequence: Synthetic oligonucleotide
  Sense strand starting at position 3773 of SEQ ID NO: 1882680
ugaagcauuuccuccgcua

SEQ ID NO: 2139831 - RNA, 19 nt, Artificial Sequence
  Description of Artificial Sequence: Synthetic oligonucleotide
  Antisense strand to SEQ ID NO: 2139830
uagcggaggaaaugcuuca

SEQ ID NO: 2139832 - RNA, 19 nt, Artificial Sequence
  Description of Artificial Sequence: Synthetic oligonucleotide
  Sense strand starting at position 213 of SEQ ID NO: 1882681
uugagucuucuauaggcga

SEQ ID NO: 2139833 - RNA, 19 nt, Artificial Sequence
  Description of Artificial Sequence: Synthetic oligonucleotide
  Antisense strand to SEQ ID NO: 2139832
ucgccuauagaagacucaa

SEQ ID NO: 2139834 - RNA, 19 nt, Artificial Sequence
  Description of Artificial Sequence: Synthetic oligonucleotide
  Sense strand starting at position 271 of SEQ ID NO: 1882681
aggucccauuuaggauaaa

SEQ ID NO: 2139835 - RNA, 19 nt, Artificial Sequence
  Description of Artificial Sequence: Synthetic oligonucleotide
  Antisense strand to SEQ ID NO: 2139834
uuuauccuaaaugggaccu

SEQ ID NO: 2139836 - RNA, 19 nt, Artificial Sequence
  Description of Artificial Sequence: Synthetic oligonucleotide
  Sense strand starting at position 289 of SEQ ID NO: 1882681
aguaaauucuauucuagag

SEQ ID NO: 2139837 - RNA, 19 nt, Artificial Sequence
  Description of Artificial Sequence: Synthetic oligonucleotide
  Antisense strand to SEQ ID NO: 2139836
cucuagaauagaauuuacu

SEQ ID NO: 2139838 - RNA, 19 nt, Artificial Sequence
  Description of Artificial Sequence: Synthetic oligonucleotide
  Sense strand starting at position 311 of SEQ ID NO: 1882681
cgugaagacccacagcauu

SEQ ID NO: 2139839 - RNA, 19 nt, Artificial Sequence
  Description of Artificial Sequence: Synthetic oligonucleotide
  Antisense strand to SEQ ID NO: 2139838
aaugcugugggucuucacg

SEQ ID NO: 2139840 - RNA, 19 nt, Artificial Sequence
  Description of Artificial Sequence: Synthetic oligonucleotide
  Sense strand starting at position 453 of SEQ ID NO: 1882681
agucaaguggacuguaaau

SEQ ID NO: 2139841 - RNA, 19 nt, Artificial Sequence
  Description of Artificial Sequence: Synthetic oligonucleotide
  Antisense strand to SEQ ID NO: 2139840
auuuacaguccacuugacu

SEQ ID NO: 2139842 - RNA, 19 nt, Artificial Sequence
  Description of Artificial Sequence: Synthetic oligonucleotide
  Sense strand starting at position 476 of SEQ ID NO: 1882681
gacaucaagugugcuauga

SEQ ID NO: 2139843 - RNA, 19 nt, Artificial Sequence
  Description of Artificial Sequence: Synthetic oligonucleotide
  Antisense strand to SEQ ID NO: 2139842
ucauagcacacuugauguc

SEQ ID NO: 2139844 - RNA, 19 nt, Artificial Sequence
  Description of Artificial Sequence: Synthetic oligonucleotide
  Sense strand starting at position 667 of SEQ ID NO: 1882681
gaaugauuauaacucgucu

SEQ ID NO: 2139845 - RNA, 19 nt, Artificial Sequence
  Description of Artificial Sequence: Synthetic oligonucleotide
  Antisense strand to SEQ ID NO: 2139844
agacgaguuauaaucauuc

SEQ ID NO: 2139846 - RNA, 19 nt, Artificial Sequence
  Description of Artificial Sequence: Synthetic oligonucleotide
  Sense strand starting at position 671 of SEQ ID NO: 1882681
gauuauaacucgucuggaa

SEQ ID NO: 2139847 - RNA, 19 nt, Artificial Sequence
  Description of Artificial Sequence: Synthetic oligonucleotide
  Antisense strand to SEQ ID NO: 2139846
uuccagacgaguuauaauc

SEQ ID NO: 2139848 - RNA, 19 nt, Artificial Sequence
  Description of Artificial Sequence: Synthetic oligonucleotide
  Sense strand starting at position 673 of SEQ ID NO: 1882681
uuauaacucgucuggaauc

SEQ ID NO: 2139849 - RNA, 19 nt, Artificial Sequence
  Description of Artificial Sequence: Synthetic oligonucleotide
  Antisense strand to SEQ ID NO: 2139848
gauuccagacgaguuauaa

SEQ ID NO: 2139850 - RNA, 19 nt, Artificial Sequence
  Description of Artificial Sequence: Synthetic oligonucleotide
  Sense strand starting at position 830 of SEQ ID NO: 1882681
guuucuacccaacgaaauu

SEQ ID NO: 2139851 - RNA, 19 nt, Artificial Sequence
  Description of Artificial Sequence: Synthetic oligonucleotide
  Antisense strand to SEQ ID NO: 2139850
aauuucguuggguagaaac

SEQ ID NO: 2139852 - RNA, 19 nt, Artificial Sequence
  Description of Artificial Sequence: Synthetic oligonucleotide
  Sense strand starting at position 926 of SEQ ID NO: 1882681
agagccaauccuugaauau

SEQ ID NO: 2139853 - RNA, 19 nt, Artificial Sequence
  Description of Artificial Sequence: Synthetic oligonucleotide
  Antisense strand to SEQ ID NO: 2139852
auauucaaggauuggcucu

SEQ ID NO: 2139854 - RNA, 19 nt, Artificial Sequence
  Description of Artificial Sequence: Synthetic oligonucleotide
  Sense strand starting at position 1210 of SEQ ID NO: 1882681
uugacagaccauuguaaua

SEQ ID NO: 2139855 - RNA, 19 nt, Artificial Sequence
  Description of Artificial Sequence: Synthetic oligonucleotide
  Antisense strand to SEQ ID NO: 2139854
uauuacaauggucugucaa

SEQ ID NO: 2139856 - RNA, 19 nt, Artificial Sequence
  Description of Artificial Sequence: Synthetic oligonucleotide
  Sense strand starting at position 1322 of SEQ ID NO: 1882681
gguugacucuuauuauuaa

SEQ ID NO: 2139857 - RNA, 19 nt, Artificial Sequence
  Description of Artificial Sequence: Synthetic oligonucleotide
  Antisense strand to SEQ ID NO: 2139856
uuaauaauaagagucaacc

SEQ ID NO: 2139858 - RNA, 19 nt, Artificial Sequence
  Description of Artificial Sequence: Synthetic oligonucleotide
  Sense strand starting at position 1602 of SEQ ID NO: 1882681
uuagcucaggcugauaaua

SEQ ID NO: 2139859 - RNA, 19 nt, Artificial Sequence
  Description of Artificial Sequence: Synthetic oligonucleotide
  Antisense strand to SEQ ID NO: 2139858
uauuaucagccugagcuaa

SEQ ID NO: 2139860 - RNA, 19 nt, Artificial Sequence
  Description of Artificial Sequence: Synthetic oligonucleotide
  Sense strand starting at position 1614 of SEQ ID NO: 1882681
gauaauaccgguggacaca

SEQ ID NO: 2139861 - RNA, 19 nt, Artificial Sequence
  Description of Artificial Sequence: Synthetic oligonucleotide
  Antisense strand to SEQ ID NO: 2139860
uguguccaccgguauuauc

SEQ ID NO: 2139862 - RNA, 19 nt, Artificial Sequence
  Description of Artificial Sequence: Synthetic oligonucleotide
  Sense strand starting at position 1623 of SEQ ID NO: 1882681
gguggacacaugugugaga

SEQ ID NO: 2139863 - RNA, 19 nt, Artificial Sequence
  Description of Artificial Sequence: Synthetic oligonucleotide
  Antisense strand to SEQ ID NO: 2139862
ucucacacauguguccacc

SEQ ID NO: 2139864 - RNA, 19 nt, Artificial Sequence
  Description of Artificial Sequence: Synthetic oligonucleotide
  Sense strand starting at position 1644 of SEQ ID NO: 1882681
gagguuuacucaccaagcu

SEQ ID NO: 2139865 - RNA, 19 nt, Artificial Sequence
  Description of Artificial Sequence: Synthetic oligonucleotide
  Antisense strand to SEQ ID NO: 2139864
agcuuggugaguaaaccuc

SEQ ID NO: 2139866 - RNA, 19 nt, Artificial Sequence
  Description of Artificial Sequence: Synthetic oligonucleotide
  Sense strand starting at position 1666 of SEQ ID NO: 1882681
guaaguccaucuuucccaa

SEQ ID NO: 2139867 - RNA, 19 nt, Artificial Sequence
  Description of Artificial Sequence: Synthetic oligonucleotide
  Antisense strand to SEQ ID NO: 2139866
uugggaaagauggacuuac

SEQ ID NO: 2139868 - RNA, 19 nt, Artificial Sequence
  Description of Artificial Sequence: Synthetic oligonucleotide
  Sense strand starting at position 1745 of SEQ ID NO: 1882681
gaacaaugugcuggaauac

SEQ ID NO: 2139869 - RNA, 19 nt, Artificial Sequence
  Description of Artificial Sequence: Synthetic oligonucleotide
  Antisense strand to SEQ ID NO: 2139868
guauuccagcacauuguuc

SEQ ID NO: 2139870 - RNA, 19 nt, Artificial Sequence
  Description of Artificial Sequence: Synthetic oligonucleotide
  Sense strand starting at position 1765 of SEQ ID NO: 1882681
accagaugguuccugagua

SEQ ID NO: 2139871 - RNA, 19 nt, Artificial Sequence
  Description of Artificial Sequence: Synthetic oligonucleotide
  Antisense strand to SEQ ID NO: 2139870
uacucaggaaccaucuggu

SEQ ID NO: 2139872 - RNA, 19 nt, Artificial Sequence
  Description of Artificial Sequence: Synthetic oligonucleotide
  Sense strand starting at position 1770 of SEQ ID NO: 1882681
augguuccugaguaagcuu

SEQ ID NO: 2139873 - RNA, 19 nt, Artificial Sequence
  Description of Artificial Sequence: Synthetic oligonucleotide
  Antisense strand to SEQ ID NO: 2139872
aagcuuacucaggaaccau

SEQ ID NO: 2139874 - RNA, 19 nt, Artificial Sequence
  Description of Artificial Sequence: Synthetic oligonucleotide
  Sense strand starting at position 1869 of SEQ ID NO: 1882681
gaagaauaagcauguagcu

SEQ ID NO: 2139875 - RNA, 19 nt, Artificial Sequence
  Description of Artificial Sequence: Synthetic oligonucleotide
  Antisense strand to SEQ ID NO: 2139874
agcuacaugcuuauucuuc

SEQ ID NO: 2139876 - RNA, 19 nt, Artificial Sequence
  Description of Artificial Sequence: Synthetic oligonucleotide
  Sense strand starting at position 2039 of SEQ ID NO: 1882681
uuucucuuagaguaucaca

SEQ ID NO: 2139877 - RNA, 19 nt, Artificial Sequence
  Description of Artificial Sequence: Synthetic oligonucleotide
  Antisense strand to SEQ ID NO: 2139876
ugugauacucuaagagaaa

SEQ ID NO: 2139878 - RNA, 19 nt, Artificial Sequence
  Description of Artificial Sequence: Synthetic oligonucleotide
  Sense strand starting at position 2211 of SEQ ID NO: 1882681
uggugaugggcuggagaua

SEQ ID NO: 2139879 - RNA, 19 nt, Artificial Sequence
  Description of Artificial Sequence: Synthetic oligonucleotide
  Antisense strand to SEQ ID NO: 2139878
uaucuccagcccaucacca

SEQ ID NO: 2139880 - RNA, 19 nt, Artificial Sequence
  Description of Artificial Sequence: Synthetic oligonucleotide
  Sense strand starting at position 2272 of SEQ ID NO: 1882681
agugccugggcucaauaau

SEQ ID NO: 2139881 - RNA, 19 nt, Artificial Sequence
  Description of Artificial Sequence: Synthetic oligonucleotide
  Antisense strand to SEQ ID NO: 2139880
auuauugagcccaggcacu

SEQ ID NO: 2139882 - RNA, 19 nt, Artificial Sequence
  Description of Artificial Sequence: Synthetic oligonucleotide
  Sense strand starting at position 2331 of SEQ ID NO: 1882681
guuggauucgugcagaaca

SEQ ID NO: 2139883 - RNA, 19 nt, Artificial Sequence
  Description of Artificial Sequence: Synthetic oligonucleotide
  Antisense strand to SEQ ID NO: 2139882
uguucugcacgaauccaac

SEQ ID NO: 2139884 - RNA, 19 nt, Artificial Sequence
  Description of Artificial Sequence: Synthetic oligonucleotide
  Sense strand starting at position 2333 of SEQ ID NO: 1882681
uggauucgugcagaacauc

SEQ ID NO: 2139885 - RNA, 19 nt, Artificial Sequence
  Description of Artificial Sequence: Synthetic oligonucleotide
  Antisense strand to SEQ ID NO: 2139884
gauguucugcacgaaucca

SEQ ID NO: 2139886 - RNA, 19 nt, Artificial Sequence
  Description of Artificial Sequence: Synthetic oligonucleotide
  Sense strand starting at position 2407 of SEQ ID NO: 1882681
auuugauugugaguuugcu

SEQ ID NO: 2139887 - RNA, 19 nt, Artificial Sequence
  Description of Artificial Sequence: Synthetic oligonucleotide
  Antisense strand to SEQ ID NO: 2139886
agcaaacucacaaucaaau

SEQ ID NO: 2139888 - RNA, 19 nt, Artificial Sequence
  Description of Artificial Sequence: Synthetic oligonucleotide
  Sense strand starting at position 2715 of SEQ ID NO: 1882681
cugagagcuccgcaaauaa

SEQ ID NO: 2139889 - RNA, 19 nt, Artificial Sequence
  Description of Artificial Sequence: Synthetic oligonucleotide
  Antisense strand to SEQ ID NO: 2139888
uuauuugcggagcucucag

SEQ ID NO: 2139890 - RNA, 19 nt, Artificial Sequence
  Description of Artificial Sequence: Synthetic oligonucleotide
  Sense strand starting at position 2813 of SEQ ID NO: 1882681
ggcggcuuguggaagauuu

SEQ ID NO: 2139891 - RNA, 19 nt, Artificial Sequence
  Description of Artificial Sequence: Synthetic oligonucleotide
  Antisense strand to SEQ ID NO: 2139890
aaaucuuccacaagccgcc

SEQ ID NO: 2139892 - RNA, 19 nt, Artificial Sequence
  Description of Artificial Sequence: Synthetic oligonucleotide
  Sense strand starting at position 2974 of SEQ ID NO: 1882681
guugcaugacuagaauuaa

SEQ ID NO: 2139893 - RNA, 19 nt, Artificial Sequence
  Description of Artificial Sequence: Synthetic oligonucleotide
  Antisense strand to SEQ ID NO: 2139892
uuaauucuagucaugcaac

SEQ ID NO: 2139894 - RNA, 19 nt, Artificial Sequence
  Description of Artificial Sequence: Synthetic oligonucleotide
  Sense strand starting at position 3128 of SEQ ID NO: 1882681
cccucaguuccacagagau

SEQ ID NO: 2139895 - RNA, 19 nt, Artificial Sequence
  Description of Artificial Sequence: Synthetic oligonucleotide
  Antisense strand to SEQ ID NO: 2139894
aucucuguggaacugaggg

SEQ ID NO: 2139896 - RNA, 19 nt, Artificial Sequence
  Description of Artificial Sequence: Synthetic oligonucleotide
  Sense strand starting at position 3159 of SEQ ID NO: 1882681
guaagugucacagaaggca

SEQ ID NO: 2139897 - RNA, 19 nt, Artificial Sequence
  Description of Artificial Sequence: Synthetic oligonucleotide
  Antisense strand to SEQ ID NO: 2139896
ugccuucugugacacuuac

SEQ ID NO: 2139898 - RNA, 19 nt, Artificial Sequence
  Description of Artificial Sequence: Synthetic oligonucleotide
  Sense strand starting at position 3231 of SEQ ID NO: 1882681
cugccuuggcaucauaaca

SEQ ID NO: 2139899 - RNA, 19 nt, Artificial Sequence
  Description of Artificial Sequence: Synthetic oligonucleotide
  Antisense strand to SEQ ID NO: 2139898
uguuaugaugccaaggcag

SEQ ID NO: 2139900 - RNA, 19 nt, Artificial Sequence
  Description of Artificial Sequence: Synthetic oligonucleotide
  Sense strand starting at position 3257 of SEQ ID NO: 1882681
ggagaaccuucucuuccuu

SEQ ID NO: 2139901 - RNA, 19 nt, Artificial Sequence
  Description of Artificial Sequence: Synthetic oligonucleotide
  Antisense strand to SEQ ID NO: 2139900
aaggaagagaagguucucc

SEQ ID NO: 2139902 - RNA, 19 nt, Artificial Sequence
  Description of Artificial Sequence: Synthetic oligonucleotide
  Sense strand starting at position 3272 of SEQ ID NO: 1882681
ccuuaaaggucucugcaag

SEQ ID NO: 2139903 - RNA, 19 nt, Artificial Sequence
  Description of Artificial Sequence: Synthetic oligonucleotide
  Antisense strand to SEQ ID NO: 2139902
cuugcagagaccuuuaagg

SEQ ID NO: 2139904 - RNA, 19 nt, Artificial Sequence
  Description of Artificial Sequence: Synthetic oligonucleotide
  Sense strand starting at position 3305 of SEQ ID NO: 1882681
cccguaaugacccagauga

SEQ ID NO: 2139905 - RNA, 19 nt, Artificial Sequence
  Description of Artificial Sequence: Synthetic oligonucleotide
  Antisense strand to SEQ ID NO: 2139904
ucaucugggucauuacggg

SEQ ID NO: 2139906 - RNA, 19 nt, Artificial Sequence
  Description of Artificial Sequence: Synthetic oligonucleotide
  Sense strand starting at position 3347 of SEQ ID NO: 1882681
gcucuuuguguguuucuga

SEQ ID NO: 2139907 - RNA, 19 nt, Artificial Sequence
  Description of Artificial Sequence: Synthetic oligonucleotide
  Antisense strand to SEQ ID NO: 2139906
ucagaaacacacaaagagc

SEQ ID NO: 2139908 - RNA, 19 nt, Artificial Sequence
  Description of Artificial Sequence: Synthetic oligonucleotide
  Sense strand starting at position 3447 of SEQ ID NO: 1882681
cuaaaugaagcucaguaua

SEQ ID NO: 2139909 - RNA, 19 nt, Artificial Sequence
  Description of Artificial Sequence: Synthetic oligonucleotide
  Antisense strand to SEQ ID NO: 2139908
uauacugagcuucauuuag

SEQ ID NO: 2139910 - RNA, 19 nt, Artificial Sequence
  Description of Artificial Sequence: Synthetic oligonucleotide
  Sense strand starting at position 3864 of SEQ ID NO: 1882681
ccacuaaguguaggaagaa

SEQ ID NO: 2139911 - RNA, 19 nt, Artificial Sequence
  Description of Artificial Sequence: Synthetic oligonucleotide
  Antisense strand to SEQ ID NO: 2139910
uucuuccuacacuuagugg

SEQ ID NO: 2139912 - RNA, 19 nt, Artificial Sequence
  Description of Artificial Sequence: Synthetic oligonucleotide
  Sense strand starting at position 113 of SEQ ID NO: 1882682
uauuguacauucguggaau

SEQ ID NO: 2139913 - RNA, 19 nt, Artificial Sequence
  Description of Artificial Sequence: Synthetic oligonucleotide
  Antisense strand to SEQ ID NO: 2139912
auuccacgaauguacaaua

SEQ ID NO: 2139914 - RNA, 19 nt, Artificial Sequence
  Description of Artificial Sequence: Synthetic oligonucleotide
  Sense strand starting at position 115 of SEQ ID NO: 1882682
uuguacauucguggaauca

SEQ ID NO: 2139915 - RNA, 19 nt, Artificial Sequence
  Description of Artificial Sequence: Synthetic oligonucleotide
  Antisense strand to SEQ ID NO: 2139914
ugauuccacgaauguacaa

SEQ ID NO: 2139916 - RNA, 19 nt, Artificial Sequence
  Description of Artificial Sequence: Synthetic oligonucleotide
  Sense strand starting at position 116 of SEQ ID NO: 1882682
uguacauucguggaaucag

SEQ ID NO: 2139917 - RNA, 19 nt, Artificial Sequence
  Description of Artificial Sequence: Synthetic oligonucleotide
  Antisense strand to SEQ ID NO: 2139916
cugauuccacgaauguaca

SEQ ID NO: 2139918 - RNA, 19 nt, Artificial Sequence
  Description of Artificial Sequence: Synthetic oligonucleotide
  Sense strand starting at position 124 of SEQ ID NO: 1882682
cguggaaucaguuguauuu

SEQ ID NO: 2139919 - RNA, 19 nt, Artificial Sequence
  Description of Artificial Sequence: Synthetic oligonucleotide
  Antisense strand to SEQ ID NO: 2139918
aaauacaacugauuccacg

SEQ ID NO: 2139920 - RNA, 19 nt, Artificial Sequence
  Description of Artificial Sequence: Synthetic oligonucleotide
  Sense strand starting at position 126 of SEQ ID NO: 1882682
uggaaucaguuguauuuac

SEQ ID NO: 2139921 - RNA, 19 nt, Artificial Sequence
  Description of Artificial Sequence: Synthetic oligonucleotide
  Antisense strand to SEQ ID NO: 2139920
guaaauacaacugauucca

SEQ ID NO: 2139922 - RNA, 19 nt, Artificial Sequence
  Description of Artificial Sequence: Synthetic oligonucleotide
  Sense strand starting at position 209 of SEQ ID NO: 1882682
uuucuuuauucugugauca

SEQ ID NO: 2139923 - RNA, 19 nt, Artificial Sequence
  Description of Artificial Sequence: Synthetic oligonucleotide
  Antisense strand to SEQ ID NO: 2139922
ugaucacagaauaaagaaa

SEQ ID NO: 2139924 - RNA, 19 nt, Artificial Sequence
  Description of Artificial Sequence: Synthetic oligonucleotide
  Sense strand starting at position 210 of SEQ ID NO: 1882682
uucuuuauucugugaucau

SEQ ID NO: 2139925 - RNA, 19 nt, Artificial Sequence
  Description of Artificial Sequence: Synthetic oligonucleotide
  Antisense strand to SEQ ID NO: 2139924
augaucacagaauaaagaa

SEQ ID NO: 2139926 - RNA, 19 nt, Artificial Sequence
  Description of Artificial Sequence: Synthetic oligonucleotide
  Sense strand starting at position 251 of SEQ ID NO: 1882682
aguaaagucuaagucagga

SEQ ID NO: 2139927 - RNA, 19 nt, Artificial Sequence
  Description of Artificial Sequence: Synthetic oligonucleotide
  Antisense strand to SEQ ID NO: 2139926
uccugacuuagacuuuacu

SEQ ID NO: 2139928 - RNA, 19 nt, Artificial Sequence
  Description of Artificial Sequence: Synthetic oligonucleotide
  Sense strand starting at position 256 of SEQ ID NO: 1882682
agucuaagucaggagcauu

SEQ ID NO: 2139929 - RNA, 19 nt, Artificial Sequence
  Description of Artificial Sequence: Synthetic oligonucleotide
  Antisense strand to SEQ ID NO: 2139928
aaugcuccugacuuagacu

SEQ ID NO: 2139930 - RNA, 19 nt, Artificial Sequence
  Description of Artificial Sequence: Synthetic oligonucleotide
  Sense strand starting at position 368 of SEQ ID NO: 1882682
ggucucuucgucuagagac

SEQ ID NO: 2139931 - RNA, 19 nt, Artificial Sequence
  Description of Artificial Sequence: Synthetic oligonucleotide
  Antisense strand to SEQ ID NO: 2139930
gucucuagacgaagagacc

SEQ ID NO: 2139932 - RNA, 19 nt, Artificial Sequence
  Description of Artificial Sequence: Synthetic oligonucleotide
  Sense strand starting at position 378 of SEQ ID NO: 1882682
ucuagagacugaucgucau

SEQ ID NO: 2139933 - RNA, 19 nt, Artificial Sequence
  Description of Artificial Sequence: Synthetic oligonucleotide
  Antisense strand to SEQ ID NO: 2139932
augacgaucagucucuaga

SEQ ID NO: 2139934 - RNA, 19 nt, Artificial Sequence
  Description of Artificial Sequence: Synthetic oligonucleotide
  Sense strand starting at position 381 of SEQ ID NO: 1882682
agagacugaucgucaugga

SEQ ID NO: 2139935 - RNA, 19 nt, Artificial Sequence
  Description of Artificial Sequence: Synthetic oligonucleotide
  Antisense strand to SEQ ID NO: 2139934
uccaugacgaucagucucu

SEQ ID NO: 2139936 - RNA, 19 nt, Artificial Sequence
  Description of Artificial Sequence: Synthetic oligonucleotide
  Sense strand starting at position 488 of SEQ ID NO: 1882682
uucuguucugcucaucuua

SEQ ID NO: 2139937 - RNA, 19 nt, Artificial Sequence
  Description of Artificial Sequence: Synthetic oligonucleotide
  Antisense strand to SEQ ID NO: 2139936
uaagaugagcagaacagaa

SEQ ID NO: 2139938 - RNA, 19 nt, Artificial Sequence
  Description of Artificial Sequence: Synthetic oligonucleotide
  Sense strand starting at position 525 of SEQ ID NO: 1882682
gggccauucccaugaggga

SEQ ID NO: 2139939 - RNA, 19 nt, Artificial Sequence
  Description of Artificial Sequence: Synthetic oligonucleotide
  Antisense strand to SEQ ID NO: 2139938
ucccucaugggaauggccc

SEQ ID NO: 2139940 - RNA, 19 nt, Artificial Sequence
  Description of Artificial Sequence: Synthetic oligonucleotide
  Sense strand starting at position 711 of SEQ ID NO: 1882682
ccuucugugcuuugaauuu

SEQ ID NO: 2139941 - RNA, 19 nt, Artificial Sequence
  Description of Artificial Sequence: Synthetic oligonucleotide
  Antisense strand to SEQ ID NO: 2139940
aaauucaaagcacagaagg

SEQ ID NO: 2139942 - RNA, 19 nt, Artificial Sequence
  Description of Artificial Sequence: Synthetic oligonucleotide
  Sense strand starting at position 807 of SEQ ID NO: 1882682
gcugucuucucaccagaau

SEQ ID NO: 2139943 - RNA, 19 nt, Artificial Sequence
  Description of Artificial Sequence: Synthetic oligonucleotide
  Antisense strand to SEQ ID NO: 2139942
auucuggugagaagacagc

SEQ ID NO: 2139944 - RNA, 19 nt, Artificial Sequence
  Description of Artificial Sequence: Synthetic oligonucleotide
  Sense strand starting at position 912 of SEQ ID NO: 1882682
uucugaagucauugccuca

SEQ ID NO: 2139945 - RNA, 19 nt, Artificial Sequence
  Description of Artificial Sequence: Synthetic oligonucleotide
  Antisense strand to SEQ ID NO: 2139944
ugaggcaaugacuucagaa

SEQ ID NO: 2139946 - RNA, 19 nt, Artificial Sequence
  Description of Artificial Sequence: Synthetic oligonucleotide
  Sense strand starting at position 915 of SEQ ID NO: 1882682
ugaagucauugccucaguu

SEQ ID NO: 2139947 - RNA, 19 nt, Artificial Sequence
  Description of Artificial Sequence: Synthetic oligonucleotide
  Antisense strand to SEQ ID NO: 2139946
aacugaggcaaugacuuca

SEQ ID NO: 2139948 - RNA, 19 nt, Artificial Sequence
  Description of Artificial Sequence: Synthetic oligonucleotide
  Sense strand starting at position 979 of SEQ ID NO: 1882682
ugcccacaccgagaauaua

SEQ ID NO: 2139949 - RNA, 19 nt, Artificial Sequence
  Description of Artificial Sequence: Synthetic oligonucleotide
  Antisense strand to SEQ ID NO: 2139948
uauauucucggugugggca

SEQ ID NO: 2139950 - RNA, 19 nt, Artificial Sequence
  Description of Artificial Sequence: Synthetic oligonucleotide
  Sense strand starting at position 1312 of SEQ ID NO: 1882682
auugaauauacguggaaga

SEQ ID NO: 2139951 - RNA, 19 nt, Artificial Sequence
  Description of Artificial Sequence: Synthetic oligonucleotide
  Antisense strand to SEQ ID NO: 2139950
ucuuccacguauauucaau

SEQ ID NO: 2139952 - RNA, 19 nt, Artificial Sequence
  Description of Artificial Sequence: Synthetic oligonucleotide
  Sense strand starting at position 1313 of SEQ ID NO: 1882682
uugaauauacguggaagaa

SEQ ID NO: 2139953 - RNA, 19 nt, Artificial Sequence
  Description of Artificial Sequence: Synthetic oligonucleotide
  Antisense strand to SEQ ID NO: 2139952
uucuuccacguauauucaa

SEQ ID NO: 2139954 - RNA, 19 nt, Artificial Sequence
  Description of Artificial Sequence: Synthetic oligonucleotide
  Sense strand starting at position 1515 of SEQ ID NO: 1882682
ugagaggagucguugaguu

SEQ ID NO: 2139955 - RNA, 19 nt, Artificial Sequence
  Description of Artificial Sequence: Synthetic oligonucleotide
  Antisense strand to SEQ ID NO: 2139954
aacucaacgacuccucuca

SEQ ID NO: 2139956 - RNA, 19 nt, Artificial Sequence
  Description of Artificial Sequence: Synthetic oligonucleotide
  Sense strand starting at position 1517 of SEQ ID NO: 1882682
agaggagucguugaguugu

SEQ ID NO: 2139957 - RNA, 19 nt, Artificial Sequence
  Description of Artificial Sequence: Synthetic oligonucleotide
  Antisense strand to SEQ ID NO: 2139956
acaacucaacgacuccucu

SEQ ID NO: 2139958 - RNA, 19 nt, Artificial Sequence
  Description of Artificial Sequence: Synthetic oligonucleotide
  Sense strand starting at position 1556 of SEQ ID NO: 1882682
gaagucacauuguucugaa

SEQ ID NO: 2139959 - RNA, 19 nt, Artificial Sequence
  Description of Artificial Sequence: Synthetic oligonucleotide
  Antisense strand to SEQ ID NO: 2139958
uucagaacaaugugacuuc

SEQ ID NO: 2139960 - RNA, 19 nt, Artificial Sequence
  Description of Artificial Sequence: Synthetic oligonucleotide
  Sense strand starting at position 2130 of SEQ ID NO: 1882682
uguggauggucugcagacu

SEQ ID NO: 2139961 - RNA, 19 nt, Artificial Sequence
  Description of Artificial Sequence: Synthetic oligonucleotide
  Antisense strand to SEQ ID NO: 2139960
agucugcagaccauccaca

SEQ ID NO: 2139962 - RNA, 19 nt, Artificial Sequence
  Description of Artificial Sequence: Synthetic oligonucleotide
  Sense strand starting at position 2219 of SEQ ID NO: 1882682
gcucuaacuccaggaguga

SEQ ID NO: 2139963 - RNA, 19 nt, Artificial Sequence
  Description of Artificial Sequence: Synthetic oligonucleotide
  Antisense strand to SEQ ID NO: 2139962
ucacuccuggaguuagagc

SEQ ID NO: 2139964 - RNA, 19 nt, Artificial Sequence
  Description of Artificial Sequence: Synthetic oligonucleotide
  Sense strand starting at position 2273 of SEQ ID NO: 1882682
aggagagaucucuggcuuc

SEQ ID NO: 2139965 - RNA, 19 nt, Artificial Sequence
  Description of Artificial Sequence: Synthetic oligonucleotide
  Antisense strand to SEQ ID NO: 2139964
gaagccagagaucucuccu

SEQ ID NO: 2139966 - RNA, 19 nt, Artificial Sequence
  Description of Artificial Sequence: Synthetic oligonucleotide
  Sense strand starting at position 2635 of SEQ ID NO: 1882682
ggacucaguuuguucugua

SEQ ID NO: 2139967 - RNA, 19 nt, Artificial Sequence
  Description of Artificial Sequence: Synthetic oligonucleotide
  Antisense strand to SEQ ID NO: 2139966
uacagaacaaacugagucc

SEQ ID NO: 2139968 - RNA, 19 nt, Artificial Sequence
  Description of Artificial Sequence: Synthetic oligonucleotide
  Sense strand starting at position 2673 of SEQ ID NO: 1882682
ucaucucuuguguagacga

SEQ ID NO: 2139969 - RNA, 19 nt, Artificial Sequence
  Description of Artificial Sequence: Synthetic oligonucleotide
  Antisense strand to SEQ ID NO: 2139968
ucgucuacacaagagauga

SEQ ID NO: 2139970 - RNA, 19 nt, Artificial Sequence
  Description of Artificial Sequence: Synthetic oligonucleotide
  Sense strand starting at position 2786 of SEQ ID NO: 1882682
agcucuucucaugagacau

SEQ ID NO: 2139971 - RNA, 19 nt, Artificial Sequence
  Description of Artificial Sequence: Synthetic oligonucleotide
  Antisense strand to SEQ ID NO: 2139970
augucucaugagaagagcu

SEQ ID NO: 2139972 - RNA, 19 nt, Artificial Sequence
  Description of Artificial Sequence: Synthetic oligonucleotide
  Sense strand starting at position 2829 of SEQ ID NO: 1882682
cucuucuuccagcaggaua

SEQ ID NO: 2139973 - RNA, 19 nt, Artificial Sequence
  Description of Artificial Sequence: Synthetic oligonucleotide
  Antisense strand to SEQ ID NO: 2139972
uauccugcuggaagaagag

SEQ ID NO: 2139974 - RNA, 19 nt, Artificial Sequence
  Description of Artificial Sequence: Synthetic oligonucleotide
  Sense strand starting at position 2921 of SEQ ID NO: 1882682
cuaaccuaucguuagucau

SEQ ID NO: 2139975 - RNA, 19 nt, Artificial Sequence
  Description of Artificial Sequence: Synthetic oligonucleotide
  Antisense strand to SEQ ID NO: 2139974
augacuaacgauagguuag

SEQ ID NO: 2139976 - RNA, 19 nt, Artificial Sequence
  Description of Artificial Sequence: Synthetic oligonucleotide
  Sense strand starting at position 2924 of SEQ ID NO: 1882682
accuaucguuagucauacu

SEQ ID NO: 2139977 - RNA, 19 nt, Artificial Sequence
  Description of Artificial Sequence: Synthetic oligonucleotide
  Antisense strand to SEQ ID NO: 2139976
aguaugacuaacgauaggu

SEQ ID NO: 2139978 - RNA, 19 nt, Artificial Sequence
  Description of Artificial Sequence: Synthetic oligonucleotide
  Sense strand starting at position 2967 of SEQ ID NO: 1882682
cccaguaucugucccugau

SEQ ID NO: 2139979 - RNA, 19 nt, Artificial Sequence
  Description of Artificial Sequence: Synthetic oligonucleotide
  Antisense strand to SEQ ID NO: 2139978
aucagggacagauacuggg

SEQ ID NO: 2139980 - RNA, 19 nt, Artificial Sequence
  Description of Artificial Sequence: Synthetic oligonucleotide
  Sense strand starting at position 2971 of SEQ ID NO: 1882682
guaucugucccugauugug

SEQ ID NO: 2139981 - RNA, 19 nt, Artificial Sequence
  Description of Artificial Sequence: Synthetic oligonucleotide
  Antisense strand to SEQ ID NO: 2139980
cacaaucagggacagauac

SEQ ID NO: 2139982 - RNA, 19 nt, Artificial Sequence
  Description of Artificial Sequence: Synthetic oligonucleotide
  Sense strand starting at position 2979 of SEQ ID NO: 1882682
cccugauuguguucccuca

SEQ ID NO: 2139983 - RNA, 19 nt, Artificial Sequence
  Description of Artificial Sequence: Synthetic oligonucleotide
  Antisense strand to SEQ ID NO: 2139982
ugagggaacacaaucaggg

SEQ ID NO: 2139984 - RNA, 19 nt, Artificial Sequence
  Description of Artificial Sequence: Synthetic oligonucleotide
  Sense strand starting at position 3243 of SEQ ID NO: 1882682
gaggcaaugcugcagaauu

SEQ ID NO: 2139985 - RNA, 19 nt, Artificial Sequence
  Description of Artificial Sequence: Synthetic oligonucleotide
  Antisense strand to SEQ ID NO: 2139984
aauucugcagcauugccuc

SEQ ID NO: 2139986 - RNA, 19 nt, Artificial Sequence
  Description of Artificial Sequence: Synthetic oligonucleotide
  Sense strand starting at position 3533 of SEQ ID NO: 1882682
ggacucaguuuggcauuga

SEQ ID NO: 2139987 - RNA, 19 nt, Artificial Sequence
  Description of Artificial Sequence: Synthetic oligonucleotide
  Antisense strand to SEQ ID NO: 2139986
ucaaugccaaacugagucc

SEQ ID NO: 2139988 - RNA, 19 nt, Artificial Sequence
  Description of Artificial Sequence: Synthetic oligonucleotide
  Sense strand starting at position 3579 of SEQ ID NO: 1882682
aagagugauucuucuagug

SEQ ID NO: 2139989 - RNA, 19 nt, Artificial Sequence
  Description of Artificial Sequence: Synthetic oligonucleotide
  Antisense strand to SEQ ID NO: 2139988
cacuagaagaaucacucuu

SEQ ID NO: 2139990 - RNA, 19 nt, Artificial Sequence
  Description of Artificial Sequence: Synthetic oligonucleotide
  Sense strand starting at position 3907 of SEQ ID NO: 1882682
uggcucaauguuggaaauu

SEQ ID NO: 2139991 - RNA, 19 nt, Artificial Sequence
  Description of Artificial Sequence: Synthetic oligonucleotide
  Antisense strand to SEQ ID NO: 2139990
aauuuccaacauugagcca

SEQ ID NO: 2139992 - RNA, 19 nt, Artificial Sequence
  Description of Artificial Sequence: Synthetic oligonucleotide
  Sense strand starting at position 445 of SEQ ID NO: 1882683
ccagcucucccugaagacu

SEQ ID NO: 2139993 - RNA, 19 nt, Artificial Sequence
  Description of Artificial Sequence: Synthetic oligonucleotide
  Antisense strand to SEQ ID NO: 2139992
agucuucagggagagcugg

SEQ ID NO: 2139994 - RNA, 19 nt, Artificial Sequence
  Description of Artificial Sequence: Synthetic oligonucleotide
  Sense strand starting at position 540 of SEQ ID NO: 1882683
uugcauuguggucaucuaa

SEQ ID NO: 2139995 - RNA, 19 nt, Artificial Sequence
  Description of Artificial Sequence: Synthetic oligonucleotide
  Antisense strand to SEQ ID NO: 2139994
uuagaugaccacaaugcaa

SEQ ID NO: 2139996 - RNA, 19 nt, Artificial Sequence
  Description of Artificial Sequence: Synthetic oligonucleotide
  Sense strand starting at position 652 of SEQ ID NO: 1882683
ggaauauaggaguguaauu

SEQ ID NO: 2139997 - RNA, 19 nt, Artificial Sequence
  Description of Artificial Sequence: Synthetic oligonucleotide
  Antisense strand to SEQ ID NO: 2139996
aauuacacuccuauauucc

SEQ ID NO: 2139998 - RNA, 19 nt, Artificial Sequence
  Description of Artificial Sequence: Synthetic oligonucleotide
  Sense strand starting at position 702 of SEQ ID NO: 1882683
gaucaagauuggguugagu

SEQ ID NO: 2139999 - RNA, 19 nt, Artificial Sequence
  Description of Artificial Sequence: Synthetic oligonucleotide
  Antisense strand to SEQ ID NO: 2139998
acucaacccaaucuugauc

SEQ ID NO: 2140000 - RNA, 19 nt, Artificial Sequence
  Description of Artificial Sequence: Synthetic oligonucleotide
  Sense strand starting at position 704 of SEQ ID NO: 1882683
ucaagauuggguugaguuu

SEQ ID NO: 2140001 - RNA, 19 nt, Artificial Sequence
  Description of Artificial Sequence: Synthetic oligonucleotide
  Antisense strand to SEQ ID NO: 2140000
aaacucaacccaaucuuga

SEQ ID NO: 2140002 - RNA, 19 nt, Artificial Sequence
  Description of Artificial Sequence: Synthetic oligonucleotide
  Sense strand starting at position 705 of SEQ ID NO: 1882683
caagauuggguugaguuua

SEQ ID NO: 2140003 - RNA, 19 nt, Artificial Sequence
  Description of Artificial Sequence: Synthetic oligonucleotide
  Antisense strand to SEQ ID NO: 2140002
uaaacucaacccaaucuug

SEQ ID NO: 2140004 - RNA, 19 nt, Artificial Sequence
  Description of Artificial Sequence: Synthetic oligonucleotide
  Sense strand starting at position 710 of SEQ ID NO: 1882683
uuggguugaguuuaggauu

SEQ ID NO: 2140005 - RNA, 19 nt, Artificial Sequence
  Description of Artificial Sequence: Synthetic oligonucleotide
  Antisense strand to SEQ ID NO: 2140004
aauccuaaacucaacccaa

SEQ ID NO: 2140006 - RNA, 19 nt, Artificial Sequence
  Description of Artificial Sequence: Synthetic oligonucleotide
  Sense strand starting at position 1252 of SEQ ID NO: 1882683
gcccaucuuuggucuuuaa

SEQ ID NO: 2140007 - RNA, 19 nt, Artificial Sequence
  Description of Artificial Sequence: Synthetic oligonucleotide
  Antisense strand to SEQ ID NO: 2140006
uuaaagaccaaagaugggc

SEQ ID NO: 2140008 - RNA, 19 nt, Artificial Sequence
  Description of Artificial Sequence: Synthetic oligonucleotide
  Sense strand starting at position 1353 of SEQ ID NO: 1882683
ggacccuugccaggaagua

SEQ ID NO: 2140009 - RNA, 19 nt, Artificial Sequence
  Description of Artificial Sequence: Synthetic oligonucleotide
  Antisense strand to SEQ ID NO: 2140008
uacuuccuggcaagggucc

SEQ ID NO: 2140010 - RNA, 19 nt, Artificial Sequence
  Description of Artificial Sequence: Synthetic oligonucleotide
  Sense strand starting at position 1437 of SEQ ID NO: 1882683
aucugagcccuuggaaguu

SEQ ID NO: 2140011 - RNA, 19 nt, Artificial Sequence
  Description of Artificial Sequence: Synthetic oligonucleotide
  Antisense strand to SEQ ID NO: 2140010
aacuuccaagggcucagau

SEQ ID NO: 2140012 - RNA, 19 nt, Artificial Sequence
  Description of Artificial Sequence: Synthetic oligonucleotide
  Sense strand starting at position 1552 of SEQ ID NO: 1882683
guccgagucgaauauucca

SEQ ID NO: 2140013 - RNA, 19 nt, Artificial Sequence
  Description of Artificial Sequence: Synthetic oligonucleotide
  Antisense strand to SEQ ID NO: 2140012
uggaauauucgacucggac

SEQ ID NO: 2140014 - RNA, 19 nt, Artificial Sequence
  Description of Artificial Sequence: Synthetic oligonucleotide
  Sense strand starting at position 1559 of SEQ ID NO: 1882683
ucgaauauuccaugugaaa

SEQ ID NO: 2140015 - RNA, 19 nt, Artificial Sequence
  Description of Artificial Sequence: Synthetic oligonucleotide
  Antisense strand to SEQ ID NO: 2140014
uuucacauggaauauucga

SEQ ID NO: 2140016 - RNA, 19 nt, Artificial Sequence
  Description of Artificial Sequence: Synthetic oligonucleotide
  Sense strand starting at position 1568 of SEQ ID NO: 1882683
ccaugugaaaguuggaaca

SEQ ID NO: 2140017 - RNA, 19 nt, Artificial Sequence
  Description of Artificial Sequence: Synthetic oligonucleotide
  Antisense strand to SEQ ID NO: 2140016
uguuccaacuuucacaugg

SEQ ID NO: 2140018 - RNA, 19 nt, Artificial Sequence
  Description of Artificial Sequence: Synthetic oligonucleotide
  Sense strand starting at position 1872 of SEQ ID NO: 1882683
uugcauugacuuuggucaa

SEQ ID NO: 2140019 - RNA, 19 nt, Artificial Sequence
  Description of Artificial Sequence: Synthetic oligonucleotide
  Antisense strand to SEQ ID NO: 2140018
uugaccaaagucaaugcaa

SEQ ID NO: 2140020 - RNA, 19 nt, Artificial Sequence
  Description of Artificial Sequence: Synthetic oligonucleotide
  Sense strand starting at position 1875 of SEQ ID NO: 1882683
cauugacuuuggucaaaga

SEQ ID NO: 2140021 - RNA, 19 nt, Artificial Sequence
  Description of Artificial Sequence: Synthetic oligonucleotide
  Antisense strand to SEQ ID NO: 2140020
ucuuugaccaaagucaaug

SEQ ID NO: 2140022 - RNA, 19 nt, Artificial Sequence
  Description of Artificial Sequence: Synthetic oligonucleotide
  Sense strand starting at position 2306 of SEQ ID NO: 1882683
ggaagugucuccucaggga

SEQ ID NO: 2140023 - RNA, 19 nt, Artificial Sequence
  Description of Artificial Sequence: Synthetic oligonucleotide
  Antisense strand to SEQ ID NO: 2140022
ucccugaggagacacuucc

SEQ ID NO: 2140024 - RNA, 19 nt, Artificial Sequence
  Description of Artificial Sequence: Synthetic oligonucleotide
  Sense strand starting at position 2413 of SEQ ID NO: 1882683
uggcuccuccagugaauac

SEQ ID NO: 2140025 - RNA, 19 nt, Artificial Sequence
  Description of Artificial Sequence: Synthetic oligonucleotide
  Antisense strand to SEQ ID NO: 2140024
guauucacuggaggagcca

SEQ ID NO: 2140026 - RNA, 19 nt, Artificial Sequence
  Description of Artificial Sequence: Synthetic oligonucleotide
  Sense strand starting at position 2420 of SEQ ID NO: 1882683
uccagugaauacuugggaa

SEQ ID NO: 2140027 - RNA, 19 nt, Artificial Sequence
  Description of Artificial Sequence: Synthetic oligonucleotide
  Antisense strand to SEQ ID NO: 2140026
uucccaaguauucacugga

SEQ ID NO: 2140028 - RNA, 19 nt, Artificial Sequence
  Description of Artificial Sequence: Synthetic oligonucleotide
  Sense strand starting at position 2602 of SEQ ID NO: 1882683
ugaaguugcauugauaggu

SEQ ID NO: 2140029 - RNA, 19 nt, Artificial Sequence
  Description of Artificial Sequence: Synthetic oligonucleotide
  Antisense strand to SEQ ID NO: 2140028
accuaucaaugcaacuuca

SEQ ID NO: 2140030 - RNA, 19 nt, Artificial Sequence
  Description of Artificial Sequence: Synthetic oligonucleotide
  Sense strand starting at position 2642 of SEQ ID NO: 1882683
augaaaguguacucuaaau

SEQ ID NO: 2140031 - RNA, 19 nt, Artificial Sequence
  Description of Artificial Sequence: Synthetic oligonucleotide
  Antisense strand to SEQ ID NO: 2140030
auuuagaguacacuuucau

SEQ ID NO: 2140032 - RNA, 19 nt, Artificial Sequence
  Description of Artificial Sequence: Synthetic oligonucleotide
  Sense strand starting at position 2731 of SEQ ID NO: 1882683
gucuuugacuccuccgaag

SEQ ID NO: 2140033 - RNA, 19 nt, Artificial Sequence
  Description of Artificial Sequence: Synthetic oligonucleotide
  Antisense strand to SEQ ID NO: 2140032
cuucggaggagucaaagac

SEQ ID NO: 2140034 - RNA, 19 nt, Artificial Sequence
  Description of Artificial Sequence: Synthetic oligonucleotide
  Sense strand starting at position 2733 of SEQ ID NO: 1882683
cuuugacuccuccgaaguu

SEQ ID NO: 2140035 - RNA, 19 nt, Artificial Sequence
  Description of Artificial Sequence: Synthetic oligonucleotide
  Antisense strand to SEQ ID NO: 2140034
aacuucggaggagucaaag

SEQ ID NO: 2140036 - RNA, 19 nt, Artificial Sequence
  Description of Artificial Sequence: Synthetic oligonucleotide
  Sense strand starting at position 2767 of SEQ ID NO: 1882683
aaagguuucugagcccuua

SEQ ID NO: 2140037 - RNA, 19 nt, Artificial Sequence
  Description of Artificial Sequence: Synthetic oligonucleotide
  Antisense strand to SEQ ID NO: 2140036
uaagggcucagaaaccuuu

SEQ ID NO: 2140038 - RNA, 19 nt, Artificial Sequence
  Description of Artificial Sequence: Synthetic oligonucleotide
  Sense strand starting at position 2831 of SEQ ID NO: 1882683
auuccagcuguuugaaagu

SEQ ID NO: 2140039 - RNA, 19 nt, Artificial Sequence
  Description of Artificial Sequence: Synthetic oligonucleotide
  Antisense strand to SEQ ID NO: 2140038
acuuucaaacagcuggaau

SEQ ID NO: 2140040 - RNA, 19 nt, Artificial Sequence
  Description of Artificial Sequence: Synthetic oligonucleotide
  Sense strand starting at position 2837 of SEQ ID NO: 1882683
gcuguuugaaagugucaga

SEQ ID NO: 2140041 - RNA, 19 nt, Artificial Sequence
  Description of Artificial Sequence: Synthetic oligonucleotide
  Antisense strand to SEQ ID NO: 2140040
ucugacacuuucaaacagc

SEQ ID NO: 2140042 - RNA, 19 nt, Artificial Sequence
  Description of Artificial Sequence: Synthetic oligonucleotide
  Sense strand starting at position 2888 of SEQ ID NO: 1882683
uccuaagacucagugaaca

SEQ ID NO: 2140043 - RNA, 19 nt, Artificial Sequence
  Description of Artificial Sequence: Synthetic oligonucleotide
  Antisense strand to SEQ ID NO: 2140042
uguucacugagucuuagga

SEQ ID NO: 2140044 - RNA, 19 nt, Artificial Sequence
  Description of Artificial Sequence: Synthetic oligonucleotide
  Sense strand starting at position 2916 of SEQ ID NO: 1882683
gugggucugagagagcaua

SEQ ID NO: 2140045 - RNA, 19 nt, Artificial Sequence
  Description of Artificial Sequence: Synthetic oligonucleotide
  Antisense strand to SEQ ID NO: 2140044
uaugcucucucagacccac

SEQ ID NO: 2140046 - RNA, 19 nt, Artificial Sequence
  Description of Artificial Sequence: Synthetic oligonucleotide
  Sense strand starting at position 3025 of SEQ ID NO: 1882683
gugaccuguggucaccaaa

SEQ ID NO: 2140047 - RNA, 19 nt, Artificial Sequence
  Description of Artificial Sequence: Synthetic oligonucleotide
  Antisense strand to SEQ ID NO: 2140046
uuuggugaccacaggucac

SEQ ID NO: 2140048 - RNA, 19 nt, Artificial Sequence
  Description of Artificial Sequence: Synthetic oligonucleotide
  Sense strand starting at position 3109 of SEQ ID NO: 1882683
cugaguguccucuaaucuu

SEQ ID NO: 2140049 - RNA, 19 nt, Artificial Sequence
  Description of Artificial Sequence: Synthetic oligonucleotide
  Antisense strand to SEQ ID NO: 2140048
aagauuagaggacacucag

SEQ ID NO: 2140050 - RNA, 19 nt, Artificial Sequence
  Description of Artificial Sequence: Synthetic oligonucleotide
  Sense strand starting at position 3215 of SEQ ID NO: 1882683
aguaacauguugucaccua

SEQ ID NO: 2140051 - RNA, 19 nt, Artificial Sequence
  Description of Artificial Sequence: Synthetic oligonucleotide
  Antisense strand to SEQ ID NO: 2140050
uaggugacaacauguuacu

SEQ ID NO: 2140052 - RNA, 19 nt, Artificial Sequence
  Description of Artificial Sequence: Synthetic oligonucleotide
  Sense strand starting at position 3252 of SEQ ID NO: 1882683
uguaaucagguuuaccuga

SEQ ID NO: 2140053 - RNA, 19 nt, Artificial Sequence
  Description of Artificial Sequence: Synthetic oligonucleotide
  Antisense strand to SEQ ID NO: 2140052
ucagguaaaccugauuaca

SEQ ID NO: 2140054 - RNA, 19 nt, Artificial Sequence
  Description of Artificial Sequence: Synthetic oligonucleotide
  Sense strand starting at position 3286 of SEQ ID NO: 1882683
ucaauuaguuugcuaggau

SEQ ID NO: 2140055 - RNA, 19 nt, Artificial Sequence
  Description of Artificial Sequence: Synthetic oligonucleotide
  Antisense strand to SEQ ID NO: 2140054
auccuagcaaacuaauuga

SEQ ID NO: 2140056 - RNA, 19 nt, Artificial Sequence
  Description of Artificial Sequence: Synthetic oligonucleotide
  Sense strand starting at position 3403 of SEQ ID NO: 1882683
gggcaagguauaugugaag

SEQ ID NO: 2140057 - RNA, 19 nt, Artificial Sequence
  Description of Artificial Sequence: Synthetic oligonucleotide
  Antisense strand to SEQ ID NO: 2140056
cuucacauauaccuugccc

SEQ ID NO: 2140058 - RNA, 19 nt, Artificial Sequence
  Description of Artificial Sequence: Synthetic oligonucleotide
  Sense strand starting at position 3510 of SEQ ID NO: 1882683
auuacauaggcgugauuaa

SEQ ID NO: 2140059 - RNA, 19 nt, Artificial Sequence
  Description of Artificial Sequence: Synthetic oligonucleotide
  Antisense strand to SEQ ID NO: 2140058
uuaaucacgccuauguaau

SEQ ID NO: 2140060 - RNA, 19 nt, Artificial Sequence
  Description of Artificial Sequence: Synthetic oligonucleotide
  Sense strand starting at position 3511 of SEQ ID NO: 1882683
uuacauaggcgugauuaau

SEQ ID NO: 2140061 - RNA, 19 nt, Artificial Sequence
  Description of Artificial Sequence: Synthetic oligonucleotide
  Antisense strand to SEQ ID NO: 2140060
auuaaucacgccuauguaa

SEQ ID NO: 2140062 - RNA, 19 nt, Artificial Sequence
  Description of Artificial Sequence: Synthetic oligonucleotide
  Sense strand starting at position 3517 of SEQ ID NO: 1882683
aggcgugauuaauuagauc

SEQ ID NO: 2140063 - RNA, 19 nt, Artificial Sequence
  Description of Artificial Sequence: Synthetic oligonucleotide
  Antisense strand to SEQ ID NO: 2140062
gaucuaauuaaucacgccu

SEQ ID NO: 2140064 - RNA, 19 nt, Artificial Sequence
  Description of Artificial Sequence: Synthetic oligonucleotide
  Sense strand starting at position 3545 of SEQ ID NO: 1882683
ugguuaucagcucaaccuu

SEQ ID NO: 2140065 - RNA, 19 nt, Artificial Sequence
  Description of Artificial Sequence: Synthetic oligonucleotide
  Antisense strand to SEQ ID NO: 2140064
aagguugagcugauaacca

SEQ ID NO: 2140066 - RNA, 19 nt, Artificial Sequence
  Description of Artificial Sequence: Synthetic oligonucleotide
  Sense strand starting at position 3740 of SEQ ID NO: 1882683
gguuguuugccaggaaaug

SEQ ID NO: 2140067 - RNA, 19 nt, Artificial Sequence
  Description of Artificial Sequence: Synthetic oligonucleotide
  Antisense strand to SEQ ID NO: 2140066
cauuuccuggcaaacaacc

SEQ ID NO: 2140068 - RNA, 19 nt, Artificial Sequence
  Description of Artificial Sequence: Synthetic oligonucleotide
  Sense strand starting at position 3741 of SEQ ID NO: 1882683
guuguuugccaggaaaugu

SEQ ID NO: 2140069 - RNA, 19 nt, Artificial Sequence
  Description of Artificial Sequence: Synthetic oligonucleotide
  Antisense strand to SEQ ID NO: 2140068
acauuuccuggcaaacaac

SEQ ID NO: 2140070 - RNA, 19 nt, Artificial Sequence
  Description of Artificial Sequence: Synthetic oligonucleotide
  Sense strand starting at position 3844 of SEQ ID NO: 1882683
gccuaaguuacuggagcau

SEQ ID NO: 2140071 - RNA, 19 nt, Artificial Sequence
  Description of Artificial Sequence: Synthetic oligonucleotide
  Antisense strand to SEQ ID NO: 2140070
augcuccaguaacuuaggc

SEQ ID NO: 2140072 - RNA, 19 nt, Artificial Sequence
  Description of Artificial Sequence: Synthetic oligonucleotide
  Sense strand starting at position 125 of SEQ ID NO: 1882684
ggacauaucucuuccacug

SEQ ID NO: 2140073 - RNA, 19 nt, Artificial Sequence
  Description of Artificial Sequence: Synthetic oligonucleotide
  Antisense strand to SEQ ID NO: 2140072
caguggaagagauaugucc

SEQ ID NO: 2140074 - RNA, 19 nt, Artificial Sequence
  Description of Artificial Sequence: Synthetic oligonucleotide
  Sense strand starting at position 301 of SEQ ID NO: 1882684
ucagaauuagaguggcacu

SEQ ID NO: 2140075 - RNA, 19 nt, Artificial Sequence
  Description of Artificial Sequence: Synthetic oligonucleotide
  Antisense strand to SEQ ID NO: 2140074
agugccacucuaauucuga

SEQ ID NO: 2140076 - RNA, 19 nt, Artificial Sequence
  Description of Artificial Sequence: Synthetic oligonucleotide
  Sense strand starting at position 523 of SEQ ID NO: 1882684
caggguccuuucucugaca

SEQ ID NO: 2140077 - RNA, 19 nt, Artificial Sequence
  Description of Artificial Sequence: Synthetic oligonucleotide
  Antisense strand to SEQ ID NO: 2140076
ugucagagaaaggacccug

SEQ ID NO: 2140078 - RNA, 19 nt, Artificial Sequence
  Description of Artificial Sequence: Synthetic oligonucleotide
  Sense strand starting at position 524 of SEQ ID NO: 1882684
aggguccuuucucugacaa

SEQ ID NO: 2140079 - RNA, 19 nt, Artificial Sequence
  Description of Artificial Sequence: Synthetic oligonucleotide
  Antisense strand to SEQ ID NO: 2140078
uugucagagaaaggacccu

SEQ ID NO: 2140080 - RNA, 19 nt, Artificial Sequence
  Description of Artificial Sequence: Synthetic oligonucleotide
  Sense strand starting at position 525 of SEQ ID NO: 1882684
ggguccuuucucugacaaa

SEQ ID NO: 2140081 - RNA, 19 nt, Artificial Sequence
  Description of Artificial Sequence: Synthetic oligonucleotide
  Antisense strand to SEQ ID NO: 2140080
uuugucagagaaaggaccc

SEQ ID NO: 2140082 - RNA, 19 nt, Artificial Sequence
  Description of Artificial Sequence: Synthetic oligonucleotide
  Sense strand starting at position 923 of SEQ ID NO: 1882684
gugggaagaaaguguuucu

SEQ ID NO: 2140083 - RNA, 19 nt, Artificial Sequence
  Description of Artificial Sequence: Synthetic oligonucleotide
  Antisense strand to SEQ ID NO: 2140082
agaaacacuuucuucccac

SEQ ID NO: 2140084 - RNA, 19 nt, Artificial Sequence
  Description of Artificial Sequence: Synthetic oligonucleotide
  Sense strand starting at position 1081 of SEQ ID NO: 1882684
uggaguguucgugccuacu

SEQ ID NO: 2140085 - RNA, 19 nt, Artificial Sequence
  Description of Artificial Sequence: Synthetic oligonucleotide
  Antisense strand to SEQ ID NO: 2140084
aguaggcacgaacacucca

SEQ ID NO: 2140086 - RNA, 19 nt, Artificial Sequence
  Description of Artificial Sequence: Synthetic oligonucleotide
  Sense strand starting at position 1368 of SEQ ID NO: 1882684
ggaccuggaugcucuagaa

SEQ ID NO: 2140087 - RNA, 19 nt, Artificial Sequence
  Description of Artificial Sequence: Synthetic oligonucleotide
  Antisense strand to SEQ ID NO: 2140086
uucuagagcauccaggucc

SEQ ID NO: 2140088 - RNA, 19 nt, Artificial Sequence
  Description of Artificial Sequence: Synthetic oligonucleotide
  Sense strand starting at position 1543 of SEQ ID NO: 1882684
ggaggucuggcauacacuu

SEQ ID NO: 2140089 - RNA, 19 nt, Artificial Sequence
  Description of Artificial Sequence: Synthetic oligonucleotide
  Antisense strand to SEQ ID NO: 2140088
aaguguaugccagaccucc

SEQ ID NO: 2140090 - RNA, 19 nt, Artificial Sequence
  Description of Artificial Sequence: Synthetic oligonucleotide
  Sense strand starting at position 1550 of SEQ ID NO: 1882684
uggcauacacuuugugaac

SEQ ID NO: 2140091 - RNA, 19 nt, Artificial Sequence
  Description of Artificial Sequence: Synthetic oligonucleotide
  Antisense strand to SEQ ID NO: 2140090
guucacaaaguguaugcca

SEQ ID NO: 2140092 - RNA, 19 nt, Artificial Sequence
  Description of Artificial Sequence: Synthetic oligonucleotide
  Sense strand starting at position 1551 of SEQ ID NO: 1882684
ggcauacacuuugugaaca

SEQ ID NO: 2140093 - RNA, 19 nt, Artificial Sequence
  Description of Artificial Sequence: Synthetic oligonucleotide
  Antisense strand to SEQ ID NO: 2140092
uguucacaaaguguaugcc

SEQ ID NO: 2140094 - RNA, 19 nt, Artificial Sequence
  Description of Artificial Sequence: Synthetic oligonucleotide
  Sense strand starting at position 1599 of SEQ ID NO: 1882684
uuuccuagagcuuacagaa

SEQ ID NO: 2140095 - RNA, 19 nt, Artificial Sequence
  Description of Artificial Sequence: Synthetic oligonucleotide
  Antisense strand to SEQ ID NO: 2140094
uucuguaagcucuaggaaa

SEQ ID NO: 2140096 - RNA, 19 nt, Artificial Sequence
  Description of Artificial Sequence: Synthetic oligonucleotide
  Sense strand starting at position 1617 of SEQ ID NO: 1882684
agaauaacccuauggcuuu

SEQ ID NO: 2140097 - RNA, 19 nt, Artificial Sequence
  Description of Artificial Sequence: Synthetic oligonucleotide
  Antisense strand to SEQ ID NO: 2140096
aaagccauaggguuauucu

SEQ ID NO: 2140098 - RNA, 19 nt, Artificial Sequence
  Description of Artificial Sequence: Synthetic oligonucleotide
  Sense strand starting at position 1840 of SEQ ID NO: 1882684
ugagauuagugcccagaug

SEQ ID NO: 2140099 - RNA, 19 nt, Artificial Sequence
  Description of Artificial Sequence: Synthetic oligonucleotide
  Antisense strand to SEQ ID NO: 2140098
caucugggcacuaaucuca

SEQ ID NO: 2140100 - RNA, 19 nt, Artificial Sequence
  Description of Artificial Sequence: Synthetic oligonucleotide
  Sense strand starting at position 1991 of SEQ ID NO: 1882684
cagcaucuagacugugaga

SEQ ID NO: 2140101 - RNA, 19 nt, Artificial Sequence
  Description of Artificial Sequence: Synthetic oligonucleotide
  Antisense strand to SEQ ID NO: 2140100
ucucacagucuagaugcug

SEQ ID NO: 2140102 - RNA, 19 nt, Artificial Sequence
  Description of Artificial Sequence: Synthetic oligonucleotide
  Sense strand starting at position 1993 of SEQ ID NO: 1882684
gcaucuagacugugagaaa

SEQ ID NO: 2140103 - RNA, 19 nt, Artificial Sequence
  Description of Artificial Sequence: Synthetic oligonucleotide
  Antisense strand to SEQ ID NO: 2140102
uuucucacagucuagaugc

SEQ ID NO: 2140104 - RNA, 19 nt, Artificial Sequence
  Description of Artificial Sequence: Synthetic oligonucleotide
  Sense strand starting at position 2008 of SEQ ID NO: 1882684
gaaagauauuucuauugug

SEQ ID NO: 2140105 - RNA, 19 nt, Artificial Sequence
  Description of Artificial Sequence: Synthetic oligonucleotide
  Antisense strand to SEQ ID NO: 2140104
cacaauagaaauaucuuuc

SEQ ID NO: 2140106 - RNA, 19 nt, Artificial Sequence
  Description of Artificial Sequence: Synthetic oligonucleotide
  Sense strand starting at position 2110 of SEQ ID NO: 1882684
ggaaauagguucucuugua

SEQ ID NO: 2140107 - RNA, 19 nt, Artificial Sequence
  Description of Artificial Sequence: Synthetic oligonucleotide
  Antisense strand to SEQ ID NO: 2140106
uacaagagaaccuauuucc

SEQ ID NO: 2140108 - RNA, 19 nt, Artificial Sequence
  Description of Artificial Sequence: Synthetic oligonucleotide
  Sense strand starting at position 2111 of SEQ ID NO: 1882684
gaaauagguucucuuguac

SEQ ID NO: 2140109 - RNA, 19 nt, Artificial Sequence
  Description of Artificial Sequence: Synthetic oligonucleotide
  Antisense strand to SEQ ID NO: 2140108
guacaagagaaccuauuuc

SEQ ID NO: 2140110 - RNA, 19 nt, Artificial Sequence
  Description of Artificial Sequence: Synthetic oligonucleotide
  Sense strand starting at position 2150 of SEQ ID NO: 1882684
uuggaauauucucuuggga

SEQ ID NO: 2140111 - RNA, 19 nt, Artificial Sequence
  Description of Artificial Sequence: Synthetic oligonucleotide
  Antisense strand to SEQ ID NO: 2140110
ucccaagagaauauuccaa

SEQ ID NO: 2140112 - RNA, 19 nt, Artificial Sequence
  Description of Artificial Sequence: Synthetic oligonucleotide
  Sense strand starting at position 2178 of SEQ ID NO: 1882684
gguaauaucuuuccagcaa

SEQ ID NO: 2140113 - RNA, 19 nt, Artificial Sequence
  Description of Artificial Sequence: Synthetic oligonucleotide
  Antisense strand to SEQ ID NO: 2140112
uugcuggaaagauauuacc

SEQ ID NO: 2140114 - RNA, 19 nt, Artificial Sequence
  Description of Artificial Sequence: Synthetic oligonucleotide
  Sense strand starting at position 2239 of SEQ ID NO: 1882684
uggguuugcacagauguuu

SEQ ID NO: 2140115 - RNA, 19 nt, Artificial Sequence
  Description of Artificial Sequence: Synthetic oligonucleotide
  Antisense strand to SEQ ID NO: 2140114
aaacaucugugcaaaccca

SEQ ID NO: 2140116 - RNA, 19 nt, Artificial Sequence
  Description of Artificial Sequence: Synthetic oligonucleotide
  Sense strand starting at position 2244 of SEQ ID NO: 1882684
uugcacagauguuugaaca

SEQ ID NO: 2140117 - RNA, 19 nt, Artificial Sequence
  Description of Artificial Sequence: Synthetic oligonucleotide
  Antisense strand to SEQ ID NO: 2140116
uguucaaacaucugugcaa

SEQ ID NO: 2140118 - RNA, 19 nt, Artificial Sequence
  Description of Artificial Sequence: Synthetic oligonucleotide
  Sense strand starting at position 2245 of SEQ ID NO: 1882684
ugcacagauguuugaacaa

SEQ ID NO: 2140119 - RNA, 19 nt, Artificial Sequence
  Description of Artificial Sequence: Synthetic oligonucleotide
  Antisense strand to SEQ ID NO: 2140118
uuguucaaacaucugugca

SEQ ID NO: 2140120 - RNA, 19 nt, Artificial Sequence
  Description of Artificial Sequence: Synthetic oligonucleotide
  Sense strand starting at position 2444 of SEQ ID NO: 1882684
cuuuguuaagaaggauaua

SEQ ID NO: 2140121 - RNA, 19 nt, Artificial Sequence
  Description of Artificial Sequence: Synthetic oligonucleotide
  Antisense strand to SEQ ID NO: 2140120
uauauccuucuuaacaaag

SEQ ID NO: 2140122 - RNA, 19 nt, Artificial Sequence
  Description of Artificial Sequence: Synthetic oligonucleotide
  Sense strand starting at position 2729 of SEQ ID NO: 1882684
uucucagaacuauguagua

SEQ ID NO: 2140123 - RNA, 19 nt, Artificial Sequence
  Description of Artificial Sequence: Synthetic oligonucleotide
  Antisense strand to SEQ ID NO: 2140122
uacuacauaguucugagaa

SEQ ID NO: 2140124 - RNA, 19 nt, Artificial Sequence
  Description of Artificial Sequence: Synthetic oligonucleotide
  Sense strand starting at position 2959 of SEQ ID NO: 1882684
cuuuauuucugugaagaaa

SEQ ID NO: 2140125 - RNA, 19 nt, Artificial Sequence
  Description of Artificial Sequence: Synthetic oligonucleotide
  Antisense strand to SEQ ID NO: 2140124
uuucuucacagaaauaaag

SEQ ID NO: 2140126 - RNA, 19 nt, Artificial Sequence
  Description of Artificial Sequence: Synthetic oligonucleotide
  Sense strand starting at position 2982 of SEQ ID NO: 1882684
agagacauguugcccagau

SEQ ID NO: 2140127 - RNA, 19 nt, Artificial Sequence
  Description of Artificial Sequence: Synthetic oligonucleotide
  Antisense strand to SEQ ID NO: 2140126
aucugggcaacaugucucu

SEQ ID NO: 2140128 - RNA, 19 nt, Artificial Sequence
  Description of Artificial Sequence: Synthetic oligonucleotide
  Sense strand starting at position 2983 of SEQ ID NO: 1882684
gagacauguugcccagauu

SEQ ID NO: 2140129 - RNA, 19 nt, Artificial Sequence
  Description of Artificial Sequence: Synthetic oligonucleotide
  Antisense strand to SEQ ID NO: 2140128
aaucugggcaacaugucuc

SEQ ID NO: 2140130 - RNA, 19 nt, Artificial Sequence
  Description of Artificial Sequence: Synthetic oligonucleotide
  Sense strand starting at position 2984 of SEQ ID NO: 1882684
agacauguugcccagauug

SEQ ID NO: 2140131 - RNA, 19 nt, Artificial Sequence
  Description of Artificial Sequence: Synthetic oligonucleotide
  Antisense strand to SEQ ID NO: 2140130
caaucugggcaacaugucu

SEQ ID NO: 2140132 - RNA, 19 nt, Artificial Sequence
  Description of Artificial Sequence: Synthetic oligonucleotide
  Sense strand starting at position 3079 of SEQ ID NO: 1882684
uauauauggccuugggauu

SEQ ID NO: 2140133 - RNA, 19 nt, Artificial Sequence
  Description of Artificial Sequence: Synthetic oligonucleotide
  Antisense strand to SEQ ID NO: 2140132
aaucccaaggccauauaua

SEQ ID NO: 2140134 - RNA, 19 nt, Artificial Sequence
  Description of Artificial Sequence: Synthetic oligonucleotide
  Sense strand starting at position 3085 of SEQ ID NO: 1882684
uggccuugggauuguugaa

SEQ ID NO: 2140135 - RNA, 19 nt, Artificial Sequence
  Description of Artificial Sequence: Synthetic oligonucleotide
  Antisense strand to SEQ ID NO: 2140134
uucaacaaucccaaggcca

SEQ ID NO: 2140136 - RNA, 19 nt, Artificial Sequence
  Description of Artificial Sequence: Synthetic oligonucleotide
  Sense strand starting at position 3378 of SEQ ID NO: 1882684
auggcaaauugcucuuaag

SEQ ID NO: 2140137 - RNA, 19 nt, Artificial Sequence
  Description of Artificial Sequence: Synthetic oligonucleotide
  Antisense strand to SEQ ID NO: 2140136
cuuaagagcaauuugccau

SEQ ID NO: 2140138 - RNA, 19 nt, Artificial Sequence
  Description of Artificial Sequence: Synthetic oligonucleotide
  Sense strand starting at position 3417 of SEQ ID NO: 1882684
ucugaaauguuacuaggau

SEQ ID NO: 2140139 - RNA, 19 nt, Artificial Sequence
  Description of Artificial Sequence: Synthetic oligonucleotide
  Antisense strand to SEQ ID NO: 2140138
auccuaguaacauuucaga

SEQ ID NO: 2140140 - RNA, 19 nt, Artificial Sequence
  Description of Artificial Sequence: Synthetic oligonucleotide
  Sense strand starting at position 3600 of SEQ ID NO: 1882684
ggcuuaauuuggagacgug

SEQ ID NO: 2140141 - RNA, 19 nt, Artificial Sequence
  Description of Artificial Sequence: Synthetic oligonucleotide
  Antisense strand to SEQ ID NO: 2140140
cacgucuccaaauuaagcc

SEQ ID NO: 2140142 - RNA, 19 nt, Artificial Sequence
  Description of Artificial Sequence: Synthetic oligonucleotide
  Sense strand starting at position 3779 of SEQ ID NO: 1882684
uggauucuguaaucuguac

SEQ ID NO: 2140143 - RNA, 19 nt, Artificial Sequence
  Description of Artificial Sequence: Synthetic oligonucleotide
  Antisense strand to SEQ ID NO: 2140142
guacagauuacagaaucca

SEQ ID NO: 2140144 - RNA, 19 nt, Artificial Sequence
  Description of Artificial Sequence: Synthetic oligonucleotide
  Sense strand starting at position 3783 of SEQ ID NO: 1882684
uucuguaaucuguacaaag

SEQ ID NO: 2140145 - RNA, 19 nt, Artificial Sequence
  Description of Artificial Sequence: Synthetic oligonucleotide
  Antisense strand to SEQ ID NO: 2140144
cuuuguacagauuacagaa

SEQ ID NO: 2140146 - RNA, 19 nt, Artificial Sequence
  Description of Artificial Sequence: Synthetic oligonucleotide
  Sense strand starting at position 3831 of SEQ ID NO: 1882684
gcuuacaacuaggcaaaua

SEQ ID NO: 2140147 - RNA, 19 nt, Artificial Sequence
  Description of Artificial Sequence: Synthetic oligonucleotide
  Antisense strand to SEQ ID NO: 2140146
uauuugccuaguuguaagc

SEQ ID NO: 2140148 - RNA, 19 nt, Artificial Sequence
  Description of Artificial Sequence: Synthetic oligonucleotide
  Sense strand starting at position 3943 of SEQ ID NO: 1882684
guaucagcuguccaauaug

SEQ ID NO: 2140149 - RNA, 19 nt, Artificial Sequence
  Description of Artificial Sequence: Synthetic oligonucleotide
  Antisense strand to SEQ ID NO: 2140148
cauauuggacagcugauac

SEQ ID NO: 2140150 - RNA, 19 nt, Artificial Sequence
  Description of Artificial Sequence: Synthetic oligonucleotide
  Sense strand starting at position 3946 of SEQ ID NO: 1882684
ucagcuguccaauauggaa

SEQ ID NO: 2140151 - RNA, 19 nt, Artificial Sequence
  Description of Artificial Sequence: Synthetic oligonucleotide
  Antisense strand to SEQ ID NO: 2140150
uuccauauuggacagcuga

SEQ ID NO: 2140152 - RNA, 19 nt, Artificial Sequence
  Description of Artificial Sequence: Synthetic oligonucleotide
  Sense strand starting at position 67 of SEQ ID NO: 1882685
ugggcacuuuaaucagaaa

SEQ ID NO: 2140153 - RNA, 19 nt, Artificial Sequence
  Description of Artificial Sequence: Synthetic oligonucleotide
  Antisense strand to SEQ ID NO: 2140152
uuucugauuaaagugccca

SEQ ID NO: 2140154 - RNA, 19 nt, Artificial Sequence
  Description of Artificial Sequence: Synthetic oligonucleotide
  Sense strand starting at position 124 of SEQ ID NO: 1882685
acugaaagguaagcucauu

SEQ ID NO: 2140155 - RNA, 19 nt, Artificial Sequence
  Description of Artificial Sequence: Synthetic oligonucleotide
  Antisense strand to SEQ ID NO: 2140154
aaugagcuuaccuuucagu

SEQ ID NO: 2140156 - RNA, 19 nt, Artificial Sequence
  Description of Artificial Sequence: Synthetic oligonucleotide
  Sense strand starting at position 142 of SEQ ID NO: 1882685
uuugaagacugggcuucua

SEQ ID NO: 2140157 - RNA, 19 nt, Artificial Sequence
  Description of Artificial Sequence: Synthetic oligonucleotide
  Antisense strand to SEQ ID NO: 2140156
uagaagcccagucuucaaa

SEQ ID NO: 2140158 - RNA, 19 nt, Artificial Sequence
  Description of Artificial Sequence: Synthetic oligonucleotide
  Sense strand starting at position 191 of SEQ ID NO: 1882685
gcagauaaguaucugcaau

SEQ ID NO: 2140159 - RNA, 19 nt, Artificial Sequence
  Description of Artificial Sequence: Synthetic oligonucleotide
  Antisense strand to SEQ ID NO: 2140158
auugcagauacuuaucugc

SEQ ID NO: 2140160 - RNA, 19 nt, Artificial Sequence
  Description of Artificial Sequence: Synthetic oligonucleotide
  Sense strand starting at position 262 of SEQ ID NO: 1882685
cggagucaaguuuauaaac

SEQ ID NO: 2140161 - RNA, 19 nt, Artificial Sequence
  Description of Artificial Sequence: Synthetic oligonucleotide
  Antisense strand to SEQ ID NO: 2140160
guuuauaaacuugacuccg

SEQ ID NO: 2140162 - RNA, 19 nt, Artificial Sequence
  Description of Artificial Sequence: Synthetic oligonucleotide
  Sense strand starting at position 302 of SEQ ID NO: 1882685
ucacauuggugaccaugua

SEQ ID NO: 2140163 - RNA, 19 nt, Artificial Sequence
  Description of Artificial Sequence: Synthetic oligonucleotide
  Antisense strand to SEQ ID NO: 2140162
uacauggucaccaauguga

SEQ ID NO: 2140164 - RNA, 19 nt, Artificial Sequence
  Description of Artificial Sequence: Synthetic oligonucleotide
  Sense strand starting at position 303 of SEQ ID NO: 1882685
cacauuggugaccauguaa

SEQ ID NO: 2140165 - RNA, 19 nt, Artificial Sequence
  Description of Artificial Sequence: Synthetic oligonucleotide
  Antisense strand to SEQ ID NO: 2140164
uuacauggucaccaaugug

SEQ ID NO: 2140166 - RNA, 19 nt, Artificial Sequence
  Description of Artificial Sequence: Synthetic oligonucleotide
  Sense strand starting at position 406 of SEQ ID NO: 1882685
gagauuuccucaggaucug

SEQ ID NO: 2140167 - RNA, 19 nt, Artificial Sequence
  Description of Artificial Sequence: Synthetic oligonucleotide
  Antisense strand to SEQ ID NO: 2140166
cagauccugaggaaaucuc

SEQ ID NO: 2140168 - RNA, 19 nt, Artificial Sequence
  Description of Artificial Sequence: Synthetic oligonucleotide
  Sense strand starting at position 506 of SEQ ID NO: 1882685
cuaauuacccuccgacagu

SEQ ID NO: 2140169 - RNA, 19 nt, Artificial Sequence
  Description of Artificial Sequence: Synthetic oligonucleotide
  Antisense strand to SEQ ID NO: 2140168
acugucggaggguaauuag

SEQ ID NO: 2140170 - RNA, 19 nt, Artificial Sequence
  Description of Artificial Sequence: Synthetic oligonucleotide
  Sense strand starting at position 814 of SEQ ID NO: 1882685
ccaugcaauuaucuggaga

SEQ ID NO: 2140171 - RNA, 19 nt, Artificial Sequence
  Description of Artificial Sequence: Synthetic oligonucleotide
  Antisense strand to SEQ ID NO: 2140170
ucuccagauaauugcaugg

SEQ ID NO: 2140172 - RNA, 19 nt, Artificial Sequence
  Description of Artificial Sequence: Synthetic oligonucleotide
  Sense strand starting at position 950 of SEQ ID NO: 1882685
gccgaaagcgccucugaca

SEQ ID NO: 2140173 - RNA, 19 nt, Artificial Sequence
  Description of Artificial Sequence: Synthetic oligonucleotide
  Antisense strand to SEQ ID NO: 2140172
ugucagaggcgcuuucggc

SEQ ID NO: 2140174 - RNA, 19 nt, Artificial Sequence
  Description of Artificial Sequence: Synthetic oligonucleotide
  Sense strand starting at position 1071 of SEQ ID NO: 1882685
cagauuucgggcugucaau

SEQ ID NO: 2140175 - RNA, 19 nt, Artificial Sequence
  Description of Artificial Sequence: Synthetic oligonucleotide
  Antisense strand to SEQ ID NO: 2140174
auugacagcccgaaaucug

SEQ ID NO: 2140176 - RNA, 19 nt, Artificial Sequence
  Description of Artificial Sequence: Synthetic oligonucleotide
  Sense strand starting at position 1195 of SEQ ID NO: 1882685
cucgauuuccucuguaacc

SEQ ID NO: 2140177 - RNA, 19 nt, Artificial Sequence
  Description of Artificial Sequence: Synthetic oligonucleotide
  Antisense strand to SEQ ID NO: 2140176
gguuacagaggaaaucgag

SEQ ID NO: 2140178 - RNA, 19 nt, Artificial Sequence
  Description of Artificial Sequence: Synthetic oligonucleotide
  Sense strand starting at position 1283 of SEQ ID NO: 1882685
ggguguuagguccacuauu

SEQ ID NO: 2140179 - RNA, 19 nt, Artificial Sequence
  Description of Artificial Sequence: Synthetic oligonucleotide
  Antisense strand to SEQ ID NO: 2140178
aauaguggaccuaacaccc

SEQ ID NO: 2140180 - RNA, 19 nt, Artificial Sequence
  Description of Artificial Sequence: Synthetic oligonucleotide
  Sense strand starting at position 1300 of SEQ ID NO: 1882685
uugggcugguuuccuuaaa

SEQ ID NO: 2140181 - RNA, 19 nt, Artificial Sequence
  Description of Artificial Sequence: Synthetic oligonucleotide
  Antisense strand to SEQ ID NO: 2140180
uuuaaggaaaccagcccaa

SEQ ID NO: 2140182 - RNA, 19 nt, Artificial Sequence
  Description of Artificial Sequence: Synthetic oligonucleotide
  Sense strand starting at position 1513 of SEQ ID NO: 1882685
accauuaugguuuaucgaa

SEQ ID NO: 2140183 - RNA, 19 nt, Artificial Sequence
  Description of Artificial Sequence: Synthetic oligonucleotide
  Antisense strand to SEQ ID NO: 2140182
uucgauaaaccauaauggu

SEQ ID NO: 2140184 - RNA, 19 nt, Artificial Sequence
  Description of Artificial Sequence: Synthetic oligonucleotide
  Sense strand starting at position 1515 of SEQ ID NO: 1882685
cauuaugguuuaucgaaac

SEQ ID NO: 2140185 - RNA, 19 nt, Artificial Sequence
  Description of Artificial Sequence: Synthetic oligonucleotide
  Antisense strand to SEQ ID NO: 2140184
guuucgauaaaccauaaug

SEQ ID NO: 2140186 - RNA, 19 nt, Artificial Sequence
  Description of Artificial Sequence: Synthetic oligonucleotide
  Sense strand starting at position 1575 of SEQ ID NO: 1882685
guucgugggacagaaacau

SEQ ID NO: 2140187 - RNA, 19 nt, Artificial Sequence
  Description of Artificial Sequence: Synthetic oligonucleotide
  Antisense strand to SEQ ID NO: 2140186
auguuucugucccacgaac

SEQ ID NO: 2140188 - RNA, 19 nt, Artificial Sequence
  Description of Artificial Sequence: Synthetic oligonucleotide
  Sense strand starting at position 1622 of SEQ ID NO: 1882685
gaugcagaauugcugauua

SEQ ID NO: 2140189 - RNA, 19 nt, Artificial Sequence
  Description of Artificial Sequence: Synthetic oligonucleotide
  Antisense strand to SEQ ID NO: 2140188
uaaucagcaauucugcauc

SEQ ID NO: 2140190 - RNA, 19 nt, Artificial Sequence
  Description of Artificial Sequence: Synthetic oligonucleotide
  Sense strand starting at position 1627 of SEQ ID NO: 1882685
agaauugcugauuagcaga

SEQ ID NO: 2140191 - RNA, 19 nt, Artificial Sequence
  Description of Artificial Sequence: Synthetic oligonucleotide
  Antisense strand to SEQ ID NO: 2140190
ucugcuaaucagcaauucu

SEQ ID NO: 2140192 - RNA, 19 nt, Artificial Sequence
  Description of Artificial Sequence: Synthetic oligonucleotide
  Sense strand starting at position 1836 of SEQ ID NO: 1882685
gagggugucacuuacugua

SEQ ID NO: 2140193 - RNA, 19 nt, Artificial Sequence
  Description of Artificial Sequence: Synthetic oligonucleotide
  Antisense strand to SEQ ID NO: 2140192
uacaguaagugacacccuc

SEQ ID NO: 2140194 - RNA, 19 nt, Artificial Sequence
  Description of Artificial Sequence: Synthetic oligonucleotide
  Sense strand starting at position 2015 of SEQ ID NO: 1882685
acaguaaagcgucacuuua

SEQ ID NO: 2140195 - RNA, 19 nt, Artificial Sequence
  Description of Artificial Sequence: Synthetic oligonucleotide
  Antisense strand to SEQ ID NO: 2140194
uaaagugacgcuuuacugu

SEQ ID NO: 2140196 - RNA, 19 nt, Artificial Sequence
  Description of Artificial Sequence: Synthetic oligonucleotide
  Sense strand starting at position 2164 of SEQ ID NO: 1882685
acgugcugcaguucucaau

SEQ ID NO: 2140197 - RNA, 19 nt, Artificial Sequence
  Description of Artificial Sequence: Synthetic oligonucleotide
  Antisense strand to SEQ ID NO: 2140196
auugagaacugcagcacgu

SEQ ID NO: 2140198 - RNA, 19 nt, Artificial Sequence
  Description of Artificial Sequence: Synthetic oligonucleotide
  Sense strand starting at position 2165 of SEQ ID NO: 1882685
cgugcugcaguucucaauu

SEQ ID NO: 2140199 - RNA, 19 nt, Artificial Sequence
  Description of Artificial Sequence: Synthetic oligonucleotide
  Antisense strand to SEQ ID NO: 2140198
aauugagaacugcagcacg

SEQ ID NO: 2140200 - RNA, 19 nt, Artificial Sequence
  Description of Artificial Sequence: Synthetic oligonucleotide
  Sense strand starting at position 2516 of SEQ ID NO: 1882685
guacuaucugagggugcaa

SEQ ID NO: 2140201 - RNA, 19 nt, Artificial Sequence
  Description of Artificial Sequence: Synthetic oligonucleotide
  Antisense strand to SEQ ID NO: 2140200
uugcacccucagauaguac

SEQ ID NO: 2140202 - RNA, 19 nt, Artificial Sequence
  Description of Artificial Sequence: Synthetic oligonucleotide
  Sense strand starting at position 2570 of SEQ ID NO: 1882685
cccugcacuccuggaauaa

SEQ ID NO: 2140203 - RNA, 19 nt, Artificial Sequence
  Description of Artificial Sequence: Synthetic oligonucleotide
  Antisense strand to SEQ ID NO: 2140202
uuauuccaggagugcaggg

SEQ ID NO: 2140204 - RNA, 19 nt, Artificial Sequence
  Description of Artificial Sequence: Synthetic oligonucleotide
  Sense strand starting at position 2596 of SEQ ID NO: 1882685
ccuguaaucugagcaacag

SEQ ID NO: 2140205 - RNA, 19 nt, Artificial Sequence
  Description of Artificial Sequence: Synthetic oligonucleotide
  Antisense strand to SEQ ID NO: 2140204
cuguugcucagauuacagg

SEQ ID NO: 2140206 - RNA, 19 nt, Artificial Sequence
  Description of Artificial Sequence: Synthetic oligonucleotide
  Sense strand starting at position 2597 of SEQ ID NO: 1882685
cuguaaucugagcaacagu

SEQ ID NO: 2140207 - RNA, 19 nt, Artificial Sequence
  Description of Artificial Sequence: Synthetic oligonucleotide
  Antisense strand to SEQ ID NO: 2140206
acuguugcucagauuacag

SEQ ID NO: 2140208 - RNA, 19 nt, Artificial Sequence
  Description of Artificial Sequence: Synthetic oligonucleotide
  Sense strand starting at position 2606 of SEQ ID NO: 1882685
gagcaacaguuuccaaaga

SEQ ID NO: 2140209 - RNA, 19 nt, Artificial Sequence
  Description of Artificial Sequence: Synthetic oligonucleotide
  Antisense strand to SEQ ID NO: 2140208
ucuuuggaaacuguugcuc

SEQ ID NO: 2140210 - RNA, 19 nt, Artificial Sequence
  Description of Artificial Sequence: Synthetic oligonucleotide
  Sense strand starting at position 2966 of SEQ ID NO: 1882685
uuguccugucccugaaaca

SEQ ID NO: 2140211 - RNA, 19 nt, Artificial Sequence
  Description of Artificial Sequence: Synthetic oligonucleotide
  Antisense strand to SEQ ID NO: 2140210
uguuucagggacaggacaa

SEQ ID NO: 2140212 - RNA, 19 nt, Artificial Sequence
  Description of Artificial Sequence: Synthetic oligonucleotide
  Sense strand starting at position 3076 of SEQ ID NO: 1882685
gauaauuccggcgugcacu

SEQ ID NO: 2140213 - RNA, 19 nt, Artificial Sequence
  Description of Artificial Sequence: Synthetic oligonucleotide
  Antisense strand to SEQ ID NO: 2140212
agugcacgccggaauuauc

SEQ ID NO: 2140214 - RNA, 19 nt, Artificial Sequence
  Description of Artificial Sequence: Synthetic oligonucleotide
  Sense strand starting at position 3147 of SEQ ID NO: 1882685
gucuuaaggacugggaacu

SEQ ID NO: 2140215 - RNA, 19 nt, Artificial Sequence
  Description of Artificial Sequence: Synthetic oligonucleotide
  Antisense strand to SEQ ID NO: 2140214
aguucccaguccuuaagac

SEQ ID NO: 2140216 - RNA, 19 nt, Artificial Sequence
  Description of Artificial Sequence: Synthetic oligonucleotide
  Sense strand starting at position 3655 of SEQ ID NO: 1882685
auaaaugugucccucuuga

SEQ ID NO: 2140217 - RNA, 19 nt, Artificial Sequence
  Description of Artificial Sequence: Synthetic oligonucleotide
  Antisense strand to SEQ ID NO: 2140216
ucaagagggacacauuuau

SEQ ID NO: 2140218 - RNA, 19 nt, Artificial Sequence
  Description of Artificial Sequence: Synthetic oligonucleotide
  Sense strand starting at position 3665 of SEQ ID NO: 1882685
cccucuugacugugaacga

SEQ ID NO: 2140219 - RNA, 19 nt, Artificial Sequence
  Description of Artificial Sequence: Synthetic oligonucleotide
  Antisense strand to SEQ ID NO: 2140218
ucguucacagucaagaggg

SEQ ID NO: 2140220 - RNA, 19 nt, Artificial Sequence
  Description of Artificial Sequence: Synthetic oligonucleotide
  Sense strand starting at position 3722 of SEQ ID NO: 1882685
guccuuucucugcauugau

SEQ ID NO: 2140221 - RNA, 19 nt, Artificial Sequence
  Description of Artificial Sequence: Synthetic oligonucleotide
  Antisense strand to SEQ ID NO: 2140220
aucaaugcagagaaaggac

SEQ ID NO: 2140222 - RNA, 19 nt, Artificial Sequence
  Description of Artificial Sequence: Synthetic oligonucleotide
  Sense strand starting at position 3731 of SEQ ID NO: 1882685
cugcauugauacuuacuga

SEQ ID NO: 2140223 - RNA, 19 nt, Artificial Sequence
  Description of Artificial Sequence: Synthetic oligonucleotide
  Antisense strand to SEQ ID NO: 2140222
ucaguaaguaucaaugcag

SEQ ID NO: 2140224 - RNA, 19 nt, Artificial Sequence
  Description of Artificial Sequence: Synthetic oligonucleotide
  Sense strand starting at position 3774 of SEQ ID NO: 1882685
augccuugauacucagaca

SEQ ID NO: 2140225 - RNA, 19 nt, Artificial Sequence
  Description of Artificial Sequence: Synthetic oligonucleotide
  Antisense strand to SEQ ID NO: 2140224
ugucugaguaucaaggcau

SEQ ID NO: 2140226 - RNA, 19 nt, Artificial Sequence
  Description of Artificial Sequence: Synthetic oligonucleotide
  Sense strand starting at position 3824 of SEQ ID NO: 1882685
ucugcuuggcacugggaaa

SEQ ID NO: 2140227 - RNA, 19 nt, Artificial Sequence
  Description of Artificial Sequence: Synthetic oligonucleotide
  Antisense strand to SEQ ID NO: 2140226
uuucccagugccaagcaga

SEQ ID NO: 2140228 - RNA, 19 nt, Artificial Sequence
  Description of Artificial Sequence: Synthetic oligonucleotide
  Sense strand starting at position 3932 of SEQ ID NO: 1882685
agcuguucugucuacaaga

SEQ ID NO: 2140229 - RNA, 19 nt, Artificial Sequence
  Description of Artificial Sequence: Synthetic oligonucleotide
  Antisense strand to SEQ ID NO: 2140228
ucuuguagacagaacagcu

SEQ ID NO: 2140230 - RNA, 19 nt, Artificial Sequence
  Description of Artificial Sequence: Synthetic oligonucleotide
  Sense strand starting at position 3934 of SEQ ID NO: 1882685
cuguucugucuacaagaca

SEQ ID NO: 2140231 - RNA, 19 nt, Artificial Sequence
  Description of Artificial Sequence: Synthetic oligonucleotide
  Antisense strand to SEQ ID NO: 2140230
ugucuuguagacagaacag

SEQ ID NO: 2140232 - RNA, 19 nt, Artificial Sequence
  Description of Artificial Sequence: Synthetic oligonucleotide
  Sense strand starting at position 199 of SEQ ID NO: 1882686
cagauugacccucgugaca

SEQ ID NO: 2140233 - RNA, 19 nt, Artificial Sequence
  Description of Artificial Sequence: Synthetic oligonucleotide
  Antisense strand to SEQ ID NO: 2140232
ugucacgagggucaaucug

SEQ ID NO: 2140234 - RNA, 19 nt, Artificial Sequence
  Description of Artificial Sequence: Synthetic oligonucleotide
  Sense strand starting at position 257 of SEQ ID NO: 1882686
cccuuuccugguuaaauag

SEQ ID NO: 2140235 - RNA, 19 nt, Artificial Sequence
  Description of Artificial Sequence: Synthetic oligonucleotide
  Antisense strand to SEQ ID NO: 2140234
cuauuuaaccaggaaaggg

SEQ ID NO: 2140236 - RNA, 19 nt, Artificial Sequence
  Description of Artificial Sequence: Synthetic oligonucleotide
  Sense strand starting at position 1338 of SEQ ID NO: 1882686
gggauccggccgcaagaau

SEQ ID NO: 2140237 - RNA, 19 nt, Artificial Sequence
  Description of Artificial Sequence: Synthetic oligonucleotide
  Antisense strand to SEQ ID NO: 2140236
auucuugcggccggauccc

SEQ ID NO: 2140238 - RNA, 19 nt, Artificial Sequence
  Description of Artificial Sequence: Synthetic oligonucleotide
  Sense strand starting at position 1414 of SEQ ID NO: 1882686
ggaagcagagcuugagaga

SEQ ID NO: 2140239 - RNA, 19 nt, Artificial Sequence
  Description of Artificial Sequence: Synthetic oligonucleotide
  Antisense strand to SEQ ID NO: 2140238
ucucucaagcucugcuucc

SEQ ID NO: 2140240 - RNA, 19 nt, Artificial Sequence
  Description of Artificial Sequence: Synthetic oligonucleotide
  Sense strand starting at position 1665 of SEQ ID NO: 1882686
gcagguagagauuaaucuu

SEQ ID NO: 2140241 - RNA, 19 nt, Artificial Sequence
  Description of Artificial Sequence: Synthetic oligonucleotide
  Antisense strand to SEQ ID NO: 2140240
aagauuaaucucuaccugc

SEQ ID NO: 2140242 - RNA, 19 nt, Artificial Sequence
  Description of Artificial Sequence: Synthetic oligonucleotide
  Sense strand starting at position 1671 of SEQ ID NO: 1882686
agagauuaaucuuugccag

SEQ ID NO: 2140243 - RNA, 19 nt, Artificial Sequence
  Description of Artificial Sequence: Synthetic oligonucleotide
  Antisense strand to SEQ ID NO: 2140242
cuggcaaagauuaaucucu

SEQ ID NO: 2140244 - RNA, 19 nt, Artificial Sequence
  Description of Artificial Sequence: Synthetic oligonucleotide
  Sense strand starting at position 1730 of SEQ ID NO: 1882686
accagucauuuggaggaga

SEQ ID NO: 2140245 - RNA, 19 nt, Artificial Sequence
  Description of Artificial Sequence: Synthetic oligonucleotide
  Antisense strand to SEQ ID NO: 2140244
ucuccuccaaaugacuggu

SEQ ID NO: 2140246 - RNA, 19 nt, Artificial Sequence
  Description of Artificial Sequence: Synthetic oligonucleotide
  Sense strand starting at position 2032 of SEQ ID NO: 1882686
cgaggaggguuugugaaug

SEQ ID NO: 2140247 - RNA, 19 nt, Artificial Sequence
  Description of Artificial Sequence: Synthetic oligonucleotide
  Antisense strand to SEQ ID NO: 2140246
cauucacaaacccuccucg

SEQ ID NO: 2140248 - RNA, 19 nt, Artificial Sequence
  Description of Artificial Sequence: Synthetic oligonucleotide
  Sense strand starting at position 2037 of SEQ ID NO: 1882686
aggguuugugaauguugaa

SEQ ID NO: 2140249 - RNA, 19 nt, Artificial Sequence
  Description of Artificial Sequence: Synthetic oligonucleotide
  Antisense strand to SEQ ID NO: 2140248
uucaacauucacaaacccu

SEQ ID NO: 2140250 - RNA, 19 nt, Artificial Sequence
  Description of Artificial Sequence: Synthetic oligonucleotide
  Sense strand starting at position 2044 of SEQ ID NO: 1882686
gugaauguugaauguguaa

SEQ ID NO: 2140251 - RNA, 19 nt, Artificial Sequence
  Description of Artificial Sequence: Synthetic oligonucleotide
  Antisense strand to SEQ ID NO: 2140250
uuacacauucaacauucac

SEQ ID NO: 2140252 - RNA, 19 nt, Artificial Sequence
  Description of Artificial Sequence: Synthetic oligonucleotide
  Sense strand starting at position 2057 of SEQ ID NO: 1882686
guguaauaaugaucaccau

SEQ ID NO: 2140253 - RNA, 19 nt, Artificial Sequence
  Description of Artificial Sequence: Synthetic oligonucleotide
  Antisense strand to SEQ ID NO: 2140252
auggugaucauuauuacac

SEQ ID NO: 2140254 - RNA, 19 nt, Artificial Sequence
  Description of Artificial Sequence: Synthetic oligonucleotide
  Sense strand starting at position 2162 of SEQ ID NO: 1882686
gguaucuggcgguaaauua

SEQ ID NO: 2140255 - RNA, 19 nt, Artificial Sequence
  Description of Artificial Sequence: Synthetic oligonucleotide
  Antisense strand to SEQ ID NO: 2140254
uaauuuaccgccagauacc

SEQ ID NO: 2140256 - RNA, 19 nt, Artificial Sequence
  Description of Artificial Sequence: Synthetic oligonucleotide
  Sense strand starting at position 2171 of SEQ ID NO: 1882686
cgguaaauuagaggcaauu

SEQ ID NO: 2140257 - RNA, 19 nt, Artificial Sequence
  Description of Artificial Sequence: Synthetic oligonucleotide
  Antisense strand to SEQ ID NO: 2140256
aauugccucuaauuuaccg

SEQ ID NO: 2140258 - RNA, 19 nt, Artificial Sequence
  Description of Artificial Sequence: Synthetic oligonucleotide
  Sense strand starting at position 2359 of SEQ ID NO: 1882686
ccaccaggguuuguuuaga

SEQ ID NO: 2140259 - RNA, 19 nt, Artificial Sequence
  Description of Artificial Sequence: Synthetic oligonucleotide
  Antisense strand to SEQ ID NO: 2140258
ucuaaacaaacccuggugg

SEQ ID NO: 2140260 - RNA, 19 nt, Artificial Sequence
  Description of Artificial Sequence: Synthetic oligonucleotide
  Sense strand starting at position 2481 of SEQ ID NO: 1882686
ugguucuuccuguagggaa

SEQ ID NO: 2140261 - RNA, 19 nt, Artificial Sequence
  Description of Artificial Sequence: Synthetic oligonucleotide
  Antisense strand to SEQ ID NO: 2140260
uucccuacaggaagaacca

SEQ ID NO: 2140262 - RNA, 19 nt, Artificial Sequence
  Description of Artificial Sequence: Synthetic oligonucleotide
  Sense strand starting at position 2495 of SEQ ID NO: 1882686
gggaaugaauuugguuuga

SEQ ID NO: 2140263 - RNA, 19 nt, Artificial Sequence
  Description of Artificial Sequence: Synthetic oligonucleotide
  Antisense strand to SEQ ID NO: 2140262
ucaaaccaaauucauuccc

SEQ ID NO: 2140264 - RNA, 19 nt, Artificial Sequence
  Description of Artificial Sequence: Synthetic oligonucleotide
  Sense strand starting at position 2552 of SEQ ID NO: 1882686
augauucguuaaccauauu

SEQ ID NO: 2140265 - RNA, 19 nt, Artificial Sequence
  Description of Artificial Sequence: Synthetic oligonucleotide
  Antisense strand to SEQ ID NO: 2140264
aauaugguuaacgaaucau

SEQ ID NO: 2140266 - RNA, 19 nt, Artificial Sequence
  Description of Artificial Sequence: Synthetic oligonucleotide
  Sense strand starting at position 2555 of SEQ ID NO: 1882686
auucguuaaccauauugca

SEQ ID NO: 2140267 - RNA, 19 nt, Artificial Sequence
  Description of Artificial Sequence: Synthetic oligonucleotide
  Antisense strand to SEQ ID NO: 2140266
ugcaauaugguuaacgaau

SEQ ID NO: 2140268 - RNA, 19 nt, Artificial Sequence
  Description of Artificial Sequence: Synthetic oligonucleotide
  Sense strand starting at position 2624 of SEQ ID NO: 1882686
ggcagcucuuaacugaauu

SEQ ID NO: 2140269 - RNA, 19 nt, Artificial Sequence
  Description of Artificial Sequence: Synthetic oligonucleotide
  Antisense strand to SEQ ID NO: 2140268
aauucaguuaagagcugcc

SEQ ID NO: 2140270 - RNA, 19 nt, Artificial Sequence
  Description of Artificial Sequence: Synthetic oligonucleotide
  Sense strand starting at position 2793 of SEQ ID NO: 1882686
gugcauguuuccuuaauuu

SEQ ID NO: 2140271 - RNA, 19 nt, Artificial Sequence
  Description of Artificial Sequence: Synthetic oligonucleotide
  Antisense strand to SEQ ID NO: 2140270
aaauuaaggaaacaugcac

SEQ ID NO: 2140272 - RNA, 19 nt, Artificial Sequence
  Description of Artificial Sequence: Synthetic oligonucleotide
  Sense strand starting at position 2822 of SEQ ID NO: 1882686
gggaacaguuccuugguaa

SEQ ID NO: 2140273 - RNA, 19 nt, Artificial Sequence
  Description of Artificial Sequence: Synthetic oligonucleotide
  Antisense strand to SEQ ID NO: 2140272
uuaccaaggaacuguuccc

SEQ ID NO: 2140274 - RNA, 19 nt, Artificial Sequence
  Description of Artificial Sequence: Synthetic oligonucleotide
  Sense strand starting at position 2823 of SEQ ID NO: 1882686
ggaacaguuccuugguaaa

SEQ ID NO: 2140275 - RNA, 19 nt, Artificial Sequence
  Description of Artificial Sequence: Synthetic oligonucleotide
  Antisense strand to SEQ ID NO: 2140274
uuuaccaaggaacuguucc

SEQ ID NO: 2140276 - RNA, 19 nt, Artificial Sequence
  Description of Artificial Sequence: Synthetic oligonucleotide
  Sense strand starting at position 2825 of SEQ ID NO: 1882686
aacaguuccuugguaaagu

SEQ ID NO: 2140277 - RNA, 19 nt, Artificial Sequence
  Description of Artificial Sequence: Synthetic oligonucleotide
  Antisense strand to SEQ ID NO: 2140276
acuuuaccaaggaacuguu

SEQ ID NO: 2140278 - RNA, 19 nt, Artificial Sequence
  Description of Artificial Sequence: Synthetic oligonucleotide
  Sense strand starting at position 2989 of SEQ ID NO: 1882686
gcaguagagccugaguacu

SEQ ID NO: 2140279 - RNA, 19 nt, Artificial Sequence
  Description of Artificial Sequence: Synthetic oligonucleotide
  Antisense strand to SEQ ID NO: 2140278
aguacucaggcucuacugc

SEQ ID NO: 2140280 - RNA, 19 nt, Artificial Sequence
  Description of Artificial Sequence: Synthetic oligonucleotide
  Sense strand starting at position 3005 of SEQ ID NO: 1882686
acugcagagaccugaguuu

SEQ ID NO: 2140281 - RNA, 19 nt, Artificial Sequence
  Description of Artificial Sequence: Synthetic oligonucleotide
  Antisense strand to SEQ ID NO: 2140280
aaacucaggucucugcagu

SEQ ID NO: 2140282 - RNA, 19 nt, Artificial Sequence
  Description of Artificial Sequence: Synthetic oligonucleotide
  Sense strand starting at position 3084 of SEQ ID NO: 1882686
ugggaucaucuuggucuga

SEQ ID NO: 2140283 - RNA, 19 nt, Artificial Sequence
  Description of Artificial Sequence: Synthetic oligonucleotide
  Antisense strand to SEQ ID NO: 2140282
ucagaccaagaugauccca

SEQ ID NO: 2140284 - RNA, 19 nt, Artificial Sequence
  Description of Artificial Sequence: Synthetic oligonucleotide
  Sense strand starting at position 3085 of SEQ ID NO: 1882686
gggaucaucuuggucugaa

SEQ ID NO: 2140285 - RNA, 19 nt, Artificial Sequence
  Description of Artificial Sequence: Synthetic oligonucleotide
  Antisense strand to SEQ ID NO: 2140284
uucagaccaagaugauccc

SEQ ID NO: 2140286 - RNA, 19 nt, Artificial Sequence
  Description of Artificial Sequence: Synthetic oligonucleotide
  Sense strand starting at position 3086 of SEQ ID NO: 1882686
ggaucaucuuggucugaau

SEQ ID NO: 2140287 - RNA, 19 nt, Artificial Sequence
  Description of Artificial Sequence: Synthetic oligonucleotide
  Antisense strand to SEQ ID NO: 2140286
auucagaccaagaugaucc

SEQ ID NO: 2140288 - RNA, 19 nt, Artificial Sequence
  Description of Artificial Sequence: Synthetic oligonucleotide
  Sense strand starting at position 3099 of SEQ ID NO: 1882686
cugaauuguccucauacug

SEQ ID NO: 2140289 - RNA, 19 nt, Artificial Sequence
  Description of Artificial Sequence: Synthetic oligonucleotide
  Antisense strand to SEQ ID NO: 2140288
caguaugaggacaauucag

SEQ ID NO: 2140290 - RNA, 19 nt, Artificial Sequence
  Description of Artificial Sequence: Synthetic oligonucleotide
  Sense strand starting at position 3122 of SEQ ID NO: 1882686
ucaucuugagggugggauu

SEQ ID NO: 2140291 - RNA, 19 nt, Artificial Sequence
  Description of Artificial Sequence: Synthetic oligonucleotide
  Antisense strand to SEQ ID NO: 2140290
aaucccacccucaagauga

SEQ ID NO: 2140292 - RNA, 19 nt, Artificial Sequence
  Description of Artificial Sequence: Synthetic oligonucleotide
  Sense strand starting at position 3503 of SEQ ID NO: 1882686
gcuccauauugggcagaga

SEQ ID NO: 2140293 - RNA, 19 nt, Artificial Sequence
  Description of Artificial Sequence: Synthetic oligonucleotide
  Antisense strand to SEQ ID NO: 2140292
ucucugcccaauauggagc

SEQ ID NO: 2140294 - RNA, 19 nt, Artificial Sequence
  Description of Artificial Sequence: Synthetic oligonucleotide
  Sense strand starting at position 3520 of SEQ ID NO: 1882686
gauugcuugcgacagguaa

SEQ ID NO: 2140295 - RNA, 19 nt, Artificial Sequence
  Description of Artificial Sequence: Synthetic oligonucleotide
  Antisense strand to SEQ ID NO: 2140294
uuaccugucgcaagcaauc

SEQ ID NO: 2140296 - RNA, 19 nt, Artificial Sequence
  Description of Artificial Sequence: Synthetic oligonucleotide
  Sense strand starting at position 3555 of SEQ ID NO: 1882686
cuuaaugccaggcguauuu

SEQ ID NO: 2140297 - RNA, 19 nt, Artificial Sequence
  Description of Artificial Sequence: Synthetic oligonucleotide
  Antisense strand to SEQ ID NO: 2140296
aaauacgccuggcauuaag

SEQ ID NO: 2140298 - RNA, 19 nt, Artificial Sequence
  Description of Artificial Sequence: Synthetic oligonucleotide
  Sense strand starting at position 3598 of SEQ ID NO: 1882686
ggugucugcagagauauug

SEQ ID NO: 2140299 - RNA, 19 nt, Artificial Sequence
  Description of Artificial Sequence: Synthetic oligonucleotide
  Antisense strand to SEQ ID NO: 2140298
caauaucucugcagacacc

SEQ ID NO: 2140300 - RNA, 19 nt, Artificial Sequence
  Description of Artificial Sequence: Synthetic oligonucleotide
  Sense strand starting at position 3604 of SEQ ID NO: 1882686
ugcagagauauuggaaagu

SEQ ID NO: 2140301 - RNA, 19 nt, Artificial Sequence
  Description of Artificial Sequence: Synthetic oligonucleotide
  Antisense strand to SEQ ID NO: 2140300
acuuuccaauaucucugca

SEQ ID NO: 2140302 - RNA, 19 nt, Artificial Sequence
  Description of Artificial Sequence: Synthetic oligonucleotide
  Sense strand starting at position 3618 of SEQ ID NO: 1882686
aaaguacaagaucgaugau

SEQ ID NO: 2140303 - RNA, 19 nt, Artificial Sequence
  Description of Artificial Sequence: Synthetic oligonucleotide
  Antisense strand to SEQ ID NO: 2140302
aucaucgaucuuguacuuu

SEQ ID NO: 2140304 - RNA, 19 nt, Artificial Sequence
  Description of Artificial Sequence: Synthetic oligonucleotide
  Sense strand starting at position 3621 of SEQ ID NO: 1882686
guacaagaucgaugaucca

SEQ ID NO: 2140305 - RNA, 19 nt, Artificial Sequence
  Description of Artificial Sequence: Synthetic oligonucleotide
  Antisense strand to SEQ ID NO: 2140304
uggaucaucgaucuuguac

SEQ ID NO: 2140306 - RNA, 19 nt, Artificial Sequence
  Description of Artificial Sequence: Synthetic oligonucleotide
  Sense strand starting at position 3630 of SEQ ID NO: 1882686
cgaugauccagcuucgugu

SEQ ID NO: 2140307 - RNA, 19 nt, Artificial Sequence
  Description of Artificial Sequence: Synthetic oligonucleotide
  Antisense strand to SEQ ID NO: 2140306
acacgaagcuggaucaucg

SEQ ID NO: 2140308 - RNA, 19 nt, Artificial Sequence
  Description of Artificial Sequence: Synthetic oligonucleotide
  Sense strand starting at position 3652 of SEQ ID NO: 1882686
aucagcagccuuuaauuga

SEQ ID NO: 2140309 - RNA, 19 nt, Artificial Sequence
  Description of Artificial Sequence: Synthetic oligonucleotide
  Antisense strand to SEQ ID NO: 2140308
ucaauuaaaggcugcugau

SEQ ID NO: 2140310 - RNA, 19 nt, Artificial Sequence
  Description of Artificial Sequence: Synthetic oligonucleotide
  Sense strand starting at position 3730 of SEQ ID NO: 1882686
uacaucuugccaggaggaa

SEQ ID NO: 2140311 - RNA, 19 nt, Artificial Sequence
  Description of Artificial Sequence: Synthetic oligonucleotide
  Antisense strand to SEQ ID NO: 2140310
uuccuccuggcaagaugua

SEQ ID NO: 2140312 - RNA, 19 nt, Artificial Sequence
  Description of Artificial Sequence: Synthetic oligonucleotide
  Sense strand starting at position 96 of SEQ ID NO: 1882687
cuacaugugcuuugaaaua

SEQ ID NO: 2140313 - RNA, 19 nt, Artificial Sequence
  Description of Artificial Sequence: Synthetic oligonucleotide
  Antisense strand to SEQ ID NO: 2140312
uauuucaaagcacauguag

SEQ ID NO: 2140314 - RNA, 19 nt, Artificial Sequence
  Description of Artificial Sequence: Synthetic oligonucleotide
  Sense strand starting at position 156 of SEQ ID NO: 1882687
cuuugcagaugauugguua

SEQ ID NO: 2140315 - RNA, 19 nt, Artificial Sequence
  Description of Artificial Sequence: Synthetic oligonucleotide
  Antisense strand to SEQ ID NO: 2140314
uaaccaaucaucugcaaag

SEQ ID NO: 2140316 - RNA, 19 nt, Artificial Sequence
  Description of Artificial Sequence: Synthetic oligonucleotide
  Sense strand starting at position 157 of SEQ ID NO: 1882687
uuugcagaugauugguuaa

SEQ ID NO: 2140317 - RNA, 19 nt, Artificial Sequence
  Description of Artificial Sequence: Synthetic oligonucleotide
  Antisense strand to SEQ ID NO: 2140316
uuaaccaaucaucugcaaa

SEQ ID NO: 2140318 - RNA, 19 nt, Artificial Sequence
  Description of Artificial Sequence: Synthetic oligonucleotide
  Sense strand starting at position 159 of SEQ ID NO: 1882687
ugcagaugauugguuaaca

SEQ ID NO: 2140319 - RNA, 19 nt, Artificial Sequence
  Description of Artificial Sequence: Synthetic oligonucleotide
  Antisense strand to SEQ ID NO: 2140318
uguuaaccaaucaucugca

SEQ ID NO: 2140320 - RNA, 19 nt, Artificial Sequence
  Description of Artificial Sequence: Synthetic oligonucleotide
  Sense strand starting at position 160 of SEQ ID NO: 1882687
gcagaugauugguuaacag

SEQ ID NO: 2140321 - RNA, 19 nt, Artificial Sequence
  Description of Artificial Sequence: Synthetic oligonucleotide
  Antisense strand to SEQ ID NO: 2140320
cuguuaaccaaucaucugc

SEQ ID NO: 2140322 - RNA, 19 nt, Artificial Sequence
  Description of Artificial Sequence: Synthetic oligonucleotide
  Sense strand starting at position 169 of SEQ ID NO: 1882687
ugguuaacagguuaguaca

SEQ ID NO: 2140323 - RNA, 19 nt, Artificial Sequence
  Description of Artificial Sequence: Synthetic oligonucleotide
  Antisense strand to SEQ ID NO: 2140322
uguacuaaccuguuaacca

SEQ ID NO: 2140324 - RNA, 19 nt, Artificial Sequence
  Description of Artificial Sequence: Synthetic oligonucleotide
  Sense strand starting at position 267 of SEQ ID NO: 1882687
uugguacuguuuccagaug

SEQ ID NO: 2140325 - RNA, 19 nt, Artificial Sequence
  Description of Artificial Sequence: Synthetic oligonucleotide
  Antisense strand to SEQ ID NO: 2140324
caucuggaaacaguaccaa

SEQ ID NO: 2140326 - RNA, 19 nt, Artificial Sequence
  Description of Artificial Sequence: Synthetic oligonucleotide
  Sense strand starting at position 418 of SEQ ID NO: 1882687
uugaauaaguauuccuuga

SEQ ID NO: 2140327 - RNA, 19 nt, Artificial Sequence
  Description of Artificial Sequence: Synthetic oligonucleotide
  Antisense strand to SEQ ID NO: 2140326
ucaaggaauacuuauucaa

SEQ ID NO: 2140328 - RNA, 19 nt, Artificial Sequence
  Description of Artificial Sequence: Synthetic oligonucleotide
  Sense strand starting at position 688 of SEQ ID NO: 1882687
ugaacucuccagcaggagu

SEQ ID NO: 2140329 - RNA, 19 nt, Artificial Sequence
  Description of Artificial Sequence: Synthetic oligonucleotide
  Antisense strand to SEQ ID NO: 2140328
acuccugcuggagaguuca

SEQ ID NO: 2140330 - RNA, 19 nt, Artificial Sequence
  Description of Artificial Sequence: Synthetic oligonucleotide
  Sense strand starting at position 729 of SEQ ID NO: 1882687
acacuuaaguucucagaag

SEQ ID NO: 2140331 - RNA, 19 nt, Artificial Sequence
  Description of Artificial Sequence: Synthetic oligonucleotide
  Antisense strand to SEQ ID NO: 2140330
cuucugagaacuuaagugu

SEQ ID NO: 2140332 - RNA, 19 nt, Artificial Sequence
  Description of Artificial Sequence: Synthetic oligonucleotide
  Sense strand starting at position 749 of SEQ ID NO: 1882687
gcuggagaagcguauggaa

SEQ ID NO: 2140333 - RNA, 19 nt, Artificial Sequence
  Description of Artificial Sequence: Synthetic oligonucleotide
  Antisense strand to SEQ ID NO: 2140332
uuccauacgcuucuccagc

SEQ ID NO: 2140334 - RNA, 19 nt, Artificial Sequence
  Description of Artificial Sequence: Synthetic oligonucleotide
  Sense strand starting at position 751 of SEQ ID NO: 1882687
uggagaagcguauggaagu

SEQ ID NO: 2140335 - RNA, 19 nt, Artificial Sequence
  Description of Artificial Sequence: Synthetic oligonucleotide
  Antisense strand to SEQ ID NO: 2140334
acuuccauacgcuucucca

SEQ ID NO: 2140336 - RNA, 19 nt, Artificial Sequence
  Description of Artificial Sequence: Synthetic oligonucleotide
  Sense strand starting at position 757 of SEQ ID NO: 1882687
agcguauggaaguaaauua

SEQ ID NO: 2140337 - RNA, 19 nt, Artificial Sequence
  Description of Artificial Sequence: Synthetic oligonucleotide
  Antisense strand to SEQ ID NO: 2140336
uaauuuacuuccauacgcu

SEQ ID NO: 2140338 - RNA, 19 nt, Artificial Sequence
  Description of Artificial Sequence: Synthetic oligonucleotide
  Sense strand starting at position 764 of SEQ ID NO: 1882687
ggaaguaaauuauccugau

SEQ ID NO: 2140339 - RNA, 19 nt, Artificial Sequence
  Description of Artificial Sequence: Synthetic oligonucleotide
  Antisense strand to SEQ ID NO: 2140338
aucaggauaauuuacuucc

SEQ ID NO: 2140340 - RNA, 19 nt, Artificial Sequence
  Description of Artificial Sequence: Synthetic oligonucleotide
  Sense strand starting at position 765 of SEQ ID NO: 1882687
gaaguaaauuauccugaug

SEQ ID NO: 2140341 - RNA, 19 nt, Artificial Sequence
  Description of Artificial Sequence: Synthetic oligonucleotide
  Antisense strand to SEQ ID NO: 2140340
caucaggauaauuuacuuc

SEQ ID NO: 2140342 - RNA, 19 nt, Artificial Sequence
  Description of Artificial Sequence: Synthetic oligonucleotide
  Sense strand starting at position 768 of SEQ ID NO: 1882687
guaaauuauccugauguau

SEQ ID NO: 2140343 - RNA, 19 nt, Artificial Sequence
  Description of Artificial Sequence: Synthetic oligonucleotide
  Antisense strand to SEQ ID NO: 2140342
auacaucaggauaauuuac

SEQ ID NO: 2140344 - RNA, 19 nt, Artificial Sequence
  Description of Artificial Sequence: Synthetic oligonucleotide
  Sense strand starting at position 798 of SEQ ID NO: 1882687
ugugaaacucaccguggaa

SEQ ID NO: 2140345 - RNA, 19 nt, Artificial Sequence
  Description of Artificial Sequence: Synthetic oligonucleotide
  Antisense strand to SEQ ID NO: 2140344
uuccacggugaguuucaca

SEQ ID NO: 2140346 - RNA, 19 nt, Artificial Sequence
  Description of Artificial Sequence: Synthetic oligonucleotide
  Sense strand starting at position 800 of SEQ ID NO: 1882687
ugaaacucaccguggaagu

SEQ ID NO: 2140347 - RNA, 19 nt, Artificial Sequence
  Description of Artificial Sequence: Synthetic oligonucleotide
  Antisense strand to SEQ ID NO: 2140346
acuuccacggugaguuuca

SEQ ID NO: 2140348 - RNA, 19 nt, Artificial Sequence
  Description of Artificial Sequence: Synthetic oligonucleotide
  Sense strand starting at position 813 of SEQ ID NO: 1882687
ggaagugccuauucuaauu

SEQ ID NO: 2140349 - RNA, 19 nt, Artificial Sequence
  Description of Artificial Sequence: Synthetic oligonucleotide
  Antisense strand to SEQ ID NO: 2140348
aauuagaauaggcacuucc

SEQ ID NO: 2140350 - RNA, 19 nt, Artificial Sequence
  Description of Artificial Sequence: Synthetic oligonucleotide
  Sense strand starting at position 846 of SEQ ID NO: 1882687
agcuaaauauuuggaucaa

SEQ ID NO: 2140351 - RNA, 19 nt, Artificial Sequence
  Description of Artificial Sequence: Synthetic oligonucleotide
  Antisense strand to SEQ ID NO: 2140350
uugauccaaauauuuagcu

SEQ ID NO: 2140352 - RNA, 19 nt, Artificial Sequence
  Description of Artificial Sequence: Synthetic oligonucleotide
  Sense strand starting at position 847 of SEQ ID NO: 1882687
gcuaaauauuuggaucaau

SEQ ID NO: 2140353 - RNA, 19 nt, Artificial Sequence
  Description of Artificial Sequence: Synthetic oligonucleotide
  Antisense strand to SEQ ID NO: 2140352
auugauccaaauauuuagc

SEQ ID NO: 2140354 - RNA, 19 nt, Artificial Sequence
  Description of Artificial Sequence: Synthetic oligonucleotide
  Sense strand starting at position 897 of SEQ ID NO: 1882687
guacaaugugcugaagaaa

SEQ ID NO: 2140355 - RNA, 19 nt, Artificial Sequence
  Description of Artificial Sequence: Synthetic oligonucleotide
  Antisense strand to SEQ ID NO: 2140354
uuucuucagcacauuguac

SEQ ID NO: 2140356 - RNA, 19 nt, Artificial Sequence
  Description of Artificial Sequence: Synthetic oligonucleotide
  Sense strand starting at position 972 of SEQ ID NO: 1882687
aucauauguuuaucacuag

SEQ ID NO: 2140357 - RNA, 19 nt, Artificial Sequence
  Description of Artificial Sequence: Synthetic oligonucleotide
  Antisense strand to SEQ ID NO: 2140356
cuagugauaaacauaugau

SEQ ID NO: 2140358 - RNA, 19 nt, Artificial Sequence
  Description of Artificial Sequence: Synthetic oligonucleotide
  Sense strand starting at position 975 of SEQ ID NO: 1882687
auauguuuaucacuaguca

SEQ ID NO: 2140359 - RNA, 19 nt, Artificial Sequence
  Description of Artificial Sequence: Synthetic oligonucleotide
  Antisense strand to SEQ ID NO: 2140358
ugacuagugauaaacauau

SEQ ID NO: 2140360 - RNA, 19 nt, Artificial Sequence
  Description of Artificial Sequence: Synthetic oligonucleotide
  Sense strand starting at position 979 of SEQ ID NO: 1882687
guuuaucacuagucacaua

SEQ ID NO: 2140361 - RNA, 19 nt, Artificial Sequence
  Description of Artificial Sequence: Synthetic oligonucleotide
  Antisense strand to SEQ ID NO: 2140360
uaugugacuagugauaaac

SEQ ID NO: 2140362 - RNA, 19 nt, Artificial Sequence
  Description of Artificial Sequence: Synthetic oligonucleotide
  Sense strand starting at position 1001 of SEQ ID NO: 1882687
guuguauuucuauguguaa

SEQ ID NO: 2140363 - RNA, 19 nt, Artificial Sequence
  Description of Artificial Sequence: Synthetic oligonucleotide
  Antisense strand to SEQ ID NO: 2140362
uuacacauagaaauacaac

SEQ ID NO: 2140364 - RNA, 19 nt, Artificial Sequence
  Description of Artificial Sequence: Synthetic oligonucleotide
  Sense strand starting at position 1005 of SEQ ID NO: 1882687
uauuucuauguguaaucgu

SEQ ID NO: 2140365 - RNA, 19 nt, Artificial Sequence
  Description of Artificial Sequence: Synthetic oligonucleotide
  Antisense strand to SEQ ID NO: 2140364
acgauuacacauagaaaua

SEQ ID NO: 2140366 - RNA, 19 nt, Artificial Sequence
  Description of Artificial Sequence: Synthetic oligonucleotide
  Sense strand starting at position 1158 of SEQ ID NO: 1882687
ugacguuauuccucauuuc

SEQ ID NO: 2140367 - RNA, 19 nt, Artificial Sequence
  Description of Artificial Sequence: Synthetic oligonucleotide
  Antisense strand to SEQ ID NO: 2140366
gaaaugaggaauaacguca

SEQ ID NO: 2140368 - RNA, 19 nt, Artificial Sequence
  Description of Artificial Sequence: Synthetic oligonucleotide
  Sense strand starting at position 1205 of SEQ ID NO: 1882687
uagaauaggcucugggaau

SEQ ID NO: 2140369 - RNA, 19 nt, Artificial Sequence
  Description of Artificial Sequence: Synthetic oligonucleotide
  Antisense strand to SEQ ID NO: 2140368
auucccagagccuauucua

SEQ ID NO: 2140370 - RNA, 19 nt, Artificial Sequence
  Description of Artificial Sequence: Synthetic oligonucleotide
  Sense strand starting at position 1292 of SEQ ID NO: 1882687
aagcaaacaucgcuggaaa

SEQ ID NO: 2140371 - RNA, 19 nt, Artificial Sequence
  Description of Artificial Sequence: Synthetic oligonucleotide
  Antisense strand to SEQ ID NO: 2140370
uuuccagcgauguuugcuu

SEQ ID NO: 2140372 - RNA, 19 nt, Artificial Sequence
  Description of Artificial Sequence: Synthetic oligonucleotide
  Sense strand starting at position 1499 of SEQ ID NO: 1882687
cucauaaacuaaucgauag

SEQ ID NO: 2140373 - RNA, 19 nt, Artificial Sequence
  Description of Artificial Sequence: Synthetic oligonucleotide
  Antisense strand to SEQ ID NO: 2140372
cuaucgauuaguuuaugag

SEQ ID NO: 2140374 - RNA, 19 nt, Artificial Sequence
  Description of Artificial Sequence: Synthetic oligonucleotide
  Sense strand starting at position 1531 of SEQ ID NO: 1882687
cagaauagaucaucgucca

SEQ ID NO: 2140375 - RNA, 19 nt, Artificial Sequence
  Description of Artificial Sequence: Synthetic oligonucleotide
  Antisense strand to SEQ ID NO: 2140374
uggacgaugaucuauucug

SEQ ID NO: 2140376 - RNA, 19 nt, Artificial Sequence
  Description of Artificial Sequence: Synthetic oligonucleotide
  Sense strand starting at position 1532 of SEQ ID NO: 1882687
agaauagaucaucguccaa

SEQ ID NO: 2140377 - RNA, 19 nt, Artificial Sequence
  Description of Artificial Sequence: Synthetic oligonucleotide
  Antisense strand to SEQ ID NO: 2140376
uuggacgaugaucuauucu

SEQ ID NO: 2140378 - RNA, 19 nt, Artificial Sequence
  Description of Artificial Sequence: Synthetic oligonucleotide
  Sense strand starting at position 1534 of SEQ ID NO: 1882687
aauagaucaucguccaagu

SEQ ID NO: 2140379 - RNA, 19 nt, Artificial Sequence
  Description of Artificial Sequence: Synthetic oligonucleotide
  Antisense strand to SEQ ID NO: 2140378
acuuggacgaugaucuauu

SEQ ID NO: 2140380 - RNA, 19 nt, Artificial Sequence
  Description of Artificial Sequence: Synthetic oligonucleotide
  Sense strand starting at position 1536 of SEQ ID NO: 1882687
uagaucaucguccaagugu

SEQ ID NO: 2140381 - RNA, 19 nt, Artificial Sequence
  Description of Artificial Sequence: Synthetic oligonucleotide
  Antisense strand to SEQ ID NO: 2140380
acacuuggacgaugaucua

SEQ ID NO: 2140382 - RNA, 19 nt, Artificial Sequence
  Description of Artificial Sequence: Synthetic oligonucleotide
  Sense strand starting at position 1555 of SEQ ID NO: 1882687
uagguauuagccugagaaa

SEQ ID NO: 2140383 - RNA, 19 nt, Artificial Sequence
  Description of Artificial Sequence: Synthetic oligonucleotide
  Antisense strand to SEQ ID NO: 2140382
uuucucaggcuaauaccua

SEQ ID NO: 2140384 - RNA, 19 nt, Artificial Sequence
  Description of Artificial Sequence: Synthetic oligonucleotide
  Sense strand starting at position 1729 of SEQ ID NO: 1882687
aaaucaagugguuggguuu

SEQ ID NO: 2140385 - RNA, 19 nt, Artificial Sequence
  Description of Artificial Sequence: Synthetic oligonucleotide
  Antisense strand to SEQ ID NO: 2140384
aaacccaaccacuugauuu

SEQ ID NO: 2140386 - RNA, 19 nt, Artificial Sequence
  Description of Artificial Sequence: Synthetic oligonucleotide
  Sense strand starting at position 1784 of SEQ ID NO: 1882687
cgagcugucaucguucuuu

SEQ ID NO: 2140387 - RNA, 19 nt, Artificial Sequence
  Description of Artificial Sequence: Synthetic oligonucleotide
  Antisense strand to SEQ ID NO: 2140386
aaagaacgaugacagcucg

SEQ ID NO: 2140388 - RNA, 19 nt, Artificial Sequence
  Description of Artificial Sequence: Synthetic oligonucleotide
  Sense strand starting at position 1804 of SEQ ID NO: 1882687
cgucuuacauccuuaugaa

SEQ ID NO: 2140389 - RNA, 19 nt, Artificial Sequence
  Description of Artificial Sequence: Synthetic oligonucleotide
  Antisense strand to SEQ ID NO: 2140388
uucauaaggauguaagacg

SEQ ID NO: 2140390 - RNA, 19 nt, Artificial Sequence
  Description of Artificial Sequence: Synthetic oligonucleotide
  Sense strand starting at position 3594 of SEQ ID NO: 1882687
cuagcuggaucauugagaa

SEQ ID NO: 2140391 - RNA, 19 nt, Artificial Sequence
  Description of Artificial Sequence: Synthetic oligonucleotide
  Antisense strand to SEQ ID NO: 2140390
uucucaaugauccagcuag

SEQ ID NO: 2140392 - RNA, 19 nt, Artificial Sequence
  Description of Artificial Sequence: Synthetic oligonucleotide
  Sense strand starting at position 132 of SEQ ID NO: 1882688
ucacuuagaugcccugaaa

SEQ ID NO: 2140393 - RNA, 19 nt, Artificial Sequence
  Description of Artificial Sequence: Synthetic oligonucleotide
  Antisense strand to SEQ ID NO: 2140392
uuucagggcaucuaaguga

SEQ ID NO: 2140394 - RNA, 19 nt, Artificial Sequence
  Description of Artificial Sequence: Synthetic oligonucleotide
  Sense strand starting at position 143 of SEQ ID NO: 1882688
cccugaaauuuagcugcuu

SEQ ID NO: 2140395 - RNA, 19 nt, Artificial Sequence
  Description of Artificial Sequence: Synthetic oligonucleotide
  Antisense strand to SEQ ID NO: 2140394
aagcagcuaaauuucaggg

SEQ ID NO: 2140396 - RNA, 19 nt, Artificial Sequence
  Description of Artificial Sequence: Synthetic oligonucleotide
  Sense strand starting at position 392 of SEQ ID NO: 1882688
aucauuguugccugacaaa

SEQ ID NO: 2140397 - RNA, 19 nt, Artificial Sequence
  Description of Artificial Sequence: Synthetic oligonucleotide
  Antisense strand to SEQ ID NO: 2140396
uuugucaggcaacaaugau

SEQ ID NO: 2140398 - RNA, 19 nt, Artificial Sequence
  Description of Artificial Sequence: Synthetic oligonucleotide
  Sense strand starting at position 437 of SEQ ID NO: 1882688
uuccuaugugaguauaucu

SEQ ID NO: 2140399 - RNA, 19 nt, Artificial Sequence
  Description of Artificial Sequence: Synthetic oligonucleotide
  Antisense strand to SEQ ID NO: 2140398
agauauacucacauaggaa

SEQ ID NO: 2140400 - RNA, 19 nt, Artificial Sequence
  Description of Artificial Sequence: Synthetic oligonucleotide
  Sense strand starting at position 442 of SEQ ID NO: 1882688
augugaguauaucuccacu

SEQ ID NO: 2140401 - RNA, 19 nt, Artificial Sequence
  Description of Artificial Sequence: Synthetic oligonucleotide
  Antisense strand to SEQ ID NO: 2140400
aguggagauauacucacau

SEQ ID NO: 2140402 - RNA, 19 nt, Artificial Sequence
  Description of Artificial Sequence: Synthetic oligonucleotide
  Sense strand starting at position 574 of SEQ ID NO: 1882688
ucuugaaaguaccugauga

SEQ ID NO: 2140403 - RNA, 19 nt, Artificial Sequence
  Description of Artificial Sequence: Synthetic oligonucleotide
  Antisense strand to SEQ ID NO: 2140402
ucaucagguacuuucaaga

SEQ ID NO: 2140404 - RNA, 19 nt, Artificial Sequence
  Description of Artificial Sequence: Synthetic oligonucleotide
  Sense strand starting at position 694 of SEQ ID NO: 1882688
uuaccuuuacggugaaacu

SEQ ID NO: 2140405 - RNA, 19 nt, Artificial Sequence
  Description of Artificial Sequence: Synthetic oligonucleotide
  Antisense strand to SEQ ID NO: 2140404
aguuucaccguaaagguaa

SEQ ID NO: 2140406 - RNA, 19 nt, Artificial Sequence
  Description of Artificial Sequence: Synthetic oligonucleotide
  Sense strand starting at position 903 of SEQ ID NO: 1882688
gucaaucuucuugagggua

SEQ ID NO: 2140407 - RNA, 19 nt, Artificial Sequence
  Description of Artificial Sequence: Synthetic oligonucleotide
  Antisense strand to SEQ ID NO: 2140406
uacccucaagaagauugac

SEQ ID NO: 2140408 - RNA, 19 nt, Artificial Sequence
  Description of Artificial Sequence: Synthetic oligonucleotide
  Sense strand starting at position 927 of SEQ ID NO: 1882688
cugcaauguccuguguagu

SEQ ID NO: 2140409 - RNA, 19 nt, Artificial Sequence
  Description of Artificial Sequence: Synthetic oligonucleotide
  Antisense strand to SEQ ID NO: 2140408
acuacacaggacauugcag

SEQ ID NO: 2140410 - RNA, 19 nt, Artificial Sequence
  Description of Artificial Sequence: Synthetic oligonucleotide
  Sense strand starting at position 1012 of SEQ ID NO: 1882688
gguugauuccauugaucuc

SEQ ID NO: 2140411 - RNA, 19 nt, Artificial Sequence
  Description of Artificial Sequence: Synthetic oligonucleotide
  Antisense strand to SEQ ID NO: 2140410
gagaucaauggaaucaacc

SEQ ID NO: 2140412 - RNA, 19 nt, Artificial Sequence
  Description of Artificial Sequence: Synthetic oligonucleotide
  Sense strand starting at position 1107 of SEQ ID NO: 1882688
cagucaguuccagagugag

SEQ ID NO: 2140413 - RNA, 19 nt, Artificial Sequence
  Description of Artificial Sequence: Synthetic oligonucleotide
  Antisense strand to SEQ ID NO: 2140412
cucacucuggaacugacug

SEQ ID NO: 2140414 - RNA, 19 nt, Artificial Sequence
  Description of Artificial Sequence: Synthetic oligonucleotide
  Sense strand starting at position 1160 of SEQ ID NO: 1882688
auaggagucacuggcaacu

SEQ ID NO: 2140415 - RNA, 19 nt, Artificial Sequence
  Description of Artificial Sequence: Synthetic oligonucleotide
  Antisense strand to SEQ ID NO: 2140414
aguugccagugacuccuau

SEQ ID NO: 2140416 - RNA, 19 nt, Artificial Sequence
  Description of Artificial Sequence: Synthetic oligonucleotide
  Sense strand starting at position 1348 of SEQ ID NO: 1882688
ucaguauagccuggaauug

SEQ ID NO: 2140417 - RNA, 19 nt, Artificial Sequence
  Description of Artificial Sequence: Synthetic oligonucleotide
  Antisense strand to SEQ ID NO: 2140416
caauuccaggcuauacuga

SEQ ID NO: 2140418 - RNA, 19 nt, Artificial Sequence
  Description of Artificial Sequence: Synthetic oligonucleotide
  Sense strand starting at position 1349 of SEQ ID NO: 1882688
caguauagccuggaauuga

SEQ ID NO: 2140419 - RNA, 19 nt, Artificial Sequence
  Description of Artificial Sequence: Synthetic oligonucleotide
  Antisense strand to SEQ ID NO: 2140418
ucaauuccaggcuauacug

SEQ ID NO: 2140420 - RNA, 19 nt, Artificial Sequence
  Description of Artificial Sequence: Synthetic oligonucleotide
  Sense strand starting at position 1456 of SEQ ID NO: 1882688
ggccaaagcaguugaggau

SEQ ID NO: 2140421 - RNA, 19 nt, Artificial Sequence
  Description of Artificial Sequence: Synthetic oligonucleotide
  Antisense strand to SEQ ID NO: 2140420
auccucaacugcuuuggcc

SEQ ID NO: 2140422 - RNA, 19 nt, Artificial Sequence
  Description of Artificial Sequence: Synthetic oligonucleotide
  Sense strand starting at position 1463 of SEQ ID NO: 1882688
gcaguugaggaugauguua

SEQ ID NO: 2140423 - RNA, 19 nt, Artificial Sequence
  Description of Artificial Sequence: Synthetic oligonucleotide
  Antisense strand to SEQ ID NO: 2140422
uaacaucauccucaacugc

SEQ ID NO: 2140424 - RNA, 19 nt, Artificial Sequence
  Description of Artificial Sequence: Synthetic oligonucleotide
  Sense strand starting at position 2023 of SEQ ID NO: 1882688
ugaggcuacagucaguuaa

SEQ ID NO: 2140425 - RNA, 19 nt, Artificial Sequence
  Description of Artificial Sequence: Synthetic oligonucleotide
  Antisense strand to SEQ ID NO: 2140424
uuaacugacuguagccuca

SEQ ID NO: 2140426 - RNA, 19 nt, Artificial Sequence
  Description of Artificial Sequence: Synthetic oligonucleotide
  Sense strand starting at position 2027 of SEQ ID NO: 1882688
gcuacagucaguuaaugag

SEQ ID NO: 2140427 - RNA, 19 nt, Artificial Sequence
  Description of Artificial Sequence: Synthetic oligonucleotide
  Antisense strand to SEQ ID NO: 2140426
cucauuaacugacuguagc

SEQ ID NO: 2140428 - RNA, 19 nt, Artificial Sequence
  Description of Artificial Sequence: Synthetic oligonucleotide
  Sense strand starting at position 2052 of SEQ ID NO: 1882688
aaucgaacucauugaguag

SEQ ID NO: 2140429 - RNA, 19 nt, Artificial Sequence
  Description of Artificial Sequence: Synthetic oligonucleotide
  Antisense strand to SEQ ID NO: 2140428
cuacucaaugaguucgauu

SEQ ID NO: 2140430 - RNA, 19 nt, Artificial Sequence
  Description of Artificial Sequence: Synthetic oligonucleotide
  Sense strand starting at position 2055 of SEQ ID NO: 1882688
cgaacucauugaguagaga

SEQ ID NO: 2140431 - RNA, 19 nt, Artificial Sequence
  Description of Artificial Sequence: Synthetic oligonucleotide
  Antisense strand to SEQ ID NO: 2140430
ucucuacucaaugaguucg

SEQ ID NO: 2140432 - RNA, 19 nt, Artificial Sequence
  Description of Artificial Sequence: Synthetic oligonucleotide
  Sense strand starting at position 2068 of SEQ ID NO: 1882688
uagagaaaucuaugugcag

SEQ ID NO: 2140433 - RNA, 19 nt, Artificial Sequence
  Description of Artificial Sequence: Synthetic oligonucleotide
  Antisense strand to SEQ ID NO: 2140432
cugcacauagauuucucua

SEQ ID NO: 2140434 - RNA, 19 nt, Artificial Sequence
  Description of Artificial Sequence: Synthetic oligonucleotide
  Sense strand starting at position 2070 of SEQ ID NO: 1882688
gagaaaucuaugugcaggu

SEQ ID NO: 2140435 - RNA, 19 nt, Artificial Sequence
  Description of Artificial Sequence: Synthetic oligonucleotide
  Antisense strand to SEQ ID NO: 2140434
accugcacauagauuucuc

SEQ ID NO: 2140436 - RNA, 19 nt, Artificial Sequence
  Description of Artificial Sequence: Synthetic oligonucleotide
  Sense strand starting at position 2071 of SEQ ID NO: 1882688
agaaaucuaugugcaggua

SEQ ID NO: 2140437 - RNA, 19 nt, Artificial Sequence
  Description of Artificial Sequence: Synthetic oligonucleotide
  Antisense strand to SEQ ID NO: 2140436
uaccugcacauagauuucu

SEQ ID NO: 2140438 - RNA, 19 nt, Artificial Sequence
  Description of Artificial Sequence: Synthetic oligonucleotide
  Sense strand starting at position 2072 of SEQ ID NO: 1882688
gaaaucuaugugcagguaa

SEQ ID NO: 2140439 - RNA, 19 nt, Artificial Sequence
  Description of Artificial Sequence: Synthetic oligonucleotide
  Antisense strand to SEQ ID NO: 2140438
uuaccugcacauagauuuc

SEQ ID NO: 2140440 - RNA, 19 nt, Artificial Sequence
  Description of Artificial Sequence: Synthetic oligonucleotide
  Sense strand starting at position 2074 of SEQ ID NO: 1882688
aaucuaugugcagguaaga

SEQ ID NO: 2140441 - RNA, 19 nt, Artificial Sequence
  Description of Artificial Sequence: Synthetic oligonucleotide
  Antisense strand to SEQ ID NO: 2140440
ucuuaccugcacauagauu

SEQ ID NO: 2140442 - RNA, 19 nt, Artificial Sequence
  Description of Artificial Sequence: Synthetic oligonucleotide
  Sense strand starting at position 2632 of SEQ ID NO: 1882688
gaggaaacgcuauagaggu

SEQ ID NO: 2140443 - RNA, 19 nt, Artificial Sequence
  Description of Artificial Sequence: Synthetic oligonucleotide
  Antisense strand to SEQ ID NO: 2140442
accucuauagcguuuccuc

SEQ ID NO: 2140444 - RNA, 19 nt, Artificial Sequence
  Description of Artificial Sequence: Synthetic oligonucleotide
  Sense strand starting at position 2703 of SEQ ID NO: 1882688
aggaauuccucccauuuag

SEQ ID NO: 2140445 - RNA, 19 nt, Artificial Sequence
  Description of Artificial Sequence: Synthetic oligonucleotide
  Antisense strand to SEQ ID NO: 2140444
cuaaaugggaggaauuccu

SEQ ID NO: 2140446 - RNA, 19 nt, Artificial Sequence
  Description of Artificial Sequence: Synthetic oligonucleotide
  Sense strand starting at position 2720 of SEQ ID NO: 1882688
agucaacuauguguugaau

SEQ ID NO: 2140447 - RNA, 19 nt, Artificial Sequence
  Description of Artificial Sequence: Synthetic oligonucleotide
  Antisense strand to SEQ ID NO: 2140446
auucaacacauaguugacu

SEQ ID NO: 2140448 - RNA, 19 nt, Artificial Sequence
  Description of Artificial Sequence: Synthetic oligonucleotide
  Sense strand starting at position 2800 of SEQ ID NO: 1882688
aguuuauuaugcccagaga

SEQ ID NO: 2140449 - RNA, 19 nt, Artificial Sequence
  Description of Artificial Sequence: Synthetic oligonucleotide
  Antisense strand to SEQ ID NO: 2140448
ucucugggcauaauaaacu

SEQ ID NO: 2140450 - RNA, 19 nt, Artificial Sequence
  Description of Artificial Sequence: Synthetic oligonucleotide
  Sense strand starting at position 2801 of SEQ ID NO: 1882688
guuuauuaugcccagagaa

SEQ ID NO: 2140451 - RNA, 19 nt, Artificial Sequence
  Description of Artificial Sequence: Synthetic oligonucleotide
  Antisense strand to SEQ ID NO: 2140450
uucucugggcauaauaaac

SEQ ID NO: 2140452 - RNA, 19 nt, Artificial Sequence
  Description of Artificial Sequence: Synthetic oligonucleotide
  Sense strand starting at position 2820 of SEQ ID NO: 1882688
aguaguacugcuuaugaau

SEQ ID NO: 2140453 - RNA, 19 nt, Artificial Sequence
  Description of Artificial Sequence: Synthetic oligonucleotide
  Antisense strand to SEQ ID NO: 2140452
auucauaagcaguacuacu

SEQ ID NO: 2140454 - RNA, 19 nt, Artificial Sequence
  Description of Artificial Sequence: Synthetic oligonucleotide
  Sense strand starting at position 2829 of SEQ ID NO: 1882688
gcuuaugaauuucucgauc

SEQ ID NO: 2140455 - RNA, 19 nt, Artificial Sequence
  Description of Artificial Sequence: Synthetic oligonucleotide
  Antisense strand to SEQ ID NO: 2140454
gaucgagaaauucauaagc

SEQ ID NO: 2140456 - RNA, 19 nt, Artificial Sequence
  Description of Artificial Sequence: Synthetic oligonucleotide
  Sense strand starting at position 2846 of SEQ ID NO: 1882688
ucuaacuuucugcaaagga

SEQ ID NO: 2140457 - RNA, 19 nt, Artificial Sequence
  Description of Artificial Sequence: Synthetic oligonucleotide
  Antisense strand to SEQ ID NO: 2140456
uccuuugcagaaaguuaga

SEQ ID NO: 2140458 - RNA, 19 nt, Artificial Sequence
  Description of Artificial Sequence: Synthetic oligonucleotide
  Sense strand starting at position 2901 of SEQ ID NO: 1882688
guaguucugaucuaggaac

SEQ ID NO: 2140459 - RNA, 19 nt, Artificial Sequence
  Description of Artificial Sequence: Synthetic oligonucleotide
  Antisense strand to SEQ ID NO: 2140458
guuccuagaucagaacuac

SEQ ID NO: 2140460 - RNA, 19 nt, Artificial Sequence
  Description of Artificial Sequence: Synthetic oligonucleotide
  Sense strand starting at position 2990 of SEQ ID NO: 1882688
cuuagaucugguuagagua

SEQ ID NO: 2140461 - RNA, 19 nt, Artificial Sequence
  Description of Artificial Sequence: Synthetic oligonucleotide
  Antisense strand to SEQ ID NO: 2140460
uacucuaaccagaucuaag

SEQ ID NO: 2140462 - RNA, 19 nt, Artificial Sequence
  Description of Artificial Sequence: Synthetic oligonucleotide
  Sense strand starting at position 3019 of SEQ ID NO: 1882688
cuucuuaaggaauggucaa

SEQ ID NO: 2140463 - RNA, 19 nt, Artificial Sequence
  Description of Artificial Sequence: Synthetic oligonucleotide
  Antisense strand to SEQ ID NO: 2140462
uugaccauuccuuaagaag

SEQ ID NO: 2140464 - RNA, 19 nt, Artificial Sequence
  Description of Artificial Sequence: Synthetic oligonucleotide
  Sense strand starting at position 3113 of SEQ ID NO: 1882688
gcaauaggagguugguuaa

SEQ ID NO: 2140465 - RNA, 19 nt, Artificial Sequence
  Description of Artificial Sequence: Synthetic oligonucleotide
  Antisense strand to SEQ ID NO: 2140464
uuaaccaaccuccuauugc

SEQ ID NO: 2140466 - RNA, 19 nt, Artificial Sequence
  Description of Artificial Sequence: Synthetic oligonucleotide
  Sense strand starting at position 3116 of SEQ ID NO: 1882688
auaggagguugguuaaaua

SEQ ID NO: 2140467 - RNA, 19 nt, Artificial Sequence
  Description of Artificial Sequence: Synthetic oligonucleotide
  Antisense strand to SEQ ID NO: 2140466
uauuuaaccaaccuccuau

SEQ ID NO: 2140468 - RNA, 19 nt, Artificial Sequence
  Description of Artificial Sequence: Synthetic oligonucleotide
  Sense strand starting at position 3234 of SEQ ID NO: 1882688
aggauaccaugcucuaaau

SEQ ID NO: 2140469 - RNA, 19 nt, Artificial Sequence
  Description of Artificial Sequence: Synthetic oligonucleotide
  Antisense strand to SEQ ID NO: 2140468
auuuagagcaugguauccu

SEQ ID NO: 2140470 - RNA, 19 nt, Artificial Sequence
  Description of Artificial Sequence: Synthetic oligonucleotide
  Sense strand starting at position 3776 of SEQ ID NO: 1882688
cugacaaagccucagcuaa

SEQ ID NO: 2140471 - RNA, 19 nt, Artificial Sequence
  Description of Artificial Sequence: Synthetic oligonucleotide
  Antisense strand to SEQ ID NO: 2140470
uuagcugaggcuuugucag

SEQ ID NO: 2140472 - RNA, 19 nt, Artificial Sequence
  Description of Artificial Sequence: Synthetic oligonucleotide
  Sense strand starting at position 27 of SEQ ID NO: 1882690
ggaugcuccuaugcugaaa

SEQ ID NO: 2140473 - RNA, 19 nt, Artificial Sequence
  Description of Artificial Sequence: Synthetic oligonucleotide
  Antisense strand to SEQ ID NO: 2140472
uuucagcauaggagcaucc

SEQ ID NO: 2140474 - RNA, 19 nt, Artificial Sequence
  Description of Artificial Sequence: Synthetic oligonucleotide
  Sense strand starting at position 35 of SEQ ID NO: 1882690
cuaugcugaaaugguguua

SEQ ID NO: 2140475 - RNA, 19 nt, Artificial Sequence
  Description of Artificial Sequence: Synthetic oligonucleotide
  Antisense strand to SEQ ID NO: 2140474
uaacaccauuucagcauag

SEQ ID NO: 2140476 - RNA, 19 nt, Artificial Sequence
  Description of Artificial Sequence: Synthetic oligonucleotide
  Sense strand starting at position 47 of SEQ ID NO: 1882690
gguguuaugcuacauaauu

SEQ ID NO: 2140477 - RNA, 19 nt, Artificial Sequence
  Description of Artificial Sequence: Synthetic oligonucleotide
  Antisense strand to SEQ ID NO: 2140476
aauuauguagcauaacacc

SEQ ID NO: 2140478 - RNA, 19 nt, Artificial Sequence
  Description of Artificial Sequence: Synthetic oligonucleotide
  Sense strand starting at position 131 of SEQ ID NO: 1882690
gcuaucuuguaaucaagau

SEQ ID NO: 2140479 - RNA, 19 nt, Artificial Sequence
  Description of Artificial Sequence: Synthetic oligonucleotide
  Antisense strand to SEQ ID NO: 2140478
aucuugauuacaagauagc

SEQ ID NO: 2140480 - RNA, 19 nt, Artificial Sequence
  Description of Artificial Sequence: Synthetic oligonucleotide
  Sense strand starting at position 383 of SEQ ID NO: 1882690
aacagaugcgguuguuuaa

SEQ ID NO: 2140481 - RNA, 19 nt, Artificial Sequence
  Description of Artificial Sequence: Synthetic oligonucleotide
  Antisense strand to SEQ ID NO: 2140480
uuaaacaaccgcaucuguu

SEQ ID NO: 2140482 - RNA, 19 nt, Artificial Sequence
  Description of Artificial Sequence: Synthetic oligonucleotide
  Sense strand starting at position 618 of SEQ ID NO: 1882690
gcaagaacuggcuacuaca

SEQ ID NO: 2140483 - RNA, 19 nt, Artificial Sequence
  Description of Artificial Sequence: Synthetic oligonucleotide
  Antisense strand to SEQ ID NO: 2140482
uguaguagccaguucuugc

SEQ ID NO: 2140484 - RNA, 19 nt, Artificial Sequence
  Description of Artificial Sequence: Synthetic oligonucleotide
  Sense strand starting at position 639 of SEQ ID NO: 1882690
uggcaagugucaucauuuc

SEQ ID NO: 2140485 - RNA, 19 nt, Artificial Sequence
  Description of Artificial Sequence: Synthetic oligonucleotide
  Antisense strand to SEQ ID NO: 2140484
gaaaugaugacacuugcca

SEQ ID NO: 2140486 - RNA, 19 nt, Artificial Sequence
  Description of Artificial Sequence: Synthetic oligonucleotide
  Sense strand starting at position 646 of SEQ ID NO: 1882690
ugucaucauuucguaaaug

SEQ ID NO: 2140487 - RNA, 19 nt, Artificial Sequence
  Description of Artificial Sequence: Synthetic oligonucleotide
  Antisense strand to SEQ ID NO: 2140486
cauuuacgaaaugaugaca

SEQ ID NO: 2140488 - RNA, 19 nt, Artificial Sequence
  Description of Artificial Sequence: Synthetic oligonucleotide
  Sense strand starting at position 663 of SEQ ID NO: 1882690
uguuaagucuccuuuggug

SEQ ID NO: 2140489 - RNA, 19 nt, Artificial Sequence
  Description of Artificial Sequence: Synthetic oligonucleotide
  Antisense strand to SEQ ID NO: 2140488
caccaaaggagacuuaaca

SEQ ID NO: 2140490 - RNA, 19 nt, Artificial Sequence
  Description of Artificial Sequence: Synthetic oligonucleotide
  Sense strand starting at position 670 of SEQ ID NO: 1882690
ucuccuuuggugugagaca

SEQ ID NO: 2140491 - RNA, 19 nt, Artificial Sequence
  Description of Artificial Sequence: Synthetic oligonucleotide
  Antisense strand to SEQ ID NO: 2140490
ugucucacaccaaaggaga

SEQ ID NO: 2140492 - RNA, 19 nt, Artificial Sequence
  Description of Artificial Sequence: Synthetic oligonucleotide
  Sense strand starting at position 964 of SEQ ID NO: 1882690
uuugaaugccuuuagaauc

SEQ ID NO: 2140493 - RNA, 19 nt, Artificial Sequence
  Description of Artificial Sequence: Synthetic oligonucleotide
  Antisense strand to SEQ ID NO: 2140492
gauucuaaaggcauucaaa

SEQ ID NO: 2140494 - RNA, 19 nt, Artificial Sequence
  Description of Artificial Sequence: Synthetic oligonucleotide
  Sense strand starting at position 1011 of SEQ ID NO: 1882690
cucuuucugcuguaaguua

SEQ ID NO: 2140495 - RNA, 19 nt, Artificial Sequence
  Description of Artificial Sequence: Synthetic oligonucleotide
  Antisense strand to SEQ ID NO: 2140494
uaacuuacagcagaaagag

SEQ ID NO: 2140496 - RNA, 19 nt, Artificial Sequence
  Description of Artificial Sequence: Synthetic oligonucleotide
  Sense strand starting at position 1019 of SEQ ID NO: 1882690
gcuguaaguuauuuaugca

SEQ ID NO: 2140497 - RNA, 19 nt, Artificial Sequence
  Description of Artificial Sequence: Synthetic oligonucleotide
  Antisense strand to SEQ ID NO: 2140496
ugcauaaauaacuuacagc

SEQ ID NO: 2140498 - RNA, 19 nt, Artificial Sequence
  Description of Artificial Sequence: Synthetic oligonucleotide
  Sense strand starting at position 1077 of SEQ ID NO: 1882690
ccaguacucgcucacacau

SEQ ID NO: 2140499 - RNA, 19 nt, Artificial Sequence
  Description of Artificial Sequence: Synthetic oligonucleotide
  Antisense strand to SEQ ID NO: 2140498
augugugagcgaguacugg

SEQ ID NO: 2140500 - RNA, 19 nt, Artificial Sequence
  Description of Artificial Sequence: Synthetic oligonucleotide
  Sense strand starting at position 1112 of SEQ ID NO: 1882690
ucaauuaaucuguaagguu

SEQ ID NO: 2140501 - RNA, 19 nt, Artificial Sequence
  Description of Artificial Sequence: Synthetic oligonucleotide
  Antisense strand to SEQ ID NO: 2140500
aaccuuacagauuaauuga

SEQ ID NO: 2140502 - RNA, 19 nt, Artificial Sequence
  Description of Artificial Sequence: Synthetic oligonucleotide
  Sense strand starting at position 1176 of SEQ ID NO: 1882690
aaaguaacuuguucuaggu

SEQ ID NO: 2140503 - RNA, 19 nt, Artificial Sequence
  Description of Artificial Sequence: Synthetic oligonucleotide
  Antisense strand to SEQ ID NO: 2140502
accuagaacaaguuacuuu

SEQ ID NO: 2140504 - RNA, 19 nt, Artificial Sequence
  Description of Artificial Sequence: Synthetic oligonucleotide
  Sense strand starting at position 1511 of SEQ ID NO: 1882690
gggccuaagucuucggagu

SEQ ID NO: 2140505 - RNA, 19 nt, Artificial Sequence
  Description of Artificial Sequence: Synthetic oligonucleotide
  Antisense strand to SEQ ID NO: 2140504
acuccgaagacuuaggccc

SEQ ID NO: 2140506 - RNA, 19 nt, Artificial Sequence
  Description of Artificial Sequence: Synthetic oligonucleotide
  Sense strand starting at position 1512 of SEQ ID NO: 1882690
ggccuaagucuucggaguu

SEQ ID NO: 2140507 - RNA, 19 nt, Artificial Sequence
  Description of Artificial Sequence: Synthetic oligonucleotide
  Antisense strand to SEQ ID NO: 2140506
aacuccgaagacuuaggcc

SEQ ID NO: 2140508 - RNA, 19 nt, Artificial Sequence
  Description of Artificial Sequence: Synthetic oligonucleotide
  Sense strand starting at position 2107 of SEQ ID NO: 1882690
gcaggaguccggucguuca

SEQ ID NO: 2140509 - RNA, 19 nt, Artificial Sequence
  Description of Artificial Sequence: Synthetic oligonucleotide
  Antisense strand to SEQ ID NO: 2140508
ugaacgaccggacuccugc

SEQ ID NO: 2140510 - RNA, 19 nt, Artificial Sequence
  Description of Artificial Sequence: Synthetic oligonucleotide
  Sense strand starting at position 2558 of SEQ ID NO: 1882690
cugaaauacucauucgagg

SEQ ID NO: 2140511 - RNA, 19 nt, Artificial Sequence
  Description of Artificial Sequence: Synthetic oligonucleotide
  Antisense strand to SEQ ID NO: 2140510
ccucgaaugaguauuucag

SEQ ID NO: 2140512 - RNA, 19 nt, Artificial Sequence
  Description of Artificial Sequence: Synthetic oligonucleotide
  Sense strand starting at position 2579 of SEQ ID NO: 1882690
acacaaagauucucccgau

SEQ ID NO: 2140513 - RNA, 19 nt, Artificial Sequence
  Description of Artificial Sequence: Synthetic oligonucleotide
  Antisense strand to SEQ ID NO: 2140512
aucgggagaaucuuugugu

SEQ ID NO: 2140514 - RNA, 19 nt, Artificial Sequence
  Description of Artificial Sequence: Synthetic oligonucleotide
  Sense strand starting at position 2585 of SEQ ID NO: 1882690
agauucucccgaugcuuau

SEQ ID NO: 2140515 - RNA, 19 nt, Artificial Sequence
  Description of Artificial Sequence: Synthetic oligonucleotide
  Antisense strand to SEQ ID NO: 2140514
auaagcaucgggagaaucu

SEQ ID NO: 2140516 - RNA, 19 nt, Artificial Sequence
  Description of Artificial Sequence: Synthetic oligonucleotide
  Sense strand starting at position 2874 of SEQ ID NO: 1882690
cgucaaggagccuguuuau

SEQ ID NO: 2140517 - RNA, 19 nt, Artificial Sequence
  Description of Artificial Sequence: Synthetic oligonucleotide
  Antisense strand to SEQ ID NO: 2140516
auaaacaggcuccuugacg

SEQ ID NO: 2140518 - RNA, 19 nt, Artificial Sequence
  Description of Artificial Sequence: Synthetic oligonucleotide
  Sense strand starting at position 2877 of SEQ ID NO: 1882690
caaggagccuguuuauaaa

SEQ ID NO: 2140519 - RNA, 19 nt, Artificial Sequence
  Description of Artificial Sequence: Synthetic oligonucleotide
  Antisense strand to SEQ ID NO: 2140518
uuuauaaacaggcuccuug

SEQ ID NO: 2140520 - RNA, 19 nt, Artificial Sequence
  Description of Artificial Sequence: Synthetic oligonucleotide
  Sense strand starting at position 2921 of SEQ ID NO: 1882690
gggccaacuuuacugcaua

SEQ ID NO: 2140521 - RNA, 19 nt, Artificial Sequence
  Description of Artificial Sequence: Synthetic oligonucleotide
  Antisense strand to SEQ ID NO: 2140520
uaugcaguaaaguuggccc

SEQ ID NO: 2140522 - RNA, 19 nt, Artificial Sequence
  Description of Artificial Sequence: Synthetic oligonucleotide
  Sense strand starting at position 3058 of SEQ ID NO: 1882690
uagcaaguaucauuaggaa

SEQ ID NO: 2140523 - RNA, 19 nt, Artificial Sequence
  Description of Artificial Sequence: Synthetic oligonucleotide
  Antisense strand to SEQ ID NO: 2140522
uuccuaaugauacuugcua

SEQ ID NO: 2140524 - RNA, 19 nt, Artificial Sequence
  Description of Artificial Sequence: Synthetic oligonucleotide
  Sense strand starting at position 3092 of SEQ ID NO: 1882690
uuaggaucuucuccggacu

SEQ ID NO: 2140525 - RNA, 19 nt, Artificial Sequence
  Description of Artificial Sequence: Synthetic oligonucleotide
  Antisense strand to SEQ ID NO: 2140524
aguccggagaagauccuaa

SEQ ID NO: 2140526 - RNA, 19 nt, Artificial Sequence
  Description of Artificial Sequence: Synthetic oligonucleotide
  Sense strand starting at position 3095 of SEQ ID NO: 1882690
ggaucuucuccggacucuu

SEQ ID NO: 2140527 - RNA, 19 nt, Artificial Sequence
  Description of Artificial Sequence: Synthetic oligonucleotide
  Antisense strand to SEQ ID NO: 2140526
aagaguccggagaagaucc

SEQ ID NO: 2140528 - RNA, 19 nt, Artificial Sequence
  Description of Artificial Sequence: Synthetic oligonucleotide
  Sense strand starting at position 3290 of SEQ ID NO: 1882690
ugguucugcucccuacuaa

SEQ ID NO: 2140529 - RNA, 19 nt, Artificial Sequence
  Description of Artificial Sequence: Synthetic oligonucleotide
  Antisense strand to SEQ ID NO: 2140528
uuaguagggagcagaacca

SEQ ID NO: 2140530 - RNA, 19 nt, Artificial Sequence
  Description of Artificial Sequence: Synthetic oligonucleotide
  Sense strand starting at position 3302 of SEQ ID NO: 1882690
cuacuaaguguugauucuu

SEQ ID NO: 2140531 - RNA, 19 nt, Artificial Sequence
  Description of Artificial Sequence: Synthetic oligonucleotide
  Antisense strand to SEQ ID NO: 2140530
aagaaucaacacuuaguag

SEQ ID NO: 2140532 - RNA, 19 nt, Artificial Sequence
  Description of Artificial Sequence: Synthetic oligonucleotide
  Sense strand starting at position 3310 of SEQ ID NO: 1882690
uguugauucuuccucagua

SEQ ID NO: 2140533 - RNA, 19 nt, Artificial Sequence
  Description of Artificial Sequence: Synthetic oligonucleotide
  Antisense strand to SEQ ID NO: 2140532
uacugaggaagaaucaaca

SEQ ID NO: 2140534 - RNA, 19 nt, Artificial Sequence
  Description of Artificial Sequence: Synthetic oligonucleotide
  Sense strand starting at position 3311 of SEQ ID NO: 1882690
guugauucuuccucaguaa

SEQ ID NO: 2140535 - RNA, 19 nt, Artificial Sequence
  Description of Artificial Sequence: Synthetic oligonucleotide
  Antisense strand to SEQ ID NO: 2140534
uuacugaggaagaaucaac

SEQ ID NO: 2140536 - RNA, 19 nt, Artificial Sequence
  Description of Artificial Sequence: Synthetic oligonucleotide
  Sense strand starting at position 3444 of SEQ ID NO: 1882690
aggagaaccuauuaauauu

SEQ ID NO: 2140537 - RNA, 19 nt, Artificial Sequence
  Description of Artificial Sequence: Synthetic oligonucleotide
  Antisense strand to SEQ ID NO: 2140536
aauauuaauagguucuccu

SEQ ID NO: 2140538 - RNA, 19 nt, Artificial Sequence
  Description of Artificial Sequence: Synthetic oligonucleotide
  Sense strand starting at position 3508 of SEQ ID NO: 1882690
cuaggcauuugacagauau

SEQ ID NO: 2140539 - RNA, 19 nt, Artificial Sequence
  Description of Artificial Sequence: Synthetic oligonucleotide
  Antisense strand to SEQ ID NO: 2140538
auaucugucaaaugccuag

SEQ ID NO: 2140540 - RNA, 19 nt, Artificial Sequence
  Description of Artificial Sequence: Synthetic oligonucleotide
  Sense strand starting at position 3556 of SEQ ID NO: 1882690
gauaauaccugugagagaa

SEQ ID NO: 2140541 - RNA, 19 nt, Artificial Sequence
  Description of Artificial Sequence: Synthetic oligonucleotide
  Antisense strand to SEQ ID NO: 2140540
uucucucacagguauuauc

SEQ ID NO: 2140542 - RNA, 19 nt, Artificial Sequence
  Description of Artificial Sequence: Synthetic oligonucleotide
  Sense strand starting at position 3558 of SEQ ID NO: 1882690
uaauaccugugagagaaua

SEQ ID NO: 2140543 - RNA, 19 nt, Artificial Sequence
  Description of Artificial Sequence: Synthetic oligonucleotide
  Antisense strand to SEQ ID NO: 2140542
uauucucucacagguauua

SEQ ID NO: 2140544 - RNA, 19 nt, Artificial Sequence
  Description of Artificial Sequence: Synthetic oligonucleotide
  Sense strand starting at position 3685 of SEQ ID NO: 1882690
uuguguuuccuuuagaagu

SEQ ID NO: 2140545 - RNA, 19 nt, Artificial Sequence
  Description of Artificial Sequence: Synthetic oligonucleotide
  Antisense strand to SEQ ID NO: 2140544
acuucuaaaggaaacacaa

SEQ ID NO: 2140546 - RNA, 19 nt, Artificial Sequence
  Description of Artificial Sequence: Synthetic oligonucleotide
  Sense strand starting at position 3861 of SEQ ID NO: 1882690
guccaagacuucucaggau

SEQ ID NO: 2140547 - RNA, 19 nt, Artificial Sequence
  Description of Artificial Sequence: Synthetic oligonucleotide
  Antisense strand to SEQ ID NO: 2140546
auccugagaagucuuggac

SEQ ID NO: 2140548 - RNA, 19 nt, Artificial Sequence
  Description of Artificial Sequence: Synthetic oligonucleotide
  Sense strand starting at position 3917 of SEQ ID NO: 1882690
gcacaugugugaucugcua

SEQ ID NO: 2140549 - RNA, 19 nt, Artificial Sequence
  Description of Artificial Sequence: Synthetic oligonucleotide
  Antisense strand to SEQ ID NO: 2140548
uagcagaucacacaugugc

SEQ ID NO: 2140550 - RNA, 19 nt, Artificial Sequence
  Description of Artificial Sequence: Synthetic oligonucleotide
  Sense strand starting at position 3977 of SEQ ID NO: 1882690
ccgaauguucuaggcauaa

SEQ ID NO: 2140551 - RNA, 19 nt, Artificial Sequence
  Description of Artificial Sequence: Synthetic oligonucleotide
  Antisense strand to SEQ ID NO: 2140550
uuaugccuagaacauucgg

SEQ ID NO: 2140552 - RNA, 19 nt, Artificial Sequence
  Description of Artificial Sequence: Synthetic oligonucleotide
  Sense strand starting at position 44 of SEQ ID NO: 1882691
ggcgauguuggcuaaagga

SEQ ID NO: 2140553 - RNA, 19 nt, Artificial Sequence
  Description of Artificial Sequence: Synthetic oligonucleotide
  Antisense strand to SEQ ID NO: 2140552
uccuuuagccaacaucgcc

SEQ ID NO: 2140554 - RNA, 19 nt, Artificial Sequence
  Description of Artificial Sequence: Synthetic oligonucleotide
  Sense strand starting at position 194 of SEQ ID NO: 1882691
aaguaugugagauacucga

SEQ ID NO: 2140555 - RNA, 19 nt, Artificial Sequence
  Description of Artificial Sequence: Synthetic oligonucleotide
  Antisense strand to SEQ ID NO: 2140554
ucgaguaucucacauacuu

SEQ ID NO: 2140556 - RNA, 19 nt, Artificial Sequence
  Description of Artificial Sequence: Synthetic oligonucleotide
  Sense strand starting at position 334 of SEQ ID NO: 1882691
uggugagauaaugggcaau

SEQ ID NO: 2140557 - RNA, 19 nt, Artificial Sequence
  Description of Artificial Sequence: Synthetic oligonucleotide
  Antisense strand to SEQ ID NO: 2140556
auugcccauuaucucacca

SEQ ID NO: 2140558 - RNA, 19 nt, Artificial Sequence
  Description of Artificial Sequence: Synthetic oligonucleotide
  Sense strand starting at position 449 of SEQ ID NO: 1882691
ucuucuaggcaguggauau

SEQ ID NO: 2140559 - RNA, 19 nt, Artificial Sequence
  Description of Artificial Sequence: Synthetic oligonucleotide
  Antisense strand to SEQ ID NO: 2140558
auauccacugccuagaaga

SEQ ID NO: 2140560 - RNA, 19 nt, Artificial Sequence
  Description of Artificial Sequence: Synthetic oligonucleotide
  Sense strand starting at position 450 of SEQ ID NO: 1882691
cuucuaggcaguggauauu

SEQ ID NO: 2140561 - RNA, 19 nt, Artificial Sequence
  Description of Artificial Sequence: Synthetic oligonucleotide
  Antisense strand to SEQ ID NO: 2140560
aauauccacugccuagaag

SEQ ID NO: 2140562 - RNA, 19 nt, Artificial Sequence
  Description of Artificial Sequence: Synthetic oligonucleotide
  Sense strand starting at position 559 of SEQ ID NO: 1882691
gagugaugucacuguagac

SEQ ID NO: 2140563 - RNA, 19 nt, Artificial Sequence
  Description of Artificial Sequence: Synthetic oligonucleotide
  Antisense strand to SEQ ID NO: 2140562
gucuacagugacaucacuc

SEQ ID NO: 2140564 - RNA, 19 nt, Artificial Sequence
  Description of Artificial Sequence: Synthetic oligonucleotide
  Sense strand starting at position 1124 of SEQ ID NO: 1882691
cuggcaaacccaggagaua

SEQ ID NO: 2140565 - RNA, 19 nt, Artificial Sequence
  Description of Artificial Sequence: Synthetic oligonucleotide
  Antisense strand to SEQ ID NO: 2140564
uaucuccuggguuugccag

SEQ ID NO: 2140566 - RNA, 19 nt, Artificial Sequence
  Description of Artificial Sequence: Synthetic oligonucleotide
  Sense strand starting at position 1243 of SEQ ID NO: 1882691
guuugcuccgugguuacaa

SEQ ID NO: 2140567 - RNA, 19 nt, Artificial Sequence
  Description of Artificial Sequence: Synthetic oligonucleotide
  Antisense strand to SEQ ID NO: 2140566
uuguaaccacggagcaaac

SEQ ID NO: 2140568 - RNA, 19 nt, Artificial Sequence
  Description of Artificial Sequence: Synthetic oligonucleotide
  Sense strand starting at position 1261 of SEQ ID NO: 1882691
aaccaaguuccacggagaa

SEQ ID NO: 2140569 - RNA, 19 nt, Artificial Sequence
  Description of Artificial Sequence: Synthetic oligonucleotide
  Antisense strand to SEQ ID NO: 2140568
uucuccguggaacuugguu

SEQ ID NO: 2140570 - RNA, 19 nt, Artificial Sequence
  Description of Artificial Sequence: Synthetic oligonucleotide
  Sense strand starting at position 1347 of SEQ ID NO: 1882691
ccgaauguucgcuugccau

SEQ ID NO: 2140571 - RNA, 19 nt, Artificial Sequence
  Description of Artificial Sequence: Synthetic oligonucleotide
  Antisense strand to SEQ ID NO: 2140570
auggcaagcgaacauucgg

SEQ ID NO: 2140572 - RNA, 19 nt, Artificial Sequence
  Description of Artificial Sequence: Synthetic oligonucleotide
  Sense strand starting at position 1406 of SEQ ID NO: 1882691
uccacaaguccuggcaauu

SEQ ID NO: 2140573 - RNA, 19 nt, Artificial Sequence
  Description of Artificial Sequence: Synthetic oligonucleotide
  Antisense strand to SEQ ID NO: 2140572
aauugccaggacuugugga

SEQ ID NO: 2140574 - RNA, 19 nt, Artificial Sequence
  Description of Artificial Sequence: Synthetic oligonucleotide
  Sense strand starting at position 1663 of SEQ ID NO: 1882691
gcaggaaguuccuugaggu

SEQ ID NO: 2140575 - RNA, 19 nt, Artificial Sequence
  Description of Artificial Sequence: Synthetic oligonucleotide
  Antisense strand to SEQ ID NO: 2140574
accucaaggaacuuccugc

SEQ ID NO: 2140576 - RNA, 19 nt, Artificial Sequence
  Description of Artificial Sequence: Synthetic oligonucleotide
  Sense strand starting at position 1664 of SEQ ID NO: 1882691
caggaaguuccuugaggua

SEQ ID NO: 2140577 - RNA, 19 nt, Artificial Sequence
  Description of Artificial Sequence: Synthetic oligonucleotide
  Antisense strand to SEQ ID NO: 2140576
uaccucaaggaacuuccug

SEQ ID NO: 2140578 - RNA, 19 nt, Artificial Sequence
  Description of Artificial Sequence: Synthetic oligonucleotide
  Sense strand starting at position 1703 of SEQ ID NO: 1882691
auuagucagcuugggcaaa

SEQ ID NO: 2140579 - RNA, 19 nt, Artificial Sequence
  Description of Artificial Sequence: Synthetic oligonucleotide
  Antisense strand to SEQ ID NO: 2140578
uuugcccaagcugacuaau

SEQ ID NO: 2140580 - RNA, 19 nt, Artificial Sequence
  Description of Artificial Sequence: Synthetic oligonucleotide
  Sense strand starting at position 1872 of SEQ ID NO: 1882691
ggagguagcuuucuaguca

SEQ ID NO: 2140581 - RNA, 19 nt, Artificial Sequence
  Description of Artificial Sequence: Synthetic oligonucleotide
  Antisense strand to SEQ ID NO: 2140580
ugacuagaaagcuaccucc

SEQ ID NO: 2140582 - RNA, 19 nt, Artificial Sequence
  Description of Artificial Sequence: Synthetic oligonucleotide
  Sense strand starting at position 1895 of SEQ ID NO: 1882691
uccaaaucagcgcuguagu

SEQ ID NO: 2140583 - RNA, 19 nt, Artificial Sequence
  Description of Artificial Sequence: Synthetic oligonucleotide
  Antisense strand to SEQ ID NO: 2140582
acuacagcgcugauuugga

SEQ ID NO: 2140584 - RNA, 19 nt, Artificial Sequence
  Description of Artificial Sequence: Synthetic oligonucleotide
  Sense strand starting at position 2121 of SEQ ID NO: 1882691
aucuguuucuugguuuaag

SEQ ID NO: 2140585 - RNA, 19 nt, Artificial Sequence
  Description of Artificial Sequence: Synthetic oligonucleotide
  Antisense strand to SEQ ID NO: 2140584
cuuaaaccaagaaacagau

SEQ ID NO: 2140586 - RNA, 19 nt, Artificial Sequence
  Description of Artificial Sequence: Synthetic oligonucleotide
  Sense strand starting at position 2122 of SEQ ID NO: 1882691
ucuguuucuugguuuaaga

SEQ ID NO: 2140587 - RNA, 19 nt, Artificial Sequence
  Description of Artificial Sequence: Synthetic oligonucleotide
  Antisense strand to SEQ ID NO: 2140586
ucuuaaaccaagaaacaga

SEQ ID NO: 2140588 - RNA, 19 nt, Artificial Sequence
  Description of Artificial Sequence: Synthetic oligonucleotide
  Sense strand starting at position 2130 of SEQ ID NO: 1882691
uugguuuaagagugaucau

SEQ ID NO: 2140589 - RNA, 19 nt, Artificial Sequence
  Description of Artificial Sequence: Synthetic oligonucleotide
  Antisense strand to SEQ ID NO: 2140588
augaucacucuuaaaccaa

SEQ ID NO: 2140590 - RNA, 19 nt, Artificial Sequence
  Description of Artificial Sequence: Synthetic oligonucleotide
  Sense strand starting at position 2131 of SEQ ID NO: 1882691
ugguuuaagagugaucaug

SEQ ID NO: 2140591 - RNA, 19 nt, Artificial Sequence
  Description of Artificial Sequence: Synthetic oligonucleotide
  Antisense strand to SEQ ID NO: 2140590
caugaucacucuuaaacca

SEQ ID NO: 2140592 - RNA, 19 nt, Artificial Sequence
  Description of Artificial Sequence: Synthetic oligonucleotide
  Sense strand starting at position 2197 of SEQ ID NO: 1882691
uugggauauuacguaguuu

SEQ ID NO: 2140593 - RNA, 19 nt, Artificial Sequence
  Description of Artificial Sequence: Synthetic oligonucleotide
  Antisense strand to SEQ ID NO: 2140592
aaacuacguaauaucccaa

SEQ ID NO: 2140594 - RNA, 19 nt, Artificial Sequence
  Description of Artificial Sequence: Synthetic oligonucleotide
  Sense strand starting at position 2280 of SEQ ID NO: 1882691
gcaguucugaagcaagaau

SEQ ID NO: 2140595 - RNA, 19 nt, Artificial Sequence
  Description of Artificial Sequence: Synthetic oligonucleotide
  Antisense strand to SEQ ID NO: 2140594
auucuugcuucagaacugc

SEQ ID NO: 2140596 - RNA, 19 nt, Artificial Sequence
  Description of Artificial Sequence: Synthetic oligonucleotide
  Sense strand starting at position 2370 of SEQ ID NO: 1882691
accucacugcgugaauaug

SEQ ID NO: 2140597 - RNA, 19 nt, Artificial Sequence
  Description of Artificial Sequence: Synthetic oligonucleotide
  Antisense strand to SEQ ID NO: 2140596
cauauucacgcagugaggu

SEQ ID NO: 2140598 - RNA, 19 nt, Artificial Sequence
  Description of Artificial Sequence: Synthetic oligonucleotide
  Sense strand starting at position 2379 of SEQ ID NO: 1882691
cgugaauaugcaugauuag

SEQ ID NO: 2140599 - RNA, 19 nt, Artificial Sequence
  Description of Artificial Sequence: Synthetic oligonucleotide
  Antisense strand to SEQ ID NO: 2140598
cuaaucaugcauauucacg

SEQ ID NO: 2140600 - RNA, 19 nt, Artificial Sequence
  Description of Artificial Sequence: Synthetic oligonucleotide
  Sense strand starting at position 2653 of SEQ ID NO: 1882691
uugguuugaugacuuaauc

SEQ ID NO: 2140601 - RNA, 19 nt, Artificial Sequence
  Description of Artificial Sequence: Synthetic oligonucleotide
  Antisense strand to SEQ ID NO: 2140600
gauuaagucaucaaaccaa

SEQ ID NO: 2140602 - RNA, 19 nt, Artificial Sequence
  Description of Artificial Sequence: Synthetic oligonucleotide
  Sense strand starting at position 2727 of SEQ ID NO: 1882691
agcaccuagugacuagauu

SEQ ID NO: 2140603 - RNA, 19 nt, Artificial Sequence
  Description of Artificial Sequence: Synthetic oligonucleotide
  Antisense strand to SEQ ID NO: 2140602
aaucuagucacuaggugcu

SEQ ID NO: 2140604 - RNA, 19 nt, Artificial Sequence
  Description of Artificial Sequence: Synthetic oligonucleotide
  Sense strand starting at position 2746 of SEQ ID NO: 1882691
uggacuuccuugcucacua

SEQ ID NO: 2140605 - RNA, 19 nt, Artificial Sequence
  Description of Artificial Sequence: Synthetic oligonucleotide
  Antisense strand to SEQ ID NO: 2140604
uagugagcaaggaagucca

SEQ ID NO: 2140606 - RNA, 19 nt, Artificial Sequence
  Description of Artificial Sequence: Synthetic oligonucleotide
  Sense strand starting at position 2773 of SEQ ID NO: 1882691
gccuaacuccaucagauga

SEQ ID NO: 2140607 - RNA, 19 nt, Artificial Sequence
  Description of Artificial Sequence: Synthetic oligonucleotide
  Antisense strand to SEQ ID NO: 2140606
ucaucugauggaguuaggc

SEQ ID NO: 2140608 - RNA, 19 nt, Artificial Sequence
  Description of Artificial Sequence: Synthetic oligonucleotide
  Sense strand starting at position 2852 of SEQ ID NO: 1882691
auuccugguuucuuugaau

SEQ ID NO: 2140609 - RNA, 19 nt, Artificial Sequence
  Description of Artificial Sequence: Synthetic oligonucleotide
  Antisense strand to SEQ ID NO: 2140608
auucaaagaaaccaggaau

SEQ ID NO: 2140610 - RNA, 19 nt, Artificial Sequence
  Description of Artificial Sequence: Synthetic oligonucleotide
  Sense strand starting at position 3003 of SEQ ID NO: 1882691
gaaguccagcuacaugauu

SEQ ID NO: 2140611 - RNA, 19 nt, Artificial Sequence
  Description of Artificial Sequence: Synthetic oligonucleotide
  Antisense strand to SEQ ID NO: 2140610
aaucauguagcuggacuuc

SEQ ID NO: 2140612 - RNA, 19 nt, Artificial Sequence
  Description of Artificial Sequence: Synthetic oligonucleotide
  Sense strand starting at position 3097 of SEQ ID NO: 1882691
uuggauuucucuuaaggac

SEQ ID NO: 2140613 - RNA, 19 nt, Artificial Sequence
  Description of Artificial Sequence: Synthetic oligonucleotide
  Antisense strand to SEQ ID NO: 2140612
guccuuaagagaaauccaa

SEQ ID NO: 2140614 - RNA, 19 nt, Artificial Sequence
  Description of Artificial Sequence: Synthetic oligonucleotide
  Sense strand starting at position 3175 of SEQ ID NO: 1882691
agaguaagaaugugguuua

SEQ ID NO: 2140615 - RNA, 19 nt, Artificial Sequence
  Description of Artificial Sequence: Synthetic oligonucleotide
  Antisense strand to SEQ ID NO: 2140614
uaaaccacauucuuacucu

SEQ ID NO: 2140616 - RNA, 19 nt, Artificial Sequence
  Description of Artificial Sequence: Synthetic oligonucleotide
  Sense strand starting at position 3178 of SEQ ID NO: 1882691
guaagaaugugguuuauag

SEQ ID NO: 2140617 - RNA, 19 nt, Artificial Sequence
  Description of Artificial Sequence: Synthetic oligonucleotide
  Antisense strand to SEQ ID NO: 2140616
cuauaaaccacauucuuac

SEQ ID NO: 2140618 - RNA, 19 nt, Artificial Sequence
  Description of Artificial Sequence: Synthetic oligonucleotide
  Sense strand starting at position 3263 of SEQ ID NO: 1882691
ucucuugcuccuuaugagu

SEQ ID NO: 2140619 - RNA, 19 nt, Artificial Sequence
  Description of Artificial Sequence: Synthetic oligonucleotide
  Antisense strand to SEQ ID NO: 2140618
acucauaaggagcaagaga

SEQ ID NO: 2140620 - RNA, 19 nt, Artificial Sequence
  Description of Artificial Sequence: Synthetic oligonucleotide
  Sense strand starting at position 3284 of SEQ ID NO: 1882691
ucuuuaaacuaggaaagaa

SEQ ID NO: 2140621 - RNA, 19 nt, Artificial Sequence
  Description of Artificial Sequence: Synthetic oligonucleotide
  Antisense strand to SEQ ID NO: 2140620
uucuuuccuaguuuaaaga

SEQ ID NO: 2140622 - RNA, 19 nt, Artificial Sequence
  Description of Artificial Sequence: Synthetic oligonucleotide
  Sense strand starting at position 3400 of SEQ ID NO: 1882691
acaaguauguucucuauuc

SEQ ID NO: 2140623 - RNA, 19 nt, Artificial Sequence
  Description of Artificial Sequence: Synthetic oligonucleotide
  Antisense strand to SEQ ID NO: 2140622
gaauagagaacauacuugu

SEQ ID NO: 2140624 - RNA, 19 nt, Artificial Sequence
  Description of Artificial Sequence: Synthetic oligonucleotide
  Sense strand starting at position 3776 of SEQ ID NO: 1882691
accauaucacacugauugu

SEQ ID NO: 2140625 - RNA, 19 nt, Artificial Sequence
  Description of Artificial Sequence: Synthetic oligonucleotide
  Antisense strand to SEQ ID NO: 2140624
acaaucagugugauauggu

SEQ ID NO: 2140626 - RNA, 19 nt, Artificial Sequence
  Description of Artificial Sequence: Synthetic oligonucleotide
  Sense strand starting at position 3803 of SEQ ID NO: 1882691
gccaauagauuguuuacuu

SEQ ID NO: 2140627 - RNA, 19 nt, Artificial Sequence
  Description of Artificial Sequence: Synthetic oligonucleotide
  Antisense strand to SEQ ID NO: 2140626
aaguaaacaaucuauuggc

SEQ ID NO: 2140628 - RNA, 19 nt, Artificial Sequence
  Description of Artificial Sequence: Synthetic oligonucleotide
  Sense strand starting at position 3842 of SEQ ID NO: 1882691
gucaacauauaguuccaua

SEQ ID NO: 2140629 - RNA, 19 nt, Artificial Sequence
  Description of Artificial Sequence: Synthetic oligonucleotide
  Antisense strand to SEQ ID NO: 2140628
uauggaacuauauguugac

SEQ ID NO: 2140630 - RNA, 19 nt, Artificial Sequence
  Description of Artificial Sequence: Synthetic oligonucleotide
  Sense strand starting at position 3980 of SEQ ID NO: 1882691
cucaguuccucaccacaga

SEQ ID NO: 2140631 - RNA, 19 nt, Artificial Sequence
  Description of Artificial Sequence: Synthetic oligonucleotide
  Antisense strand to SEQ ID NO: 2140630
ucuguggugaggaacugag

SEQ ID NO: 2140632 - RNA, 19 nt, Artificial Sequence
  Description of Artificial Sequence: Synthetic oligonucleotide
  Sense strand starting at position 70 of SEQ ID NO: 1882692
gacaaauggcagugguaua

SEQ ID NO: 2140633 - RNA, 19 nt, Artificial Sequence
  Description of Artificial Sequence: Synthetic oligonucleotide
  Antisense strand to SEQ ID NO: 2140632
uauaccacugccauuuguc

SEQ ID NO: 2140634 - RNA, 19 nt, Artificial Sequence
  Description of Artificial Sequence: Synthetic oligonucleotide
  Sense strand starting at position 82 of SEQ ID NO: 1882692
ugguauaugaagcaaguuu

SEQ ID NO: 2140635 - RNA, 19 nt, Artificial Sequence
  Description of Artificial Sequence: Synthetic oligonucleotide
  Antisense strand to SEQ ID NO: 2140634
aaacuugcuucauauacca

SEQ ID NO: 2140636 - RNA, 19 nt, Artificial Sequence
  Description of Artificial Sequence: Synthetic oligonucleotide
  Sense strand starting at position 125 of SEQ ID NO: 1882692
auccuuggcugucuauuua

SEQ ID NO: 2140637 - RNA, 19 nt, Artificial Sequence
  Description of Artificial Sequence: Synthetic oligonucleotide
  Antisense strand to SEQ ID NO: 2140636
uaaauagacagccaaggau

SEQ ID NO: 2140638 - RNA, 19 nt, Artificial Sequence
  Description of Artificial Sequence: Synthetic oligonucleotide
  Sense strand starting at position 157 of SEQ ID NO: 1882692
ggcaucucuguauacaaau

SEQ ID NO: 2140639 - RNA, 19 nt, Artificial Sequence
  Description of Artificial Sequence: Synthetic oligonucleotide
  Antisense strand to SEQ ID NO: 2140638
auuuguauacagagaugcc

SEQ ID NO: 2140640 - RNA, 19 nt, Artificial Sequence
  Description of Artificial Sequence: Synthetic oligonucleotide
  Sense strand starting at position 617 of SEQ ID NO: 1882692
ccaucagucccaggaagaa

SEQ ID NO: 2140641 - RNA, 19 nt, Artificial Sequence
  Description of Artificial Sequence: Synthetic oligonucleotide
  Antisense strand to SEQ ID NO: 2140640
uucuuccugggacugaugg

SEQ ID NO: 2140642 - RNA, 19 nt, Artificial Sequence
  Description of Artificial Sequence: Synthetic oligonucleotide
  Sense strand starting at position 858 of SEQ ID NO: 1882692
ccaggugauacccggaaca

SEQ ID NO: 2140643 - RNA, 19 nt, Artificial Sequence
  Description of Artificial Sequence: Synthetic oligonucleotide
  Antisense strand to SEQ ID NO: 2140642
uguuccggguaucaccugg

SEQ ID NO: 2140644 - RNA, 19 nt, Artificial Sequence
  Description of Artificial Sequence: Synthetic oligonucleotide
  Sense strand starting at position 912 of SEQ ID NO: 1882692
ggcugugagcaagaugaaa

SEQ ID NO: 2140645 - RNA, 19 nt, Artificial Sequence
  Description of Artificial Sequence: Synthetic oligonucleotide
  Antisense strand to SEQ ID NO: 2140644
uuucaucuugcucacagcc

SEQ ID NO: 2140646 - RNA, 19 nt, Artificial Sequence
  Description of Artificial Sequence: Synthetic oligonucleotide
  Sense strand starting at position 914 of SEQ ID NO: 1882692
cugugagcaagaugaaaug

SEQ ID NO: 2140647 - RNA, 19 nt, Artificial Sequence
  Description of Artificial Sequence: Synthetic oligonucleotide
  Antisense strand to SEQ ID NO: 2140646
cauuucaucuugcucacag

SEQ ID NO: 2140648 - RNA, 19 nt, Artificial Sequence
  Description of Artificial Sequence: Synthetic oligonucleotide
  Sense strand starting at position 935 of SEQ ID NO: 1882692
gauggacugccauaccauu

SEQ ID NO: 2140649 - RNA, 19 nt, Artificial Sequence
  Description of Artificial Sequence: Synthetic oligonucleotide
  Antisense strand to SEQ ID NO: 2140648
aaugguauggcaguccauc

SEQ ID NO: 2140650 - RNA, 19 nt, Artificial Sequence
  Description of Artificial Sequence: Synthetic oligonucleotide
  Sense strand starting at position 941 of SEQ ID NO: 1882692
cugccauaccauugaauga

SEQ ID NO: 2140651 - RNA, 19 nt, Artificial Sequence
  Description of Artificial Sequence: Synthetic oligonucleotide
  Antisense strand to SEQ ID NO: 2140650
ucauucaaugguauggcag

SEQ ID NO: 2140652 - RNA, 19 nt, Artificial Sequence
  Description of Artificial Sequence: Synthetic oligonucleotide
  Sense strand starting at position 998 of SEQ ID NO: 1882692
ugcuaaugacaacgggaua

SEQ ID NO: 2140653 - RNA, 19 nt, Artificial Sequence
  Description of Artificial Sequence: Synthetic oligonucleotide
  Antisense strand to SEQ ID NO: 2140652
uaucccguugucauuagca

SEQ ID NO: 2140654 - RNA, 19 nt, Artificial Sequence
  Description of Artificial Sequence: Synthetic oligonucleotide
  Sense strand starting at position 999 of SEQ ID NO: 1882692
gcuaaugacaacgggauaa

SEQ ID NO: 2140655 - RNA, 19 nt, Artificial Sequence
  Description of Artificial Sequence: Synthetic oligonucleotide
  Antisense strand to SEQ ID NO: 2140654
uuaucccguugucauuagc

SEQ ID NO: 2140656 - RNA, 19 nt, Artificial Sequence
  Description of Artificial Sequence: Synthetic oligonucleotide
  Sense strand starting at position 1117 of SEQ ID NO: 1882692
uuuaaauacuacucggaca

SEQ ID NO: 2140657 - RNA, 19 nt, Artificial Sequence
  Description of Artificial Sequence: Synthetic oligonucleotide
  Antisense strand to SEQ ID NO: 2140656
uguccgaguaguauuuaaa

SEQ ID NO: 2140658 - RNA, 19 nt, Artificial Sequence
  Description of Artificial Sequence: Synthetic oligonucleotide
  Sense strand starting at position 1180 of SEQ ID NO: 1882692
acuguaaauuagguuuaga

SEQ ID NO: 2140659 - RNA, 19 nt, Artificial Sequence
  Description of Artificial Sequence: Synthetic oligonucleotide
  Antisense strand to SEQ ID NO: 2140658
ucuaaaccuaauuuacagu

SEQ ID NO: 2140660 - RNA, 19 nt, Artificial Sequence
  Description of Artificial Sequence: Synthetic oligonucleotide
  Sense strand starting at position 1220 of SEQ ID NO: 1882692
gcacgucgaccacauuuau

SEQ ID NO: 2140661 - RNA, 19 nt, Artificial Sequence
  Description of Artificial Sequence: Synthetic oligonucleotide
  Antisense strand to SEQ ID NO: 2140660
auaaauguggucgacgugc

SEQ ID NO: 2140662 - RNA, 19 nt, Artificial Sequence
  Description of Artificial Sequence: Synthetic oligonucleotide
  Sense strand starting at position 2007 of SEQ ID NO: 1882692
cgggauagguaguucuaag

SEQ ID NO: 2140663 - RNA, 19 nt, Artificial Sequence
  Description of Artificial Sequence: Synthetic oligonucleotide
  Antisense strand to SEQ ID NO: 2140662
cuuagaacuaccuaucccg

SEQ ID NO: 2140664 - RNA, 19 nt, Artificial Sequence
  Description of Artificial Sequence: Synthetic oligonucleotide
  Sense strand starting at position 2027 of SEQ ID NO: 1882692
cgcagagcucugccucuua

SEQ ID NO: 2140665 - RNA, 19 nt, Artificial Sequence
  Description of Artificial Sequence: Synthetic oligonucleotide
  Antisense strand to SEQ ID NO: 2140664
uaagaggcagagcucugcg

SEQ ID NO: 2140666 - RNA, 19 nt, Artificial Sequence
  Description of Artificial Sequence: Synthetic oligonucleotide
  Sense strand starting at position 2101 of SEQ ID NO: 1882692
guuagaaucgcuggaaagg

SEQ ID NO: 2140667 - RNA, 19 nt, Artificial Sequence
  Description of Artificial Sequence: Synthetic oligonucleotide
  Antisense strand to SEQ ID NO: 2140666
ccuuuccagcgauucuaac

SEQ ID NO: 2140668 - RNA, 19 nt, Artificial Sequence
  Description of Artificial Sequence: Synthetic oligonucleotide
  Sense strand starting at position 2133 of SEQ ID NO: 1882692
ucucaagaccauuggcuau

SEQ ID NO: 2140669 - RNA, 19 nt, Artificial Sequence
  Description of Artificial Sequence: Synthetic oligonucleotide
  Antisense strand to SEQ ID NO: 2140668
auagccaauggucuugaga

SEQ ID NO: 2140670 - RNA, 19 nt, Artificial Sequence
  Description of Artificial Sequence: Synthetic oligonucleotide
  Sense strand starting at position 2246 of SEQ ID NO: 1882692
cgacuucuugguuggagag

SEQ ID NO: 2140671 - RNA, 19 nt, Artificial Sequence
  Description of Artificial Sequence: Synthetic oligonucleotide
  Antisense strand to SEQ ID NO: 2140670
cucuccaaccaagaagucg

SEQ ID NO: 2140672 - RNA, 19 nt, Artificial Sequence
  Description of Artificial Sequence: Synthetic oligonucleotide
  Sense strand starting at position 2392 of SEQ ID NO: 1882692
aggaguaaccucuguggau

SEQ ID NO: 2140673 - RNA, 19 nt, Artificial Sequence
  Description of Artificial Sequence: Synthetic oligonucleotide
  Antisense strand to SEQ ID NO: 2140672
auccacagagguuacuccu

SEQ ID NO: 2140674 - RNA, 19 nt, Artificial Sequence
  Description of Artificial Sequence: Synthetic oligonucleotide
  Sense strand starting at position 2393 of SEQ ID NO: 1882692
ggaguaaccucuguggaug

SEQ ID NO: 2140675 - RNA, 19 nt, Artificial Sequence
  Description of Artificial Sequence: Synthetic oligonucleotide
  Antisense strand to SEQ ID NO: 2140674
cauccacagagguuacucc

SEQ ID NO: 2140676 - RNA, 19 nt, Artificial Sequence
  Description of Artificial Sequence: Synthetic oligonucleotide
  Sense strand starting at position 2404 of SEQ ID NO: 1882692
uguggaugucaacauccaa

SEQ ID NO: 2140677 - RNA, 19 nt, Artificial Sequence
  Description of Artificial Sequence: Synthetic oligonucleotide
  Antisense strand to SEQ ID NO: 2140676
uuggauguugacauccaca

SEQ ID NO: 2140678 - RNA, 19 nt, Artificial Sequence
  Description of Artificial Sequence: Synthetic oligonucleotide
  Sense strand starting at position 2455 of SEQ ID NO: 1882692
cauggagaaugccuuggua

SEQ ID NO: 2140679 - RNA, 19 nt, Artificial Sequence
  Description of Artificial Sequence: Synthetic oligonucleotide
  Antisense strand to SEQ ID NO: 2140678
uaccaaggcauucuccaug

SEQ ID NO: 2140680 - RNA, 19 nt, Artificial Sequence
  Description of Artificial Sequence: Synthetic oligonucleotide
  Sense strand starting at position 2457 of SEQ ID NO: 1882692
uggagaaugccuugguaag

SEQ ID NO: 2140681 - RNA, 19 nt, Artificial Sequence
  Description of Artificial Sequence: Synthetic oligonucleotide
  Antisense strand to SEQ ID NO: 2140680
cuuaccaaggcauucucca

SEQ ID NO: 2140682 - RNA, 19 nt, Artificial Sequence
  Description of Artificial Sequence: Synthetic oligonucleotide
  Sense strand starting at position 2458 of SEQ ID NO: 1882692
ggagaaugccuugguaaga

SEQ ID NO: 2140683 - RNA, 19 nt, Artificial Sequence
  Description of Artificial Sequence: Synthetic oligonucleotide
  Antisense strand to SEQ ID NO: 2140682
ucuuaccaaggcauucucc

SEQ ID NO: 2140684 - RNA, 19 nt, Artificial Sequence
  Description of Artificial Sequence: Synthetic oligonucleotide
  Sense strand starting at position 2459 of SEQ ID NO: 1882692
gagaaugccuugguaagaa

SEQ ID NO: 2140685 - RNA, 19 nt, Artificial Sequence
  Description of Artificial Sequence: Synthetic oligonucleotide
  Antisense strand to SEQ ID NO: 2140684
uucuuaccaaggcauucuc

SEQ ID NO: 2140686 - RNA, 19 nt, Artificial Sequence
  Description of Artificial Sequence: Synthetic oligonucleotide
  Sense strand starting at position 2507 of SEQ ID NO: 1882692
ggaauugccucuuuggaag

SEQ ID NO: 2140687 - RNA, 19 nt, Artificial Sequence
  Description of Artificial Sequence: Synthetic oligonucleotide
  Antisense strand to SEQ ID NO: 2140686
cuuccaaagaggcaauucc

SEQ ID NO: 2140688 - RNA, 19 nt, Artificial Sequence
  Description of Artificial Sequence: Synthetic oligonucleotide
  Sense strand starting at position 2722 of SEQ ID NO: 1882692
cguguaaagaacuguauuu

SEQ ID NO: 2140689 - RNA, 19 nt, Artificial Sequence
  Description of Artificial Sequence: Synthetic oligonucleotide
  Antisense strand to SEQ ID NO: 2140688
aaauacaguucuuuacacg

SEQ ID NO: 2140690 - RNA, 19 nt, Artificial Sequence
  Description of Artificial Sequence: Synthetic oligonucleotide
  Sense strand starting at position 2763 of SEQ ID NO: 1882692
gauucugaguuaccaagaa

SEQ ID NO: 2140691 - RNA, 19 nt, Artificial Sequence
  Description of Artificial Sequence: Synthetic oligonucleotide
  Antisense strand to SEQ ID NO: 2140690
uucuugguaacucagaauc

SEQ ID NO: 2140692 - RNA, 19 nt, Artificial Sequence
  Description of Artificial Sequence: Synthetic oligonucleotide
  Sense strand starting at position 2807 of SEQ ID NO: 1882692
ugagaauagcauugaucuc

SEQ ID NO: 2140693 - RNA, 19 nt, Artificial Sequence
  Description of Artificial Sequence: Synthetic oligonucleotide
  Antisense strand to SEQ ID NO: 2140692
gagaucaaugcuauucuca

SEQ ID NO: 2140694 - RNA, 19 nt, Artificial Sequence
  Description of Artificial Sequence: Synthetic oligonucleotide
  Sense strand starting at position 3003 of SEQ ID NO: 1882692
gguucuaaaugacccuaua

SEQ ID NO: 2140695 - RNA, 19 nt, Artificial Sequence
  Description of Artificial Sequence: Synthetic oligonucleotide
  Antisense strand to SEQ ID NO: 2140694
uauagggucauuuagaacc

SEQ ID NO: 2140696 - RNA, 19 nt, Artificial Sequence
  Description of Artificial Sequence: Synthetic oligonucleotide
  Sense strand starting at position 3071 of SEQ ID NO: 1882692
auaauucuauaggcaguaa

SEQ ID NO: 2140697 - RNA, 19 nt, Artificial Sequence
  Description of Artificial Sequence: Synthetic oligonucleotide
  Antisense strand to SEQ ID NO: 2140696
uuacugccuauagaauuau

SEQ ID NO: 2140698 - RNA, 19 nt, Artificial Sequence
  Description of Artificial Sequence: Synthetic oligonucleotide
  Sense strand starting at position 3303 of SEQ ID NO: 1882692
gcuaucgugauagauagac

SEQ ID NO: 2140699 - RNA, 19 nt, Artificial Sequence
  Description of Artificial Sequence: Synthetic oligonucleotide
  Antisense strand to SEQ ID NO: 2140698
gucuaucuaucacgauagc

SEQ ID NO: 2140700 - RNA, 19 nt, Artificial Sequence
  Description of Artificial Sequence: Synthetic oligonucleotide
  Sense strand starting at position 3327 of SEQ ID NO: 1882692
uaaaguucucauggguaca

SEQ ID NO: 2140701 - RNA, 19 nt, Artificial Sequence
  Description of Artificial Sequence: Synthetic oligonucleotide
  Antisense strand to SEQ ID NO: 2140700
uguacccaugagaacuuua

SEQ ID NO: 2140702 - RNA, 19 nt, Artificial Sequence
  Description of Artificial Sequence: Synthetic oligonucleotide
  Sense strand starting at position 3330 of SEQ ID NO: 1882692
aguucucauggguacaagu

SEQ ID NO: 2140703 - RNA, 19 nt, Artificial Sequence
  Description of Artificial Sequence: Synthetic oligonucleotide
  Antisense strand to SEQ ID NO: 2140702
acuuguacccaugagaacu

SEQ ID NO: 2140704 - RNA, 19 nt, Artificial Sequence
  Description of Artificial Sequence: Synthetic oligonucleotide
  Sense strand starting at position 3463 of SEQ ID NO: 1882692
ggugaagacucacucauua

SEQ ID NO: 2140705 - RNA, 19 nt, Artificial Sequence
  Description of Artificial Sequence: Synthetic oligonucleotide
  Antisense strand to SEQ ID NO: 2140704
uaaugagugagucuucacc

SEQ ID NO: 2140706 - RNA, 19 nt, Artificial Sequence
  Description of Artificial Sequence: Synthetic oligonucleotide
  Sense strand starting at position 3646 of SEQ ID NO: 1882692
uugagaagguacucaaauu

SEQ ID NO: 2140707 - RNA, 19 nt, Artificial Sequence
  Description of Artificial Sequence: Synthetic oligonucleotide
  Antisense strand to SEQ ID NO: 2140706
aauuugaguaccuucucaa

SEQ ID NO: 2140708 - RNA, 19 nt, Artificial Sequence
  Description of Artificial Sequence: Synthetic oligonucleotide
  Sense strand starting at position 3861 of SEQ ID NO: 1882692
cugaucauacaauguugaa

SEQ ID NO: 2140709 - RNA, 19 nt, Artificial Sequence
  Description of Artificial Sequence: Synthetic oligonucleotide
  Antisense strand to SEQ ID NO: 2140708
uucaacauuguaugaucag

SEQ ID NO: 2140710 - RNA, 19 nt, Artificial Sequence
  Description of Artificial Sequence: Synthetic oligonucleotide
  Sense strand starting at position 3942 of SEQ ID NO: 1882692
acaguauaaugaguaucaa

SEQ ID NO: 2140711 - RNA, 19 nt, Artificial Sequence
  Description of Artificial Sequence: Synthetic oligonucleotide
  Antisense strand to SEQ ID NO: 2140710
uugauacucauuauacugu

SEQ ID NO: 2140712 - RNA, 19 nt, Artificial Sequence
  Description of Artificial Sequence: Synthetic oligonucleotide
  Sense strand starting at position 56 of SEQ ID NO: 1882694
gggcccaaugcugagagau

SEQ ID NO: 2140713 - RNA, 19 nt, Artificial Sequence
  Description of Artificial Sequence: Synthetic oligonucleotide
  Antisense strand to SEQ ID NO: 2140712
aucucucagcauugggccc

SEQ ID NO: 2140714 - RNA, 19 nt, Artificial Sequence
  Description of Artificial Sequence: Synthetic oligonucleotide
  Sense strand starting at position 94 of SEQ ID NO: 1882694
gucugugcagcgagaaaga

SEQ ID NO: 2140715 - RNA, 19 nt, Artificial Sequence
  Description of Artificial Sequence: Synthetic oligonucleotide
  Antisense strand to SEQ ID NO: 2140714
ucuuucucgcugcacagac

SEQ ID NO: 2140716 - RNA, 19 nt, Artificial Sequence
  Description of Artificial Sequence: Synthetic oligonucleotide
  Sense strand starting at position 628 of SEQ ID NO: 1882694
guuggauauucuuuguuga

SEQ ID NO: 2140717 - RNA, 19 nt, Artificial Sequence
  Description of Artificial Sequence: Synthetic oligonucleotide
  Antisense strand to SEQ ID NO: 2140716
ucaacaaagaauauccaac

SEQ ID NO: 2140718 - RNA, 19 nt, Artificial Sequence
  Description of Artificial Sequence: Synthetic oligonucleotide
  Sense strand starting at position 629 of SEQ ID NO: 1882694
uuggauauucuuuguugag

SEQ ID NO: 2140719 - RNA, 19 nt, Artificial Sequence
  Description of Artificial Sequence: Synthetic oligonucleotide
  Antisense strand to SEQ ID NO: 2140718
cucaacaaagaauauccaa

SEQ ID NO: 2140720 - RNA, 19 nt, Artificial Sequence
  Description of Artificial Sequence: Synthetic oligonucleotide
  Sense strand starting at position 633 of SEQ ID NO: 1882694
auauucuuuguugagggua

SEQ ID NO: 2140721 - RNA, 19 nt, Artificial Sequence
  Description of Artificial Sequence: Synthetic oligonucleotide
  Antisense strand to SEQ ID NO: 2140720
uacccucaacaaagaauau

SEQ ID NO: 2140722 - RNA, 19 nt, Artificial Sequence
  Description of Artificial Sequence: Synthetic oligonucleotide
  Sense strand starting at position 638 of SEQ ID NO: 1882694
cuuuguugaggguaggaua

SEQ ID NO: 2140723 - RNA, 19 nt, Artificial Sequence
  Description of Artificial Sequence: Synthetic oligonucleotide
  Antisense strand to SEQ ID NO: 2140722
uauccuacccucaacaaag

SEQ ID NO: 2140724 - RNA, 19 nt, Artificial Sequence
  Description of Artificial Sequence: Synthetic oligonucleotide
  Sense strand starting at position 671 of SEQ ID NO: 1882694
aaagaaugcuuaguagcau

SEQ ID NO: 2140725 - RNA, 19 nt, Artificial Sequence
  Description of Artificial Sequence: Synthetic oligonucleotide
  Antisense strand to SEQ ID NO: 2140724
augcuacuaagcauucuuu

SEQ ID NO: 2140726 - RNA, 19 nt, Artificial Sequence
  Description of Artificial Sequence: Synthetic oligonucleotide
  Sense strand starting at position 725 of SEQ ID NO: 1882694
cagccaaaucgugacaaua

SEQ ID NO: 2140727 - RNA, 19 nt, Artificial Sequence
  Description of Artificial Sequence: Synthetic oligonucleotide
  Antisense strand to SEQ ID NO: 2140726
uauugucacgauuuggcug

SEQ ID NO: 2140728 - RNA, 19 nt, Artificial Sequence
  Description of Artificial Sequence: Synthetic oligonucleotide
  Sense strand starting at position 804 of SEQ ID NO: 1882694
guugauagccacuauauug

SEQ ID NO: 2140729 - RNA, 19 nt, Artificial Sequence
  Description of Artificial Sequence: Synthetic oligonucleotide
  Antisense strand to SEQ ID NO: 2140728
caauauaguggcuaucaac

SEQ ID NO: 2140730 - RNA, 19 nt, Artificial Sequence
  Description of Artificial Sequence: Synthetic oligonucleotide
  Sense strand starting at position 1021 of SEQ ID NO: 1882694
acaggaagguccucucuaa

SEQ ID NO: 2140731 - RNA, 19 nt, Artificial Sequence
  Description of Artificial Sequence: Synthetic oligonucleotide
  Antisense strand to SEQ ID NO: 2140730
uuagagaggaccuuccugu

SEQ ID NO: 2140732 - RNA, 19 nt, Artificial Sequence
  Description of Artificial Sequence: Synthetic oligonucleotide
  Sense strand starting at position 1113 of SEQ ID NO: 1882694
gugccuguuagacaaggua

SEQ ID NO: 2140733 - RNA, 19 nt, Artificial Sequence
  Description of Artificial Sequence: Synthetic oligonucleotide
  Antisense strand to SEQ ID NO: 2140732
uaccuugucuaacaggcac

SEQ ID NO: 2140734 - RNA, 19 nt, Artificial Sequence
  Description of Artificial Sequence: Synthetic oligonucleotide
  Sense strand starting at position 1285 of SEQ ID NO: 1882694
ggugcuguucuuucgccaa

SEQ ID NO: 2140735 - RNA, 19 nt, Artificial Sequence
  Description of Artificial Sequence: Synthetic oligonucleotide
  Antisense strand to SEQ ID NO: 2140734
uuggcgaaagaacagcacc

SEQ ID NO: 2140736 - RNA, 19 nt, Artificial Sequence
  Description of Artificial Sequence: Synthetic oligonucleotide
  Sense strand starting at position 1298 of SEQ ID NO: 1882694
cgccaauccgcauuauugu

SEQ ID NO: 2140737 - RNA, 19 nt, Artificial Sequence
  Description of Artificial Sequence: Synthetic oligonucleotide
  Antisense strand to SEQ ID NO: 2140736
acaauaaugcggauuggcg

SEQ ID NO: 2140738 - RNA, 19 nt, Artificial Sequence
  Description of Artificial Sequence: Synthetic oligonucleotide
  Sense strand starting at position 1307 of SEQ ID NO: 1882694
gcauuauuguucucaagaa

SEQ ID NO: 2140739 - RNA, 19 nt, Artificial Sequence
  Description of Artificial Sequence: Synthetic oligonucleotide
  Antisense strand to SEQ ID NO: 2140738
uucuugagaacaauaaugc

SEQ ID NO: 2140740 - RNA, 19 nt, Artificial Sequence
  Description of Artificial Sequence: Synthetic oligonucleotide
  Sense strand starting at position 1435 of SEQ ID NO: 1882694
gaccuuucucccuggguga

SEQ ID NO: 2140741 - RNA, 19 nt, Artificial Sequence
  Description of Artificial Sequence: Synthetic oligonucleotide
  Antisense strand to SEQ ID NO: 2140740
ucacccagggagaaagguc

SEQ ID NO: 2140742 - RNA, 19 nt, Artificial Sequence
  Description of Artificial Sequence: Synthetic oligonucleotide
  Sense strand starting at position 1452 of SEQ ID NO: 1882694
gacagcugucuguaggaga

SEQ ID NO: 2140743 - RNA, 19 nt, Artificial Sequence
  Description of Artificial Sequence: Synthetic oligonucleotide
  Antisense strand to SEQ ID NO: 2140742
ucuccuacagacagcuguc

SEQ ID NO: 2140744 - RNA, 19 nt, Artificial Sequence
  Description of Artificial Sequence: Synthetic oligonucleotide
  Sense strand starting at position 1578 of SEQ ID NO: 1882694
uggacucucucagucauau

SEQ ID NO: 2140745 - RNA, 19 nt, Artificial Sequence
  Description of Artificial Sequence: Synthetic oligonucleotide
  Antisense strand to SEQ ID NO: 2140744
auaugacugagagagucca

SEQ ID NO: 2140746 - RNA, 19 nt, Artificial Sequence
  Description of Artificial Sequence: Synthetic oligonucleotide
  Sense strand starting at position 1588 of SEQ ID NO: 1882694
cagucauaucuugggaaca

SEQ ID NO: 2140747 - RNA, 19 nt, Artificial Sequence
  Description of Artificial Sequence: Synthetic oligonucleotide
  Antisense strand to SEQ ID NO: 2140746
uguucccaagauaugacug

SEQ ID NO: 2140748 - RNA, 19 nt, Artificial Sequence
  Description of Artificial Sequence: Synthetic oligonucleotide
  Sense strand starting at position 1612 of SEQ ID NO: 1882694
cgaagaaucaaagagugcu

SEQ ID NO: 2140749 - RNA, 19 nt, Artificial Sequence
  Description of Artificial Sequence: Synthetic oligonucleotide
  Antisense strand to SEQ ID NO: 2140748
agcacucuuugauucuucg

SEQ ID NO: 2140750 - RNA, 19 nt, Artificial Sequence
  Description of Artificial Sequence: Synthetic oligonucleotide
  Sense strand starting at position 1615 of SEQ ID NO: 1882694
agaaucaaagagugcuauu

SEQ ID NO: 2140751 - RNA, 19 nt, Artificial Sequence
  Description of Artificial Sequence: Synthetic oligonucleotide
  Antisense strand to SEQ ID NO: 2140750
aauagcacucuuugauucu

SEQ ID NO: 2140752 - RNA, 19 nt, Artificial Sequence
  Description of Artificial Sequence: Synthetic oligonucleotide
  Sense strand starting at position 1996 of SEQ ID NO: 1882694
gucagcucacaaugaugaa

SEQ ID NO: 2140753 - RNA, 19 nt, Artificial Sequence
  Description of Artificial Sequence: Synthetic oligonucleotide
  Antisense strand to SEQ ID NO: 2140752
uucaucauugugagcugac

SEQ ID NO: 2140754 - RNA, 19 nt, Artificial Sequence
  Description of Artificial Sequence: Synthetic oligonucleotide
  Sense strand starting at position 2211 of SEQ ID NO: 1882694
ucaggaagauccuuccacu

SEQ ID NO: 2140755 - RNA, 19 nt, Artificial Sequence
  Description of Artificial Sequence: Synthetic oligonucleotide
  Antisense strand to SEQ ID NO: 2140754
aguggaaggaucuuccuga

SEQ ID NO: 2140756 - RNA, 19 nt, Artificial Sequence
  Description of Artificial Sequence: Synthetic oligonucleotide
  Sense strand starting at position 2372 of SEQ ID NO: 1882694
ggaucugcagguuauggaa

SEQ ID NO: 2140757 - RNA, 19 nt, Artificial Sequence
  Description of Artificial Sequence: Synthetic oligonucleotide
  Antisense strand to SEQ ID NO: 2140756
uuccauaaccugcagaucc

SEQ ID NO: 2140758 - RNA, 19 nt, Artificial Sequence
  Description of Artificial Sequence: Synthetic oligonucleotide
  Sense strand starting at position 2439 of SEQ ID NO: 1882694
ugguuacuucugcaggacu

SEQ ID NO: 2140759 - RNA, 19 nt, Artificial Sequence
  Description of Artificial Sequence: Synthetic oligonucleotide
  Antisense strand to SEQ ID NO: 2140758
aguccugcagaaguaacca

SEQ ID NO: 2140760 - RNA, 19 nt, Artificial Sequence
  Description of Artificial Sequence: Synthetic oligonucleotide
  Sense strand starting at position 2453 of SEQ ID NO: 1882694
ggacuuacuucccuuagga

SEQ ID NO: 2140761 - RNA, 19 nt, Artificial Sequence
  Description of Artificial Sequence: Synthetic oligonucleotide
  Antisense strand to SEQ ID NO: 2140760
uccuaagggaaguaagucc

SEQ ID NO: 2140762 - RNA, 19 nt, Artificial Sequence
  Description of Artificial Sequence: Synthetic oligonucleotide
  Sense strand starting at position 2499 of SEQ ID NO: 1882694
auuaguuucuuauccagag

SEQ ID NO: 2140763 - RNA, 19 nt, Artificial Sequence
  Description of Artificial Sequence: Synthetic oligonucleotide
  Antisense strand to SEQ ID NO: 2140762
cucuggauaagaaacuaau

SEQ ID NO: 2140764 - RNA, 19 nt, Artificial Sequence
  Description of Artificial Sequence: Synthetic oligonucleotide
  Sense strand starting at position 2701 of SEQ ID NO: 1882694
aaggccauuccugggagaa

SEQ ID NO: 2140765 - RNA, 19 nt, Artificial Sequence
  Description of Artificial Sequence: Synthetic oligonucleotide
  Antisense strand to SEQ ID NO: 2140764
uucucccaggaauggccuu

SEQ ID NO: 2140766 - RNA, 19 nt, Artificial Sequence
  Description of Artificial Sequence: Synthetic oligonucleotide
  Sense strand starting at position 2702 of SEQ ID NO: 1882694
aggccauuccugggagaaa

SEQ ID NO: 2140767 - RNA, 19 nt, Artificial Sequence
  Description of Artificial Sequence: Synthetic oligonucleotide
  Antisense strand to SEQ ID NO: 2140766
uuucucccaggaauggccu

SEQ ID NO: 2140768 - RNA, 19 nt, Artificial Sequence
  Description of Artificial Sequence: Synthetic oligonucleotide
  Sense strand starting at position 3505 of SEQ ID NO: 1882694
uaaagcucauugguuuaga

SEQ ID NO: 2140769 - RNA, 19 nt, Artificial Sequence
  Description of Artificial Sequence: Synthetic oligonucleotide
  Antisense strand to SEQ ID NO: 2140768
ucuaaaccaaugagcuuua

SEQ ID NO: 2140770 - RNA, 19 nt, Artificial Sequence
  Description of Artificial Sequence: Synthetic oligonucleotide
  Sense strand starting at position 3506 of SEQ ID NO: 1882694
aaagcucauugguuuagau

SEQ ID NO: 2140771 - RNA, 19 nt, Artificial Sequence
  Description of Artificial Sequence: Synthetic oligonucleotide
  Antisense strand to SEQ ID NO: 2140770
aucuaaaccaaugagcuuu

SEQ ID NO: 2140772 - RNA, 19 nt, Artificial Sequence
  Description of Artificial Sequence: Synthetic oligonucleotide
  Sense strand starting at position 3508 of SEQ ID NO: 1882694
agcucauugguuuagauau

SEQ ID NO: 2140773 - RNA, 19 nt, Artificial Sequence
  Description of Artificial Sequence: Synthetic oligonucleotide
  Antisense strand to SEQ ID NO: 2140772
auaucuaaaccaaugagcu

SEQ ID NO: 2140774 - RNA, 19 nt, Artificial Sequence
  Description of Artificial Sequence: Synthetic oligonucleotide
  Sense strand starting at position 3534 of SEQ ID NO: 1882694
gaguauacuuggccacuga

SEQ ID NO: 2140775 - RNA, 19 nt, Artificial Sequence
  Description of Artificial Sequence: Synthetic oligonucleotide
  Antisense strand to SEQ ID NO: 2140774
ucaguggccaaguauacuc

SEQ ID NO: 2140776 - RNA, 19 nt, Artificial Sequence
  Description of Artificial Sequence: Synthetic oligonucleotide
  Sense strand starting at position 3538 of SEQ ID NO: 1882694
auacuuggccacugagaca

SEQ ID NO: 2140777 - RNA, 19 nt, Artificial Sequence
  Description of Artificial Sequence: Synthetic oligonucleotide
  Antisense strand to SEQ ID NO: 2140776
ugucucaguggccaaguau

SEQ ID NO: 2140778 - RNA, 19 nt, Artificial Sequence
  Description of Artificial Sequence: Synthetic oligonucleotide
  Sense strand starting at position 3593 of SEQ ID NO: 1882694
uccauacaagucuguuaag

SEQ ID NO: 2140779 - RNA, 19 nt, Artificial Sequence
  Description of Artificial Sequence: Synthetic oligonucleotide
  Antisense strand to SEQ ID NO: 2140778
cuuaacagacuuguaugga

SEQ ID NO: 2140780 - RNA, 19 nt, Artificial Sequence
  Description of Artificial Sequence: Synthetic oligonucleotide
  Sense strand starting at position 3670 of SEQ ID NO: 1882694
gcugauugugagcaaagga

SEQ ID NO: 2140781 - RNA, 19 nt, Artificial Sequence
  Description of Artificial Sequence: Synthetic oligonucleotide
  Antisense strand to SEQ ID NO: 2140780
uccuuugcucacaaucagc

SEQ ID NO: 2140782 - RNA, 19 nt, Artificial Sequence
  Description of Artificial Sequence: Synthetic oligonucleotide
  Sense strand starting at position 3756 of SEQ ID NO: 1882694
auucuagugcuuugggaag

SEQ ID NO: 2140783 - RNA, 19 nt, Artificial Sequence
  Description of Artificial Sequence: Synthetic oligonucleotide
  Antisense strand to SEQ ID NO: 2140782
cuucccaaagcacuagaau

SEQ ID NO: 2140784 - RNA, 19 nt, Artificial Sequence
  Description of Artificial Sequence: Synthetic oligonucleotide
  Sense strand starting at position 3965 of SEQ ID NO: 1882694
gugacagauacuuaguugu

SEQ ID NO: 2140785 - RNA, 19 nt, Artificial Sequence
  Description of Artificial Sequence: Synthetic oligonucleotide
  Antisense strand to SEQ ID NO: 2140784
acaacuaaguaucugucac

SEQ ID NO: 2140786 - RNA, 19 nt, Artificial Sequence
  Description of Artificial Sequence: Synthetic oligonucleotide
  Sense strand starting at position 3967 of SEQ ID NO: 1882694
gacagauacuuaguugucu

SEQ ID NO: 2140787 - RNA, 19 nt, Artificial Sequence
  Description of Artificial Sequence: Synthetic oligonucleotide
  Antisense strand to SEQ ID NO: 2140786
agacaacuaaguaucuguc

SEQ ID NO: 2140788 - RNA, 19 nt, Artificial Sequence
  Description of Artificial Sequence: Synthetic oligonucleotide
  Sense strand starting at position 3968 of SEQ ID NO: 1882694
acagauacuuaguugucua

SEQ ID NO: 2140789 - RNA, 19 nt, Artificial Sequence
  Description of Artificial Sequence: Synthetic oligonucleotide
  Antisense strand to SEQ ID NO: 2140788
uagacaacuaaguaucugu

SEQ ID NO: 2140790 - RNA, 19 nt, Artificial Sequence
  Description of Artificial Sequence: Synthetic oligonucleotide
  Sense strand starting at position 3973 of SEQ ID NO: 1882694
uacuuaguugucuauuagu

SEQ ID NO: 2140791 - RNA, 19 nt, Artificial Sequence
  Description of Artificial Sequence: Synthetic oligonucleotide
  Antisense strand to SEQ ID NO: 2140790
acuaauagacaacuaagua

SEQ ID NO: 2140792 - RNA, 19 nt, Artificial Sequence
  Description of Artificial Sequence: Synthetic oligonucleotide
  Sense strand starting at position 57 of SEQ ID NO: 1882693
agaugaaauuaagaccgaa

SEQ ID NO: 2140793 - RNA, 19 nt, Artificial Sequence
  Description of Artificial Sequence: Synthetic oligonucleotide
  Antisense strand to SEQ ID NO: 2140792
uucggucuuaauuucaucu

SEQ ID NO: 2140794 - RNA, 19 nt, Artificial Sequence
  Description of Artificial Sequence: Synthetic oligonucleotide
  Sense strand starting at position 481 of SEQ ID NO: 1882693
ggaugacaggcuugagaau

SEQ ID NO: 2140795 - RNA, 19 nt, Artificial Sequence
  Description of Artificial Sequence: Synthetic oligonucleotide
  Antisense strand to SEQ ID NO: 2140794
auucucaagccugucaucc

SEQ ID NO: 2140796 - RNA, 19 nt, Artificial Sequence
  Description of Artificial Sequence: Synthetic oligonucleotide
  Sense strand starting at position 490 of SEQ ID NO: 1882693
gcuugagaauaugacacaa

SEQ ID NO: 2140797 - RNA, 19 nt, Artificial Sequence
  Description of Artificial Sequence: Synthetic oligonucleotide
  Antisense strand to SEQ ID NO: 2140796
uugugucauauucucaagc

SEQ ID NO: 2140798 - RNA, 19 nt, Artificial Sequence
  Description of Artificial Sequence: Synthetic oligonucleotide
  Sense strand starting at position 492 of SEQ ID NO: 1882693
uugagaauaugacacaaua

SEQ ID NO: 2140799 - RNA, 19 nt, Artificial Sequence
  Description of Artificial Sequence: Synthetic oligonucleotide
  Antisense strand to SEQ ID NO: 2140798
uauugugucauauucucaa

SEQ ID NO: 2140800 - RNA, 19 nt, Artificial Sequence
  Description of Artificial Sequence: Synthetic oligonucleotide
  Sense strand starting at position 515 of SEQ ID NO: 1882693
ugggauaaauaucauacaa

SEQ ID NO: 2140801 - RNA, 19 nt, Artificial Sequence
  Description of Artificial Sequence: Synthetic oligonucleotide
  Antisense strand to SEQ ID NO: 2140800
uuguaugauauuuauccca

SEQ ID NO: 2140802 - RNA, 19 nt, Artificial Sequence
  Description of Artificial Sequence: Synthetic oligonucleotide
  Sense strand starting at position 608 of SEQ ID NO: 1882693
cagauugaguccuuaguga

SEQ ID NO: 2140803 - RNA, 19 nt, Artificial Sequence
  Description of Artificial Sequence: Synthetic oligonucleotide
  Antisense strand to SEQ ID NO: 2140802
ucacuaaggacucaaucug

SEQ ID NO: 2140804 - RNA, 19 nt, Artificial Sequence
  Description of Artificial Sequence: Synthetic oligonucleotide
  Sense strand starting at position 616 of SEQ ID NO: 1882693
guccuuagugacuagggaa

SEQ ID NO: 2140805 - RNA, 19 nt, Artificial Sequence
  Description of Artificial Sequence: Synthetic oligonucleotide
  Antisense strand to SEQ ID NO: 2140804
uucccuagucacuaaggac

SEQ ID NO: 2140806 - RNA, 19 nt, Artificial Sequence
  Description of Artificial Sequence: Synthetic oligonucleotide
  Sense strand starting at position 731 of SEQ ID NO: 1882693
uacuauauugcagguaaag

SEQ ID NO: 2140807 - RNA, 19 nt, Artificial Sequence
  Description of Artificial Sequence: Synthetic oligonucleotide
  Antisense strand to SEQ ID NO: 2140806
cuuuaccugcaauauagua

SEQ ID NO: 2140808 - RNA, 19 nt, Artificial Sequence
  Description of Artificial Sequence: Synthetic oligonucleotide
  Sense strand starting at position 733 of SEQ ID NO: 1882693
cuauauugcagguaaagug

SEQ ID NO: 2140809 - RNA, 19 nt, Artificial Sequence
  Description of Artificial Sequence: Synthetic oligonucleotide
  Antisense strand to SEQ ID NO: 2140808
cacuuuaccugcaauauag

SEQ ID NO: 2140810 - RNA, 19 nt, Artificial Sequence
  Description of Artificial Sequence: Synthetic oligonucleotide
  Sense strand starting at position 1451 of SEQ ID NO: 1882693
aaaggauacuggccucaga

SEQ ID NO: 2140811 - RNA, 19 nt, Artificial Sequence
  Description of Artificial Sequence: Synthetic oligonucleotide
  Antisense strand to SEQ ID NO: 2140810
ucugaggccaguauccuuu

SEQ ID NO: 2140812 - RNA, 19 nt, Artificial Sequence
  Description of Artificial Sequence: Synthetic oligonucleotide
  Sense strand starting at position 1482 of SEQ ID NO: 1882693
aaguuuagauggcauagga

SEQ ID NO: 2140813 - RNA, 19 nt, Artificial Sequence
  Description of Artificial Sequence: Synthetic oligonucleotide
  Antisense strand to SEQ ID NO: 2140812
uccuaugccaucuaaacuu

SEQ ID NO: 2140814 - RNA, 19 nt, Artificial Sequence
  Description of Artificial Sequence: Synthetic oligonucleotide
  Sense strand starting at position 1514 of SEQ ID NO: 1882693
gagaaagaauguugagaag

SEQ ID NO: 2140815 - RNA, 19 nt, Artificial Sequence
  Description of Artificial Sequence: Synthetic oligonucleotide
  Antisense strand to SEQ ID NO: 2140814
cuucucaacauucuuucuc

SEQ ID NO: 2140816 - RNA, 19 nt, Artificial Sequence
  Description of Artificial Sequence: Synthetic oligonucleotide
  Sense strand starting at position 1713 of SEQ ID NO: 1882693
acauaaguaugugcaaaua

SEQ ID NO: 2140817 - RNA, 19 nt, Artificial Sequence
  Description of Artificial Sequence: Synthetic oligonucleotide
  Antisense strand to SEQ ID NO: 2140816
uauuugcacauacuuaugu

SEQ ID NO: 2140818 - RNA, 19 nt, Artificial Sequence
  Description of Artificial Sequence: Synthetic oligonucleotide
  Sense strand starting at position 1763 of SEQ ID NO: 1882693
guggcaugaagcuguacua

SEQ ID NO: 2140819 - RNA, 19 nt, Artificial Sequence
  Description of Artificial Sequence: Synthetic oligonucleotide
  Antisense strand to SEQ ID NO: 2140818
uaguacagcuucaugccac

SEQ ID NO: 2140820 - RNA, 19 nt, Artificial Sequence
  Description of Artificial Sequence: Synthetic oligonucleotide
  Sense strand starting at position 2068 of SEQ ID NO: 1882693
caucccauuggucggaauu

SEQ ID NO: 2140821 - RNA, 19 nt, Artificial Sequence
  Description of Artificial Sequence: Synthetic oligonucleotide
  Antisense strand to SEQ ID NO: 2140820
aauuccgaccaaugggaug

SEQ ID NO: 2140822 - RNA, 19 nt, Artificial Sequence
  Description of Artificial Sequence: Synthetic oligonucleotide
  Sense strand starting at position 2183 of SEQ ID NO: 1882693
auuuaaggaugagggauau

SEQ ID NO: 2140823 - RNA, 19 nt, Artificial Sequence
  Description of Artificial Sequence: Synthetic oligonucleotide
  Antisense strand to SEQ ID NO: 2140822
auaucccucauccuuaaau

SEQ ID NO: 2140824 - RNA, 19 nt, Artificial Sequence
  Description of Artificial Sequence: Synthetic oligonucleotide
  Sense strand starting at position 2193 of SEQ ID NO: 1882693
gagggauauugauggacaa

SEQ ID NO: 2140825 - RNA, 19 nt, Artificial Sequence
  Description of Artificial Sequence: Synthetic oligonucleotide
  Antisense strand to SEQ ID NO: 2140824
uuguccaucaauaucccuc

SEQ ID NO: 2140826 - RNA, 19 nt, Artificial Sequence
  Description of Artificial Sequence: Synthetic oligonucleotide
  Sense strand starting at position 2222 of SEQ ID NO: 1882693
gugggaagaagcuauguca

SEQ ID NO: 2140827 - RNA, 19 nt, Artificial Sequence
  Description of Artificial Sequence: Synthetic oligonucleotide
  Antisense strand to SEQ ID NO: 2140826
ugacauagcuucuucccac

SEQ ID NO: 2140828 - RNA, 19 nt, Artificial Sequence
  Description of Artificial Sequence: Synthetic oligonucleotide
  Sense strand starting at position 2225 of SEQ ID NO: 1882693
ggaagaagcuaugucacag

SEQ ID NO: 2140829 - RNA, 19 nt, Artificial Sequence
  Description of Artificial Sequence: Synthetic oligonucleotide
  Antisense strand to SEQ ID NO: 2140828
cugugacauagcuucuucc

SEQ ID NO: 2140830 - RNA, 19 nt, Artificial Sequence
  Description of Artificial Sequence: Synthetic oligonucleotide
  Sense strand starting at position 2256 of SEQ ID NO: 1882693
ugccauacgcauuaaguau

SEQ ID NO: 2140831 - RNA, 19 nt, Artificial Sequence
  Description of Artificial Sequence: Synthetic oligonucleotide
  Antisense strand to SEQ ID NO: 2140830
auacuuaaugcguauggca

SEQ ID NO: 2140832 - RNA, 19 nt, Artificial Sequence
  Description of Artificial Sequence: Synthetic oligonucleotide
  Sense strand starting at position 2262 of SEQ ID NO: 1882693
acgcauuaaguauguaguu

SEQ ID NO: 2140833 - RNA, 19 nt, Artificial Sequence
  Description of Artificial Sequence: Synthetic oligonucleotide
  Antisense strand to SEQ ID NO: 2140832
aacuacauacuuaaugcgu

SEQ ID NO: 2140834 - RNA, 19 nt, Artificial Sequence
  Description of Artificial Sequence: Synthetic oligonucleotide
  Sense strand starting at position 2264 of SEQ ID NO: 1882693
gcauuaaguauguaguuua

SEQ ID NO: 2140835 - RNA, 19 nt, Artificial Sequence
  Description of Artificial Sequence: Synthetic oligonucleotide
  Antisense strand to SEQ ID NO: 2140834
uaaacuacauacuuaaugc

SEQ ID NO: 2140836 - RNA, 19 nt, Artificial Sequence
  Description of Artificial Sequence: Synthetic oligonucleotide
  Sense strand starting at position 2328 of SEQ ID NO: 1882693
gguuaagucagguggccaa

SEQ ID NO: 2140837 - RNA, 19 nt, Artificial Sequence
  Description of Artificial Sequence: Synthetic oligonucleotide
  Antisense strand to SEQ ID NO: 2140836
uuggccaccugacuuaacc

SEQ ID NO: 2140838 - RNA, 19 nt, Artificial Sequence
  Description of Artificial Sequence: Synthetic oligonucleotide
  Sense strand starting at position 2374 of SEQ ID NO: 1882693
auagccugauaauaaagaa

SEQ ID NO: 2140839 - RNA, 19 nt, Artificial Sequence
  Description of Artificial Sequence: Synthetic oligonucleotide
  Antisense strand to SEQ ID NO: 2140838
uucuuuauuaucaggcuau

SEQ ID NO: 2140840 - RNA, 19 nt, Artificial Sequence
  Description of Artificial Sequence: Synthetic oligonucleotide
  Sense strand starting at position 2399 of SEQ ID NO: 1882693
uuaauaauauuguccgugu

SEQ ID NO: 2140841 - RNA, 19 nt, Artificial Sequence
  Description of Artificial Sequence: Synthetic oligonucleotide
  Antisense strand to SEQ ID NO: 2140840
acacggacaauauuauuaa

SEQ ID NO: 2140842 - RNA, 19 nt, Artificial Sequence
  Description of Artificial Sequence: Synthetic oligonucleotide
  Sense strand starting at position 2400 of SEQ ID NO: 1882693
uaauaauauuguccguguu

SEQ ID NO: 2140843 - RNA, 19 nt, Artificial Sequence
  Description of Artificial Sequence: Synthetic oligonucleotide
  Antisense strand to SEQ ID NO: 2140842
aacacggacaauauuauua

SEQ ID NO: 2140844 - RNA, 19 nt, Artificial Sequence
  Description of Artificial Sequence: Synthetic oligonucleotide
  Sense strand starting at position 2401 of SEQ ID NO: 1882693
aauaauauuguccguguuc

SEQ ID NO: 2140845 - RNA, 19 nt, Artificial Sequence
  Description of Artificial Sequence: Synthetic oligonucleotide
  Antisense strand to SEQ ID NO: 2140844
gaacacggacaauauuauu

SEQ ID NO: 2140846 - RNA, 19 nt, Artificial Sequence
  Description of Artificial Sequence: Synthetic oligonucleotide
  Sense strand starting at position 2402 of SEQ ID NO: 1882693
auaauauuguccguguucu

SEQ ID NO: 2140847 - RNA, 19 nt, Artificial Sequence
  Description of Artificial Sequence: Synthetic oligonucleotide
  Antisense strand to SEQ ID NO: 2140846
agaacacggacaauauuau

SEQ ID NO: 2140848 - RNA, 19 nt, Artificial Sequence
  Description of Artificial Sequence: Synthetic oligonucleotide
  Sense strand starting at position 2406 of SEQ ID NO: 1882693
uauuguccguguucucaca

SEQ ID NO: 2140849 - RNA, 19 nt, Artificial Sequence
  Description of Artificial Sequence: Synthetic oligonucleotide
  Antisense strand to SEQ ID NO: 2140848
ugugagaacacggacaaua

SEQ ID NO: 2140850 - RNA, 19 nt, Artificial Sequence
  Description of Artificial Sequence: Synthetic oligonucleotide
  Sense strand starting at position 2408 of SEQ ID NO: 1882693
uuguccguguucucacaaa

SEQ ID NO: 2140851 - RNA, 19 nt, Artificial Sequence
  Description of Artificial Sequence: Synthetic oligonucleotide
  Antisense strand to SEQ ID NO: 2140850
uuugugagaacacggacaa

SEQ ID NO: 2140852 - RNA, 19 nt, Artificial Sequence
  Description of Artificial Sequence: Synthetic oligonucleotide
  Sense strand starting at position 2567 of SEQ ID NO: 1882693
agcacugucucauuagaga

SEQ ID NO: 2140853 - RNA, 19 nt, Artificial Sequence
  Description of Artificial Sequence: Synthetic oligonucleotide
  Antisense strand to SEQ ID NO: 2140852
ucucuaaugagacagugcu

SEQ ID NO: 2140854 - RNA, 19 nt, Artificial Sequence
  Description of Artificial Sequence: Synthetic oligonucleotide
  Sense strand starting at position 2640 of SEQ ID NO: 1882693
aggauuaccucaugagaau

SEQ ID NO: 2140855 - RNA, 19 nt, Artificial Sequence
  Description of Artificial Sequence: Synthetic oligonucleotide
  Antisense strand to SEQ ID NO: 2140854
auucucaugagguaauccu

SEQ ID NO: 2140856 - RNA, 19 nt, Artificial Sequence
  Description of Artificial Sequence: Synthetic oligonucleotide
  Sense strand starting at position 2703 of SEQ ID NO: 1882693
aggagacacucagccuuaa

SEQ ID NO: 2140857 - RNA, 19 nt, Artificial Sequence
  Description of Artificial Sequence: Synthetic oligonucleotide
  Antisense strand to SEQ ID NO: 2140856
uuaaggcugagugucuccu

SEQ ID NO: 2140858 - RNA, 19 nt, Artificial Sequence
  Description of Artificial Sequence: Synthetic oligonucleotide
  Sense strand starting at position 2729 of SEQ ID NO: 1882693
agaaauuggcccggugcaa

SEQ ID NO: 2140859 - RNA, 19 nt, Artificial Sequence
  Description of Artificial Sequence: Synthetic oligonucleotide
  Antisense strand to SEQ ID NO: 2140858
uugcaccgggccaauuucu

SEQ ID NO: 2140860 - RNA, 19 nt, Artificial Sequence
  Description of Artificial Sequence: Synthetic oligonucleotide
  Sense strand starting at position 3686 of SEQ ID NO: 1882693
guuucaguuguaggauaga

SEQ ID NO: 2140861 - RNA, 19 nt, Artificial Sequence
  Description of Artificial Sequence: Synthetic oligonucleotide
  Antisense strand to SEQ ID NO: 2140860
ucuauccuacaacugaaac

SEQ ID NO: 2140862 - RNA, 19 nt, Artificial Sequence
  Description of Artificial Sequence: Synthetic oligonucleotide
  Sense strand starting at position 3718 of SEQ ID NO: 1882693
gagauuuacuaugaggcau

SEQ ID NO: 2140863 - RNA, 19 nt, Artificial Sequence
  Description of Artificial Sequence: Synthetic oligonucleotide
  Antisense strand to SEQ ID NO: 2140862
augccucauaguaaaucuc

SEQ ID NO: 2140864 - RNA, 19 nt, Artificial Sequence
  Description of Artificial Sequence: Synthetic oligonucleotide
  Sense strand starting at position 3720 of SEQ ID NO: 1882693
gauuuacuaugaggcauca

SEQ ID NO: 2140865 - RNA, 19 nt, Artificial Sequence
  Description of Artificial Sequence: Synthetic oligonucleotide
  Antisense strand to SEQ ID NO: 2140864
ugaugccucauaguaaauc

SEQ ID NO: 2140866 - RNA, 19 nt, Artificial Sequence
  Description of Artificial Sequence: Synthetic oligonucleotide
  Sense strand starting at position 3784 of SEQ ID NO: 1882693
gaggguagaucuuauauug

SEQ ID NO: 2140867 - RNA, 19 nt, Artificial Sequence
  Description of Artificial Sequence: Synthetic oligonucleotide
  Antisense strand to SEQ ID NO: 2140866
caauauaagaucuacccuc

SEQ ID NO: 2140868 - RNA, 19 nt, Artificial Sequence
  Description of Artificial Sequence: Synthetic oligonucleotide
  Sense strand starting at position 3898 of SEQ ID NO: 1882693
guaugucuauggccuugau

SEQ ID NO: 2140869 - RNA, 19 nt, Artificial Sequence
  Description of Artificial Sequence: Synthetic oligonucleotide
  Antisense strand to SEQ ID NO: 2140868
aucaaggccauagacauac

SEQ ID NO: 2140870 - RNA, 19 nt, Artificial Sequence
  Description of Artificial Sequence: Synthetic oligonucleotide
  Sense strand starting at position 3917 of SEQ ID NO: 1882693
gguaguaagguuggcuuca

SEQ ID NO: 2140871 - RNA, 19 nt, Artificial Sequence
  Description of Artificial Sequence: Synthetic oligonucleotide
  Antisense strand to SEQ ID NO: 2140870
ugaagccaaccuuacuacc

SEQ ID NO: 2140872 - RNA, 19 nt, Artificial Sequence
  Description of Artificial Sequence: Synthetic oligonucleotide
  Sense strand starting at position 55 of SEQ ID NO: 1882695
auuaauauaugccuggcaa

SEQ ID NO: 2140873 - RNA, 19 nt, Artificial Sequence
  Description of Artificial Sequence: Synthetic oligonucleotide
  Antisense strand to SEQ ID NO: 2140872
uugccaggcauauauuaau

SEQ ID NO: 2140874 - RNA, 19 nt, Artificial Sequence
  Description of Artificial Sequence: Synthetic oligonucleotide
  Sense strand starting at position 89 of SEQ ID NO: 1882695
gaagucaacuugguuaucu

SEQ ID NO: 2140875 - RNA, 19 nt, Artificial Sequence
  Description of Artificial Sequence: Synthetic oligonucleotide
  Antisense strand to SEQ ID NO: 2140874
agauaaccaaguugacuuc

SEQ ID NO: 2140876 - RNA, 19 nt, Artificial Sequence
  Description of Artificial Sequence: Synthetic oligonucleotide
  Sense strand starting at position 99 of SEQ ID NO: 1882695
ugguuaucucuguaccuac

SEQ ID NO: 2140877 - RNA, 19 nt, Artificial Sequence
  Description of Artificial Sequence: Synthetic oligonucleotide
  Antisense strand to SEQ ID NO: 2140876
guagguacagagauaacca

SEQ ID NO: 2140878 - RNA, 19 nt, Artificial Sequence
  Description of Artificial Sequence: Synthetic oligonucleotide
  Sense strand starting at position 127 of SEQ ID NO: 1882695
acugacugcuacuugagaa

SEQ ID NO: 2140879 - RNA, 19 nt, Artificial Sequence
  Description of Artificial Sequence: Synthetic oligonucleotide
  Antisense strand to SEQ ID NO: 2140878
uucucaaguagcagucagu

SEQ ID NO: 2140880 - RNA, 19 nt, Artificial Sequence
  Description of Artificial Sequence: Synthetic oligonucleotide
  Sense strand starting at position 193 of SEQ ID NO: 1882695
agcacaauuguauagaggu

SEQ ID NO: 2140881 - RNA, 19 nt, Artificial Sequence
  Description of Artificial Sequence: Synthetic oligonucleotide
  Antisense strand to SEQ ID NO: 2140880
accucuauacaauugugcu

SEQ ID NO: 2140882 - RNA, 19 nt, Artificial Sequence
  Description of Artificial Sequence: Synthetic oligonucleotide
  Sense strand starting at position 308 of SEQ ID NO: 1882695
agacaucuguuauuaacag

SEQ ID NO: 2140883 - RNA, 19 nt, Artificial Sequence
  Description of Artificial Sequence: Synthetic oligonucleotide
  Antisense strand to SEQ ID NO: 2140882
cuguuaauaacagaugucu

SEQ ID NO: 2140884 - RNA, 19 nt, Artificial Sequence
  Description of Artificial Sequence: Synthetic oligonucleotide
  Sense strand starting at position 356 of SEQ ID NO: 1882695
gucuuaaagcuagauauau

SEQ ID NO: 2140885 - RNA, 19 nt, Artificial Sequence
  Description of Artificial Sequence: Synthetic oligonucleotide
  Antisense strand to SEQ ID NO: 2140884
auauaucuagcuuuaagac

SEQ ID NO: 2140886 - RNA, 19 nt, Artificial Sequence
  Description of Artificial Sequence: Synthetic oligonucleotide
  Sense strand starting at position 478 of SEQ ID NO: 1882695
uuaauaauauguguuggga

SEQ ID NO: 2140887 - RNA, 19 nt, Artificial Sequence
  Description of Artificial Sequence: Synthetic oligonucleotide
  Antisense strand to SEQ ID NO: 2140886
ucccaacacauauuauuaa

SEQ ID NO: 2140888 - RNA, 19 nt, Artificial Sequence
  Description of Artificial Sequence: Synthetic oligonucleotide
  Sense strand starting at position 660 of SEQ ID NO: 1882695
auaauaauaugucuuggag

SEQ ID NO: 2140889 - RNA, 19 nt, Artificial Sequence
  Description of Artificial Sequence: Synthetic oligonucleotide
  Antisense strand to SEQ ID NO: 2140888
cuccaagacauauuauuau

SEQ ID NO: 2140890 - RNA, 19 nt, Artificial Sequence
  Description of Artificial Sequence: Synthetic oligonucleotide
  Sense strand starting at position 663 of SEQ ID NO: 1882695
auaauaugucuuggaggac

SEQ ID NO: 2140891 - RNA, 19 nt, Artificial Sequence
  Description of Artificial Sequence: Synthetic oligonucleotide
  Antisense strand to SEQ ID NO: 2140890
guccuccaagacauauuau

SEQ ID NO: 2140892 - RNA, 19 nt, Artificial Sequence
  Description of Artificial Sequence: Synthetic oligonucleotide
  Sense strand starting at position 666 of SEQ ID NO: 1882695
auaugucuuggaggacauu

SEQ ID NO: 2140893 - RNA, 19 nt, Artificial Sequence
  Description of Artificial Sequence: Synthetic oligonucleotide
  Antisense strand to SEQ ID NO: 2140892
aauguccuccaagacauau

SEQ ID NO: 2140894 - RNA, 19 nt, Artificial Sequence
  Description of Artificial Sequence: Synthetic oligonucleotide
  Sense strand starting at position 685 of SEQ ID NO: 1882695
ucuucuuaguagguacaga

SEQ ID NO: 2140895 - RNA, 19 nt, Artificial Sequence
  Description of Artificial Sequence: Synthetic oligonucleotide
  Antisense strand to SEQ ID NO: 2140894
ucuguaccuacuaagaaga

SEQ ID NO: 2140896 - RNA, 19 nt, Artificial Sequence
  Description of Artificial Sequence: Synthetic oligonucleotide
  Sense strand starting at position 723 of SEQ ID NO: 1882695
ugccucauucgcuuaguca

SEQ ID NO: 2140897 - RNA, 19 nt, Artificial Sequence
  Description of Artificial Sequence: Synthetic oligonucleotide
  Antisense strand to SEQ ID NO: 2140896
ugacuaagcgaaugaggca

SEQ ID NO: 2140898 - RNA, 19 nt, Artificial Sequence
  Description of Artificial Sequence: Synthetic oligonucleotide
  Sense strand starting at position 806 of SEQ ID NO: 1882695
ugaacacaugugcaaguau

SEQ ID NO: 2140899 - RNA, 19 nt, Artificial Sequence
  Description of Artificial Sequence: Synthetic oligonucleotide
  Antisense strand to SEQ ID NO: 2140898
auacuugcacauguguuca

SEQ ID NO: 2140900 - RNA, 19 nt, Artificial Sequence
  Description of Artificial Sequence: Synthetic oligonucleotide
  Sense strand starting at position 847 of SEQ ID NO: 1882695
aguagaaaugcuugguuaa

SEQ ID NO: 2140901 - RNA, 19 nt, Artificial Sequence
  Description of Artificial Sequence: Synthetic oligonucleotide
  Antisense strand to SEQ ID NO: 2140900
uuaaccaagcauuucuacu

SEQ ID NO: 2140902 - RNA, 19 nt, Artificial Sequence
  Description of Artificial Sequence: Synthetic oligonucleotide
  Sense strand starting at position 848 of SEQ ID NO: 1882695
guagaaaugcuugguuaaa

SEQ ID NO: 2140903 - RNA, 19 nt, Artificial Sequence
  Description of Artificial Sequence: Synthetic oligonucleotide
  Antisense strand to SEQ ID NO: 2140902
uuuaaccaagcauuucuac

SEQ ID NO: 2140904 - RNA, 19 nt, Artificial Sequence
  Description of Artificial Sequence: Synthetic oligonucleotide
  Sense strand starting at position 849 of SEQ ID NO: 1882695
uagaaaugcuugguuaaag

SEQ ID NO: 2140905 - RNA, 19 nt, Artificial Sequence
  Description of Artificial Sequence: Synthetic oligonucleotide
  Antisense strand to SEQ ID NO: 2140904
cuuuaaccaagcauuucua

SEQ ID NO: 2140906 - RNA, 19 nt, Artificial Sequence
  Description of Artificial Sequence: Synthetic oligonucleotide
  Sense strand starting at position 860 of SEQ ID NO: 1882695
gguuaaaggguacauguau

SEQ ID NO: 2140907 - RNA, 19 nt, Artificial Sequence
  Description of Artificial Sequence: Synthetic oligonucleotide
  Antisense strand to SEQ ID NO: 2140906
auacauguacccuuuaacc

SEQ ID NO: 2140908 - RNA, 19 nt, Artificial Sequence
  Description of Artificial Sequence: Synthetic oligonucleotide
  Sense strand starting at position 1115 of SEQ ID NO: 1882695
accaacuauuuguagagaa

SEQ ID NO: 2140909 - RNA, 19 nt, Artificial Sequence
  Description of Artificial Sequence: Synthetic oligonucleotide
  Antisense strand to SEQ ID NO: 2140908
uucucuacaaauaguuggu

SEQ ID NO: 2140910 - RNA, 19 nt, Artificial Sequence
  Description of Artificial Sequence: Synthetic oligonucleotide
  Sense strand starting at position 1268 of SEQ ID NO: 1882695
aggcaauccugguugagag

SEQ ID NO: 2140911 - RNA, 19 nt, Artificial Sequence
  Description of Artificial Sequence: Synthetic oligonucleotide
  Antisense strand to SEQ ID NO: 2140910
cucucaaccaggauugccu

SEQ ID NO: 2140912 - RNA, 19 nt, Artificial Sequence
  Description of Artificial Sequence: Synthetic oligonucleotide
  Sense strand starting at position 1280 of SEQ ID NO: 1882695
uugagaggguccuuaccuu

SEQ ID NO: 2140913 - RNA, 19 nt, Artificial Sequence
  Description of Artificial Sequence: Synthetic oligonucleotide
  Antisense strand to SEQ ID NO: 2140912
aagguaaggacccucucaa

SEQ ID NO: 2140914 - RNA, 19 nt, Artificial Sequence
  Description of Artificial Sequence: Synthetic oligonucleotide
  Sense strand starting at position 1422 of SEQ ID NO: 1882695
uccuuaucuuaggugacua

SEQ ID NO: 2140915 - RNA, 19 nt, Artificial Sequence
  Description of Artificial Sequence: Synthetic oligonucleotide
  Antisense strand to SEQ ID NO: 2140914
uagucaccuaagauaagga

SEQ ID NO: 2140916 - RNA, 19 nt, Artificial Sequence
  Description of Artificial Sequence: Synthetic oligonucleotide
  Sense strand starting at position 1540 of SEQ ID NO: 1882695
agguacuucuuguccaaac

SEQ ID NO: 2140917 - RNA, 19 nt, Artificial Sequence
  Description of Artificial Sequence: Synthetic oligonucleotide
  Antisense strand to SEQ ID NO: 2140916
guuuggacaagaaguaccu

SEQ ID NO: 2140918 - RNA, 19 nt, Artificial Sequence
  Description of Artificial Sequence: Synthetic oligonucleotide
  Sense strand starting at position 1542 of SEQ ID NO: 1882695
guacuucuuguccaaaccu

SEQ ID NO: 2140919 - RNA, 19 nt, Artificial Sequence
  Description of Artificial Sequence: Synthetic oligonucleotide
  Antisense strand to SEQ ID NO: 2140918
agguuuggacaagaaguac

SEQ ID NO: 2140920 - RNA, 19 nt, Artificial Sequence
  Description of Artificial Sequence: Synthetic oligonucleotide
  Sense strand starting at position 1688 of SEQ ID NO: 1882695
cgccuacaaguccgaauuu

SEQ ID NO: 2140921 - RNA, 19 nt, Artificial Sequence
  Description of Artificial Sequence: Synthetic oligonucleotide
  Antisense strand to SEQ ID NO: 2140920
aaauucggacuuguaggcg

SEQ ID NO: 2140922 - RNA, 19 nt, Artificial Sequence
  Description of Artificial Sequence: Synthetic oligonucleotide
  Sense strand starting at position 1857 of SEQ ID NO: 1882695
cgcagaccugaggaaugua

SEQ ID NO: 2140923 - RNA, 19 nt, Artificial Sequence
  Description of Artificial Sequence: Synthetic oligonucleotide
  Antisense strand to SEQ ID NO: 2140922
uacauuccucaggucugcg

SEQ ID NO: 2140924 - RNA, 19 nt, Artificial Sequence
  Description of Artificial Sequence: Synthetic oligonucleotide
  Sense strand starting at position 1860 of SEQ ID NO: 1882695
agaccugaggaauguaguu

SEQ ID NO: 2140925 - RNA, 19 nt, Artificial Sequence
  Description of Artificial Sequence: Synthetic oligonucleotide
  Antisense strand to SEQ ID NO: 2140924
aacuacauuccucaggucu

SEQ ID NO: 2140926 - RNA, 19 nt, Artificial Sequence
  Description of Artificial Sequence: Synthetic oligonucleotide
  Sense strand starting at position 1865 of SEQ ID NO: 1882695
ugaggaauguaguucuccu

SEQ ID NO: 2140927 - RNA, 19 nt, Artificial Sequence
  Description of Artificial Sequence: Synthetic oligonucleotide
  Antisense strand to SEQ ID NO: 2140926
aggagaacuacauuccuca

SEQ ID NO: 2140928 - RNA, 19 nt, Artificial Sequence
  Description of Artificial Sequence: Synthetic oligonucleotide
  Sense strand starting at position 2735 of SEQ ID NO: 1882695
gcugacuauacugguauga

SEQ ID NO: 2140929 - RNA, 19 nt, Artificial Sequence
  Description of Artificial Sequence: Synthetic oligonucleotide
  Antisense strand to SEQ ID NO: 2140928
ucauaccaguauagucagc

SEQ ID NO: 2140930 - RNA, 19 nt, Artificial Sequence
  Description of Artificial Sequence: Synthetic oligonucleotide
  Sense strand starting at position 2785 of SEQ ID NO: 1882695
gcgucacagcggaggauua

SEQ ID NO: 2140931 - RNA, 19 nt, Artificial Sequence
  Description of Artificial Sequence: Synthetic oligonucleotide
  Antisense strand to SEQ ID NO: 2140930
uaauccuccgcugugacgc

SEQ ID NO: 2140932 - RNA, 19 nt, Artificial Sequence
  Description of Artificial Sequence: Synthetic oligonucleotide
  Sense strand starting at position 2869 of SEQ ID NO: 1882695
agggauucucccgauugug

SEQ ID NO: 2140933 - RNA, 19 nt, Artificial Sequence
  Description of Artificial Sequence: Synthetic oligonucleotide
  Antisense strand to SEQ ID NO: 2140932
cacaaucgggagaaucccu

SEQ ID NO: 2140934 - RNA, 19 nt, Artificial Sequence
  Description of Artificial Sequence: Synthetic oligonucleotide
  Sense strand starting at position 2872 of SEQ ID NO: 1882695
gauucucccgauuguggaa

SEQ ID NO: 2140935 - RNA, 19 nt, Artificial Sequence
  Description of Artificial Sequence: Synthetic oligonucleotide
  Antisense strand to SEQ ID NO: 2140934
uuccacaaucgggagaauc

SEQ ID NO: 2140936 - RNA, 19 nt, Artificial Sequence
  Description of Artificial Sequence: Synthetic oligonucleotide
  Sense strand starting at position 3123 of SEQ ID NO: 1882695
aaaguugaucgguacauua

SEQ ID NO: 2140937 - RNA, 19 nt, Artificial Sequence
  Description of Artificial Sequence: Synthetic oligonucleotide
  Antisense strand to SEQ ID NO: 2140936
uaauguaccgaucaacuuu

SEQ ID NO: 2140938 - RNA, 19 nt, Artificial Sequence
  Description of Artificial Sequence: Synthetic oligonucleotide
  Sense strand starting at position 3125 of SEQ ID NO: 1882695
aguugaucgguacauuaaa

SEQ ID NO: 2140939 - RNA, 19 nt, Artificial Sequence
  Description of Artificial Sequence: Synthetic oligonucleotide
  Antisense strand to SEQ ID NO: 2140938
uuuaauguaccgaucaacu

SEQ ID NO: 2140940 - RNA, 19 nt, Artificial Sequence
  Description of Artificial Sequence: Synthetic oligonucleotide
  Sense strand starting at position 3341 of SEQ ID NO: 1882695
uuaaauguagcuggacaga

SEQ ID NO: 2140941 - RNA, 19 nt, Artificial Sequence
  Description of Artificial Sequence: Synthetic oligonucleotide
  Antisense strand to SEQ ID NO: 2140940
ucuguccagcuacauuuaa

SEQ ID NO: 2140942 - RNA, 19 nt, Artificial Sequence
  Description of Artificial Sequence: Synthetic oligonucleotide
  Sense strand starting at position 3445 of SEQ ID NO: 1882695
acauguaguuuauccugaa

SEQ ID NO: 2140943 - RNA, 19 nt, Artificial Sequence
  Description of Artificial Sequence: Synthetic oligonucleotide
  Antisense strand to SEQ ID NO: 2140942
uucaggauaaacuacaugu

SEQ ID NO: 2140944 - RNA, 19 nt, Artificial Sequence
  Description of Artificial Sequence: Synthetic oligonucleotide
  Sense strand starting at position 3583 of SEQ ID NO: 1882695
ggaucuaucuuccuggaag

SEQ ID NO: 2140945 - RNA, 19 nt, Artificial Sequence
  Description of Artificial Sequence: Synthetic oligonucleotide
  Antisense strand to SEQ ID NO: 2140944
cuuccaggaagauagaucc

SEQ ID NO: 2140946 - RNA, 19 nt, Artificial Sequence
  Description of Artificial Sequence: Synthetic oligonucleotide
  Sense strand starting at position 3585 of SEQ ID NO: 1882695
aucuaucuuccuggaagag

SEQ ID NO: 2140947 - RNA, 19 nt, Artificial Sequence
  Description of Artificial Sequence: Synthetic oligonucleotide
  Antisense strand to SEQ ID NO: 2140946
cucuuccaggaagauagau

SEQ ID NO: 2140948 - RNA, 19 nt, Artificial Sequence
  Description of Artificial Sequence: Synthetic oligonucleotide
  Sense strand starting at position 3586 of SEQ ID NO: 1882695
ucuaucuuccuggaagagu

SEQ ID NO: 2140949 - RNA, 19 nt, Artificial Sequence
  Description of Artificial Sequence: Synthetic oligonucleotide
  Antisense strand to SEQ ID NO: 2140948
acucuuccaggaagauaga

SEQ ID NO: 2140950 - RNA, 19 nt, Artificial Sequence
  Description of Artificial Sequence: Synthetic oligonucleotide
  Sense strand starting at position 3595 of SEQ ID NO: 1882695
cuggaagaguagguuucaa

SEQ ID NO: 2140951 - RNA, 19 nt, Artificial Sequence
  Description of Artificial Sequence: Synthetic oligonucleotide
  Antisense strand to SEQ ID NO: 2140950
uugaaaccuacucuuccag

SEQ ID NO: 2140952 - RNA, 19 nt, Artificial Sequence
  Description of Artificial Sequence: Synthetic oligonucleotide
  Sense strand starting at position 898 of SEQ ID NO: 1882696
gucccacauuucuguguuu

SEQ ID NO: 2140953 - RNA, 19 nt, Artificial Sequence
  Description of Artificial Sequence: Synthetic oligonucleotide
  Antisense strand to SEQ ID NO: 2140952
aaacacagaaaugugggac

SEQ ID NO: 2140954 - RNA, 19 nt, Artificial Sequence
  Description of Artificial Sequence: Synthetic oligonucleotide
  Sense strand starting at position 1548 of SEQ ID NO: 1882696
aaggauuaguuguaacaga

SEQ ID NO: 2140955 - RNA, 19 nt, Artificial Sequence
  Description of Artificial Sequence: Synthetic oligonucleotide
  Antisense strand to SEQ ID NO: 2140954
ucuguuacaacuaauccuu

SEQ ID NO: 2140956 - RNA, 19 nt, Artificial Sequence
  Description of Artificial Sequence: Synthetic oligonucleotide
  Sense strand starting at position 1862 of SEQ ID NO: 1882696
uugcaucuccaguagaaca

SEQ ID NO: 2140957 - RNA, 19 nt, Artificial Sequence
  Description of Artificial Sequence: Synthetic oligonucleotide
  Antisense strand to SEQ ID NO: 2140956
uguucuacuggagaugcaa

SEQ ID NO: 2140958 - RNA, 19 nt, Artificial Sequence
  Description of Artificial Sequence: Synthetic oligonucleotide
  Sense strand starting at position 1903 of SEQ ID NO: 1882696
ccacgauccucuggacaga

SEQ ID NO: 2140959 - RNA, 19 nt, Artificial Sequence
  Description of Artificial Sequence: Synthetic oligonucleotide
  Antisense strand to SEQ ID NO: 2140958
ucuguccagaggaucgugg

SEQ ID NO: 2140960 - RNA, 19 nt, Artificial Sequence
  Description of Artificial Sequence: Synthetic oligonucleotide
  Sense strand starting at position 1916 of SEQ ID NO: 1882696
gacagagauuuguggcgaa

SEQ ID NO: 2140961 - RNA, 19 nt, Artificial Sequence
  Description of Artificial Sequence: Synthetic oligonucleotide
  Antisense strand to SEQ ID NO: 2140960
uucgccacaaaucucuguc

SEQ ID NO: 2140962 - RNA, 19 nt, Artificial Sequence
  Description of Artificial Sequence: Synthetic oligonucleotide
  Sense strand starting at position 1919 of SEQ ID NO: 1882696
agagauuuguggcgaagac

SEQ ID NO: 2140963 - RNA, 19 nt, Artificial Sequence
  Description of Artificial Sequence: Synthetic oligonucleotide
  Antisense strand to SEQ ID NO: 2140962
gucuucgccacaaaucucu

SEQ ID NO: 2140964 - RNA, 19 nt, Artificial Sequence
  Description of Artificial Sequence: Synthetic oligonucleotide
  Sense strand starting at position 3741 of SEQ ID NO: 1882696
ucuagaauuagauguaggu

SEQ ID NO: 2140965 - RNA, 19 nt, Artificial Sequence
  Description of Artificial Sequence: Synthetic oligonucleotide
  Antisense strand to SEQ ID NO: 2140964
accuacaucuaauucuaga

SEQ ID NO: 2140966 - RNA, 19 nt, Artificial Sequence
  Description of Artificial Sequence: Synthetic oligonucleotide
  Sense strand starting at position 3745 of SEQ ID NO: 1882696
gaauuagauguagguauca

SEQ ID NO: 2140967 - RNA, 19 nt, Artificial Sequence
  Description of Artificial Sequence: Synthetic oligonucleotide
  Antisense strand to SEQ ID NO: 2140966
ugauaccuacaucuaauuc

SEQ ID NO: 2140968 - RNA, 19 nt, Artificial Sequence
  Description of Artificial Sequence: Synthetic oligonucleotide
  Sense strand starting at position 3750 of SEQ ID NO: 1882696
agauguagguaucaaaggu

SEQ ID NO: 2140969 - RNA, 19 nt, Artificial Sequence
  Description of Artificial Sequence: Synthetic oligonucleotide
  Antisense strand to SEQ ID NO: 2140968
accuuugauaccuacaucu

SEQ ID NO: 2140970 - RNA, 19 nt, Artificial Sequence
  Description of Artificial Sequence: Synthetic oligonucleotide
  Sense strand starting at position 3916 of SEQ ID NO: 1882696
gcugauguccucgccugua

SEQ ID NO: 2140971 - RNA, 19 nt, Artificial Sequence
  Description of Artificial Sequence: Synthetic oligonucleotide
  Antisense strand to SEQ ID NO: 2140970
uacaggcgaggacaucagc

SEQ ID NO: 2140972 - RNA, 19 nt, Artificial Sequence
  Description of Artificial Sequence: Synthetic oligonucleotide
  Sense strand starting at position 3918 of SEQ ID NO: 1882696
ugauguccucgccuguauu

SEQ ID NO: 2140973 - RNA, 19 nt, Artificial Sequence
  Description of Artificial Sequence: Synthetic oligonucleotide
  Antisense strand to SEQ ID NO: 2140972
aauacaggcgaggacauca

SEQ ID NO: 2140974 - RNA, 19 nt, Artificial Sequence
  Description of Artificial Sequence: Synthetic oligonucleotide
  Sense strand starting at position 3919 of SEQ ID NO: 1882696
gauguccucgccuguauuu

SEQ ID NO: 2140975 - RNA, 19 nt, Artificial Sequence
  Description of Artificial Sequence: Synthetic oligonucleotide
  Antisense strand to SEQ ID NO: 2140974
aaauacaggcgaggacauc

SEQ ID NO: 2140976 - RNA, 19 nt, Artificial Sequence
  Description of Artificial Sequence: Synthetic oligonucleotide
  Sense strand starting at position 381 of SEQ ID NO: 1882697
gaaauaggucugcggaggu

SEQ ID NO: 2140977 - RNA, 19 nt, Artificial Sequence
  Description of Artificial Sequence: Synthetic oligonucleotide
  Antisense strand to SEQ ID NO: 2140976
accuccgcagaccuauuuc

SEQ ID NO: 2140978 - RNA, 19 nt, Artificial Sequence
  Description of Artificial Sequence: Synthetic oligonucleotide
  Sense strand starting at position 463 of SEQ ID NO: 1882697
cagcgaaaccucggauuuc

SEQ ID NO: 2140979 - RNA, 19 nt, Artificial Sequence
  Description of Artificial Sequence: Synthetic oligonucleotide
  Antisense strand to SEQ ID NO: 2140978
gaaauccgagguuucgcug

SEQ ID NO: 2140980 - RNA, 19 nt, Artificial Sequence
  Description of Artificial Sequence: Synthetic oligonucleotide
  Sense strand starting at position 553 of SEQ ID NO: 1882697
gaauuagacuccguuuccu

SEQ ID NO: 2140981 - RNA, 19 nt, Artificial Sequence
  Description of Artificial Sequence: Synthetic oligonucleotide
  Antisense strand to SEQ ID NO: 2140980
aggaaacggagucuaauuc

SEQ ID NO: 2140982 - RNA, 19 nt, Artificial Sequence
  Description of Artificial Sequence: Synthetic oligonucleotide
  Sense strand starting at position 604 of SEQ ID NO: 1882697
gucacuuagagcuaaacga

SEQ ID NO: 2140983 - RNA, 19 nt, Artificial Sequence
  Description of Artificial Sequence: Synthetic oligonucleotide
  Antisense strand to SEQ ID NO: 2140982
ucguuuagcucuaagugac

SEQ ID NO: 2140984 - RNA, 19 nt, Artificial Sequence
  Description of Artificial Sequence: Synthetic oligonucleotide
  Sense strand starting at position 635 of SEQ ID NO: 1882697
cagauuugcuuggccucua

SEQ ID NO: 2140985 - RNA, 19 nt, Artificial Sequence
  Description of Artificial Sequence: Synthetic oligonucleotide
  Antisense strand to SEQ ID NO: 2140984
uagaggccaagcaaaucug

SEQ ID NO: 2140986 - RNA, 19 nt, Artificial Sequence
  Description of Artificial Sequence: Synthetic oligonucleotide
  Sense strand starting at position 636 of SEQ ID NO: 1882697
agauuugcuuggccucuaa

SEQ ID NO: 2140987 - RNA, 19 nt, Artificial Sequence
  Description of Artificial Sequence: Synthetic oligonucleotide
  Antisense strand to SEQ ID NO: 2140986
uuagaggccaagcaaaucu

SEQ ID NO: 2140988 - RNA, 19 nt, Artificial Sequence
  Description of Artificial Sequence: Synthetic oligonucleotide
  Sense strand starting at position 648 of SEQ ID NO: 1882697
ccucuaaagccugguuaag

SEQ ID NO: 2140989 - RNA, 19 nt, Artificial Sequence
  Description of Artificial Sequence: Synthetic oligonucleotide
  Antisense strand to SEQ ID NO: 2140988
cuuaaccaggcuuuagagg

SEQ ID NO: 2140990 - RNA, 19 nt, Artificial Sequence
  Description of Artificial Sequence: Synthetic oligonucleotide
  Sense strand starting at position 660 of SEQ ID NO: 1882697
gguuaagcagauugagaau

SEQ ID NO: 2140991 - RNA, 19 nt, Artificial Sequence
  Description of Artificial Sequence: Synthetic oligonucleotide
  Antisense strand to SEQ ID NO: 2140990
auucucaaucugcuuaacc

SEQ ID NO: 2140992 - RNA, 19 nt, Artificial Sequence
  Description of Artificial Sequence: Synthetic oligonucleotide
  Sense strand starting at position 835 of SEQ ID NO: 1882697
aguaguuacugacugcaga

SEQ ID NO: 2140993 - RNA, 19 nt, Artificial Sequence
  Description of Artificial Sequence: Synthetic oligonucleotide
  Antisense strand to SEQ ID NO: 2140992
ucugcagucaguaacuacu

SEQ ID NO: 2140994 - RNA, 19 nt, Artificial Sequence
  Description of Artificial Sequence: Synthetic oligonucleotide
  Sense strand starting at position 836 of SEQ ID NO: 1882697
guaguuacugacugcagau

SEQ ID NO: 2140995 - RNA, 19 nt, Artificial Sequence
  Description of Artificial Sequence: Synthetic oligonucleotide
  Antisense strand to SEQ ID NO: 2140994
aucugcagucaguaacuac

SEQ ID NO: 2140996 - RNA, 19 nt, Artificial Sequence
  Description of Artificial Sequence: Synthetic oligonucleotide
  Sense strand starting at position 888 of SEQ ID NO: 1882697
aagcgaauugagcaauuau

SEQ ID NO: 2140997 - RNA, 19 nt, Artificial Sequence
  Description of Artificial Sequence: Synthetic oligonucleotide
  Antisense strand to SEQ ID NO: 2140996
auaauugcucaauucgcuu

SEQ ID NO: 2140998 - RNA, 19 nt, Artificial Sequence
  Description of Artificial Sequence: Synthetic oligonucleotide
  Sense strand starting at position 895 of SEQ ID NO: 1882697
uugagcaauuaucuaguuu

SEQ ID NO: 2140999 - RNA, 19 nt, Artificial Sequence
  Description of Artificial Sequence: Synthetic oligonucleotide
  Antisense strand to SEQ ID NO: 2140998
aaacuagauaauugcucaa

SEQ ID NO: 2141000 - RNA, 19 nt, Artificial Sequence
  Description of Artificial Sequence: Synthetic oligonucleotide
  Sense strand starting at position 1305 of SEQ ID NO: 1882697
cuuggcuuucuccauugaa

SEQ ID NO: 2141001 - RNA, 19 nt, Artificial Sequence
  Description of Artificial Sequence: Synthetic oligonucleotide
  Antisense strand to SEQ ID NO: 2141000
uucaauggagaaagccaag

SEQ ID NO: 2141002 - RNA, 19 nt, Artificial Sequence
  Description of Artificial Sequence: Synthetic oligonucleotide
  Sense strand starting at position 1308 of SEQ ID NO: 1882697
ggcuuucuccauugaacga

SEQ ID NO: 2141003 - RNA, 19 nt, Artificial Sequence
  Description of Artificial Sequence: Synthetic oligonucleotide
  Antisense strand to SEQ ID NO: 2141002
ucguucaauggagaaagcc

SEQ ID NO: 2141004 - RNA, 19 nt, Artificial Sequence
  Description of Artificial Sequence: Synthetic oligonucleotide
  Sense strand starting at position 2321 of SEQ ID NO: 1882697
ccuguucuacguguguuua

SEQ ID NO: 2141005 - RNA, 19 nt, Artificial Sequence
  Description of Artificial Sequence: Synthetic oligonucleotide
  Antisense strand to SEQ ID NO: 2141004
uaaacacacguagaacagg

SEQ ID NO: 2141006 - RNA, 19 nt, Artificial Sequence
  Description of Artificial Sequence: Synthetic oligonucleotide
  Sense strand starting at position 2324 of SEQ ID NO: 1882697
guucuacguguguuuaauu

SEQ ID NO: 2141007 - RNA, 19 nt, Artificial Sequence
  Description of Artificial Sequence: Synthetic oligonucleotide
  Antisense strand to SEQ ID NO: 2141006
aauuaaacacacguagaac

SEQ ID NO: 2141008 - RNA, 19 nt, Artificial Sequence
  Description of Artificial Sequence: Synthetic oligonucleotide
  Sense strand starting at position 2325 of SEQ ID NO: 1882697
uucuacguguguuuaauuu

SEQ ID NO: 2141009 - RNA, 19 nt, Artificial Sequence
  Description of Artificial Sequence: Synthetic oligonucleotide
  Antisense strand to SEQ ID NO: 2141008
aaauuaaacacacguagaa

SEQ ID NO: 2141010 - RNA, 19 nt, Artificial Sequence
  Description of Artificial Sequence: Synthetic oligonucleotide
  Sense strand starting at position 2351 of SEQ ID NO: 1882697
uuuaaugcgcacuauaacu

SEQ ID NO: 2141011 - RNA, 19 nt, Artificial Sequence
  Description of Artificial Sequence: Synthetic oligonucleotide
  Antisense strand to SEQ ID NO: 2141010
aguuauagugcgcauuaaa

SEQ ID NO: 2141012 - RNA, 19 nt, Artificial Sequence
  Description of Artificial Sequence: Synthetic oligonucleotide
  Sense strand starting at position 2518 of SEQ ID NO: 1882697
uccgaacuguuugcagaaa

SEQ ID NO: 2141013 - RNA, 19 nt, Artificial Sequence
  Description of Artificial Sequence: Synthetic oligonucleotide
  Antisense strand to SEQ ID NO: 2141012
uuucugcaaacaguucgga

SEQ ID NO: 2141014 - RNA, 19 nt, Artificial Sequence
  Description of Artificial Sequence: Synthetic oligonucleotide
  Sense strand starting at position 2554 of SEQ ID NO: 1882697
uacucuuuaggauaacguu

SEQ ID NO: 2141015 - RNA, 19 nt, Artificial Sequence
  Description of Artificial Sequence: Synthetic oligonucleotide
  Antisense strand to SEQ ID NO: 2141014
aacguuauccuaaagagua

SEQ ID NO: 2141016 - RNA, 19 nt, Artificial Sequence
  Description of Artificial Sequence: Synthetic oligonucleotide
  Sense strand starting at position 2597 of SEQ ID NO: 1882697
gggugaaugccauguauug

SEQ ID NO: 2141017 - RNA, 19 nt, Artificial Sequence
  Description of Artificial Sequence: Synthetic oligonucleotide
  Antisense strand to SEQ ID NO: 2141016
caauacauggcauucaccc

SEQ ID NO: 2141018 - RNA, 19 nt, Artificial Sequence
  Description of Artificial Sequence: Synthetic oligonucleotide
  Sense strand starting at position 2599 of SEQ ID NO: 1882697
gugaaugccauguauuguu

SEQ ID NO: 2141019 - RNA, 19 nt, Artificial Sequence
  Description of Artificial Sequence: Synthetic oligonucleotide
  Antisense strand to SEQ ID NO: 2141018
aacaauacauggcauucac

SEQ ID NO: 2141020 - RNA, 19 nt, Artificial Sequence
  Description of Artificial Sequence: Synthetic oligonucleotide
  Sense strand starting at position 2631 of SEQ ID NO: 1882697
cuugaaaguguuuaagcau

SEQ ID NO: 2141021 - RNA, 19 nt, Artificial Sequence
  Description of Artificial Sequence: Synthetic oligonucleotide
  Antisense strand to SEQ ID NO: 2141020
augcuuaaacacuuucaag

SEQ ID NO: 2141022 - RNA, 19 nt, Artificial Sequence
  Description of Artificial Sequence: Synthetic oligonucleotide
  Sense strand starting at position 2634 of SEQ ID NO: 1882697
gaaaguguuuaagcauuac

SEQ ID NO: 2141023 - RNA, 19 nt, Artificial Sequence
  Description of Artificial Sequence: Synthetic oligonucleotide
  Antisense strand to SEQ ID NO: 2141022
guaaugcuuaaacacuuuc

SEQ ID NO: 2141024 - RNA, 19 nt, Artificial Sequence
  Description of Artificial Sequence: Synthetic oligonucleotide
  Sense strand starting at position 2712 of SEQ ID NO: 1882697
ccuuucuccugcuuaggaa

SEQ ID NO: 2141025 - RNA, 19 nt, Artificial Sequence
  Description of Artificial Sequence: Synthetic oligonucleotide
  Antisense strand to SEQ ID NO: 2141024
uuccuaagcaggagaaagg

SEQ ID NO: 2141026 - RNA, 19 nt, Artificial Sequence
  Description of Artificial Sequence: Synthetic oligonucleotide
  Sense strand starting at position 2713 of SEQ ID NO: 1882697
cuuucuccugcuuaggaaa

SEQ ID NO: 2141027 - RNA, 19 nt, Artificial Sequence
  Description of Artificial Sequence: Synthetic oligonucleotide
  Antisense strand to SEQ ID NO: 2141026
uuuccuaagcaggagaaag

SEQ ID NO: 2141028 - RNA, 19 nt, Artificial Sequence
  Description of Artificial Sequence: Synthetic oligonucleotide
  Sense strand starting at position 2740 of SEQ ID NO: 1882697
aaauguaaccaguguggca

SEQ ID NO: 2141029 - RNA, 19 nt, Artificial Sequence
  Description of Artificial Sequence: Synthetic oligonucleotide
  Antisense strand to SEQ ID NO: 2141028
ugccacacugguuacauuu

SEQ ID NO: 2141030 - RNA, 19 nt, Artificial Sequence
  Description of Artificial Sequence: Synthetic oligonucleotide
  Sense strand starting at position 2913 of SEQ ID NO: 1882697
uaauacuuucgggauguuu

SEQ ID NO: 2141031 - RNA, 19 nt, Artificial Sequence
  Description of Artificial Sequence: Synthetic oligonucleotide
  Antisense strand to SEQ ID NO: 2141030
aaacaucccgaaaguauua

SEQ ID NO: 2141032 - RNA, 19 nt, Artificial Sequence
  Description of Artificial Sequence: Synthetic oligonucleotide
  Sense strand starting at position 2930 of SEQ ID NO: 1882697
uuuagaagacgauguuuaa

SEQ ID NO: 2141033 - RNA, 19 nt, Artificial Sequence
  Description of Artificial Sequence: Synthetic oligonucleotide
  Antisense strand to SEQ ID NO: 2141032
uuaaacaucgucuucuaaa

SEQ ID NO: 2141034 - RNA, 19 nt, Artificial Sequence
  Description of Artificial Sequence: Synthetic oligonucleotide
  Sense strand starting at position 2933 of SEQ ID NO: 1882697
agaagacgauguuuaaagu

SEQ ID NO: 2141035 - RNA, 19 nt, Artificial Sequence
  Description of Artificial Sequence: Synthetic oligonucleotide
  Antisense strand to SEQ ID NO: 2141034
acuuuaaacaucgucuucu

SEQ ID NO: 2141036 - RNA, 19 nt, Artificial Sequence
  Description of Artificial Sequence: Synthetic oligonucleotide
  Sense strand starting at position 2991 of SEQ ID NO: 1882697
cucgaagucugauuaguau

SEQ ID NO: 2141037 - RNA, 19 nt, Artificial Sequence
  Description of Artificial Sequence: Synthetic oligonucleotide
  Antisense strand to SEQ ID NO: 2141036
auacuaaucagacuucgag

SEQ ID NO: 2141038 - RNA, 19 nt, Artificial Sequence
  Description of Artificial Sequence: Synthetic oligonucleotide
  Sense strand starting at position 3063 of SEQ ID NO: 1882697
cauuguauguaauuggacu

SEQ ID NO: 2141039 - RNA, 19 nt, Artificial Sequence
  Description of Artificial Sequence: Synthetic oligonucleotide
  Antisense strand to SEQ ID NO: 2141038
aguccaauuacauacaaug

SEQ ID NO: 2141040 - RNA, 19 nt, Artificial Sequence
  Description of Artificial Sequence: Synthetic oligonucleotide
  Sense strand starting at position 3076 of SEQ ID NO: 1882697
uggacugauaaauguguau

SEQ ID NO: 2141041 - RNA, 19 nt, Artificial Sequence
  Description of Artificial Sequence: Synthetic oligonucleotide
  Antisense strand to SEQ ID NO: 2141040
auacacauuuaucagucca

SEQ ID NO: 2141042 - RNA, 19 nt, Artificial Sequence
  Description of Artificial Sequence: Synthetic oligonucleotide
  Sense strand starting at position 3352 of SEQ ID NO: 1882697
agugcaauaucugcaacaa

SEQ ID NO: 2141043 - RNA, 19 nt, Artificial Sequence
  Description of Artificial Sequence: Synthetic oligonucleotide
  Antisense strand to SEQ ID NO: 2141042
uuguugcagauauugcacu

SEQ ID NO: 2141044 - RNA, 19 nt, Artificial Sequence
  Description of Artificial Sequence: Synthetic oligonucleotide
  Sense strand starting at position 3353 of SEQ ID NO: 1882697
gugcaauaucugcaacaag

SEQ ID NO: 2141045 - RNA, 19 nt, Artificial Sequence
  Description of Artificial Sequence: Synthetic oligonucleotide
  Antisense strand to SEQ ID NO: 2141044
cuuguugcagauauugcac

SEQ ID NO: 2141046 - RNA, 19 nt, Artificial Sequence
  Description of Artificial Sequence: Synthetic oligonucleotide
  Sense strand starting at position 3455 of SEQ ID NO: 1882697
ggguuucugcaggaacuuu

SEQ ID NO: 2141047 - RNA, 19 nt, Artificial Sequence
  Description of Artificial Sequence: Synthetic oligonucleotide
  Antisense strand to SEQ ID NO: 2141046
aaaguuccugcagaaaccc

SEQ ID NO: 2141048 - RNA, 19 nt, Artificial Sequence
  Description of Artificial Sequence: Synthetic oligonucleotide
  Sense strand starting at position 3470 of SEQ ID NO: 1882697
cuuugaccucaagaagcau

SEQ ID NO: 2141049 - RNA, 19 nt, Artificial Sequence
  Description of Artificial Sequence: Synthetic oligonucleotide
  Antisense strand to SEQ ID NO: 2141048
augcuucuugaggucaaag

SEQ ID NO: 2141050 - RNA, 19 nt, Artificial Sequence
  Description of Artificial Sequence: Synthetic oligonucleotide
  Sense strand starting at position 3653 of SEQ ID NO: 1882697
ccaccagugaucgaggcua

SEQ ID NO: 2141051 - RNA, 19 nt, Artificial Sequence
  Description of Artificial Sequence: Synthetic oligonucleotide
  Antisense strand to SEQ ID NO: 2141050
uagccucgaucacuggugg

SEQ ID NO: 2141052 - RNA, 19 nt, Artificial Sequence
  Description of Artificial Sequence: Synthetic oligonucleotide
  Sense strand starting at position 3655 of SEQ ID NO: 1882697
accagugaucgaggcuaag

SEQ ID NO: 2141053 - RNA, 19 nt, Artificial Sequence
  Description of Artificial Sequence: Synthetic oligonucleotide
  Antisense strand to SEQ ID NO: 2141052
cuuagccucgaucacuggu

SEQ ID NO: 2141054 - RNA, 19 nt, Artificial Sequence
  Description of Artificial Sequence: Synthetic oligonucleotide
  Sense strand starting at position 3732 of SEQ ID NO: 1882697
guccgaguucgucugcaga

SEQ ID NO: 2141055 - RNA, 19 nt, Artificial Sequence
  Description of Artificial Sequence: Synthetic oligonucleotide
  Antisense strand to SEQ ID NO: 2141054
ucugcagacgaacucggac

SEQ ID NO: 2141056 - RNA, 19 nt, Artificial Sequence
  Description of Artificial Sequence: Synthetic oligonucleotide
  Sense strand starting at position 67 of SEQ ID NO: 1882698
agaagucaggcugagucua

SEQ ID NO: 2141057 - RNA, 19 nt, Artificial Sequence
  Description of Artificial Sequence: Synthetic oligonucleotide
  Antisense strand to SEQ ID NO: 2141056
uagacucagccugacuucu

SEQ ID NO: 2141058 - RNA, 19 nt, Artificial Sequence
  Description of Artificial Sequence: Synthetic oligonucleotide
  Sense strand starting at position 69 of SEQ ID NO: 1882698
aagucaggcugagucuaaa

SEQ ID NO: 2141059 - RNA, 19 nt, Artificial Sequence
  Description of Artificial Sequence: Synthetic oligonucleotide
  Antisense strand to SEQ ID NO: 2141058
uuuagacucagccugacuu

SEQ ID NO: 2141060 - RNA, 19 nt, Artificial Sequence
  Description of Artificial Sequence: Synthetic oligonucleotide
  Sense strand starting at position 307 of SEQ ID NO: 1882698
aaaggcaguuuauuagaaa

SEQ ID NO: 2141061 - RNA, 19 nt, Artificial Sequence
  Description of Artificial Sequence: Synthetic oligonucleotide
  Antisense strand to SEQ ID NO: 2141060
uuucuaauaaacugccuuu

SEQ ID NO: 2141062 - RNA, 19 nt, Artificial Sequence
  Description of Artificial Sequence: Synthetic oligonucleotide
  Sense strand starting at position 444 of SEQ ID NO: 1882698
caauuauggucucugggaa

SEQ ID NO: 2141063 - RNA, 19 nt, Artificial Sequence
  Description of Artificial Sequence: Synthetic oligonucleotide
  Antisense strand to SEQ ID NO: 2141062
uucccagagaccauaauug

SEQ ID NO: 2141064 - RNA, 19 nt, Artificial Sequence
  Description of Artificial Sequence: Synthetic oligonucleotide
  Sense strand starting at position 553 of SEQ ID NO: 1882698
ugcauuauuuacuugucuu

SEQ ID NO: 2141065 - RNA, 19 nt, Artificial Sequence
  Description of Artificial Sequence: Synthetic oligonucleotide
  Antisense strand to SEQ ID NO: 2141064
aagacaaguaaauaaugca

SEQ ID NO: 2141066 - RNA, 19 nt, Artificial Sequence
  Description of Artificial Sequence: Synthetic oligonucleotide
  Sense strand starting at position 740 of SEQ ID NO: 1882698
cccagaacauggcuuaaca

SEQ ID NO: 2141067 - RNA, 19 nt, Artificial Sequence
  Description of Artificial Sequence: Synthetic oligonucleotide
  Antisense strand to SEQ ID NO: 2141066
uguuaagccauguucuggg

SEQ ID NO: 2141068 - RNA, 19 nt, Artificial Sequence
  Description of Artificial Sequence: Synthetic oligonucleotide
  Sense strand starting at position 751 of SEQ ID NO: 1882698
gcuuaacaucaaggaaaug

SEQ ID NO: 2141069 - RNA, 19 nt, Artificial Sequence
  Description of Artificial Sequence: Synthetic oligonucleotide
  Antisense strand to SEQ ID NO: 2141068
cauuuccuugauguuaagc

SEQ ID NO: 2141070 - RNA, 19 nt, Artificial Sequence
  Description of Artificial Sequence: Synthetic oligonucleotide
  Sense strand starting at position 800 of SEQ ID NO: 1882698
ggaaccgaugccuaauuga

SEQ ID NO: 2141071 - RNA, 19 nt, Artificial Sequence
  Description of Artificial Sequence: Synthetic oligonucleotide
  Antisense strand to SEQ ID NO: 2141070
ucaauuaggcaucgguucc

SEQ ID NO: 2141072 - RNA, 19 nt, Artificial Sequence
  Description of Artificial Sequence: Synthetic oligonucleotide
  Sense strand starting at position 821 of SEQ ID NO: 1882698
aucauuaggcuguaaacca

SEQ ID NO: 2141073 - RNA, 19 nt, Artificial Sequence
  Description of Artificial Sequence: Synthetic oligonucleotide
  Antisense strand to SEQ ID NO: 2141072
ugguuuacagccuaaugau

SEQ ID NO: 2141074 - RNA, 19 nt, Artificial Sequence
  Description of Artificial Sequence: Synthetic oligonucleotide
  Sense strand starting at position 847 of SEQ ID NO: 1882698
guuccaauuucuucguuua

SEQ ID NO: 2141075 - RNA, 19 nt, Artificial Sequence
  Description of Artificial Sequence: Synthetic oligonucleotide
  Antisense strand to SEQ ID NO: 2141074
uaaacgaagaaauuggaac

SEQ ID NO: 2141076 - RNA, 19 nt, Artificial Sequence
  Description of Artificial Sequence: Synthetic oligonucleotide
  Sense strand starting at position 1021 of SEQ ID NO: 1882698
agaaguaggucagugaaac

SEQ ID NO: 2141077 - RNA, 19 nt, Artificial Sequence
  Description of Artificial Sequence: Synthetic oligonucleotide
  Antisense strand to SEQ ID NO: 2141076
guuucacugaccuacuucu

SEQ ID NO: 2141078 - RNA, 19 nt, Artificial Sequence
  Description of Artificial Sequence: Synthetic oligonucleotide
  Sense strand starting at position 1033 of SEQ ID NO: 1882698
gugaaacggcauuaguaua

SEQ ID NO: 2141079 - RNA, 19 nt, Artificial Sequence
  Description of Artificial Sequence: Synthetic oligonucleotide
  Antisense strand to SEQ ID NO: 2141078
uauacuaaugccguuucac

SEQ ID NO: 2141080 - RNA, 19 nt, Artificial Sequence
  Description of Artificial Sequence: Synthetic oligonucleotide
  Sense strand starting at position 1462 of SEQ ID NO: 1882698
gugaguggauucuuaauua

SEQ ID NO: 2141081 - RNA, 19 nt, Artificial Sequence
  Description of Artificial Sequence: Synthetic oligonucleotide
  Antisense strand to SEQ ID NO: 2141080
uaauuaagaauccacucac

SEQ ID NO: 2141082 - RNA, 19 nt, Artificial Sequence
  Description of Artificial Sequence: Synthetic oligonucleotide
  Sense strand starting at position 1466 of SEQ ID NO: 1882698
guggauucuuaauuacuau

SEQ ID NO: 2141083 - RNA, 19 nt, Artificial Sequence
  Description of Artificial Sequence: Synthetic oligonucleotide
  Antisense strand to SEQ ID NO: 2141082
auaguaauuaagaauccac

SEQ ID NO: 2141084 - RNA, 19 nt, Artificial Sequence
  Description of Artificial Sequence: Synthetic oligonucleotide
  Sense strand starting at position 1502 of SEQ ID NO: 1882698
auuacuuacguggagugaa

SEQ ID NO: 2141085 - RNA, 19 nt, Artificial Sequence
  Description of Artificial Sequence: Synthetic oligonucleotide
  Antisense strand to SEQ ID NO: 2141084
uucacuccacguaaguaau

SEQ ID NO: 2141086 - RNA, 19 nt, Artificial Sequence
  Description of Artificial Sequence: Synthetic oligonucleotide
  Sense strand starting at position 1505 of SEQ ID NO: 1882698
acuuacguggagugaaaua

SEQ ID NO: 2141087 - RNA, 19 nt, Artificial Sequence
  Description of Artificial Sequence: Synthetic oligonucleotide
  Antisense strand to SEQ ID NO: 2141086
uauuucacuccacguaagu

SEQ ID NO: 2141088 - RNA, 19 nt, Artificial Sequence
  Description of Artificial Sequence: Synthetic oligonucleotide
  Sense strand starting at position 1681 of SEQ ID NO: 1882698
gaccgcguuccacaagaaa

SEQ ID NO: 2141089 - RNA, 19 nt, Artificial Sequence
  Description of Artificial Sequence: Synthetic oligonucleotide
  Antisense strand to SEQ ID NO: 2141088
uuucuuguggaacgcgguc

SEQ ID NO: 2141090 - RNA, 19 nt, Artificial Sequence
  Description of Artificial Sequence: Synthetic oligonucleotide
  Sense strand starting at position 2073 of SEQ ID NO: 1882698
ccuagagcccgguggauuu

SEQ ID NO: 2141091 - RNA, 19 nt, Artificial Sequence
  Description of Artificial Sequence: Synthetic oligonucleotide
  Antisense strand to SEQ ID NO: 2141090
aaauccaccgggcucuagg

SEQ ID NO: 2141092 - RNA, 19 nt, Artificial Sequence
  Description of Artificial Sequence: Synthetic oligonucleotide
  Sense strand starting at position 2161 of SEQ ID NO: 1882698
auuuaucucugugaagaac

SEQ ID NO: 2141093 - RNA, 19 nt, Artificial Sequence
  Description of Artificial Sequence: Synthetic oligonucleotide
  Antisense strand to SEQ ID NO: 2141092
guucuucacagagauaaau

SEQ ID NO: 2141094 - RNA, 19 nt, Artificial Sequence
  Description of Artificial Sequence: Synthetic oligonucleotide
  Sense strand starting at position 2232 of SEQ ID NO: 1882698
ccaggaaagacucguuuac

SEQ ID NO: 2141095 - RNA, 19 nt, Artificial Sequence
  Description of Artificial Sequence: Synthetic oligonucleotide
  Antisense strand to SEQ ID NO: 2141094
guaaacgagucuuuccugg

SEQ ID NO: 2141096 - RNA, 19 nt, Artificial Sequence
  Description of Artificial Sequence: Synthetic oligonucleotide
  Sense strand starting at position 2234 of SEQ ID NO: 1882698
aggaaagacucguuuacuc

SEQ ID NO: 2141097 - RNA, 19 nt, Artificial Sequence
  Description of Artificial Sequence: Synthetic oligonucleotide
  Antisense strand to SEQ ID NO: 2141096
gaguaaacgagucuuuccu

SEQ ID NO: 2141098 - RNA, 19 nt, Artificial Sequence
  Description of Artificial Sequence: Synthetic oligonucleotide
  Sense strand starting at position 2236 of SEQ ID NO: 1882698
gaaagacucguuuacucuc

SEQ ID NO: 2141099 - RNA, 19 nt, Artificial Sequence
  Description of Artificial Sequence: Synthetic oligonucleotide
  Antisense strand to SEQ ID NO: 2141098
gagaguaaacgagucuuuc

SEQ ID NO: 2141100 - RNA, 19 nt, Artificial Sequence
  Description of Artificial Sequence: Synthetic oligonucleotide
  Sense strand starting at position 2306 of SEQ ID NO: 1882698
gcuuauaaacuguaaagac

SEQ ID NO: 2141101 - RNA, 19 nt, Artificial Sequence
  Description of Artificial Sequence: Synthetic oligonucleotide
  Antisense strand to SEQ ID NO: 2141100
gucuuuacaguuuauaagc

SEQ ID NO: 2141102 - RNA, 19 nt, Artificial Sequence
  Description of Artificial Sequence: Synthetic oligonucleotide
  Sense strand starting at position 2326 of SEQ ID NO: 1882698
gacauacugcuugaggguu

SEQ ID NO: 2141103 - RNA, 19 nt, Artificial Sequence
  Description of Artificial Sequence: Synthetic oligonucleotide
  Antisense strand to SEQ ID NO: 2141102
aacccucaagcaguauguc

SEQ ID NO: 2141104 - RNA, 19 nt, Artificial Sequence
  Description of Artificial Sequence: Synthetic oligonucleotide
  Sense strand starting at position 2434 of SEQ ID NO: 1882698
ggagauauuaacuguccug

SEQ ID NO: 2141105 - RNA, 19 nt, Artificial Sequence
  Description of Artificial Sequence: Synthetic oligonucleotide
  Antisense strand to SEQ ID NO: 2141104
caggacaguuaauaucucc

SEQ ID NO: 2141106 - RNA, 19 nt, Artificial Sequence
  Description of Artificial Sequence: Synthetic oligonucleotide
  Sense strand starting at position 2524 of SEQ ID NO: 1882698
cgucauguuauggcugcua

SEQ ID NO: 2141107 - RNA, 19 nt, Artificial Sequence
  Description of Artificial Sequence: Synthetic oligonucleotide
  Antisense strand to SEQ ID NO: 2141106
uagcagccauaacaugacg

SEQ ID NO: 2141108 - RNA, 19 nt, Artificial Sequence
  Description of Artificial Sequence: Synthetic oligonucleotide
  Sense strand starting at position 2559 of SEQ ID NO: 1882698
guuaccuuacaggguaaau

SEQ ID NO: 2141109 - RNA, 19 nt, Artificial Sequence
  Description of Artificial Sequence: Synthetic oligonucleotide
  Antisense strand to SEQ ID NO: 2141108
auuuacccuguaagguaac

SEQ ID NO: 2141110 - RNA, 19 nt, Artificial Sequence
  Description of Artificial Sequence: Synthetic oligonucleotide
  Sense strand starting at position 2571 of SEQ ID NO: 1882698
gguaaauaaugaguuucga

SEQ ID NO: 2141111 - RNA, 19 nt, Artificial Sequence
  Description of Artificial Sequence: Synthetic oligonucleotide
  Antisense strand to SEQ ID NO: 2141110
ucgaaacucauuauuuacc

SEQ ID NO: 2141112 - RNA, 19 nt, Artificial Sequence
  Description of Artificial Sequence: Synthetic oligonucleotide
  Sense strand starting at position 2595 of SEQ ID NO: 1882698
agacuuccgcuuuaaagaa

SEQ ID NO: 2141113 - RNA, 19 nt, Artificial Sequence
  Description of Artificial Sequence: Synthetic oligonucleotide
  Antisense strand to SEQ ID NO: 2141112
uucuuuaaagcggaagucu

SEQ ID NO: 2141114 - RNA, 19 nt, Artificial Sequence
  Description of Artificial Sequence: Synthetic oligonucleotide
  Sense strand starting at position 2612 of SEQ ID NO: 1882698
aagaaaugguaaucauggu

SEQ ID NO: 2141115 - RNA, 19 nt, Artificial Sequence
  Description of Artificial Sequence: Synthetic oligonucleotide
  Antisense strand to SEQ ID NO: 2141114
accaugauuaccauuucuu

SEQ ID NO: 2141116 - RNA, 19 nt, Artificial Sequence
  Description of Artificial Sequence: Synthetic oligonucleotide
  Sense strand starting at position 2618 of SEQ ID NO: 1882698
ugguaaucaugguuacgaa

SEQ ID NO: 2141117 - RNA, 19 nt, Artificial Sequence
  Description of Artificial Sequence: Synthetic oligonucleotide
  Antisense strand to SEQ ID NO: 2141116
uucguaaccaugauuacca

SEQ ID NO: 2141118 - RNA, 19 nt, Artificial Sequence
  Description of Artificial Sequence: Synthetic oligonucleotide
  Sense strand starting at position 2619 of SEQ ID NO: 1882698
gguaaucaugguuacgaau

SEQ ID NO: 2141119 - RNA, 19 nt, Artificial Sequence
  Description of Artificial Sequence: Synthetic oligonucleotide
  Antisense strand to SEQ ID NO: 2141118
auucguaaccaugauuacc

SEQ ID NO: 2141120 - RNA, 19 nt, Artificial Sequence
  Description of Artificial Sequence: Synthetic oligonucleotide
  Sense strand starting at position 2977 of SEQ ID NO: 1882698
ccacuuaaucuguaguuaa

SEQ ID NO: 2141121 - RNA, 19 nt, Artificial Sequence
  Description of Artificial Sequence: Synthetic oligonucleotide
  Antisense strand to SEQ ID NO: 2141120
uuaacuacagauuaagugg

SEQ ID NO: 2141122 - RNA, 19 nt, Artificial Sequence
  Description of Artificial Sequence: Synthetic oligonucleotide
  Sense strand starting at position 3038 of SEQ ID NO: 1882698
acucuaugugcauaggaau

SEQ ID NO: 2141123 - RNA, 19 nt, Artificial Sequence
  Description of Artificial Sequence: Synthetic oligonucleotide
  Antisense strand to SEQ ID NO: 2141122
auuccuaugcacauagagu

SEQ ID NO: 2141124 - RNA, 19 nt, Artificial Sequence
  Description of Artificial Sequence: Synthetic oligonucleotide
  Sense strand starting at position 3110 of SEQ ID NO: 1882698
gugcaagauucugcauuuc

SEQ ID NO: 2141125 - RNA, 19 nt, Artificial Sequence
  Description of Artificial Sequence: Synthetic oligonucleotide
  Antisense strand to SEQ ID NO: 2141124
gaaaugcagaaucuugcac

SEQ ID NO: 2141126 - RNA, 19 nt, Artificial Sequence
  Description of Artificial Sequence: Synthetic oligonucleotide
  Sense strand starting at position 3188 of SEQ ID NO: 1882698
gaccuuagagucuggacaa

SEQ ID NO: 2141127 - RNA, 19 nt, Artificial Sequence
  Description of Artificial Sequence: Synthetic oligonucleotide
  Antisense strand to SEQ ID NO: 2141126
uuguccagacucuaagguc

SEQ ID NO: 2141128 - RNA, 19 nt, Artificial Sequence
  Description of Artificial Sequence: Synthetic oligonucleotide
  Sense strand starting at position 3200 of SEQ ID NO: 1882698
uggacaacaucuguuuaca

SEQ ID NO: 2141129 - RNA, 19 nt, Artificial Sequence
  Description of Artificial Sequence: Synthetic oligonucleotide
  Antisense strand to SEQ ID NO: 2141128
uguaaacagauguugucca

SEQ ID NO: 2141130 - RNA, 19 nt, Artificial Sequence
  Description of Artificial Sequence: Synthetic oligonucleotide
  Sense strand starting at position 3214 of SEQ ID NO: 1882698
uuacacuggccucauagua

SEQ ID NO: 2141131 - RNA, 19 nt, Artificial Sequence
  Description of Artificial Sequence: Synthetic oligonucleotide
  Antisense strand to SEQ ID NO: 2141130
uacuaugaggccaguguaa

SEQ ID NO: 2141132 - RNA, 19 nt, Artificial Sequence
  Description of Artificial Sequence: Synthetic oligonucleotide
  Sense strand starting at position 3304 of SEQ ID NO: 1882698
gcagcuuuggaacaagaau

SEQ ID NO: 2141133 - RNA, 19 nt, Artificial Sequence
  Description of Artificial Sequence: Synthetic oligonucleotide
  Antisense strand to SEQ ID NO: 2141132
auucuuguuccaaagcugc

SEQ ID NO: 2141134 - RNA, 19 nt, Artificial Sequence
  Description of Artificial Sequence: Synthetic oligonucleotide
  Sense strand starting at position 3337 of SEQ ID NO: 1882698
aggagguaucgugagaggu

SEQ ID NO: 2141135 - RNA, 19 nt, Artificial Sequence
  Description of Artificial Sequence: Synthetic oligonucleotide
  Antisense strand to SEQ ID NO: 2141134
accucucacgauaccuccu

SEQ ID NO: 2141136 - RNA, 19 nt, Artificial Sequence
  Description of Artificial Sequence: Synthetic oligonucleotide
  Sense strand starting at position 8 of SEQ ID NO: 1882702
agggaaauuugucauugua

SEQ ID NO: 2141137 - RNA, 19 nt, Artificial Sequence
  Description of Artificial Sequence: Synthetic oligonucleotide
  Antisense strand to SEQ ID NO: 2141136
uacaaugacaaauuucccu

SEQ ID NO: 2141138 - RNA, 19 nt, Artificial Sequence
  Description of Artificial Sequence: Synthetic oligonucleotide
  Sense strand starting at position 59 of SEQ ID NO: 1882702
gucaaugcaucacuuagua

SEQ ID NO: 2141139 - RNA, 19 nt, Artificial Sequence
  Description of Artificial Sequence: Synthetic oligonucleotide
  Antisense strand to SEQ ID NO: 2141138
uacuaagugaugcauugac

SEQ ID NO: 2141140 - RNA, 19 nt, Artificial Sequence
  Description of Artificial Sequence: Synthetic oligonucleotide
  Sense strand starting at position 63 of SEQ ID NO: 1882702
augcaucacuuaguagaaa

SEQ ID NO: 2141141 - RNA, 19 nt, Artificial Sequence
  Description of Artificial Sequence: Synthetic oligonucleotide
  Antisense strand to SEQ ID NO: 2141140
uuucuacuaagugaugcau

SEQ ID NO: 2141142 - RNA, 19 nt, Artificial Sequence
  Description of Artificial Sequence: Synthetic oligonucleotide
  Sense strand starting at position 146 of SEQ ID NO: 1882702
aguuaaucauaguuaaagg

SEQ ID NO: 2141143 - RNA, 19 nt, Artificial Sequence
  Description of Artificial Sequence: Synthetic oligonucleotide
  Antisense strand to SEQ ID NO: 2141142
ccuuuaacuaugauuaacu

SEQ ID NO: 2141144 - RNA, 19 nt, Artificial Sequence
  Description of Artificial Sequence: Synthetic oligonucleotide
  Sense strand starting at position 164 of SEQ ID NO: 1882702
gugugaugcugcccuagga

SEQ ID NO: 2141145 - RNA, 19 nt, Artificial Sequence
  Description of Artificial Sequence: Synthetic oligonucleotide
  Antisense strand to SEQ ID NO: 2141144
uccuagggcagcaucacac

SEQ ID NO: 2141146 - RNA, 19 nt, Artificial Sequence
  Description of Artificial Sequence: Synthetic oligonucleotide
  Sense strand starting at position 290 of SEQ ID NO: 1882702
gucauucaugacggauguu

SEQ ID NO: 2141147 - RNA, 19 nt, Artificial Sequence
  Description of Artificial Sequence: Synthetic oligonucleotide
  Antisense strand to SEQ ID NO: 2141146
aacauccgucaugaaugac

SEQ ID NO: 2141148 - RNA, 19 nt, Artificial Sequence
  Description of Artificial Sequence: Synthetic oligonucleotide
  Sense strand starting at position 343 of SEQ ID NO: 1882702
guuaaauccuuccugucac

SEQ ID NO: 2141149 - RNA, 19 nt, Artificial Sequence
  Description of Artificial Sequence: Synthetic oligonucleotide
  Antisense strand to SEQ ID NO: 2141148
gugacaggaaggauuuaac

SEQ ID NO: 2141150 - RNA, 19 nt, Artificial Sequence
  Description of Artificial Sequence: Synthetic oligonucleotide
  Sense strand starting at position 441 of SEQ ID NO: 1882702
cguuguuaacacugguuau

SEQ ID NO: 2141151 - RNA, 19 nt, Artificial Sequence
  Description of Artificial Sequence: Synthetic oligonucleotide
  Antisense strand to SEQ ID NO: 2141150
auaaccaguguuaacaacg

SEQ ID NO: 2141152 - RNA, 19 nt, Artificial Sequence
  Description of Artificial Sequence: Synthetic oligonucleotide
  Sense strand starting at position 442 of SEQ ID NO: 1882702
guuguuaacacugguuauc

SEQ ID NO: 2141153 - RNA, 19 nt, Artificial Sequence
  Description of Artificial Sequence: Synthetic oligonucleotide
  Antisense strand to SEQ ID NO: 2141152
gauaaccaguguuaacaac

SEQ ID NO: 2141154 - RNA, 19 nt, Artificial Sequence
  Description of Artificial Sequence: Synthetic oligonucleotide
  Sense strand starting at position 445 of SEQ ID NO: 1882702
guuaacacugguuaucuca

SEQ ID NO: 2141155 - RNA, 19 nt, Artificial Sequence
  Description of Artificial Sequence: Synthetic oligonucleotide
  Antisense strand to SEQ ID NO: 2141154
ugagauaaccaguguuaac

SEQ ID NO: 2141156 - RNA, 19 nt, Artificial Sequence
  Description of Artificial Sequence: Synthetic oligonucleotide
  Sense strand starting at position 453 of SEQ ID NO: 1882702
ugguuaucucaugguagug

SEQ ID NO: 2141157 - RNA, 19 nt, Artificial Sequence
  Description of Artificial Sequence: Synthetic oligonucleotide
  Antisense strand to SEQ ID NO: 2141156
cacuaccaugagauaacca

SEQ ID NO: 2141158 - RNA, 19 nt, Artificial Sequence
  Description of Artificial Sequence: Synthetic oligonucleotide
  Sense strand starting at position 518 of SEQ ID NO: 1882702
uuugcauuguuuccauuau

SEQ ID NO: 2141159 - RNA, 19 nt, Artificial Sequence
  Description of Artificial Sequence: Synthetic oligonucleotide
  Antisense strand to SEQ ID NO: 2141158
auaauggaaacaaugcaaa

SEQ ID NO: 2141160 - RNA, 19 nt, Artificial Sequence
  Description of Artificial Sequence: Synthetic oligonucleotide
  Sense strand starting at position 1033 of SEQ ID NO: 1882702
gaggaagucuaauguauuu

SEQ ID NO: 2141161 - RNA, 19 nt, Artificial Sequence
  Description of Artificial Sequence: Synthetic oligonucleotide
  Antisense strand to SEQ ID NO: 2141160
aaauacauuagacuuccuc

SEQ ID NO: 2141162 - RNA, 19 nt, Artificial Sequence
  Description of Artificial Sequence: Synthetic oligonucleotide
  Sense strand starting at position 1421 of SEQ ID NO: 1882702
augggauacucuuaaacug

SEQ ID NO: 2141163 - RNA, 19 nt, Artificial Sequence
  Description of Artificial Sequence: Synthetic oligonucleotide
  Antisense strand to SEQ ID NO: 2141162
caguuuaagaguaucccau

SEQ ID NO: 2141164 - RNA, 19 nt, Artificial Sequence
  Description of Artificial Sequence: Synthetic oligonucleotide
  Sense strand starting at position 1428 of SEQ ID NO: 1882702
acucuuaaacugugaugcu

SEQ ID NO: 2141165 - RNA, 19 nt, Artificial Sequence
  Description of Artificial Sequence: Synthetic oligonucleotide
  Antisense strand to SEQ ID NO: 2141164
agcaucacaguuuaagagu

SEQ ID NO: 2141166 - RNA, 19 nt, Artificial Sequence
  Description of Artificial Sequence: Synthetic oligonucleotide
  Sense strand starting at position 1435 of SEQ ID NO: 1882702
aacugugaugcugaguaaa

SEQ ID NO: 2141167 - RNA, 19 nt, Artificial Sequence
  Description of Artificial Sequence: Synthetic oligonucleotide
  Antisense strand to SEQ ID NO: 2141166
uuuacucagcaucacaguu

SEQ ID NO: 2141168 - RNA, 19 nt, Artificial Sequence
  Description of Artificial Sequence: Synthetic oligonucleotide
  Sense strand starting at position 1471 of SEQ ID NO: 1882702
cuugguaguauguaucaaa

SEQ ID NO: 2141169 - RNA, 19 nt, Artificial Sequence
  Description of Artificial Sequence: Synthetic oligonucleotide
  Antisense strand to SEQ ID NO: 2141168
uuugauacauacuaccaag

SEQ ID NO: 2141170 - RNA, 19 nt, Artificial Sequence
  Description of Artificial Sequence: Synthetic oligonucleotide
  Sense strand starting at position 2152 of SEQ ID NO: 1882702
cgauguaucccagggaaac

SEQ ID NO: 2141171 - RNA, 19 nt, Artificial Sequence
  Description of Artificial Sequence: Synthetic oligonucleotide
  Antisense strand to SEQ ID NO: 2141170
guuucccugggauacaucg

SEQ ID NO: 2141172 - RNA, 19 nt, Artificial Sequence
  Description of Artificial Sequence: Synthetic oligonucleotide
  Sense strand starting at position 2308 of SEQ ID NO: 1882702
gcuguuagaaugggcuaga

SEQ ID NO: 2141173 - RNA, 19 nt, Artificial Sequence
  Description of Artificial Sequence: Synthetic oligonucleotide
  Antisense strand to SEQ ID NO: 2141172
ucuagcccauucuaacagc

SEQ ID NO: 2141174 - RNA, 19 nt, Artificial Sequence
  Description of Artificial Sequence: Synthetic oligonucleotide
  Sense strand starting at position 2309 of SEQ ID NO: 1882702
cuguuagaaugggcuagau

SEQ ID NO: 2141175 - RNA, 19 nt, Artificial Sequence
  Description of Artificial Sequence: Synthetic oligonucleotide
  Antisense strand to SEQ ID NO: 2141174
aucuagcccauucuaacag

SEQ ID NO: 2141176 - RNA, 19 nt, Artificial Sequence
  Description of Artificial Sequence: Synthetic oligonucleotide
  Sense strand starting at position 2321 of SEQ ID NO: 1882702
gcuagaucccacuguauua

SEQ ID NO: 2141177 - RNA, 19 nt, Artificial Sequence
  Description of Artificial Sequence: Synthetic oligonucleotide
  Antisense strand to SEQ ID NO: 2141176
uaauacagugggaucuagc

SEQ ID NO: 2141178 - RNA, 19 nt, Artificial Sequence
  Description of Artificial Sequence: Synthetic oligonucleotide
  Sense strand starting at position 2342 of SEQ ID NO: 1882702
auggaaagcucuugaaacc

SEQ ID NO: 2141179 - RNA, 19 nt, Artificial Sequence
  Description of Artificial Sequence: Synthetic oligonucleotide
  Antisense strand to SEQ ID NO: 2141178
gguuucaagagcuuuccau

SEQ ID NO: 2141180 - RNA, 19 nt, Artificial Sequence
  Description of Artificial Sequence: Synthetic oligonucleotide
  Sense strand starting at position 2374 of SEQ ID NO: 1882702
guuccauuauaugaacaga

SEQ ID NO: 2141181 - RNA, 19 nt, Artificial Sequence
  Description of Artificial Sequence: Synthetic oligonucleotide
  Antisense strand to SEQ ID NO: 2141180
ucuguucauauaauggaac

SEQ ID NO: 2141182 - RNA, 19 nt, Artificial Sequence
  Description of Artificial Sequence: Synthetic oligonucleotide
  Sense strand starting at position 2591 of SEQ ID NO: 1882702
augggacacccauguagau

SEQ ID NO: 2141183 - RNA, 19 nt, Artificial Sequence
  Description of Artificial Sequence: Synthetic oligonucleotide
  Antisense strand to SEQ ID NO: 2141182
aucuacaugggugucccau

SEQ ID NO: 2141184 - RNA, 19 nt, Artificial Sequence
  Description of Artificial Sequence: Synthetic oligonucleotide
  Sense strand starting at position 2682 of SEQ ID NO: 1882702
ccaccuuguucccuaguaa

SEQ ID NO: 2141185 - RNA, 19 nt, Artificial Sequence
  Description of Artificial Sequence: Synthetic oligonucleotide
  Antisense strand to SEQ ID NO: 2141184
uuacuagggaacaaggugg

SEQ ID NO: 2141186 - RNA, 19 nt, Artificial Sequence
  Description of Artificial Sequence: Synthetic oligonucleotide
  Sense strand starting at position 2743 of SEQ ID NO: 1882702
acauuuguguuugcuuaua

SEQ ID NO: 2141187 - RNA, 19 nt, Artificial Sequence
  Description of Artificial Sequence: Synthetic oligonucleotide
  Antisense strand to SEQ ID NO: 2141186
uauaagcaaacacaaaugu

SEQ ID NO: 2141188 - RNA, 19 nt, Artificial Sequence
  Description of Artificial Sequence: Synthetic oligonucleotide
  Sense strand starting at position 3537 of SEQ ID NO: 1882702
agaagucuaucaccucaga

SEQ ID NO: 2141189 - RNA, 19 nt, Artificial Sequence
  Description of Artificial Sequence: Synthetic oligonucleotide
  Antisense strand to SEQ ID NO: 2141188
ucugaggugauagacuucu

SEQ ID NO: 2141190 - RNA, 19 nt, Artificial Sequence
  Description of Artificial Sequence: Synthetic oligonucleotide
  Sense strand starting at position 3572 of SEQ ID NO: 1882702
ucacuacuuguuugcucua

SEQ ID NO: 2141191 - RNA, 19 nt, Artificial Sequence
  Description of Artificial Sequence: Synthetic oligonucleotide
  Antisense strand to SEQ ID NO: 2141190
uagagcaaacaaguaguga

SEQ ID NO: 2141192 - RNA, 19 nt, Artificial Sequence
  Description of Artificial Sequence: Synthetic oligonucleotide
  Sense strand starting at position 3577 of SEQ ID NO: 1882702
acuuguuugcucuacugga

SEQ ID NO: 2141193 - RNA, 19 nt, Artificial Sequence
  Description of Artificial Sequence: Synthetic oligonucleotide
  Antisense strand to SEQ ID NO: 2141192
uccaguagagcaaacaagu

SEQ ID NO: 2141194 - RNA, 19 nt, Artificial Sequence
  Description of Artificial Sequence: Synthetic oligonucleotide
  Sense strand starting at position 3673 of SEQ ID NO: 1882702
gcaggccaugccugauaaa

SEQ ID NO: 2141195 - RNA, 19 nt, Artificial Sequence
  Description of Artificial Sequence: Synthetic oligonucleotide
  Antisense strand to SEQ ID NO: 2141194
uuuaucaggcauggccugc

SEQ ID NO: 2141196 - RNA, 19 nt, Artificial Sequence
  Description of Artificial Sequence: Synthetic oligonucleotide
  Sense strand starting at position 3720 of SEQ ID NO: 1882702
gccaguaauuagccucuau

SEQ ID NO: 2141197 - RNA, 19 nt, Artificial Sequence
  Description of Artificial Sequence: Synthetic oligonucleotide
  Antisense strand to SEQ ID NO: 2141196
auagaggcuaauuacuggc

SEQ ID NO: 2141198 - RNA, 19 nt, Artificial Sequence
  Description of Artificial Sequence: Synthetic oligonucleotide
  Sense strand starting at position 3724 of SEQ ID NO: 1882702
guaauuagccucuauggca

SEQ ID NO: 2141199 - RNA, 19 nt, Artificial Sequence
  Description of Artificial Sequence: Synthetic oligonucleotide
  Antisense strand to SEQ ID NO: 2141198
ugccauagaggcuaauuac

SEQ ID NO: 2141200 - RNA, 19 nt, Artificial Sequence
  Description of Artificial Sequence: Synthetic oligonucleotide
  Sense strand starting at position 3790 of SEQ ID NO: 1882702
cugaucagccucugaaauu

SEQ ID NO: 2141201 - RNA, 19 nt, Artificial Sequence
  Description of Artificial Sequence: Synthetic oligonucleotide
  Antisense strand to SEQ ID NO: 2141200
aauuucagaggcugaucag

SEQ ID NO: 2141202 - RNA, 19 nt, Artificial Sequence
  Description of Artificial Sequence: Synthetic oligonucleotide
  Sense strand starting at position 3791 of SEQ ID NO: 1882702
ugaucagccucugaaauuu

SEQ ID NO: 2141203 - RNA, 19 nt, Artificial Sequence
  Description of Artificial Sequence: Synthetic oligonucleotide
  Antisense strand to SEQ ID NO: 2141202
aaauuucagaggcugauca

SEQ ID NO: 2141204 - RNA, 19 nt, Artificial Sequence
  Description of Artificial Sequence: Synthetic oligonucleotide
  Sense strand starting at position 3807 of SEQ ID NO: 1882702
uuuguaaagcacugugaca

SEQ ID NO: 2141205 - RNA, 19 nt, Artificial Sequence
  Description of Artificial Sequence: Synthetic oligonucleotide
  Antisense strand to SEQ ID NO: 2141204
ugucacagugcuuuacaaa

SEQ ID NO: 2141206 - RNA, 19 nt, Artificial Sequence
  Description of Artificial Sequence: Synthetic oligonucleotide
  Sense strand starting at position 3857 of SEQ ID NO: 1882702
uugacaaaguugcuggaau

SEQ ID NO: 2141207 - RNA, 19 nt, Artificial Sequence
  Description of Artificial Sequence: Synthetic oligonucleotide
  Antisense strand to SEQ ID NO: 2141206
auuccagcaacuuugucaa

SEQ ID NO: 2141208 - RNA, 19 nt, Artificial Sequence
  Description of Artificial Sequence: Synthetic oligonucleotide
  Sense strand starting at position 3859 of SEQ ID NO: 1882702
gacaaaguugcuggaauag

SEQ ID NO: 2141209 - RNA, 19 nt, Artificial Sequence
  Description of Artificial Sequence: Synthetic oligonucleotide
  Antisense strand to SEQ ID NO: 2141208
cuauuccagcaacuuuguc

SEQ ID NO: 2141210 - RNA, 19 nt, Artificial Sequence
  Description of Artificial Sequence: Synthetic oligonucleotide
  Sense strand starting at position 3899 of SEQ ID NO: 1882702
gucaaacacuauccaaagu

SEQ ID NO: 2141211 - RNA, 19 nt, Artificial Sequence
  Description of Artificial Sequence: Synthetic oligonucleotide
  Antisense strand to SEQ ID NO: 2141210
acuuuggauaguguuugac

SEQ ID NO: 2141212 - RNA, 19 nt, Artificial Sequence
  Description of Artificial Sequence: Synthetic oligonucleotide
  Sense strand starting at position 3952 of SEQ ID NO: 1882702
cccagcucucuuggcauua

SEQ ID NO: 2141213 - RNA, 19 nt, Artificial Sequence
  Description of Artificial Sequence: Synthetic oligonucleotide
  Antisense strand to SEQ ID NO: 2141212
uaaugccaagagagcuggg

SEQ ID NO: 2141214 - RNA, 19 nt, Artificial Sequence
  Description of Artificial Sequence: Synthetic oligonucleotide
  Sense strand starting at position 3953 of SEQ ID NO: 1882702
ccagcucucuuggcauuaa

SEQ ID NO: 2141215 - RNA, 19 nt, Artificial Sequence
  Description of Artificial Sequence: Synthetic oligonucleotide
  Antisense strand to SEQ ID NO: 2141214
uuaaugccaagagagcugg

SEQ ID NO: 2141216 - RNA, 19 nt, Artificial Sequence
  Description of Artificial Sequence: Synthetic oligonucleotide
  Sense strand starting at position 58 of SEQ ID NO: 1882701
cacacaugggucugaagau

SEQ ID NO: 2141217 - RNA, 19 nt, Artificial Sequence
  Description of Artificial Sequence: Synthetic oligonucleotide
  Antisense strand to SEQ ID NO: 2141216
aucuucagacccaugugug

SEQ ID NO: 2141218 - RNA, 19 nt, Artificial Sequence
  Description of Artificial Sequence: Synthetic oligonucleotide
  Sense strand starting at position 97 of SEQ ID NO: 1882701
acugguucuuucucaagag

SEQ ID NO: 2141219 - RNA, 19 nt, Artificial Sequence
  Description of Artificial Sequence: Synthetic oligonucleotide
  Antisense strand to SEQ ID NO: 2141218
cucuugagaaagaaccagu

SEQ ID NO: 2141220 - RNA, 19 nt, Artificial Sequence
  Description of Artificial Sequence: Synthetic oligonucleotide
  Sense strand starting at position 101 of SEQ ID NO: 1882701
guucuuucucaagagggua

SEQ ID NO: 2141221 - RNA, 19 nt, Artificial Sequence
  Description of Artificial Sequence: Synthetic oligonucleotide
  Antisense strand to SEQ ID NO: 2141220
uacccucuugagaaagaac

SEQ ID NO: 2141222 - RNA, 19 nt, Artificial Sequence
  Description of Artificial Sequence: Synthetic oligonucleotide
  Sense strand starting at position 197 of SEQ ID NO: 1882701
ccacacacucuggguauua

SEQ ID NO: 2141223 - RNA, 19 nt, Artificial Sequence
  Description of Artificial Sequence: Synthetic oligonucleotide
  Antisense strand to SEQ ID NO: 2141222
uaauacccagagugugugg

SEQ ID NO: 2141224 - RNA, 19 nt, Artificial Sequence
  Description of Artificial Sequence: Synthetic oligonucleotide
  Sense strand starting at position 206 of SEQ ID NO: 1882701
cuggguauuacauguaaga

SEQ ID NO: 2141225 - RNA, 19 nt, Artificial Sequence
  Description of Artificial Sequence: Synthetic oligonucleotide
  Antisense strand to SEQ ID NO: 2141224
ucuuacauguaauacccag

SEQ ID NO: 2141226 - RNA, 19 nt, Artificial Sequence
  Description of Artificial Sequence: Synthetic oligonucleotide
  Sense strand starting at position 340 of SEQ ID NO: 1882701
ccaggugaggcggaaugau

SEQ ID NO: 2141227 - RNA, 19 nt, Artificial Sequence
  Description of Artificial Sequence: Synthetic oligonucleotide
  Antisense strand to SEQ ID NO: 2141226
aucauuccgccucaccugg

SEQ ID NO: 2141228 - RNA, 19 nt, Artificial Sequence
  Description of Artificial Sequence: Synthetic oligonucleotide
  Sense strand starting at position 388 of SEQ ID NO: 1882701
cucugagacccauguccau

SEQ ID NO: 2141229 - RNA, 19 nt, Artificial Sequence
  Description of Artificial Sequence: Synthetic oligonucleotide
  Antisense strand to SEQ ID NO: 2141228
auggacaugggucucagag

SEQ ID NO: 2141230 - RNA, 19 nt, Artificial Sequence
  Description of Artificial Sequence: Synthetic oligonucleotide
  Sense strand starting at position 475 of SEQ ID NO: 1882701
acagaagagccucauguua

SEQ ID NO: 2141231 - RNA, 19 nt, Artificial Sequence
  Description of Artificial Sequence: Synthetic oligonucleotide
  Antisense strand to SEQ ID NO: 2141230
uaacaugaggcucuucugu

SEQ ID NO: 2141232 - RNA, 19 nt, Artificial Sequence
  Description of Artificial Sequence: Synthetic oligonucleotide
  Sense strand starting at position 511 of SEQ ID NO: 1882701
cacugagaguguuccuaug

SEQ ID NO: 2141233 - RNA, 19 nt, Artificial Sequence
  Description of Artificial Sequence: Synthetic oligonucleotide
  Antisense strand to SEQ ID NO: 2141232
cauaggaacacucucagug

SEQ ID NO: 2141234 - RNA, 19 nt, Artificial Sequence
  Description of Artificial Sequence: Synthetic oligonucleotide
  Sense strand starting at position 513 of SEQ ID NO: 1882701
cugagaguguuccuaugag

SEQ ID NO: 2141235 - RNA, 19 nt, Artificial Sequence
  Description of Artificial Sequence: Synthetic oligonucleotide
  Antisense strand to SEQ ID NO: 2141234
cucauaggaacacucucag

SEQ ID NO: 2141236 - RNA, 19 nt, Artificial Sequence
  Description of Artificial Sequence: Synthetic oligonucleotide
  Sense strand starting at position 538 of SEQ ID NO: 1882701
acaucacuccuaggguauu

SEQ ID NO: 2141237 - RNA, 19 nt, Artificial Sequence
  Description of Artificial Sequence: Synthetic oligonucleotide
  Antisense strand to SEQ ID NO: 2141236
aauacccuaggagugaugu

SEQ ID NO: 2141238 - RNA, 19 nt, Artificial Sequence
  Description of Artificial Sequence: Synthetic oligonucleotide
  Sense strand starting at position 550 of SEQ ID NO: 1882701
ggguauuucuaccaaagaa

SEQ ID NO: 2141239 - RNA, 19 nt, Artificial Sequence
  Description of Artificial Sequence: Synthetic oligonucleotide
  Antisense strand to SEQ ID NO: 2141238
uucuuugguagaaauaccc

SEQ ID NO: 2141240 - RNA, 19 nt, Artificial Sequence
  Description of Artificial Sequence: Synthetic oligonucleotide
  Sense strand starting at position 688 of SEQ ID NO: 1882701
guggaaguuccagagugga

SEQ ID NO: 2141241 - RNA, 19 nt, Artificial Sequence
  Description of Artificial Sequence: Synthetic oligonucleotide
  Antisense strand to SEQ ID NO: 2141240
uccacucuggaacuuccac

SEQ ID NO: 2141242 - RNA, 19 nt, Artificial Sequence
  Description of Artificial Sequence: Synthetic oligonucleotide
  Sense strand starting at position 691 of SEQ ID NO: 1882701
gaaguuccagaguggagaa

SEQ ID NO: 2141243 - RNA, 19 nt, Artificial Sequence
  Description of Artificial Sequence: Synthetic oligonucleotide
  Antisense strand to SEQ ID NO: 2141242
uucuccacucuggaacuuc

SEQ ID NO: 2141244 - RNA, 19 nt, Artificial Sequence
  Description of Artificial Sequence: Synthetic oligonucleotide
  Sense strand starting at position 897 of SEQ ID NO: 1882701
auuugacccugagaaaugu

SEQ ID NO: 2141245 - RNA, 19 nt, Artificial Sequence
  Description of Artificial Sequence: Synthetic oligonucleotide
  Antisense strand to SEQ ID NO: 2141244
acauuucucagggucaaau

SEQ ID NO: 2141246 - RNA, 19 nt, Artificial Sequence
  Description of Artificial Sequence: Synthetic oligonucleotide
  Sense strand starting at position 906 of SEQ ID NO: 1882701
ugagaaauguaaucucuca

SEQ ID NO: 2141247 - RNA, 19 nt, Artificial Sequence
  Description of Artificial Sequence: Synthetic oligonucleotide
  Antisense strand to SEQ ID NO: 2141246
ugagagauuacauuucuca

SEQ ID NO: 2141248 - RNA, 19 nt, Artificial Sequence
  Description of Artificial Sequence: Synthetic oligonucleotide
  Sense strand starting at position 922 of SEQ ID NO: 1882701
ucaguuacuuuaucuauga

SEQ ID NO: 2141249 - RNA, 19 nt, Artificial Sequence
  Description of Artificial Sequence: Synthetic oligonucleotide
  Antisense strand to SEQ ID NO: 2141248
ucauagauaaaguaacuga

SEQ ID NO: 2141250 - RNA, 19 nt, Artificial Sequence
  Description of Artificial Sequence: Synthetic oligonucleotide
  Sense strand starting at position 926 of SEQ ID NO: 1882701
uuacuuuaucuaugaaacg

SEQ ID NO: 2141251 - RNA, 19 nt, Artificial Sequence
  Description of Artificial Sequence: Synthetic oligonucleotide
  Antisense strand to SEQ ID NO: 2141250
cguuucauagauaaaguaa

SEQ ID NO: 2141252 - RNA, 19 nt, Artificial Sequence
  Description of Artificial Sequence: Synthetic oligonucleotide
  Sense strand starting at position 960 of SEQ ID NO: 1882701
gcuaucucacagggacauu

SEQ ID NO: 2141253 - RNA, 19 nt, Artificial Sequence
  Description of Artificial Sequence: Synthetic oligonucleotide
  Antisense strand to SEQ ID NO: 2141252
aaugucccugugagauagc

SEQ ID NO: 2141254 - RNA, 19 nt, Artificial Sequence
  Description of Artificial Sequence: Synthetic oligonucleotide
  Sense strand starting at position 1036 of SEQ ID NO: 1882701
aauaaauguuuggccuuga

SEQ ID NO: 2141255 - RNA, 19 nt, Artificial Sequence
  Description of Artificial Sequence: Synthetic oligonucleotide
  Antisense strand to SEQ ID NO: 2141254
ucaaggccaaacauuuauu

SEQ ID NO: 2141256 - RNA, 19 nt, Artificial Sequence
  Description of Artificial Sequence: Synthetic oligonucleotide
  Sense strand starting at position 1047 of SEQ ID NO: 1882701
ggccuugagguguaaagug

SEQ ID NO: 2141257 - RNA, 19 nt, Artificial Sequence
  Description of Artificial Sequence: Synthetic oligonucleotide
  Antisense strand to SEQ ID NO: 2141256
cacuuuacaccucaaggcc

SEQ ID NO: 2141258 - RNA, 19 nt, Artificial Sequence
  Description of Artificial Sequence: Synthetic oligonucleotide
  Sense strand starting at position 1072 of SEQ ID NO: 1882701
ucuguaacagucuaagacu

SEQ ID NO: 2141259 - RNA, 19 nt, Artificial Sequence
  Description of Artificial Sequence: Synthetic oligonucleotide
  Antisense strand to SEQ ID NO: 2141258
agucuuagacuguuacaga

SEQ ID NO: 2141260 - RNA, 19 nt, Artificial Sequence
  Description of Artificial Sequence: Synthetic oligonucleotide
  Sense strand starting at position 1115 of SEQ ID NO: 1882701
agaguuuaauuauccuuga

SEQ ID NO: 2141261 - RNA, 19 nt, Artificial Sequence
  Description of Artificial Sequence: Synthetic oligonucleotide
  Antisense strand to SEQ ID NO: 2141260
ucaaggauaauuaaacucu

SEQ ID NO: 2141262 - RNA, 19 nt, Artificial Sequence
  Description of Artificial Sequence: Synthetic oligonucleotide
  Sense strand starting at position 1118 of SEQ ID NO: 1882701
guuuaauuauccuugaugg

SEQ ID NO: 2141263 - RNA, 19 nt, Artificial Sequence
  Description of Artificial Sequence: Synthetic oligonucleotide
  Antisense strand to SEQ ID NO: 2141262
ccaucaaggauaauuaaac

SEQ ID NO: 2141264 - RNA, 19 nt, Artificial Sequence
  Description of Artificial Sequence: Synthetic oligonucleotide
  Sense strand starting at position 1240 of SEQ ID NO: 1882701
aaaggcaaacaguguuuau

SEQ ID NO: 2141265 - RNA, 19 nt, Artificial Sequence
  Description of Artificial Sequence: Synthetic oligonucleotide
  Antisense strand to SEQ ID NO: 2141264
auaaacacuguuugccuuu

SEQ ID NO: 2141266 - RNA, 19 nt, Artificial Sequence
  Description of Artificial Sequence: Synthetic oligonucleotide
  Sense strand starting at position 1411 of SEQ ID NO: 1882701
gcugauuaccagcaaacca

SEQ ID NO: 2141267 - RNA, 19 nt, Artificial Sequence
  Description of Artificial Sequence: Synthetic oligonucleotide
  Antisense strand to SEQ ID NO: 2141266
ugguuugcugguaaucagc

SEQ ID NO: 2141268 - RNA, 19 nt, Artificial Sequence
  Description of Artificial Sequence: Synthetic oligonucleotide
  Sense strand starting at position 1570 of SEQ ID NO: 1882701
agaacucagucauccagga

SEQ ID NO: 2141269 - RNA, 19 nt, Artificial Sequence
  Description of Artificial Sequence: Synthetic oligonucleotide
  Antisense strand to SEQ ID NO: 2141268
uccuggaugacugaguucu

SEQ ID NO: 2141270 - RNA, 19 nt, Artificial Sequence
  Description of Artificial Sequence: Synthetic oligonucleotide
  Sense strand starting at position 1669 of SEQ ID NO: 1882701
augugucaucucugaacac

SEQ ID NO: 2141271 - RNA, 19 nt, Artificial Sequence
  Description of Artificial Sequence: Synthetic oligonucleotide
  Antisense strand to SEQ ID NO: 2141270
guguucagagaugacacau

SEQ ID NO: 2141272 - RNA, 19 nt, Artificial Sequence
  Description of Artificial Sequence: Synthetic oligonucleotide
  Sense strand starting at position 1877 of SEQ ID NO: 1882701
ugccuuaguccugaugaau

SEQ ID NO: 2141273 - RNA, 19 nt, Artificial Sequence
  Description of Artificial Sequence: Synthetic oligonucleotide
  Antisense strand to SEQ ID NO: 2141272
auucaucaggacuaaggca

SEQ ID NO: 2141274 - RNA, 19 nt, Artificial Sequence
  Description of Artificial Sequence: Synthetic oligonucleotide
  Sense strand starting at position 2122 of SEQ ID NO: 1882701
uguuaugaguccuccaaac

SEQ ID NO: 2141275 - RNA, 19 nt, Artificial Sequence
  Description of Artificial Sequence: Synthetic oligonucleotide
  Antisense strand to SEQ ID NO: 2141274
guuuggaggacucauaaca

SEQ ID NO: 2141276 - RNA, 19 nt, Artificial Sequence
  Description of Artificial Sequence: Synthetic oligonucleotide
  Sense strand starting at position 2428 of SEQ ID NO: 1882701
aauagucagugguugggau

SEQ ID NO: 2141277 - RNA, 19 nt, Artificial Sequence
  Description of Artificial Sequence: Synthetic oligonucleotide
  Antisense strand to SEQ ID NO: 2141276
aucccaaccacugacuauu

SEQ ID NO: 2141278 - RNA, 19 nt, Artificial Sequence
  Description of Artificial Sequence: Synthetic oligonucleotide
  Sense strand starting at position 2549 of SEQ ID NO: 1882701
accuuuguauaauuaggau

SEQ ID NO: 2141279 - RNA, 19 nt, Artificial Sequence
  Description of Artificial Sequence: Synthetic oligonucleotide
  Antisense strand to SEQ ID NO: 2141278
auccuaauuauacaaaggu

SEQ ID NO: 2141280 - RNA, 19 nt, Artificial Sequence
  Description of Artificial Sequence: Synthetic oligonucleotide
  Sense strand starting at position 2582 of SEQ ID NO: 1882701
acaguaugucaucaauuag

SEQ ID NO: 2141281 - RNA, 19 nt, Artificial Sequence
  Description of Artificial Sequence: Synthetic oligonucleotide
  Antisense strand to SEQ ID NO: 2141280
cuaauugaugacauacugu

SEQ ID NO: 2141282 - RNA, 19 nt, Artificial Sequence
  Description of Artificial Sequence: Synthetic oligonucleotide
  Sense strand starting at position 2644 of SEQ ID NO: 1882701
ccuuuagaguuguugaaau

SEQ ID NO: 2141283 - RNA, 19 nt, Artificial Sequence
  Description of Artificial Sequence: Synthetic oligonucleotide
  Antisense strand to SEQ ID NO: 2141282
auuucaacaacucuaaagg

SEQ ID NO: 2141284 - RNA, 19 nt, Artificial Sequence
  Description of Artificial Sequence: Synthetic oligonucleotide
  Sense strand starting at position 2646 of SEQ ID NO: 1882701
uuuagaguuguugaaauac

SEQ ID NO: 2141285 - RNA, 19 nt, Artificial Sequence
  Description of Artificial Sequence: Synthetic oligonucleotide
  Antisense strand to SEQ ID NO: 2141284
guauuucaacaacucuaaa

SEQ ID NO: 2141286 - RNA, 19 nt, Artificial Sequence
  Description of Artificial Sequence: Synthetic oligonucleotide
  Sense strand starting at position 2875 of SEQ ID NO: 1882701
acauuugcccgccacuaua

SEQ ID NO: 2141287 - RNA, 19 nt, Artificial Sequence
  Description of Artificial Sequence: Synthetic oligonucleotide
  Antisense strand to SEQ ID NO: 2141286
uauaguggcgggcaaaugu

SEQ ID NO: 2141288 - RNA, 19 nt, Artificial Sequence
  Description of Artificial Sequence: Synthetic oligonucleotide
  Sense strand starting at position 3068 of SEQ ID NO: 1882701
ugggcaugauggcucaaau

SEQ ID NO: 2141289 - RNA, 19 nt, Artificial Sequence
  Description of Artificial Sequence: Synthetic oligonucleotide
  Antisense strand to SEQ ID NO: 2141288
auuugagccaucaugccca

SEQ ID NO: 2141290 - RNA, 19 nt, Artificial Sequence
  Description of Artificial Sequence: Synthetic oligonucleotide
  Sense strand starting at position 3603 of SEQ ID NO: 1882701
caguuauacgaugagaucu

SEQ ID NO: 2141291 - RNA, 19 nt, Artificial Sequence
  Description of Artificial Sequence: Synthetic oligonucleotide
  Antisense strand to SEQ ID NO: 2141290
agaucucaucguauaacug

SEQ ID NO: 2141292 - RNA, 19 nt, Artificial Sequence
  Description of Artificial Sequence: Synthetic oligonucleotide
  Sense strand starting at position 3867 of SEQ ID NO: 1882701
gggucccauccagaaguga

SEQ ID NO: 2141293 - RNA, 19 nt, Artificial Sequence
  Description of Artificial Sequence: Synthetic oligonucleotide
  Antisense strand to SEQ ID NO: 2141292
ucacuucuggaugggaccc

SEQ ID NO: 2141294 - RNA, 19 nt, Artificial Sequence
  Description of Artificial Sequence: Synthetic oligonucleotide
  Sense strand starting at position 3876 of SEQ ID NO: 1882701
ccagaagugaggcauugua

SEQ ID NO: 2141295 - RNA, 19 nt, Artificial Sequence
  Description of Artificial Sequence: Synthetic oligonucleotide
  Antisense strand to SEQ ID NO: 2141294
uacaaugccucacuucugg

SEQ ID NO: 2141296 - RNA, 19 nt, Artificial Sequence
  Description of Artificial Sequence: Synthetic oligonucleotide
  Sense strand starting at position 28 of SEQ ID NO: 1882699
uugugauguguugauuaaa

SEQ ID NO: 2141297 - RNA, 19 nt, Artificial Sequence
  Description of Artificial Sequence: Synthetic oligonucleotide
  Antisense strand to SEQ ID NO: 2141296
uuuaaucaacacaucacaa

SEQ ID NO: 2141298 - RNA, 19 nt, Artificial Sequence
  Description of Artificial Sequence: Synthetic oligonucleotide
  Sense strand starting at position 55 of SEQ ID NO: 1882699
aagaaauguguauaugugu

SEQ ID NO: 2141299 - RNA, 19 nt, Artificial Sequence
  Description of Artificial Sequence: Synthetic oligonucleotide
  Antisense strand to SEQ ID NO: 2141298
acacauauacacauuucuu

SEQ ID NO: 2141300 - RNA, 19 nt, Artificial Sequence
  Description of Artificial Sequence: Synthetic oligonucleotide
  Sense strand starting at position 80 of SEQ ID NO: 1882699
uauguuuauguaggauaca

SEQ ID NO: 2141301 - RNA, 19 nt, Artificial Sequence
  Description of Artificial Sequence: Synthetic oligonucleotide
  Antisense strand to SEQ ID NO: 2141300
uguauccuacauaaacaua

SEQ ID NO: 2141302 - RNA, 19 nt, Artificial Sequence
  Description of Artificial Sequence: Synthetic oligonucleotide
  Sense strand starting at position 157 of SEQ ID NO: 1882699
gcuuguagagacuacaaua

SEQ ID NO: 2141303 - RNA, 19 nt, Artificial Sequence
  Description of Artificial Sequence: Synthetic oligonucleotide
  Antisense strand to SEQ ID NO: 2141302
uauuguagucucuacaagc

SEQ ID NO: 2141304 - RNA, 19 nt, Artificial Sequence
  Description of Artificial Sequence: Synthetic oligonucleotide
  Sense strand starting at position 246 of SEQ ID NO: 1882699
gauccaagauuugacugua

SEQ ID NO: 2141305 - RNA, 19 nt, Artificial Sequence
  Description of Artificial Sequence: Synthetic oligonucleotide
  Antisense strand to SEQ ID NO: 2141304
uacagucaaaucuuggauc

SEQ ID NO: 2141306 - RNA, 19 nt, Artificial Sequence
  Description of Artificial Sequence: Synthetic oligonucleotide
  Sense strand starting at position 305 of SEQ ID NO: 1882699
gaaguuaucuaaguaugga

SEQ ID NO: 2141307 - RNA, 19 nt, Artificial Sequence
  Description of Artificial Sequence: Synthetic oligonucleotide
  Antisense strand to SEQ ID NO: 2141306
uccauacuuagauaacuuc

SEQ ID NO: 2141308 - RNA, 19 nt, Artificial Sequence
  Description of Artificial Sequence: Synthetic oligonucleotide
  Sense strand starting at position 308 of SEQ ID NO: 1882699
guuaucuaaguauggacua

SEQ ID NO: 2141309 - RNA, 19 nt, Artificial Sequence
  Description of Artificial Sequence: Synthetic oligonucleotide
  Antisense strand to SEQ ID NO: 2141308
uaguccauacuuagauaac

SEQ ID NO: 2141310 - RNA, 19 nt, Artificial Sequence
  Description of Artificial Sequence: Synthetic oligonucleotide
  Sense strand starting at position 330 of SEQ ID NO: 1882699
aaagguaaugugcauuauu

SEQ ID NO: 2141311 - RNA, 19 nt, Artificial Sequence
  Description of Artificial Sequence: Synthetic oligonucleotide
  Antisense strand to SEQ ID NO: 2141310
aauaaugcacauuaccuuu

SEQ ID NO: 2141312 - RNA, 19 nt, Artificial Sequence
  Description of Artificial Sequence: Synthetic oligonucleotide
  Sense strand starting at position 431 of SEQ ID NO: 1882699
agucuuaaagaauguacaa

SEQ ID NO: 2141313 - RNA, 19 nt, Artificial Sequence
  Description of Artificial Sequence: Synthetic oligonucleotide
  Antisense strand to SEQ ID NO: 2141312
uuguacauucuuuaagacu

SEQ ID NO: 2141314 - RNA, 19 nt, Artificial Sequence
  Description of Artificial Sequence: Synthetic oligonucleotide
  Sense strand starting at position 877 of SEQ ID NO: 1882699
cuccuccauguccagauau

SEQ ID NO: 2141315 - RNA, 19 nt, Artificial Sequence
  Description of Artificial Sequence: Synthetic oligonucleotide
  Antisense strand to SEQ ID NO: 2141314
auaucuggacauggaggag

SEQ ID NO: 2141316 - RNA, 19 nt, Artificial Sequence
  Description of Artificial Sequence: Synthetic oligonucleotide
  Sense strand starting at position 879 of SEQ ID NO: 1882699
ccuccauguccagauauca

SEQ ID NO: 2141317 - RNA, 19 nt, Artificial Sequence
  Description of Artificial Sequence: Synthetic oligonucleotide
  Antisense strand to SEQ ID NO: 2141316
ugauaucuggacauggagg

SEQ ID NO: 2141318 - RNA, 19 nt, Artificial Sequence
  Description of Artificial Sequence: Synthetic oligonucleotide
  Sense strand starting at position 890 of SEQ ID NO: 1882699
agauaucagcagugugaaa

SEQ ID NO: 2141319 - RNA, 19 nt, Artificial Sequence
  Description of Artificial Sequence: Synthetic oligonucleotide
  Antisense strand to SEQ ID NO: 2141318
uuucacacugcugauaucu

SEQ ID NO: 2141320 - RNA, 19 nt, Artificial Sequence
  Description of Artificial Sequence: Synthetic oligonucleotide
  Sense strand starting at position 1246 of SEQ ID NO: 1882699
gacacauuguggcugaaau

SEQ ID NO: 2141321 - RNA, 19 nt, Artificial Sequence
  Description of Artificial Sequence: Synthetic oligonucleotide
  Antisense strand to SEQ ID NO: 2141320
auuucagccacaauguguc

SEQ ID NO: 2141322 - RNA, 19 nt, Artificial Sequence
  Description of Artificial Sequence: Synthetic oligonucleotide
  Sense strand starting at position 1247 of SEQ ID NO: 1882699
acacauuguggcugaaaug

SEQ ID NO: 2141323 - RNA, 19 nt, Artificial Sequence
  Description of Artificial Sequence: Synthetic oligonucleotide
  Antisense strand to SEQ ID NO: 2141322
cauuucagccacaaugugu

SEQ ID NO: 2141324 - RNA, 19 nt, Artificial Sequence
  Description of Artificial Sequence: Synthetic oligonucleotide
  Sense strand starting at position 1248 of SEQ ID NO: 1882699
cacauuguggcugaaauga

SEQ ID NO: 2141325 - RNA, 19 nt, Artificial Sequence
  Description of Artificial Sequence: Synthetic oligonucleotide
  Antisense strand to SEQ ID NO: 2141324
ucauuucagccacaaugug

SEQ ID NO: 2141326 - RNA, 19 nt, Artificial Sequence
  Description of Artificial Sequence: Synthetic oligonucleotide
  Sense strand starting at position 1399 of SEQ ID NO: 1882699
ccaccugucccaggaaaca

SEQ ID NO: 2141327 - RNA, 19 nt, Artificial Sequence
  Description of Artificial Sequence: Synthetic oligonucleotide
  Antisense strand to SEQ ID NO: 2141326
uguuuccugggacaggugg

SEQ ID NO: 2141328 - RNA, 19 nt, Artificial Sequence
  Description of Artificial Sequence: Synthetic oligonucleotide
  Sense strand starting at position 1486 of SEQ ID NO: 1882699
cacacaugggucugaagau

SEQ ID NO: 2141329 - RNA, 19 nt, Artificial Sequence
  Description of Artificial Sequence: Synthetic oligonucleotide
  Antisense strand to SEQ ID NO: 2141328
aucuucagacccaugugug

SEQ ID NO: 2141330 - RNA, 19 nt, Artificial Sequence
  Description of Artificial Sequence: Synthetic oligonucleotide
  Sense strand starting at position 1525 of SEQ ID NO: 1882699
acugguucuuucucaagag

SEQ ID NO: 2141331 - RNA, 19 nt, Artificial Sequence
  Description of Artificial Sequence: Synthetic oligonucleotide
  Antisense strand to SEQ ID NO: 2141330
cucuugagaaagaaccagu

SEQ ID NO: 2141332 - RNA, 19 nt, Artificial Sequence
  Description of Artificial Sequence: Synthetic oligonucleotide
  Sense strand starting at position 1529 of SEQ ID NO: 1882699
guucuuucucaagagggua

SEQ ID NO: 2141333 - RNA, 19 nt, Artificial Sequence
  Description of Artificial Sequence: Synthetic oligonucleotide
  Antisense strand to SEQ ID NO: 2141332
uacccucuugagaaagaac

SEQ ID NO: 2141334 - RNA, 19 nt, Artificial Sequence
  Description of Artificial Sequence: Synthetic oligonucleotide
  Sense strand starting at position 1625 of SEQ ID NO: 1882699
ccacacacucuggguauua

SEQ ID NO: 2141335 - RNA, 19 nt, Artificial Sequence
  Description of Artificial Sequence: Synthetic oligonucleotide
  Antisense strand to SEQ ID NO: 2141334
uaauacccagagugugugg

SEQ ID NO: 2141336 - RNA, 19 nt, Artificial Sequence
  Description of Artificial Sequence: Synthetic oligonucleotide
  Sense strand starting at position 1634 of SEQ ID NO: 1882699
cuggguauuacauguaaga

SEQ ID NO: 2141337 - RNA, 19 nt, Artificial Sequence
  Description of Artificial Sequence: Synthetic oligonucleotide
  Antisense strand to SEQ ID NO: 2141336
ucuuacauguaauacccag

SEQ ID NO: 2141338 - RNA, 19 nt, Artificial Sequence
  Description of Artificial Sequence: Synthetic oligonucleotide
  Sense strand starting at position 1768 of SEQ ID NO: 1882699
ccaggugaggcggaaugau

SEQ ID NO: 2141339 - RNA, 19 nt, Artificial Sequence
  Description of Artificial Sequence: Synthetic oligonucleotide
  Antisense strand to SEQ ID NO: 2141338
aucauuccgccucaccugg

SEQ ID NO: 2141340 - RNA, 19 nt, Artificial Sequence
  Description of Artificial Sequence: Synthetic oligonucleotide
  Sense strand starting at position 1903 of SEQ ID NO: 1882699
acagaagagccucauguua

SEQ ID NO: 2141341 - RNA, 19 nt, Artificial Sequence
  Description of Artificial Sequence: Synthetic oligonucleotide
  Antisense strand to SEQ ID NO: 2141340
uaacaugaggcucuucugu

SEQ ID NO: 2141342 - RNA, 19 nt, Artificial Sequence
  Description of Artificial Sequence: Synthetic oligonucleotide
  Sense strand starting at position 1941 of SEQ ID NO: 1882699
cugagaguguuccuaugag

SEQ ID NO: 2141343 - RNA, 19 nt, Artificial Sequence
  Description of Artificial Sequence: Synthetic oligonucleotide
  Antisense strand to SEQ ID NO: 2141342
cucauaggaacacucucag

SEQ ID NO: 2141344 - RNA, 19 nt, Artificial Sequence
  Description of Artificial Sequence: Synthetic oligonucleotide
  Sense strand starting at position 1966 of SEQ ID NO: 1882699
acaucacuccuaggguauu

SEQ ID NO: 2141345 - RNA, 19 nt, Artificial Sequence
  Description of Artificial Sequence: Synthetic oligonucleotide
  Antisense strand to SEQ ID NO: 2141344
aauacccuaggagugaugu

SEQ ID NO: 2141346 - RNA, 19 nt, Artificial Sequence
  Description of Artificial Sequence: Synthetic oligonucleotide
  Sense strand starting at position 1978 of SEQ ID NO: 1882699
ggguauuucuaccaaagaa

SEQ ID NO: 2141347 - RNA, 19 nt, Artificial Sequence
  Description of Artificial Sequence: Synthetic oligonucleotide
  Antisense strand to SEQ ID NO: 2141346
uucuuugguagaaauaccc

SEQ ID NO: 2141348 - RNA, 19 nt, Artificial Sequence
  Description of Artificial Sequence: Synthetic oligonucleotide
  Sense strand starting at position 2116 of SEQ ID NO: 1882699
guggaaguuccagagugga

SEQ ID NO: 2141349 - RNA, 19 nt, Artificial Sequence
  Description of Artificial Sequence: Synthetic oligonucleotide
  Antisense strand to SEQ ID NO: 2141348
uccacucuggaacuuccac

SEQ ID NO: 2141350 - RNA, 19 nt, Artificial Sequence
  Description of Artificial Sequence: Synthetic oligonucleotide
  Sense strand starting at position 2119 of SEQ ID NO: 1882699
gaaguuccagaguggagaa

SEQ ID NO: 2141351 - RNA, 19 nt, Artificial Sequence
  Description of Artificial Sequence: Synthetic oligonucleotide
  Antisense strand to SEQ ID NO: 2141350
uucuccacucuggaacuuc

SEQ ID NO: 2141352 - RNA, 19 nt, Artificial Sequence
  Description of Artificial Sequence: Synthetic oligonucleotide
  Sense strand starting at position 2325 of SEQ ID NO: 1882699
auuugacccugagaaaugu

SEQ ID NO: 2141353 - RNA, 19 nt, Artificial Sequence
  Description of Artificial Sequence: Synthetic oligonucleotide
  Antisense strand to SEQ ID NO: 2141352
acauuucucagggucaaau

SEQ ID NO: 2141354 - RNA, 19 nt, Artificial Sequence
  Description of Artificial Sequence: Synthetic oligonucleotide
  Sense strand starting at position 2334 of SEQ ID NO: 1882699
ugagaaauguaaucucuca

SEQ ID NO: 2141355 - RNA, 19 nt, Artificial Sequence
  Description of Artificial Sequence: Synthetic oligonucleotide
  Antisense strand to SEQ ID NO: 2141354
ugagagauuacauuucuca

SEQ ID NO: 2141356 - RNA, 19 nt, Artificial Sequence
  Description of Artificial Sequence: Synthetic oligonucleotide
  Sense strand starting at position 2350 of SEQ ID NO: 1882699
ucaguuacuuuaucuauga

SEQ ID NO: 2141357 - RNA, 19 nt, Artificial Sequence
  Description of Artificial Sequence: Synthetic oligonucleotide
  Antisense strand to SEQ ID NO: 2141356
ucauagauaaaguaacuga

SEQ ID NO: 2141358 - RNA, 19 nt, Artificial Sequence
  Description of Artificial Sequence: Synthetic oligonucleotide
  Sense strand starting at position 2354 of SEQ ID NO: 1882699
uuacuuuaucuaugaaacg

SEQ ID NO: 2141359 - RNA, 19 nt, Artificial Sequence
  Description of Artificial Sequence: Synthetic oligonucleotide
  Antisense strand to SEQ ID NO: 2141358
cguuucauagauaaaguaa

SEQ ID NO: 2141360 - RNA, 19 nt, Artificial Sequence
  Description of Artificial Sequence: Synthetic oligonucleotide
  Sense strand starting at position 2388 of SEQ ID NO: 1882699
gcuaucucacagggacauu

SEQ ID NO: 2141361 - RNA, 19 nt, Artificial Sequence
  Description of Artificial Sequence: Synthetic oligonucleotide
  Antisense strand to SEQ ID NO: 2141360
aaugucccugugagauagc

SEQ ID NO: 2141362 - RNA, 19 nt, Artificial Sequence
  Description of Artificial Sequence: Synthetic oligonucleotide
  Sense strand starting at position 2500 of SEQ ID NO: 1882699
ucuguaacagucuaagacu

SEQ ID NO: 2141363 - RNA, 19 nt, Artificial Sequence
  Description of Artificial Sequence: Synthetic oligonucleotide
  Antisense strand to SEQ ID NO: 2141362
agucuuagacuguuacaga

SEQ ID NO: 2141364 - RNA, 19 nt, Artificial Sequence
  Description of Artificial Sequence: Synthetic oligonucleotide
  Sense strand starting at position 2543 of SEQ ID NO: 1882699
agaguuuaauuauccuuga

SEQ ID NO: 2141365 - RNA, 19 nt, Artificial Sequence
  Description of Artificial Sequence: Synthetic oligonucleotide
  Antisense strand to SEQ ID NO: 2141364
ucaaggauaauuaaacucu

SEQ ID NO: 2141366 - RNA, 19 nt, Artificial Sequence
  Description of Artificial Sequence: Synthetic oligonucleotide
  Sense strand starting at position 2546 of SEQ ID NO: 1882699
guuuaauuauccuugaugg

SEQ ID NO: 2141367 - RNA, 19 nt, Artificial Sequence
  Description of Artificial Sequence: Synthetic oligonucleotide
  Antisense strand to SEQ ID NO: 2141366
ccaucaaggauaauuaaac

SEQ ID NO: 2141368 - RNA, 19 nt, Artificial Sequence
  Description of Artificial Sequence: Synthetic oligonucleotide
  Sense strand starting at position 2839 of SEQ ID NO: 1882699
gcugauuaccagcaaacca

SEQ ID NO: 2141369 - RNA, 19 nt, Artificial Sequence
  Description of Artificial Sequence: Synthetic oligonucleotide
  Antisense strand to SEQ ID NO: 2141368
ugguuugcugguaaucagc

SEQ ID NO: 2141370 - RNA, 19 nt, Artificial Sequence
  Description of Artificial Sequence: Synthetic oligonucleotide
  Sense strand starting at position 2998 of SEQ ID NO: 1882699
agaacucagucauccagga

SEQ ID NO: 2141371 - RNA, 19 nt, Artificial Sequence
  Description of Artificial Sequence: Synthetic oligonucleotide
  Antisense strand to SEQ ID NO: 2141370
uccuggaugacugaguucu

SEQ ID NO: 2141372 - RNA, 19 nt, Artificial Sequence
  Description of Artificial Sequence: Synthetic oligonucleotide
  Sense strand starting at position 3305 of SEQ ID NO: 1882699
ugccuuaguccugaugaau

SEQ ID NO: 2141373 - RNA, 19 nt, Artificial Sequence
  Description of Artificial Sequence: Synthetic oligonucleotide
  Antisense strand to SEQ ID NO: 2141372
auucaucaggacuaaggca

SEQ ID NO: 2141374 - RNA, 19 nt, Artificial Sequence
  Description of Artificial Sequence: Synthetic oligonucleotide
  Sense strand starting at position 3977 of SEQ ID NO: 1882699
accuuuguauaauuaggau

SEQ ID NO: 2141375 - RNA, 19 nt, Artificial Sequence
  Description of Artificial Sequence: Synthetic oligonucleotide
  Antisense strand to SEQ ID NO: 2141374
auccuaauuauacaaaggu

SEQ ID NO: 2141376 - RNA, 19 nt, Artificial Sequence
  Description of Artificial Sequence: Synthetic oligonucleotide
  Sense strand starting at position 130 of SEQ ID NO: 1882700
ccaccugucccaggaaaca

SEQ ID NO: 2141377 - RNA, 19 nt, Artificial Sequence
  Description of Artificial Sequence: Synthetic oligonucleotide
  Antisense strand to SEQ ID NO: 2141376
uguuuccugggacaggugg

SEQ ID NO: 2141378 - RNA, 19 nt, Artificial Sequence
  Description of Artificial Sequence: Synthetic oligonucleotide
  Sense strand starting at position 217 of SEQ ID NO: 1882700
cacacaugggucugaagau

SEQ ID NO: 2141379 - RNA, 19 nt, Artificial Sequence
  Description of Artificial Sequence: Synthetic oligonucleotide
  Antisense strand to SEQ ID NO: 2141378
aucuucagacccaugugug

SEQ ID NO: 2141380 - RNA, 19 nt, Artificial Sequence
  Description of Artificial Sequence: Synthetic oligonucleotide
  Sense strand starting at position 256 of SEQ ID NO: 1882700
acugguucuuucucaagag

SEQ ID NO: 2141381 - RNA, 19 nt, Artificial Sequence
  Description of Artificial Sequence: Synthetic oligonucleotide
  Antisense strand to SEQ ID NO: 2141380
cucuugagaaagaaccagu

SEQ ID NO: 2141382 - RNA, 19 nt, Artificial Sequence
  Description of Artificial Sequence: Synthetic oligonucleotide
  Sense strand starting at position 260 of SEQ ID NO: 1882700
guucuuucucaagagggua

SEQ ID NO: 2141383 - RNA, 19 nt, Artificial Sequence
  Description of Artificial Sequence: Synthetic oligonucleotide
  Antisense strand to SEQ ID NO: 2141382
uacccucuugagaaagaac

SEQ ID NO: 2141384 - RNA, 19 nt, Artificial Sequence
  Description of Artificial Sequence: Synthetic oligonucleotide
  Sense strand starting at position 356 of SEQ ID NO: 1882700
ccacacacucuggguauua

SEQ ID NO: 2141385 - RNA, 19 nt, Artificial Sequence
  Description of Artificial Sequence: Synthetic oligonucleotide
  Antisense strand to SEQ ID NO: 2141384
uaauacccagagugugugg

SEQ ID NO: 2141386 - RNA, 19 nt, Artificial Sequence
  Description of Artificial Sequence: Synthetic oligonucleotide
  Sense strand starting at position 365 of SEQ ID NO: 1882700
cuggguauuacauguaaga

SEQ ID NO: 2141387 - RNA, 19 nt, Artificial Sequence
  Description of Artificial Sequence: Synthetic oligonucleotide
  Antisense strand to SEQ ID NO: 2141386
ucuuacauguaauacccag

SEQ ID NO: 2141388 - RNA, 19 nt, Artificial Sequence
  Description of Artificial Sequence: Synthetic oligonucleotide
  Sense strand starting at position 499 of SEQ ID NO: 1882700
ccaggugaggcggaaugau

SEQ ID NO: 2141389 - RNA, 19 nt, Artificial Sequence
  Description of Artificial Sequence: Synthetic oligonucleotide
  Antisense strand to SEQ ID NO: 2141388
aucauuccgccucaccugg

SEQ ID NO: 2141390 - RNA, 19 nt, Artificial Sequence
  Description of Artificial Sequence: Synthetic oligonucleotide
  Sense strand starting at position 547 of SEQ ID NO: 1882700
cucugagacccauguccau

SEQ ID NO: 2141391 - RNA, 19 nt, Artificial Sequence
  Description of Artificial Sequence: Synthetic oligonucleotide
  Antisense strand to SEQ ID NO: 2141390
auggacaugggucucagag

SEQ ID NO: 2141392 - RNA, 19 nt, Artificial Sequence
  Description of Artificial Sequence: Synthetic oligonucleotide
  Sense strand starting at position 634 of SEQ ID NO: 1882700
acagaagagccucauguua

SEQ ID NO: 2141393 - RNA, 19 nt, Artificial Sequence
  Description of Artificial Sequence: Synthetic oligonucleotide
  Antisense strand to SEQ ID NO: 2141392
uaacaugaggcucuucugu

SEQ ID NO: 2141394 - RNA, 19 nt, Artificial Sequence
  Description of Artificial Sequence: Synthetic oligonucleotide
  Sense strand starting at position 670 of SEQ ID NO: 1882700
cacugagaguguuccuaug

SEQ ID NO: 2141395 - RNA, 19 nt, Artificial Sequence
  Description of Artificial Sequence: Synthetic oligonucleotide
  Antisense strand to SEQ ID NO: 2141394
cauaggaacacucucagug

SEQ ID NO: 2141396 - RNA, 19 nt, Artificial Sequence
  Description of Artificial Sequence: Synthetic oligonucleotide
  Sense strand starting at position 672 of SEQ ID NO: 1882700
cugagaguguuccuaugag

SEQ ID NO: 2141397 - RNA, 19 nt, Artificial Sequence
  Description of Artificial Sequence: Synthetic oligonucleotide
  Antisense strand to SEQ ID NO: 2141396
cucauaggaacacucucag

SEQ ID NO: 2141398 - RNA, 19 nt, Artificial Sequence
  Description of Artificial Sequence: Synthetic oligonucleotide
  Sense strand starting at position 697 of SEQ ID NO: 1882700
acaucacuccuaggguauu

SEQ ID NO: 2141399 - RNA, 19 nt, Artificial Sequence
  Description of Artificial Sequence: Synthetic oligonucleotide
  Antisense strand to SEQ ID NO: 2141398
aauacccuaggagugaugu

SEQ ID NO: 2141400 - RNA, 19 nt, Artificial Sequence
  Description of Artificial Sequence: Synthetic oligonucleotide
  Sense strand starting at position 709 of SEQ ID NO: 1882700
ggguauuucuaccaaagaa

SEQ ID NO: 2141401 - RNA, 19 nt, Artificial Sequence
  Description of Artificial Sequence: Synthetic oligonucleotide
  Antisense strand to SEQ ID NO: 2141400
uucuuugguagaaauaccc

SEQ ID NO: 2141402 - RNA, 19 nt, Artificial Sequence
  Description of Artificial Sequence: Synthetic oligonucleotide
  Sense strand starting at position 847 of SEQ ID NO: 1882700
guggaaguuccagagugga

SEQ ID NO: 2141403 - RNA, 19 nt, Artificial Sequence
  Description of Artificial Sequence: Synthetic oligonucleotide
  Antisense strand to SEQ ID NO: 2141402
uccacucuggaacuuccac

SEQ ID NO: 2141404 - RNA, 19 nt, Artificial Sequence
  Description of Artificial Sequence: Synthetic oligonucleotide
  Sense strand starting at position 850 of SEQ ID NO: 1882700
gaaguuccagaguggagaa

SEQ ID NO: 2141405 - RNA, 19 nt, Artificial Sequence
  Description of Artificial Sequence: Synthetic oligonucleotide
  Antisense strand to SEQ ID NO: 2141404
uucuccacucuggaacuuc

SEQ ID NO: 2141406 - RNA, 19 nt, Artificial Sequence
  Description of Artificial Sequence: Synthetic oligonucleotide
  Sense strand starting at position 1056 of SEQ ID NO: 1882700
auuugacccugagaaaugu

SEQ ID NO: 2141407 - RNA, 19 nt, Artificial Sequence
  Description of Artificial Sequence: Synthetic oligonucleotide
  Antisense strand to SEQ ID NO: 2141406
acauuucucagggucaaau

SEQ ID NO: 2141408 - RNA, 19 nt, Artificial Sequence
  Description of Artificial Sequence: Synthetic oligonucleotide
  Sense strand starting at position 1065 of SEQ ID NO: 1882700
ugagaaauguaaucucuca

SEQ ID NO: 2141409 - RNA, 19 nt, Artificial Sequence
  Description of Artificial Sequence: Synthetic oligonucleotide
  Antisense strand to SEQ ID NO: 2141408
ugagagauuacauuucuca

SEQ ID NO: 2141410 - RNA, 19 nt, Artificial Sequence
  Description of Artificial Sequence: Synthetic oligonucleotide
  Sense strand starting at position 1081 of SEQ ID NO: 1882700
ucaguuacuuuaucuauga

SEQ ID NO: 2141411 - RNA, 19 nt, Artificial Sequence
  Description of Artificial Sequence: Synthetic oligonucleotide
  Antisense strand to SEQ ID NO: 2141410
ucauagauaaaguaacuga

SEQ ID NO: 2141412 - RNA, 19 nt, Artificial Sequence
  Description of Artificial Sequence: Synthetic oligonucleotide
  Sense strand starting at position 1085 of SEQ ID NO: 1882700
uuacuuuaucuaugaaacg

SEQ ID NO: 2141413 - RNA, 19 nt, Artificial Sequence
  Description of Artificial Sequence: Synthetic oligonucleotide
  Antisense strand to SEQ ID NO: 2141412
cguuucauagauaaaguaa

SEQ ID NO: 2141414 - RNA, 19 nt, Artificial Sequence
  Description of Artificial Sequence: Synthetic oligonucleotide
  Sense strand starting at position 1119 of SEQ ID NO: 1882700
gcuaucucacagggacauu

SEQ ID NO: 2141415 - RNA, 19 nt, Artificial Sequence
  Description of Artificial Sequence: Synthetic oligonucleotide
  Antisense strand to SEQ ID NO: 2141414
aaugucccugugagauagc

SEQ ID NO: 2141416 - RNA, 19 nt, Artificial Sequence
  Description of Artificial Sequence: Synthetic oligonucleotide
  Sense strand starting at position 1195 of SEQ ID NO: 1882700
aauaaauguuuggccuuga

SEQ ID NO: 2141417 - RNA, 19 nt, Artificial Sequence
  Description of Artificial Sequence: Synthetic oligonucleotide
  Antisense strand to SEQ ID NO: 2141416
ucaaggccaaacauuuauu

SEQ ID NO: 2141418 - RNA, 19 nt, Artificial Sequence
  Description of Artificial Sequence: Synthetic oligonucleotide
  Sense strand starting at position 1206 of SEQ ID NO: 1882700
ggccuugagguguaaagug

SEQ ID NO: 2141419 - RNA, 19 nt, Artificial Sequence
  Description of Artificial Sequence: Synthetic oligonucleotide
  Antisense strand to SEQ ID NO: 2141418
cacuuuacaccucaaggcc

SEQ ID NO: 2141420 - RNA, 19 nt, Artificial Sequence
  Description of Artificial Sequence: Synthetic oligonucleotide
  Sense strand starting at position 1231 of SEQ ID NO: 1882700
ucuguaacagucuaagacu

SEQ ID NO: 2141421 - RNA, 19 nt, Artificial Sequence
  Description of Artificial Sequence: Synthetic oligonucleotide
  Antisense strand to SEQ ID NO: 2141420
agucuuagacuguuacaga

SEQ ID NO: 2141422 - RNA, 19 nt, Artificial Sequence
  Description of Artificial Sequence: Synthetic oligonucleotide
  Sense strand starting at position 1274 of SEQ ID NO: 1882700
agaguuuaauuauccuuga

SEQ ID NO: 2141423 - RNA, 19 nt, Artificial Sequence
  Description of Artificial Sequence: Synthetic oligonucleotide
  Antisense strand to SEQ ID NO: 2141422
ucaaggauaauuaaacucu

SEQ ID NO: 2141424 - RNA, 19 nt, Artificial Sequence
  Description of Artificial Sequence: Synthetic oligonucleotide
  Sense strand starting at position 1277 of SEQ ID NO: 1882700
guuuaauuauccuugaugg

SEQ ID NO: 2141425 - RNA, 19 nt, Artificial Sequence
  Description of Artificial Sequence: Synthetic oligonucleotide
  Antisense strand to SEQ ID NO: 2141424
ccaucaaggauaauuaaac

SEQ ID NO: 2141426 - RNA, 19 nt, Artificial Sequence
  Description of Artificial Sequence: Synthetic oligonucleotide
  Sense strand starting at position 1399 of SEQ ID NO: 1882700
aaaggcaaacaguguuuau

SEQ ID NO: 2141427 - RNA, 19 nt, Artificial Sequence
  Description of Artificial Sequence: Synthetic oligonucleotide
  Antisense strand to SEQ ID NO: 2141426
auaaacacuguuugccuuu

SEQ ID NO: 2141428 - RNA, 19 nt, Artificial Sequence
  Description of Artificial Sequence: Synthetic oligonucleotide
  Sense strand starting at position 1570 of SEQ ID NO: 1882700
gcugauuaccagcaaacca

SEQ ID NO: 2141429 - RNA, 19 nt, Artificial Sequence
  Description of Artificial Sequence: Synthetic oligonucleotide
  Antisense strand to SEQ ID NO: 2141428
ugguuugcugguaaucagc

SEQ ID NO: 2141430 - RNA, 19 nt, Artificial Sequence
  Description of Artificial Sequence: Synthetic oligonucleotide
  Sense strand starting at position 1729 of SEQ ID NO: 1882700
agaacucagucauccagga

SEQ ID NO: 2141431 - RNA, 19 nt, Artificial Sequence
  Description of Artificial Sequence: Synthetic oligonucleotide
  Antisense strand to SEQ ID NO: 2141430
uccuggaugacugaguucu

SEQ ID NO: 2141432 - RNA, 19 nt, Artificial Sequence
  Description of Artificial Sequence: Synthetic oligonucleotide
  Sense strand starting at position 1828 of SEQ ID NO: 1882700
augugucaucucugaacac

SEQ ID NO: 2141433 - RNA, 19 nt, Artificial Sequence
  Description of Artificial Sequence: Synthetic oligonucleotide
  Antisense strand to SEQ ID NO: 2141432
guguucagagaugacacau

SEQ ID NO: 2141434 - RNA, 19 nt, Artificial Sequence
  Description of Artificial Sequence: Synthetic oligonucleotide
  Sense strand starting at position 2036 of SEQ ID NO: 1882700
ugccuuaguccugaugaau

SEQ ID NO: 2141435 - RNA, 19 nt, Artificial Sequence
  Description of Artificial Sequence: Synthetic oligonucleotide
  Antisense strand to SEQ ID NO: 2141434
auucaucaggacuaaggca

SEQ ID NO: 2141436 - RNA, 19 nt, Artificial Sequence
  Description of Artificial Sequence: Synthetic oligonucleotide
  Sense strand starting at position 2281 of SEQ ID NO: 1882700
uguuaugaguccuccaaac

SEQ ID NO: 2141437 - RNA, 19 nt, Artificial Sequence
  Description of Artificial Sequence: Synthetic oligonucleotide
  Antisense strand to SEQ ID NO: 2141436
guuuggaggacucauaaca

SEQ ID NO: 2141438 - RNA, 19 nt, Artificial Sequence
  Description of Artificial Sequence: Synthetic oligonucleotide
  Sense strand starting at position 2587 of SEQ ID NO: 1882700
aauagucagugguugggau

SEQ ID NO: 2141439 - RNA, 19 nt, Artificial Sequence
  Description of Artificial Sequence: Synthetic oligonucleotide
  Antisense strand to SEQ ID NO: 2141438
aucccaaccacugacuauu

SEQ ID NO: 2141440 - RNA, 19 nt, Artificial Sequence
  Description of Artificial Sequence: Synthetic oligonucleotide
  Sense strand starting at position 2588 of SEQ ID NO: 1882700
auagucagugguugggauu

SEQ ID NO: 2141441 - RNA, 19 nt, Artificial Sequence
  Description of Artificial Sequence: Synthetic oligonucleotide
  Antisense strand to SEQ ID NO: 2141440
aaucccaaccacugacuau

SEQ ID NO: 2141442 - RNA, 19 nt, Artificial Sequence
  Description of Artificial Sequence: Synthetic oligonucleotide
  Sense strand starting at position 2708 of SEQ ID NO: 1882700
accuuuguauaauuaggau

SEQ ID NO: 2141443 - RNA, 19 nt, Artificial Sequence
  Description of Artificial Sequence: Synthetic oligonucleotide
  Antisense strand to SEQ ID NO: 2141442
auccuaauuauacaaaggu

SEQ ID NO: 2141444 - RNA, 19 nt, Artificial Sequence
  Description of Artificial Sequence: Synthetic oligonucleotide
  Sense strand starting at position 2741 of SEQ ID NO: 1882700
acaguaugucaucaauuag

SEQ ID NO: 2141445 - RNA, 19 nt, Artificial Sequence
  Description of Artificial Sequence: Synthetic oligonucleotide
  Antisense strand to SEQ ID NO: 2141444
cuaauugaugacauacugu

SEQ ID NO: 2141446 - RNA, 19 nt, Artificial Sequence
  Description of Artificial Sequence: Synthetic oligonucleotide
  Sense strand starting at position 2803 of SEQ ID NO: 1882700
ccuuuagaguuguugaaau

SEQ ID NO: 2141447 - RNA, 19 nt, Artificial Sequence
  Description of Artificial Sequence: Synthetic oligonucleotide
  Antisense strand to SEQ ID NO: 2141446
auuucaacaacucuaaagg

SEQ ID NO: 2141448 - RNA, 19 nt, Artificial Sequence
  Description of Artificial Sequence: Synthetic oligonucleotide
  Sense strand starting at position 2805 of SEQ ID NO: 1882700
uuuagaguuguugaaauac

SEQ ID NO: 2141449 - RNA, 19 nt, Artificial Sequence
  Description of Artificial Sequence: Synthetic oligonucleotide
  Antisense strand to SEQ ID NO: 2141448
guauuucaacaacucuaaa

SEQ ID NO: 2141450 - RNA, 19 nt, Artificial Sequence
  Description of Artificial Sequence: Synthetic oligonucleotide
  Sense strand starting at position 3034 of SEQ ID NO: 1882700
acauuugcccgccacuaua

SEQ ID NO: 2141451 - RNA, 19 nt, Artificial Sequence
  Description of Artificial Sequence: Synthetic oligonucleotide
  Antisense strand to SEQ ID NO: 2141450
uauaguggcgggcaaaugu

SEQ ID NO: 2141452 - RNA, 19 nt, Artificial Sequence
  Description of Artificial Sequence: Synthetic oligonucleotide
  Sense strand starting at position 3227 of SEQ ID NO: 1882700
ugggcaugauggcucaaau

SEQ ID NO: 2141453 - RNA, 19 nt, Artificial Sequence
  Description of Artificial Sequence: Synthetic oligonucleotide
  Antisense strand to SEQ ID NO: 2141452
auuugagccaucaugccca

SEQ ID NO: 2141454 - RNA, 19 nt, Artificial Sequence
  Description of Artificial Sequence: Synthetic oligonucleotide
  Sense strand starting at position 3762 of SEQ ID NO: 1882700
caguuauacgaugagaucu

SEQ ID NO: 2141455 - RNA, 19 nt, Artificial Sequence
  Description of Artificial Sequence: Synthetic oligonucleotide
  Antisense strand to SEQ ID NO: 2141454
agaucucaucguauaacug

SEQ ID NO: 2141456 - RNA, 19 nt, Artificial Sequence
  Description of Artificial Sequence: Synthetic oligonucleotide
  Sense strand starting at position 29 of SEQ ID NO: 1882703
cucauuuagccuugggcua

SEQ ID NO: 2141457 - RNA, 19 nt, Artificial Sequence
  Description of Artificial Sequence: Synthetic oligonucleotide
  Antisense strand to SEQ ID NO: 2141456
uagcccaaggcuaaaugag

SEQ ID NO: 2141458 - RNA, 19 nt, Artificial Sequence
  Description of Artificial Sequence: Synthetic oligonucleotide
  Sense strand starting at position 30 of SEQ ID NO: 1882703
ucauuuagccuugggcuau

SEQ ID NO: 2141459 - RNA, 19 nt, Artificial Sequence
  Description of Artificial Sequence: Synthetic oligonucleotide
  Antisense strand to SEQ ID NO: 2141458
auagcccaaggcuaaauga

SEQ ID NO: 2141460 - RNA, 19 nt, Artificial Sequence
  Description of Artificial Sequence: Synthetic oligonucleotide
  Sense strand starting at position 278 of SEQ ID NO: 1882703
agauguucucagcaaagug

SEQ ID NO: 2141461 - RNA, 19 nt, Artificial Sequence
  Description of Artificial Sequence: Synthetic oligonucleotide
  Antisense strand to SEQ ID NO: 2141460
cacuuugcugagaacaucu

SEQ ID NO: 2141462 - RNA, 19 nt, Artificial Sequence
  Description of Artificial Sequence: Synthetic oligonucleotide
  Sense strand starting at position 347 of SEQ ID NO: 1882703
uaggaauagcucugaugua

SEQ ID NO: 2141463 - RNA, 19 nt, Artificial Sequence
  Description of Artificial Sequence: Synthetic oligonucleotide
  Antisense strand to SEQ ID NO: 2141462
uacaucagagcuauuccua

SEQ ID NO: 2141464 - RNA, 19 nt, Artificial Sequence
  Description of Artificial Sequence: Synthetic oligonucleotide
  Sense strand starting at position 463 of SEQ ID NO: 1882703
uauucuaugggcugggauu

SEQ ID NO: 2141465 - RNA, 19 nt, Artificial Sequence
  Description of Artificial Sequence: Synthetic oligonucleotide
  Antisense strand to SEQ ID NO: 2141464
aaucccagcccauagaaua

SEQ ID NO: 2141466 - RNA, 19 nt, Artificial Sequence
  Description of Artificial Sequence: Synthetic oligonucleotide
  Sense strand starting at position 601 of SEQ ID NO: 1882703
cugcaugaugcucagggaa

SEQ ID NO: 2141467 - RNA, 19 nt, Artificial Sequence
  Description of Artificial Sequence: Synthetic oligonucleotide
  Antisense strand to SEQ ID NO: 2141466
uucccugagcaucaugcag

SEQ ID NO: 2141468 - RNA, 19 nt, Artificial Sequence
  Description of Artificial Sequence: Synthetic oligonucleotide
  Sense strand starting at position 614 of SEQ ID NO: 1882703
agggaagguuucucuggga

SEQ ID NO: 2141469 - RNA, 19 nt, Artificial Sequence
  Description of Artificial Sequence: Synthetic oligonucleotide
  Antisense strand to SEQ ID NO: 2141468
ucccagagaaaccuucccu

SEQ ID NO: 2141470 - RNA, 19 nt, Artificial Sequence
  Description of Artificial Sequence: Synthetic oligonucleotide
  Sense strand starting at position 618 of SEQ ID NO: 1882703
aagguuucucugggacagu

SEQ ID NO: 2141471 - RNA, 19 nt, Artificial Sequence
  Description of Artificial Sequence: Synthetic oligonucleotide
  Antisense strand to SEQ ID NO: 2141470
acugucccagagaaaccuu

SEQ ID NO: 2141472 - RNA, 19 nt, Artificial Sequence
  Description of Artificial Sequence: Synthetic oligonucleotide
  Sense strand starting at position 1164 of SEQ ID NO: 1882703
auuagugauucucuaacug

SEQ ID NO: 2141473 - RNA, 19 nt, Artificial Sequence
  Description of Artificial Sequence: Synthetic oligonucleotide
  Antisense strand to SEQ ID NO: 2141472
caguuagagaaucacuaau

SEQ ID NO: 2141474 - RNA, 19 nt, Artificial Sequence
  Description of Artificial Sequence: Synthetic oligonucleotide
  Sense strand starting at position 1202 of SEQ ID NO: 1882703
uuucucucugcagaaguga

SEQ ID NO: 2141475 - RNA, 19 nt, Artificial Sequence
  Description of Artificial Sequence: Synthetic oligonucleotide
  Antisense strand to SEQ ID NO: 2141474
ucacuucugcagagagaaa

SEQ ID NO: 2141476 - RNA, 19 nt, Artificial Sequence
  Description of Artificial Sequence: Synthetic oligonucleotide
  Sense strand starting at position 1469 of SEQ ID NO: 1882703
cugggaugucugcaccuaa

SEQ ID NO: 2141477 - RNA, 19 nt, Artificial Sequence
  Description of Artificial Sequence: Synthetic oligonucleotide
  Antisense strand to SEQ ID NO: 2141476
uuaggugcagacaucccag

SEQ ID NO: 2141478 - RNA, 19 nt, Artificial Sequence
  Description of Artificial Sequence: Synthetic oligonucleotide
  Sense strand starting at position 1566 of SEQ ID NO: 1882703
guucucagugaacauugua

SEQ ID NO: 2141479 - RNA, 19 nt, Artificial Sequence
  Description of Artificial Sequence: Synthetic oligonucleotide
  Antisense strand to SEQ ID NO: 2141478
uacaauguucacugagaac

SEQ ID NO: 2141480 - RNA, 19 nt, Artificial Sequence
  Description of Artificial Sequence: Synthetic oligonucleotide
  Sense strand starting at position 1569 of SEQ ID NO: 1882703
cucagugaacauuguaaua

SEQ ID NO: 2141481 - RNA, 19 nt, Artificial Sequence
  Description of Artificial Sequence: Synthetic oligonucleotide
  Antisense strand to SEQ ID NO: 2141480
uauuacaauguucacugag

SEQ ID NO: 2141482 - RNA, 19 nt, Artificial Sequence
  Description of Artificial Sequence: Synthetic oligonucleotide
  Sense strand starting at position 2009 of SEQ ID NO: 1882703
ucugguggauucucaugau

SEQ ID NO: 2141483 - RNA, 19 nt, Artificial Sequence
  Description of Artificial Sequence: Synthetic oligonucleotide
  Antisense strand to SEQ ID NO: 2141482
aucaugagaauccaccaga

SEQ ID NO: 2141484 - RNA, 19 nt, Artificial Sequence
  Description of Artificial Sequence: Synthetic oligonucleotide
  Sense strand starting at position 2015 of SEQ ID NO: 1882703
ggauucucaugauuagacu

SEQ ID NO: 2141485 - RNA, 19 nt, Artificial Sequence
  Description of Artificial Sequence: Synthetic oligonucleotide
  Antisense strand to SEQ ID NO: 2141484
agucuaaucaugagaaucc

SEQ ID NO: 2141486 - RNA, 19 nt, Artificial Sequence
  Description of Artificial Sequence: Synthetic oligonucleotide
  Sense strand starting at position 2060 of SEQ ID NO: 1882703
cuaauugugagaugaguuu

SEQ ID NO: 2141487 - RNA, 19 nt, Artificial Sequence
  Description of Artificial Sequence: Synthetic oligonucleotide
  Antisense strand to SEQ ID NO: 2141486
aaacucaucucacaauuag

SEQ ID NO: 2141488 - RNA, 19 nt, Artificial Sequence
  Description of Artificial Sequence: Synthetic oligonucleotide
  Sense strand starting at position 2128 of SEQ ID NO: 1882703
gaccuuaaugcauggagau

SEQ ID NO: 2141489 - RNA, 19 nt, Artificial Sequence
  Description of Artificial Sequence: Synthetic oligonucleotide
  Antisense strand to SEQ ID NO: 2141488
aucuccaugcauuaagguc

SEQ ID NO: 2141490 - RNA, 19 nt, Artificial Sequence
  Description of Artificial Sequence: Synthetic oligonucleotide
  Sense strand starting at position 2129 of SEQ ID NO: 1882703
accuuaaugcauggagauc

SEQ ID NO: 2141491 - RNA, 19 nt, Artificial Sequence
  Description of Artificial Sequence: Synthetic oligonucleotide
  Antisense strand to SEQ ID NO: 2141490
gaucuccaugcauuaaggu

SEQ ID NO: 2141492 - RNA, 19 nt, Artificial Sequence
  Description of Artificial Sequence: Synthetic oligonucleotide
  Sense strand starting at position 2141 of SEQ ID NO: 1882703
ggagaucuugcccacuagu

SEQ ID NO: 2141493 - RNA, 19 nt, Artificial Sequence
  Description of Artificial Sequence: Synthetic oligonucleotide
  Antisense strand to SEQ ID NO: 2141492
acuagugggcaagaucucc

SEQ ID NO: 2141494 - RNA, 19 nt, Artificial Sequence
  Description of Artificial Sequence: Synthetic oligonucleotide
  Sense strand starting at position 2186 of SEQ ID NO: 1882703
gcccaaucagaccaguauu

SEQ ID NO: 2141495 - RNA, 19 nt, Artificial Sequence
  Description of Artificial Sequence: Synthetic oligonucleotide
  Antisense strand to SEQ ID NO: 2141494
aauacuggucugauugggc

SEQ ID NO: 2141496 - RNA, 19 nt, Artificial Sequence
  Description of Artificial Sequence: Synthetic oligonucleotide
  Sense strand starting at position 2343 of SEQ ID NO: 1882703
uacuguugagagugugaag

SEQ ID NO: 2141497 - RNA, 19 nt, Artificial Sequence
  Description of Artificial Sequence: Synthetic oligonucleotide
  Antisense strand to SEQ ID NO: 2141496
cuucacacucucaacagua

SEQ ID NO: 2141498 - RNA, 19 nt, Artificial Sequence
  Description of Artificial Sequence: Synthetic oligonucleotide
  Sense strand starting at position 2473 of SEQ ID NO: 1882703
agggaagguucuguaaguc

SEQ ID NO: 2141499 - RNA, 19 nt, Artificial Sequence
  Description of Artificial Sequence: Synthetic oligonucleotide
  Antisense strand to SEQ ID NO: 2141498
gacuuacagaaccuucccu

SEQ ID NO: 2141500 - RNA, 19 nt, Artificial Sequence
  Description of Artificial Sequence: Synthetic oligonucleotide
  Sense strand starting at position 2494 of SEQ ID NO: 1882703
uagucucaguaaucaggaa

SEQ ID NO: 2141501 - RNA, 19 nt, Artificial Sequence
  Description of Artificial Sequence: Synthetic oligonucleotide
  Antisense strand to SEQ ID NO: 2141500
uuccugauuacugagacua

SEQ ID NO: 2141502 - RNA, 19 nt, Artificial Sequence
  Description of Artificial Sequence: Synthetic oligonucleotide
  Sense strand starting at position 2515 of SEQ ID NO: 1882703
auugauacuguuggaaaug

SEQ ID NO: 2141503 - RNA, 19 nt, Artificial Sequence
  Description of Artificial Sequence: Synthetic oligonucleotide
  Antisense strand to SEQ ID NO: 2141502
cauuuccaacaguaucaau

SEQ ID NO: 2141504 - RNA, 19 nt, Artificial Sequence
  Description of Artificial Sequence: Synthetic oligonucleotide
  Sense strand starting at position 2537 of SEQ ID NO: 1882703
agcguuucugugcuuagaa

SEQ ID NO: 2141505 - RNA, 19 nt, Artificial Sequence
  Description of Artificial Sequence: Synthetic oligonucleotide
  Antisense strand to SEQ ID NO: 2141504
uucuaagcacagaaacgcu

SEQ ID NO: 2141506 - RNA, 19 nt, Artificial Sequence
  Description of Artificial Sequence: Synthetic oligonucleotide
  Sense strand starting at position 2544 of SEQ ID NO: 1882703
cugugcuuagaaggacaua

SEQ ID NO: 2141507 - RNA, 19 nt, Artificial Sequence
  Description of Artificial Sequence: Synthetic oligonucleotide
  Antisense strand to SEQ ID NO: 2141506
uauguccuucuaagcacag

SEQ ID NO: 2141508 - RNA, 19 nt, Artificial Sequence
  Description of Artificial Sequence: Synthetic oligonucleotide
  Sense strand starting at position 2556 of SEQ ID NO: 1882703
ggacauacacgauguguga

SEQ ID NO: 2141509 - RNA, 19 nt, Artificial Sequence
  Description of Artificial Sequence: Synthetic oligonucleotide
  Antisense strand to SEQ ID NO: 2141508
ucacacaucguguaugucc

SEQ ID NO: 2141510 - RNA, 19 nt, Artificial Sequence
  Description of Artificial Sequence: Synthetic oligonucleotide
  Sense strand starting at position 2605 of SEQ ID NO: 1882703
cacaguguacaugaguaua

SEQ ID NO: 2141511 - RNA, 19 nt, Artificial Sequence
  Description of Artificial Sequence: Synthetic oligonucleotide
  Antisense strand to SEQ ID NO: 2141510
uauacucauguacacugug

SEQ ID NO: 2141512 - RNA, 19 nt, Artificial Sequence
  Description of Artificial Sequence: Synthetic oligonucleotide
  Sense strand starting at position 2608 of SEQ ID NO: 1882703
aguguacaugaguauaugu

SEQ ID NO: 2141513 - RNA, 19 nt, Artificial Sequence
  Description of Artificial Sequence: Synthetic oligonucleotide
  Antisense strand to SEQ ID NO: 2141512
acauauacucauguacacu

SEQ ID NO: 2141514 - RNA, 19 nt, Artificial Sequence
  Description of Artificial Sequence: Synthetic oligonucleotide
  Sense strand starting at position 2621 of SEQ ID NO: 1882703
auaugugugacugaaugua

SEQ ID NO: 2141515 - RNA, 19 nt, Artificial Sequence
  Description of Artificial Sequence: Synthetic oligonucleotide
  Antisense strand to SEQ ID NO: 2141514
uacauucagucacacauau

SEQ ID NO: 2141516 - RNA, 19 nt, Artificial Sequence
  Description of Artificial Sequence: Synthetic oligonucleotide
  Sense strand starting at position 2629 of SEQ ID NO: 1882703
gacugaauguaugcauaag

SEQ ID NO: 2141517 - RNA, 19 nt, Artificial Sequence
  Description of Artificial Sequence: Synthetic oligonucleotide
  Antisense strand to SEQ ID NO: 2141516
cuuaugcauacauucaguc

SEQ ID NO: 2141518 - RNA, 19 nt, Artificial Sequence
  Description of Artificial Sequence: Synthetic oligonucleotide
  Sense strand starting at position 2686 of SEQ ID NO: 1882703
uguauauguguauaugaca

SEQ ID NO: 2141519 - RNA, 19 nt, Artificial Sequence
  Description of Artificial Sequence: Synthetic oligonucleotide
  Antisense strand to SEQ ID NO: 2141518
ugucauauacacauauaca

SEQ ID NO: 2141520 - RNA, 19 nt, Artificial Sequence
  Description of Artificial Sequence: Synthetic oligonucleotide
  Sense strand starting at position 3063 of SEQ ID NO: 1882703
aauguaugugaguauauug

SEQ ID NO: 2141521 - RNA, 19 nt, Artificial Sequence
  Description of Artificial Sequence: Synthetic oligonucleotide
  Antisense strand to SEQ ID NO: 2141520
caauauacucacauacauu

SEQ ID NO: 2141522 - RNA, 19 nt, Artificial Sequence
  Description of Artificial Sequence: Synthetic oligonucleotide
  Sense strand starting at position 3149 of SEQ ID NO: 1882703
guguauguguguaugauag

SEQ ID NO: 2141523 - RNA, 19 nt, Artificial Sequence
  Description of Artificial Sequence: Synthetic oligonucleotide
  Antisense strand to SEQ ID NO: 2141522
cuaucauacacacauacac

SEQ ID NO: 2141524 - RNA, 19 nt, Artificial Sequence
  Description of Artificial Sequence: Synthetic oligonucleotide
  Sense strand starting at position 3251 of SEQ ID NO: 1882703
guguacguguguauaugau

SEQ ID NO: 2141525 - RNA, 19 nt, Artificial Sequence
  Description of Artificial Sequence: Synthetic oligonucleotide
  Antisense strand to SEQ ID NO: 2141524
aucauauacacacguacac

SEQ ID NO: 2141526 - RNA, 19 nt, Artificial Sequence
  Description of Artificial Sequence: Synthetic oligonucleotide
  Sense strand starting at position 3253 of SEQ ID NO: 1882703
guacguguguauaugauag

SEQ ID NO: 2141527 - RNA, 19 nt, Artificial Sequence
  Description of Artificial Sequence: Synthetic oligonucleotide
  Antisense strand to SEQ ID NO: 2141526
cuaucauauacacacguac

SEQ ID NO: 2141528 - RNA, 19 nt, Artificial Sequence
  Description of Artificial Sequence: Synthetic oligonucleotide
  Sense strand starting at position 3327 of SEQ ID NO: 1882703
gugugacuguguauguaag

SEQ ID NO: 2141529 - RNA, 19 nt, Artificial Sequence
  Description of Artificial Sequence: Synthetic oligonucleotide
  Antisense strand to SEQ ID NO: 2141528
cuuacauacacagucacac

SEQ ID NO: 2141530 - RNA, 19 nt, Artificial Sequence
  Description of Artificial Sequence: Synthetic oligonucleotide
  Sense strand starting at position 3817 of SEQ ID NO: 1882703
ggguauuugugaguguaug

SEQ ID NO: 2141531 - RNA, 19 nt, Artificial Sequence
  Description of Artificial Sequence: Synthetic oligonucleotide
  Antisense strand to SEQ ID NO: 2141530
cauacacucacaaauaccc

SEQ ID NO: 2141532 - RNA, 19 nt, Artificial Sequence
  Description of Artificial Sequence: Synthetic oligonucleotide
  Sense strand starting at position 3818 of SEQ ID NO: 1882703
gguauuugugaguguauga

SEQ ID NO: 2141533 - RNA, 19 nt, Artificial Sequence
  Description of Artificial Sequence: Synthetic oligonucleotide
  Antisense strand to SEQ ID NO: 2141532
ucauacacucacaaauacc

SEQ ID NO: 2141534 - RNA, 19 nt, Artificial Sequence
  Description of Artificial Sequence: Synthetic oligonucleotide
  Sense strand starting at position 3882 of SEQ ID NO: 1882703
gguguacgugugaaugcau

SEQ ID NO: 2141535 - RNA, 19 nt, Artificial Sequence
  Description of Artificial Sequence: Synthetic oligonucleotide
  Antisense strand to SEQ ID NO: 2141534
augcauucacacguacacc

SEQ ID NO: 2141536 - RNA, 19 nt, Artificial Sequence
  Description of Artificial Sequence: Synthetic oligonucleotide
  Sense strand starting at position 2990 of SEQ ID NO: 1882704
ggcugauguccgcaaauau

SEQ ID NO: 2141537 - RNA, 19 nt, Artificial Sequence
  Description of Artificial Sequence: Synthetic oligonucleotide
  Antisense strand to SEQ ID NO: 2141536
auauuugcggacaucagcc

SEQ ID NO: 2141538 - RNA, 19 nt, Artificial Sequence
  Description of Artificial Sequence: Synthetic oligonucleotide
  Sense strand starting at position 3000 of SEQ ID NO: 1882704
cgcaaauaugcagaauuac

SEQ ID NO: 2141539 - RNA, 19 nt, Artificial Sequence
  Description of Artificial Sequence: Synthetic oligonucleotide
  Antisense strand to SEQ ID NO: 2141538
guaauucugcauauuugcg

SEQ ID NO: 2141540 - RNA, 19 nt, Artificial Sequence
  Description of Artificial Sequence: Synthetic oligonucleotide
  Sense strand starting at position 3294 of SEQ ID NO: 1882704
aagggaugguacugaauuu

SEQ ID NO: 2141541 - RNA, 19 nt, Artificial Sequence
  Description of Artificial Sequence: Synthetic oligonucleotide
  Antisense strand to SEQ ID NO: 2141540
aaauucaguaccaucccuu

SEQ ID NO: 2141542 - RNA, 19 nt, Artificial Sequence
  Description of Artificial Sequence: Synthetic oligonucleotide
  Sense strand starting at position 3304 of SEQ ID NO: 1882704
acugaauuucgccgccaca

SEQ ID NO: 2141543 - RNA, 19 nt, Artificial Sequence
  Description of Artificial Sequence: Synthetic oligonucleotide
  Antisense strand to SEQ ID NO: 2141542
uguggcggcgaaauucagu

SEQ ID NO: 2141544 - RNA, 19 nt, Artificial Sequence
  Description of Artificial Sequence: Synthetic oligonucleotide
  Sense strand starting at position 3438 of SEQ ID NO: 1882704
ccauguucuggccgagguu

SEQ ID NO: 2141545 - RNA, 19 nt, Artificial Sequence
  Description of Artificial Sequence: Synthetic oligonucleotide
  Antisense strand to SEQ ID NO: 2141544
aaccucggccagaacaugg

SEQ ID NO: 2141546 - RNA, 19 nt, Artificial Sequence
  Description of Artificial Sequence: Synthetic oligonucleotide
  Sense strand starting at position 3560 of SEQ ID NO: 1882704
gguggucgauguuuagauu

SEQ ID NO: 2141547 - RNA, 19 nt, Artificial Sequence
  Description of Artificial Sequence: Synthetic oligonucleotide
  Antisense strand to SEQ ID NO: 2141546
aaucuaaacaucgaccacc

SEQ ID NO: 2141548 - RNA, 19 nt, Artificial Sequence
  Description of Artificial Sequence: Synthetic oligonucleotide
  Sense strand starting at position 3622 of SEQ ID NO: 1882704
gggaguuuccagcguguug

SEQ ID NO: 2141549 - RNA, 19 nt, Artificial Sequence
  Description of Artificial Sequence: Synthetic oligonucleotide
  Antisense strand to SEQ ID NO: 2141548
caacacgcuggaaacuccc

SEQ ID NO: 2141550 - RNA, 19 nt, Artificial Sequence
  Description of Artificial Sequence: Synthetic oligonucleotide
  Sense strand starting at position 231 of SEQ ID NO: 1882705
gugguuuaaaucuguuggu

SEQ ID NO: 2141551 - RNA, 19 nt, Artificial Sequence
  Description of Artificial Sequence: Synthetic oligonucleotide
  Antisense strand to SEQ ID NO: 2141550
accaacagauuuaaaccac

SEQ ID NO: 2141552 - RNA, 19 nt, Artificial Sequence
  Description of Artificial Sequence: Synthetic oligonucleotide
  Sense strand starting at position 232 of SEQ ID NO: 1882705
ugguuuaaaucuguugguu

SEQ ID NO: 2141553 - RNA, 19 nt, Artificial Sequence
  Description of Artificial Sequence: Synthetic oligonucleotide
  Antisense strand to SEQ ID NO: 2141552
aaccaacagauuuaaacca

SEQ ID NO: 2141554 - RNA, 19 nt, Artificial Sequence
  Description of Artificial Sequence: Synthetic oligonucleotide
  Sense strand starting at position 345 of SEQ ID NO: 1882705
uugacucaucccugugcaa

SEQ ID NO: 2141555 - RNA, 19 nt, Artificial Sequence
  Description of Artificial Sequence: Synthetic oligonucleotide
  Antisense strand to SEQ ID NO: 2141554
uugcacagggaugagucaa

SEQ ID NO: 2141556 - RNA, 19 nt, Artificial Sequence
  Description of Artificial Sequence: Synthetic oligonucleotide
  Sense strand starting at position 465 of SEQ ID NO: 1882705
agacuuaccuaagagauuc

SEQ ID NO: 2141557 - RNA, 19 nt, Artificial Sequence
  Description of Artificial Sequence: Synthetic oligonucleotide
  Antisense strand to SEQ ID NO: 2141556
gaaucucuuagguaagucu

SEQ ID NO: 2141558 - RNA, 19 nt, Artificial Sequence
  Description of Artificial Sequence: Synthetic oligonucleotide
  Sense strand starting at position 479 of SEQ ID NO: 1882705
gauuccagagucugagaau

SEQ ID NO: 2141559 - RNA, 19 nt, Artificial Sequence
  Description of Artificial Sequence: Synthetic oligonucleotide
  Antisense strand to SEQ ID NO: 2141558
auucucagacucuggaauc

SEQ ID NO: 2141560 - RNA, 19 nt, Artificial Sequence
  Description of Artificial Sequence: Synthetic oligonucleotide
  Sense strand starting at position 492 of SEQ ID NO: 1882705
gagaauagugaggguaacu

SEQ ID NO: 2141561 - RNA, 19 nt, Artificial Sequence
  Description of Artificial Sequence: Synthetic oligonucleotide
  Antisense strand to SEQ ID NO: 2141560
aguuacccucacuauucuc

SEQ ID NO: 2141562 - RNA, 19 nt, Artificial Sequence
  Description of Artificial Sequence: Synthetic oligonucleotide
  Sense strand starting at position 762 of SEQ ID NO: 1882705
uguggacuuccagguaaca

SEQ ID NO: 2141563 - RNA, 19 nt, Artificial Sequence
  Description of Artificial Sequence: Synthetic oligonucleotide
  Antisense strand to SEQ ID NO: 2141562
uguuaccuggaaguccaca

SEQ ID NO: 2141564 - RNA, 19 nt, Artificial Sequence
  Description of Artificial Sequence: Synthetic oligonucleotide
  Sense strand starting at position 897 of SEQ ID NO: 1882705
cucucuaaagcggaauaaa

SEQ ID NO: 2141565 - RNA, 19 nt, Artificial Sequence
  Description of Artificial Sequence: Synthetic oligonucleotide
  Antisense strand to SEQ ID NO: 2141564
uuuauuccgcuuuagagag

SEQ ID NO: 2141566 - RNA, 19 nt, Artificial Sequence
  Description of Artificial Sequence: Synthetic oligonucleotide
  Sense strand starting at position 1007 of SEQ ID NO: 1882705
acgguuaucccgaagcguc

SEQ ID NO: 2141567 - RNA, 19 nt, Artificial Sequence
  Description of Artificial Sequence: Synthetic oligonucleotide
  Antisense strand to SEQ ID NO: 2141566
gacgcuucgggauaaccgu

SEQ ID NO: 2141568 - RNA, 19 nt, Artificial Sequence
  Description of Artificial Sequence: Synthetic oligonucleotide
  Sense strand starting at position 1008 of SEQ ID NO: 1882705
cgguuaucccgaagcguca

SEQ ID NO: 2141569 - RNA, 19 nt, Artificial Sequence
  Description of Artificial Sequence: Synthetic oligonucleotide
  Antisense strand to SEQ ID NO: 2141568
ugacgcuucgggauaaccg

SEQ ID NO: 2141570 - RNA, 19 nt, Artificial Sequence
  Description of Artificial Sequence: Synthetic oligonucleotide
  Sense strand starting at position 1037 of SEQ ID NO: 1882705
ggaguuucuugacuccaga

SEQ ID NO: 2141571 - RNA, 19 nt, Artificial Sequence
  Description of Artificial Sequence: Synthetic oligonucleotide
  Antisense strand to SEQ ID NO: 2141570
ucuggagucaagaaacucc

SEQ ID NO: 2141572 - RNA, 19 nt, Artificial Sequence
  Description of Artificial Sequence: Synthetic oligonucleotide
  Sense strand starting at position 1040 of SEQ ID NO: 1882705
guuucuugacuccagaaac

SEQ ID NO: 2141573 - RNA, 19 nt, Artificial Sequence
  Description of Artificial Sequence: Synthetic oligonucleotide
  Antisense strand to SEQ ID NO: 2141572
guuucuggagucaagaaac

SEQ ID NO: 2141574 - RNA, 19 nt, Artificial Sequence
  Description of Artificial Sequence: Synthetic oligonucleotide
  Sense strand starting at position 1080 of SEQ ID NO: 1882705
cucuccuuccuggagaagu

SEQ ID NO: 2141575 - RNA, 19 nt, Artificial Sequence
  Description of Artificial Sequence: Synthetic oligonucleotide
  Antisense strand to SEQ ID NO: 2141574
acuucuccaggaaggagag

SEQ ID NO: 2141576 - RNA, 19 nt, Artificial Sequence
  Description of Artificial Sequence: Synthetic oligonucleotide
  Sense strand starting at position 1093 of SEQ ID NO: 1882705
agaaguacuucugagauga

SEQ ID NO: 2141577 - RNA, 19 nt, Artificial Sequence
  Description of Artificial Sequence: Synthetic oligonucleotide
  Antisense strand to SEQ ID NO: 2141576
ucaucucagaaguacuucu

SEQ ID NO: 2141578 - RNA, 19 nt, Artificial Sequence
  Description of Artificial Sequence: Synthetic oligonucleotide
  Sense strand starting at position 1113 of SEQ ID NO: 1882705
cgcugaagugcccaacuua

SEQ ID NO: 2141579 - RNA, 19 nt, Artificial Sequence
  Description of Artificial Sequence: Synthetic oligonucleotide
  Antisense strand to SEQ ID NO: 2141578
uaaguugggcacuucagcg

SEQ ID NO: 2141580 - RNA, 19 nt, Artificial Sequence
  Description of Artificial Sequence: Synthetic oligonucleotide
  Sense strand starting at position 1150 of SEQ ID NO: 1882705
uugcccaacugaguaaaua

SEQ ID NO: 2141581 - RNA, 19 nt, Artificial Sequence
  Description of Artificial Sequence: Synthetic oligonucleotide
  Antisense strand to SEQ ID NO: 2141580
uauuuacucaguugggcaa

SEQ ID NO: 2141582 - RNA, 19 nt, Artificial Sequence
  Description of Artificial Sequence: Synthetic oligonucleotide
  Sense strand starting at position 1151 of SEQ ID NO: 1882705
ugcccaacugaguaaauaa

SEQ ID NO: 2141583 - RNA, 19 nt, Artificial Sequence
  Description of Artificial Sequence: Synthetic oligonucleotide
  Antisense strand to SEQ ID NO: 2141582
uuauuuacucaguugggca

SEQ ID NO: 2141584 - RNA, 19 nt, Artificial Sequence
  Description of Artificial Sequence: Synthetic oligonucleotide
  Sense strand starting at position 1187 of SEQ ID NO: 1882705
aauaaagugugugcuucua

SEQ ID NO: 2141585 - RNA, 19 nt, Artificial Sequence
  Description of Artificial Sequence: Synthetic oligonucleotide
  Antisense strand to SEQ ID NO: 2141584
uagaagcacacacuuuauu

SEQ ID NO: 2141586 - RNA, 19 nt, Artificial Sequence
  Description of Artificial Sequence: Synthetic oligonucleotide
  Sense strand starting at position 1189 of SEQ ID NO: 1882705
uaaagugugugcuucuaac

SEQ ID NO: 2141587 - RNA, 19 nt, Artificial Sequence
  Description of Artificial Sequence: Synthetic oligonucleotide
  Antisense strand to SEQ ID NO: 2141586
guuagaagcacacacuuua

SEQ ID NO: 2141588 - RNA, 19 nt, Artificial Sequence
  Description of Artificial Sequence: Synthetic oligonucleotide
  Sense strand starting at position 1199 of SEQ ID NO: 1882705
gcuucuaaccgccagaugu

SEQ ID NO: 2141589 - RNA, 19 nt, Artificial Sequence
  Description of Artificial Sequence: Synthetic oligonucleotide
  Antisense strand to SEQ ID NO: 2141588
acaucuggcgguuagaagc

SEQ ID NO: 2141590 - RNA, 19 nt, Artificial Sequence
  Description of Artificial Sequence: Synthetic oligonucleotide
  Sense strand starting at position 1201 of SEQ ID NO: 1882705
uucuaaccgccagauguuu

SEQ ID NO: 2141591 - RNA, 19 nt, Artificial Sequence
  Description of Artificial Sequence: Synthetic oligonucleotide
  Antisense strand to SEQ ID NO: 2141590
aaacaucuggcgguuagaa

SEQ ID NO: 2141592 - RNA, 19 nt, Artificial Sequence
  Description of Artificial Sequence: Synthetic oligonucleotide
  Sense strand starting at position 1321 of SEQ ID NO: 1882705
gguguuucgacacacauuc

SEQ ID NO: 2141593 - RNA, 19 nt, Artificial Sequence
  Description of Artificial Sequence: Synthetic oligonucleotide
  Antisense strand to SEQ ID NO: 2141592
gaaugugugucgaaacacc

SEQ ID NO: 2141594 - RNA, 19 nt, Artificial Sequence
  Description of Artificial Sequence: Synthetic oligonucleotide
  Sense strand starting at position 1514 of SEQ ID NO: 1882705
gcccaaauuugacacaugu

SEQ ID NO: 2141595 - RNA, 19 nt, Artificial Sequence
  Description of Artificial Sequence: Synthetic oligonucleotide
  Antisense strand to SEQ ID NO: 2141594
acaugugucaaauuugggc

SEQ ID NO: 2141596 - RNA, 19 nt, Artificial Sequence
  Description of Artificial Sequence: Synthetic oligonucleotide
  Sense strand starting at position 2115 of SEQ ID NO: 1882705
cguguuguuggcaaugcga

SEQ ID NO: 2141597 - RNA, 19 nt, Artificial Sequence
  Description of Artificial Sequence: Synthetic oligonucleotide
  Antisense strand to SEQ ID NO: 2141596
ucgcauugccaacaacacg

SEQ ID NO: 2141598 - RNA, 19 nt, Artificial Sequence
  Description of Artificial Sequence: Synthetic oligonucleotide
  Sense strand starting at position 2268 of SEQ ID NO: 1882705
uguuguugauagguuugga

SEQ ID NO: 2141599 - RNA, 19 nt, Artificial Sequence
  Description of Artificial Sequence: Synthetic oligonucleotide
  Antisense strand to SEQ ID NO: 2141598
uccaaaccuaucaacaaca

SEQ ID NO: 2141600 - RNA, 19 nt, Artificial Sequence
  Description of Artificial Sequence: Synthetic oligonucleotide
  Sense strand starting at position 2368 of SEQ ID NO: 1882705
ggaagaauauuguucggau

SEQ ID NO: 2141601 - RNA, 19 nt, Artificial Sequence
  Description of Artificial Sequence: Synthetic oligonucleotide
  Antisense strand to SEQ ID NO: 2141600
auccgaacaauauucuucc

SEQ ID NO: 2141602 - RNA, 19 nt, Artificial Sequence
  Description of Artificial Sequence: Synthetic oligonucleotide
  Sense strand starting at position 2369 of SEQ ID NO: 1882705
gaagaauauuguucggauu

SEQ ID NO: 2141603 - RNA, 19 nt, Artificial Sequence
  Description of Artificial Sequence: Synthetic oligonucleotide
  Antisense strand to SEQ ID NO: 2141602
aauccgaacaauauucuuc

SEQ ID NO: 2141604 - RNA, 19 nt, Artificial Sequence
  Description of Artificial Sequence: Synthetic oligonucleotide
  Sense strand starting at position 2371 of SEQ ID NO: 1882705
agaauauuguucggauuug

SEQ ID NO: 2141605 - RNA, 19 nt, Artificial Sequence
  Description of Artificial Sequence: Synthetic oligonucleotide
  Antisense strand to SEQ ID NO: 2141604
caaauccgaacaauauucu

SEQ ID NO: 2141606 - RNA, 19 nt, Artificial Sequence
  Description of Artificial Sequence: Synthetic oligonucleotide
  Sense strand starting at position 2442 of SEQ ID NO: 1882705
uggagaacuuguuugugcu

SEQ ID NO: 2141607 - RNA, 19 nt, Artificial Sequence
  Description of Artificial Sequence: Synthetic oligonucleotide
  Antisense strand to SEQ ID NO: 2141606
agcacaaacaaguucucca

SEQ ID NO: 2141608 - RNA, 19 nt, Artificial Sequence
  Description of Artificial Sequence: Synthetic oligonucleotide
  Sense strand starting at position 2443 of SEQ ID NO: 1882705
ggagaacuuguuugugcua

SEQ ID NO: 2141609 - RNA, 19 nt, Artificial Sequence
  Description of Artificial Sequence: Synthetic oligonucleotide
  Antisense strand to SEQ ID NO: 2141608
uagcacaaacaaguucucc

SEQ ID NO: 2141610 - RNA, 19 nt, Artificial Sequence
  Description of Artificial Sequence: Synthetic oligonucleotide
  Sense strand starting at position 2737 of SEQ ID NO: 1882705
aguacaugguagucggaaa

SEQ ID NO: 2141611 - RNA, 19 nt, Artificial Sequence
  Description of Artificial Sequence: Synthetic oligonucleotide
  Antisense strand to SEQ ID NO: 2141610
uuuccgacuaccauguacu

SEQ ID NO: 2141612 - RNA, 19 nt, Artificial Sequence
  Description of Artificial Sequence: Synthetic oligonucleotide
  Sense strand starting at position 2769 of SEQ ID NO: 1882705
gugcguuaaagcgcugauu

SEQ ID NO: 2141613 - RNA, 19 nt, Artificial Sequence
  Description of Artificial Sequence: Synthetic oligonucleotide
  Antisense strand to SEQ ID NO: 2141612
aaucagcgcuuuaacgcac

SEQ ID NO: 2141614 - RNA, 19 nt, Artificial Sequence
  Description of Artificial Sequence: Synthetic oligonucleotide
  Sense strand starting at position 2780 of SEQ ID NO: 1882705
cgcugauuggccuuucuuu

SEQ ID NO: 2141615 - RNA, 19 nt, Artificial Sequence
  Description of Artificial Sequence: Synthetic oligonucleotide
  Antisense strand to SEQ ID NO: 2141614
aaagaaaggccaaucagcg

SEQ ID NO: 2141616 - RNA, 19 nt, Artificial Sequence
  Description of Artificial Sequence: Synthetic oligonucleotide
  Sense strand starting at position 2995 of SEQ ID NO: 1882705
ggguccuaucagugacuga

SEQ ID NO: 2141617 - RNA, 19 nt, Artificial Sequence
  Description of Artificial Sequence: Synthetic oligonucleotide
  Antisense strand to SEQ ID NO: 2141616
ucagucacugauaggaccc

SEQ ID NO: 2141618 - RNA, 19 nt, Artificial Sequence
  Description of Artificial Sequence: Synthetic oligonucleotide
  Sense strand starting at position 3432 of SEQ ID NO: 1882705
ccgagaggcgcugaaacuu

SEQ ID NO: 2141619 - RNA, 19 nt, Artificial Sequence
  Description of Artificial Sequence: Synthetic oligonucleotide
  Antisense strand to SEQ ID NO: 2141618
aaguuucagcgccucucgg

SEQ ID NO: 2141620 - RNA, 19 nt, Artificial Sequence
  Description of Artificial Sequence: Synthetic oligonucleotide
  Sense strand starting at position 3440 of SEQ ID NO: 1882705
cgcugaaacuuuccuccaa

SEQ ID NO: 2141621 - RNA, 19 nt, Artificial Sequence
  Description of Artificial Sequence: Synthetic oligonucleotide
  Antisense strand to SEQ ID NO: 2141620
uuggaggaaaguuucagcg

SEQ ID NO: 2141622 - RNA, 19 nt, Artificial Sequence
  Description of Artificial Sequence: Synthetic oligonucleotide
  Sense strand starting at position 3606 of SEQ ID NO: 1882705
acuaacuugugccuuugaa

SEQ ID NO: 2141623 - RNA, 19 nt, Artificial Sequence
  Description of Artificial Sequence: Synthetic oligonucleotide
  Antisense strand to SEQ ID NO: 2141622
uucaaaggcacaaguuagu

SEQ ID NO: 2141624 - RNA, 19 nt, Artificial Sequence
  Description of Artificial Sequence: Synthetic oligonucleotide
  Sense strand starting at position 3857 of SEQ ID NO: 1882705
cgagguagaguuggacuuu

SEQ ID NO: 2141625 - RNA, 19 nt, Artificial Sequence
  Description of Artificial Sequence: Synthetic oligonucleotide
  Antisense strand to SEQ ID NO: 2141624
aaaguccaacucuaccucg

SEQ ID NO: 2141626 - RNA, 19 nt, Artificial Sequence
  Description of Artificial Sequence: Synthetic oligonucleotide
  Sense strand starting at position 3863 of SEQ ID NO: 1882705
agaguuggacuuugaauug

SEQ ID NO: 2141627 - RNA, 19 nt, Artificial Sequence
  Description of Artificial Sequence: Synthetic oligonucleotide
  Antisense strand to SEQ ID NO: 2141626
caauucaaaguccaacucu

SEQ ID NO: 2141628 - RNA, 19 nt, Artificial Sequence
  Description of Artificial Sequence: Synthetic oligonucleotide
  Sense strand starting at position 3883 of SEQ ID NO: 1882705
gguucuuucccugagcuuu

SEQ ID NO: 2141629 - RNA, 19 nt, Artificial Sequence
  Description of Artificial Sequence: Synthetic oligonucleotide
  Antisense strand to SEQ ID NO: 2141628
aaagcucagggaaagaacc

SEQ ID NO: 2141630 - RNA, 19 nt, Artificial Sequence
  Description of Artificial Sequence: Synthetic oligonucleotide
  Sense strand starting at position 57 of SEQ ID NO: 1882706
ugagcauauucugugaaau

SEQ ID NO: 2141631 - RNA, 19 nt, Artificial Sequence
  Description of Artificial Sequence: Synthetic oligonucleotide
  Antisense strand to SEQ ID NO: 2141630
auuucacagaauaugcuca

SEQ ID NO: 2141632 - RNA, 19 nt, Artificial Sequence
  Description of Artificial Sequence: Synthetic oligonucleotide
  Sense strand starting at position 58 of SEQ ID NO: 1882706
gagcauauucugugaaauu

SEQ ID NO: 2141633 - RNA, 19 nt, Artificial Sequence
  Description of Artificial Sequence: Synthetic oligonucleotide
  Antisense strand to SEQ ID NO: 2141632
aauuucacagaauaugcuc

SEQ ID NO: 2141634 - RNA, 19 nt, Artificial Sequence
  Description of Artificial Sequence: Synthetic oligonucleotide
  Sense strand starting at position 168 of SEQ ID NO: 1882706
aucucuguuagguauagga

SEQ ID NO: 2141635 - RNA, 19 nt, Artificial Sequence
  Description of Artificial Sequence: Synthetic oligonucleotide
  Antisense strand to SEQ ID NO: 2141634
uccuauaccuaacagagau

SEQ ID NO: 2141636 - RNA, 19 nt, Artificial Sequence
  Description of Artificial Sequence: Synthetic oligonucleotide
  Sense strand starting at position 243 of SEQ ID NO: 1882706
aguauacuuuguuuccaaa

SEQ ID NO: 2141637 - RNA, 19 nt, Artificial Sequence
  Description of Artificial Sequence: Synthetic oligonucleotide
  Antisense strand to SEQ ID NO: 2141636
uuuggaaacaaaguauacu

SEQ ID NO: 2141638 - RNA, 19 nt, Artificial Sequence
  Description of Artificial Sequence: Synthetic oligonucleotide
  Sense strand starting at position 342 of SEQ ID NO: 1882706
gauuuaaagucagaacagu

SEQ ID NO: 2141639 - RNA, 19 nt, Artificial Sequence
  Description of Artificial Sequence: Synthetic oligonucleotide
  Antisense strand to SEQ ID NO: 2141638
acuguucugacuuuaaauc

SEQ ID NO: 2141640 - RNA, 19 nt, Artificial Sequence
  Description of Artificial Sequence: Synthetic oligonucleotide
  Sense strand starting at position 409 of SEQ ID NO: 1882706
cacacuauugacggugaaa

SEQ ID NO: 2141641 - RNA, 19 nt, Artificial Sequence
  Description of Artificial Sequence: Synthetic oligonucleotide
  Antisense strand to SEQ ID NO: 2141640
uuucaccgucaauagugug

SEQ ID NO: 2141642 - RNA, 19 nt, Artificial Sequence
  Description of Artificial Sequence: Synthetic oligonucleotide
  Sense strand starting at position 411 of SEQ ID NO: 1882706
cacuauugacggugaaagu

SEQ ID NO: 2141643 - RNA, 19 nt, Artificial Sequence
  Description of Artificial Sequence: Synthetic oligonucleotide
  Antisense strand to SEQ ID NO: 2141642
acuuucaccgucaauagug

SEQ ID NO: 2141644 - RNA, 19 nt, Artificial Sequence
  Description of Artificial Sequence: Synthetic oligonucleotide
  Sense strand starting at position 420 of SEQ ID NO: 1882706
cggugaaagugauucaaga

SEQ ID NO: 2141645 - RNA, 19 nt, Artificial Sequence
  Description of Artificial Sequence: Synthetic oligonucleotide
  Antisense strand to SEQ ID NO: 2141644
ucuugaaucacuuucaccg

SEQ ID NO: 2141646 - RNA, 19 nt, Artificial Sequence
  Description of Artificial Sequence: Synthetic oligonucleotide
  Sense strand starting at position 561 of SEQ ID NO: 1882706
gcguuauuaccugaaggug

SEQ ID NO: 2141647 - RNA, 19 nt, Artificial Sequence
  Description of Artificial Sequence: Synthetic oligonucleotide
  Antisense strand to SEQ ID NO: 2141646
caccuucagguaauaacgc

SEQ ID NO: 2141648 - RNA, 19 nt, Artificial Sequence
  Description of Artificial Sequence: Synthetic oligonucleotide
  Sense strand starting at position 608 of SEQ ID NO: 1882706
gcuguugguguugcaguaa

SEQ ID NO: 2141649 - RNA, 19 nt, Artificial Sequence
  Description of Artificial Sequence: Synthetic oligonucleotide
  Antisense strand to SEQ ID NO: 2141648
uuacugcaacaccaacagc

SEQ ID NO: 2141650 - RNA, 19 nt, Artificial Sequence
  Description of Artificial Sequence: Synthetic oligonucleotide
  Sense strand starting at position 631 of SEQ ID NO: 1882706
uugcucaugucacugggaa

SEQ ID NO: 2141651 - RNA, 19 nt, Artificial Sequence
  Description of Artificial Sequence: Synthetic oligonucleotide
  Antisense strand to SEQ ID NO: 2141650
uucccagugacaugagcaa

SEQ ID NO: 2141652 - RNA, 19 nt, Artificial Sequence
  Description of Artificial Sequence: Synthetic oligonucleotide
  Sense strand starting at position 632 of SEQ ID NO: 1882706
ugcucaugucacugggaaa

SEQ ID NO: 2141653 - RNA, 19 nt, Artificial Sequence
  Description of Artificial Sequence: Synthetic oligonucleotide
  Antisense strand to SEQ ID NO: 2141652
uuucccagugacaugagca

SEQ ID NO: 2141654 - RNA, 19 nt, Artificial Sequence
  Description of Artificial Sequence: Synthetic oligonucleotide
  Sense strand starting at position 821 of SEQ ID NO: 1882706
gcccuaugaugggcccaau

SEQ ID NO: 2141655 - RNA, 19 nt, Artificial Sequence
  Description of Artificial Sequence: Synthetic oligonucleotide
  Antisense strand to SEQ ID NO: 2141654
auugggcccaucauagggc

SEQ ID NO: 2141656 - RNA, 19 nt, Artificial Sequence
  Description of Artificial Sequence: Synthetic oligonucleotide
  Sense strand starting at position 926 of SEQ ID NO: 1882706
uuuaacugacacgaguauu

SEQ ID NO: 2141657 - RNA, 19 nt, Artificial Sequence
  Description of Artificial Sequence: Synthetic oligonucleotide
  Antisense strand to SEQ ID NO: 2141656
aauacucgugucaguuaaa

SEQ ID NO: 2141658 - RNA, 19 nt, Artificial Sequence
  Description of Artificial Sequence: Synthetic oligonucleotide
  Sense strand starting at position 1005 of SEQ ID NO: 1882706
caauguguauuccuggaaa

SEQ ID NO: 2141659 - RNA, 19 nt, Artificial Sequence
  Description of Artificial Sequence: Synthetic oligonucleotide
  Antisense strand to SEQ ID NO: 2141658
uuuccaggaauacacauug

SEQ ID NO: 2141660 - RNA, 19 nt, Artificial Sequence
  Description of Artificial Sequence: Synthetic oligonucleotide
  Sense strand starting at position 1007 of SEQ ID NO: 1882706
auguguauuccuggaaaua

SEQ ID NO: 2141661 - RNA, 19 nt, Artificial Sequence
  Description of Artificial Sequence: Synthetic oligonucleotide
  Antisense strand to SEQ ID NO: 2141660
uauuuccaggaauacacau

SEQ ID NO: 2141662 - RNA, 19 nt, Artificial Sequence
  Description of Artificial Sequence: Synthetic oligonucleotide
  Sense strand starting at position 1008 of SEQ ID NO: 1882706
uguguauuccuggaaauau

SEQ ID NO: 2141663 - RNA, 19 nt, Artificial Sequence
  Description of Artificial Sequence: Synthetic oligonucleotide
  Antisense strand to SEQ ID NO: 2141662
auauuuccaggaauacaca

SEQ ID NO: 2141664 - RNA, 19 nt, Artificial Sequence
  Description of Artificial Sequence: Synthetic oligonucleotide
  Sense strand starting at position 1140 of SEQ ID NO: 1882706
uuuguacaagcuuagcaaa

SEQ ID NO: 2141665 - RNA, 19 nt, Artificial Sequence
  Description of Artificial Sequence: Synthetic oligonucleotide
  Antisense strand to SEQ ID NO: 2141664
uuugcuaagcuuguacaaa

SEQ ID NO: 2141666 - RNA, 19 nt, Artificial Sequence
  Description of Artificial Sequence: Synthetic oligonucleotide
  Sense strand starting at position 1289 of SEQ ID NO: 1882706
gcaagaugacaugguuauu

SEQ ID NO: 2141667 - RNA, 19 nt, Artificial Sequence
  Description of Artificial Sequence: Synthetic oligonucleotide
  Antisense strand to SEQ ID NO: 2141666
aauaaccaugucaucuugc

SEQ ID NO: 2141668 - RNA, 19 nt, Artificial Sequence
  Description of Artificial Sequence: Synthetic oligonucleotide
  Sense strand starting at position 1294 of SEQ ID NO: 1882706
augacaugguuauuaucaa

SEQ ID NO: 2141669 - RNA, 19 nt, Artificial Sequence
  Description of Artificial Sequence: Synthetic oligonucleotide
  Antisense strand to SEQ ID NO: 2141668
uugauaauaaccaugucau

SEQ ID NO: 2141670 - RNA, 19 nt, Artificial Sequence
  Description of Artificial Sequence: Synthetic oligonucleotide
  Sense strand starting at position 1388 of SEQ ID NO: 1882706
uuuauuugcugucuuuacu

SEQ ID NO: 2141671 - RNA, 19 nt, Artificial Sequence
  Description of Artificial Sequence: Synthetic oligonucleotide
  Antisense strand to SEQ ID NO: 2141670
aguaaagacagcaaauaaa

SEQ ID NO: 2141672 - RNA, 19 nt, Artificial Sequence
  Description of Artificial Sequence: Synthetic oligonucleotide
  Sense strand starting at position 1630 of SEQ ID NO: 1882706
uaacguaccuucucuggaa

SEQ ID NO: 2141673 - RNA, 19 nt, Artificial Sequence
  Description of Artificial Sequence: Synthetic oligonucleotide
  Antisense strand to SEQ ID NO: 2141672
uuccagagaagguacguua

SEQ ID NO: 2141674 - RNA, 19 nt, Artificial Sequence
  Description of Artificial Sequence: Synthetic oligonucleotide
  Sense strand starting at position 1631 of SEQ ID NO: 1882706
aacguaccuucucuggaaa

SEQ ID NO: 2141675 - RNA, 19 nt, Artificial Sequence
  Description of Artificial Sequence: Synthetic oligonucleotide
  Antisense strand to SEQ ID NO: 2141674
uuuccagagaagguacguu

SEQ ID NO: 2141676 - RNA, 19 nt, Artificial Sequence
  Description of Artificial Sequence: Synthetic oligonucleotide
  Sense strand starting at position 1632 of SEQ ID NO: 1882706
acguaccuucucuggaaau

SEQ ID NO: 2141677 - RNA, 19 nt, Artificial Sequence
  Description of Artificial Sequence: Synthetic oligonucleotide
  Antisense strand to SEQ ID NO: 2141676
auuuccagagaagguacgu

SEQ ID NO: 2141678 - RNA, 19 nt, Artificial Sequence
  Description of Artificial Sequence: Synthetic oligonucleotide
  Sense strand starting at position 2204 of SEQ ID NO: 1882706
cccuuauuaggacaagcuu

SEQ ID NO: 2141679 - RNA, 19 nt, Artificial Sequence
  Description of Artificial Sequence: Synthetic oligonucleotide
  Antisense strand to SEQ ID NO: 2141678
aagcuuguccuaauaaggg

SEQ ID NO: 2141680 - RNA, 19 nt, Artificial Sequence
  Description of Artificial Sequence: Synthetic oligonucleotide
  Sense strand starting at position 2212 of SEQ ID NO: 1882706
aggacaagcuuaccauuau

SEQ ID NO: 2141681 - RNA, 19 nt, Artificial Sequence
  Description of Artificial Sequence: Synthetic oligonucleotide
  Antisense strand to SEQ ID NO: 2141680
auaaugguaagcuuguccu

SEQ ID NO: 2141682 - RNA, 19 nt, Artificial Sequence
  Description of Artificial Sequence: Synthetic oligonucleotide
  Sense strand starting at position 2252 of SEQ ID NO: 1882706
uccagugcucugcaauuua

SEQ ID NO: 2141683 - RNA, 19 nt, Artificial Sequence
  Description of Artificial Sequence: Synthetic oligonucleotide
  Antisense strand to SEQ ID NO: 2141682
uaaauugcagagcacugga

SEQ ID NO: 2141684 - RNA, 19 nt, Artificial Sequence
  Description of Artificial Sequence: Synthetic oligonucleotide
  Sense strand starting at position 2401 of SEQ ID NO: 1882706
agcagauguuaaucaagcu

SEQ ID NO: 2141685 - RNA, 19 nt, Artificial Sequence
  Description of Artificial Sequence: Synthetic oligonucleotide
  Antisense strand to SEQ ID NO: 2141684
agcuugauuaacaucugcu

SEQ ID NO: 2141686 - RNA, 19 nt, Artificial Sequence
  Description of Artificial Sequence: Synthetic oligonucleotide
  Sense strand starting at position 2423 of SEQ ID NO: 1882706
gccuuugaacacuagauac

SEQ ID NO: 2141687 - RNA, 19 nt, Artificial Sequence
  Description of Artificial Sequence: Synthetic oligonucleotide
  Antisense strand to SEQ ID NO: 2141686
guaucuaguguucaaaggc

SEQ ID NO: 2141688 - RNA, 19 nt, Artificial Sequence
  Description of Artificial Sequence: Synthetic oligonucleotide
  Sense strand starting at position 2832 of SEQ ID NO: 1882706
gagaaaugguagccucaaa

SEQ ID NO: 2141689 - RNA, 19 nt, Artificial Sequence
  Description of Artificial Sequence: Synthetic oligonucleotide
  Antisense strand to SEQ ID NO: 2141688
uuugaggcuaccauuucuc

SEQ ID NO: 2141690 - RNA, 19 nt, Artificial Sequence
  Description of Artificial Sequence: Synthetic oligonucleotide
  Sense strand starting at position 2893 of SEQ ID NO: 1882706
cuuacugaagcugguaaau

SEQ ID NO: 2141691 - RNA, 19 nt, Artificial Sequence
  Description of Artificial Sequence: Synthetic oligonucleotide
  Antisense strand to SEQ ID NO: 2141690
auuuaccagcuucaguaag

SEQ ID NO: 2141692 - RNA, 19 nt, Artificial Sequence
  Description of Artificial Sequence: Synthetic oligonucleotide
  Sense strand starting at position 2937 of SEQ ID NO: 1882706
cuccuauugcaagaacuga

SEQ ID NO: 2141693 - RNA, 19 nt, Artificial Sequence
  Description of Artificial Sequence: Synthetic oligonucleotide
  Antisense strand to SEQ ID NO: 2141692
ucaguucuugcaauaggag

SEQ ID NO: 2141694 - RNA, 19 nt, Artificial Sequence
  Description of Artificial Sequence: Synthetic oligonucleotide
  Sense strand starting at position 2983 of SEQ ID NO: 1882706
caggaacgacacugucuua

SEQ ID NO: 2141695 - RNA, 19 nt, Artificial Sequence
  Description of Artificial Sequence: Synthetic oligonucleotide
  Antisense strand to SEQ ID NO: 2141694
uaagacagugucguuccug

SEQ ID NO: 2141696 - RNA, 19 nt, Artificial Sequence
  Description of Artificial Sequence: Synthetic oligonucleotide
  Sense strand starting at position 2986 of SEQ ID NO: 1882706
gaacgacacugucuuaguu

SEQ ID NO: 2141697 - RNA, 19 nt, Artificial Sequence
  Description of Artificial Sequence: Synthetic oligonucleotide
  Antisense strand to SEQ ID NO: 2141696
aacuaagacagugucguuc

SEQ ID NO: 2141698 - RNA, 19 nt, Artificial Sequence
  Description of Artificial Sequence: Synthetic oligonucleotide
  Sense strand starting at position 3136 of SEQ ID NO: 1882706
gcacuucgaagagaucuuu

SEQ ID NO: 2141699 - RNA, 19 nt, Artificial Sequence
  Description of Artificial Sequence: Synthetic oligonucleotide
  Antisense strand to SEQ ID NO: 2141698
aaagaucucuucgaagugc

SEQ ID NO: 2141700 - RNA, 19 nt, Artificial Sequence
  Description of Artificial Sequence: Synthetic oligonucleotide
  Sense strand starting at position 3205 of SEQ ID NO: 1882706
ugaguaacaucugccacua

SEQ ID NO: 2141701 - RNA, 19 nt, Artificial Sequence
  Description of Artificial Sequence: Synthetic oligonucleotide
  Antisense strand to SEQ ID NO: 2141700
uaguggcagauguuacuca

SEQ ID NO: 2141702 - RNA, 19 nt, Artificial Sequence
  Description of Artificial Sequence: Synthetic oligonucleotide
  Sense strand starting at position 3622 of SEQ ID NO: 1882706
uuauaugagcaauaguaac

SEQ ID NO: 2141703 - RNA, 19 nt, Artificial Sequence
  Description of Artificial Sequence: Synthetic oligonucleotide
  Antisense strand to SEQ ID NO: 2141702
guuacuauugcucauauaa

SEQ ID NO: 2141704 - RNA, 19 nt, Artificial Sequence
  Description of Artificial Sequence: Synthetic oligonucleotide
  Sense strand starting at position 3656 of SEQ ID NO: 1882706
auuaaacaacugcgaauau

SEQ ID NO: 2141705 - RNA, 19 nt, Artificial Sequence
  Description of Artificial Sequence: Synthetic oligonucleotide
  Antisense strand to SEQ ID NO: 2141704
auauucgcaguuguuuaau

SEQ ID NO: 2141706 - RNA, 19 nt, Artificial Sequence
  Description of Artificial Sequence: Synthetic oligonucleotide
  Sense strand starting at position 3803 of SEQ ID NO: 1882706
gacuuuauguacuccagag

SEQ ID NO: 2141707 - RNA, 19 nt, Artificial Sequence
  Description of Artificial Sequence: Synthetic oligonucleotide
  Antisense strand to SEQ ID NO: 2141706
cucuggaguacauaaaguc

SEQ ID NO: 2141708 - RNA, 19 nt, Artificial Sequence
  Description of Artificial Sequence: Synthetic oligonucleotide
  Sense strand starting at position 3916 of SEQ ID NO: 1882706
gcaauagugccuuaucaac

SEQ ID NO: 2141709 - RNA, 19 nt, Artificial Sequence
  Description of Artificial Sequence: Synthetic oligonucleotide
  Antisense strand to SEQ ID NO: 2141708
guugauaaggcacuauugc

SEQ ID NO: 2141710 - RNA, 19 nt, Artificial Sequence
  Description of Artificial Sequence: Synthetic oligonucleotide
  Sense strand starting at position 332 of SEQ ID NO: 1882707
gggaauucucuuuagacgu

SEQ ID NO: 2141711 - RNA, 19 nt, Artificial Sequence
  Description of Artificial Sequence: Synthetic oligonucleotide
  Antisense strand to SEQ ID NO: 2141710
acgucuaaagagaauuccc

SEQ ID NO: 2141712 - RNA, 19 nt, Artificial Sequence
  Description of Artificial Sequence: Synthetic oligonucleotide
  Sense strand starting at position 339 of SEQ ID NO: 1882707
cucuuuagacgugaacacu

SEQ ID NO: 2141713 - RNA, 19 nt, Artificial Sequence
  Description of Artificial Sequence: Synthetic oligonucleotide
  Antisense strand to SEQ ID NO: 2141712
aguguucacgucuaaagag

SEQ ID NO: 2141714 - RNA, 19 nt, Artificial Sequence
  Description of Artificial Sequence: Synthetic oligonucleotide
  Sense strand starting at position 342 of SEQ ID NO: 1882707
uuuagacgugaacacuuau

SEQ ID NO: 2141715 - RNA, 19 nt, Artificial Sequence
  Description of Artificial Sequence: Synthetic oligonucleotide
  Antisense strand to SEQ ID NO: 2141714
auaaguguucacgucuaaa

SEQ ID NO: 2141716 - RNA, 19 nt, Artificial Sequence
  Description of Artificial Sequence: Synthetic oligonucleotide
  Sense strand starting at position 490 of SEQ ID NO: 1882707
cuaucaagagaucgaugua

SEQ ID NO: 2141717 - RNA, 19 nt, Artificial Sequence
  Description of Artificial Sequence: Synthetic oligonucleotide
  Antisense strand to SEQ ID NO: 2141716
uacaucgaucucuugauag

SEQ ID NO: 2141718 - RNA, 19 nt, Artificial Sequence
  Description of Artificial Sequence: Synthetic oligonucleotide
  Sense strand starting at position 723 of SEQ ID NO: 1882707
gcuaauagucaccaacaug

SEQ ID NO: 2141719 - RNA, 19 nt, Artificial Sequence
  Description of Artificial Sequence: Synthetic oligonucleotide
  Antisense strand to SEQ ID NO: 2141718
cauguuggugacuauuagc

SEQ ID NO: 2141720 - RNA, 19 nt, Artificial Sequence
  Description of Artificial Sequence: Synthetic oligonucleotide
  Sense strand starting at position 1157 of SEQ ID NO: 1882707
acaugaccaugcuuuagau

SEQ ID NO: 2141721 - RNA, 19 nt, Artificial Sequence
  Description of Artificial Sequence: Synthetic oligonucleotide
  Antisense strand to SEQ ID NO: 2141720
aucuaaagcauggucaugu

SEQ ID NO: 2141722 - RNA, 19 nt, Artificial Sequence
  Description of Artificial Sequence: Synthetic oligonucleotide
  Sense strand starting at position 1342 of SEQ ID NO: 1882707
ugccgugcccaguuuauaa

SEQ ID NO: 2141723 - RNA, 19 nt, Artificial Sequence
  Description of Artificial Sequence: Synthetic oligonucleotide
  Antisense strand to SEQ ID NO: 2141722
uuauaaacugggcacggca

SEQ ID NO: 2141724 - RNA, 19 nt, Artificial Sequence
  Description of Artificial Sequence: Synthetic oligonucleotide
  Sense strand starting at position 1377 of SEQ ID NO: 1882707
cuagcuuuccuaggaccau

SEQ ID NO: 2141725 - RNA, 19 nt, Artificial Sequence
  Description of Artificial Sequence: Synthetic oligonucleotide
  Antisense strand to SEQ ID NO: 2141724
augguccuaggaaagcuag

SEQ ID NO: 2141726 - RNA, 19 nt, Artificial Sequence
  Description of Artificial Sequence: Synthetic oligonucleotide
  Sense strand starting at position 1426 of SEQ ID NO: 1882707
acuuuaugacacugcuaag

SEQ ID NO: 2141727 - RNA, 19 nt, Artificial Sequence
  Description of Artificial Sequence: Synthetic oligonucleotide
  Antisense strand to SEQ ID NO: 2141726
cuuagcagugucauaaagu

SEQ ID NO: 2141728 - RNA, 19 nt, Artificial Sequence
  Description of Artificial Sequence: Synthetic oligonucleotide
  Sense strand starting at position 1444 of SEQ ID NO: 1882707
gggccuuuauuucccuauu

SEQ ID NO: 2141729 - RNA, 19 nt, Artificial Sequence
  Description of Artificial Sequence: Synthetic oligonucleotide
  Antisense strand to SEQ ID NO: 2141728
aauagggaaauaaaggccc

SEQ ID NO: 2141730 - RNA, 19 nt, Artificial Sequence
  Description of Artificial Sequence: Synthetic oligonucleotide
  Sense strand starting at position 1475 of SEQ ID NO: 1882707
guaauacagucacuguaua

SEQ ID NO: 2141731 - RNA, 19 nt, Artificial Sequence
  Description of Artificial Sequence: Synthetic oligonucleotide
  Antisense strand to SEQ ID NO: 2141730
uauacagugacuguauuac

SEQ ID NO: 2141732 - RNA, 19 nt, Artificial Sequence
  Description of Artificial Sequence: Synthetic oligonucleotide
  Sense strand starting at position 1598 of SEQ ID NO: 1882707
ggaggcuacuccuucuuua

SEQ ID NO: 2141733 - RNA, 19 nt, Artificial Sequence
  Description of Artificial Sequence: Synthetic oligonucleotide
  Antisense strand to SEQ ID NO: 2141732
uaaagaaggaguagccucc

SEQ ID NO: 2141734 - RNA, 19 nt, Artificial Sequence
  Description of Artificial Sequence: Synthetic oligonucleotide
  Sense strand starting at position 1671 of SEQ ID NO: 1882707
gacgcagugauuugaugua

SEQ ID NO: 2141735 - RNA, 19 nt, Artificial Sequence
  Description of Artificial Sequence: Synthetic oligonucleotide
  Antisense strand to SEQ ID NO: 2141734
uacaucaaaucacugcguc

SEQ ID NO: 2141736 - RNA, 19 nt, Artificial Sequence
  Description of Artificial Sequence: Synthetic oligonucleotide
  Sense strand starting at position 2120 of SEQ ID NO: 1882707
cucauauuaggugaggcua

SEQ ID NO: 2141737 - RNA, 19 nt, Artificial Sequence
  Description of Artificial Sequence: Synthetic oligonucleotide
  Antisense strand to SEQ ID NO: 2141736
uagccucaccuaauaugag

SEQ ID NO: 2141738 - RNA, 19 nt, Artificial Sequence
  Description of Artificial Sequence: Synthetic oligonucleotide
  Sense strand starting at position 2135 of SEQ ID NO: 1882707
gcuagaauccagggugacu

SEQ ID NO: 2141739 - RNA, 19 nt, Artificial Sequence
  Description of Artificial Sequence: Synthetic oligonucleotide
  Antisense strand to SEQ ID NO: 2141738
agucacccuggauucuagc

SEQ ID NO: 2141740 - RNA, 19 nt, Artificial Sequence
  Description of Artificial Sequence: Synthetic oligonucleotide
  Sense strand starting at position 2146 of SEQ ID NO: 1882707
gggugacucucuucucuag

SEQ ID NO: 2141741 - RNA, 19 nt, Artificial Sequence
  Description of Artificial Sequence: Synthetic oligonucleotide
  Antisense strand to SEQ ID NO: 2141740
cuagagaagagagucaccc

SEQ ID NO: 2141742 - RNA, 19 nt, Artificial Sequence
  Description of Artificial Sequence: Synthetic oligonucleotide
  Sense strand starting at position 2286 of SEQ ID NO: 1882707
gugcaaucucugcaaucuc

SEQ ID NO: 2141743 - RNA, 19 nt, Artificial Sequence
  Description of Artificial Sequence: Synthetic oligonucleotide
  Antisense strand to SEQ ID NO: 2141742
gagauugcagagauugcac

SEQ ID NO: 2141744 - RNA, 19 nt, Artificial Sequence
  Description of Artificial Sequence: Synthetic oligonucleotide
  Sense strand starting at position 2612 of SEQ ID NO: 1882707
agaugagccaaaggguuau

SEQ ID NO: 2141745 - RNA, 19 nt, Artificial Sequence
  Description of Artificial Sequence: Synthetic oligonucleotide
  Antisense strand to SEQ ID NO: 2141744
auaacccuuuggcucaucu

SEQ ID NO: 2141746 - RNA, 19 nt, Artificial Sequence
  Description of Artificial Sequence: Synthetic oligonucleotide
  Sense strand starting at position 2624 of SEQ ID NO: 1882707
ggguuauuugauugccuuu

SEQ ID NO: 2141747 - RNA, 19 nt, Artificial Sequence
  Description of Artificial Sequence: Synthetic oligonucleotide
  Antisense strand to SEQ ID NO: 2141746
aaaggcaaucaaauaaccc

SEQ ID NO: 2141748 - RNA, 19 nt, Artificial Sequence
  Description of Artificial Sequence: Synthetic oligonucleotide
  Sense strand starting at position 2667 of SEQ ID NO: 1882707
acauuuagaugucaguaca

SEQ ID NO: 2141749 - RNA, 19 nt, Artificial Sequence
  Description of Artificial Sequence: Synthetic oligonucleotide
  Antisense strand to SEQ ID NO: 2141748
uguacugacaucuaaaugu

SEQ ID NO: 2141750 - RNA, 19 nt, Artificial Sequence
  Description of Artificial Sequence: Synthetic oligonucleotide
  Sense strand starting at position 2670 of SEQ ID NO: 1882707
uuuagaugucaguacacaa

SEQ ID NO: 2141751 - RNA, 19 nt, Artificial Sequence
  Description of Artificial Sequence: Synthetic oligonucleotide
  Antisense strand to SEQ ID NO: 2141750
uuguguacugacaucuaaa

SEQ ID NO: 2141752 - RNA, 19 nt, Artificial Sequence
  Description of Artificial Sequence: Synthetic oligonucleotide
  Sense strand starting at position 2691 of SEQ ID NO: 1882707
ucagccaaaugcuugugaa

SEQ ID NO: 2141753 - RNA, 19 nt, Artificial Sequence
  Description of Artificial Sequence: Synthetic oligonucleotide
  Antisense strand to SEQ ID NO: 2141752
uucacaagcauuuggcuga

SEQ ID NO: 2141754 - RNA, 19 nt, Artificial Sequence
  Description of Artificial Sequence: Synthetic oligonucleotide
  Sense strand starting at position 2692 of SEQ ID NO: 1882707
cagccaaaugcuugugaaa

SEQ ID NO: 2141755 - RNA, 19 nt, Artificial Sequence
  Description of Artificial Sequence: Synthetic oligonucleotide
  Antisense strand to SEQ ID NO: 2141754
uuucacaagcauuuggcug

SEQ ID NO: 2141756 - RNA, 19 nt, Artificial Sequence
  Description of Artificial Sequence: Synthetic oligonucleotide
  Sense strand starting at position 2950 of SEQ ID NO: 1882707
acuggaguuucugcagaaa

SEQ ID NO: 2141757 - RNA, 19 nt, Artificial Sequence
  Description of Artificial Sequence: Synthetic oligonucleotide
  Antisense strand to SEQ ID NO: 2141756
uuucugcagaaacuccagu

SEQ ID NO: 2141758 - RNA, 19 nt, Artificial Sequence
  Description of Artificial Sequence: Synthetic oligonucleotide
  Sense strand starting at position 2962 of SEQ ID NO: 1882707
gcagaaagagcuugcugau

SEQ ID NO: 2141759 - RNA, 19 nt, Artificial Sequence
  Description of Artificial Sequence: Synthetic oligonucleotide
  Antisense strand to SEQ ID NO: 2141758
aucagcaagcucuuucugc

SEQ ID NO: 2141760 - RNA, 19 nt, Artificial Sequence
  Description of Artificial Sequence: Synthetic oligonucleotide
  Sense strand starting at position 2988 of SEQ ID NO: 1882707
ccugaauuuccacgcaugu

SEQ ID NO: 2141761 - RNA, 19 nt, Artificial Sequence
  Description of Artificial Sequence: Synthetic oligonucleotide
  Antisense strand to SEQ ID NO: 2141760
acaugcguggaaauucagg

SEQ ID NO: 2141762 - RNA, 19 nt, Artificial Sequence
  Description of Artificial Sequence: Synthetic oligonucleotide
  Sense strand starting at position 3064 of SEQ ID NO: 1882707
gagauaacugcgcaugucu

SEQ ID NO: 2141763 - RNA, 19 nt, Artificial Sequence
  Description of Artificial Sequence: Synthetic oligonucleotide
  Antisense strand to SEQ ID NO: 2141762
agacaugcgcaguuaucuc

SEQ ID NO: 2141764 - RNA, 19 nt, Artificial Sequence
  Description of Artificial Sequence: Synthetic oligonucleotide
  Sense strand starting at position 3255 of SEQ ID NO: 1882707
ucugaaacccagugucuua

SEQ ID NO: 2141765 - RNA, 19 nt, Artificial Sequence
  Description of Artificial Sequence: Synthetic oligonucleotide
  Antisense strand to SEQ ID NO: 2141764
uaagacacuggguuucaga

SEQ ID NO: 2141766 - RNA, 19 nt, Artificial Sequence
  Description of Artificial Sequence: Synthetic oligonucleotide
  Sense strand starting at position 3258 of SEQ ID NO: 1882707
gaaacccagugucuuagua

SEQ ID NO: 2141767 - RNA, 19 nt, Artificial Sequence
  Description of Artificial Sequence: Synthetic oligonucleotide
  Antisense strand to SEQ ID NO: 2141766
uacuaagacacuggguuuc

SEQ ID NO: 2141768 - RNA, 19 nt, Artificial Sequence
  Description of Artificial Sequence: Synthetic oligonucleotide
  Sense strand starting at position 3262 of SEQ ID NO: 1882707
cccagugucuuaguauuua

SEQ ID NO: 2141769 - RNA, 19 nt, Artificial Sequence
  Description of Artificial Sequence: Synthetic oligonucleotide
  Antisense strand to SEQ ID NO: 2141768
uaaauacuaagacacuggg

SEQ ID NO: 2141770 - RNA, 19 nt, Artificial Sequence
  Description of Artificial Sequence: Synthetic oligonucleotide
  Sense strand starting at position 3494 of SEQ ID NO: 1882707
aauguccaucuguaguaga

SEQ ID NO: 2141771 - RNA, 19 nt, Artificial Sequence
  Description of Artificial Sequence: Synthetic oligonucleotide
  Antisense strand to SEQ ID NO: 2141770
ucuacuacagauggacauu

SEQ ID NO: 2141772 - RNA, 19 nt, Artificial Sequence
  Description of Artificial Sequence: Synthetic oligonucleotide
  Sense strand starting at position 3632 of SEQ ID NO: 1882707
augggagagcgcgauucua

SEQ ID NO: 2141773 - RNA, 19 nt, Artificial Sequence
  Description of Artificial Sequence: Synthetic oligonucleotide
  Antisense strand to SEQ ID NO: 2141772
uagaaucgcgcucucccau

SEQ ID NO: 2141774 - RNA, 19 nt, Artificial Sequence
  Description of Artificial Sequence: Synthetic oligonucleotide
  Sense strand starting at position 3642 of SEQ ID NO: 1882707
gcgauucuauuucugugaa

SEQ ID NO: 2141775 - RNA, 19 nt, Artificial Sequence
  Description of Artificial Sequence: Synthetic oligonucleotide
  Antisense strand to SEQ ID NO: 2141774
uucacagaaauagaaucgc

SEQ ID NO: 2141776 - RNA, 19 nt, Artificial Sequence
  Description of Artificial Sequence: Synthetic oligonucleotide
  Sense strand starting at position 3655 of SEQ ID NO: 1882707
ugugaaguuucugcagaac

SEQ ID NO: 2141777 - RNA, 19 nt, Artificial Sequence
  Description of Artificial Sequence: Synthetic oligonucleotide
  Antisense strand to SEQ ID NO: 2141776
guucugcagaaacuucaca

SEQ ID NO: 2141778 - RNA, 19 nt, Artificial Sequence
  Description of Artificial Sequence: Synthetic oligonucleotide
  Sense strand starting at position 3789 of SEQ ID NO: 1882707
guguuugggagccagaaca

SEQ ID NO: 2141779 - RNA, 19 nt, Artificial Sequence
  Description of Artificial Sequence: Synthetic oligonucleotide
  Antisense strand to SEQ ID NO: 2141778
uguucuggcucccaaacac

SEQ ID NO: 2141780 - RNA, 19 nt, Artificial Sequence
  Description of Artificial Sequence: Synthetic oligonucleotide
  Sense strand starting at position 3806 of SEQ ID NO: 1882707
caggauugcugguuacuga

SEQ ID NO: 2141781 - RNA, 19 nt, Artificial Sequence
  Description of Artificial Sequence: Synthetic oligonucleotide
  Antisense strand to SEQ ID NO: 2141780
ucaguaaccagcaauccug

SEQ ID NO: 2141782 - RNA, 19 nt, Artificial Sequence
  Description of Artificial Sequence: Synthetic oligonucleotide
  Sense strand starting at position 3845 of SEQ ID NO: 1882707
uuuggagugcuggaauguu

SEQ ID NO: 2141783 - RNA, 19 nt, Artificial Sequence
  Description of Artificial Sequence: Synthetic oligonucleotide
  Antisense strand to SEQ ID NO: 2141782
aacauuccagcacuccaaa

SEQ ID NO: 2141784 - RNA, 19 nt, Artificial Sequence
  Description of Artificial Sequence: Synthetic oligonucleotide
  Sense strand starting at position 3925 of SEQ ID NO: 1882707
ugggcuggucacugaaagu

SEQ ID NO: 2141785 - RNA, 19 nt, Artificial Sequence
  Description of Artificial Sequence: Synthetic oligonucleotide
  Antisense strand to SEQ ID NO: 2141784
acuuucagugaccagccca

SEQ ID NO: 2141786 - RNA, 19 nt, Artificial Sequence
  Description of Artificial Sequence: Synthetic oligonucleotide
  Sense strand starting at position 3931 of SEQ ID NO: 1882707
ggucacugaaaguguauau

SEQ ID NO: 2141787 - RNA, 19 nt, Artificial Sequence
  Description of Artificial Sequence: Synthetic oligonucleotide
  Antisense strand to SEQ ID NO: 2141786
auauacacuuucagugacc

SEQ ID NO: 2141788 - RNA, 19 nt, Artificial Sequence
  Description of Artificial Sequence: Synthetic oligonucleotide
  Sense strand starting at position 3935 of SEQ ID NO: 1882707
acugaaaguguauauacuu

SEQ ID NO: 2141789 - RNA, 19 nt, Artificial Sequence
  Description of Artificial Sequence: Synthetic oligonucleotide
  Antisense strand to SEQ ID NO: 2141788
aaguauauacacuuucagu

SEQ ID NO: 2141790 - RNA, 19 nt, Artificial Sequence
  Description of Artificial Sequence: Synthetic oligonucleotide
  Sense strand starting at position 106 of SEQ ID NO: 1882708
ucaucaucauaagucagua

SEQ ID NO: 2141791 - RNA, 19 nt, Artificial Sequence
  Description of Artificial Sequence: Synthetic oligonucleotide
  Antisense strand to SEQ ID NO: 2141790
uacugacuuaugaugauga

SEQ ID NO: 2141792 - RNA, 19 nt, Artificial Sequence
  Description of Artificial Sequence: Synthetic oligonucleotide
  Sense strand starting at position 371 of SEQ ID NO: 1882708
aggaaagaguauuauuaac

SEQ ID NO: 2141793 - RNA, 19 nt, Artificial Sequence
  Description of Artificial Sequence: Synthetic oligonucleotide
  Antisense strand to SEQ ID NO: 2141792
guuaauaauacucuuuccu

SEQ ID NO: 2141794 - RNA, 19 nt, Artificial Sequence
  Description of Artificial Sequence: Synthetic oligonucleotide
  Sense strand starting at position 548 of SEQ ID NO: 1882708
aggcacuguccacaaauau

SEQ ID NO: 2141795 - RNA, 19 nt, Artificial Sequence
  Description of Artificial Sequence: Synthetic oligonucleotide
  Antisense strand to SEQ ID NO: 2141794
auauuuguggacagugccu

SEQ ID NO: 2141796 - RNA, 19 nt, Artificial Sequence
  Description of Artificial Sequence: Synthetic oligonucleotide
  Sense strand starting at position 966 of SEQ ID NO: 1882708
gggaguaggagucagucuu

SEQ ID NO: 2141797 - RNA, 19 nt, Artificial Sequence
  Description of Artificial Sequence: Synthetic oligonucleotide
  Antisense strand to SEQ ID NO: 2141796
aagacugacuccuacuccc

SEQ ID NO: 2141798 - RNA, 19 nt, Artificial Sequence
  Description of Artificial Sequence: Synthetic oligonucleotide
  Sense strand starting at position 976 of SEQ ID NO: 1882708
gucagucuugaccaagaca

SEQ ID NO: 2141799 - RNA, 19 nt, Artificial Sequence
  Description of Artificial Sequence: Synthetic oligonucleotide
  Antisense strand to SEQ ID NO: 2141798
ugucuuggucaagacugac

SEQ ID NO: 2141800 - RNA, 19 nt, Artificial Sequence
  Description of Artificial Sequence: Synthetic oligonucleotide
  Sense strand starting at position 1189 of SEQ ID NO: 1882708
gcauuuguggcaugacacu

SEQ ID NO: 2141801 - RNA, 19 nt, Artificial Sequence
  Description of Artificial Sequence: Synthetic oligonucleotide
  Antisense strand to SEQ ID NO: 2141800
agugucaugccacaaaugc

SEQ ID NO: 2141802 - RNA, 19 nt, Artificial Sequence
  Description of Artificial Sequence: Synthetic oligonucleotide
  Sense strand starting at position 1219 of SEQ ID NO: 1882708
uguagacauguguauauug

SEQ ID NO: 2141803 - RNA, 19 nt, Artificial Sequence
  Description of Artificial Sequence: Synthetic oligonucleotide
  Antisense strand to SEQ ID NO: 2141802
caauauacacaugucuaca

SEQ ID NO: 2141804 - RNA, 19 nt, Artificial Sequence
  Description of Artificial Sequence: Synthetic oligonucleotide
  Sense strand starting at position 1253 of SEQ ID NO: 1882708
cuuuacaucuugguucuua

SEQ ID NO: 2141805 - RNA, 19 nt, Artificial Sequence
  Description of Artificial Sequence: Synthetic oligonucleotide
  Antisense strand to SEQ ID NO: 2141804
uaagaaccaagauguaaag

SEQ ID NO: 2141806 - RNA, 19 nt, Artificial Sequence
  Description of Artificial Sequence: Synthetic oligonucleotide
  Sense strand starting at position 1254 of SEQ ID NO: 1882708
uuuacaucuugguucuuau

SEQ ID NO: 2141807 - RNA, 19 nt, Artificial Sequence
  Description of Artificial Sequence: Synthetic oligonucleotide
  Antisense strand to SEQ ID NO: 2141806
auaagaaccaagauguaaa

SEQ ID NO: 2141808 - RNA, 19 nt, Artificial Sequence
  Description of Artificial Sequence: Synthetic oligonucleotide
  Sense strand starting at position 1263 of SEQ ID NO: 1882708
ugguucuuauugcuuugaa

SEQ ID NO: 2141809 - RNA, 19 nt, Artificial Sequence
  Description of Artificial Sequence: Synthetic oligonucleotide
  Antisense strand to SEQ ID NO: 2141808
uucaaagcaauaagaacca

SEQ ID NO: 2141810 - RNA, 19 nt, Artificial Sequence
  Description of Artificial Sequence: Synthetic oligonucleotide
  Sense strand starting at position 1264 of SEQ ID NO: 1882708
gguucuuauugcuuugaau

SEQ ID NO: 2141811 - RNA, 19 nt, Artificial Sequence
  Description of Artificial Sequence: Synthetic oligonucleotide
  Antisense strand to SEQ ID NO: 2141810
auucaaagcaauaagaacc

SEQ ID NO: 2141812 - RNA, 19 nt, Artificial Sequence
  Description of Artificial Sequence: Synthetic oligonucleotide
  Sense strand starting at position 2061 of SEQ ID NO: 1882708
ccggaauuacugggagcuu

SEQ ID NO: 2141813 - RNA, 19 nt, Artificial Sequence
  Description of Artificial Sequence: Synthetic oligonucleotide
  Antisense strand to SEQ ID NO: 2141812
aagcucccaguaauuccgg

SEQ ID NO: 2141814 - RNA, 19 nt, Artificial Sequence
  Description of Artificial Sequence: Synthetic oligonucleotide
  Sense strand starting at position 2128 of SEQ ID NO: 1882708
uggucucaggccuagaauu

SEQ ID NO: 2141815 - RNA, 19 nt, Artificial Sequence
  Description of Artificial Sequence: Synthetic oligonucleotide
  Antisense strand to SEQ ID NO: 2141814
aauucuaggccugagacca

SEQ ID NO: 2141816 - RNA, 19 nt, Artificial Sequence
  Description of Artificial Sequence: Synthetic oligonucleotide
  Sense strand starting at position 2217 of SEQ ID NO: 1882708
gaguguaucccaugcaaua

SEQ ID NO: 2141817 - RNA, 19 nt, Artificial Sequence
  Description of Artificial Sequence: Synthetic oligonucleotide
  Antisense strand to SEQ ID NO: 2141816
uauugcaugggauacacuc

SEQ ID NO: 2141818 - RNA, 19 nt, Artificial Sequence
  Description of Artificial Sequence: Synthetic oligonucleotide
  Sense strand starting at position 2230 of SEQ ID NO: 1882708
gcaauaaugguuuauccga

SEQ ID NO: 2141819 - RNA, 19 nt, Artificial Sequence
  Description of Artificial Sequence: Synthetic oligonucleotide
  Antisense strand to SEQ ID NO: 2141818
ucggauaaaccauuauugc

SEQ ID NO: 2141820 - RNA, 19 nt, Artificial Sequence
  Description of Artificial Sequence: Synthetic oligonucleotide
  Sense strand starting at position 2232 of SEQ ID NO: 1882708
aauaaugguuuauccgaga

SEQ ID NO: 2141821 - RNA, 19 nt, Artificial Sequence
  Description of Artificial Sequence: Synthetic oligonucleotide
  Antisense strand to SEQ ID NO: 2141820
ucucggauaaaccauuauu

SEQ ID NO: 2141822 - RNA, 19 nt, Artificial Sequence
  Description of Artificial Sequence: Synthetic oligonucleotide
  Sense strand starting at position 2238 of SEQ ID NO: 1882708
gguuuauccgagaggcguu

SEQ ID NO: 2141823 - RNA, 19 nt, Artificial Sequence
  Description of Artificial Sequence: Synthetic oligonucleotide
  Antisense strand to SEQ ID NO: 2141822
aacgccucucggauaaacc

SEQ ID NO: 2141824 - RNA, 19 nt, Artificial Sequence
  Description of Artificial Sequence: Synthetic oligonucleotide
  Sense strand starting at position 2602 of SEQ ID NO: 1882708
cuggcaaucuuacuuagga

SEQ ID NO: 2141825 - RNA, 19 nt, Artificial Sequence
  Description of Artificial Sequence: Synthetic oligonucleotide
  Antisense strand to SEQ ID NO: 2141824
uccuaaguaagauugccag

SEQ ID NO: 2141826 - RNA, 19 nt, Artificial Sequence
  Description of Artificial Sequence: Synthetic oligonucleotide
  Sense strand starting at position 2711 of SEQ ID NO: 1882708
guuuauggacaucgacaaa

SEQ ID NO: 2141827 - RNA, 19 nt, Artificial Sequence
  Description of Artificial Sequence: Synthetic oligonucleotide
  Antisense strand to SEQ ID NO: 2141826
uuugucgauguccauaaac

SEQ ID NO: 2141828 - RNA, 19 nt, Artificial Sequence
  Description of Artificial Sequence: Synthetic oligonucleotide
  Sense strand starting at position 2826 of SEQ ID NO: 1882708
uggauaauaucguugcaaa

SEQ ID NO: 2141829 - RNA, 19 nt, Artificial Sequence
  Description of Artificial Sequence: Synthetic oligonucleotide
  Antisense strand to SEQ ID NO: 2141828
uuugcaacgauauuaucca

SEQ ID NO: 2141830 - RNA, 19 nt, Artificial Sequence
  Description of Artificial Sequence: Synthetic oligonucleotide
  Sense strand starting at position 2827 of SEQ ID NO: 1882708
ggauaauaucguugcaaau

SEQ ID NO: 2141831 - RNA, 19 nt, Artificial Sequence
  Description of Artificial Sequence: Synthetic oligonucleotide
  Antisense strand to SEQ ID NO: 2141830
auuugcaacgauauuaucc

SEQ ID NO: 2141832 - RNA, 19 nt, Artificial Sequence
  Description of Artificial Sequence: Synthetic oligonucleotide
  Sense strand starting at position 2854 of SEQ ID NO: 1882708
cucugaagaguauaccgau

SEQ ID NO: 2141833 - RNA, 19 nt, Artificial Sequence
  Description of Artificial Sequence: Synthetic oligonucleotide
  Antisense strand to SEQ ID NO: 2141832
aucgguauacucuucagag

SEQ ID NO: 2141834 - RNA, 19 nt, Artificial Sequence
  Description of Artificial Sequence: Synthetic oligonucleotide
  Sense strand starting at position 3095 of SEQ ID NO: 1882708
cuggguuuccuagacuuag

SEQ ID NO: 2141835 - RNA, 19 nt, Artificial Sequence
  Description of Artificial Sequence: Synthetic oligonucleotide
  Antisense strand to SEQ ID NO: 2141834
cuaagucuaggaaacccag

SEQ ID NO: 2141836 - RNA, 19 nt, Artificial Sequence
  Description of Artificial Sequence: Synthetic oligonucleotide
  Sense strand starting at position 3105 of SEQ ID NO: 1882708
uagacuuaguauccuugga

SEQ ID NO: 2141837 - RNA, 19 nt, Artificial Sequence
  Description of Artificial Sequence: Synthetic oligonucleotide
  Antisense strand to SEQ ID NO: 2141836
uccaaggauacuaagucua

SEQ ID NO: 2141838 - RNA, 19 nt, Artificial Sequence
  Description of Artificial Sequence: Synthetic oligonucleotide
  Sense strand starting at position 3107 of SEQ ID NO: 1882708
gacuuaguauccuuggaaa

SEQ ID NO: 2141839 - RNA, 19 nt, Artificial Sequence
  Description of Artificial Sequence: Synthetic oligonucleotide
  Antisense strand to SEQ ID NO: 2141838
uuuccaaggauacuaaguc

SEQ ID NO: 2141840 - RNA, 19 nt, Artificial Sequence
  Description of Artificial Sequence: Synthetic oligonucleotide
  Sense strand starting at position 3109 of SEQ ID NO: 1882708
cuuaguauccuuggaaagg

SEQ ID NO: 2141841 - RNA, 19 nt, Artificial Sequence
  Description of Artificial Sequence: Synthetic oligonucleotide
  Antisense strand to SEQ ID NO: 2141840
ccuuuccaaggauacuaag

SEQ ID NO: 2141842 - RNA, 19 nt, Artificial Sequence
  Description of Artificial Sequence: Synthetic oligonucleotide
  Sense strand starting at position 3239 of SEQ ID NO: 1882708
uacuguuaauuggugauca

SEQ ID NO: 2141843 - RNA, 19 nt, Artificial Sequence
  Description of Artificial Sequence: Synthetic oligonucleotide
  Antisense strand to SEQ ID NO: 2141842
ugaucaccaauuaacagua

SEQ ID NO: 2141844 - RNA, 19 nt, Artificial Sequence
  Description of Artificial Sequence: Synthetic oligonucleotide
  Sense strand starting at position 3241 of SEQ ID NO: 1882708
cuguuaauuggugaucaac

SEQ ID NO: 2141845 - RNA, 19 nt, Artificial Sequence
  Description of Artificial Sequence: Synthetic oligonucleotide
  Antisense strand to SEQ ID NO: 2141844
guugaucaccaauuaacag

SEQ ID NO: 2141846 - RNA, 19 nt, Artificial Sequence
  Description of Artificial Sequence: Synthetic oligonucleotide
  Sense strand starting at position 3403 of SEQ ID NO: 1882708
auaaguuuccaggacuguu

SEQ ID NO: 2141847 - RNA, 19 nt, Artificial Sequence
  Description of Artificial Sequence: Synthetic oligonucleotide
  Antisense strand to SEQ ID NO: 2141846
aacaguccuggaaacuuau

SEQ ID NO: 2141848 - RNA, 19 nt, Artificial Sequence
  Description of Artificial Sequence: Synthetic oligonucleotide
  Sense strand starting at position 3465 of SEQ ID NO: 1882708
uaaagaguguugucucacu

SEQ ID NO: 2141849 - RNA, 19 nt, Artificial Sequence
  Description of Artificial Sequence: Synthetic oligonucleotide
  Antisense strand to SEQ ID NO: 2141848
agugagacaacacucuuua

SEQ ID NO: 2141850 - RNA, 19 nt, Artificial Sequence
  Description of Artificial Sequence: Synthetic oligonucleotide
  Sense strand starting at position 3470 of SEQ ID NO: 1882708
aguguugucucacuuuaga

SEQ ID NO: 2141851 - RNA, 19 nt, Artificial Sequence
  Description of Artificial Sequence: Synthetic oligonucleotide
  Antisense strand to SEQ ID NO: 2141850
ucuaaagugagacaacacu

SEQ ID NO: 2141852 - RNA, 19 nt, Artificial Sequence
  Description of Artificial Sequence: Synthetic oligonucleotide
  Sense strand starting at position 3473 of SEQ ID NO: 1882708
guugucucacuuuagaaca

SEQ ID NO: 2141853 - RNA, 19 nt, Artificial Sequence
  Description of Artificial Sequence: Synthetic oligonucleotide
  Antisense strand to SEQ ID NO: 2141852
uguucuaaagugagacaac

SEQ ID NO: 2141854 - RNA, 19 nt, Artificial Sequence
  Description of Artificial Sequence: Synthetic oligonucleotide
  Sense strand starting at position 3481 of SEQ ID NO: 1882708
acuuuagaacaaugcugaa

SEQ ID NO: 2141855 - RNA, 19 nt, Artificial Sequence
  Description of Artificial Sequence: Synthetic oligonucleotide
  Antisense strand to SEQ ID NO: 2141854
uucagcauuguucuaaagu

SEQ ID NO: 2141856 - RNA, 19 nt, Artificial Sequence
  Description of Artificial Sequence: Synthetic oligonucleotide
  Sense strand starting at position 3544 of SEQ ID NO: 1882708
ugauucuucugagccagag

SEQ ID NO: 2141857 - RNA, 19 nt, Artificial Sequence
  Description of Artificial Sequence: Synthetic oligonucleotide
  Antisense strand to SEQ ID NO: 2141856
cucuggcucagaagaauca

SEQ ID NO: 2141858 - RNA, 19 nt, Artificial Sequence
  Description of Artificial Sequence: Synthetic oligonucleotide
  Sense strand starting at position 3610 of SEQ ID NO: 1882708
uucuguuugaagcggaaca

SEQ ID NO: 2141859 - RNA, 19 nt, Artificial Sequence
  Description of Artificial Sequence: Synthetic oligonucleotide
  Antisense strand to SEQ ID NO: 2141858
uguuccgcuucaaacagaa

SEQ ID NO: 2141860 - RNA, 19 nt, Artificial Sequence
  Description of Artificial Sequence: Synthetic oligonucleotide
  Sense strand starting at position 3611 of SEQ ID NO: 1882708
ucuguuugaagcggaacau

SEQ ID NO: 2141861 - RNA, 19 nt, Artificial Sequence
  Description of Artificial Sequence: Synthetic oligonucleotide
  Antisense strand to SEQ ID NO: 2141860
auguuccgcuucaaacaga

SEQ ID NO: 2141862 - RNA, 19 nt, Artificial Sequence
  Description of Artificial Sequence: Synthetic oligonucleotide
  Sense strand starting at position 3612 of SEQ ID NO: 1882708
cuguuugaagcggaacaua

SEQ ID NO: 2141863 - RNA, 19 nt, Artificial Sequence
  Description of Artificial Sequence: Synthetic oligonucleotide
  Antisense strand to SEQ ID NO: 2141862
uauguuccgcuucaaacag

SEQ ID NO: 2141864 - RNA, 19 nt, Artificial Sequence
  Description of Artificial Sequence: Synthetic oligonucleotide
  Sense strand starting at position 3677 of SEQ ID NO: 1882708
auauuauugccagaggcag

SEQ ID NO: 2141865 - RNA, 19 nt, Artificial Sequence
  Description of Artificial Sequence: Synthetic oligonucleotide
  Antisense strand to SEQ ID NO: 2141864
cugccucuggcaauaauau

SEQ ID NO: 2141866 - RNA, 19 nt, Artificial Sequence
  Description of Artificial Sequence: Synthetic oligonucleotide
  Sense strand starting at position 3964 of SEQ ID NO: 1882708
uccaguaaaucugucuuau

SEQ ID NO: 2141867 - RNA, 19 nt, Artificial Sequence
  Description of Artificial Sequence: Synthetic oligonucleotide
  Antisense strand to SEQ ID NO: 2141866
auaagacagauuuacugga

SEQ ID NO: 2141868 - RNA, 19 nt, Artificial Sequence
  Description of Artificial Sequence: Synthetic oligonucleotide
  Sense strand starting at position 3981 of SEQ ID NO: 1882708
auguuaguguaauucccau

SEQ ID NO: 2141869 - RNA, 19 nt, Artificial Sequence
  Description of Artificial Sequence: Synthetic oligonucleotide
  Antisense strand to SEQ ID NO: 2141868
augggaauuacacuaacau

SEQ ID NO: 2141870 - RNA, 19 nt, Artificial Sequence
  Description of Artificial Sequence: Synthetic oligonucleotide
  Sense strand starting at position 429 of SEQ ID NO: 1882709
aagugagauuuccaagcca

SEQ ID NO: 2141871 - RNA, 19 nt, Artificial Sequence
  Description of Artificial Sequence: Synthetic oligonucleotide
  Antisense strand to SEQ ID NO: 2141870
uggcuuggaaaucucacuu

SEQ ID NO: 2141872 - RNA, 19 nt, Artificial Sequence
  Description of Artificial Sequence: Synthetic oligonucleotide
  Sense strand starting at position 499 of SEQ ID NO: 1882709
ccuugagcucagugccaaa

SEQ ID NO: 2141873 - RNA, 19 nt, Artificial Sequence
  Description of Artificial Sequence: Synthetic oligonucleotide
  Antisense strand to SEQ ID NO: 2141872
uuuggcacugagcucaagg

SEQ ID NO: 2141874 - RNA, 19 nt, Artificial Sequence
  Description of Artificial Sequence: Synthetic oligonucleotide
  Sense strand starting at position 657 of SEQ ID NO: 1882709
agucacaaucgugggcaaa

SEQ ID NO: 2141875 - RNA, 19 nt, Artificial Sequence
  Description of Artificial Sequence: Synthetic oligonucleotide
  Antisense strand to SEQ ID NO: 2141874
uuugcccacgauugugacu

SEQ ID NO: 2141876 - RNA, 19 nt, Artificial Sequence
  Description of Artificial Sequence: Synthetic oligonucleotide
  Sense strand starting at position 658 of SEQ ID NO: 1882709
gucacaaucgugggcaaau

SEQ ID NO: 2141877 - RNA, 19 nt, Artificial Sequence
  Description of Artificial Sequence: Synthetic oligonucleotide
  Antisense strand to SEQ ID NO: 2141876
auuugcccacgauugugac

SEQ ID NO: 2141878 - RNA, 19 nt, Artificial Sequence
  Description of Artificial Sequence: Synthetic oligonucleotide
  Sense strand starting at position 659 of SEQ ID NO: 1882709
ucacaaucgugggcaaaug

SEQ ID NO: 2141879 - RNA, 19 nt, Artificial Sequence
  Description of Artificial Sequence: Synthetic oligonucleotide
  Antisense strand to SEQ ID NO: 2141878
cauuugcccacgauuguga

SEQ ID NO: 2141880 - RNA, 19 nt, Artificial Sequence
  Description of Artificial Sequence: Synthetic oligonucleotide
  Sense strand starting at position 720 of SEQ ID NO: 1882709
ggcucaggguccuuaaaca

SEQ ID NO: 2141881 - RNA, 19 nt, Artificial Sequence
  Description of Artificial Sequence: Synthetic oligonucleotide
  Antisense strand to SEQ ID NO: 2141880
uguuuaaggacccugagcc

SEQ ID NO: 2141882 - RNA, 19 nt, Artificial Sequence
  Description of Artificial Sequence: Synthetic oligonucleotide
  Sense strand starting at position 1508 of SEQ ID NO: 1882709
gcccgaaguugucuuccga

SEQ ID NO: 2141883 - RNA, 19 nt, Artificial Sequence
  Description of Artificial Sequence: Synthetic oligonucleotide
  Antisense strand to SEQ ID NO: 2141882
ucggaagacaacuucgggc

SEQ ID NO: 2141884 - RNA, 19 nt, Artificial Sequence
  Description of Artificial Sequence: Synthetic oligonucleotide
  Sense strand starting at position 1601 of SEQ ID NO: 1882709
cuuaccuggucuuggagaa

SEQ ID NO: 2141885 - RNA, 19 nt, Artificial Sequence
  Description of Artificial Sequence: Synthetic oligonucleotide
  Antisense strand to SEQ ID NO: 2141884
uucuccaagaccagguaag

SEQ ID NO: 2141886 - RNA, 19 nt, Artificial Sequence
  Description of Artificial Sequence: Synthetic oligonucleotide
  Sense strand starting at position 2472 of SEQ ID NO: 1882709
gggaguucguagcaaggga

SEQ ID NO: 2141887 - RNA, 19 nt, Artificial Sequence
  Description of Artificial Sequence: Synthetic oligonucleotide
  Antisense strand to SEQ ID NO: 2141886
ucccuugcuacgaacuccc

SEQ ID NO: 2141888 - RNA, 19 nt, Artificial Sequence
  Description of Artificial Sequence: Synthetic oligonucleotide
  Sense strand starting at position 2629 of SEQ ID NO: 1882709
gcuggugagugacuguaau

SEQ ID NO: 2141889 - RNA, 19 nt, Artificial Sequence
  Description of Artificial Sequence: Synthetic oligonucleotide
  Antisense strand to SEQ ID NO: 2141888
auuacagucacucaccagc

SEQ ID NO: 2141890 - RNA, 19 nt, Artificial Sequence
  Description of Artificial Sequence: Synthetic oligonucleotide
  Sense strand starting at position 2740 of SEQ ID NO: 1882709
aggcaauagagugagaguu

SEQ ID NO: 2141891 - RNA, 19 nt, Artificial Sequence
  Description of Artificial Sequence: Synthetic oligonucleotide
  Antisense strand to SEQ ID NO: 2141890
aacucucacucuauugccu

SEQ ID NO: 2141892 - RNA, 19 nt, Artificial Sequence
  Description of Artificial Sequence: Synthetic oligonucleotide
  Sense strand starting at position 2742 of SEQ ID NO: 1882709
gcaauagagugagaguuca

SEQ ID NO: 2141893 - RNA, 19 nt, Artificial Sequence
  Description of Artificial Sequence: Synthetic oligonucleotide
  Antisense strand to SEQ ID NO: 2141892
ugaacucucacucuauugc

SEQ ID NO: 2141894 - RNA, 19 nt, Artificial Sequence
  Description of Artificial Sequence: Synthetic oligonucleotide
  Sense strand starting at position 3238 of SEQ ID NO: 1882709
acaaguuggucacaggacu

SEQ ID NO: 2141895 - RNA, 19 nt, Artificial Sequence
  Description of Artificial Sequence: Synthetic oligonucleotide
  Antisense strand to SEQ ID NO: 2141894
aguccugugaccaacuugu

SEQ ID NO: 2141896 - RNA, 19 nt, Artificial Sequence
  Description of Artificial Sequence: Synthetic oligonucleotide
  Sense strand starting at position 107 of SEQ ID NO: 1882710
uucugugguccuggaagau

SEQ ID NO: 2141897 - RNA, 19 nt, Artificial Sequence
  Description of Artificial Sequence: Synthetic oligonucleotide
  Antisense strand to SEQ ID NO: 2141896
aucuuccaggaccacagaa

SEQ ID NO: 2141898 - RNA, 19 nt, Artificial Sequence
  Description of Artificial Sequence: Synthetic oligonucleotide
  Sense strand starting at position 467 of SEQ ID NO: 1882710
cuuccuacaguugggaaau

SEQ ID NO: 2141899 - RNA, 19 nt, Artificial Sequence
  Description of Artificial Sequence: Synthetic oligonucleotide
  Antisense strand to SEQ ID NO: 2141898
auuucccaacuguaggaag

SEQ ID NO: 2141900 - RNA, 19 nt, Artificial Sequence
  Description of Artificial Sequence: Synthetic oligonucleotide
  Sense strand starting at position 477 of SEQ ID NO: 1882710
uugggaaauucccuaccuu

SEQ ID NO: 2141901 - RNA, 19 nt, Artificial Sequence
  Description of Artificial Sequence: Synthetic oligonucleotide
  Antisense strand to SEQ ID NO: 2141900
aagguagggaauuucccaa

SEQ ID NO: 2141902 - RNA, 19 nt, Artificial Sequence
  Description of Artificial Sequence: Synthetic oligonucleotide
  Sense strand starting at position 491 of SEQ ID NO: 1882710
accuuacgaguuugggaau

SEQ ID NO: 2141903 - RNA, 19 nt, Artificial Sequence
  Description of Artificial Sequence: Synthetic oligonucleotide
  Antisense strand to SEQ ID NO: 2141902
auucccaaacucguaaggu

SEQ ID NO: 2141904 - RNA, 19 nt, Artificial Sequence
  Description of Artificial Sequence: Synthetic oligonucleotide
  Sense strand starting at position 674 of SEQ ID NO: 1882710
cagagaggcugacacauuu

SEQ ID NO: 2141905 - RNA, 19 nt, Artificial Sequence
  Description of Artificial Sequence: Synthetic oligonucleotide
  Antisense strand to SEQ ID NO: 2141904
aaaugugucagccucucug

SEQ ID NO: 2141906 - RNA, 19 nt, Artificial Sequence
  Description of Artificial Sequence: Synthetic oligonucleotide
  Sense strand starting at position 809 of SEQ ID NO: 1882710
gcugguucuguugugugau

SEQ ID NO: 2141907 - RNA, 19 nt, Artificial Sequence
  Description of Artificial Sequence: Synthetic oligonucleotide
  Antisense strand to SEQ ID NO: 2141906
aucacacaacagaaccagc

SEQ ID NO: 2141908 - RNA, 19 nt, Artificial Sequence
  Description of Artificial Sequence: Synthetic oligonucleotide
  Sense strand starting at position 911 of SEQ ID NO: 1882710
ugagcucuccaauagccuu

SEQ ID NO: 2141909 - RNA, 19 nt, Artificial Sequence
  Description of Artificial Sequence: Synthetic oligonucleotide
  Antisense strand to SEQ ID NO: 2141908
aaggcuauuggagagcuca

SEQ ID NO: 2141910 - RNA, 19 nt, Artificial Sequence
  Description of Artificial Sequence: Synthetic oligonucleotide
  Sense strand starting at position 998 of SEQ ID NO: 1882710
cuaagaacucacgauguua

SEQ ID NO: 2141911 - RNA, 19 nt, Artificial Sequence
  Description of Artificial Sequence: Synthetic oligonucleotide
  Antisense strand to SEQ ID NO: 2141910
uaacaucgugaguucuuag

SEQ ID NO: 2141912 - RNA, 19 nt, Artificial Sequence
  Description of Artificial Sequence: Synthetic oligonucleotide
  Sense strand starting at position 1013 of SEQ ID NO: 1882710
guuagcagagaucauguuu

SEQ ID NO: 2141913 - RNA, 19 nt, Artificial Sequence
  Description of Artificial Sequence: Synthetic oligonucleotide
  Antisense strand to SEQ ID NO: 2141912
aaacaugaucucugcuaac

SEQ ID NO: 2141914 - RNA, 19 nt, Artificial Sequence
  Description of Artificial Sequence: Synthetic oligonucleotide
  Sense strand starting at position 1019 of SEQ ID NO: 1882710
agagaucauguuugucuca

SEQ ID NO: 2141915 - RNA, 19 nt, Artificial Sequence
  Description of Artificial Sequence: Synthetic oligonucleotide
  Antisense strand to SEQ ID NO: 2141914
ugagacaaacaugaucucu

SEQ ID NO: 2141916 - RNA, 19 nt, Artificial Sequence
  Description of Artificial Sequence: Synthetic oligonucleotide
  Sense strand starting at position 1020 of SEQ ID NO: 1882710
gagaucauguuugucucau

SEQ ID NO: 2141917 - RNA, 19 nt, Artificial Sequence
  Description of Artificial Sequence: Synthetic oligonucleotide
  Antisense strand to SEQ ID NO: 2141916
augagacaaacaugaucuc

SEQ ID NO: 2141918 - RNA, 19 nt, Artificial Sequence
  Description of Artificial Sequence: Synthetic oligonucleotide
  Sense strand starting at position 1032 of SEQ ID NO: 1882710
gucucauucgacgcuguca

SEQ ID NO: 2141919 - RNA, 19 nt, Artificial Sequence
  Description of Artificial Sequence: Synthetic oligonucleotide
  Antisense strand to SEQ ID NO: 2141918
ugacagcgucgaaugagac

SEQ ID NO: 2141920 - RNA, 19 nt, Artificial Sequence
  Description of Artificial Sequence: Synthetic oligonucleotide
  Sense strand starting at position 1083 of SEQ ID NO: 1882710
guccuacagacugagaguu

SEQ ID NO: 2141921 - RNA, 19 nt, Artificial Sequence
  Description of Artificial Sequence: Synthetic oligonucleotide
  Antisense strand to SEQ ID NO: 2141920
aacucucagucuguaggac

SEQ ID NO: 2141922 - RNA, 19 nt, Artificial Sequence
  Description of Artificial Sequence: Synthetic oligonucleotide
  Sense strand starting at position 1091 of SEQ ID NO: 1882710
gacugagaguuccucgaaa

SEQ ID NO: 2141923 - RNA, 19 nt, Artificial Sequence
  Description of Artificial Sequence: Synthetic oligonucleotide
  Antisense strand to SEQ ID NO: 2141922
uuucgaggaacucucaguc

SEQ ID NO: 2141924 - RNA, 19 nt, Artificial Sequence
  Description of Artificial Sequence: Synthetic oligonucleotide
  Sense strand starting at position 1093 of SEQ ID NO: 1882710
cugagaguuccucgaaaca

SEQ ID NO: 2141925 - RNA, 19 nt, Artificial Sequence
  Description of Artificial Sequence: Synthetic oligonucleotide
  Antisense strand to SEQ ID NO: 2141924
uguuucgaggaacucucag

SEQ ID NO: 2141926 - RNA, 19 nt, Artificial Sequence
  Description of Artificial Sequence: Synthetic oligonucleotide
  Sense strand starting at position 1144 of SEQ ID NO: 1882710
uguuaagugccggaagaau

SEQ ID NO: 2141927 - RNA, 19 nt, Artificial Sequence
  Description of Artificial Sequence: Synthetic oligonucleotide
  Antisense strand to SEQ ID NO: 2141926
auucuuccggcacuuaaca

SEQ ID NO: 2141928 - RNA, 19 nt, Artificial Sequence
  Description of Artificial Sequence: Synthetic oligonucleotide
  Sense strand starting at position 1152 of SEQ ID NO: 1882710
gccggaagaauauguacua

SEQ ID NO: 2141929 - RNA, 19 nt, Artificial Sequence
  Description of Artificial Sequence: Synthetic oligonucleotide
  Antisense strand to SEQ ID NO: 2141928
uaguacauauucuuccggc

SEQ ID NO: 2141930 - RNA, 19 nt, Artificial Sequence
  Description of Artificial Sequence: Synthetic oligonucleotide
  Sense strand starting at position 1153 of SEQ ID NO: 1882710
ccggaagaauauguacuaa

SEQ ID NO: 2141931 - RNA, 19 nt, Artificial Sequence
  Description of Artificial Sequence: Synthetic oligonucleotide
  Antisense strand to SEQ ID NO: 2141930
uuaguacauauucuuccgg

SEQ ID NO: 2141932 - RNA, 19 nt, Artificial Sequence
  Description of Artificial Sequence: Synthetic oligonucleotide
  Sense strand starting at position 1344 of SEQ ID NO: 1882710
ugagaagugcuguaacaaa

SEQ ID NO: 2141933 - RNA, 19 nt, Artificial Sequence
  Description of Artificial Sequence: Synthetic oligonucleotide
  Antisense strand to SEQ ID NO: 2141932
uuuguuacagcacuucuca

SEQ ID NO: 2141934 - RNA, 19 nt, Artificial Sequence
  Description of Artificial Sequence: Synthetic oligonucleotide
  Sense strand starting at position 2020 of SEQ ID NO: 1882710
gagcgagcgcucuccugau

SEQ ID NO: 2141935 - RNA, 19 nt, Artificial Sequence
  Description of Artificial Sequence: Synthetic oligonucleotide
  Antisense strand to SEQ ID NO: 2141934
aucaggagagcgcucgcuc

SEQ ID NO: 2141936 - RNA, 19 nt, Artificial Sequence
  Description of Artificial Sequence: Synthetic oligonucleotide
  Sense strand starting at position 2119 of SEQ ID NO: 1882710
ucagaaauagucuguccug

SEQ ID NO: 2141937 - RNA, 19 nt, Artificial Sequence
  Description of Artificial Sequence: Synthetic oligonucleotide
  Antisense strand to SEQ ID NO: 2141936
caggacagacuauuucuga

SEQ ID NO: 2141938 - RNA, 19 nt, Artificial Sequence
  Description of Artificial Sequence: Synthetic oligonucleotide
  Sense strand starting at position 2120 of SEQ ID NO: 1882710
cagaaauagucuguccuga

SEQ ID NO: 2141939 - RNA, 19 nt, Artificial Sequence
  Description of Artificial Sequence: Synthetic oligonucleotide
  Antisense strand to SEQ ID NO: 2141938
ucaggacagacuauuucug

SEQ ID NO: 2141940 - RNA, 19 nt, Artificial Sequence
  Description of Artificial Sequence: Synthetic oligonucleotide
  Sense strand starting at position 2122 of SEQ ID NO: 1882710
gaaauagucuguccugaag

SEQ ID NO: 2141941 - RNA, 19 nt, Artificial Sequence
  Description of Artificial Sequence: Synthetic oligonucleotide
  Antisense strand to SEQ ID NO: 2141940
cuucaggacagacuauuuc

SEQ ID NO: 2141942 - RNA, 19 nt, Artificial Sequence
  Description of Artificial Sequence: Synthetic oligonucleotide
  Sense strand starting at position 2125 of SEQ ID NO: 1882710
auagucuguccugaagcaa

SEQ ID NO: 2141943 - RNA, 19 nt, Artificial Sequence
  Description of Artificial Sequence: Synthetic oligonucleotide
  Antisense strand to SEQ ID NO: 2141942
uugcuucaggacagacuau

SEQ ID NO: 2141944 - RNA, 19 nt, Artificial Sequence
  Description of Artificial Sequence: Synthetic oligonucleotide
  Sense strand starting at position 2344 of SEQ ID NO: 1882710
ggaaguucuggucagaucu

SEQ ID NO: 2141945 - RNA, 19 nt, Artificial Sequence
  Description of Artificial Sequence: Synthetic oligonucleotide
  Antisense strand to SEQ ID NO: 2141944
agaucugaccagaacuucc

SEQ ID NO: 2141946 - RNA, 19 nt, Artificial Sequence
  Description of Artificial Sequence: Synthetic oligonucleotide
  Sense strand starting at position 2355 of SEQ ID NO: 1882710
ucagaucugaggcgaaaca

SEQ ID NO: 2141947 - RNA, 19 nt, Artificial Sequence
  Description of Artificial Sequence: Synthetic oligonucleotide
  Antisense strand to SEQ ID NO: 2141946
uguuucgccucagaucuga

SEQ ID NO: 2141948 - RNA, 19 nt, Artificial Sequence
  Description of Artificial Sequence: Synthetic oligonucleotide
  Sense strand starting at position 2493 of SEQ ID NO: 1882710
cccagcacuggucaucaau

SEQ ID NO: 2141949 - RNA, 19 nt, Artificial Sequence
  Description of Artificial Sequence: Synthetic oligonucleotide
  Antisense strand to SEQ ID NO: 2141948
auugaugaccagugcuggg

SEQ ID NO: 2141950 - RNA, 19 nt, Artificial Sequence
  Description of Artificial Sequence: Synthetic oligonucleotide
  Sense strand starting at position 2621 of SEQ ID NO: 1882710
gccauuuacuagccaagua

SEQ ID NO: 2141951 - RNA, 19 nt, Artificial Sequence
  Description of Artificial Sequence: Synthetic oligonucleotide
  Antisense strand to SEQ ID NO: 2141950
uacuuggcuaguaaauggc

SEQ ID NO: 2141952 - RNA, 19 nt, Artificial Sequence
  Description of Artificial Sequence: Synthetic oligonucleotide
  Sense strand starting at position 2693 of SEQ ID NO: 1882710
auaaguuagggucacagua

SEQ ID NO: 2141953 - RNA, 19 nt, Artificial Sequence
  Description of Artificial Sequence: Synthetic oligonucleotide
  Antisense strand to SEQ ID NO: 2141952
uacugugacccuaacuuau

SEQ ID NO: 2141954 - RNA, 19 nt, Artificial Sequence
  Description of Artificial Sequence: Synthetic oligonucleotide
  Sense strand starting at position 2754 of SEQ ID NO: 1882710
cacacauccuggguguauu

SEQ ID NO: 2141955 - RNA, 19 nt, Artificial Sequence
  Description of Artificial Sequence: Synthetic oligonucleotide
  Antisense strand to SEQ ID NO: 2141954
aauacacccaggaugugug

SEQ ID NO: 2141956 - RNA, 19 nt, Artificial Sequence
  Description of Artificial Sequence: Synthetic oligonucleotide
  Sense strand starting at position 2817 of SEQ ID NO: 1882710
aggaacauugucuauccuu

SEQ ID NO: 2141957 - RNA, 19 nt, Artificial Sequence
  Description of Artificial Sequence: Synthetic oligonucleotide
  Antisense strand to SEQ ID NO: 2141956
aaggauagacaauguuccu

SEQ ID NO: 2141958 - RNA, 19 nt, Artificial Sequence
  Description of Artificial Sequence: Synthetic oligonucleotide
  Sense strand starting at position 3179 of SEQ ID NO: 1882710
auugguggugacuauuaca

SEQ ID NO: 2141959 - RNA, 19 nt, Artificial Sequence
  Description of Artificial Sequence: Synthetic oligonucleotide
  Antisense strand to SEQ ID NO: 2141958
uguaauagucaccaccaau

SEQ ID NO: 2141960 - RNA, 19 nt, Artificial Sequence
  Description of Artificial Sequence: Synthetic oligonucleotide
  Sense strand starting at position 3239 of SEQ ID NO: 1882710
gguauuccgccuuucuagu

SEQ ID NO: 2141961 - RNA, 19 nt, Artificial Sequence
  Description of Artificial Sequence: Synthetic oligonucleotide
  Antisense strand to SEQ ID NO: 2141960
acuagaaaggcggaauacc

SEQ ID NO: 2141962 - RNA, 19 nt, Artificial Sequence
  Description of Artificial Sequence: Synthetic oligonucleotide
  Sense strand starting at position 3313 of SEQ ID NO: 1882710
aggaaacaguucucuuuac

SEQ ID NO: 2141963 - RNA, 19 nt, Artificial Sequence
  Description of Artificial Sequence: Synthetic oligonucleotide
  Antisense strand to SEQ ID NO: 2141962
guaaagagaacuguuuccu

SEQ ID NO: 2141964 - RNA, 19 nt, Artificial Sequence
  Description of Artificial Sequence: Synthetic oligonucleotide
  Sense strand starting at position 3314 of SEQ ID NO: 1882710
ggaaacaguucucuuuaca

SEQ ID NO: 2141965 - RNA, 19 nt, Artificial Sequence
  Description of Artificial Sequence: Synthetic oligonucleotide
  Antisense strand to SEQ ID NO: 2141964
uguaaagagaacuguuucc

SEQ ID NO: 2141966 - RNA, 19 nt, Artificial Sequence
  Description of Artificial Sequence: Synthetic oligonucleotide
  Sense strand starting at position 3390 of SEQ ID NO: 1882710
ccaggaucaucagugauau

SEQ ID NO: 2141967 - RNA, 19 nt, Artificial Sequence
  Description of Artificial Sequence: Synthetic oligonucleotide
  Antisense strand to SEQ ID NO: 2141966
auaucacugaugauccugg

SEQ ID NO: 2141968 - RNA, 19 nt, Artificial Sequence
  Description of Artificial Sequence: Synthetic oligonucleotide
  Sense strand starting at position 3391 of SEQ ID NO: 1882710
caggaucaucagugauauc

SEQ ID NO: 2141969 - RNA, 19 nt, Artificial Sequence
  Description of Artificial Sequence: Synthetic oligonucleotide
  Antisense strand to SEQ ID NO: 2141968
gauaucacugaugauccug

SEQ ID NO: 2141970 - RNA, 19 nt, Artificial Sequence
  Description of Artificial Sequence: Synthetic oligonucleotide
  Sense strand starting at position 3467 of SEQ ID NO: 1882710
aggauuacugcugguuaca

SEQ ID NO: 2141971 - RNA, 19 nt, Artificial Sequence
  Description of Artificial Sequence: Synthetic oligonucleotide
  Antisense strand to SEQ ID NO: 2141970
uguaaccagcaguaauccu

SEQ ID NO: 2141972 - RNA, 19 nt, Artificial Sequence
  Description of Artificial Sequence: Synthetic oligonucleotide
  Sense strand starting at position 3469 of SEQ ID NO: 1882710
gauuacugcugguuacaau

SEQ ID NO: 2141973 - RNA, 19 nt, Artificial Sequence
  Description of Artificial Sequence: Synthetic oligonucleotide
  Antisense strand to SEQ ID NO: 2141972
auuguaaccagcaguaauc

SEQ ID NO: 2141974 - RNA, 19 nt, Artificial Sequence
  Description of Artificial Sequence: Synthetic oligonucleotide
  Sense strand starting at position 3470 of SEQ ID NO: 1882710
auuacugcugguuacaauu

SEQ ID NO: 2141975 - RNA, 19 nt, Artificial Sequence
  Description of Artificial Sequence: Synthetic oligonucleotide
  Antisense strand to SEQ ID NO: 2141974
aauuguaaccagcaguaau

SEQ ID NO: 2141976 - RNA, 19 nt, Artificial Sequence
  Description of Artificial Sequence: Synthetic oligonucleotide
  Sense strand starting at position 52 of SEQ ID NO: 1882711
aguguagaaguguucgcuu

SEQ ID NO: 2141977 - RNA, 19 nt, Artificial Sequence
  Description of Artificial Sequence: Synthetic oligonucleotide
  Antisense strand to SEQ ID NO: 2141976
aagcgaacacuucuacacu

SEQ ID NO: 2141978 - RNA, 19 nt, Artificial Sequence
  Description of Artificial Sequence: Synthetic oligonucleotide
  Sense strand starting at position 460 of SEQ ID NO: 1882711
caguaaacucuauguggcu

SEQ ID NO: 2141979 - RNA, 19 nt, Artificial Sequence
  Description of Artificial Sequence: Synthetic oligonucleotide
  Antisense strand to SEQ ID NO: 2141978
agccacauagaguuuacug

SEQ ID NO: 2141980 - RNA, 19 nt, Artificial Sequence
  Description of Artificial Sequence: Synthetic oligonucleotide
  Sense strand starting at position 588 of SEQ ID NO: 1882711
uagcuaguagcuggugaaa

SEQ ID NO: 2141981 - RNA, 19 nt, Artificial Sequence
  Description of Artificial Sequence: Synthetic oligonucleotide
  Antisense strand to SEQ ID NO: 2141980
uuucaccagcuacuagcua

SEQ ID NO: 2141982 - RNA, 19 nt, Artificial Sequence
  Description of Artificial Sequence: Synthetic oligonucleotide
  Sense strand starting at position 666 of SEQ ID NO: 1882711
ccggauucucacugcauau

SEQ ID NO: 2141983 - RNA, 19 nt, Artificial Sequence
  Description of Artificial Sequence: Synthetic oligonucleotide
  Antisense strand to SEQ ID NO: 2141982
auaugcagugagaauccgg

SEQ ID NO: 2141984 - RNA, 19 nt, Artificial Sequence
  Description of Artificial Sequence: Synthetic oligonucleotide
  Sense strand starting at position 668 of SEQ ID NO: 1882711
ggauucucacugcauauca

SEQ ID NO: 2141985 - RNA, 19 nt, Artificial Sequence
  Description of Artificial Sequence: Synthetic oligonucleotide
  Antisense strand to SEQ ID NO: 2141984
ugauaugcagugagaaucc

SEQ ID NO: 2141986 - RNA, 19 nt, Artificial Sequence
  Description of Artificial Sequence: Synthetic oligonucleotide
  Sense strand starting at position 904 of SEQ ID NO: 1882711
ggcagagugaaagguauaa

SEQ ID NO: 2141987 - RNA, 19 nt, Artificial Sequence
  Description of Artificial Sequence: Synthetic oligonucleotide
  Antisense strand to SEQ ID NO: 2141986
uuauaccuuucacucugcc

SEQ ID NO: 2141988 - RNA, 19 nt, Artificial Sequence
  Description of Artificial Sequence: Synthetic oligonucleotide
  Sense strand starting at position 1068 of SEQ ID NO: 1882711
agagcaacaucguuuagag

SEQ ID NO: 2141989 - RNA, 19 nt, Artificial Sequence
  Description of Artificial Sequence: Synthetic oligonucleotide
  Antisense strand to SEQ ID NO: 2141988
cucuaaacgauguugcucu

SEQ ID NO: 2141990 - RNA, 19 nt, Artificial Sequence
  Description of Artificial Sequence: Synthetic oligonucleotide
  Sense strand starting at position 1070 of SEQ ID NO: 1882711
agcaacaucguuuagagau

SEQ ID NO: 2141991 - RNA, 19 nt, Artificial Sequence
  Description of Artificial Sequence: Synthetic oligonucleotide
  Antisense strand to SEQ ID NO: 2141990
aucucuaaacgauguugcu

SEQ ID NO: 2141992 - RNA, 19 nt, Artificial Sequence
  Description of Artificial Sequence: Synthetic oligonucleotide
  Sense strand starting at position 1077 of SEQ ID NO: 1882711
ucguuuagagauugucauu

SEQ ID NO: 2141993 - RNA, 19 nt, Artificial Sequence
  Description of Artificial Sequence: Synthetic oligonucleotide
  Antisense strand to SEQ ID NO: 2141992
aaugacaaucucuaaacga

SEQ ID NO: 2141994 - RNA, 19 nt, Artificial Sequence
  Description of Artificial Sequence: Synthetic oligonucleotide
  Sense strand starting at position 1229 of SEQ ID NO: 1882711
ugcugugucccagauacug

SEQ ID NO: 2141995 - RNA, 19 nt, Artificial Sequence
  Description of Artificial Sequence: Synthetic oligonucleotide
  Antisense strand to SEQ ID NO: 2141994
caguaucugggacacagca

SEQ ID NO: 2141996 - RNA, 19 nt, Artificial Sequence
  Description of Artificial Sequence: Synthetic oligonucleotide
  Sense strand starting at position 1265 of SEQ ID NO: 1882711
agucaaacauagucaauga

SEQ ID NO: 2141997 - RNA, 19 nt, Artificial Sequence
  Description of Artificial Sequence: Synthetic oligonucleotide
  Antisense strand to SEQ ID NO: 2141996
ucauugacuauguuugacu

SEQ ID NO: 2141998 - RNA, 19 nt, Artificial Sequence
  Description of Artificial Sequence: Synthetic oligonucleotide
  Sense strand starting at position 1419 of SEQ ID NO: 1882711
gcaggaagauccuccauua

SEQ ID NO: 2141999 - RNA, 19 nt, Artificial Sequence
  Description of Artificial Sequence: Synthetic oligonucleotide
  Antisense strand to SEQ ID NO: 2141998
uaauggaggaucuuccugc

SEQ ID NO: 2142000 - RNA, 19 nt, Artificial Sequence
  Description of Artificial Sequence: Synthetic oligonucleotide
  Sense strand starting at position 1486 of SEQ ID NO: 1882711
cuuguugcuccagacacau

SEQ ID NO: 2142001 - RNA, 19 nt, Artificial Sequence
  Description of Artificial Sequence: Synthetic oligonucleotide
  Antisense strand to SEQ ID NO: 2142000
augugucuggagcaacaag

SEQ ID NO: 2142002 - RNA, 19 nt, Artificial Sequence
  Description of Artificial Sequence: Synthetic oligonucleotide
  Sense strand starting at position 1608 of SEQ ID NO: 1882711
uagucaucuuuacuucgga

SEQ ID NO: 2142003 - RNA, 19 nt, Artificial Sequence
  Description of Artificial Sequence: Synthetic oligonucleotide
  Antisense strand to SEQ ID NO: 2142002
uccgaaguaaagaugacua

SEQ ID NO: 2142004 - RNA, 19 nt, Artificial Sequence
  Description of Artificial Sequence: Synthetic oligonucleotide
  Sense strand starting at position 1844 of SEQ ID NO: 1882711
uggcgcuugcugggauuua

SEQ ID NO: 2142005 - RNA, 19 nt, Artificial Sequence
  Description of Artificial Sequence: Synthetic oligonucleotide
  Antisense strand to SEQ ID NO: 2142004
uaaaucccagcaagcgcca

SEQ ID NO: 2142006 - RNA, 19 nt, Artificial Sequence
  Description of Artificial Sequence: Synthetic oligonucleotide
  Sense strand starting at position 1868 of SEQ ID NO: 1882711
gcuggaagcacagacuuua

SEQ ID NO: 2142007 - RNA, 19 nt, Artificial Sequence
  Description of Artificial Sequence: Synthetic oligonucleotide
  Antisense strand to SEQ ID NO: 2142006
uaaagucugugcuuccagc

SEQ ID NO: 2142008 - RNA, 19 nt, Artificial Sequence
  Description of Artificial Sequence: Synthetic oligonucleotide
  Sense strand starting at position 1879 of SEQ ID NO: 1882711
agacuuuaucuguagggcu

SEQ ID NO: 2142009 - RNA, 19 nt, Artificial Sequence
  Description of Artificial Sequence: Synthetic oligonucleotide
  Antisense strand to SEQ ID NO: 2142008
agcccuacagauaaagucu

SEQ ID NO: 2142010 - RNA, 19 nt, Artificial Sequence
  Description of Artificial Sequence: Synthetic oligonucleotide
  Sense strand starting at position 2057 of SEQ ID NO: 1882711
gcauaucucuuucccagga

SEQ ID NO: 2142011 - RNA, 19 nt, Artificial Sequence
  Description of Artificial Sequence: Synthetic oligonucleotide
  Antisense strand to SEQ ID NO: 2142010
uccugggaaagagauaugc

SEQ ID NO: 2142012 - RNA, 19 nt, Artificial Sequence
  Description of Artificial Sequence: Synthetic oligonucleotide
  Sense strand starting at position 2132 of SEQ ID NO: 1882711
auagaugugccagggaauu

SEQ ID NO: 2142013 - RNA, 19 nt, Artificial Sequence
  Description of Artificial Sequence: Synthetic oligonucleotide
  Antisense strand to SEQ ID NO: 2142012
aauucccuggcacaucuau

SEQ ID NO: 2142014 - RNA, 19 nt, Artificial Sequence
  Description of Artificial Sequence: Synthetic oligonucleotide
  Sense strand starting at position 2134 of SEQ ID NO: 1882711
agaugugccagggaauucu

SEQ ID NO: 2142015 - RNA, 19 nt, Artificial Sequence
  Description of Artificial Sequence: Synthetic oligonucleotide
  Antisense strand to SEQ ID NO: 2142014
agaauucccuggcacaucu

SEQ ID NO: 2142016 - RNA, 19 nt, Artificial Sequence
  Description of Artificial Sequence: Synthetic oligonucleotide
  Sense strand starting at position 2206 of SEQ ID NO: 1882711
ccagaauaucacuguaagg

SEQ ID NO: 2142017 - RNA, 19 nt, Artificial Sequence
  Description of Artificial Sequence: Synthetic oligonucleotide
  Antisense strand to SEQ ID NO: 2142016
ccuuacagugauauucugg

SEQ ID NO: 2142018 - RNA, 19 nt, Artificial Sequence
  Description of Artificial Sequence: Synthetic oligonucleotide
  Sense strand starting at position 2451 of SEQ ID NO: 1882711
uguugaaagucagcaucau

SEQ ID NO: 2142019 - RNA, 19 nt, Artificial Sequence
  Description of Artificial Sequence: Synthetic oligonucleotide
  Antisense strand to SEQ ID NO: 2142018
augaugcugacuuucaaca

SEQ ID NO: 2142020 - RNA, 19 nt, Artificial Sequence
  Description of Artificial Sequence: Synthetic oligonucleotide
  Sense strand starting at position 2452 of SEQ ID NO: 1882711
guugaaagucagcaucauu

SEQ ID NO: 2142021 - RNA, 19 nt, Artificial Sequence
  Description of Artificial Sequence: Synthetic oligonucleotide
  Antisense strand to SEQ ID NO: 2142020
aaugaugcugacuuucaac

SEQ ID NO: 2142022 - RNA, 19 nt, Artificial Sequence
  Description of Artificial Sequence: Synthetic oligonucleotide
  Sense strand starting at position 2625 of SEQ ID NO: 1882711
gaugguauaguauguccua

SEQ ID NO: 2142023 - RNA, 19 nt, Artificial Sequence
  Description of Artificial Sequence: Synthetic oligonucleotide
  Antisense strand to SEQ ID NO: 2142022
uaggacauacuauaccauc

SEQ ID NO: 2142024 - RNA, 19 nt, Artificial Sequence
  Description of Artificial Sequence: Synthetic oligonucleotide
  Sense strand starting at position 2626 of SEQ ID NO: 1882711
augguauaguauguccuaa

SEQ ID NO: 2142025 - RNA, 19 nt, Artificial Sequence
  Description of Artificial Sequence: Synthetic oligonucleotide
  Antisense strand to SEQ ID NO: 2142024
uuaggacauacuauaccau

SEQ ID NO: 2142026 - RNA, 19 nt, Artificial Sequence
  Description of Artificial Sequence: Synthetic oligonucleotide
  Sense strand starting at position 2628 of SEQ ID NO: 1882711
gguauaguauguccuaaga

SEQ ID NO: 2142027 - RNA, 19 nt, Artificial Sequence
  Description of Artificial Sequence: Synthetic oligonucleotide
  Antisense strand to SEQ ID NO: 2142026
ucuuaggacauacuauacc

SEQ ID NO: 2142028 - RNA, 19 nt, Artificial Sequence
  Description of Artificial Sequence: Synthetic oligonucleotide
  Sense strand starting at position 2909 of SEQ ID NO: 1882711
uuuguaaagaccgaaguuu

SEQ ID NO: 2142029 - RNA, 19 nt, Artificial Sequence
  Description of Artificial Sequence: Synthetic oligonucleotide
  Antisense strand to SEQ ID NO: 2142028
aaacuucggucuuuacaaa

SEQ ID NO: 2142030 - RNA, 19 nt, Artificial Sequence
  Description of Artificial Sequence: Synthetic oligonucleotide
  Sense strand starting at position 3070 of SEQ ID NO: 1882711
acugguauuugaugauaca

SEQ ID NO: 2142031 - RNA, 19 nt, Artificial Sequence
  Description of Artificial Sequence: Synthetic oligonucleotide
  Antisense strand to SEQ ID NO: 2142030
uguaucaucaaauaccagu

SEQ ID NO: 2142032 - RNA, 19 nt, Artificial Sequence
  Description of Artificial Sequence: Synthetic oligonucleotide
  Sense strand starting at position 3073 of SEQ ID NO: 1882711
gguauuugaugauacaaca

SEQ ID NO: 2142033 - RNA, 19 nt, Artificial Sequence
  Description of Artificial Sequence: Synthetic oligonucleotide
  Antisense strand to SEQ ID NO: 2142032
uguuguaucaucaaauacc

SEQ ID NO: 2142034 - RNA, 19 nt, Artificial Sequence
  Description of Artificial Sequence: Synthetic oligonucleotide
  Sense strand starting at position 3147 of SEQ ID NO: 1882711
agcuaagagaugugaacau

SEQ ID NO: 2142035 - RNA, 19 nt, Artificial Sequence
  Description of Artificial Sequence: Synthetic oligonucleotide
  Antisense strand to SEQ ID NO: 2142034
auguucacaucucuuagcu

SEQ ID NO: 2142036 - RNA, 19 nt, Artificial Sequence
  Description of Artificial Sequence: Synthetic oligonucleotide
  Sense strand starting at position 3313 of SEQ ID NO: 1882711
uuauguagccuuuagaaag

SEQ ID NO: 2142037 - RNA, 19 nt, Artificial Sequence
  Description of Artificial Sequence: Synthetic oligonucleotide
  Antisense strand to SEQ ID NO: 2142036
cuuucuaaaggcuacauaa

SEQ ID NO: 2142038 - RNA, 19 nt, Artificial Sequence
  Description of Artificial Sequence: Synthetic oligonucleotide
  Sense strand starting at position 3362 of SEQ ID NO: 1882711
gggucauuacacugaucuu

SEQ ID NO: 2142039 - RNA, 19 nt, Artificial Sequence
  Description of Artificial Sequence: Synthetic oligonucleotide
  Antisense strand to SEQ ID NO: 2142038
aagaucaguguaaugaccc

SEQ ID NO: 2142040 - RNA, 19 nt, Artificial Sequence
  Description of Artificial Sequence: Synthetic oligonucleotide
  Sense strand starting at position 3427 of SEQ ID NO: 1882711
ggcaaaguguuguuugaug

SEQ ID NO: 2142041 - RNA, 19 nt, Artificial Sequence
  Description of Artificial Sequence: Synthetic oligonucleotide
  Antisense strand to SEQ ID NO: 2142040
caucaaacaacacuuugcc

SEQ ID NO: 2142042 - RNA, 19 nt, Artificial Sequence
  Description of Artificial Sequence: Synthetic oligonucleotide
  Sense strand starting at position 3429 of SEQ ID NO: 1882711
caaaguguuguuugaugag

SEQ ID NO: 2142043 - RNA, 19 nt, Artificial Sequence
  Description of Artificial Sequence: Synthetic oligonucleotide
  Antisense strand to SEQ ID NO: 2142042
cucaucaaacaacacuuug

SEQ ID NO: 2142044 - RNA, 19 nt, Artificial Sequence
  Description of Artificial Sequence: Synthetic oligonucleotide
  Sense strand starting at position 3438 of SEQ ID NO: 1882711
guuugaugagauuguggug

SEQ ID NO: 2142045 - RNA, 19 nt, Artificial Sequence
  Description of Artificial Sequence: Synthetic oligonucleotide
  Antisense strand to SEQ ID NO: 2142044
caccacaaucucaucaaac

SEQ ID NO: 2142046 - RNA, 19 nt, Artificial Sequence
  Description of Artificial Sequence: Synthetic oligonucleotide
  Sense strand starting at position 3470 of SEQ ID NO: 1882711
gugugacugccacaaaugu

SEQ ID NO: 2142047 - RNA, 19 nt, Artificial Sequence
  Description of Artificial Sequence: Synthetic oligonucleotide
  Antisense strand to SEQ ID NO: 2142046
acauuuguggcagucacac

SEQ ID NO: 2142048 - RNA, 19 nt, Artificial Sequence
  Description of Artificial Sequence: Synthetic oligonucleotide
  Sense strand starting at position 3478 of SEQ ID NO: 1882711
gccacaaauguguauacaa

SEQ ID NO: 2142049 - RNA, 19 nt, Artificial Sequence
  Description of Artificial Sequence: Synthetic oligonucleotide
  Antisense strand to SEQ ID NO: 2142048
uuguauacacauuuguggc

SEQ ID NO: 2142050 - RNA, 19 nt, Artificial Sequence
  Description of Artificial Sequence: Synthetic oligonucleotide
  Sense strand starting at position 3554 of SEQ ID NO: 1882711
acauguggguuucccaaga

SEQ ID NO: 2142051 - RNA, 19 nt, Artificial Sequence
  Description of Artificial Sequence: Synthetic oligonucleotide
  Antisense strand to SEQ ID NO: 2142050
ucuugggaaacccacaugu

SEQ ID NO: 2142052 - RNA, 19 nt, Artificial Sequence
  Description of Artificial Sequence: Synthetic oligonucleotide
  Sense strand starting at position 3959 of SEQ ID NO: 1882711
acuuaagggucuccucaau

SEQ ID NO: 2142053 - RNA, 19 nt, Artificial Sequence
  Description of Artificial Sequence: Synthetic oligonucleotide
  Antisense strand to SEQ ID NO: 2142052
auugaggagacccuuaagu

SEQ ID NO: 2142054 - RNA, 19 nt, Artificial Sequence
  Description of Artificial Sequence: Synthetic oligonucleotide
  Sense strand starting at position 3975 of SEQ ID NO: 1882711
aaucuaagucccgaggcuu

SEQ ID NO: 2142055 - RNA, 19 nt, Artificial Sequence
  Description of Artificial Sequence: Synthetic oligonucleotide
  Antisense strand to SEQ ID NO: 2142054
aagccucgggacuuagauu

SEQ ID NO: 2142056 - RNA, 19 nt, Artificial Sequence
  Description of Artificial Sequence: Synthetic oligonucleotide
  Sense strand starting at position 397 of SEQ ID NO: 1882712
gugaguuaacaauaacuuu

SEQ ID NO: 2142057 - RNA, 19 nt, Artificial Sequence
  Description of Artificial Sequence: Synthetic oligonucleotide
  Antisense strand to SEQ ID NO: 2142056
aaaguuauuguuaacucac

SEQ ID NO: 2142058 - RNA, 19 nt, Artificial Sequence
  Description of Artificial Sequence: Synthetic oligonucleotide
  Sense strand starting at position 591 of SEQ ID NO: 1882712
auuccaagucuguaucaga

SEQ ID NO: 2142059 - RNA, 19 nt, Artificial Sequence
  Description of Artificial Sequence: Synthetic oligonucleotide
  Antisense strand to SEQ ID NO: 2142058
ucugauacagacuuggaau

SEQ ID NO: 2142060 - RNA, 19 nt, Artificial Sequence
  Description of Artificial Sequence: Synthetic oligonucleotide
  Sense strand starting at position 604 of SEQ ID NO: 1882712
aucagagcagucugaauua

SEQ ID NO: 2142061 - RNA, 19 nt, Artificial Sequence
  Description of Artificial Sequence: Synthetic oligonucleotide
  Antisense strand to SEQ ID NO: 2142060
uaauucagacugcucugau

SEQ ID NO: 2142062 - RNA, 19 nt, Artificial Sequence
  Description of Artificial Sequence: Synthetic oligonucleotide
  Sense strand starting at position 985 of SEQ ID NO: 1882712
guuaauuguaaguaaugga

SEQ ID NO: 2142063 - RNA, 19 nt, Artificial Sequence
  Description of Artificial Sequence: Synthetic oligonucleotide
  Antisense strand to SEQ ID NO: 2142062
uccauuacuuacaauuaac

SEQ ID NO: 2142064 - RNA, 19 nt, Artificial Sequence
  Description of Artificial Sequence: Synthetic oligonucleotide
  Sense strand starting at position 1114 of SEQ ID NO: 1882712
ugcaguaggagucauagca

SEQ ID NO: 2142065 - RNA, 19 nt, Artificial Sequence
  Description of Artificial Sequence: Synthetic oligonucleotide
  Antisense strand to SEQ ID NO: 2142064
ugcuaugacuccuacugca

SEQ ID NO: 2142066 - RNA, 19 nt, Artificial Sequence
  Description of Artificial Sequence: Synthetic oligonucleotide
  Sense strand starting at position 1275 of SEQ ID NO: 1882712
guggaucuccauuagcaca

SEQ ID NO: 2142067 - RNA, 19 nt, Artificial Sequence
  Description of Artificial Sequence: Synthetic oligonucleotide
  Antisense strand to SEQ ID NO: 2142066
ugugcuaauggagauccac

SEQ ID NO: 2142068 - RNA, 19 nt, Artificial Sequence
  Description of Artificial Sequence: Synthetic oligonucleotide
  Sense strand starting at position 1337 of SEQ ID NO: 1882712
guuagagacugcuccaaag

SEQ ID NO: 2142069 - RNA, 19 nt, Artificial Sequence
  Description of Artificial Sequence: Synthetic oligonucleotide
  Antisense strand to SEQ ID NO: 2142068
cuuuggagcagucucuaac

SEQ ID NO: 2142070 - RNA, 19 nt, Artificial Sequence
  Description of Artificial Sequence: Synthetic oligonucleotide
  Sense strand starting at position 1415 of SEQ ID NO: 1882712
agaucaggguccuuguuaa

SEQ ID NO: 2142071 - RNA, 19 nt, Artificial Sequence
  Description of Artificial Sequence: Synthetic oligonucleotide
  Antisense strand to SEQ ID NO: 2142070
uuaacaaggacccugaucu

SEQ ID NO: 2142072 - RNA, 19 nt, Artificial Sequence
  Description of Artificial Sequence: Synthetic oligonucleotide
  Sense strand starting at position 1427 of SEQ ID NO: 1882712
uuguuaaucuggucaauug

SEQ ID NO: 2142073 - RNA, 19 nt, Artificial Sequence
  Description of Artificial Sequence: Synthetic oligonucleotide
  Antisense strand to SEQ ID NO: 2142072
caauugaccagauuaacaa

SEQ ID NO: 2142074 - RNA, 19 nt, Artificial Sequence
  Description of Artificial Sequence: Synthetic oligonucleotide
  Sense strand starting at position 1436 of SEQ ID NO: 1882712
uggucaauugcauaaagca

SEQ ID NO: 2142075 - RNA, 19 nt, Artificial Sequence
  Description of Artificial Sequence: Synthetic oligonucleotide
  Antisense strand to SEQ ID NO: 2142074
ugcuuuaugcaauugacca

SEQ ID NO: 2142076 - RNA, 19 nt, Artificial Sequence
  Description of Artificial Sequence: Synthetic oligonucleotide
  Sense strand starting at position 1667 of SEQ ID NO: 1882712
gaucgcuuucccucgcaua

SEQ ID NO: 2142077 - RNA, 19 nt, Artificial Sequence
  Description of Artificial Sequence: Synthetic oligonucleotide
  Antisense strand to SEQ ID NO: 2142076
uaugcgagggaaagcgauc

SEQ ID NO: 2142078 - RNA, 19 nt, Artificial Sequence
  Description of Artificial Sequence: Synthetic oligonucleotide
  Sense strand starting at position 1728 of SEQ ID NO: 1882712
uuauucuugccacagaaga

SEQ ID NO: 2142079 - RNA, 19 nt, Artificial Sequence
  Description of Artificial Sequence: Synthetic oligonucleotide
  Antisense strand to SEQ ID NO: 2142078
ucuucuguggcaagaauaa

SEQ ID NO: 2142080 - RNA, 19 nt, Artificial Sequence
  Description of Artificial Sequence: Synthetic oligonucleotide
  Sense strand starting at position 1834 of SEQ ID NO: 1882712
auuugaaugucacagugaa

SEQ ID NO: 2142081 - RNA, 19 nt, Artificial Sequence
  Description of Artificial Sequence: Synthetic oligonucleotide
  Antisense strand to SEQ ID NO: 2142080
uucacugugacauucaaau

SEQ ID NO: 2142082 - RNA, 19 nt, Artificial Sequence
  Description of Artificial Sequence: Synthetic oligonucleotide
  Sense strand starting at position 1893 of SEQ ID NO: 1882712
agaucaacuugccuggaau

SEQ ID NO: 2142083 - RNA, 19 nt, Artificial Sequence
  Description of Artificial Sequence: Synthetic oligonucleotide
  Antisense strand to SEQ ID NO: 2142082
auuccaggcaaguugaucu

SEQ ID NO: 2142084 - RNA, 19 nt, Artificial Sequence
  Description of Artificial Sequence: Synthetic oligonucleotide
  Sense strand starting at position 1894 of SEQ ID NO: 1882712
gaucaacuugccuggaaug

SEQ ID NO: 2142085 - RNA, 19 nt, Artificial Sequence
  Description of Artificial Sequence: Synthetic oligonucleotide
  Antisense strand to SEQ ID NO: 2142084
cauuccaggcaaguugauc

SEQ ID NO: 2142086 - RNA, 19 nt, Artificial Sequence
  Description of Artificial Sequence: Synthetic oligonucleotide
  Sense strand starting at position 1935 of SEQ ID NO: 1882712
gguucugauguugggauga

SEQ ID NO: 2142087 - RNA, 19 nt, Artificial Sequence
  Description of Artificial Sequence: Synthetic oligonucleotide
  Antisense strand to SEQ ID NO: 2142086
ucaucccaacaucagaacc

SEQ ID NO: 2142088 - RNA, 19 nt, Artificial Sequence
  Description of Artificial Sequence: Synthetic oligonucleotide
  Sense strand starting at position 1980 of SEQ ID NO: 1882712
agccuuguagcagaauuau

SEQ ID NO: 2142089 - RNA, 19 nt, Artificial Sequence
  Description of Artificial Sequence: Synthetic oligonucleotide
  Antisense strand to SEQ ID NO: 2142088
auaauucugcuacaaggcu

SEQ ID NO: 2142090 - RNA, 19 nt, Artificial Sequence
  Description of Artificial Sequence: Synthetic oligonucleotide
  Sense strand starting at position 1989 of SEQ ID NO: 1882712
gcagaauuauuccugggaa

SEQ ID NO: 2142091 - RNA, 19 nt, Artificial Sequence
  Description of Artificial Sequence: Synthetic oligonucleotide
  Antisense strand to SEQ ID NO: 2142090
uucccaggaauaauucugc

SEQ ID NO: 2142092 - RNA, 19 nt, Artificial Sequence
  Description of Artificial Sequence: Synthetic oligonucleotide
  Sense strand starting at position 2157 of SEQ ID NO: 1882712
gcaucuaaacagggagauu

SEQ ID NO: 2142093 - RNA, 19 nt, Artificial Sequence
  Description of Artificial Sequence: Synthetic oligonucleotide
  Antisense strand to SEQ ID NO: 2142092
aaucucccuguuuagaugc

SEQ ID NO: 2142094 - RNA, 19 nt, Artificial Sequence
  Description of Artificial Sequence: Synthetic oligonucleotide
  Sense strand starting at position 2218 of SEQ ID NO: 1882712
guagguugauucucccaaa

SEQ ID NO: 2142095 - RNA, 19 nt, Artificial Sequence
  Description of Artificial Sequence: Synthetic oligonucleotide
  Antisense strand to SEQ ID NO: 2142094
uuugggagaaucaaccuac

SEQ ID NO: 2142096 - RNA, 19 nt, Artificial Sequence
  Description of Artificial Sequence: Synthetic oligonucleotide
  Sense strand starting at position 2682 of SEQ ID NO: 1882712
uugucaggguuuccaauua

SEQ ID NO: 2142097 - RNA, 19 nt, Artificial Sequence
  Description of Artificial Sequence: Synthetic oligonucleotide
  Antisense strand to SEQ ID NO: 2142096
uaauuggaaacccugacaa

SEQ ID NO: 2142098 - RNA, 19 nt, Artificial Sequence
  Description of Artificial Sequence: Synthetic oligonucleotide
  Sense strand starting at position 2694 of SEQ ID NO: 1882712
ccaauuaauuugucggugu

SEQ ID NO: 2142099 - RNA, 19 nt, Artificial Sequence
  Description of Artificial Sequence: Synthetic oligonucleotide
  Antisense strand to SEQ ID NO: 2142098
acaccgacaaauuaauugg

SEQ ID NO: 2142100 - RNA, 19 nt, Artificial Sequence
  Description of Artificial Sequence: Synthetic oligonucleotide
  Sense strand starting at position 2698 of SEQ ID NO: 1882712
uuaauuugucgguguggga

SEQ ID NO: 2142101 - RNA, 19 nt, Artificial Sequence
  Description of Artificial Sequence: Synthetic oligonucleotide
  Antisense strand to SEQ ID NO: 2142100
ucccacaccgacaaauuaa

SEQ ID NO: 2142102 - RNA, 19 nt, Artificial Sequence
  Description of Artificial Sequence: Synthetic oligonucleotide
  Sense strand starting at position 2711 of SEQ ID NO: 1882712
gugggagcaauggguauau

SEQ ID NO: 2142103 - RNA, 19 nt, Artificial Sequence
  Description of Artificial Sequence: Synthetic oligonucleotide
  Antisense strand to SEQ ID NO: 2142102
auauacccauugcucccac

SEQ ID NO: 2142104 - RNA, 19 nt, Artificial Sequence
  Description of Artificial Sequence: Synthetic oligonucleotide
  Sense strand starting at position 2741 of SEQ ID NO: 1882712
agggaaacaugccuugauc

SEQ ID NO: 2142105 - RNA, 19 nt, Artificial Sequence
  Description of Artificial Sequence: Synthetic oligonucleotide
  Antisense strand to SEQ ID NO: 2142104
gaucaaggcauguuucccu

SEQ ID NO: 2142106 - RNA, 19 nt, Artificial Sequence
  Description of Artificial Sequence: Synthetic oligonucleotide
  Sense strand starting at position 2760 of SEQ ID NO: 1882712
ccagaaucacuaggagcaa

SEQ ID NO: 2142107 - RNA, 19 nt, Artificial Sequence
  Description of Artificial Sequence: Synthetic oligonucleotide
  Antisense strand to SEQ ID NO: 2142106
uugcuccuagugauucugg

SEQ ID NO: 2142108 - RNA, 19 nt, Artificial Sequence
  Description of Artificial Sequence: Synthetic oligonucleotide
  Sense strand starting at position 2917 of SEQ ID NO: 1882712
acccuuaauuccguaagau

SEQ ID NO: 2142109 - RNA, 19 nt, Artificial Sequence
  Description of Artificial Sequence: Synthetic oligonucleotide
  Antisense strand to SEQ ID NO: 2142108
aucuuacggaauuaagggu

SEQ ID NO: 2142110 - RNA, 19 nt, Artificial Sequence
  Description of Artificial Sequence: Synthetic oligonucleotide
  Sense strand starting at position 2918 of SEQ ID NO: 1882712
cccuuaauuccguaagauu

SEQ ID NO: 2142111 - RNA, 19 nt, Artificial Sequence
  Description of Artificial Sequence: Synthetic oligonucleotide
  Antisense strand to SEQ ID NO: 2142110
aaucuuacggaauuaaggg

SEQ ID NO: 2142112 - RNA, 19 nt, Artificial Sequence
  Description of Artificial Sequence: Synthetic oligonucleotide
  Sense strand starting at position 2990 of SEQ ID NO: 1882712
cagggaaucugagauuugu

SEQ ID NO: 2142113 - RNA, 19 nt, Artificial Sequence
  Description of Artificial Sequence: Synthetic oligonucleotide
  Antisense strand to SEQ ID NO: 2142112
acaaaucucagauucccug

SEQ ID NO: 2142114 - RNA, 19 nt, Artificial Sequence
  Description of Artificial Sequence: Synthetic oligonucleotide
  Sense strand starting at position 3054 of SEQ ID NO: 1882712
caggaugguuaaucuaaug

SEQ ID NO: 2142115 - RNA, 19 nt, Artificial Sequence
  Description of Artificial Sequence: Synthetic oligonucleotide
  Antisense strand to SEQ ID NO: 2142114
cauuagauuaaccauccug

SEQ ID NO: 2142116 - RNA, 19 nt, Artificial Sequence
  Description of Artificial Sequence: Synthetic oligonucleotide
  Sense strand starting at position 3097 of SEQ ID NO: 1882712
ggguuugaaaccugaaauu

SEQ ID NO: 2142117 - RNA, 19 nt, Artificial Sequence
  Description of Artificial Sequence: Synthetic oligonucleotide
  Antisense strand to SEQ ID NO: 2142116
aauuucagguuucaaaccc

SEQ ID NO: 2142118 - RNA, 19 nt, Artificial Sequence
  Description of Artificial Sequence: Synthetic oligonucleotide
  Sense strand starting at position 3106 of SEQ ID NO: 1882712
accugaaauuuggacaguu

SEQ ID NO: 2142119 - RNA, 19 nt, Artificial Sequence
  Description of Artificial Sequence: Synthetic oligonucleotide
  Antisense strand to SEQ ID NO: 2142118
aacuguccaaauuucaggu

SEQ ID NO: 2142120 - RNA, 19 nt, Artificial Sequence
  Description of Artificial Sequence: Synthetic oligonucleotide
  Sense strand starting at position 3119 of SEQ ID NO: 1882712
acaguucuccuguacccua

SEQ ID NO: 2142121 - RNA, 19 nt, Artificial Sequence
  Description of Artificial Sequence: Synthetic oligonucleotide
  Antisense strand to SEQ ID NO: 2142120
uaggguacaggagaacugu

SEQ ID NO: 2142122 - RNA, 19 nt, Artificial Sequence
  Description of Artificial Sequence: Synthetic oligonucleotide
  Sense strand starting at position 3291 of SEQ ID NO: 1882712
uuugcacuugcagauuaga

SEQ ID NO: 2142123 - RNA, 19 nt, Artificial Sequence
  Description of Artificial Sequence: Synthetic oligonucleotide
  Antisense strand to SEQ ID NO: 2142122
ucuaaucugcaagugcaaa

SEQ ID NO: 2142124 - RNA, 19 nt, Artificial Sequence
  Description of Artificial Sequence: Synthetic oligonucleotide
  Sense strand starting at position 3449 of SEQ ID NO: 1882712
uuagauuuccucugugcug

SEQ ID NO: 2142125 - RNA, 19 nt, Artificial Sequence
  Description of Artificial Sequence: Synthetic oligonucleotide
  Antisense strand to SEQ ID NO: 2142124
cagcacagaggaaaucuaa

SEQ ID NO: 2142126 - RNA, 19 nt, Artificial Sequence
  Description of Artificial Sequence: Synthetic oligonucleotide
  Sense strand starting at position 3684 of SEQ ID NO: 1882712
aaguaagauuguguuuaac

SEQ ID NO: 2142127 - RNA, 19 nt, Artificial Sequence
  Description of Artificial Sequence: Synthetic oligonucleotide
  Antisense strand to SEQ ID NO: 2142126
guuaaacacaaucuuacuu

SEQ ID NO: 2142128 - RNA, 19 nt, Artificial Sequence
  Description of Artificial Sequence: Synthetic oligonucleotide
  Sense strand starting at position 3686 of SEQ ID NO: 1882712
guaagauuguguuuaacag

SEQ ID NO: 2142129 - RNA, 19 nt, Artificial Sequence
  Description of Artificial Sequence: Synthetic oligonucleotide
  Antisense strand to SEQ ID NO: 2142128
cuguuaaacacaaucuuac

SEQ ID NO: 2142130 - RNA, 19 nt, Artificial Sequence
  Description of Artificial Sequence: Synthetic oligonucleotide
  Sense strand starting at position 3687 of SEQ ID NO: 1882712
uaagauuguguuuaacagu

SEQ ID NO: 2142131 - RNA, 19 nt, Artificial Sequence
  Description of Artificial Sequence: Synthetic oligonucleotide
  Antisense strand to SEQ ID NO: 2142130
acuguuaaacacaaucuua

SEQ ID NO: 2142132 - RNA, 19 nt, Artificial Sequence
  Description of Artificial Sequence: Synthetic oligonucleotide
  Sense strand starting at position 3749 of SEQ ID NO: 1882712
ucugaucacuaguugagaa

SEQ ID NO: 2142133 - RNA, 19 nt, Artificial Sequence
  Description of Artificial Sequence: Synthetic oligonucleotide
  Antisense strand to SEQ ID NO: 2142132
uucucaacuagugaucaga

SEQ ID NO: 2142134 - RNA, 19 nt, Artificial Sequence
  Description of Artificial Sequence: Synthetic oligonucleotide
  Sense strand starting at position 3761 of SEQ ID NO: 1882712
uugagaauuugagaccaau

SEQ ID NO: 2142135 - RNA, 19 nt, Artificial Sequence
  Description of Artificial Sequence: Synthetic oligonucleotide
  Antisense strand to SEQ ID NO: 2142134
auuggucucaaauucucaa

SEQ ID NO: 2142136 - RNA, 19 nt, Artificial Sequence
  Description of Artificial Sequence: Synthetic oligonucleotide
  Sense strand starting at position 45 of SEQ ID NO: 1882713
aggaucugaaggugucaau

SEQ ID NO: 2142137 - RNA, 19 nt, Artificial Sequence
  Description of Artificial Sequence: Synthetic oligonucleotide
  Antisense strand to SEQ ID NO: 2142136
auugacaccuucagauccu

SEQ ID NO: 2142138 - RNA, 19 nt, Artificial Sequence
  Description of Artificial Sequence: Synthetic oligonucleotide
  Sense strand starting at position 2501 of SEQ ID NO: 1882713
gggaguuccuagcaagaga

SEQ ID NO: 2142139 - RNA, 19 nt, Artificial Sequence
  Description of Artificial Sequence: Synthetic oligonucleotide
  Antisense strand to SEQ ID NO: 2142138
ucucuugcuaggaacuccc

SEQ ID NO: 2142140 - RNA, 19 nt, Artificial Sequence
  Description of Artificial Sequence: Synthetic oligonucleotide
  Sense strand starting at position 408 of SEQ ID NO: 1882714
cagauaacaggcuggaauu

SEQ ID NO: 2142141 - RNA, 19 nt, Artificial Sequence
  Description of Artificial Sequence: Synthetic oligonucleotide
  Antisense strand to SEQ ID NO: 2142140
aauuccagccuguuaucug

SEQ ID NO: 2142142 - RNA, 19 nt, Artificial Sequence
  Description of Artificial Sequence: Synthetic oligonucleotide
  Sense strand starting at position 440 of SEQ ID NO: 1882714
ccuagagcucagugccaaa

SEQ ID NO: 2142143 - RNA, 19 nt, Artificial Sequence
  Description of Artificial Sequence: Synthetic oligonucleotide
  Antisense strand to SEQ ID NO: 2142142
uuuggcacugagcucuagg

SEQ ID NO: 2142144 - RNA, 19 nt, Artificial Sequence
  Description of Artificial Sequence: Synthetic oligonucleotide
  Sense strand starting at position 599 of SEQ ID NO: 1882714
gucacaauggugggcaaau

SEQ ID NO: 2142145 - RNA, 19 nt, Artificial Sequence
  Description of Artificial Sequence: Synthetic oligonucleotide
  Antisense strand to SEQ ID NO: 2142144
auuugcccaccauugugac

SEQ ID NO: 2142146 - RNA, 19 nt, Artificial Sequence
  Description of Artificial Sequence: Synthetic oligonucleotide
  Sense strand starting at position 661 of SEQ ID NO: 1882714
ggcucaggcuccuuaaaca

SEQ ID NO: 2142147 - RNA, 19 nt, Artificial Sequence
  Description of Artificial Sequence: Synthetic oligonucleotide
  Antisense strand to SEQ ID NO: 2142146
uguuuaaggagccugagcc

SEQ ID NO: 2142148 - RNA, 19 nt, Artificial Sequence
  Description of Artificial Sequence: Synthetic oligonucleotide
  Sense strand starting at position 1610 of SEQ ID NO: 1882714
caaguuugaucaggccgua

SEQ ID NO: 2142149 - RNA, 19 nt, Artificial Sequence
  Description of Artificial Sequence: Synthetic oligonucleotide
  Antisense strand to SEQ ID NO: 2142148
uacggccugaucaaacuug

SEQ ID NO: 2142150 - RNA, 19 nt, Artificial Sequence
  Description of Artificial Sequence: Synthetic oligonucleotide
  Sense strand starting at position 2494 of SEQ ID NO: 1882714
gggaguucguagcaagaga

SEQ ID NO: 2142151 - RNA, 19 nt, Artificial Sequence
  Description of Artificial Sequence: Synthetic oligonucleotide
  Antisense strand to SEQ ID NO: 2142150
ucucuugcuacgaacuccc

SEQ ID NO: 2142152 - RNA, 19 nt, Artificial Sequence
  Description of Artificial Sequence: Synthetic oligonucleotide
  Sense strand starting at position 2608 of SEQ ID NO: 1882714
uggcuuuguugcagcggaa

SEQ ID NO: 2142153 - RNA, 19 nt, Artificial Sequence
  Description of Artificial Sequence: Synthetic oligonucleotide
  Antisense strand to SEQ ID NO: 2142152
uuccgcugcaacaaagcca

SEQ ID NO: 2142154 - RNA, 19 nt, Artificial Sequence
  Description of Artificial Sequence: Synthetic oligonucleotide
  Sense strand starting at position 2658 of SEQ ID NO: 1882714
aggcauagucaccaggagu

SEQ ID NO: 2142155 - RNA, 19 nt, Artificial Sequence
  Description of Artificial Sequence: Synthetic oligonucleotide
  Antisense strand to SEQ ID NO: 2142154
acuccuggugacuaugccu

SEQ ID NO: 2142156 - RNA, 19 nt, Artificial Sequence
  Description of Artificial Sequence: Synthetic oligonucleotide
  Sense strand starting at position 2684 of SEQ ID NO: 1882714
ggagggucaugugugcaga

SEQ ID NO: 2142157 - RNA, 19 nt, Artificial Sequence
  Description of Artificial Sequence: Synthetic oligonucleotide
  Antisense strand to SEQ ID NO: 2142156
ucugcacacaugacccucc

SEQ ID NO: 2142158 - RNA, 19 nt, Artificial Sequence
  Description of Artificial Sequence: Synthetic oligonucleotide
  Sense strand starting at position 2687 of SEQ ID NO: 1882714
gggucaugugugcagagcu

SEQ ID NO: 2142159 - RNA, 19 nt, Artificial Sequence
  Description of Artificial Sequence: Synthetic oligonucleotide
  Antisense strand to SEQ ID NO: 2142158
agcucugcacacaugaccc

SEQ ID NO: 2142160 - RNA, 19 nt, Artificial Sequence
  Description of Artificial Sequence: Synthetic oligonucleotide
  Sense strand starting at position 2714 of SEQ ID NO: 1882714
ggccauuuaucccacugga

SEQ ID NO: 2142161 - RNA, 19 nt, Artificial Sequence
  Description of Artificial Sequence: Synthetic oligonucleotide
  Antisense strand to SEQ ID NO: 2142160
uccagugggauaaauggcc

SEQ ID NO: 2142162 - RNA, 19 nt, Artificial Sequence
  Description of Artificial Sequence: Synthetic oligonucleotide
  Sense strand starting at position 2771 of SEQ ID NO: 1882714
aaauguaaagugcgucuga

SEQ ID NO: 2142163 - RNA, 19 nt, Artificial Sequence
  Description of Artificial Sequence: Synthetic oligonucleotide
  Antisense strand to SEQ ID NO: 2142162
ucagacgcacuuuacauuu

SEQ ID NO: 2142164 - RNA, 19 nt, Artificial Sequence
  Description of Artificial Sequence: Synthetic oligonucleotide
  Sense strand starting at position 2855 of SEQ ID NO: 1882714
uuugaaauguucuggguua

SEQ ID NO: 2142165 - RNA, 19 nt, Artificial Sequence
  Description of Artificial Sequence: Synthetic oligonucleotide
  Antisense strand to SEQ ID NO: 2142164
uaacccagaacauuucaaa

SEQ ID NO: 2142166 - RNA, 19 nt, Artificial Sequence
  Description of Artificial Sequence: Synthetic oligonucleotide
  Sense strand starting at position 2856 of SEQ ID NO: 1882714
uugaaauguucuggguuaa

SEQ ID NO: 2142167 - RNA, 19 nt, Artificial Sequence
  Description of Artificial Sequence: Synthetic oligonucleotide
  Antisense strand to SEQ ID NO: 2142166
uuaacccagaacauuucaa

SEQ ID NO: 2142168 - RNA, 19 nt, Artificial Sequence
  Description of Artificial Sequence: Synthetic oligonucleotide
  Sense strand starting at position 2857 of SEQ ID NO: 1882714
ugaaauguucuggguuaaa

SEQ ID NO: 2142169 - RNA, 19 nt, Artificial Sequence
  Description of Artificial Sequence: Synthetic oligonucleotide
  Antisense strand to SEQ ID NO: 2142168
uuuaacccagaacauuuca

SEQ ID NO: 2142170 - RNA, 19 nt, Artificial Sequence
  Description of Artificial Sequence: Synthetic oligonucleotide
  Sense strand starting at position 2860 of SEQ ID NO: 1882714
aauguucuggguuaaagug

SEQ ID NO: 2142171 - RNA, 19 nt, Artificial Sequence
  Description of Artificial Sequence: Synthetic oligonucleotide
  Antisense strand to SEQ ID NO: 2142170
cacuuuaacccagaacauu

SEQ ID NO: 2142172 - RNA, 19 nt, Artificial Sequence
  Description of Artificial Sequence: Synthetic oligonucleotide
  Sense strand starting at position 2869 of SEQ ID NO: 1882714
gguuaaagugauuggugcu

SEQ ID NO: 2142173 - RNA, 19 nt, Artificial Sequence
  Description of Artificial Sequence: Synthetic oligonucleotide
  Antisense strand to SEQ ID NO: 2142172
agcaccaaucacuuuaacc

SEQ ID NO: 2142174 - RNA, 19 nt, Artificial Sequence
  Description of Artificial Sequence: Synthetic oligonucleotide
  Sense strand starting at position 2870 of SEQ ID NO: 1882714
guuaaagugauuggugcuu

SEQ ID NO: 2142175 - RNA, 19 nt, Artificial Sequence
  Description of Artificial Sequence: Synthetic oligonucleotide
  Antisense strand to SEQ ID NO: 2142174
aagcaccaaucacuuuaac

SEQ ID NO: 2142176 - RNA, 19 nt, Artificial Sequence
  Description of Artificial Sequence: Synthetic oligonucleotide
  Sense strand starting at position 2889 of SEQ ID NO: 1882714
ccaccuuuggcagaguaau

SEQ ID NO: 2142177 - RNA, 19 nt, Artificial Sequence
  Description of Artificial Sequence: Synthetic oligonucleotide
  Antisense strand to SEQ ID NO: 2142176
auuacucugccaaaggugg

SEQ ID NO: 2142178 - RNA, 19 nt, Artificial Sequence
  Description of Artificial Sequence: Synthetic oligonucleotide
  Sense strand starting at position 2915 of SEQ ID NO: 1882714
cgcgaugggugagaucuau

SEQ ID NO: 2142179 - RNA, 19 nt, Artificial Sequence
  Description of Artificial Sequence: Synthetic oligonucleotide
  Antisense strand to SEQ ID NO: 2142178
auagaucucacccaucgcg

SEQ ID NO: 2142180 - RNA, 19 nt, Artificial Sequence
  Description of Artificial Sequence: Synthetic oligonucleotide
  Sense strand starting at position 2923 of SEQ ID NO: 1882714
gugagaucuaucugccagg

SEQ ID NO: 2142181 - RNA, 19 nt, Artificial Sequence
  Description of Artificial Sequence: Synthetic oligonucleotide
  Antisense strand to SEQ ID NO: 2142180
ccuggcagauagaucucac

SEQ ID NO: 2142182 - RNA, 19 nt, Artificial Sequence
  Description of Artificial Sequence: Synthetic oligonucleotide
  Sense strand starting at position 2926 of SEQ ID NO: 1882714
agaucuaucugccagggca

SEQ ID NO: 2142183 - RNA, 19 nt, Artificial Sequence
  Description of Artificial Sequence: Synthetic oligonucleotide
  Antisense strand to SEQ ID NO: 2142182
ugcccuggcagauagaucu

SEQ ID NO: 2142184 - RNA, 19 nt, Artificial Sequence
  Description of Artificial Sequence: Synthetic oligonucleotide
  Sense strand starting at position 3007 of SEQ ID NO: 1882714
cucuguuagguaggaacau

SEQ ID NO: 2142185 - RNA, 19 nt, Artificial Sequence
  Description of Artificial Sequence: Synthetic oligonucleotide
  Antisense strand to SEQ ID NO: 2142184
auguuccuaccuaacagag

SEQ ID NO: 2142186 - RNA, 19 nt, Artificial Sequence
  Description of Artificial Sequence: Synthetic oligonucleotide
  Sense strand starting at position 3008 of SEQ ID NO: 1882714
ucuguuagguaggaacaua

SEQ ID NO: 2142187 - RNA, 19 nt, Artificial Sequence
  Description of Artificial Sequence: Synthetic oligonucleotide
  Antisense strand to SEQ ID NO: 2142186
uauguuccuaccuaacaga

SEQ ID NO: 2142188 - RNA, 19 nt, Artificial Sequence
  Description of Artificial Sequence: Synthetic oligonucleotide
  Sense strand starting at position 3016 of SEQ ID NO: 1882714
guaggaacauacuagguuu

SEQ ID NO: 2142189 - RNA, 19 nt, Artificial Sequence
  Description of Artificial Sequence: Synthetic oligonucleotide
  Antisense strand to SEQ ID NO: 2142188
aaaccuaguauguuccuac

SEQ ID NO: 2142190 - RNA, 19 nt, Artificial Sequence
  Description of Artificial Sequence: Synthetic oligonucleotide
  Sense strand starting at position 3060 of SEQ ID NO: 1882714
gccuguaaucugugguaga

SEQ ID NO: 2142191 - RNA, 19 nt, Artificial Sequence
  Description of Artificial Sequence: Synthetic oligonucleotide
  Antisense strand to SEQ ID NO: 2142190
ucuaccacagauuacaggc

SEQ ID NO: 2142192 - RNA, 19 nt, Artificial Sequence
  Description of Artificial Sequence: Synthetic oligonucleotide
  Sense strand starting at position 3061 of SEQ ID NO: 1882714
ccuguaaucugugguagau

SEQ ID NO: 2142193 - RNA, 19 nt, Artificial Sequence
  Description of Artificial Sequence: Synthetic oligonucleotide
  Antisense strand to SEQ ID NO: 2142192
aucuaccacagauuacagg

SEQ ID NO: 2142194 - RNA, 19 nt, Artificial Sequence
  Description of Artificial Sequence: Synthetic oligonucleotide
  Sense strand starting at position 3063 of SEQ ID NO: 1882714
uguaaucugugguagauag

SEQ ID NO: 2142195 - RNA, 19 nt, Artificial Sequence
  Description of Artificial Sequence: Synthetic oligonucleotide
  Antisense strand to SEQ ID NO: 2142194
cuaucuaccacagauuaca

SEQ ID NO: 2142196 - RNA, 19 nt, Artificial Sequence
  Description of Artificial Sequence: Synthetic oligonucleotide
  Sense strand starting at position 3074 of SEQ ID NO: 1882714
guagauagaucuuagagca

SEQ ID NO: 2142197 - RNA, 19 nt, Artificial Sequence
  Description of Artificial Sequence: Synthetic oligonucleotide
  Antisense strand to SEQ ID NO: 2142196
ugcucuaagaucuaucuac

SEQ ID NO: 2142198 - RNA, 19 nt, Artificial Sequence
  Description of Artificial Sequence: Synthetic oligonucleotide
  Sense strand starting at position 3081 of SEQ ID NO: 1882714
gaucuuagagcaugcauau

SEQ ID NO: 2142199 - RNA, 19 nt, Artificial Sequence
  Description of Artificial Sequence: Synthetic oligonucleotide
  Antisense strand to SEQ ID NO: 2142198
auaugcaugcucuaagauc

SEQ ID NO: 2142200 - RNA, 19 nt, Artificial Sequence
  Description of Artificial Sequence: Synthetic oligonucleotide
  Sense strand starting at position 3274 of SEQ ID NO: 1882714
uacaguuaugccuggcuaa

SEQ ID NO: 2142201 - RNA, 19 nt, Artificial Sequence
  Description of Artificial Sequence: Synthetic oligonucleotide
  Antisense strand to SEQ ID NO: 2142200
uuagccaggcauaacugua

SEQ ID NO: 2142202 - RNA, 19 nt, Artificial Sequence
  Description of Artificial Sequence: Synthetic oligonucleotide
  Sense strand starting at position 3275 of SEQ ID NO: 1882714
acaguuaugccuggcuaau

SEQ ID NO: 2142203 - RNA, 19 nt, Artificial Sequence
  Description of Artificial Sequence: Synthetic oligonucleotide
  Antisense strand to SEQ ID NO: 2142202
auuagccaggcauaacugu

SEQ ID NO: 2142204 - RNA, 19 nt, Artificial Sequence
  Description of Artificial Sequence: Synthetic oligonucleotide
  Sense strand starting at position 3277 of SEQ ID NO: 1882714
aguuaugccuggcuaauuu

SEQ ID NO: 2142205 - RNA, 19 nt, Artificial Sequence
  Description of Artificial Sequence: Synthetic oligonucleotide
  Antisense strand to SEQ ID NO: 2142204
aaauuagccaggcauaacu

SEQ ID NO: 2142206 - RNA, 19 nt, Artificial Sequence
  Description of Artificial Sequence: Synthetic oligonucleotide
  Sense strand starting at position 92 of SEQ ID NO: 1882715
agugaaaccuggucucuag

SEQ ID NO: 2142207 - RNA, 19 nt, Artificial Sequence
  Description of Artificial Sequence: Synthetic oligonucleotide
  Antisense strand to SEQ ID NO: 2142206
cuagagaccagguuucacu

SEQ ID NO: 2142208 - RNA, 19 nt, Artificial Sequence
  Description of Artificial Sequence: Synthetic oligonucleotide
  Sense strand starting at position 300 of SEQ ID NO: 1882715
gcagcaucuaccuggaaga

SEQ ID NO: 2142209 - RNA, 19 nt, Artificial Sequence
  Description of Artificial Sequence: Synthetic oligonucleotide
  Antisense strand to SEQ ID NO: 2142208
ucuuccagguagaugcugc

SEQ ID NO: 2142210 - RNA, 19 nt, Artificial Sequence
  Description of Artificial Sequence: Synthetic oligonucleotide
  Sense strand starting at position 314 of SEQ ID NO: 1882715
gaagaauuguugugggauc

SEQ ID NO: 2142211 - RNA, 19 nt, Artificial Sequence
  Description of Artificial Sequence: Synthetic oligonucleotide
  Antisense strand to SEQ ID NO: 2142210
gaucccacaacaauucuuc

SEQ ID NO: 2142212 - RNA, 19 nt, Artificial Sequence
  Description of Artificial Sequence: Synthetic oligonucleotide
  Sense strand starting at position 315 of SEQ ID NO: 1882715
aagaauuguugugggauca

SEQ ID NO: 2142213 - RNA, 19 nt, Artificial Sequence
  Description of Artificial Sequence: Synthetic oligonucleotide
  Antisense strand to SEQ ID NO: 2142212
ugaucccacaacaauucuu

SEQ ID NO: 2142214 - RNA, 19 nt, Artificial Sequence
  Description of Artificial Sequence: Synthetic oligonucleotide
  Sense strand starting at position 316 of SEQ ID NO: 1882715
agaauuguugugggaucaa

SEQ ID NO: 2142215 - RNA, 19 nt, Artificial Sequence
  Description of Artificial Sequence: Synthetic oligonucleotide
  Antisense strand to SEQ ID NO: 2142214
uugaucccacaacaauucu

SEQ ID NO: 2142216 - RNA, 19 nt, Artificial Sequence
  Description of Artificial Sequence: Synthetic oligonucleotide
  Sense strand starting at position 340 of SEQ ID NO: 1882715
cagagaaucuagcaaguau

SEQ ID NO: 2142217 - RNA, 19 nt, Artificial Sequence
  Description of Artificial Sequence: Synthetic oligonucleotide
  Antisense strand to SEQ ID NO: 2142216
auacuugcuagauucucug

SEQ ID NO: 2142218 - RNA, 19 nt, Artificial Sequence
  Description of Artificial Sequence: Synthetic oligonucleotide
  Sense strand starting at position 409 of SEQ ID NO: 1882715
gaaguuacacccugaccga

SEQ ID NO: 2142219 - RNA, 19 nt, Artificial Sequence
  Description of Artificial Sequence: Synthetic oligonucleotide
  Antisense strand to SEQ ID NO: 2142218
ucggucaggguguaacuuc

SEQ ID NO: 2142220 - RNA, 19 nt, Artificial Sequence
  Description of Artificial Sequence: Synthetic oligonucleotide
  Sense strand starting at position 525 of SEQ ID NO: 1882715
gucguccucuccuuacaau

SEQ ID NO: 2142221 - RNA, 19 nt, Artificial Sequence
  Description of Artificial Sequence: Synthetic oligonucleotide
  Antisense strand to SEQ ID NO: 2142220
auuguaaggagaggacgac

SEQ ID NO: 2142222 - RNA, 19 nt, Artificial Sequence
  Description of Artificial Sequence: Synthetic oligonucleotide
  Sense strand starting at position 543 of SEQ ID NO: 1882715
ucacuuaucuuuguuacag

SEQ ID NO: 2142223 - RNA, 19 nt, Artificial Sequence
  Description of Artificial Sequence: Synthetic oligonucleotide
  Antisense strand to SEQ ID NO: 2142222
cuguaacaaagauaaguga

SEQ ID NO: 2142224 - RNA, 19 nt, Artificial Sequence
  Description of Artificial Sequence: Synthetic oligonucleotide
  Sense strand starting at position 545 of SEQ ID NO: 1882715
acuuaucuuuguuacagau

SEQ ID NO: 2142225 - RNA, 19 nt, Artificial Sequence
  Description of Artificial Sequence: Synthetic oligonucleotide
  Antisense strand to SEQ ID NO: 2142224
aucuguaacaaagauaagu

SEQ ID NO: 2142226 - RNA, 19 nt, Artificial Sequence
  Description of Artificial Sequence: Synthetic oligonucleotide
  Sense strand starting at position 730 of SEQ ID NO: 1882715
aagugagaggacugcuuau

SEQ ID NO: 2142227 - RNA, 19 nt, Artificial Sequence
  Description of Artificial Sequence: Synthetic oligonucleotide
  Antisense strand to SEQ ID NO: 2142226
auaagcaguccucucacuu

SEQ ID NO: 2142228 - RNA, 19 nt, Artificial Sequence
  Description of Artificial Sequence: Synthetic oligonucleotide
  Sense strand starting at position 739 of SEQ ID NO: 1882715
gacugcuuaugcccaggaa

SEQ ID NO: 2142229 - RNA, 19 nt, Artificial Sequence
  Description of Artificial Sequence: Synthetic oligonucleotide
  Antisense strand to SEQ ID NO: 2142228
uuccugggcauaagcaguc

SEQ ID NO: 2142230 - RNA, 19 nt, Artificial Sequence
  Description of Artificial Sequence: Synthetic oligonucleotide
  Sense strand starting at position 740 of SEQ ID NO: 1882715
acugcuuaugcccaggaau

SEQ ID NO: 2142231 - RNA, 19 nt, Artificial Sequence
  Description of Artificial Sequence: Synthetic oligonucleotide
  Antisense strand to SEQ ID NO: 2142230
auuccugggcauaagcagu

SEQ ID NO: 2142232 - RNA, 19 nt, Artificial Sequence
  Description of Artificial Sequence: Synthetic oligonucleotide
  Sense strand starting at position 892 of SEQ ID NO: 1882715
ggcugaggcuguaaugagu

SEQ ID NO: 2142233 - RNA, 19 nt, Artificial Sequence
  Description of Artificial Sequence: Synthetic oligonucleotide
  Antisense strand to SEQ ID NO: 2142232
acucauuacagccucagcc

SEQ ID NO: 2142234 - RNA, 19 nt, Artificial Sequence
  Description of Artificial Sequence: Synthetic oligonucleotide
  Sense strand starting at position 899 of SEQ ID NO: 1882715
gcuguaaugaguugcgauu

SEQ ID NO: 2142235 - RNA, 19 nt, Artificial Sequence
  Description of Artificial Sequence: Synthetic oligonucleotide
  Antisense strand to SEQ ID NO: 2142234
aaucgcaacucauuacagc

SEQ ID NO: 2142236 - RNA, 19 nt, Artificial Sequence
  Description of Artificial Sequence: Synthetic oligonucleotide
  Sense strand starting at position 905 of SEQ ID NO: 1882715
augaguugcgauugcacua

SEQ ID NO: 2142237 - RNA, 19 nt, Artificial Sequence
  Description of Artificial Sequence: Synthetic oligonucleotide
  Antisense strand to SEQ ID NO: 2142236
uagugcaaucgcaacucau

SEQ ID NO: 2142238 - RNA, 19 nt, Artificial Sequence
  Description of Artificial Sequence: Synthetic oligonucleotide
  Sense strand starting at position 1016 of SEQ ID NO: 1882715
cugaaauucugcuaagcuu

SEQ ID NO: 2142239 - RNA, 19 nt, Artificial Sequence
  Description of Artificial Sequence: Synthetic oligonucleotide
  Antisense strand to SEQ ID NO: 2142238
aagcuuagcagaauuucag

SEQ ID NO: 2142240 - RNA, 19 nt, Artificial Sequence
  Description of Artificial Sequence: Synthetic oligonucleotide
  Sense strand starting at position 1048 of SEQ ID NO: 1882715
cuaugcaagugaucccaaa

SEQ ID NO: 2142241 - RNA, 19 nt, Artificial Sequence
  Description of Artificial Sequence: Synthetic oligonucleotide
  Antisense strand to SEQ ID NO: 2142240
uuugggaucacuugcauag

SEQ ID NO: 2142242 - RNA, 19 nt, Artificial Sequence
  Description of Artificial Sequence: Synthetic oligonucleotide
  Sense strand starting at position 1066 of SEQ ID NO: 1882715
acuucuaagccuuggaaca

SEQ ID NO: 2142243 - RNA, 19 nt, Artificial Sequence
  Description of Artificial Sequence: Synthetic oligonucleotide
  Antisense strand to SEQ ID NO: 2142242
uguuccaaggcuuagaagu

SEQ ID NO: 2142244 - RNA, 19 nt, Artificial Sequence
  Description of Artificial Sequence: Synthetic oligonucleotide
  Sense strand starting at position 1154 of SEQ ID NO: 1882715
uuuagauucugacccuguu

SEQ ID NO: 2142245 - RNA, 19 nt, Artificial Sequence
  Description of Artificial Sequence: Synthetic oligonucleotide
  Antisense strand to SEQ ID NO: 2142244
aacagggucagaaucuaaa

SEQ ID NO: 2142246 - RNA, 19 nt, Artificial Sequence
  Description of Artificial Sequence: Synthetic oligonucleotide
  Sense strand starting at position 1157 of SEQ ID NO: 1882715
agauucugacccuguugau

SEQ ID NO: 2142247 - RNA, 19 nt, Artificial Sequence
  Description of Artificial Sequence: Synthetic oligonucleotide
  Antisense strand to SEQ ID NO: 2142246
aucaacagggucagaaucu

SEQ ID NO: 2142248 - RNA, 19 nt, Artificial Sequence
  Description of Artificial Sequence: Synthetic oligonucleotide
  Sense strand starting at position 1160 of SEQ ID NO: 1882715
uucugacccuguugauuau

SEQ ID NO: 2142249 - RNA, 19 nt, Artificial Sequence
  Description of Artificial Sequence: Synthetic oligonucleotide
  Antisense strand to SEQ ID NO: 2142248
auaaucaacagggucagaa

SEQ ID NO: 2142250 - RNA, 19 nt, Artificial Sequence
  Description of Artificial Sequence: Synthetic oligonucleotide
  Sense strand starting at position 1184 of SEQ ID NO: 1882715
guugacacacugugcaaua

SEQ ID NO: 2142251 - RNA, 19 nt, Artificial Sequence
  Description of Artificial Sequence: Synthetic oligonucleotide
  Antisense strand to SEQ ID NO: 2142250
uauugcacagugugucaac

SEQ ID NO: 2142252 - RNA, 19 nt, Artificial Sequence
  Description of Artificial Sequence: Synthetic oligonucleotide
  Sense strand starting at position 1513 of SEQ ID NO: 1882715
cggcccgaucgcuuauauu

SEQ ID NO: 2142253 - RNA, 19 nt, Artificial Sequence
  Description of Artificial Sequence: Synthetic oligonucleotide
  Antisense strand to SEQ ID NO: 2142252
aauauaagcgaucgggccg

SEQ ID NO: 2142254 - RNA, 19 nt, Artificial Sequence
  Description of Artificial Sequence: Synthetic oligonucleotide
  Sense strand starting at position 1584 of SEQ ID NO: 1882715
uuccaaaggcuuuaauguu

SEQ ID NO: 2142255 - RNA, 19 nt, Artificial Sequence
  Description of Artificial Sequence: Synthetic oligonucleotide
  Antisense strand to SEQ ID NO: 2142254
aacauuaaagccuuuggaa

SEQ ID NO: 2142256 - RNA, 19 nt, Artificial Sequence
  Description of Artificial Sequence: Synthetic oligonucleotide
  Sense strand starting at position 1592 of SEQ ID NO: 1882715
gcuuuaauguuguugcaac

SEQ ID NO: 2142257 - RNA, 19 nt, Artificial Sequence
  Description of Artificial Sequence: Synthetic oligonucleotide
  Antisense strand to SEQ ID NO: 2142256
guugcaacaacauuaaagc

SEQ ID NO: 2142258 - RNA, 19 nt, Artificial Sequence
  Description of Artificial Sequence: Synthetic oligonucleotide
  Sense strand starting at position 1612 of SEQ ID NO: 1882715
gccaucagcugucaagaug

SEQ ID NO: 2142259 - RNA, 19 nt, Artificial Sequence
  Description of Artificial Sequence: Synthetic oligonucleotide
  Antisense strand to SEQ ID NO: 2142258
caucuugacagcugauggc

SEQ ID NO: 2142260 - RNA, 19 nt, Artificial Sequence
  Description of Artificial Sequence: Synthetic oligonucleotide
  Sense strand starting at position 1974 of SEQ ID NO: 1882715
ugggaaagcuccuccuugu

SEQ ID NO: 2142261 - RNA, 19 nt, Artificial Sequence
  Description of Artificial Sequence: Synthetic oligonucleotide
  Antisense strand to SEQ ID NO: 2142260
acaaggaggagcuuuccca

SEQ ID NO: 2142262 - RNA, 19 nt, Artificial Sequence
  Description of Artificial Sequence: Synthetic oligonucleotide
  Sense strand starting at position 2104 of SEQ ID NO: 1882715
uccgauugguuccacauga

SEQ ID NO: 2142263 - RNA, 19 nt, Artificial Sequence
  Description of Artificial Sequence: Synthetic oligonucleotide
  Antisense strand to SEQ ID NO: 2142262
ucauguggaaccaaucgga

SEQ ID NO: 2142264 - RNA, 19 nt, Artificial Sequence
  Description of Artificial Sequence: Synthetic oligonucleotide
  Sense strand starting at position 2301 of SEQ ID NO: 1882715
guguguugcuggcuggaga

SEQ ID NO: 2142265 - RNA, 19 nt, Artificial Sequence
  Description of Artificial Sequence: Synthetic oligonucleotide
  Antisense strand to SEQ ID NO: 2142264
ucuccagccagcaacacac

SEQ ID NO: 2142266 - RNA, 19 nt, Artificial Sequence
  Description of Artificial Sequence: Synthetic oligonucleotide
  Sense strand starting at position 2302 of SEQ ID NO: 1882715
uguguugcuggcuggagaa

SEQ ID NO: 2142267 - RNA, 19 nt, Artificial Sequence
  Description of Artificial Sequence: Synthetic oligonucleotide
  Antisense strand to SEQ ID NO: 2142266
uucuccagccagcaacaca

SEQ ID NO: 2142268 - RNA, 19 nt, Artificial Sequence
  Description of Artificial Sequence: Synthetic oligonucleotide
  Sense strand starting at position 2349 of SEQ ID NO: 1882715
gguguuucugugggucaaa

SEQ ID NO: 2142269 - RNA, 19 nt, Artificial Sequence
  Description of Artificial Sequence: Synthetic oligonucleotide
  Antisense strand to SEQ ID NO: 2142268
uuugacccacagaaacacc

SEQ ID NO: 2142270 - RNA, 19 nt, Artificial Sequence
  Description of Artificial Sequence: Synthetic oligonucleotide
  Sense strand starting at position 2861 of SEQ ID NO: 1882715
cccuaagggcccgguaauu

SEQ ID NO: 2142271 - RNA, 19 nt, Artificial Sequence
  Description of Artificial Sequence: Synthetic oligonucleotide
  Antisense strand to SEQ ID NO: 2142270
aauuaccgggcccuuaggg

SEQ ID NO: 2142272 - RNA, 19 nt, Artificial Sequence
  Description of Artificial Sequence: Synthetic oligonucleotide
  Sense strand starting at position 2874 of SEQ ID NO: 1882715
guaauugaaucccucggau

SEQ ID NO: 2142273 - RNA, 19 nt, Artificial Sequence
  Description of Artificial Sequence: Synthetic oligonucleotide
  Antisense strand to SEQ ID NO: 2142272
auccgagggauucaauuac

SEQ ID NO: 2142274 - RNA, 19 nt, Artificial Sequence
  Description of Artificial Sequence: Synthetic oligonucleotide
  Sense strand starting at position 2878 of SEQ ID NO: 1882715
uugaaucccucggauuuga

SEQ ID NO: 2142275 - RNA, 19 nt, Artificial Sequence
  Description of Artificial Sequence: Synthetic oligonucleotide
  Antisense strand to SEQ ID NO: 2142274
ucaaauccgagggauucaa

SEQ ID NO: 2142276 - RNA, 19 nt, Artificial Sequence
  Description of Artificial Sequence: Synthetic oligonucleotide
  Sense strand starting at position 2900 of SEQ ID NO: 1882715
ugagaaaccuuggcucagu

SEQ ID NO: 2142277 - RNA, 19 nt, Artificial Sequence
  Description of Artificial Sequence: Synthetic oligonucleotide
  Antisense strand to SEQ ID NO: 2142276
acugagccaagguuucuca

SEQ ID NO: 2142278 - RNA, 19 nt, Artificial Sequence
  Description of Artificial Sequence: Synthetic oligonucleotide
  Sense strand starting at position 2901 of SEQ ID NO: 1882715
gagaaaccuuggcucaguu

SEQ ID NO: 2142279 - RNA, 19 nt, Artificial Sequence
  Description of Artificial Sequence: Synthetic oligonucleotide
  Antisense strand to SEQ ID NO: 2142278
aacugagccaagguuucuc

SEQ ID NO: 2142280 - RNA, 19 nt, Artificial Sequence
  Description of Artificial Sequence: Synthetic oligonucleotide
  Sense strand starting at position 3255 of SEQ ID NO: 1882715
cggcaugaguuccauggga

SEQ ID NO: 2142281 - RNA, 19 nt, Artificial Sequence
  Description of Artificial Sequence: Synthetic oligonucleotide
  Antisense strand to SEQ ID NO: 2142280
ucccauggaacucaugccg

SEQ ID NO: 2142282 - RNA, 19 nt, Artificial Sequence
  Description of Artificial Sequence: Synthetic oligonucleotide
  Sense strand starting at position 3539 of SEQ ID NO: 1882715
ggguucgaacuuggugaga

SEQ ID NO: 2142283 - RNA, 19 nt, Artificial Sequence
  Description of Artificial Sequence: Synthetic oligonucleotide
  Antisense strand to SEQ ID NO: 2142282
ucucaccaaguucgaaccc

SEQ ID NO: 2142284 - RNA, 19 nt, Artificial Sequence
  Description of Artificial Sequence: Synthetic oligonucleotide
  Sense strand starting at position 3770 of SEQ ID NO: 1882715
augcuacgcuccuauaauc

SEQ ID NO: 2142285 - RNA, 19 nt, Artificial Sequence
  Description of Artificial Sequence: Synthetic oligonucleotide
  Antisense strand to SEQ ID NO: 2142284
gauuauaggagcguagcau

SEQ ID NO: 2142286 - RNA, 19 nt, Artificial Sequence
  Description of Artificial Sequence: Synthetic oligonucleotide
  Sense strand starting at position 38 of SEQ ID NO: 1882716
aguccuggcugaugucauu

SEQ ID NO: 2142287 - RNA, 19 nt, Artificial Sequence
  Description of Artificial Sequence: Synthetic oligonucleotide
  Antisense strand to SEQ ID NO: 2142286
aaugacaucagccaggacu

SEQ ID NO: 2142288 - RNA, 19 nt, Artificial Sequence
  Description of Artificial Sequence: Synthetic oligonucleotide
  Sense strand starting at position 41 of SEQ ID NO: 1882716
ccuggcugaugucauugaa

SEQ ID NO: 2142289 - RNA, 19 nt, Artificial Sequence
  Description of Artificial Sequence: Synthetic oligonucleotide
  Antisense strand to SEQ ID NO: 2142288
uucaaugacaucagccagg

SEQ ID NO: 2142290 - RNA, 19 nt, Artificial Sequence
  Description of Artificial Sequence: Synthetic oligonucleotide
  Sense strand starting at position 44 of SEQ ID NO: 1882716
ggcugaugucauugaagcu

SEQ ID NO: 2142291 - RNA, 19 nt, Artificial Sequence
  Description of Artificial Sequence: Synthetic oligonucleotide
  Antisense strand to SEQ ID NO: 2142290
agcuucaaugacaucagcc

SEQ ID NO: 2142292 - RNA, 19 nt, Artificial Sequence
  Description of Artificial Sequence: Synthetic oligonucleotide
  Sense strand starting at position 286 of SEQ ID NO: 1882716
aggaguuccuccucagagu

SEQ ID NO: 2142293 - RNA, 19 nt, Artificial Sequence
  Description of Artificial Sequence: Synthetic oligonucleotide
  Antisense strand to SEQ ID NO: 2142292
acucugaggaggaacuccu

SEQ ID NO: 2142294 - RNA, 19 nt, Artificial Sequence
  Description of Artificial Sequence: Synthetic oligonucleotide
  Sense strand starting at position 311 of SEQ ID NO: 1882716
ggcacaauaucuccugaga

SEQ ID NO: 2142295 - RNA, 19 nt, Artificial Sequence
  Description of Artificial Sequence: Synthetic oligonucleotide
  Antisense strand to SEQ ID NO: 2142294
ucucaggagauauugugcc

SEQ ID NO: 2142296 - RNA, 19 nt, Artificial Sequence
  Description of Artificial Sequence: Synthetic oligonucleotide
  Sense strand starting at position 520 of SEQ ID NO: 1882716
gcugcaaagucagaauaag

SEQ ID NO: 2142297 - RNA, 19 nt, Artificial Sequence
  Description of Artificial Sequence: Synthetic oligonucleotide
  Antisense strand to SEQ ID NO: 2142296
cuuauucugacuuugcagc

SEQ ID NO: 2142298 - RNA, 19 nt, Artificial Sequence
  Description of Artificial Sequence: Synthetic oligonucleotide
  Sense strand starting at position 578 of SEQ ID NO: 1882716
guuccacuucucugcagau

SEQ ID NO: 2142299 - RNA, 19 nt, Artificial Sequence
  Description of Artificial Sequence: Synthetic oligonucleotide
  Antisense strand to SEQ ID NO: 2142298
aucugcagagaaguggaac

SEQ ID NO: 2142300 - RNA, 19 nt, Artificial Sequence
  Description of Artificial Sequence: Synthetic oligonucleotide
  Sense strand starting at position 647 of SEQ ID NO: 1882716
uguccuguccucuauguga

SEQ ID NO: 2142301 - RNA, 19 nt, Artificial Sequence
  Description of Artificial Sequence: Synthetic oligonucleotide
  Antisense strand to SEQ ID NO: 2142300
ucacauagaggacaggaca

SEQ ID NO: 2142302 - RNA, 19 nt, Artificial Sequence
  Description of Artificial Sequence: Synthetic oligonucleotide
  Sense strand starting at position 649 of SEQ ID NO: 1882716
uccuguccucuaugugaac

SEQ ID NO: 2142303 - RNA, 19 nt, Artificial Sequence
  Description of Artificial Sequence: Synthetic oligonucleotide
  Antisense strand to SEQ ID NO: 2142302
guucacauagaggacagga

SEQ ID NO: 2142304 - RNA, 19 nt, Artificial Sequence
  Description of Artificial Sequence: Synthetic oligonucleotide
  Sense strand starting at position 857 of SEQ ID NO: 1882716
gagaccacccuggguaaau

SEQ ID NO: 2142305 - RNA, 19 nt, Artificial Sequence
  Description of Artificial Sequence: Synthetic oligonucleotide
  Antisense strand to SEQ ID NO: 2142304
auuuacccaggguggucuc

SEQ ID NO: 2142306 - RNA, 19 nt, Artificial Sequence
  Description of Artificial Sequence: Synthetic oligonucleotide
  Sense strand starting at position 858 of SEQ ID NO: 1882716
agaccacccuggguaaaua

SEQ ID NO: 2142307 - RNA, 19 nt, Artificial Sequence
  Description of Artificial Sequence: Synthetic oligonucleotide
  Antisense strand to SEQ ID NO: 2142306
uauuuacccaggguggucu

SEQ ID NO: 2142308 - RNA, 19 nt, Artificial Sequence
  Description of Artificial Sequence: Synthetic oligonucleotide
  Sense strand starting at position 876 of SEQ ID NO: 1882716
agugacacccuguaucuuu

SEQ ID NO: 2142309 - RNA, 19 nt, Artificial Sequence
  Description of Artificial Sequence: Synthetic oligonucleotide
  Antisense strand to SEQ ID NO: 2142308
aaagauacagggugucacu

SEQ ID NO: 2142310 - RNA, 19 nt, Artificial Sequence
  Description of Artificial Sequence: Synthetic oligonucleotide
  Sense strand starting at position 1416 of SEQ ID NO: 1882716
cagccuuuaccucgggaaa

SEQ ID NO: 2142311 - RNA, 19 nt, Artificial Sequence
  Description of Artificial Sequence: Synthetic oligonucleotide
  Antisense strand to SEQ ID NO: 2142310
uuucccgagguaaaggcug

SEQ ID NO: 2142312 - RNA, 19 nt, Artificial Sequence
  Description of Artificial Sequence: Synthetic oligonucleotide
  Sense strand starting at position 1417 of SEQ ID NO: 1882716
agccuuuaccucgggaaag

SEQ ID NO: 2142313 - RNA, 19 nt, Artificial Sequence
  Description of Artificial Sequence: Synthetic oligonucleotide
  Antisense strand to SEQ ID NO: 2142312
cuuucccgagguaaaggcu

SEQ ID NO: 2142314 - RNA, 19 nt, Artificial Sequence
  Description of Artificial Sequence: Synthetic oligonucleotide
  Sense strand starting at position 1700 of SEQ ID NO: 1882716
cggcgucgguugucagaga

SEQ ID NO: 2142315 - RNA, 19 nt, Artificial Sequence
  Description of Artificial Sequence: Synthetic oligonucleotide
  Antisense strand to SEQ ID NO: 2142314
ucucugacaaccgacgccg

SEQ ID NO: 2142316 - RNA, 19 nt, Artificial Sequence
  Description of Artificial Sequence: Synthetic oligonucleotide
  Sense strand starting at position 1701 of SEQ ID NO: 1882716
ggcgucgguugucagagaa

SEQ ID NO: 2142317 - RNA, 19 nt, Artificial Sequence
  Description of Artificial Sequence: Synthetic oligonucleotide
  Antisense strand to SEQ ID NO: 2142316
uucucugacaaccgacgcc

SEQ ID NO: 2142318 - RNA, 19 nt, Artificial Sequence
  Description of Artificial Sequence: Synthetic oligonucleotide
  Sense strand starting at position 1703 of SEQ ID NO: 1882716
cgucgguugucagagaagu

SEQ ID NO: 2142319 - RNA, 19 nt, Artificial Sequence
  Description of Artificial Sequence: Synthetic oligonucleotide
  Antisense strand to SEQ ID NO: 2142318
acuucucugacaaccgacg

SEQ ID NO: 2142320 - RNA, 19 nt, Artificial Sequence
  Description of Artificial Sequence: Synthetic oligonucleotide
  Sense strand starting at position 1704 of SEQ ID NO: 1882716
gucgguugucagagaaguc

SEQ ID NO: 2142321 - RNA, 19 nt, Artificial Sequence
  Description of Artificial Sequence: Synthetic oligonucleotide
  Antisense strand to SEQ ID NO: 2142320
gacuucucugacaaccgac

SEQ ID NO: 2142322 - RNA, 19 nt, Artificial Sequence
  Description of Artificial Sequence: Synthetic oligonucleotide
  Sense strand starting at position 1713 of SEQ ID NO: 1882716
cagagaagucggcgcggaa

SEQ ID NO: 2142323 - RNA, 19 nt, Artificial Sequence
  Description of Artificial Sequence: Synthetic oligonucleotide
  Antisense strand to SEQ ID NO: 2142322
uuccgcgccgacuucucug

SEQ ID NO: 2142324 - RNA, 19 nt, Artificial Sequence
  Description of Artificial Sequence: Synthetic oligonucleotide
  Sense strand starting at position 1981 of SEQ ID NO: 1882716
gcgccaucuugguugagga

SEQ ID NO: 2142325 - RNA, 19 nt, Artificial Sequence
  Description of Artificial Sequence: Synthetic oligonucleotide
  Antisense strand to SEQ ID NO: 2142324
uccucaaccaagauggcgc

SEQ ID NO: 2142326 - RNA, 19 nt, Artificial Sequence
  Description of Artificial Sequence: Synthetic oligonucleotide
  Sense strand starting at position 2387 of SEQ ID NO: 1882716
ugguguugcaggcacauaa

SEQ ID NO: 2142327 - RNA, 19 nt, Artificial Sequence
  Description of Artificial Sequence: Synthetic oligonucleotide
  Antisense strand to SEQ ID NO: 2142326
uuaugugccugcaacacca

SEQ ID NO: 2142328 - RNA, 19 nt, Artificial Sequence
  Description of Artificial Sequence: Synthetic oligonucleotide
  Sense strand starting at position 2391 of SEQ ID NO: 1882716
guugcaggcacauaaagau

SEQ ID NO: 2142329 - RNA, 19 nt, Artificial Sequence
  Description of Artificial Sequence: Synthetic oligonucleotide
  Antisense strand to SEQ ID NO: 2142328
aucuuuaugugccugcaac

SEQ ID NO: 2142330 - RNA, 19 nt, Artificial Sequence
  Description of Artificial Sequence: Synthetic oligonucleotide
  Sense strand starting at position 2851 of SEQ ID NO: 1882716
uggccauugcuggacauga

SEQ ID NO: 2142331 - RNA, 19 nt, Artificial Sequence
  Description of Artificial Sequence: Synthetic oligonucleotide
  Antisense strand to SEQ ID NO: 2142330
ucauguccagcaauggcca

SEQ ID NO: 2142332 - RNA, 19 nt, Artificial Sequence
  Description of Artificial Sequence: Synthetic oligonucleotide
  Sense strand starting at position 2853 of SEQ ID NO: 1882716
gccauugcuggacaugaga

SEQ ID NO: 2142333 - RNA, 19 nt, Artificial Sequence
  Description of Artificial Sequence: Synthetic oligonucleotide
  Antisense strand to SEQ ID NO: 2142332
ucucauguccagcaauggc

SEQ ID NO: 2142334 - RNA, 19 nt, Artificial Sequence
  Description of Artificial Sequence: Synthetic oligonucleotide
  Sense strand starting at position 2930 of SEQ ID NO: 1882716
accuguuacugguggaguu

SEQ ID NO: 2142335 - RNA, 19 nt, Artificial Sequence
  Description of Artificial Sequence: Synthetic oligonucleotide
  Antisense strand to SEQ ID NO: 2142334
aacuccaccaguaacaggu

SEQ ID NO: 2142336 - RNA, 19 nt, Artificial Sequence
  Description of Artificial Sequence: Synthetic oligonucleotide
  Sense strand starting at position 2942 of SEQ ID NO: 1882716
uggaguuccggguggugaa

SEQ ID NO: 2142337 - RNA, 19 nt, Artificial Sequence
  Description of Artificial Sequence: Synthetic oligonucleotide
  Antisense strand to SEQ ID NO: 2142336
uucaccacccggaacucca

SEQ ID NO: 2142338 - RNA, 19 nt, Artificial Sequence
  Description of Artificial Sequence: Synthetic oligonucleotide
  Sense strand starting at position 2943 of SEQ ID NO: 1882716
ggaguuccggguggugaau

SEQ ID NO: 2142339 - RNA, 19 nt, Artificial Sequence
  Description of Artificial Sequence: Synthetic oligonucleotide
  Antisense strand to SEQ ID NO: 2142338
auucaccacccggaacucc

SEQ ID NO: 2142340 - RNA, 19 nt, Artificial Sequence
  Description of Artificial Sequence: Synthetic oligonucleotide
  Sense strand starting at position 2952 of SEQ ID NO: 1882716
gguggugaaucccuacaca

SEQ ID NO: 2142341 - RNA, 19 nt, Artificial Sequence
  Description of Artificial Sequence: Synthetic oligonucleotide
  Antisense strand to SEQ ID NO: 2142340
uguguagggauucaccacc

SEQ ID NO: 2142342 - RNA, 19 nt, Artificial Sequence
  Description of Artificial Sequence: Synthetic oligonucleotide
  Sense strand starting at position 3052 of SEQ ID NO: 1882716
gcugcagagcaguaguaaa

SEQ ID NO: 2142343 - RNA, 19 nt, Artificial Sequence
  Description of Artificial Sequence: Synthetic oligonucleotide
  Antisense strand to SEQ ID NO: 2142342
uuuacuacugcucugcagc

SEQ ID NO: 2142344 - RNA, 19 nt, Artificial Sequence
  Description of Artificial Sequence: Synthetic oligonucleotide
  Sense strand starting at position 3732 of SEQ ID NO: 1882716
gggccaagugggugaucua

SEQ ID NO: 2142345 - RNA, 19 nt, Artificial Sequence
  Description of Artificial Sequence: Synthetic oligonucleotide
  Antisense strand to SEQ ID NO: 2142344
uagaucacccacuuggccc

SEQ ID NO: 2142346 - RNA, 19 nt, Artificial Sequence
  Description of Artificial Sequence: Synthetic oligonucleotide
  Sense strand starting at position 3733 of SEQ ID NO: 1882716
ggccaagugggugaucuaa

SEQ ID NO: 2142347 - RNA, 19 nt, Artificial Sequence
  Description of Artificial Sequence: Synthetic oligonucleotide
  Antisense strand to SEQ ID NO: 2142346
uuagaucacccacuuggcc

SEQ ID NO: 2142348 - RNA, 19 nt, Artificial Sequence
  Description of Artificial Sequence: Synthetic oligonucleotide
  Sense strand starting at position 3735 of SEQ ID NO: 1882716
ccaagugggugaucuaaga

SEQ ID NO: 2142349 - RNA, 19 nt, Artificial Sequence
  Description of Artificial Sequence: Synthetic oligonucleotide
  Antisense strand to SEQ ID NO: 2142348
ucuuagaucacccacuugg

SEQ ID NO: 2142350 - RNA, 19 nt, Artificial Sequence
  Description of Artificial Sequence: Synthetic oligonucleotide
  Sense strand starting at position 3944 of SEQ ID NO: 1882716
gagagaaucgccugaacca

SEQ ID NO: 2142351 - RNA, 19 nt, Artificial Sequence
  Description of Artificial Sequence: Synthetic oligonucleotide
  Antisense strand to SEQ ID NO: 2142350
ugguucaggcgauucucuc

SEQ ID NO: 2142352 - RNA, 19 nt, Artificial Sequence
  Description of Artificial Sequence: Synthetic oligonucleotide
  Sense strand starting at position 3953 of SEQ ID NO: 1882716
gccugaaccagagauugca

SEQ ID NO: 2142353 - RNA, 19 nt, Artificial Sequence
  Description of Artificial Sequence: Synthetic oligonucleotide
  Antisense strand to SEQ ID NO: 2142352
ugcaaucucugguucaggc

SEQ ID NO: 2142354 - RNA, 19 nt, Artificial Sequence
  Description of Artificial Sequence: Synthetic oligonucleotide
  Sense strand starting at position 179 of SEQ ID NO: 1882717
ggccaaugucguugaagcu

SEQ ID NO: 2142355 - RNA, 19 nt, Artificial Sequence
  Description of Artificial Sequence: Synthetic oligonucleotide
  Antisense strand to SEQ ID NO: 2142354
agcuucaacgacauuggcc

SEQ ID NO: 2142356 - RNA, 19 nt, Artificial Sequence
  Description of Artificial Sequence: Synthetic oligonucleotide
  Sense strand starting at position 318 of SEQ ID NO: 1882717
uagcgcaaguccugacaua

SEQ ID NO: 2142357 - RNA, 19 nt, Artificial Sequence
  Description of Artificial Sequence: Synthetic oligonucleotide
  Antisense strand to SEQ ID NO: 2142356
uaugucaggacuugcgcua

SEQ ID NO: 2142358 - RNA, 19 nt, Artificial Sequence
  Description of Artificial Sequence: Synthetic oligonucleotide
  Sense strand starting at position 352 of SEQ ID NO: 1882717
guggaacguacagauaacu

SEQ ID NO: 2142359 - RNA, 19 nt, Artificial Sequence
  Description of Artificial Sequence: Synthetic oligonucleotide
  Antisense strand to SEQ ID NO: 2142358
aguuaucuguacguuccac

SEQ ID NO: 2142360 - RNA, 19 nt, Artificial Sequence
  Description of Artificial Sequence: Synthetic oligonucleotide
  Sense strand starting at position 425 of SEQ ID NO: 1882717
ggaguuccuccucgggagu

SEQ ID NO: 2142361 - RNA, 19 nt, Artificial Sequence
  Description of Artificial Sequence: Synthetic oligonucleotide
  Antisense strand to SEQ ID NO: 2142360
acucccgaggaggaacucc

SEQ ID NO: 2142362 - RNA, 19 nt, Artificial Sequence
  Description of Artificial Sequence: Synthetic oligonucleotide
  Sense strand starting at position 450 of SEQ ID NO: 1882717
ggcccaauaucucccgaga

SEQ ID NO: 2142363 - RNA, 19 nt, Artificial Sequence
  Description of Artificial Sequence: Synthetic oligonucleotide
  Antisense strand to SEQ ID NO: 2142362
ucucgggagauauugggcc

SEQ ID NO: 2142364 - RNA, 19 nt, Artificial Sequence
  Description of Artificial Sequence: Synthetic oligonucleotide
  Sense strand starting at position 452 of SEQ ID NO: 1882717
cccaauaucucccgagaca

SEQ ID NO: 2142365 - RNA, 19 nt, Artificial Sequence
  Description of Artificial Sequence: Synthetic oligonucleotide
  Antisense strand to SEQ ID NO: 2142364
ugucucgggagauauuggg

SEQ ID NO: 2142366 - RNA, 19 nt, Artificial Sequence
  Description of Artificial Sequence: Synthetic oligonucleotide
  Sense strand starting at position 701 of SEQ ID NO: 1882717
cguccuuggccugauguca

SEQ ID NO: 2142367 - RNA, 19 nt, Artificial Sequence
  Description of Artificial Sequence: Synthetic oligonucleotide
  Antisense strand to SEQ ID NO: 2142366
ugacaucaggccaaggacg

SEQ ID NO: 2142368 - RNA, 19 nt, Artificial Sequence
  Description of Artificial Sequence: Synthetic oligonucleotide
  Sense strand starting at position 720 of SEQ ID NO: 1882717
uguccuguccucuaucuga

SEQ ID NO: 2142369 - RNA, 19 nt, Artificial Sequence
  Description of Artificial Sequence: Synthetic oligonucleotide
  Antisense strand to SEQ ID NO: 2142368
ucagauagaggacaggaca

SEQ ID NO: 2142370 - RNA, 19 nt, Artificial Sequence
  Description of Artificial Sequence: Synthetic oligonucleotide
  Sense strand starting at position 842 of SEQ ID NO: 1882717
ccacucuggcuagaugagu

SEQ ID NO: 2142371 - RNA, 19 nt, Artificial Sequence
  Description of Artificial Sequence: Synthetic oligonucleotide
  Antisense strand to SEQ ID NO: 2142370
acucaucuagccagagugg

SEQ ID NO: 2142372 - RNA, 19 nt, Artificial Sequence
  Description of Artificial Sequence: Synthetic oligonucleotide
  Sense strand starting at position 855 of SEQ ID NO: 1882717
augaguguguggguaauca

SEQ ID NO: 2142373 - RNA, 19 nt, Artificial Sequence
  Description of Artificial Sequence: Synthetic oligonucleotide
  Antisense strand to SEQ ID NO: 2142372
ugauuacccacacacucau

SEQ ID NO: 2142374 - RNA, 19 nt, Artificial Sequence
  Description of Artificial Sequence: Synthetic oligonucleotide
  Sense strand starting at position 1350 of SEQ ID NO: 1882717
agaaucacuugagcucaau

SEQ ID NO: 2142375 - RNA, 19 nt, Artificial Sequence
  Description of Artificial Sequence: Synthetic oligonucleotide
  Antisense strand to SEQ ID NO: 2142374
auugagcucaagugauucu

SEQ ID NO: 2142376 - RNA, 19 nt, Artificial Sequence
  Description of Artificial Sequence: Synthetic oligonucleotide
  Sense strand starting at position 1753 of SEQ ID NO: 1882717
uggcgucgguuguccaaau

SEQ ID NO: 2142377 - RNA, 19 nt, Artificial Sequence
  Description of Artificial Sequence: Synthetic oligonucleotide
  Antisense strand to SEQ ID NO: 2142376
auuuggacaaccgacgcca

SEQ ID NO: 2142378 - RNA, 19 nt, Artificial Sequence
  Description of Artificial Sequence: Synthetic oligonucleotide
  Sense strand starting at position 2306 of SEQ ID NO: 1882717
augccuguuggaugcaaua

SEQ ID NO: 2142379 - RNA, 19 nt, Artificial Sequence
  Description of Artificial Sequence: Synthetic oligonucleotide
  Antisense strand to SEQ ID NO: 2142378
uauugcauccaacaggcau

SEQ ID NO: 2142380 - RNA, 19 nt, Artificial Sequence
  Description of Artificial Sequence: Synthetic oligonucleotide
  Sense strand starting at position 2308 of SEQ ID NO: 1882717
gccuguuggaugcaauaga

SEQ ID NO: 2142381 - RNA, 19 nt, Artificial Sequence
  Description of Artificial Sequence: Synthetic oligonucleotide
  Antisense strand to SEQ ID NO: 2142380
ucuauugcauccaacaggc

SEQ ID NO: 2142382 - RNA, 19 nt, Artificial Sequence
  Description of Artificial Sequence: Synthetic oligonucleotide
  Sense strand starting at position 2316 of SEQ ID NO: 1882717
gaugcaauagagugagauu

SEQ ID NO: 2142383 - RNA, 19 nt, Artificial Sequence
  Description of Artificial Sequence: Synthetic oligonucleotide
  Antisense strand to SEQ ID NO: 2142382
aaucucacucuauugcauc

SEQ ID NO: 2142384 - RNA, 19 nt, Artificial Sequence
  Description of Artificial Sequence: Synthetic oligonucleotide
  Sense strand starting at position 2444 of SEQ ID NO: 1882717
aauuaagacuaggcauagu

SEQ ID NO: 2142385 - RNA, 19 nt, Artificial Sequence
  Description of Artificial Sequence: Synthetic oligonucleotide
  Antisense strand to SEQ ID NO: 2142384
acuaugccuagucuuaauu

SEQ ID NO: 2142386 - RNA, 19 nt, Artificial Sequence
  Description of Artificial Sequence: Synthetic oligonucleotide
  Sense strand starting at position 2850 of SEQ ID NO: 1882717
gagggacacugucuccaaa

SEQ ID NO: 2142387 - RNA, 19 nt, Artificial Sequence
  Description of Artificial Sequence: Synthetic oligonucleotide
  Antisense strand to SEQ ID NO: 2142386
uuuggagacagugucccuc

SEQ ID NO: 2142388 - RNA, 19 nt, Artificial Sequence
  Description of Artificial Sequence: Synthetic oligonucleotide
  Sense strand starting at position 2929 of SEQ ID NO: 1882717
cccugaaaggcucggugaa

SEQ ID NO: 2142389 - RNA, 19 nt, Artificial Sequence
  Description of Artificial Sequence: Synthetic oligonucleotide
  Antisense strand to SEQ ID NO: 2142388
uucaccgagccuuucaggg

SEQ ID NO: 2142390 - RNA, 19 nt, Artificial Sequence
  Description of Artificial Sequence: Synthetic oligonucleotide
  Sense strand starting at position 2930 of SEQ ID NO: 1882717
ccugaaaggcucggugaau

SEQ ID NO: 2142391 - RNA, 19 nt, Artificial Sequence
  Description of Artificial Sequence: Synthetic oligonucleotide
  Antisense strand to SEQ ID NO: 2142390
auucaccgagccuuucagg

SEQ ID NO: 2142392 - RNA, 19 nt, Artificial Sequence
  Description of Artificial Sequence: Synthetic oligonucleotide
  Sense strand starting at position 2931 of SEQ ID NO: 1882717
cugaaaggcucggugaaug

SEQ ID NO: 2142393 - RNA, 19 nt, Artificial Sequence
  Description of Artificial Sequence: Synthetic oligonucleotide
  Antisense strand to SEQ ID NO: 2142392
cauucaccgagccuuucag

SEQ ID NO: 2142394 - RNA, 19 nt, Artificial Sequence
  Description of Artificial Sequence: Synthetic oligonucleotide
  Sense strand starting at position 29 of SEQ ID NO: 1882718
ggaggacugccuugccuuu

SEQ ID NO: 2142395 - RNA, 19 nt, Artificial Sequence
  Description of Artificial Sequence: Synthetic oligonucleotide
  Antisense strand to SEQ ID NO: 2142394
aaaggcaaggcaguccucc

SEQ ID NO: 2142396 - RNA, 19 nt, Artificial Sequence
  Description of Artificial Sequence: Synthetic oligonucleotide
  Sense strand starting at position 147 of SEQ ID NO: 1882718
ccaugcuugggauggauca

SEQ ID NO: 2142397 - RNA, 19 nt, Artificial Sequence
  Description of Artificial Sequence: Synthetic oligonucleotide
  Antisense strand to SEQ ID NO: 2142396
ugauccaucccaagcaugg

SEQ ID NO: 2142398 - RNA, 19 nt, Artificial Sequence
  Description of Artificial Sequence: Synthetic oligonucleotide
  Sense strand starting at position 148 of SEQ ID NO: 1882718
caugcuugggauggaucaa

SEQ ID NO: 2142399 - RNA, 19 nt, Artificial Sequence
  Description of Artificial Sequence: Synthetic oligonucleotide
  Antisense strand to SEQ ID NO: 2142398
uugauccaucccaagcaug

SEQ ID NO: 2142400 - RNA, 19 nt, Artificial Sequence
  Description of Artificial Sequence: Synthetic oligonucleotide
  Sense strand starting at position 160 of SEQ ID NO: 1882718
ggaucaaagucacaaauac

SEQ ID NO: 2142401 - RNA, 19 nt, Artificial Sequence
  Description of Artificial Sequence: Synthetic oligonucleotide
  Antisense strand to SEQ ID NO: 2142400
guauuugugacuuugaucc

SEQ ID NO: 2142402 - RNA, 19 nt, Artificial Sequence
  Description of Artificial Sequence: Synthetic oligonucleotide
  Sense strand starting at position 313 of SEQ ID NO: 1882718
aagggugacuaacauauuu

SEQ ID NO: 2142403 - RNA, 19 nt, Artificial Sequence
  Description of Artificial Sequence: Synthetic oligonucleotide
  Antisense strand to SEQ ID NO: 2142402
aaauauguuagucacccuu

SEQ ID NO: 2142404 - RNA, 19 nt, Artificial Sequence
  Description of Artificial Sequence: Synthetic oligonucleotide
  Sense strand starting at position 365 of SEQ ID NO: 1882718
ccuuguucuaacgggagga

SEQ ID NO: 2142405 - RNA, 19 nt, Artificial Sequence
  Description of Artificial Sequence: Synthetic oligonucleotide
  Antisense strand to SEQ ID NO: 2142404
uccucccguuagaacaagg

SEQ ID NO: 2142406 - RNA, 19 nt, Artificial Sequence
  Description of Artificial Sequence: Synthetic oligonucleotide
  Sense strand starting at position 366 of SEQ ID NO: 1882718
cuuguucuaacgggaggaa

SEQ ID NO: 2142407 - RNA, 19 nt, Artificial Sequence
  Description of Artificial Sequence: Synthetic oligonucleotide
  Antisense strand to SEQ ID NO: 2142406
uuccucccguuagaacaag

SEQ ID NO: 2142408 - RNA, 19 nt, Artificial Sequence
  Description of Artificial Sequence: Synthetic oligonucleotide
  Sense strand starting at position 457 of SEQ ID NO: 1882718
guacacaugguuggaguaa

SEQ ID NO: 2142409 - RNA, 19 nt, Artificial Sequence
  Description of Artificial Sequence: Synthetic oligonucleotide
  Antisense strand to SEQ ID NO: 2142408
uuacuccaaccauguguac

SEQ ID NO: 2142410 - RNA, 19 nt, Artificial Sequence
  Description of Artificial Sequence: Synthetic oligonucleotide
  Sense strand starting at position 601 of SEQ ID NO: 1882718
ugacgugaaaccuaauagu

SEQ ID NO: 2142411 - RNA, 19 nt, Artificial Sequence
  Description of Artificial Sequence: Synthetic oligonucleotide
  Antisense strand to SEQ ID NO: 2142410
acuauuagguuucacguca

SEQ ID NO: 2142412 - RNA, 19 nt, Artificial Sequence
  Description of Artificial Sequence: Synthetic oligonucleotide
  Sense strand starting at position 696 of SEQ ID NO: 1882718
cucagauuugcaugugucu

SEQ ID NO: 2142413 - RNA, 19 nt, Artificial Sequence
  Description of Artificial Sequence: Synthetic oligonucleotide
  Antisense strand to SEQ ID NO: 2142412
agacacaugcaaaucugag

SEQ ID NO: 2142414 - RNA, 19 nt, Artificial Sequence
  Description of Artificial Sequence: Synthetic oligonucleotide
  Sense strand starting at position 705 of SEQ ID NO: 1882718
gcaugugucucucuaggga

SEQ ID NO: 2142415 - RNA, 19 nt, Artificial Sequence
  Description of Artificial Sequence: Synthetic oligonucleotide
  Antisense strand to SEQ ID NO: 2142414
ucccuagagagacacaugc

SEQ ID NO: 2142416 - RNA, 19 nt, Artificial Sequence
  Description of Artificial Sequence: Synthetic oligonucleotide
  Sense strand starting at position 727 of SEQ ID NO: 1882718
acuugaagguucucauaag

SEQ ID NO: 2142417 - RNA, 19 nt, Artificial Sequence
  Description of Artificial Sequence: Synthetic oligonucleotide
  Antisense strand to SEQ ID NO: 2142416
cuuaugagaaccuucaagu

SEQ ID NO: 2142418 - RNA, 19 nt, Artificial Sequence
  Description of Artificial Sequence: Synthetic oligonucleotide
  Sense strand starting at position 1256 of SEQ ID NO: 1882718
cugaguuuccagggcucau

SEQ ID NO: 2142419 - RNA, 19 nt, Artificial Sequence
  Description of Artificial Sequence: Synthetic oligonucleotide
  Antisense strand to SEQ ID NO: 2142418
augagcccuggaaacucag

SEQ ID NO: 2142420 - RNA, 19 nt, Artificial Sequence
  Description of Artificial Sequence: Synthetic oligonucleotide
  Sense strand starting at position 1497 of SEQ ID NO: 1882718
guucuaugcgcuccucaca

SEQ ID NO: 2142421 - RNA, 19 nt, Artificial Sequence
  Description of Artificial Sequence: Synthetic oligonucleotide
  Antisense strand to SEQ ID NO: 2142420
ugugaggagcgcauagaac

SEQ ID NO: 2142422 - RNA, 19 nt, Artificial Sequence
  Description of Artificial Sequence: Synthetic oligonucleotide
  Sense strand starting at position 1572 of SEQ ID NO: 1882718
gcgcggugucagccggauu

SEQ ID NO: 2142423 - RNA, 19 nt, Artificial Sequence
  Description of Artificial Sequence: Synthetic oligonucleotide
  Antisense strand to SEQ ID NO: 2142422
aauccggcugacaccgcgc

SEQ ID NO: 2142424 - RNA, 19 nt, Artificial Sequence
  Description of Artificial Sequence: Synthetic oligonucleotide
  Sense strand starting at position 2126 of SEQ ID NO: 1882718
gugagaaaguuggcacagu

SEQ ID NO: 2142425 - RNA, 19 nt, Artificial Sequence
  Description of Artificial Sequence: Synthetic oligonucleotide
  Antisense strand to SEQ ID NO: 2142424
acugugccaacuuucucac

SEQ ID NO: 2142426 - RNA, 19 nt, Artificial Sequence
  Description of Artificial Sequence: Synthetic oligonucleotide
  Sense strand starting at position 2165 of SEQ ID NO: 1882718
caggucacucagugacaga

SEQ ID NO: 2142427 - RNA, 19 nt, Artificial Sequence
  Description of Artificial Sequence: Synthetic oligonucleotide
  Antisense strand to SEQ ID NO: 2142426
ucugucacugagugaccug

SEQ ID NO: 2142428 - RNA, 19 nt, Artificial Sequence
  Description of Artificial Sequence: Synthetic oligonucleotide
  Sense strand starting at position 2198 of SEQ ID NO: 1882718
augaacuccuuccuggaau

SEQ ID NO: 2142429 - RNA, 19 nt, Artificial Sequence
  Description of Artificial Sequence: Synthetic oligonucleotide
  Antisense strand to SEQ ID NO: 2142428
auuccaggaaggaguucau

SEQ ID NO: 2142430 - RNA, 19 nt, Artificial Sequence
  Description of Artificial Sequence: Synthetic oligonucleotide
  Sense strand starting at position 2460 of SEQ ID NO: 1882718
caaguugugguccaagcua

SEQ ID NO: 2142431 - RNA, 19 nt, Artificial Sequence
  Description of Artificial Sequence: Synthetic oligonucleotide
  Antisense strand to SEQ ID NO: 2142430
uagcuuggaccacaacuug

SEQ ID NO: 2142432 - RNA, 19 nt, Artificial Sequence
  Description of Artificial Sequence: Synthetic oligonucleotide
  Sense strand starting at position 2516 of SEQ ID NO: 1882718
gcguuaaaucaggaagcag

SEQ ID NO: 2142433 - RNA, 19 nt, Artificial Sequence
  Description of Artificial Sequence: Synthetic oligonucleotide
  Antisense strand to SEQ ID NO: 2142432
cugcuuccugauuuaacgc

SEQ ID NO: 2142434 - RNA, 19 nt, Artificial Sequence
  Description of Artificial Sequence: Synthetic oligonucleotide
  Sense strand starting at position 2566 of SEQ ID NO: 1882718
cgcuguuuacucuggaaau

SEQ ID NO: 2142435 - RNA, 19 nt, Artificial Sequence
  Description of Artificial Sequence: Synthetic oligonucleotide
  Antisense strand to SEQ ID NO: 2142434
auuuccagaguaaacagcg

SEQ ID NO: 2142436 - RNA, 19 nt, Artificial Sequence
  Description of Artificial Sequence: Synthetic oligonucleotide
  Sense strand starting at position 2568 of SEQ ID NO: 1882718
cuguuuacucuggaaaucu

SEQ ID NO: 2142437 - RNA, 19 nt, Artificial Sequence
  Description of Artificial Sequence: Synthetic oligonucleotide
  Antisense strand to SEQ ID NO: 2142436
agauuuccagaguaaacag

SEQ ID NO: 2142438 - RNA, 19 nt, Artificial Sequence
  Description of Artificial Sequence: Synthetic oligonucleotide
  Sense strand starting at position 2642 of SEQ ID NO: 1882718
gugggcucgccucaauaca

SEQ ID NO: 2142439 - RNA, 19 nt, Artificial Sequence
  Description of Artificial Sequence: Synthetic oligonucleotide
  Antisense strand to SEQ ID NO: 2142438
uguauugaggcgagcccac

SEQ ID NO: 2142440 - RNA, 19 nt, Artificial Sequence
  Description of Artificial Sequence: Synthetic oligonucleotide
  Sense strand starting at position 2851 of SEQ ID NO: 1882718
gguggaugcuccuugauua

SEQ ID NO: 2142441 - RNA, 19 nt, Artificial Sequence
  Description of Artificial Sequence: Synthetic oligonucleotide
  Antisense strand to SEQ ID NO: 2142440
uaaucaaggagcauccacc

SEQ ID NO: 2142442 - RNA, 19 nt, Artificial Sequence
  Description of Artificial Sequence: Synthetic oligonucleotide
  Sense strand starting at position 2852 of SEQ ID NO: 1882718
guggaugcuccuugauuau

SEQ ID NO: 2142443 - RNA, 19 nt, Artificial Sequence
  Description of Artificial Sequence: Synthetic oligonucleotide
  Antisense strand to SEQ ID NO: 2142442
auaaucaaggagcauccac

SEQ ID NO: 2142444 - RNA, 19 nt, Artificial Sequence
  Description of Artificial Sequence: Synthetic oligonucleotide
  Sense strand starting at position 2859 of SEQ ID NO: 1882718
cuccuugauuauucuggaa

SEQ ID NO: 2142445 - RNA, 19 nt, Artificial Sequence
  Description of Artificial Sequence: Synthetic oligonucleotide
  Antisense strand to SEQ ID NO: 2142444
uuccagaauaaucaaggag

SEQ ID NO: 2142446 - RNA, 19 nt, Artificial Sequence
  Description of Artificial Sequence: Synthetic oligonucleotide
  Sense strand starting at position 2877 of SEQ ID NO: 1882718
aggagcugguaugcuuaau

SEQ ID NO: 2142447 - RNA, 19 nt, Artificial Sequence
  Description of Artificial Sequence: Synthetic oligonucleotide
  Antisense strand to SEQ ID NO: 2142446
auuaagcauaccagcuccu

SEQ ID NO: 2142448 - RNA, 19 nt, Artificial Sequence
  Description of Artificial Sequence: Synthetic oligonucleotide
  Sense strand starting at position 2935 of SEQ ID NO: 1882718
uuuguaucagacuaguguu

SEQ ID NO: 2142449 - RNA, 19 nt, Artificial Sequence
  Description of Artificial Sequence: Synthetic oligonucleotide
  Antisense strand to SEQ ID NO: 2142448
aacacuagucugauacaaa

SEQ ID NO: 2142450 - RNA, 19 nt, Artificial Sequence
  Description of Artificial Sequence: Synthetic oligonucleotide
  Sense strand starting at position 3061 of SEQ ID NO: 1882718
guuauugugacgguagugu

SEQ ID NO: 2142451 - RNA, 19 nt, Artificial Sequence
  Description of Artificial Sequence: Synthetic oligonucleotide
  Antisense strand to SEQ ID NO: 2142450
acacuaccgucacaauaac

SEQ ID NO: 2142452 - RNA, 19 nt, Artificial Sequence
  Description of Artificial Sequence: Synthetic oligonucleotide
  Sense strand starting at position 3110 of SEQ ID NO: 1882718
ccggucugaccaugcuaau

SEQ ID NO: 2142453 - RNA, 19 nt, Artificial Sequence
  Description of Artificial Sequence: Synthetic oligonucleotide
  Antisense strand to SEQ ID NO: 2142452
auuagcauggucagaccgg

SEQ ID NO: 2142454 - RNA, 19 nt, Artificial Sequence
  Description of Artificial Sequence: Synthetic oligonucleotide
  Sense strand starting at position 3119 of SEQ ID NO: 1882718
ccaugcuaaugguuuacau

SEQ ID NO: 2142455 - RNA, 19 nt, Artificial Sequence
  Description of Artificial Sequence: Synthetic oligonucleotide
  Antisense strand to SEQ ID NO: 2142454
auguaaaccauuagcaugg

SEQ ID NO: 2142456 - RNA, 19 nt, Artificial Sequence
  Description of Artificial Sequence: Synthetic oligonucleotide
  Sense strand starting at position 3121 of SEQ ID NO: 1882718
augcuaaugguuuacauca

SEQ ID NO: 2142457 - RNA, 19 nt, Artificial Sequence
  Description of Artificial Sequence: Synthetic oligonucleotide
  Antisense strand to SEQ ID NO: 2142456
ugauguaaaccauuagcau

SEQ ID NO: 2142458 - RNA, 19 nt, Artificial Sequence
  Description of Artificial Sequence: Synthetic oligonucleotide
  Sense strand starting at position 3126 of SEQ ID NO: 1882718
aaugguuuacaucagguua

SEQ ID NO: 2142459 - RNA, 19 nt, Artificial Sequence
  Description of Artificial Sequence: Synthetic oligonucleotide
  Antisense strand to SEQ ID NO: 2142458
uaaccugauguaaaccauu

SEQ ID NO: 2142460 - RNA, 19 nt, Artificial Sequence
  Description of Artificial Sequence: Synthetic oligonucleotide
  Sense strand starting at position 3178 of SEQ ID NO: 1882718
ccgauuugugcugaguucu

SEQ ID NO: 2142461 - RNA, 19 nt, Artificial Sequence
  Description of Artificial Sequence: Synthetic oligonucleotide
  Antisense strand to SEQ ID NO: 2142460
agaacucagcacaaaucgg

SEQ ID NO: 2142462 - RNA, 19 nt, Artificial Sequence
  Description of Artificial Sequence: Synthetic oligonucleotide
  Sense strand starting at position 3186 of SEQ ID NO: 1882718
ugcugaguucuugaucuuu

SEQ ID NO: 2142463 - RNA, 19 nt, Artificial Sequence
  Description of Artificial Sequence: Synthetic oligonucleotide
  Antisense strand to SEQ ID NO: 2142462
aaagaucaagaacucagca

SEQ ID NO: 2142464 - RNA, 19 nt, Artificial Sequence
  Description of Artificial Sequence: Synthetic oligonucleotide
  Sense strand starting at position 3210 of SEQ ID NO: 1882718
accugaguguugccaugaa

SEQ ID NO: 2142465 - RNA, 19 nt, Artificial Sequence
  Description of Artificial Sequence: Synthetic oligonucleotide
  Antisense strand to SEQ ID NO: 2142464
uucauggcaacacucaggu

SEQ ID NO: 2142466 - RNA, 19 nt, Artificial Sequence
  Description of Artificial Sequence: Synthetic oligonucleotide
  Sense strand starting at position 3297 of SEQ ID NO: 1882718
cagggaaaguuggagagua

SEQ ID NO: 2142467 - RNA, 19 nt, Artificial Sequence
  Description of Artificial Sequence: Synthetic oligonucleotide
  Antisense strand to SEQ ID NO: 2142466
uacucuccaacuuucccug

SEQ ID NO: 2142468 - RNA, 19 nt, Artificial Sequence
  Description of Artificial Sequence: Synthetic oligonucleotide
  Sense strand starting at position 3569 of SEQ ID NO: 1882718
gaggaauccucagagaagu

SEQ ID NO: 2142469 - RNA, 19 nt, Artificial Sequence
  Description of Artificial Sequence: Synthetic oligonucleotide
  Antisense strand to SEQ ID NO: 2142468
acuucucugaggauuccuc

SEQ ID NO: 2142470 - RNA, 19 nt, Artificial Sequence
  Description of Artificial Sequence: Synthetic oligonucleotide
  Sense strand starting at position 3783 of SEQ ID NO: 1882718
agcuccuggccaggauaau

SEQ ID NO: 2142471 - RNA, 19 nt, Artificial Sequence
  Description of Artificial Sequence: Synthetic oligonucleotide
  Antisense strand to SEQ ID NO: 2142470
auuauccuggccaggagcu

SEQ ID NO: 2142472 - RNA, 19 nt, Artificial Sequence
  Description of Artificial Sequence: Synthetic oligonucleotide
  Sense strand starting at position 3784 of SEQ ID NO: 1882718
gcuccuggccaggauaaua

SEQ ID NO: 2142473 - RNA, 19 nt, Artificial Sequence
  Description of Artificial Sequence: Synthetic oligonucleotide
  Antisense strand to SEQ ID NO: 2142472
uauuauccuggccaggagc

SEQ ID NO: 2142474 - RNA, 19 nt, Artificial Sequence
  Description of Artificial Sequence: Synthetic oligonucleotide
  Sense strand starting at position 1890 of SEQ ID NO: 1882719
ggcagaauuaccugaccug

SEQ ID NO: 2142475 - RNA, 19 nt, Artificial Sequence
  Description of Artificial Sequence: Synthetic oligonucleotide
  Antisense strand to SEQ ID NO: 2142474
caggucagguaauucugcc

SEQ ID NO: 2142476 - RNA, 19 nt, Artificial Sequence
  Description of Artificial Sequence: Synthetic oligonucleotide
  Sense strand starting at position 1891 of SEQ ID NO: 1882719
gcagaauuaccugaccugu

SEQ ID NO: 2142477 - RNA, 19 nt, Artificial Sequence
  Description of Artificial Sequence: Synthetic oligonucleotide
  Antisense strand to SEQ ID NO: 2142476
acaggucagguaauucugc

SEQ ID NO: 2142478 - RNA, 19 nt, Artificial Sequence
  Description of Artificial Sequence: Synthetic oligonucleotide
  Sense strand starting at position 2388 of SEQ ID NO: 1882719
ccgucauguuucucuacga

SEQ ID NO: 2142479 - RNA, 19 nt, Artificial Sequence
  Description of Artificial Sequence: Synthetic oligonucleotide
  Antisense strand to SEQ ID NO: 2142478
ucguagagaaacaugacgg

SEQ ID NO: 2142480 - RNA, 19 nt, Artificial Sequence
  Description of Artificial Sequence: Synthetic oligonucleotide
  Sense strand starting at position 3150 of SEQ ID NO: 1882719
ugggucuucccauggaaag

SEQ ID NO: 2142481 - RNA, 19 nt, Artificial Sequence
  Description of Artificial Sequence: Synthetic oligonucleotide
  Antisense strand to SEQ ID NO: 2142480
cuuuccaugggaagaccca

SEQ ID NO: 2142482 - RNA, 19 nt, Artificial Sequence
  Description of Artificial Sequence: Synthetic oligonucleotide
  Sense strand starting at position 3152 of SEQ ID NO: 1882719
ggucuucccauggaaagcu

SEQ ID NO: 2142483 - RNA, 19 nt, Artificial Sequence
  Description of Artificial Sequence: Synthetic oligonucleotide
  Antisense strand to SEQ ID NO: 2142482
agcuuuccaugggaagacc

SEQ ID NO: 2142484 - RNA, 19 nt, Artificial Sequence
  Description of Artificial Sequence: Synthetic oligonucleotide
  Sense strand starting at position 3253 of SEQ ID NO: 1882719
guccacucugcccgguaaa

SEQ ID NO: 2142485 - RNA, 19 nt, Artificial Sequence
  Description of Artificial Sequence: Synthetic oligonucleotide
  Antisense strand to SEQ ID NO: 2142484
uuuaccgggcagaguggac

SEQ ID NO: 2142486 - RNA, 19 nt, Artificial Sequence
  Description of Artificial Sequence: Synthetic oligonucleotide
  Sense strand starting at position 3254 of SEQ ID NO: 1882719
uccacucugcccgguaaau

SEQ ID NO: 2142487 - RNA, 19 nt, Artificial Sequence
  Description of Artificial Sequence: Synthetic oligonucleotide
  Antisense strand to SEQ ID NO: 2142486
auuuaccgggcagagugga

SEQ ID NO: 2142488 - RNA, 19 nt, Artificial Sequence
  Description of Artificial Sequence: Synthetic oligonucleotide
  Sense strand starting at position 3256 of SEQ ID NO: 1882719
cacucugcccgguaaauga

SEQ ID NO: 2142489 - RNA, 19 nt, Artificial Sequence
  Description of Artificial Sequence: Synthetic oligonucleotide
  Antisense strand to SEQ ID NO: 2142488
ucauuuaccgggcagagug

SEQ ID NO: 2142490 - RNA, 19 nt, Artificial Sequence
  Description of Artificial Sequence: Synthetic oligonucleotide
  Sense strand starting at position 3264 of SEQ ID NO: 1882719
ccgguaaaugacgaccuau

SEQ ID NO: 2142491 - RNA, 19 nt, Artificial Sequence
  Description of Artificial Sequence: Synthetic oligonucleotide
  Antisense strand to SEQ ID NO: 2142490
auaggucgucauuuaccgg

SEQ ID NO: 2142492 - RNA, 19 nt, Artificial Sequence
  Description of Artificial Sequence: Synthetic oligonucleotide
  Sense strand starting at position 3619 of SEQ ID NO: 1882719
uguagaagcuucgaguauu

SEQ ID NO: 2142493 - RNA, 19 nt, Artificial Sequence
  Description of Artificial Sequence: Synthetic oligonucleotide
  Antisense strand to SEQ ID NO: 2142492
aauacucgaagcuucuaca

SEQ ID NO: 2142494 - RNA, 19 nt, Artificial Sequence
  Description of Artificial Sequence: Synthetic oligonucleotide
  Sense strand starting at position 3776 of SEQ ID NO: 1882719
acuggagcccugggugauu

SEQ ID NO: 2142495 - RNA, 19 nt, Artificial Sequence
  Description of Artificial Sequence: Synthetic oligonucleotide
  Antisense strand to SEQ ID NO: 2142494
aaucacccagggcuccagu

SEQ ID NO: 2142496 - RNA, 19 nt, Artificial Sequence
  Description of Artificial Sequence: Synthetic oligonucleotide
  Sense strand starting at position 3831 of SEQ ID NO: 1882719
cccucuaggcuuuagcaga

SEQ ID NO: 2142497 - RNA, 19 nt, Artificial Sequence
  Description of Artificial Sequence: Synthetic oligonucleotide
  Antisense strand to SEQ ID NO: 2142496
ucugcuaaagccuagaggg

SEQ ID NO: 2142498 - RNA, 19 nt, Artificial Sequence
  Description of Artificial Sequence: Synthetic oligonucleotide
  Sense strand starting at position 3836 of SEQ ID NO: 1882719
uaggcuuuagcagaagaca

SEQ ID NO: 2142499 - RNA, 19 nt, Artificial Sequence
  Description of Artificial Sequence: Synthetic oligonucleotide
  Antisense strand to SEQ ID NO: 2142498
ugucuucugcuaaagccua

SEQ ID NO: 2142500 - RNA, 19 nt, Artificial Sequence
  Description of Artificial Sequence: Synthetic oligonucleotide
  Sense strand starting at position 3937 of SEQ ID NO: 1882719
ggguccgaucccuguguaa

SEQ ID NO: 2142501 - RNA, 19 nt, Artificial Sequence
  Description of Artificial Sequence: Synthetic oligonucleotide
  Antisense strand to SEQ ID NO: 2142500
uuacacagggaucggaccc

SEQ ID NO: 2142502 - RNA, 19 nt, Artificial Sequence
  Description of Artificial Sequence: Synthetic oligonucleotide
  Sense strand starting at position 3939 of SEQ ID NO: 1882719
guccgaucccuguguaacu

SEQ ID NO: 2142503 - RNA, 19 nt, Artificial Sequence
  Description of Artificial Sequence: Synthetic oligonucleotide
  Antisense strand to SEQ ID NO: 2142502
aguuacacagggaucggac

SEQ ID NO: 2142504 - RNA, 19 nt, Artificial Sequence
  Description of Artificial Sequence: Synthetic oligonucleotide
  Sense strand starting at position 3940 of SEQ ID NO: 1882719
uccgaucccuguguaacuu

SEQ ID NO: 2142505 - RNA, 19 nt, Artificial Sequence
  Description of Artificial Sequence: Synthetic oligonucleotide
  Antisense strand to SEQ ID NO: 2142504
aaguuacacagggaucgga

SEQ ID NO: 2142506 - RNA, 19 nt, Artificial Sequence
  Description of Artificial Sequence: Synthetic oligonucleotide
  Sense strand starting at position 12 of SEQ ID NO: 1882720
ccaugcauuuaugcauagu

SEQ ID NO: 2142507 - RNA, 19 nt, Artificial Sequence
  Description of Artificial Sequence: Synthetic oligonucleotide
  Antisense strand to SEQ ID NO: 2142506
acuaugcauaaaugcaugg

SEQ ID NO: 2142508 - RNA, 19 nt, Artificial Sequence
  Description of Artificial Sequence: Synthetic oligonucleotide
  Sense strand starting at position 98 of SEQ ID NO: 1882720
ggauauuugaugugucugu

SEQ ID NO: 2142509 - RNA, 19 nt, Artificial Sequence
  Description of Artificial Sequence: Synthetic oligonucleotide
  Antisense strand to SEQ ID NO: 2142508
acagacacaucaaauaucc

SEQ ID NO: 2142510 - RNA, 19 nt, Artificial Sequence
  Description of Artificial Sequence: Synthetic oligonucleotide
  Sense strand starting at position 99 of SEQ ID NO: 1882720
gauauuugaugugucuguu

SEQ ID NO: 2142511 - RNA, 19 nt, Artificial Sequence
  Description of Artificial Sequence: Synthetic oligonucleotide
  Antisense strand to SEQ ID NO: 2142510
aacagacacaucaaauauc

SEQ ID NO: 2142512 - RNA, 19 nt, Artificial Sequence
  Description of Artificial Sequence: Synthetic oligonucleotide
  Sense strand starting at position 352 of SEQ ID NO: 1882720
gcucauuucuugccuuguu

SEQ ID NO: 2142513 - RNA, 19 nt, Artificial Sequence
  Description of Artificial Sequence: Synthetic oligonucleotide
  Antisense strand to SEQ ID NO: 2142512
aacaaggcaagaaaugagc

SEQ ID NO: 2142514 - RNA, 19 nt, Artificial Sequence
  Description of Artificial Sequence: Synthetic oligonucleotide
  Sense strand starting at position 370 of SEQ ID NO: 1882720
ugcuuugcuccgucauagu

SEQ ID NO: 2142515 - RNA, 19 nt, Artificial Sequence
  Description of Artificial Sequence: Synthetic oligonucleotide
  Antisense strand to SEQ ID NO: 2142514
acuaugacggagcaaagca

SEQ ID NO: 2142516 - RNA, 19 nt, Artificial Sequence
  Description of Artificial Sequence: Synthetic oligonucleotide
  Sense strand starting at position 455 of SEQ ID NO: 1882720
ugccuacuuucucugggau

SEQ ID NO: 2142517 - RNA, 19 nt, Artificial Sequence
  Description of Artificial Sequence: Synthetic oligonucleotide
  Antisense strand to SEQ ID NO: 2142516
aucccagagaaaguaggca

SEQ ID NO: 2142518 - RNA, 19 nt, Artificial Sequence
  Description of Artificial Sequence: Synthetic oligonucleotide
  Sense strand starting at position 456 of SEQ ID NO: 1882720
gccuacuuucucugggauu

SEQ ID NO: 2142519 - RNA, 19 nt, Artificial Sequence
  Description of Artificial Sequence: Synthetic oligonucleotide
  Antisense strand to SEQ ID NO: 2142518
aaucccagagaaaguaggc

SEQ ID NO: 2142520 - RNA, 19 nt, Artificial Sequence
  Description of Artificial Sequence: Synthetic oligonucleotide
  Sense strand starting at position 776 of SEQ ID NO: 1882720
gaaauugcagcuggguuua

SEQ ID NO: 2142521 - RNA, 19 nt, Artificial Sequence
  Description of Artificial Sequence: Synthetic oligonucleotide
  Antisense strand to SEQ ID NO: 2142520
uaaacccagcugcaauuuc

SEQ ID NO: 2142522 - RNA, 19 nt, Artificial Sequence
  Description of Artificial Sequence: Synthetic oligonucleotide
  Sense strand starting at position 781 of SEQ ID NO: 1882720
ugcagcuggguuuauaaca

SEQ ID NO: 2142523 - RNA, 19 nt, Artificial Sequence
  Description of Artificial Sequence: Synthetic oligonucleotide
  Antisense strand to SEQ ID NO: 2142522
uguuauaaacccagcugca

SEQ ID NO: 2142524 - RNA, 19 nt, Artificial Sequence
  Description of Artificial Sequence: Synthetic oligonucleotide
  Sense strand starting at position 821 of SEQ ID NO: 1882720
cagagacuugucuggcacu

SEQ ID NO: 2142525 - RNA, 19 nt, Artificial Sequence
  Description of Artificial Sequence: Synthetic oligonucleotide
  Antisense strand to SEQ ID NO: 2142524
agugccagacaagucucug

SEQ ID NO: 2142526 - RNA, 19 nt, Artificial Sequence
  Description of Artificial Sequence: Synthetic oligonucleotide
  Sense strand starting at position 1005 of SEQ ID NO: 1882720
cauuguuuagaauggaaac

SEQ ID NO: 2142527 - RNA, 19 nt, Artificial Sequence
  Description of Artificial Sequence: Synthetic oligonucleotide
  Antisense strand to SEQ ID NO: 2142526
guuuccauucuaaacaaug

SEQ ID NO: 2142528 - RNA, 19 nt, Artificial Sequence
  Description of Artificial Sequence: Synthetic oligonucleotide
  Sense strand starting at position 1097 of SEQ ID NO: 1882720
ggaacacuuucgccuagau

SEQ ID NO: 2142529 - RNA, 19 nt, Artificial Sequence
  Description of Artificial Sequence: Synthetic oligonucleotide
  Antisense strand to SEQ ID NO: 2142528
aucuaggcgaaaguguucc

SEQ ID NO: 2142530 - RNA, 19 nt, Artificial Sequence
  Description of Artificial Sequence: Synthetic oligonucleotide
  Sense strand starting at position 1159 of SEQ ID NO: 1882720
aucgaaagauucgccuuga

SEQ ID NO: 2142531 - RNA, 19 nt, Artificial Sequence
  Description of Artificial Sequence: Synthetic oligonucleotide
  Antisense strand to SEQ ID NO: 2142530
ucaaggcgaaucuuucgau

SEQ ID NO: 2142532 - RNA, 19 nt, Artificial Sequence
  Description of Artificial Sequence: Synthetic oligonucleotide
  Sense strand starting at position 1160 of SEQ ID NO: 1882720
ucgaaagauucgccuugag

SEQ ID NO: 2142533 - RNA, 19 nt, Artificial Sequence
  Description of Artificial Sequence: Synthetic oligonucleotide
  Antisense strand to SEQ ID NO: 2142532
cucaaggcgaaucuuucga

SEQ ID NO: 2142534 - RNA, 19 nt, Artificial Sequence
  Description of Artificial Sequence: Synthetic oligonucleotide
  Sense strand starting at position 1163 of SEQ ID NO: 1882720
aaagauucgccuugaguga

SEQ ID NO: 2142535 - RNA, 19 nt, Artificial Sequence
  Description of Artificial Sequence: Synthetic oligonucleotide
  Antisense strand to SEQ ID NO: 2142534
ucacucaaggcgaaucuuu

SEQ ID NO: 2142536 - RNA, 19 nt, Artificial Sequence
  Description of Artificial Sequence: Synthetic oligonucleotide
  Sense strand starting at position 1164 of SEQ ID NO: 1882720
aagauucgccuugagugaa

SEQ ID NO: 2142537 - RNA, 19 nt, Artificial Sequence
  Description of Artificial Sequence: Synthetic oligonucleotide
  Antisense strand to SEQ ID NO: 2142536
uucacucaaggcgaaucuu

SEQ ID NO: 2142538 - RNA, 19 nt, Artificial Sequence
  Description of Artificial Sequence: Synthetic oligonucleotide
  Sense strand starting at position 1167 of SEQ ID NO: 1882720
auucgccuugagugaaaug

SEQ ID NO: 2142539 - RNA, 19 nt, Artificial Sequence
  Description of Artificial Sequence: Synthetic oligonucleotide
  Antisense strand to SEQ ID NO: 2142538
cauuucacucaaggcgaau

SEQ ID NO: 2142540 - RNA, 19 nt, Artificial Sequence
  Description of Artificial Sequence: Synthetic oligonucleotide
  Sense strand starting at position 1307 of SEQ ID NO: 1882720
gagagcccugcuuagacau

SEQ ID NO: 2142541 - RNA, 19 nt, Artificial Sequence
  Description of Artificial Sequence: Synthetic oligonucleotide
  Antisense strand to SEQ ID NO: 2142540
augucuaagcagggcucuc

SEQ ID NO: 2142542 - RNA, 19 nt, Artificial Sequence
  Description of Artificial Sequence: Synthetic oligonucleotide
  Sense strand starting at position 1365 of SEQ ID NO: 1882720
cuaaacuuguggccucuua

SEQ ID NO: 2142543 - RNA, 19 nt, Artificial Sequence
  Description of Artificial Sequence: Synthetic oligonucleotide
  Antisense strand to SEQ ID NO: 2142542
uaagaggccacaaguuuag

SEQ ID NO: 2142544 - RNA, 19 nt, Artificial Sequence
  Description of Artificial Sequence: Synthetic oligonucleotide
  Sense strand starting at position 1375 of SEQ ID NO: 1882720
ggccucuuaccuugacaca

SEQ ID NO: 2142545 - RNA, 19 nt, Artificial Sequence
  Description of Artificial Sequence: Synthetic oligonucleotide
  Antisense strand to SEQ ID NO: 2142544
ugugucaagguaagaggcc

SEQ ID NO: 2142546 - RNA, 19 nt, Artificial Sequence
  Description of Artificial Sequence: Synthetic oligonucleotide
  Sense strand starting at position 1387 of SEQ ID NO: 1882720
ugacacauuuccgaaauca

SEQ ID NO: 2142547 - RNA, 19 nt, Artificial Sequence
  Description of Artificial Sequence: Synthetic oligonucleotide
  Antisense strand to SEQ ID NO: 2142546
ugauuucggaaauguguca

SEQ ID NO: 2142548 - RNA, 19 nt, Artificial Sequence
  Description of Artificial Sequence: Synthetic oligonucleotide
  Sense strand starting at position 1459 of SEQ ID NO: 1882720
augcgcguugcuuuaaauu

SEQ ID NO: 2142549 - RNA, 19 nt, Artificial Sequence
  Description of Artificial Sequence: Synthetic oligonucleotide
  Antisense strand to SEQ ID NO: 2142548
aauuuaaagcaacgcgcau

SEQ ID NO: 2142550 - RNA, 19 nt, Artificial Sequence
  Description of Artificial Sequence: Synthetic oligonucleotide
  Sense strand starting at position 1488 of SEQ ID NO: 1882720
ucacuucuugagggugagu

SEQ ID NO: 2142551 - RNA, 19 nt, Artificial Sequence
  Description of Artificial Sequence: Synthetic oligonucleotide
  Antisense strand to SEQ ID NO: 2142550
acucacccucaagaaguga

SEQ ID NO: 2142552 - RNA, 19 nt, Artificial Sequence
  Description of Artificial Sequence: Synthetic oligonucleotide
  Sense strand starting at position 1551 of SEQ ID NO: 1882720
uaccgugcugcucuuagua

SEQ ID NO: 2142553 - RNA, 19 nt, Artificial Sequence
  Description of Artificial Sequence: Synthetic oligonucleotide
  Antisense strand to SEQ ID NO: 2142552
uacuaagagcagcacggua

SEQ ID NO: 2142554 - RNA, 19 nt, Artificial Sequence
  Description of Artificial Sequence: Synthetic oligonucleotide
  Sense strand starting at position 1621 of SEQ ID NO: 1882720
ggcuuugacauugaucgga

SEQ ID NO: 2142555 - RNA, 19 nt, Artificial Sequence
  Description of Artificial Sequence: Synthetic oligonucleotide
  Antisense strand to SEQ ID NO: 2142554
uccgaucaaugucaaagcc

SEQ ID NO: 2142556 - RNA, 19 nt, Artificial Sequence
  Description of Artificial Sequence: Synthetic oligonucleotide
  Sense strand starting at position 1623 of SEQ ID NO: 1882720
cuuugacauugaucggaag

SEQ ID NO: 2142557 - RNA, 19 nt, Artificial Sequence
  Description of Artificial Sequence: Synthetic oligonucleotide
  Antisense strand to SEQ ID NO: 2142556
cuuccgaucaaugucaaag

SEQ ID NO: 2142558 - RNA, 19 nt, Artificial Sequence
  Description of Artificial Sequence: Synthetic oligonucleotide
  Sense strand starting at position 1624 of SEQ ID NO: 1882720
uuugacauugaucggaagu

SEQ ID NO: 2142559 - RNA, 19 nt, Artificial Sequence
  Description of Artificial Sequence: Synthetic oligonucleotide
  Antisense strand to SEQ ID NO: 2142558
acuuccgaucaaugucaaa

SEQ ID NO: 2142560 - RNA, 19 nt, Artificial Sequence
  Description of Artificial Sequence: Synthetic oligonucleotide
  Sense strand starting at position 1625 of SEQ ID NO: 1882720
uugacauugaucggaagug

SEQ ID NO: 2142561 - RNA, 19 nt, Artificial Sequence
  Description of Artificial Sequence: Synthetic oligonucleotide
  Antisense strand to SEQ ID NO: 2142560
cacuuccgaucaaugucaa

SEQ ID NO: 2142562 - RNA, 19 nt, Artificial Sequence
  Description of Artificial Sequence: Synthetic oligonucleotide
  Sense strand starting at position 1987 of SEQ ID NO: 1882720
gagagacuuugguuaaucu

SEQ ID NO: 2142563 - RNA, 19 nt, Artificial Sequence
  Description of Artificial Sequence: Synthetic oligonucleotide
  Antisense strand to SEQ ID NO: 2142562
agauuaaccaaagucucuc

SEQ ID NO: 2142564 - RNA, 19 nt, Artificial Sequence
  Description of Artificial Sequence: Synthetic oligonucleotide
  Sense strand starting at position 2020 of SEQ ID NO: 1882720
ggaagucuuucccuaaacc

SEQ ID NO: 2142565 - RNA, 19 nt, Artificial Sequence
  Description of Artificial Sequence: Synthetic oligonucleotide
  Antisense strand to SEQ ID NO: 2142564
gguuuagggaaagacuucc

SEQ ID NO: 2142566 - RNA, 19 nt, Artificial Sequence
  Description of Artificial Sequence: Synthetic oligonucleotide
  Sense strand starting at position 2375 of SEQ ID NO: 1882720
agaggaaaucggcauccuu

SEQ ID NO: 2142567 - RNA, 19 nt, Artificial Sequence
  Description of Artificial Sequence: Synthetic oligonucleotide
  Antisense strand to SEQ ID NO: 2142566
aaggaugccgauuuccucu

SEQ ID NO: 2142568 - RNA, 19 nt, Artificial Sequence
  Description of Artificial Sequence: Synthetic oligonucleotide
  Sense strand starting at position 2654 of SEQ ID NO: 1882720
uauuccaggcccugagaua

SEQ ID NO: 2142569 - RNA, 19 nt, Artificial Sequence
  Description of Artificial Sequence: Synthetic oligonucleotide
  Antisense strand to SEQ ID NO: 2142568
uaucucagggccuggaaua

SEQ ID NO: 2142570 - RNA, 19 nt, Artificial Sequence
  Description of Artificial Sequence: Synthetic oligonucleotide
  Sense strand starting at position 2842 of SEQ ID NO: 1882720
gcagacauuugguaguaaa

SEQ ID NO: 2142571 - RNA, 19 nt, Artificial Sequence
  Description of Artificial Sequence: Synthetic oligonucleotide
  Antisense strand to SEQ ID NO: 2142570
uuuacuaccaaaugucugc

SEQ ID NO: 2142572 - RNA, 19 nt, Artificial Sequence
  Description of Artificial Sequence: Synthetic oligonucleotide
  Sense strand starting at position 2934 of SEQ ID NO: 1882720
gccuguauaagugcugcaa

SEQ ID NO: 2142573 - RNA, 19 nt, Artificial Sequence
  Description of Artificial Sequence: Synthetic oligonucleotide
  Antisense strand to SEQ ID NO: 2142572
uugcagcacuuauacaggc

SEQ ID NO: 2142574 - RNA, 19 nt, Artificial Sequence
  Description of Artificial Sequence: Synthetic oligonucleotide
  Sense strand starting at position 2938 of SEQ ID NO: 1882720
guauaagugcugcaacaca

SEQ ID NO: 2142575 - RNA, 19 nt, Artificial Sequence
  Description of Artificial Sequence: Synthetic oligonucleotide
  Antisense strand to SEQ ID NO: 2142574
uguguugcagcacuuauac

SEQ ID NO: 2142576 - RNA, 19 nt, Artificial Sequence
  Description of Artificial Sequence: Synthetic oligonucleotide
  Sense strand starting at position 3066 of SEQ ID NO: 1882720
cuggcuuucccagaugaga

SEQ ID NO: 2142577 - RNA, 19 nt, Artificial Sequence
  Description of Artificial Sequence: Synthetic oligonucleotide
  Antisense strand to SEQ ID NO: 2142576
ucucaucugggaaagccag

SEQ ID NO: 2142578 - RNA, 19 nt, Artificial Sequence
  Description of Artificial Sequence: Synthetic oligonucleotide
  Sense strand starting at position 3068 of SEQ ID NO: 1882720
ggcuuucccagaugagauc

SEQ ID NO: 2142579 - RNA, 19 nt, Artificial Sequence
  Description of Artificial Sequence: Synthetic oligonucleotide
  Antisense strand to SEQ ID NO: 2142578
gaucucaucugggaaagcc

SEQ ID NO: 2142580 - RNA, 19 nt, Artificial Sequence
  Description of Artificial Sequence: Synthetic oligonucleotide
  Sense strand starting at position 3255 of SEQ ID NO: 1882720
ugauuaugguuccuuuauu

SEQ ID NO: 2142581 - RNA, 19 nt, Artificial Sequence
  Description of Artificial Sequence: Synthetic oligonucleotide
  Antisense strand to SEQ ID NO: 2142580
aauaaaggaaccauaauca

SEQ ID NO: 2142582 - RNA, 19 nt, Artificial Sequence
  Description of Artificial Sequence: Synthetic oligonucleotide
  Sense strand starting at position 3335 of SEQ ID NO: 1882720
cgaguuuaaccacggaaca

SEQ ID NO: 2142583 - RNA, 19 nt, Artificial Sequence
  Description of Artificial Sequence: Synthetic oligonucleotide
  Antisense strand to SEQ ID NO: 2142582
uguuccgugguuaaacucg

SEQ ID NO: 2142584 - RNA, 19 nt, Artificial Sequence
  Description of Artificial Sequence: Synthetic oligonucleotide
  Sense strand starting at position 3845 of SEQ ID NO: 1882720
acccucauuugguagaaag

SEQ ID NO: 2142585 - RNA, 19 nt, Artificial Sequence
  Description of Artificial Sequence: Synthetic oligonucleotide
  Antisense strand to SEQ ID NO: 2142584
cuuucuaccaaaugagggu

SEQ ID NO: 2142586 - RNA, 19 nt, Artificial Sequence
  Description of Artificial Sequence: Synthetic oligonucleotide
  Sense strand starting at position 6 of SEQ ID NO: 1882721
gggagacauuguuuggauu

SEQ ID NO: 2142587 - RNA, 19 nt, Artificial Sequence
  Description of Artificial Sequence: Synthetic oligonucleotide
  Antisense strand to SEQ ID NO: 2142586
aauccaaacaaugucuccc

SEQ ID NO: 2142588 - RNA, 19 nt, Artificial Sequence
  Description of Artificial Sequence: Synthetic oligonucleotide
  Sense strand starting at position 8 of SEQ ID NO: 1882721
gagacauuguuuggauuuc

SEQ ID NO: 2142589 - RNA, 19 nt, Artificial Sequence
  Description of Artificial Sequence: Synthetic oligonucleotide
  Antisense strand to SEQ ID NO: 2142588
gaaauccaaacaaugucuc

SEQ ID NO: 2142590 - RNA, 19 nt, Artificial Sequence
  Description of Artificial Sequence: Synthetic oligonucleotide
  Sense strand starting at position 155 of SEQ ID NO: 1882721
ugcauucuaucguuauuau

SEQ ID NO: 2142591 - RNA, 19 nt, Artificial Sequence
  Description of Artificial Sequence: Synthetic oligonucleotide
  Antisense strand to SEQ ID NO: 2142590
auaauaacgauagaaugca

SEQ ID NO: 2142592 - RNA, 19 nt, Artificial Sequence
  Description of Artificial Sequence: Synthetic oligonucleotide
  Sense strand starting at position 156 of SEQ ID NO: 1882721
gcauucuaucguuauuaua

SEQ ID NO: 2142593 - RNA, 19 nt, Artificial Sequence
  Description of Artificial Sequence: Synthetic oligonucleotide
  Antisense strand to SEQ ID NO: 2142592
uauaauaacgauagaaugc

SEQ ID NO: 2142594 - RNA, 19 nt, Artificial Sequence
  Description of Artificial Sequence: Synthetic oligonucleotide
  Sense strand starting at position 254 of SEQ ID NO: 1882721
gacgauguuuauguucuua

SEQ ID NO: 2142595 - RNA, 19 nt, Artificial Sequence
  Description of Artificial Sequence: Synthetic oligonucleotide
  Antisense strand to SEQ ID NO: 2142594
uaagaacauaaacaucguc

SEQ ID NO: 2142596 - RNA, 19 nt, Artificial Sequence
  Description of Artificial Sequence: Synthetic oligonucleotide
  Sense strand starting at position 256 of SEQ ID NO: 1882721
cgauguuuauguucuuaua

SEQ ID NO: 2142597 - RNA, 19 nt, Artificial Sequence
  Description of Artificial Sequence: Synthetic oligonucleotide
  Antisense strand to SEQ ID NO: 2142596
uauaagaacauaaacaucg

SEQ ID NO: 2142598 - RNA, 19 nt, Artificial Sequence
  Description of Artificial Sequence: Synthetic oligonucleotide
  Sense strand starting at position 389 of SEQ ID NO: 1882721
cugcaauuacuuuaggcau

SEQ ID NO: 2142599 - RNA, 19 nt, Artificial Sequence
  Description of Artificial Sequence: Synthetic oligonucleotide
  Antisense strand to SEQ ID NO: 2142598
augccuaaaguaauugcag

SEQ ID NO: 2142600 - RNA, 19 nt, Artificial Sequence
  Description of Artificial Sequence: Synthetic oligonucleotide
  Sense strand starting at position 420 of SEQ ID NO: 1882721
uaccuagacggucguaauu

SEQ ID NO: 2142601 - RNA, 19 nt, Artificial Sequence
  Description of Artificial Sequence: Synthetic oligonucleotide
  Antisense strand to SEQ ID NO: 2142600
aauuacgaccgucuaggua

SEQ ID NO: 2142602 - RNA, 19 nt, Artificial Sequence
  Description of Artificial Sequence: Synthetic oligonucleotide
  Sense strand starting at position 422 of SEQ ID NO: 1882721
ccuagacggucguaauuug

SEQ ID NO: 2142603 - RNA, 19 nt, Artificial Sequence
  Description of Artificial Sequence: Synthetic oligonucleotide
  Antisense strand to SEQ ID NO: 2142602
caaauuacgaccgucuagg

SEQ ID NO: 2142604 - RNA, 19 nt, Artificial Sequence
  Description of Artificial Sequence: Synthetic oligonucleotide
  Sense strand starting at position 433 of SEQ ID NO: 1882721
guaauuugucugggcccua

SEQ ID NO: 2142605 - RNA, 19 nt, Artificial Sequence
  Description of Artificial Sequence: Synthetic oligonucleotide
  Antisense strand to SEQ ID NO: 2142604
uagggcccagacaaauuac

SEQ ID NO: 2142606 - RNA, 19 nt, Artificial Sequence
  Description of Artificial Sequence: Synthetic oligonucleotide
  Sense strand starting at position 434 of SEQ ID NO: 1882721
uaauuugucugggcccuau

SEQ ID NO: 2142607 - RNA, 19 nt, Artificial Sequence
  Description of Artificial Sequence: Synthetic oligonucleotide
  Antisense strand to SEQ ID NO: 2142606
auagggcccagacaaauua

SEQ ID NO: 2142608 - RNA, 19 nt, Artificial Sequence
  Description of Artificial Sequence: Synthetic oligonucleotide
  Sense strand starting at position 499 of SEQ ID NO: 1882721
uugcuaguauaucuggauu

SEQ ID NO: 2142609 - RNA, 19 nt, Artificial Sequence
  Description of Artificial Sequence: Synthetic oligonucleotide
  Antisense strand to SEQ ID NO: 2142608
aauccagauauacuagcaa

SEQ ID NO: 2142610 - RNA, 19 nt, Artificial Sequence
  Description of Artificial Sequence: Synthetic oligonucleotide
  Sense strand starting at position 502 of SEQ ID NO: 1882721
cuaguauaucuggauugug

SEQ ID NO: 2142611 - RNA, 19 nt, Artificial Sequence
  Description of Artificial Sequence: Synthetic oligonucleotide
  Antisense strand to SEQ ID NO: 2142610
cacaauccagauauacuag

SEQ ID NO: 2142612 - RNA, 19 nt, Artificial Sequence
  Description of Artificial Sequence: Synthetic oligonucleotide
  Sense strand starting at position 521 of SEQ ID NO: 1882721
gcugucuuggaccagugau

SEQ ID NO: 2142613 - RNA, 19 nt, Artificial Sequence
  Description of Artificial Sequence: Synthetic oligonucleotide
  Antisense strand to SEQ ID NO: 2142612
aucacugguccaagacagc

SEQ ID NO: 2142614 - RNA, 19 nt, Artificial Sequence
  Description of Artificial Sequence: Synthetic oligonucleotide
  Sense strand starting at position 632 of SEQ ID NO: 1882721
gggugucugggucacagau

SEQ ID NO: 2142615 - RNA, 19 nt, Artificial Sequence
  Description of Artificial Sequence: Synthetic oligonucleotide
  Antisense strand to SEQ ID NO: 2142614
aucugugacccagacaccc

SEQ ID NO: 2142616 - RNA, 19 nt, Artificial Sequence
  Description of Artificial Sequence: Synthetic oligonucleotide
  Sense strand starting at position 997 of SEQ ID NO: 1882721
cucgcugggcugcaagauu

SEQ ID NO: 2142617 - RNA, 19 nt, Artificial Sequence
  Description of Artificial Sequence: Synthetic oligonucleotide
  Antisense strand to SEQ ID NO: 2142616
aaucuugcagcccagcgag

SEQ ID NO: 2142618 - RNA, 19 nt, Artificial Sequence
  Description of Artificial Sequence: Synthetic oligonucleotide
  Sense strand starting at position 1650 of SEQ ID NO: 1882721
guaggaauucugggcuuug

SEQ ID NO: 2142619 - RNA, 19 nt, Artificial Sequence
  Description of Artificial Sequence: Synthetic oligonucleotide
  Antisense strand to SEQ ID NO: 2142618
caaagcccagaauuccuac

SEQ ID NO: 2142620 - RNA, 19 nt, Artificial Sequence
  Description of Artificial Sequence: Synthetic oligonucleotide
  Sense strand starting at position 1813 of SEQ ID NO: 1882721
cgggugugagcucaggaaa

SEQ ID NO: 2142621 - RNA, 19 nt, Artificial Sequence
  Description of Artificial Sequence: Synthetic oligonucleotide
  Antisense strand to SEQ ID NO: 2142620
uuuccugagcucacacccg

SEQ ID NO: 2142622 - RNA, 19 nt, Artificial Sequence
  Description of Artificial Sequence: Synthetic oligonucleotide
  Sense strand starting at position 1816 of SEQ ID NO: 1882721
gugugagcucaggaaagaa

SEQ ID NO: 2142623 - RNA, 19 nt, Artificial Sequence
  Description of Artificial Sequence: Synthetic oligonucleotide
  Antisense strand to SEQ ID NO: 2142622
uucuuuccugagcucacac

SEQ ID NO: 2142624 - RNA, 19 nt, Artificial Sequence
  Description of Artificial Sequence: Synthetic oligonucleotide
  Sense strand starting at position 2063 of SEQ ID NO: 1882721
ccgucucugccagauucua

SEQ ID NO: 2142625 - RNA, 19 nt, Artificial Sequence
  Description of Artificial Sequence: Synthetic oligonucleotide
  Antisense strand to SEQ ID NO: 2142624
uagaaucuggcagagacgg

SEQ ID NO: 2142626 - RNA, 19 nt, Artificial Sequence
  Description of Artificial Sequence: Synthetic oligonucleotide
  Sense strand starting at position 2250 of SEQ ID NO: 1882721
guguguuacucugcagaca

SEQ ID NO: 2142627 - RNA, 19 nt, Artificial Sequence
  Description of Artificial Sequence: Synthetic oligonucleotide
  Antisense strand to SEQ ID NO: 2142626
ugucugcagaguaacacac

SEQ ID NO: 2142628 - RNA, 19 nt, Artificial Sequence
  Description of Artificial Sequence: Synthetic oligonucleotide
  Sense strand starting at position 2251 of SEQ ID NO: 1882721
uguguuacucugcagacaa

SEQ ID NO: 2142629 - RNA, 19 nt, Artificial Sequence
  Description of Artificial Sequence: Synthetic oligonucleotide
  Antisense strand to SEQ ID NO: 2142628
uugucugcagaguaacaca

SEQ ID NO: 2142630 - RNA, 19 nt, Artificial Sequence
  Description of Artificial Sequence: Synthetic oligonucleotide
  Sense strand starting at position 2263 of SEQ ID NO: 1882721
cagacaaggccucgguuau

SEQ ID NO: 2142631 - RNA, 19 nt, Artificial Sequence
  Description of Artificial Sequence: Synthetic oligonucleotide
  Antisense strand to SEQ ID NO: 2142630
auaaccgaggccuugucug

SEQ ID NO: 2142632 - RNA, 19 nt, Artificial Sequence
  Description of Artificial Sequence: Synthetic oligonucleotide
  Sense strand starting at position 2276 of SEQ ID NO: 1882721
gguuaugaucacgaccgga

SEQ ID NO: 2142633 - RNA, 19 nt, Artificial Sequence
  Description of Artificial Sequence: Synthetic oligonucleotide
  Antisense strand to SEQ ID NO: 2142632
uccggucgugaucauaacc

SEQ ID NO: 2142634 - RNA, 19 nt, Artificial Sequence
  Description of Artificial Sequence: Synthetic oligonucleotide
  Sense strand starting at position 2367 of SEQ ID NO: 1882721
cagcuuugugugcccauau

SEQ ID NO: 2142635 - RNA, 19 nt, Artificial Sequence
  Description of Artificial Sequence: Synthetic oligonucleotide
  Antisense strand to SEQ ID NO: 2142634
auaugggcacacaaagcug

SEQ ID NO: 2142636 - RNA, 19 nt, Artificial Sequence
  Description of Artificial Sequence: Synthetic oligonucleotide
  Sense strand starting at position 2551 of SEQ ID NO: 1882721
cuugacugcuugcuuacua

SEQ ID NO: 2142637 - RNA, 19 nt, Artificial Sequence
  Description of Artificial Sequence: Synthetic oligonucleotide
  Antisense strand to SEQ ID NO: 2142636
uaguaagcaagcagucaag

SEQ ID NO: 2142638 - RNA, 19 nt, Artificial Sequence
  Description of Artificial Sequence: Synthetic oligonucleotide
  Sense strand starting at position 2572 of SEQ ID NO: 1882721
ggcuuccauuagguacaaa

SEQ ID NO: 2142639 - RNA, 19 nt, Artificial Sequence
  Description of Artificial Sequence: Synthetic oligonucleotide
  Antisense strand to SEQ ID NO: 2142638
uuuguaccuaauggaagcc

SEQ ID NO: 2142640 - RNA, 19 nt, Artificial Sequence
  Description of Artificial Sequence: Synthetic oligonucleotide
  Sense strand starting at position 2816 of SEQ ID NO: 1882721
acagauucgugcccacaaa

SEQ ID NO: 2142641 - RNA, 19 nt, Artificial Sequence
  Description of Artificial Sequence: Synthetic oligonucleotide
  Antisense strand to SEQ ID NO: 2142640
uuugugggcacgaaucugu

SEQ ID NO: 2142642 - RNA, 19 nt, Artificial Sequence
  Description of Artificial Sequence: Synthetic oligonucleotide
  Sense strand starting at position 2817 of SEQ ID NO: 1882721
cagauucgugcccacaaag

SEQ ID NO: 2142643 - RNA, 19 nt, Artificial Sequence
  Description of Artificial Sequence: Synthetic oligonucleotide
  Antisense strand to SEQ ID NO: 2142642
cuuugugggcacgaaucug

SEQ ID NO: 2142644 - RNA, 19 nt, Artificial Sequence
  Description of Artificial Sequence: Synthetic oligonucleotide
  Sense strand starting at position 2869 of SEQ ID NO: 1882721
ggaacucuuucguugcaca

SEQ ID NO: 2142645 - RNA, 19 nt, Artificial Sequence
  Description of Artificial Sequence: Synthetic oligonucleotide
  Antisense strand to SEQ ID NO: 2142644
ugugcaacgaaagaguucc

SEQ ID NO: 2142646 - RNA, 19 nt, Artificial Sequence
  Description of Artificial Sequence: Synthetic oligonucleotide
  Sense strand starting at position 2991 of SEQ ID NO: 1882721
ucagaaaucucagucgaga

SEQ ID NO: 2142647 - RNA, 19 nt, Artificial Sequence
  Description of Artificial Sequence: Synthetic oligonucleotide
  Antisense strand to SEQ ID NO: 2142646
ucucgacugagauuucuga

SEQ ID NO: 2142648 - RNA, 19 nt, Artificial Sequence
  Description of Artificial Sequence: Synthetic oligonucleotide
  Sense strand starting at position 2993 of SEQ ID NO: 1882721
agaaaucucagucgagaag

SEQ ID NO: 2142649 - RNA, 19 nt, Artificial Sequence
  Description of Artificial Sequence: Synthetic oligonucleotide
  Antisense strand to SEQ ID NO: 2142648
cuucucgacugagauuucu

SEQ ID NO: 2142650 - RNA, 19 nt, Artificial Sequence
  Description of Artificial Sequence: Synthetic oligonucleotide
  Sense strand starting at position 3041 of SEQ ID NO: 1882721
uuucuuuaugcauacgcaa

SEQ ID NO: 2142651 - RNA, 19 nt, Artificial Sequence
  Description of Artificial Sequence: Synthetic oligonucleotide
  Antisense strand to SEQ ID NO: 2142650
uugcguaugcauaaagaaa

SEQ ID NO: 2142652 - RNA, 19 nt, Artificial Sequence
  Description of Artificial Sequence: Synthetic oligonucleotide
  Sense strand starting at position 3098 of SEQ ID NO: 1882721
agacuauucuggcuccaaa

SEQ ID NO: 2142653 - RNA, 19 nt, Artificial Sequence
  Description of Artificial Sequence: Synthetic oligonucleotide
  Antisense strand to SEQ ID NO: 2142652
uuuggagccagaauagucu

SEQ ID NO: 2142654 - RNA, 19 nt, Artificial Sequence
  Description of Artificial Sequence: Synthetic oligonucleotide
  Sense strand starting at position 3114 of SEQ ID NO: 1882721
aaaccuuugggcugaagga

SEQ ID NO: 2142655 - RNA, 19 nt, Artificial Sequence
  Description of Artificial Sequence: Synthetic oligonucleotide
  Antisense strand to SEQ ID NO: 2142654
uccuucagcccaaagguuu

SEQ ID NO: 2142656 - RNA, 19 nt, Artificial Sequence
  Description of Artificial Sequence: Synthetic oligonucleotide
  Sense strand starting at position 3278 of SEQ ID NO: 1882721
cugaaauaaucagugucuu

SEQ ID NO: 2142657 - RNA, 19 nt, Artificial Sequence
  Description of Artificial Sequence: Synthetic oligonucleotide
  Antisense strand to SEQ ID NO: 2142656
aagacacugauuauuucag

SEQ ID NO: 2142658 - RNA, 19 nt, Artificial Sequence
  Description of Artificial Sequence: Synthetic oligonucleotide
  Sense strand starting at position 3279 of SEQ ID NO: 1882721
ugaaauaaucagugucuuc

SEQ ID NO: 2142659 - RNA, 19 nt, Artificial Sequence
  Description of Artificial Sequence: Synthetic oligonucleotide
  Antisense strand to SEQ ID NO: 2142658
gaagacacugauuauuuca

SEQ ID NO: 2142660 - RNA, 19 nt, Artificial Sequence
  Description of Artificial Sequence: Synthetic oligonucleotide
  Sense strand starting at position 3286 of SEQ ID NO: 1882721
aucagugucuucucaggca

SEQ ID NO: 2142661 - RNA, 19 nt, Artificial Sequence
  Description of Artificial Sequence: Synthetic oligonucleotide
  Antisense strand to SEQ ID NO: 2142660
ugccugagaagacacugau

SEQ ID NO: 2142662 - RNA, 19 nt, Artificial Sequence
  Description of Artificial Sequence: Synthetic oligonucleotide
  Sense strand starting at position 3369 of SEQ ID NO: 1882721
ggguuuccuccaggguuaa

SEQ ID NO: 2142663 - RNA, 19 nt, Artificial Sequence
  Description of Artificial Sequence: Synthetic oligonucleotide
  Antisense strand to SEQ ID NO: 2142662
uuaacccuggaggaaaccc

SEQ ID NO: 2142664 - RNA, 19 nt, Artificial Sequence
  Description of Artificial Sequence: Synthetic oligonucleotide
  Sense strand starting at position 3370 of SEQ ID NO: 1882721
gguuuccuccaggguuaau

SEQ ID NO: 2142665 - RNA, 19 nt, Artificial Sequence
  Description of Artificial Sequence: Synthetic oligonucleotide
  Antisense strand to SEQ ID NO: 2142664
auuaacccuggaggaaacc

SEQ ID NO: 2142666 - RNA, 19 nt, Artificial Sequence
  Description of Artificial Sequence: Synthetic oligonucleotide
  Sense strand starting at position 12 of SEQ ID NO: 1882722
ccaugcauuuaugcauagu

SEQ ID NO: 2142667 - RNA, 19 nt, Artificial Sequence
  Description of Artificial Sequence: Synthetic oligonucleotide
  Antisense strand to SEQ ID NO: 2142666
acuaugcauaaaugcaugg

SEQ ID NO: 2142668 - RNA, 19 nt, Artificial Sequence
  Description of Artificial Sequence: Synthetic oligonucleotide
  Sense strand starting at position 98 of SEQ ID NO: 1882722
ggauauuugaugugucugu

SEQ ID NO: 2142669 - RNA, 19 nt, Artificial Sequence
  Description of Artificial Sequence: Synthetic oligonucleotide
  Antisense strand to SEQ ID NO: 2142668
acagacacaucaaauaucc

SEQ ID NO: 2142670 - RNA, 19 nt, Artificial Sequence
  Description of Artificial Sequence: Synthetic oligonucleotide
  Sense strand starting at position 99 of SEQ ID NO: 1882722
gauauuugaugugucuguu

SEQ ID NO: 2142671 - RNA, 19 nt, Artificial Sequence
  Description of Artificial Sequence: Synthetic oligonucleotide
  Antisense strand to SEQ ID NO: 2142670
aacagacacaucaaauauc

SEQ ID NO: 2142672 - RNA, 19 nt, Artificial Sequence
  Description of Artificial Sequence: Synthetic oligonucleotide
  Sense strand starting at position 352 of SEQ ID NO: 1882722
gcucauuucuugccuuguu

SEQ ID NO: 2142673 - RNA, 19 nt, Artificial Sequence
  Description of Artificial Sequence: Synthetic oligonucleotide
  Antisense strand to SEQ ID NO: 2142672
aacaaggcaagaaaugagc

SEQ ID NO: 2142674 - RNA, 19 nt, Artificial Sequence
  Description of Artificial Sequence: Synthetic oligonucleotide
  Sense strand starting at position 370 of SEQ ID NO: 1882722
ugcuuugcuccgucauagu

SEQ ID NO: 2142675 - RNA, 19 nt, Artificial Sequence
  Description of Artificial Sequence: Synthetic oligonucleotide
  Antisense strand to SEQ ID NO: 2142674
acuaugacggagcaaagca

SEQ ID NO: 2142676 - RNA, 19 nt, Artificial Sequence
  Description of Artificial Sequence: Synthetic oligonucleotide
  Sense strand starting at position 455 of SEQ ID NO: 1882722
ugccuacuuucucugggau

SEQ ID NO: 2142677 - RNA, 19 nt, Artificial Sequence
  Description of Artificial Sequence: Synthetic oligonucleotide
  Antisense strand to SEQ ID NO: 2142676
aucccagagaaaguaggca

SEQ ID NO: 2142678 - RNA, 19 nt, Artificial Sequence
  Description of Artificial Sequence: Synthetic oligonucleotide
  Sense strand starting at position 456 of SEQ ID NO: 1882722
gccuacuuucucugggauu

SEQ ID NO: 2142679 - RNA, 19 nt, Artificial Sequence
  Description of Artificial Sequence: Synthetic oligonucleotide
  Antisense strand to SEQ ID NO: 2142678
aaucccagagaaaguaggc

SEQ ID NO: 2142680 - RNA, 19 nt, Artificial Sequence
  Description of Artificial Sequence: Synthetic oligonucleotide
  Sense strand starting at position 776 of SEQ ID NO: 1882722
gaaauugcagcuggguuua

SEQ ID NO: 2142681 - RNA, 19 nt, Artificial Sequence
  Description of Artificial Sequence: Synthetic oligonucleotide
  Antisense strand to SEQ ID NO: 2142680
uaaacccagcugcaauuuc

SEQ ID NO: 2142682 - RNA, 19 nt, Artificial Sequence
  Description of Artificial Sequence: Synthetic oligonucleotide
  Sense strand starting at position 781 of SEQ ID NO: 1882722
ugcagcuggguuuauaaca

SEQ ID NO: 2142683 - RNA, 19 nt, Artificial Sequence
  Description of Artificial Sequence: Synthetic oligonucleotide
  Antisense strand to SEQ ID NO: 2142682
uguuauaaacccagcugca

SEQ ID NO: 2142684 - RNA, 19 nt, Artificial Sequence
  Description of Artificial Sequence: Synthetic oligonucleotide
  Sense strand starting at position 821 of SEQ ID NO: 1882722
cagagacuugucuggcacu

SEQ ID NO: 2142685 - RNA, 19 nt, Artificial Sequence
  Description of Artificial Sequence: Synthetic oligonucleotide
  Antisense strand to SEQ ID NO: 2142684
agugccagacaagucucug

SEQ ID NO: 2142686 - RNA, 19 nt, Artificial Sequence
  Description of Artificial Sequence: Synthetic oligonucleotide
  Sense strand starting at position 1005 of SEQ ID NO: 1882722
cauuguuuagaauggaaac

SEQ ID NO: 2142687 - RNA, 19 nt, Artificial Sequence
  Description of Artificial Sequence: Synthetic oligonucleotide
  Antisense strand to SEQ ID NO: 2142686
guuuccauucuaaacaaug

SEQ ID NO: 2142688 - RNA, 19 nt, Artificial Sequence
  Description of Artificial Sequence: Synthetic oligonucleotide
  Sense strand starting at position 1097 of SEQ ID NO: 1882722
ggaacacuuucgccuagau

SEQ ID NO: 2142689 - RNA, 19 nt, Artificial Sequence
  Description of Artificial Sequence: Synthetic oligonucleotide
  Antisense strand to SEQ ID NO: 2142688
aucuaggcgaaaguguucc

SEQ ID NO: 2142690 - RNA, 19 nt, Artificial Sequence
  Description of Artificial Sequence: Synthetic oligonucleotide
  Sense strand starting at position 1159 of SEQ ID NO: 1882722
aucgaaagauucgccuuga

SEQ ID NO: 2142691 - RNA, 19 nt, Artificial Sequence
  Description of Artificial Sequence: Synthetic oligonucleotide
  Antisense strand to SEQ ID NO: 2142690
ucaaggcgaaucuuucgau

SEQ ID NO: 2142692 - RNA, 19 nt, Artificial Sequence
  Description of Artificial Sequence: Synthetic oligonucleotide
  Sense strand starting at position 1160 of SEQ ID NO: 1882722
ucgaaagauucgccuugag

SEQ ID NO: 2142693 - RNA, 19 nt, Artificial Sequence
  Description of Artificial Sequence: Synthetic oligonucleotide
  Antisense strand to SEQ ID NO: 2142692
cucaaggcgaaucuuucga

SEQ ID NO: 2142694 - RNA, 19 nt, Artificial Sequence
  Description of Artificial Sequence: Synthetic oligonucleotide
  Sense strand starting at position 1163 of SEQ ID NO: 1882722
aaagauucgccuugaguga

SEQ ID NO: 2142695 - RNA, 19 nt, Artificial Sequence
  Description of Artificial Sequence: Synthetic oligonucleotide
  Antisense strand to SEQ ID NO: 2142694
ucacucaaggcgaaucuuu

SEQ ID NO: 2142696 - RNA, 19 nt, Artificial Sequence
  Description of Artificial Sequence: Synthetic oligonucleotide
  Sense strand starting at position 1164 of SEQ ID NO: 1882722
aagauucgccuugagugaa

SEQ ID NO: 2142697 - RNA, 19 nt, Artificial Sequence
  Description of Artificial Sequence: Synthetic oligonucleotide
  Antisense strand to SEQ ID NO: 2142696
uucacucaaggcgaaucuu

SEQ ID NO: 2142698 - RNA, 19 nt, Artificial Sequence
  Description of Artificial Sequence: Synthetic oligonucleotide
  Sense strand starting at position 1167 of SEQ ID NO: 1882722
auucgccuugagugaaaug

SEQ ID NO: 2142699 - RNA, 19 nt, Artificial Sequence
  Description of Artificial Sequence: Synthetic oligonucleotide
  Antisense strand to SEQ ID NO: 2142698
cauuucacucaaggcgaau

SEQ ID NO: 2142700 - RNA, 19 nt, Artificial Sequence
  Description of Artificial Sequence: Synthetic oligonucleotide
  Sense strand starting at position 1307 of SEQ ID NO: 1882722
gagagcccugcuuagacau

SEQ ID NO: 2142701 - RNA, 19 nt, Artificial Sequence
  Description of Artificial Sequence: Synthetic oligonucleotide
  Antisense strand to SEQ ID NO: 2142700
augucuaagcagggcucuc

SEQ ID NO: 2142702 - RNA, 19 nt, Artificial Sequence
  Description of Artificial Sequence: Synthetic oligonucleotide
  Sense strand starting at position 1365 of SEQ ID NO: 1882722
cuaaacuuguggccucuua

SEQ ID NO: 2142703 - RNA, 19 nt, Artificial Sequence
  Description of Artificial Sequence: Synthetic oligonucleotide
  Antisense strand to SEQ ID NO: 2142702
uaagaggccacaaguuuag

SEQ ID NO: 2142704 - RNA, 19 nt, Artificial Sequence
  Description of Artificial Sequence: Synthetic oligonucleotide
  Sense strand starting at position 1375 of SEQ ID NO: 1882722
ggccucuuaccuugacaca

SEQ ID NO: 2142705 - RNA, 19 nt, Artificial Sequence
  Description of Artificial Sequence: Synthetic oligonucleotide
  Antisense strand to SEQ ID NO: 2142704
ugugucaagguaagaggcc

SEQ ID NO: 2142706 - RNA, 19 nt, Artificial Sequence
  Description of Artificial Sequence: Synthetic oligonucleotide
  Sense strand starting at position 1387 of SEQ ID NO: 1882722
ugacacauuuccgaaauca

SEQ ID NO: 2142707 - RNA, 19 nt, Artificial Sequence
  Description of Artificial Sequence: Synthetic oligonucleotide
  Antisense strand to SEQ ID NO: 2142706
ugauuucggaaauguguca

SEQ ID NO: 2142708 - RNA, 19 nt, Artificial Sequence
  Description of Artificial Sequence: Synthetic oligonucleotide
  Sense strand starting at position 1459 of SEQ ID NO: 1882722
augcgcguugcuuuaaauu

SEQ ID NO: 2142709 - RNA, 19 nt, Artificial Sequence
  Description of Artificial Sequence: Synthetic oligonucleotide
  Antisense strand to SEQ ID NO: 2142708
aauuuaaagcaacgcgcau

SEQ ID NO: 2142710 - RNA, 19 nt, Artificial Sequence
  Description of Artificial Sequence: Synthetic oligonucleotide
  Sense strand starting at position 1488 of SEQ ID NO: 1882722
ucacuucuugagggugagu

SEQ ID NO: 2142711 - RNA, 19 nt, Artificial Sequence
  Description of Artificial Sequence: Synthetic oligonucleotide
  Antisense strand to SEQ ID NO: 2142710
acucacccucaagaaguga

SEQ ID NO: 2142712 - RNA, 19 nt, Artificial Sequence
  Description of Artificial Sequence: Synthetic oligonucleotide
  Sense strand starting at position 1551 of SEQ ID NO: 1882722
uaccgugcugcucuuagua

SEQ ID NO: 2142713 - RNA, 19 nt, Artificial Sequence
  Description of Artificial Sequence: Synthetic oligonucleotide
  Antisense strand to SEQ ID NO: 2142712
uacuaagagcagcacggua

SEQ ID NO: 2142714 - RNA, 19 nt, Artificial Sequence
  Description of Artificial Sequence: Synthetic oligonucleotide
  Sense strand starting at position 1621 of SEQ ID NO: 1882722
ggcuuugacauugaucgga

SEQ ID NO: 2142715 - RNA, 19 nt, Artificial Sequence
  Description of Artificial Sequence: Synthetic oligonucleotide
  Antisense strand to SEQ ID NO: 2142714
uccgaucaaugucaaagcc

SEQ ID NO: 2142716 - RNA, 19 nt, Artificial Sequence
  Description of Artificial Sequence: Synthetic oligonucleotide
  Sense strand starting at position 1623 of SEQ ID NO: 1882722
cuuugacauugaucggaag

SEQ ID NO: 2142717 - RNA, 19 nt, Artificial Sequence
  Description of Artificial Sequence: Synthetic oligonucleotide
  Antisense strand to SEQ ID NO: 2142716
cuuccgaucaaugucaaag

SEQ ID NO: 2142718 - RNA, 19 nt, Artificial Sequence
  Description of Artificial Sequence: Synthetic oligonucleotide
  Sense strand starting at position 1624 of SEQ ID NO: 1882722
uuugacauugaucggaagu

SEQ ID NO: 2142719 - RNA, 19 nt, Artificial Sequence
  Description of Artificial Sequence: Synthetic oligonucleotide
  Antisense strand to SEQ ID NO: 2142718
acuuccgaucaaugucaaa

SEQ ID NO: 2142720 - RNA, 19 nt, Artificial Sequence
  Description of Artificial Sequence: Synthetic oligonucleotide
  Sense strand starting at position 1625 of SEQ ID NO: 1882722
uugacauugaucggaagug

SEQ ID NO: 2142721 - RNA, 19 nt, Artificial Sequence
  Description of Artificial Sequence: Synthetic oligonucleotide
  Antisense strand to SEQ ID NO: 2142720
cacuuccgaucaaugucaa

SEQ ID NO: 2142722 - RNA, 19 nt, Artificial Sequence
  Description of Artificial Sequence: Synthetic oligonucleotide
  Sense strand starting at position 1987 of SEQ ID NO: 1882722
gagagacuuugguuaaucu

SEQ ID NO: 2142723 - RNA, 19 nt, Artificial Sequence
  Description of Artificial Sequence: Synthetic oligonucleotide
  Antisense strand to SEQ ID NO: 2142722
agauuaaccaaagucucuc

SEQ ID NO: 2142724 - RNA, 19 nt, Artificial Sequence
  Description of Artificial Sequence: Synthetic oligonucleotide
  Sense strand starting at position 2020 of SEQ ID NO: 1882722
ggaagucuuucccuaaacc

SEQ ID NO: 2142725 - RNA, 19 nt, Artificial Sequence
  Description of Artificial Sequence: Synthetic oligonucleotide
  Antisense strand to SEQ ID NO: 2142724
gguuuagggaaagacuucc

SEQ ID NO: 2142726 - RNA, 19 nt, Artificial Sequence
  Description of Artificial Sequence: Synthetic oligonucleotide
  Sense strand starting at position 2375 of SEQ ID NO: 1882722
agaggaaaucggcauccuu

SEQ ID NO: 2142727 - RNA, 19 nt, Artificial Sequence
  Description of Artificial Sequence: Synthetic oligonucleotide
  Antisense strand to SEQ ID NO: 2142726
aaggaugccgauuuccucu

SEQ ID NO: 2142728 - RNA, 19 nt, Artificial Sequence
  Description of Artificial Sequence: Synthetic oligonucleotide
  Sense strand starting at position 2654 of SEQ ID NO: 1882722
uauuccaggcccugagaua

SEQ ID NO: 2142729 - RNA, 19 nt, Artificial Sequence
  Description of Artificial Sequence: Synthetic oligonucleotide
  Antisense strand to SEQ ID NO: 2142728
uaucucagggccuggaaua

SEQ ID NO: 2142730 - RNA, 19 nt, Artificial Sequence
  Description of Artificial Sequence: Synthetic oligonucleotide
  Sense strand starting at position 2842 of SEQ ID NO: 1882722
gcagacauuugguaguaaa

SEQ ID NO: 2142731 - RNA, 19 nt, Artificial Sequence
  Description of Artificial Sequence: Synthetic oligonucleotide
  Antisense strand to SEQ ID NO: 2142730
uuuacuaccaaaugucugc

SEQ ID NO: 2142732 - RNA, 19 nt, Artificial Sequence
  Description of Artificial Sequence: Synthetic oligonucleotide
  Sense strand starting at position 2934 of SEQ ID NO: 1882722
gccuguauaagugcugcaa

SEQ ID NO: 2142733 - RNA, 19 nt, Artificial Sequence
  Description of Artificial Sequence: Synthetic oligonucleotide
  Antisense strand to SEQ ID NO: 2142732
uugcagcacuuauacaggc

SEQ ID NO: 2142734 - RNA, 19 nt, Artificial Sequence
  Description of Artificial Sequence: Synthetic oligonucleotide
  Sense strand starting at position 2938 of SEQ ID NO: 1882722
guauaagugcugcaacaca

SEQ ID NO: 2142735 - RNA, 19 nt, Artificial Sequence
  Description of Artificial Sequence: Synthetic oligonucleotide
  Antisense strand to SEQ ID NO: 2142734
uguguugcagcacuuauac

SEQ ID NO: 2142736 - RNA, 19 nt, Artificial Sequence
  Description of Artificial Sequence: Synthetic oligonucleotide
  Sense strand starting at position 3066 of SEQ ID NO: 1882722
cuggcuuucccagaugaga

SEQ ID NO: 2142737 - RNA, 19 nt, Artificial Sequence
  Description of Artificial Sequence: Synthetic oligonucleotide
  Antisense strand to SEQ ID NO: 2142736
ucucaucugggaaagccag

SEQ ID NO: 2142738 - RNA, 19 nt, Artificial Sequence
  Description of Artificial Sequence: Synthetic oligonucleotide
  Sense strand starting at position 3068 of SEQ ID NO: 1882722
ggcuuucccagaugagauc

SEQ ID NO: 2142739 - RNA, 19 nt, Artificial Sequence
  Description of Artificial Sequence: Synthetic oligonucleotide
  Antisense strand to SEQ ID NO: 2142738
gaucucaucugggaaagcc

SEQ ID NO: 2142740 - RNA, 19 nt, Artificial Sequence
  Description of Artificial Sequence: Synthetic oligonucleotide
  Sense strand starting at position 3255 of SEQ ID NO: 1882722
ugauuaugguuccuuuauu

SEQ ID NO: 2142741 - RNA, 19 nt, Artificial Sequence
  Description of Artificial Sequence: Synthetic oligonucleotide
  Antisense strand to SEQ ID NO: 2142740
aauaaaggaaccauaauca

SEQ ID NO: 2142742 - RNA, 19 nt, Artificial Sequence
  Description of Artificial Sequence: Synthetic oligonucleotide
  Sense strand starting at position 3335 of SEQ ID NO: 1882722
cgaguuuaaccacggaaca

SEQ ID NO: 2142743 - RNA, 19 nt, Artificial Sequence
  Description of Artificial Sequence: Synthetic oligonucleotide
  Antisense strand to SEQ ID NO: 2142742
uguuccgugguuaaacucg

SEQ ID NO: 2142744 - RNA, 19 nt, Artificial Sequence
  Description of Artificial Sequence: Synthetic oligonucleotide
  Sense strand starting at position 3845 of SEQ ID NO: 1882722
acccucauuugguagaaag

SEQ ID NO: 2142745 - RNA, 19 nt, Artificial Sequence
  Description of Artificial Sequence: Synthetic oligonucleotide
  Antisense strand to SEQ ID NO: 2142744
cuuucuaccaaaugagggu

SEQ ID NO: 2142746 - RNA, 19 nt, Artificial Sequence
  Description of Artificial Sequence: Synthetic oligonucleotide
  Sense strand starting at position 177 of SEQ ID NO: 1882723
guccaaguagcuugauuug

SEQ ID NO: 2142747 - RNA, 19 nt, Artificial Sequence
  Description of Artificial Sequence: Synthetic oligonucleotide
  Antisense strand to SEQ ID NO: 2142746
caaaucaagcuacuuggac

SEQ ID NO: 2142748 - RNA, 19 nt, Artificial Sequence
  Description of Artificial Sequence: Synthetic oligonucleotide
  Sense strand starting at position 184 of SEQ ID NO: 1882723
uagcuugauuugugauaag

SEQ ID NO: 2142749 - RNA, 19 nt, Artificial Sequence
  Description of Artificial Sequence: Synthetic oligonucleotide
  Antisense strand to SEQ ID NO: 2142748
cuuaucacaaaucaagcua

SEQ ID NO: 2142750 - RNA, 19 nt, Artificial Sequence
  Description of Artificial Sequence: Synthetic oligonucleotide
  Sense strand starting at position 187 of SEQ ID NO: 1882723
cuugauuugugauaagcaa

SEQ ID NO: 2142751 - RNA, 19 nt, Artificial Sequence
  Description of Artificial Sequence: Synthetic oligonucleotide
  Antisense strand to SEQ ID NO: 2142750
uugcuuaucacaaaucaag

SEQ ID NO: 2142752 - RNA, 19 nt, Artificial Sequence
  Description of Artificial Sequence: Synthetic oligonucleotide
  Sense strand starting at position 198 of SEQ ID NO: 1882723
auaagcaauccuuguaaag

SEQ ID NO: 2142753 - RNA, 19 nt, Artificial Sequence
  Description of Artificial Sequence: Synthetic oligonucleotide
  Antisense strand to SEQ ID NO: 2142752
cuuuacaaggauugcuuau

SEQ ID NO: 2142754 - RNA, 19 nt, Artificial Sequence
  Description of Artificial Sequence: Synthetic oligonucleotide
  Sense strand starting at position 265 of SEQ ID NO: 1882723
auuaguuuacucgacuaca

SEQ ID NO: 2142755 - RNA, 19 nt, Artificial Sequence
  Description of Artificial Sequence: Synthetic oligonucleotide
  Antisense strand to SEQ ID NO: 2142754
uguagucgaguaaacuaau

SEQ ID NO: 2142756 - RNA, 19 nt, Artificial Sequence
  Description of Artificial Sequence: Synthetic oligonucleotide
  Sense strand starting at position 268 of SEQ ID NO: 1882723
aguuuacucgacuacagag

SEQ ID NO: 2142757 - RNA, 19 nt, Artificial Sequence
  Description of Artificial Sequence: Synthetic oligonucleotide
  Antisense strand to SEQ ID NO: 2142756
cucuguagucgaguaaacu

SEQ ID NO: 2142758 - RNA, 19 nt, Artificial Sequence
  Description of Artificial Sequence: Synthetic oligonucleotide
  Sense strand starting at position 337 of SEQ ID NO: 1882723
aggccauuauuuggagaaa

SEQ ID NO: 2142759 - RNA, 19 nt, Artificial Sequence
  Description of Artificial Sequence: Synthetic oligonucleotide
  Antisense strand to SEQ ID NO: 2142758
uuucuccaaauaauggccu

SEQ ID NO: 2142760 - RNA, 19 nt, Artificial Sequence
  Description of Artificial Sequence: Synthetic oligonucleotide
  Sense strand starting at position 382 of SEQ ID NO: 1882723
agugcaauacacgauuaga

SEQ ID NO: 2142761 - RNA, 19 nt, Artificial Sequence
  Description of Artificial Sequence: Synthetic oligonucleotide
  Antisense strand to SEQ ID NO: 2142760
ucuaaucguguauugcacu

SEQ ID NO: 2142762 - RNA, 19 nt, Artificial Sequence
  Description of Artificial Sequence: Synthetic oligonucleotide
  Sense strand starting at position 397 of SEQ ID NO: 1882723
uagauuuguuauugaguca

SEQ ID NO: 2142763 - RNA, 19 nt, Artificial Sequence
  Description of Artificial Sequence: Synthetic oligonucleotide
  Antisense strand to SEQ ID NO: 2142762
ugacucaauaacaaaucua

SEQ ID NO: 2142764 - RNA, 19 nt, Artificial Sequence
  Description of Artificial Sequence: Synthetic oligonucleotide
  Sense strand starting at position 400 of SEQ ID NO: 1882723
auuuguuauugagucaguu

SEQ ID NO: 2142765 - RNA, 19 nt, Artificial Sequence
  Description of Artificial Sequence: Synthetic oligonucleotide
  Antisense strand to SEQ ID NO: 2142764
aacugacucaauaacaaau

SEQ ID NO: 2142766 - RNA, 19 nt, Artificial Sequence
  Description of Artificial Sequence: Synthetic oligonucleotide
  Sense strand starting at position 402 of SEQ ID NO: 1882723
uuguuauugagucaguuac

SEQ ID NO: 2142767 - RNA, 19 nt, Artificial Sequence
  Description of Artificial Sequence: Synthetic oligonucleotide
  Antisense strand to SEQ ID NO: 2142766
guaacugacucaauaacaa

SEQ ID NO: 2142768 - RNA, 19 nt, Artificial Sequence
  Description of Artificial Sequence: Synthetic oligonucleotide
  Sense strand starting at position 404 of SEQ ID NO: 1882723
guuauugagucaguuacag

SEQ ID NO: 2142769 - RNA, 19 nt, Artificial Sequence
  Description of Artificial Sequence: Synthetic oligonucleotide
  Antisense strand to SEQ ID NO: 2142768
cuguaacugacucaauaac

SEQ ID NO: 2142770 - RNA, 19 nt, Artificial Sequence
  Description of Artificial Sequence: Synthetic oligonucleotide
  Sense strand starting at position 439 of SEQ ID NO: 1882723
uaaauaaaucgauguugac

SEQ ID NO: 2142771 - RNA, 19 nt, Artificial Sequence
  Description of Artificial Sequence: Synthetic oligonucleotide
  Antisense strand to SEQ ID NO: 2142770
gucaacaucgauuuauuua

SEQ ID NO: 2142772 - RNA, 19 nt, Artificial Sequence
  Description of Artificial Sequence: Synthetic oligonucleotide
  Sense strand starting at position 445 of SEQ ID NO: 1882723
aaucgauguugacacuuaa

SEQ ID NO: 2142773 - RNA, 19 nt, Artificial Sequence
  Description of Artificial Sequence: Synthetic oligonucleotide
  Antisense strand to SEQ ID NO: 2142772
uuaagugucaacaucgauu

SEQ ID NO: 2142774 - RNA, 19 nt, Artificial Sequence
  Description of Artificial Sequence: Synthetic oligonucleotide
  Sense strand starting at position 508 of SEQ ID NO: 1882723
uguaaauaacuuuggcuau

SEQ ID NO: 2142775 - RNA, 19 nt, Artificial Sequence
  Description of Artificial Sequence: Synthetic oligonucleotide
  Antisense strand to SEQ ID NO: 2142774
auagccaaaguuauuuaca

SEQ ID NO: 2142776 - RNA, 19 nt, Artificial Sequence
  Description of Artificial Sequence: Synthetic oligonucleotide
  Sense strand starting at position 519 of SEQ ID NO: 1882723
uuggcuauuuccuggagag

SEQ ID NO: 2142777 - RNA, 19 nt, Artificial Sequence
  Description of Artificial Sequence: Synthetic oligonucleotide
  Antisense strand to SEQ ID NO: 2142776
cucuccaggaaauagccaa

SEQ ID NO: 2142778 - RNA, 19 nt, Artificial Sequence
  Description of Artificial Sequence: Synthetic oligonucleotide
  Sense strand starting at position 592 of SEQ ID NO: 1882723
cccagauccuuccaagaag

SEQ ID NO: 2142779 - RNA, 19 nt, Artificial Sequence
  Description of Artificial Sequence: Synthetic oligonucleotide
  Antisense strand to SEQ ID NO: 2142778
cuucuuggaaggaucuggg

SEQ ID NO: 2142780 - RNA, 19 nt, Artificial Sequence
  Description of Artificial Sequence: Synthetic oligonucleotide
  Sense strand starting at position 785 of SEQ ID NO: 1882723
aagcuagacucagaguauu

SEQ ID NO: 2142781 - RNA, 19 nt, Artificial Sequence
  Description of Artificial Sequence: Synthetic oligonucleotide
  Antisense strand to SEQ ID NO: 2142780
aauacucugagucuagcuu

SEQ ID NO: 2142782 - RNA, 19 nt, Artificial Sequence
  Description of Artificial Sequence: Synthetic oligonucleotide
  Sense strand starting at position 908 of SEQ ID NO: 1882723
guauuccuccuguggaaug

SEQ ID NO: 2142783 - RNA, 19 nt, Artificial Sequence
  Description of Artificial Sequence: Synthetic oligonucleotide
  Antisense strand to SEQ ID NO: 2142782
cauuccacaggaggaauac

SEQ ID NO: 2142784 - RNA, 19 nt, Artificial Sequence
  Description of Artificial Sequence: Synthetic oligonucleotide
  Sense strand starting at position 941 of SEQ ID NO: 1882723
cacagagcucucugaguuu

SEQ ID NO: 2142785 - RNA, 19 nt, Artificial Sequence
  Description of Artificial Sequence: Synthetic oligonucleotide
  Antisense strand to SEQ ID NO: 2142784
aaacucagagagcucugug

SEQ ID NO: 2142786 - RNA, 19 nt, Artificial Sequence
  Description of Artificial Sequence: Synthetic oligonucleotide
  Sense strand starting at position 2140 of SEQ ID NO: 1882723
gggauagauuuccacguca

SEQ ID NO: 2142787 - RNA, 19 nt, Artificial Sequence
  Description of Artificial Sequence: Synthetic oligonucleotide
  Antisense strand to SEQ ID NO: 2142786
ugacguggaaaucuauccc

SEQ ID NO: 2142788 - RNA, 19 nt, Artificial Sequence
  Description of Artificial Sequence: Synthetic oligonucleotide
  Sense strand starting at position 2142 of SEQ ID NO: 1882723
gauagauuuccacgucagc

SEQ ID NO: 2142789 - RNA, 19 nt, Artificial Sequence
  Description of Artificial Sequence: Synthetic oligonucleotide
  Antisense strand to SEQ ID NO: 2142788
gcugacguggaaaucuauc

SEQ ID NO: 2142790 - RNA, 19 nt, Artificial Sequence
  Description of Artificial Sequence: Synthetic oligonucleotide
  Sense strand starting at position 2214 of SEQ ID NO: 1882723
ggagaaucauguuaagcuc

SEQ ID NO: 2142791 - RNA, 19 nt, Artificial Sequence
  Description of Artificial Sequence: Synthetic oligonucleotide
  Antisense strand to SEQ ID NO: 2142790
gagcuuaacaugauucucc

SEQ ID NO: 2142792 - RNA, 19 nt, Artificial Sequence
  Description of Artificial Sequence: Synthetic oligonucleotide
  Sense strand starting at position 2283 of SEQ ID NO: 1882723
ggucccugcuccucuaaca

SEQ ID NO: 2142793 - RNA, 19 nt, Artificial Sequence
  Description of Artificial Sequence: Synthetic oligonucleotide
  Antisense strand to SEQ ID NO: 2142792
uguuagaggagcagggacc

SEQ ID NO: 2142794 - RNA, 19 nt, Artificial Sequence
  Description of Artificial Sequence: Synthetic oligonucleotide
  Sense strand starting at position 2376 of SEQ ID NO: 1882723
ccgucuucgcgcccaauga

SEQ ID NO: 2142795 - RNA, 19 nt, Artificial Sequence
  Description of Artificial Sequence: Synthetic oligonucleotide
  Antisense strand to SEQ ID NO: 2142794
ucauugggcgcgaagacgg

SEQ ID NO: 2142796 - RNA, 19 nt, Artificial Sequence
  Description of Artificial Sequence: Synthetic oligonucleotide
  Sense strand starting at position 2631 of SEQ ID NO: 1882723
ucguccaauuucuauagca

SEQ ID NO: 2142797 - RNA, 19 nt, Artificial Sequence
  Description of Artificial Sequence: Synthetic oligonucleotide
  Antisense strand to SEQ ID NO: 2142796
ugcuauagaaauuggacga

SEQ ID NO: 2142798 - RNA, 19 nt, Artificial Sequence
  Description of Artificial Sequence: Synthetic oligonucleotide
  Sense strand starting at position 2989 of SEQ ID NO: 1882723
gcgcccugcgcuuuaugaa

SEQ ID NO: 2142799 - RNA, 19 nt, Artificial Sequence
  Description of Artificial Sequence: Synthetic oligonucleotide
  Antisense strand to SEQ ID NO: 2142798
uucauaaagcgcagggcgc

SEQ ID NO: 2142800 - RNA, 19 nt, Artificial Sequence
  Description of Artificial Sequence: Synthetic oligonucleotide
  Sense strand starting at position 2990 of SEQ ID NO: 1882723
cgcccugcgcuuuaugaaa

SEQ ID NO: 2142801 - RNA, 19 nt, Artificial Sequence
  Description of Artificial Sequence: Synthetic oligonucleotide
  Antisense strand to SEQ ID NO: 2142800
uuucauaaagcgcagggcg

SEQ ID NO: 2142802 - RNA, 19 nt, Artificial Sequence
  Description of Artificial Sequence: Synthetic oligonucleotide
  Sense strand starting at position 3027 of SEQ ID NO: 1882723
cgcagcaccgcuguuaaau

SEQ ID NO: 2142803 - RNA, 19 nt, Artificial Sequence
  Description of Artificial Sequence: Synthetic oligonucleotide
  Antisense strand to SEQ ID NO: 2142802
auuuaacagcggugcugcg

SEQ ID NO: 2142804 - RNA, 19 nt, Artificial Sequence
  Description of Artificial Sequence: Synthetic oligonucleotide
  Sense strand starting at position 3028 of SEQ ID NO: 1882723
gcagcaccgcuguuaaauu

SEQ ID NO: 2142805 - RNA, 19 nt, Artificial Sequence
  Description of Artificial Sequence: Synthetic oligonucleotide
  Antisense strand to SEQ ID NO: 2142804
aauuuaacagcggugcugc

SEQ ID NO: 2142806 - RNA, 19 nt, Artificial Sequence
  Description of Artificial Sequence: Synthetic oligonucleotide
  Sense strand starting at position 3142 of SEQ ID NO: 1882723
ugcugaaauuggccgugaa

SEQ ID NO: 2142807 - RNA, 19 nt, Artificial Sequence
  Description of Artificial Sequence: Synthetic oligonucleotide
  Antisense strand to SEQ ID NO: 2142806
uucacggccaauuucagca

SEQ ID NO: 2142808 - RNA, 19 nt, Artificial Sequence
  Description of Artificial Sequence: Synthetic oligonucleotide
  Sense strand starting at position 3143 of SEQ ID NO: 1882723
gcugaaauuggccgugaaa

SEQ ID NO: 2142809 - RNA, 19 nt, Artificial Sequence
  Description of Artificial Sequence: Synthetic oligonucleotide
  Antisense strand to SEQ ID NO: 2142808
uuucacggccaauuucagc

SEQ ID NO: 2142810 - RNA, 19 nt, Artificial Sequence
  Description of Artificial Sequence: Synthetic oligonucleotide
  Sense strand starting at position 3145 of SEQ ID NO: 1882723
ugaaauuggccgugaaaua

SEQ ID NO: 2142811 - RNA, 19 nt, Artificial Sequence
  Description of Artificial Sequence: Synthetic oligonucleotide
  Antisense strand to SEQ ID NO: 2142810
uauuucacggccaauuuca

SEQ ID NO: 2142812 - RNA, 19 nt, Artificial Sequence
  Description of Artificial Sequence: Synthetic oligonucleotide
  Sense strand starting at position 3146 of SEQ ID NO: 1882723
gaaauuggccgugaaauac

SEQ ID NO: 2142813 - RNA, 19 nt, Artificial Sequence
  Description of Artificial Sequence: Synthetic oligonucleotide
  Antisense strand to SEQ ID NO: 2142812
guauuucacggccaauuuc

SEQ ID NO: 2142814 - RNA, 19 nt, Artificial Sequence
  Description of Artificial Sequence: Synthetic oligonucleotide
  Sense strand starting at position 3434 of SEQ ID NO: 1882723
gcgcguuuaacagauaaag

SEQ ID NO: 2142815 - RNA, 19 nt, Artificial Sequence
  Description of Artificial Sequence: Synthetic oligonucleotide
  Antisense strand to SEQ ID NO: 2142814
cuuuaucuguuaaacgcgc

SEQ ID NO: 2142816 - RNA, 19 nt, Artificial Sequence
  Description of Artificial Sequence: Synthetic oligonucleotide
  Sense strand starting at position 3436 of SEQ ID NO: 1882723
gcguuuaacagauaaagua

SEQ ID NO: 2142817 - RNA, 19 nt, Artificial Sequence
  Description of Artificial Sequence: Synthetic oligonucleotide
  Antisense strand to SEQ ID NO: 2142816
uacuuuaucuguuaaacgc

SEQ ID NO: 2142818 - RNA, 19 nt, Artificial Sequence
  Description of Artificial Sequence: Synthetic oligonucleotide
  Sense strand starting at position 3456 of SEQ ID NO: 1882723
cccgcuuagcucuagcaau

SEQ ID NO: 2142819 - RNA, 19 nt, Artificial Sequence
  Description of Artificial Sequence: Synthetic oligonucleotide
  Antisense strand to SEQ ID NO: 2142818
auugcuagagcuaagcggg

SEQ ID NO: 2142820 - RNA, 19 nt, Artificial Sequence
  Description of Artificial Sequence: Synthetic oligonucleotide
  Sense strand starting at position 3565 of SEQ ID NO: 1882723
ugcccaacugcauguuauu

SEQ ID NO: 2142821 - RNA, 19 nt, Artificial Sequence
  Description of Artificial Sequence: Synthetic oligonucleotide
  Antisense strand to SEQ ID NO: 2142820
aauaacaugcaguugggca

SEQ ID NO: 2142822 - RNA, 19 nt, Artificial Sequence
  Description of Artificial Sequence: Synthetic oligonucleotide
  Sense strand starting at position 3867 of SEQ ID NO: 1882723
caggacucaggcugacaaa

SEQ ID NO: 2142823 - RNA, 19 nt, Artificial Sequence
  Description of Artificial Sequence: Synthetic oligonucleotide
  Antisense strand to SEQ ID NO: 2142822
uuugucagccugaguccug

SEQ ID NO: 2142824 - RNA, 19 nt, Artificial Sequence
  Description of Artificial Sequence: Synthetic oligonucleotide
  Sense strand starting at position 3960 of SEQ ID NO: 1882723
ccuuuacugccuugggaag

SEQ ID NO: 2142825 - RNA, 19 nt, Artificial Sequence
  Description of Artificial Sequence: Synthetic oligonucleotide
  Antisense strand to SEQ ID NO: 2142824
cuucccaaggcaguaaagg

SEQ ID NO: 2142826 - RNA, 19 nt, Artificial Sequence
  Description of Artificial Sequence: Synthetic oligonucleotide
  Sense strand starting at position 215 of SEQ ID NO: 1882724
acagaauugcgugaaggca

SEQ ID NO: 2142827 - RNA, 19 nt, Artificial Sequence
  Description of Artificial Sequence: Synthetic oligonucleotide
  Antisense strand to SEQ ID NO: 2142826
ugccuucacgcaauucugu

SEQ ID NO: 2142828 - RNA, 19 nt, Artificial Sequence
  Description of Artificial Sequence: Synthetic oligonucleotide
  Sense strand starting at position 273 of SEQ ID NO: 1882724
agagguuaccugggucuga

SEQ ID NO: 2142829 - RNA, 19 nt, Artificial Sequence
  Description of Artificial Sequence: Synthetic oligonucleotide
  Antisense strand to SEQ ID NO: 2142828
ucagacccagguaaccucu

SEQ ID NO: 2142830 - RNA, 19 nt, Artificial Sequence
  Description of Artificial Sequence: Synthetic oligonucleotide
  Sense strand starting at position 472 of SEQ ID NO: 1882724
gcaagagaggguugcaaau

SEQ ID NO: 2142831 - RNA, 19 nt, Artificial Sequence
  Description of Artificial Sequence: Synthetic oligonucleotide
  Antisense strand to SEQ ID NO: 2142830
auuugcaacccucucuugc

SEQ ID NO: 2142832 - RNA, 19 nt, Artificial Sequence
  Description of Artificial Sequence: Synthetic oligonucleotide
  Sense strand starting at position 483 of SEQ ID NO: 1882724
uugcaaauacugugaggga

SEQ ID NO: 2142833 - RNA, 19 nt, Artificial Sequence
  Description of Artificial Sequence: Synthetic oligonucleotide
  Antisense strand to SEQ ID NO: 2142832
ucccucacaguauuugcaa

SEQ ID NO: 2142834 - RNA, 19 nt, Artificial Sequence
  Description of Artificial Sequence: Synthetic oligonucleotide
  Sense strand starting at position 490 of SEQ ID NO: 1882724
uacugugagggacgagauu

SEQ ID NO: 2142835 - RNA, 19 nt, Artificial Sequence
  Description of Artificial Sequence: Synthetic oligonucleotide
  Antisense strand to SEQ ID NO: 2142834
aaucucgucccucacagua

SEQ ID NO: 2142836 - RNA, 19 nt, Artificial Sequence
  Description of Artificial Sequence: Synthetic oligonucleotide
  Sense strand starting at position 764 of SEQ ID NO: 1882724
ugauuucgcgccuacagaa

SEQ ID NO: 2142837 - RNA, 19 nt, Artificial Sequence
  Description of Artificial Sequence: Synthetic oligonucleotide
  Antisense strand to SEQ ID NO: 2142836
uucuguaggcgcgaaauca

SEQ ID NO: 2142838 - RNA, 19 nt, Artificial Sequence
  Description of Artificial Sequence: Synthetic oligonucleotide
  Sense strand starting at position 807 of SEQ ID NO: 1882724
aggagaguccgugauugaa

SEQ ID NO: 2142839 - RNA, 19 nt, Artificial Sequence
  Description of Artificial Sequence: Synthetic oligonucleotide
  Antisense strand to SEQ ID NO: 2142838
uucaaucacggacucuccu

SEQ ID NO: 2142840 - RNA, 19 nt, Artificial Sequence
  Description of Artificial Sequence: Synthetic oligonucleotide
  Sense strand starting at position 809 of SEQ ID NO: 1882724
gagaguccgugauugaaug

SEQ ID NO: 2142841 - RNA, 19 nt, Artificial Sequence
  Description of Artificial Sequence: Synthetic oligonucleotide
  Antisense strand to SEQ ID NO: 2142840
cauucaaucacggacucuc

SEQ ID NO: 2142842 - RNA, 19 nt, Artificial Sequence
  Description of Artificial Sequence: Synthetic oligonucleotide
  Sense strand starting at position 817 of SEQ ID NO: 1882724
gugauugaaugcucccaga

SEQ ID NO: 2142843 - RNA, 19 nt, Artificial Sequence
  Description of Artificial Sequence: Synthetic oligonucleotide
  Antisense strand to SEQ ID NO: 2142842
ucugggagcauucaaucac

SEQ ID NO: 2142844 - RNA, 19 nt, Artificial Sequence
  Description of Artificial Sequence: Synthetic oligonucleotide
  Sense strand starting at position 1029 of SEQ ID NO: 1882724
aaaguauggguguggagau

SEQ ID NO: 2142845 - RNA, 19 nt, Artificial Sequence
  Description of Artificial Sequence: Synthetic oligonucleotide
  Antisense strand to SEQ ID NO: 2142844
aucuccacacccauacuuu

SEQ ID NO: 2142846 - RNA, 19 nt, Artificial Sequence
  Description of Artificial Sequence: Synthetic oligonucleotide
  Sense strand starting at position 1146 of SEQ ID NO: 1882724
uggugacucccugauguuc

SEQ ID NO: 2142847 - RNA, 19 nt, Artificial Sequence
  Description of Artificial Sequence: Synthetic oligonucleotide
  Antisense strand to SEQ ID NO: 2142846
gaacaucagggagucacca

SEQ ID NO: 2142848 - RNA, 19 nt, Artificial Sequence
  Description of Artificial Sequence: Synthetic oligonucleotide
  Sense strand starting at position 1462 of SEQ ID NO: 1882724
agagguucuggucaauauu

SEQ ID NO: 2142849 - RNA, 19 nt, Artificial Sequence
  Description of Artificial Sequence: Synthetic oligonucleotide
  Antisense strand to SEQ ID NO: 2142848
aauauugaccagaaccucu

SEQ ID NO: 2142850 - RNA, 19 nt, Artificial Sequence
  Description of Artificial Sequence: Synthetic oligonucleotide
  Sense strand starting at position 1479 of SEQ ID NO: 1882724
uuuaacuucggaggaguuu

SEQ ID NO: 2142851 - RNA, 19 nt, Artificial Sequence
  Description of Artificial Sequence: Synthetic oligonucleotide
  Antisense strand to SEQ ID NO: 2142850
aaacuccuccgaaguuaaa

SEQ ID NO: 2142852 - RNA, 19 nt, Artificial Sequence
  Description of Artificial Sequence: Synthetic oligonucleotide
  Sense strand starting at position 1488 of SEQ ID NO: 1882724
ggaggaguuuggaguugga

SEQ ID NO: 2142853 - RNA, 19 nt, Artificial Sequence
  Description of Artificial Sequence: Synthetic oligonucleotide
  Antisense strand to SEQ ID NO: 2142852
uccaacuccaaacuccucc

SEQ ID NO: 2142854 - RNA, 19 nt, Artificial Sequence
  Description of Artificial Sequence: Synthetic oligonucleotide
  Sense strand starting at position 1498 of SEQ ID NO: 1882724
ggaguuggauuccuuuaag

SEQ ID NO: 2142855 - RNA, 19 nt, Artificial Sequence
  Description of Artificial Sequence: Synthetic oligonucleotide
  Antisense strand to SEQ ID NO: 2142854
cuuaaaggaauccaacucc

SEQ ID NO: 2142856 - RNA, 19 nt, Artificial Sequence
  Description of Artificial Sequence: Synthetic oligonucleotide
  Sense strand starting at position 1501 of SEQ ID NO: 1882724
guuggauuccuuuaagcuu

SEQ ID NO: 2142857 - RNA, 19 nt, Artificial Sequence
  Description of Artificial Sequence: Synthetic oligonucleotide
  Antisense strand to SEQ ID NO: 2142856
aagcuuaaaggaauccaac

SEQ ID NO: 2142858 - RNA, 19 nt, Artificial Sequence
  Description of Artificial Sequence: Synthetic oligonucleotide
  Sense strand starting at position 1766 of SEQ ID NO: 1882724
gaggcugugaguuaagaaa

SEQ ID NO: 2142859 - RNA, 19 nt, Artificial Sequence
  Description of Artificial Sequence: Synthetic oligonucleotide
  Antisense strand to SEQ ID NO: 2142858
uuucuuaacucacagccuc

SEQ ID NO: 2142860 - RNA, 19 nt, Artificial Sequence
  Description of Artificial Sequence: Synthetic oligonucleotide
  Sense strand starting at position 1855 of SEQ ID NO: 1882724
ccuuuccuucggcaugaga

SEQ ID NO: 2142861 - RNA, 19 nt, Artificial Sequence
  Description of Artificial Sequence: Synthetic oligonucleotide
  Antisense strand to SEQ ID NO: 2142860
ucucaugccgaaggaaagg

SEQ ID NO: 2142862 - RNA, 19 nt, Artificial Sequence
  Description of Artificial Sequence: Synthetic oligonucleotide
  Sense strand starting at position 2049 of SEQ ID NO: 1882724
cuuaauuuguccucuuagu

SEQ ID NO: 2142863 - RNA, 19 nt, Artificial Sequence
  Description of Artificial Sequence: Synthetic oligonucleotide
  Antisense strand to SEQ ID NO: 2142862
acuaagaggacaaauuaag

SEQ ID NO: 2142864 - RNA, 19 nt, Artificial Sequence
  Description of Artificial Sequence: Synthetic oligonucleotide
  Sense strand starting at position 2287 of SEQ ID NO: 1882724
uagauaucagguuguuaau

SEQ ID NO: 2142865 - RNA, 19 nt, Artificial Sequence
  Description of Artificial Sequence: Synthetic oligonucleotide
  Antisense strand to SEQ ID NO: 2142864
auuaacaaccugauaucua

SEQ ID NO: 2142866 - RNA, 19 nt, Artificial Sequence
  Description of Artificial Sequence: Synthetic oligonucleotide
  Sense strand starting at position 2289 of SEQ ID NO: 1882724
gauaucagguuguuaauua

SEQ ID NO: 2142867 - RNA, 19 nt, Artificial Sequence
  Description of Artificial Sequence: Synthetic oligonucleotide
  Antisense strand to SEQ ID NO: 2142866
uaauuaacaaccugauauc

SEQ ID NO: 2142868 - RNA, 19 nt, Artificial Sequence
  Description of Artificial Sequence: Synthetic oligonucleotide
  Sense strand starting at position 2340 of SEQ ID NO: 1882724
cugauaugguguucuggau

SEQ ID NO: 2142869 - RNA, 19 nt, Artificial Sequence
  Description of Artificial Sequence: Synthetic oligonucleotide
  Antisense strand to SEQ ID NO: 2142868
auccagaacaccauaucag

SEQ ID NO: 2142870 - RNA, 19 nt, Artificial Sequence
  Description of Artificial Sequence: Synthetic oligonucleotide
  Sense strand starting at position 2344 of SEQ ID NO: 1882724
uaugguguucuggauacaa

SEQ ID NO: 2142871 - RNA, 19 nt, Artificial Sequence
  Description of Artificial Sequence: Synthetic oligonucleotide
  Antisense strand to SEQ ID NO: 2142870
uuguauccagaacaccaua

SEQ ID NO: 2142872 - RNA, 19 nt, Artificial Sequence
  Description of Artificial Sequence: Synthetic oligonucleotide
  Sense strand starting at position 2346 of SEQ ID NO: 1882724
ugguguucuggauacaauu

SEQ ID NO: 2142873 - RNA, 19 nt, Artificial Sequence
  Description of Artificial Sequence: Synthetic oligonucleotide
  Antisense strand to SEQ ID NO: 2142872
aauuguauccagaacacca

SEQ ID NO: 2142874 - RNA, 19 nt, Artificial Sequence
  Description of Artificial Sequence: Synthetic oligonucleotide
  Sense strand starting at position 2466 of SEQ ID NO: 1882724
auuuguaacucuguguaua

SEQ ID NO: 2142875 - RNA, 19 nt, Artificial Sequence
  Description of Artificial Sequence: Synthetic oligonucleotide
  Antisense strand to SEQ ID NO: 2142874
uauacacagaguuacaaau

SEQ ID NO: 2142876 - RNA, 19 nt, Artificial Sequence
  Description of Artificial Sequence: Synthetic oligonucleotide
  Sense strand starting at position 2469 of SEQ ID NO: 1882724
uguaacucuguguauauga

SEQ ID NO: 2142877 - RNA, 19 nt, Artificial Sequence
  Description of Artificial Sequence: Synthetic oligonucleotide
  Antisense strand to SEQ ID NO: 2142876
ucauauacacagaguuaca

SEQ ID NO: 2142878 - RNA, 19 nt, Artificial Sequence
  Description of Artificial Sequence: Synthetic oligonucleotide
  Sense strand starting at position 2508 of SEQ ID NO: 1882724
agaacaauugcauguauaa

SEQ ID NO: 2142879 - RNA, 19 nt, Artificial Sequence
  Description of Artificial Sequence: Synthetic oligonucleotide
  Antisense strand to SEQ ID NO: 2142878
uuauacaugcaauuguucu

SEQ ID NO: 2142880 - RNA, 19 nt, Artificial Sequence
  Description of Artificial Sequence: Synthetic oligonucleotide
  Sense strand starting at position 2544 of SEQ ID NO: 1882724
gggccuuguguauaacaca

SEQ ID NO: 2142881 - RNA, 19 nt, Artificial Sequence
  Description of Artificial Sequence: Synthetic oligonucleotide
  Antisense strand to SEQ ID NO: 2142880
uguguuauacacaaggccc

SEQ ID NO: 2142882 - RNA, 19 nt, Artificial Sequence
  Description of Artificial Sequence: Synthetic oligonucleotide
  Sense strand starting at position 2723 of SEQ ID NO: 1882724
uuaccugaugcugaguaga

SEQ ID NO: 2142883 - RNA, 19 nt, Artificial Sequence
  Description of Artificial Sequence: Synthetic oligonucleotide
  Antisense strand to SEQ ID NO: 2142882
ucuacucagcaucagguaa

SEQ ID NO: 2142884 - RNA, 19 nt, Artificial Sequence
  Description of Artificial Sequence: Synthetic oligonucleotide
  Sense strand starting at position 2751 of SEQ ID NO: 1882724
agauuuaaguaaugggaca

SEQ ID NO: 2142885 - RNA, 19 nt, Artificial Sequence
  Description of Artificial Sequence: Synthetic oligonucleotide
  Antisense strand to SEQ ID NO: 2142884
ugucccauuacuuaaaucu

SEQ ID NO: 2142886 - RNA, 19 nt, Artificial Sequence
  Description of Artificial Sequence: Synthetic oligonucleotide
  Sense strand starting at position 2794 of SEQ ID NO: 1882724
gagaaaucagauugcagug

SEQ ID NO: 2142887 - RNA, 19 nt, Artificial Sequence
  Description of Artificial Sequence: Synthetic oligonucleotide
  Antisense strand to SEQ ID NO: 2142886
cacugcaaucugauuucuc

SEQ ID NO: 2142888 - RNA, 19 nt, Artificial Sequence
  Description of Artificial Sequence: Synthetic oligonucleotide
  Sense strand starting at position 2809 of SEQ ID NO: 1882724
aguguuugaguacagauau

SEQ ID NO: 2142889 - RNA, 19 nt, Artificial Sequence
  Description of Artificial Sequence: Synthetic oligonucleotide
  Antisense strand to SEQ ID NO: 2142888
auaucuguacucaaacacu

SEQ ID NO: 2142890 - RNA, 19 nt, Artificial Sequence
  Description of Artificial Sequence: Synthetic oligonucleotide
  Sense strand starting at position 3019 of SEQ ID NO: 1882724
guagcuuugcuccaggaaa

SEQ ID NO: 2142891 - RNA, 19 nt, Artificial Sequence
  Description of Artificial Sequence: Synthetic oligonucleotide
  Antisense strand to SEQ ID NO: 2142890
uuuccuggagcaaagcuac

SEQ ID NO: 2142892 - RNA, 19 nt, Artificial Sequence
  Description of Artificial Sequence: Synthetic oligonucleotide
  Sense strand starting at position 3237 of SEQ ID NO: 1882724
ggagcauuaacuggauguu

SEQ ID NO: 2142893 - RNA, 19 nt, Artificial Sequence
  Description of Artificial Sequence: Synthetic oligonucleotide
  Antisense strand to SEQ ID NO: 2142892
aacauccaguuaaugcucc

SEQ ID NO: 2142894 - RNA, 19 nt, Artificial Sequence
  Description of Artificial Sequence: Synthetic oligonucleotide
  Sense strand starting at position 3238 of SEQ ID NO: 1882724
gagcauuaacuggauguua

SEQ ID NO: 2142895 - RNA, 19 nt, Artificial Sequence
  Description of Artificial Sequence: Synthetic oligonucleotide
  Antisense strand to SEQ ID NO: 2142894
uaacauccaguuaaugcuc

SEQ ID NO: 2142896 - RNA, 19 nt, Artificial Sequence
  Description of Artificial Sequence: Synthetic oligonucleotide
  Sense strand starting at position 3297 of SEQ ID NO: 1882724
ugagcuuugcuggcguuaa

SEQ ID NO: 2142897 - RNA, 19 nt, Artificial Sequence
  Description of Artificial Sequence: Synthetic oligonucleotide
  Antisense strand to SEQ ID NO: 2142896
uuaacgccagcaaagcuca

SEQ ID NO: 2142898 - RNA, 19 nt, Artificial Sequence
  Description of Artificial Sequence: Synthetic oligonucleotide
  Sense strand starting at position 3722 of SEQ ID NO: 1882724
ucucaucuuugaguugaug

SEQ ID NO: 2142899 - RNA, 19 nt, Artificial Sequence
  Description of Artificial Sequence: Synthetic oligonucleotide
  Antisense strand to SEQ ID NO: 2142898
caucaacucaaagaugaga

SEQ ID NO: 2142900 - RNA, 19 nt, Artificial Sequence
  Description of Artificial Sequence: Synthetic oligonucleotide
  Sense strand starting at position 3809 of SEQ ID NO: 1882724
uggagagcucagugugaau

SEQ ID NO: 2142901 - RNA, 19 nt, Artificial Sequence
  Description of Artificial Sequence: Synthetic oligonucleotide
  Antisense strand to SEQ ID NO: 2142900
auucacacugagcucucca

SEQ ID NO: 2142902 - RNA, 19 nt, Artificial Sequence
  Description of Artificial Sequence: Synthetic oligonucleotide
  Sense strand starting at position 3811 of SEQ ID NO: 1882724
gagagcucagugugaauga

SEQ ID NO: 2142903 - RNA, 19 nt, Artificial Sequence
  Description of Artificial Sequence: Synthetic oligonucleotide
  Antisense strand to SEQ ID NO: 2142902
ucauucacacugagcucuc

SEQ ID NO: 2142904 - RNA, 19 nt, Artificial Sequence
  Description of Artificial Sequence: Synthetic oligonucleotide
  Sense strand starting at position 3818 of SEQ ID NO: 1882724
cagugugaaugauugguga

SEQ ID NO: 2142905 - RNA, 19 nt, Artificial Sequence
  Description of Artificial Sequence: Synthetic oligonucleotide
  Antisense strand to SEQ ID NO: 2142904
ucaccaaucauucacacug

SEQ ID NO: 2142906 - RNA, 19 nt, Artificial Sequence
  Description of Artificial Sequence: Synthetic oligonucleotide
  Sense strand starting at position 1 of SEQ ID NO: 1882726
gucaacuaucucgaaggca

SEQ ID NO: 2142907 - RNA, 19 nt, Artificial Sequence
  Description of Artificial Sequence: Synthetic oligonucleotide
  Antisense strand to SEQ ID NO: 2142906
ugccuucgagauaguugac

SEQ ID NO: 2142908 - RNA, 19 nt, Artificial Sequence
  Description of Artificial Sequence: Synthetic oligonucleotide
  Sense strand starting at position 251 of SEQ ID NO: 1882726
ucaauuaucccgcggccuu

SEQ ID NO: 2142909 - RNA, 19 nt, Artificial Sequence
  Description of Artificial Sequence: Synthetic oligonucleotide
  Antisense strand to SEQ ID NO: 2142908
aaggccgcgggauaauuga

SEQ ID NO: 2142910 - RNA, 19 nt, Artificial Sequence
  Description of Artificial Sequence: Synthetic oligonucleotide
  Sense strand starting at position 385 of SEQ ID NO: 1882726
agcgguucucgcaguggau

SEQ ID NO: 2142911 - RNA, 19 nt, Artificial Sequence
  Description of Artificial Sequence: Synthetic oligonucleotide
  Antisense strand to SEQ ID NO: 2142910
auccacugcgagaaccgcu

SEQ ID NO: 2142912 - RNA, 19 nt, Artificial Sequence
  Description of Artificial Sequence: Synthetic oligonucleotide
  Sense strand starting at position 483 of SEQ ID NO: 1882726
gguccuuucuuguugaaac

SEQ ID NO: 2142913 - RNA, 19 nt, Artificial Sequence
  Description of Artificial Sequence: Synthetic oligonucleotide
  Antisense strand to SEQ ID NO: 2142912
guuucaacaagaaaggacc

SEQ ID NO: 2142914 - RNA, 19 nt, Artificial Sequence
  Description of Artificial Sequence: Synthetic oligonucleotide
  Sense strand starting at position 493 of SEQ ID NO: 1882726
uguugaaaccagugguuuc

SEQ ID NO: 2142915 - RNA, 19 nt, Artificial Sequence
  Description of Artificial Sequence: Synthetic oligonucleotide
  Antisense strand to SEQ ID NO: 2142914
gaaaccacugguuucaaca

SEQ ID NO: 2142916 - RNA, 19 nt, Artificial Sequence
  Description of Artificial Sequence: Synthetic oligonucleotide
  Sense strand starting at position 494 of SEQ ID NO: 1882726
guugaaaccagugguuucu

SEQ ID NO: 2142917 - RNA, 19 nt, Artificial Sequence
  Description of Artificial Sequence: Synthetic oligonucleotide
  Antisense strand to SEQ ID NO: 2142916
agaaaccacugguuucaac

SEQ ID NO: 2142918 - RNA, 19 nt, Artificial Sequence
  Description of Artificial Sequence: Synthetic oligonucleotide
  Sense strand starting at position 646 of SEQ ID NO: 1882726
gugggaagaaccuacguuu

SEQ ID NO: 2142919 - RNA, 19 nt, Artificial Sequence
  Description of Artificial Sequence: Synthetic oligonucleotide
  Antisense strand to SEQ ID NO: 2142918
aaacguagguucuucccac

SEQ ID NO: 2142920 - RNA, 19 nt, Artificial Sequence
  Description of Artificial Sequence: Synthetic oligonucleotide
  Sense strand starting at position 674 of SEQ ID NO: 1882726
cuggucagcucgaggugau

SEQ ID NO: 2142921 - RNA, 19 nt, Artificial Sequence
  Description of Artificial Sequence: Synthetic oligonucleotide
  Antisense strand to SEQ ID NO: 2142920
aucaccucgagcugaccag

SEQ ID NO: 2142922 - RNA, 19 nt, Artificial Sequence
  Description of Artificial Sequence: Synthetic oligonucleotide
  Sense strand starting at position 793 of SEQ ID NO: 1882726
gagugaaggccugguuucu

SEQ ID NO: 2142923 - RNA, 19 nt, Artificial Sequence
  Description of Artificial Sequence: Synthetic oligonucleotide
  Antisense strand to SEQ ID NO: 2142922
agaaaccaggccuucacuc

SEQ ID NO: 2142924 - RNA, 19 nt, Artificial Sequence
  Description of Artificial Sequence: Synthetic oligonucleotide
  Sense strand starting at position 954 of SEQ ID NO: 1882726
agguuuccuguuuggagga

SEQ ID NO: 2142925 - RNA, 19 nt, Artificial Sequence
  Description of Artificial Sequence: Synthetic oligonucleotide
  Antisense strand to SEQ ID NO: 2142924
uccuccaaacaggaaaccu

SEQ ID NO: 2142926 - RNA, 19 nt, Artificial Sequence
  Description of Artificial Sequence: Synthetic oligonucleotide
  Sense strand starting at position 1059 of SEQ ID NO: 1882726
gcauuagugucccuacucu

SEQ ID NO: 2142927 - RNA, 19 nt, Artificial Sequence
  Description of Artificial Sequence: Synthetic oligonucleotide
  Antisense strand to SEQ ID NO: 2142926
agaguagggacacuaaugc

SEQ ID NO: 2142928 - RNA, 19 nt, Artificial Sequence
  Description of Artificial Sequence: Synthetic oligonucleotide
  Sense strand starting at position 1082 of SEQ ID NO: 1882726
ugaucugcucgccacugaa

SEQ ID NO: 2142929 - RNA, 19 nt, Artificial Sequence
  Description of Artificial Sequence: Synthetic oligonucleotide
  Antisense strand to SEQ ID NO: 2142928
uucaguggcgagcagauca

SEQ ID NO: 2142930 - RNA, 19 nt, Artificial Sequence
  Description of Artificial Sequence: Synthetic oligonucleotide
  Sense strand starting at position 1337 of SEQ ID NO: 1882726
ccaguucgaugacuacuaa

SEQ ID NO: 2142931 - RNA, 19 nt, Artificial Sequence
  Description of Artificial Sequence: Synthetic oligonucleotide
  Antisense strand to SEQ ID NO: 2142930
uuaguagucaucgaacugg

SEQ ID NO: 2142932 - RNA, 19 nt, Artificial Sequence
  Description of Artificial Sequence: Synthetic oligonucleotide
  Sense strand starting at position 1338 of SEQ ID NO: 1882726
caguucgaugacuacuaau

SEQ ID NO: 2142933 - RNA, 19 nt, Artificial Sequence
  Description of Artificial Sequence: Synthetic oligonucleotide
  Antisense strand to SEQ ID NO: 2142932
auuaguagucaucgaacug

SEQ ID NO: 2142934 - RNA, 19 nt, Artificial Sequence
  Description of Artificial Sequence: Synthetic oligonucleotide
  Sense strand starting at position 1341 of SEQ ID NO: 1882726
uucgaugacuacuaauagu

SEQ ID NO: 2142935 - RNA, 19 nt, Artificial Sequence
  Description of Artificial Sequence: Synthetic oligonucleotide
  Antisense strand to SEQ ID NO: 2142934
acuauuaguagucaucgaa

SEQ ID NO: 2142936 - RNA, 19 nt, Artificial Sequence
  Description of Artificial Sequence: Synthetic oligonucleotide
  Sense strand starting at position 1356 of SEQ ID NO: 1882726
uaguuauagccagauguac

SEQ ID NO: 2142937 - RNA, 19 nt, Artificial Sequence
  Description of Artificial Sequence: Synthetic oligonucleotide
  Antisense strand to SEQ ID NO: 2142936
guacaucuggcuauaacua

SEQ ID NO: 2142938 - RNA, 19 nt, Artificial Sequence
  Description of Artificial Sequence: Synthetic oligonucleotide
  Sense strand starting at position 1408 of SEQ ID NO: 1882726
cgcgcaaaugaguuccuau

SEQ ID NO: 2142939 - RNA, 19 nt, Artificial Sequence
  Description of Artificial Sequence: Synthetic oligonucleotide
  Antisense strand to SEQ ID NO: 2142938
auaggaacucauuugcgcg

SEQ ID NO: 2142940 - RNA, 19 nt, Artificial Sequence
  Description of Artificial Sequence: Synthetic oligonucleotide
  Sense strand starting at position 1547 of SEQ ID NO: 1882726
ucgagucucccggacaaga

SEQ ID NO: 2142941 - RNA, 19 nt, Artificial Sequence
  Description of Artificial Sequence: Synthetic oligonucleotide
  Antisense strand to SEQ ID NO: 2142940
ucuuguccgggagacucga

SEQ ID NO: 2142942 - RNA, 19 nt, Artificial Sequence
  Description of Artificial Sequence: Synthetic oligonucleotide
  Sense strand starting at position 1643 of SEQ ID NO: 1882726
ucguguuucuauucugaua

SEQ ID NO: 2142943 - RNA, 19 nt, Artificial Sequence
  Description of Artificial Sequence: Synthetic oligonucleotide
  Antisense strand to SEQ ID NO: 2142942
uaucagaauagaaacacga

SEQ ID NO: 2142944 - RNA, 19 nt, Artificial Sequence
  Description of Artificial Sequence: Synthetic oligonucleotide
  Sense strand starting at position 1648 of SEQ ID NO: 1882726
uuucuauucugauaaggac

SEQ ID NO: 2142945 - RNA, 19 nt, Artificial Sequence
  Description of Artificial Sequence: Synthetic oligonucleotide
  Antisense strand to SEQ ID NO: 2142944
guccuuaucagaauagaaa

SEQ ID NO: 2142946 - RNA, 19 nt, Artificial Sequence
  Description of Artificial Sequence: Synthetic oligonucleotide
  Sense strand starting at position 2096 of SEQ ID NO: 1882726
ggcacuggcacguauauga

SEQ ID NO: 2142947 - RNA, 19 nt, Artificial Sequence
  Description of Artificial Sequence: Synthetic oligonucleotide
  Antisense strand to SEQ ID NO: 2142946
ucauauacgugccagugcc

SEQ ID NO: 2142948 - RNA, 19 nt, Artificial Sequence
  Description of Artificial Sequence: Synthetic oligonucleotide
  Sense strand starting at position 2107 of SEQ ID NO: 1882726
guauaugagaccugugaca

SEQ ID NO: 2142949 - RNA, 19 nt, Artificial Sequence
  Description of Artificial Sequence: Synthetic oligonucleotide
  Antisense strand to SEQ ID NO: 2142948
ugucacaggucucauauac

SEQ ID NO: 2142950 - RNA, 19 nt, Artificial Sequence
  Description of Artificial Sequence: Synthetic oligonucleotide
  Sense strand starting at position 2221 of SEQ ID NO: 1882726
ugcacugcgucacugauaa

SEQ ID NO: 2142951 - RNA, 19 nt, Artificial Sequence
  Description of Artificial Sequence: Synthetic oligonucleotide
  Antisense strand to SEQ ID NO: 2142950
uuaucagugacgcagugca

SEQ ID NO: 2142952 - RNA, 19 nt, Artificial Sequence
  Description of Artificial Sequence: Synthetic oligonucleotide
  Sense strand starting at position 2607 of SEQ ID NO: 1882726
cccaaagacuccuaggaau

SEQ ID NO: 2142953 - RNA, 19 nt, Artificial Sequence
  Description of Artificial Sequence: Synthetic oligonucleotide
  Antisense strand to SEQ ID NO: 2142952
auuccuaggagucuuuggg

SEQ ID NO: 2142954 - RNA, 19 nt, Artificial Sequence
  Description of Artificial Sequence: Synthetic oligonucleotide
  Sense strand starting at position 2637 of SEQ ID NO: 1882726
gagccuaaugcggauuguu

SEQ ID NO: 2142955 - RNA, 19 nt, Artificial Sequence
  Description of Artificial Sequence: Synthetic oligonucleotide
  Antisense strand to SEQ ID NO: 2142954
aacaauccgcauuaggcuc

SEQ ID NO: 2142956 - RNA, 19 nt, Artificial Sequence
  Description of Artificial Sequence: Synthetic oligonucleotide
  Sense strand starting at position 2640 of SEQ ID NO: 1882726
ccuaaugcggauuguuaaa

SEQ ID NO: 2142957 - RNA, 19 nt, Artificial Sequence
  Description of Artificial Sequence: Synthetic oligonucleotide
  Antisense strand to SEQ ID NO: 2142956
uuuaacaauccgcauuagg

SEQ ID NO: 2142958 - RNA, 19 nt, Artificial Sequence
  Description of Artificial Sequence: Synthetic oligonucleotide
  Sense strand starting at position 2704 of SEQ ID NO: 1882726
cugcauuucucagaagggu

SEQ ID NO: 2142959 - RNA, 19 nt, Artificial Sequence
  Description of Artificial Sequence: Synthetic oligonucleotide
  Antisense strand to SEQ ID NO: 2142958
acccuucugagaaaugcag

SEQ ID NO: 2142960 - RNA, 19 nt, Artificial Sequence
  Description of Artificial Sequence: Synthetic oligonucleotide
  Sense strand starting at position 2713 of SEQ ID NO: 1882726
ucagaagggucauauaauu

SEQ ID NO: 2142961 - RNA, 19 nt, Artificial Sequence
  Description of Artificial Sequence: Synthetic oligonucleotide
  Antisense strand to SEQ ID NO: 2142960
aauuauaugacccuucuga

SEQ ID NO: 2142962 - RNA, 19 nt, Artificial Sequence
  Description of Artificial Sequence: Synthetic oligonucleotide
  Sense strand starting at position 2721 of SEQ ID NO: 1882726
gucauauaauuugggagaa

SEQ ID NO: 2142963 - RNA, 19 nt, Artificial Sequence
  Description of Artificial Sequence: Synthetic oligonucleotide
  Antisense strand to SEQ ID NO: 2142962
uucucccaaauuauaugac

SEQ ID NO: 2142964 - RNA, 19 nt, Artificial Sequence
  Description of Artificial Sequence: Synthetic oligonucleotide
  Sense strand starting at position 2722 of SEQ ID NO: 1882726
ucauauaauuugggagaau

SEQ ID NO: 2142965 - RNA, 19 nt, Artificial Sequence
  Description of Artificial Sequence: Synthetic oligonucleotide
  Antisense strand to SEQ ID NO: 2142964
auucucccaaauuauauga

SEQ ID NO: 2142966 - RNA, 19 nt, Artificial Sequence
  Description of Artificial Sequence: Synthetic oligonucleotide
  Sense strand starting at position 2798 of SEQ ID NO: 1882726
cgacauggcuggucacagu

SEQ ID NO: 2142967 - RNA, 19 nt, Artificial Sequence
  Description of Artificial Sequence: Synthetic oligonucleotide
  Antisense strand to SEQ ID NO: 2142966
acugugaccagccaugucg

SEQ ID NO: 2142968 - RNA, 19 nt, Artificial Sequence
  Description of Artificial Sequence: Synthetic oligonucleotide
  Sense strand starting at position 2812 of SEQ ID NO: 1882726
acaguagcauccucagaga

SEQ ID NO: 2142969 - RNA, 19 nt, Artificial Sequence
  Description of Artificial Sequence: Synthetic oligonucleotide
  Antisense strand to SEQ ID NO: 2142968
ucucugaggaugcuacugu

SEQ ID NO: 2142970 - RNA, 19 nt, Artificial Sequence
  Description of Artificial Sequence: Synthetic oligonucleotide
  Sense strand starting at position 2815 of SEQ ID NO: 1882726
guagcauccucagagagac

SEQ ID NO: 2142971 - RNA, 19 nt, Artificial Sequence
  Description of Artificial Sequence: Synthetic oligonucleotide
  Antisense strand to SEQ ID NO: 2142970
gucucucugaggaugcuac

SEQ ID NO: 2142972 - RNA, 19 nt, Artificial Sequence
  Description of Artificial Sequence: Synthetic oligonucleotide
  Sense strand starting at position 2858 of SEQ ID NO: 1882726
cuacuuacaugguuccaca

SEQ ID NO: 2142973 - RNA, 19 nt, Artificial Sequence
  Description of Artificial Sequence: Synthetic oligonucleotide
  Antisense strand to SEQ ID NO: 2142972
uguggaaccauguaaguag

SEQ ID NO: 2142974 - RNA, 19 nt, Artificial Sequence
  Description of Artificial Sequence: Synthetic oligonucleotide
  Sense strand starting at position 3063 of SEQ ID NO: 1882726
aaacaucucgcuugguaug

SEQ ID NO: 2142975 - RNA, 19 nt, Artificial Sequence
  Description of Artificial Sequence: Synthetic oligonucleotide
  Antisense strand to SEQ ID NO: 2142974
cauaccaagcgagauguuu

SEQ ID NO: 2142976 - RNA, 19 nt, Artificial Sequence
  Description of Artificial Sequence: Synthetic oligonucleotide
  Sense strand starting at position 3064 of SEQ ID NO: 1882726
aacaucucgcuugguauga

SEQ ID NO: 2142977 - RNA, 19 nt, Artificial Sequence
  Description of Artificial Sequence: Synthetic oligonucleotide
  Antisense strand to SEQ ID NO: 2142976
ucauaccaagcgagauguu

SEQ ID NO: 2142978 - RNA, 19 nt, Artificial Sequence
  Description of Artificial Sequence: Synthetic oligonucleotide
  Sense strand starting at position 3065 of SEQ ID NO: 1882726
acaucucgcuugguaugaa

SEQ ID NO: 2142979 - RNA, 19 nt, Artificial Sequence
  Description of Artificial Sequence: Synthetic oligonucleotide
  Antisense strand to SEQ ID NO: 2142978
uucauaccaagcgagaugu

SEQ ID NO: 2142980 - RNA, 19 nt, Artificial Sequence
  Description of Artificial Sequence: Synthetic oligonucleotide
  Sense strand starting at position 3068 of SEQ ID NO: 1882726
ucucgcuugguaugaaaua

SEQ ID NO: 2142981 - RNA, 19 nt, Artificial Sequence
  Description of Artificial Sequence: Synthetic oligonucleotide
  Antisense strand to SEQ ID NO: 2142980
uauuucauaccaagcgaga

SEQ ID NO: 2142982 - RNA, 19 nt, Artificial Sequence
  Description of Artificial Sequence: Synthetic oligonucleotide
  Sense strand starting at position 3641 of SEQ ID NO: 1882726
gcaagcgucugugcauuua

SEQ ID NO: 2142983 - RNA, 19 nt, Artificial Sequence
  Description of Artificial Sequence: Synthetic oligonucleotide
  Antisense strand to SEQ ID NO: 2142982
uaaaugcacagacgcuugc

SEQ ID NO: 2142984 - RNA, 19 nt, Artificial Sequence
  Description of Artificial Sequence: Synthetic oligonucleotide
  Sense strand starting at position 3959 of SEQ ID NO: 1882726
cccgaagggcaucaucaaa

SEQ ID NO: 2142985 - RNA, 19 nt, Artificial Sequence
  Description of Artificial Sequence: Synthetic oligonucleotide
  Antisense strand to SEQ ID NO: 2142984
uuugaugaugcccuucggg

SEQ ID NO: 2142986 - RNA, 19 nt, Artificial Sequence
  Description of Artificial Sequence: Synthetic oligonucleotide
  Sense strand starting at position 81 of SEQ ID NO: 1882725
gauuguucccaggguccaa

SEQ ID NO: 2142987 - RNA, 19 nt, Artificial Sequence
  Description of Artificial Sequence: Synthetic oligonucleotide
  Antisense strand to SEQ ID NO: 2142986
uuggacccugggaacaauc

SEQ ID NO: 2142988 - RNA, 19 nt, Artificial Sequence
  Description of Artificial Sequence: Synthetic oligonucleotide
  Sense strand starting at position 240 of SEQ ID NO: 1882725
acaggaguugguggcuaaa

SEQ ID NO: 2142989 - RNA, 19 nt, Artificial Sequence
  Description of Artificial Sequence: Synthetic oligonucleotide
  Antisense strand to SEQ ID NO: 2142988
uuuagccaccaacuccugu

SEQ ID NO: 2142990 - RNA, 19 nt, Artificial Sequence
  Description of Artificial Sequence: Synthetic oligonucleotide
  Sense strand starting at position 413 of SEQ ID NO: 1882725
uugccucuccgagagacaa

SEQ ID NO: 2142991 - RNA, 19 nt, Artificial Sequence
  Description of Artificial Sequence: Synthetic oligonucleotide
  Antisense strand to SEQ ID NO: 2142990
uugucucucggagaggcaa

SEQ ID NO: 2142992 - RNA, 19 nt, Artificial Sequence
  Description of Artificial Sequence: Synthetic oligonucleotide
  Sense strand starting at position 415 of SEQ ID NO: 1882725
gccucuccgagagacaaau

SEQ ID NO: 2142993 - RNA, 19 nt, Artificial Sequence
  Description of Artificial Sequence: Synthetic oligonucleotide
  Antisense strand to SEQ ID NO: 2142992
auuugucucucggagaggc

SEQ ID NO: 2142994 - RNA, 19 nt, Artificial Sequence
  Description of Artificial Sequence: Synthetic oligonucleotide
  Sense strand starting at position 541 of SEQ ID NO: 1882725
guuuaaaguacugagcagu

SEQ ID NO: 2142995 - RNA, 19 nt, Artificial Sequence
  Description of Artificial Sequence: Synthetic oligonucleotide
  Antisense strand to SEQ ID NO: 2142994
acugcucaguacuuuaaac

SEQ ID NO: 2142996 - RNA, 19 nt, Artificial Sequence
  Description of Artificial Sequence: Synthetic oligonucleotide
  Sense strand starting at position 544 of SEQ ID NO: 1882725
uaaaguacugagcaguauu

SEQ ID NO: 2142997 - RNA, 19 nt, Artificial Sequence
  Description of Artificial Sequence: Synthetic oligonucleotide
  Antisense strand to SEQ ID NO: 2142996
aauacugcucaguacuuua

SEQ ID NO: 2142998 - RNA, 19 nt, Artificial Sequence
  Description of Artificial Sequence: Synthetic oligonucleotide
  Sense strand starting at position 588 of SEQ ID NO: 1882725
uaaggugacuuucugaaac

SEQ ID NO: 2142999 - RNA, 19 nt, Artificial Sequence
  Description of Artificial Sequence: Synthetic oligonucleotide
  Antisense strand to SEQ ID NO: 2142998
guuucagaaagucaccuua

SEQ ID NO: 2143000 - RNA, 19 nt, Artificial Sequence
  Description of Artificial Sequence: Synthetic oligonucleotide
  Sense strand starting at position 682 of SEQ ID NO: 1882725
gccauuauagcgccuguau

SEQ ID NO: 2143001 - RNA, 19 nt, Artificial Sequence
  Description of Artificial Sequence: Synthetic oligonucleotide
  Antisense strand to SEQ ID NO: 2143000
auacaggcgcuauaauggc

SEQ ID NO: 2143002 - RNA, 19 nt, Artificial Sequence
  Description of Artificial Sequence: Synthetic oligonucleotide
  Sense strand starting at position 874 of SEQ ID NO: 1882725
caauguuguguguugcacu

SEQ ID NO: 2143003 - RNA, 19 nt, Artificial Sequence
  Description of Artificial Sequence: Synthetic oligonucleotide
  Antisense strand to SEQ ID NO: 2143002
agugcaacacacaacauug

SEQ ID NO: 2143004 - RNA, 19 nt, Artificial Sequence
  Description of Artificial Sequence: Synthetic oligonucleotide
  Sense strand starting at position 879 of SEQ ID NO: 1882725
uuguguguugcacucaagu

SEQ ID NO: 2143005 - RNA, 19 nt, Artificial Sequence
  Description of Artificial Sequence: Synthetic oligonucleotide
  Antisense strand to SEQ ID NO: 2143004
acuugagugcaacacacaa

SEQ ID NO: 2143006 - RNA, 19 nt, Artificial Sequence
  Description of Artificial Sequence: Synthetic oligonucleotide
  Sense strand starting at position 916 of SEQ ID NO: 1882725
cguggaaguguuccugucu

SEQ ID NO: 2143007 - RNA, 19 nt, Artificial Sequence
  Description of Artificial Sequence: Synthetic oligonucleotide
  Antisense strand to SEQ ID NO: 2143006
agacaggaacacuuccacg

SEQ ID NO: 2143008 - RNA, 19 nt, Artificial Sequence
  Description of Artificial Sequence: Synthetic oligonucleotide
  Sense strand starting at position 1047 of SEQ ID NO: 1882725
acuagugacucugugauga

SEQ ID NO: 2143009 - RNA, 19 nt, Artificial Sequence
  Description of Artificial Sequence: Synthetic oligonucleotide
  Antisense strand to SEQ ID NO: 2143008
ucaucacagagucacuagu

SEQ ID NO: 2143010 - RNA, 19 nt, Artificial Sequence
  Description of Artificial Sequence: Synthetic oligonucleotide
  Sense strand starting at position 1180 of SEQ ID NO: 1882725
uuacaaauauuguccaagu

SEQ ID NO: 2143011 - RNA, 19 nt, Artificial Sequence
  Description of Artificial Sequence: Synthetic oligonucleotide
  Antisense strand to SEQ ID NO: 2143010
acuuggacaauauuuguaa

SEQ ID NO: 2143012 - RNA, 19 nt, Artificial Sequence
  Description of Artificial Sequence: Synthetic oligonucleotide
  Sense strand starting at position 1182 of SEQ ID NO: 1882725
acaaauauuguccaagucu

SEQ ID NO: 2143013 - RNA, 19 nt, Artificial Sequence
  Description of Artificial Sequence: Synthetic oligonucleotide
  Antisense strand to SEQ ID NO: 2143012
agacuuggacaauauuugu

SEQ ID NO: 2143014 - RNA, 19 nt, Artificial Sequence
  Description of Artificial Sequence: Synthetic oligonucleotide
  Sense strand starting at position 1212 of SEQ ID NO: 1882725
gcaaacugugaucagcuuu

SEQ ID NO: 2143015 - RNA, 19 nt, Artificial Sequence
  Description of Artificial Sequence: Synthetic oligonucleotide
  Antisense strand to SEQ ID NO: 2143014
aaagcugaucacaguuugc

SEQ ID NO: 2143016 - RNA, 19 nt, Artificial Sequence
  Description of Artificial Sequence: Synthetic oligonucleotide
  Sense strand starting at position 1533 of SEQ ID NO: 1882725
ccuguccaucucugaggaa

SEQ ID NO: 2143017 - RNA, 19 nt, Artificial Sequence
  Description of Artificial Sequence: Synthetic oligonucleotide
  Antisense strand to SEQ ID NO: 2143016
uuccucagagauggacagg

SEQ ID NO: 2143018 - RNA, 19 nt, Artificial Sequence
  Description of Artificial Sequence: Synthetic oligonucleotide
  Sense strand starting at position 1558 of SEQ ID NO: 1882725
uuaacuugcuggguacaaa

SEQ ID NO: 2143019 - RNA, 19 nt, Artificial Sequence
  Description of Artificial Sequence: Synthetic oligonucleotide
  Antisense strand to SEQ ID NO: 2143018
uuuguacccagcaaguuaa

SEQ ID NO: 2143020 - RNA, 19 nt, Artificial Sequence
  Description of Artificial Sequence: Synthetic oligonucleotide
  Sense strand starting at position 2073 of SEQ ID NO: 1882725
gggccauuaaaguaaguuu

SEQ ID NO: 2143021 - RNA, 19 nt, Artificial Sequence
  Description of Artificial Sequence: Synthetic oligonucleotide
  Antisense strand to SEQ ID NO: 2143020
aaacuuacuuuaauggccc

SEQ ID NO: 2143022 - RNA, 19 nt, Artificial Sequence
  Description of Artificial Sequence: Synthetic oligonucleotide
  Sense strand starting at position 2220 of SEQ ID NO: 1882725
uccagaaguguccaaacca

SEQ ID NO: 2143023 - RNA, 19 nt, Artificial Sequence
  Description of Artificial Sequence: Synthetic oligonucleotide
  Antisense strand to SEQ ID NO: 2143022
ugguuuggacacuucugga

SEQ ID NO: 2143024 - RNA, 19 nt, Artificial Sequence
  Description of Artificial Sequence: Synthetic oligonucleotide
  Sense strand starting at position 2267 of SEQ ID NO: 1882725
cucccuccgaguuaaggua

SEQ ID NO: 2143025 - RNA, 19 nt, Artificial Sequence
  Description of Artificial Sequence: Synthetic oligonucleotide
  Antisense strand to SEQ ID NO: 2143024
uaccuuaacucggagggag

SEQ ID NO: 2143026 - RNA, 19 nt, Artificial Sequence
  Description of Artificial Sequence: Synthetic oligonucleotide
  Sense strand starting at position 2738 of SEQ ID NO: 1882725
cgcucaggaguuugaaaga

SEQ ID NO: 2143027 - RNA, 19 nt, Artificial Sequence
  Description of Artificial Sequence: Synthetic oligonucleotide
  Antisense strand to SEQ ID NO: 2143026
ucuuucaaacuccugagcg

SEQ ID NO: 2143028 - RNA, 19 nt, Artificial Sequence
  Description of Artificial Sequence: Synthetic oligonucleotide
  Sense strand starting at position 2832 of SEQ ID NO: 1882725
ggucauuuggcagggcuga

SEQ ID NO: 2143029 - RNA, 19 nt, Artificial Sequence
  Description of Artificial Sequence: Synthetic oligonucleotide
  Antisense strand to SEQ ID NO: 2143028
ucagcccugccaaaugacc

SEQ ID NO: 2143030 - RNA, 19 nt, Artificial Sequence
  Description of Artificial Sequence: Synthetic oligonucleotide
  Sense strand starting at position 2833 of SEQ ID NO: 1882725
gucauuuggcagggcugaa

SEQ ID NO: 2143031 - RNA, 19 nt, Artificial Sequence
  Description of Artificial Sequence: Synthetic oligonucleotide
  Antisense strand to SEQ ID NO: 2143030
uucagcccugccaaaugac

SEQ ID NO: 2143032 - RNA, 19 nt, Artificial Sequence
  Description of Artificial Sequence: Synthetic oligonucleotide
  Sense strand starting at position 3127 of SEQ ID NO: 1882725
gugagucugaagcaauaaa

SEQ ID NO: 2143033 - RNA, 19 nt, Artificial Sequence
  Description of Artificial Sequence: Synthetic oligonucleotide
  Antisense strand to SEQ ID NO: 2143032
uuuauugcuucagacucac

SEQ ID NO: 2143034 - RNA, 19 nt, Artificial Sequence
  Description of Artificial Sequence: Synthetic oligonucleotide
  Sense strand starting at position 3142 of SEQ ID NO: 1882725
uaaacuuuauggccggauu

SEQ ID NO: 2143035 - RNA, 19 nt, Artificial Sequence
  Description of Artificial Sequence: Synthetic oligonucleotide
  Antisense strand to SEQ ID NO: 2143034
aauccggccauaaaguuua

SEQ ID NO: 2143036 - RNA, 19 nt, Artificial Sequence
  Description of Artificial Sequence: Synthetic oligonucleotide
  Sense strand starting at position 3332 of SEQ ID NO: 1882725
acauuaagauuggagaaau

SEQ ID NO: 2143037 - RNA, 19 nt, Artificial Sequence
  Description of Artificial Sequence: Synthetic oligonucleotide
  Antisense strand to SEQ ID NO: 2143036
auuucuccaaucuuaaugu

SEQ ID NO: 2143038 - RNA, 19 nt, Artificial Sequence
  Description of Artificial Sequence: Synthetic oligonucleotide
  Sense strand starting at position 3385 of SEQ ID NO: 1882725
uccaaacugugcucuaaag

SEQ ID NO: 2143039 - RNA, 19 nt, Artificial Sequence
  Description of Artificial Sequence: Synthetic oligonucleotide
  Antisense strand to SEQ ID NO: 2143038
cuuuagagcacaguuugga

SEQ ID NO: 2143040 - RNA, 19 nt, Artificial Sequence
  Description of Artificial Sequence: Synthetic oligonucleotide
  Sense strand starting at position 3410 of SEQ ID NO: 1882725
gggaaauugaggugucuuc

SEQ ID NO: 2143041 - RNA, 19 nt, Artificial Sequence
  Description of Artificial Sequence: Synthetic oligonucleotide
  Antisense strand to SEQ ID NO: 2143040
gaagacaccucaauuuccc

SEQ ID NO: 2143042 - RNA, 19 nt, Artificial Sequence
  Description of Artificial Sequence: Synthetic oligonucleotide
  Sense strand starting at position 3478 of SEQ ID NO: 1882725
caucauaaacgguaguuua

SEQ ID NO: 2143043 - RNA, 19 nt, Artificial Sequence
  Description of Artificial Sequence: Synthetic oligonucleotide
  Antisense strand to SEQ ID NO: 2143042
uaaacuaccguuuaugaug

SEQ ID NO: 2143044 - RNA, 19 nt, Artificial Sequence
  Description of Artificial Sequence: Synthetic oligonucleotide
  Sense strand starting at position 3498 of SEQ ID NO: 1882725
ggaagaaauugguccuuug

SEQ ID NO: 2143045 - RNA, 19 nt, Artificial Sequence
  Description of Artificial Sequence: Synthetic oligonucleotide
  Antisense strand to SEQ ID NO: 2143044
caaaggaccaauuucuucc

SEQ ID NO: 2143046 - RNA, 19 nt, Artificial Sequence
  Description of Artificial Sequence: Synthetic oligonucleotide
  Sense strand starting at position 3501 of SEQ ID NO: 1882725
agaaauugguccuuuguca

SEQ ID NO: 2143047 - RNA, 19 nt, Artificial Sequence
  Description of Artificial Sequence: Synthetic oligonucleotide
  Antisense strand to SEQ ID NO: 2143046
ugacaaaggaccaauuucu

SEQ ID NO: 2143048 - RNA, 19 nt, Artificial Sequence
  Description of Artificial Sequence: Synthetic oligonucleotide
  Sense strand starting at position 3509 of SEQ ID NO: 1882725
guccuuugucaguaggaga

SEQ ID NO: 2143049 - RNA, 19 nt, Artificial Sequence
  Description of Artificial Sequence: Synthetic oligonucleotide
  Antisense strand to SEQ ID NO: 2143048
ucuccuacugacaaaggac

SEQ ID NO: 2143050 - RNA, 19 nt, Artificial Sequence
  Description of Artificial Sequence: Synthetic oligonucleotide
  Sense strand starting at position 3615 of SEQ ID NO: 1882725
gcaccaaugggugaaguaa

SEQ ID NO: 2143051 - RNA, 19 nt, Artificial Sequence
  Description of Artificial Sequence: Synthetic oligonucleotide
  Antisense strand to SEQ ID NO: 2143050
uuacuucacccauuggugc

SEQ ID NO: 2143052 - RNA, 19 nt, Artificial Sequence
  Description of Artificial Sequence: Synthetic oligonucleotide
  Sense strand starting at position 3624 of SEQ ID NO: 1882725
ggugaaguaaggugaaaua

SEQ ID NO: 2143053 - RNA, 19 nt, Artificial Sequence
  Description of Artificial Sequence: Synthetic oligonucleotide
  Antisense strand to SEQ ID NO: 2143052
uauuucaccuuacuucacc

SEQ ID NO: 2143054 - RNA, 19 nt, Artificial Sequence
  Description of Artificial Sequence: Synthetic oligonucleotide
  Sense strand starting at position 3635 of SEQ ID NO: 1882725
gugaaauaaguuuauccug

SEQ ID NO: 2143055 - RNA, 19 nt, Artificial Sequence
  Description of Artificial Sequence: Synthetic oligonucleotide
  Antisense strand to SEQ ID NO: 2143054
caggauaaacuuauuucac

SEQ ID NO: 2143056 - RNA, 19 nt, Artificial Sequence
  Description of Artificial Sequence: Synthetic oligonucleotide
  Sense strand starting at position 3641 of SEQ ID NO: 1882725
uaaguuuauccugggcaca

SEQ ID NO: 2143057 - RNA, 19 nt, Artificial Sequence
  Description of Artificial Sequence: Synthetic oligonucleotide
  Antisense strand to SEQ ID NO: 2143056
ugugcccaggauaaacuua

SEQ ID NO: 2143058 - RNA, 19 nt, Artificial Sequence
  Description of Artificial Sequence: Synthetic oligonucleotide
  Sense strand starting at position 3642 of SEQ ID NO: 1882725
aaguuuauccugggcacaa

SEQ ID NO: 2143059 - RNA, 19 nt, Artificial Sequence
  Description of Artificial Sequence: Synthetic oligonucleotide
  Antisense strand to SEQ ID NO: 2143058
uugugcccaggauaaacuu

SEQ ID NO: 2143060 - RNA, 19 nt, Artificial Sequence
  Description of Artificial Sequence: Synthetic oligonucleotide
  Sense strand starting at position 3643 of SEQ ID NO: 1882725
aguuuauccugggcacaau

SEQ ID NO: 2143061 - RNA, 19 nt, Artificial Sequence
  Description of Artificial Sequence: Synthetic oligonucleotide
  Antisense strand to SEQ ID NO: 2143060
auugugcccaggauaaacu

SEQ ID NO: 2143062 - RNA, 19 nt, Artificial Sequence
  Description of Artificial Sequence: Synthetic oligonucleotide
  Sense strand starting at position 3644 of SEQ ID NO: 1882725
guuuauccugggcacaauu

SEQ ID NO: 2143063 - RNA, 19 nt, Artificial Sequence
  Description of Artificial Sequence: Synthetic oligonucleotide
  Antisense strand to SEQ ID NO: 2143062
aauugugcccaggauaaac

SEQ ID NO: 2143064 - RNA, 19 nt, Artificial Sequence
  Description of Artificial Sequence: Synthetic oligonucleotide
  Sense strand starting at position 3929 of SEQ ID NO: 1882725
cuauuaagugcuuaaagug

SEQ ID NO: 2143065 - RNA, 19 nt, Artificial Sequence
  Description of Artificial Sequence: Synthetic oligonucleotide
  Antisense strand to SEQ ID NO: 2143064
cacuuuaagcacuuaauag

SEQ ID NO: 2143066 - RNA, 19 nt, Artificial Sequence
  Description of Artificial Sequence: Synthetic oligonucleotide
  Sense strand starting at position 49 of SEQ ID NO: 1882727
ccaaauauucuaugguuug

SEQ ID NO: 2143067 - RNA, 19 nt, Artificial Sequence
  Description of Artificial Sequence: Synthetic oligonucleotide
  Antisense strand to SEQ ID NO: 2143066
caaaccauagaauauuugg

SEQ ID NO: 2143068 - RNA, 19 nt, Artificial Sequence
  Description of Artificial Sequence: Synthetic oligonucleotide
  Sense strand starting at position 106 of SEQ ID NO: 1882727
uuaucaacacguuagcaaa

SEQ ID NO: 2143069 - RNA, 19 nt, Artificial Sequence
  Description of Artificial Sequence: Synthetic oligonucleotide
  Antisense strand to SEQ ID NO: 2143068
uuugcuaacguguugauaa

SEQ ID NO: 2143070 - RNA, 19 nt, Artificial Sequence
  Description of Artificial Sequence: Synthetic oligonucleotide
  Sense strand starting at position 323 of SEQ ID NO: 1882727
auguguugagucaguggca

SEQ ID NO: 2143071 - RNA, 19 nt, Artificial Sequence
  Description of Artificial Sequence: Synthetic oligonucleotide
  Antisense strand to SEQ ID NO: 2143070
ugccacugacucaacacau

SEQ ID NO: 2143072 - RNA, 19 nt, Artificial Sequence
  Description of Artificial Sequence: Synthetic oligonucleotide
  Sense strand starting at position 430 of SEQ ID NO: 1882727
ggaguuguauaucuggaca

SEQ ID NO: 2143073 - RNA, 19 nt, Artificial Sequence
  Description of Artificial Sequence: Synthetic oligonucleotide
  Antisense strand to SEQ ID NO: 2143072
uguccagauauacaacucc

SEQ ID NO: 2143074 - RNA, 19 nt, Artificial Sequence
  Description of Artificial Sequence: Synthetic oligonucleotide
  Sense strand starting at position 433 of SEQ ID NO: 1882727
guuguauaucuggacaauu

SEQ ID NO: 2143075 - RNA, 19 nt, Artificial Sequence
  Description of Artificial Sequence: Synthetic oligonucleotide
  Antisense strand to SEQ ID NO: 2143074
aauuguccagauauacaac

SEQ ID NO: 2143076 - RNA, 19 nt, Artificial Sequence
  Description of Artificial Sequence: Synthetic oligonucleotide
  Sense strand starting at position 445 of SEQ ID NO: 1882727
gacaauucgguguauaaua

SEQ ID NO: 2143077 - RNA, 19 nt, Artificial Sequence
  Description of Artificial Sequence: Synthetic oligonucleotide
  Antisense strand to SEQ ID NO: 2143076
uauuauacaccgaauuguc

SEQ ID NO: 2143078 - RNA, 19 nt, Artificial Sequence
  Description of Artificial Sequence: Synthetic oligonucleotide
  Sense strand starting at position 447 of SEQ ID NO: 1882727
caauucgguguauaauaaa

SEQ ID NO: 2143079 - RNA, 19 nt, Artificial Sequence
  Description of Artificial Sequence: Synthetic oligonucleotide
  Antisense strand to SEQ ID NO: 2143078
uuuauuauacaccgaauug

SEQ ID NO: 2143080 - RNA, 19 nt, Artificial Sequence
  Description of Artificial Sequence: Synthetic oligonucleotide
  Sense strand starting at position 512 of SEQ ID NO: 1882727
gggauuagguaauuguaga

SEQ ID NO: 2143081 - RNA, 19 nt, Artificial Sequence
  Description of Artificial Sequence: Synthetic oligonucleotide
  Antisense strand to SEQ ID NO: 2143080
ucuacaauuaccuaauccc

SEQ ID NO: 2143082 - RNA, 19 nt, Artificial Sequence
  Description of Artificial Sequence: Synthetic oligonucleotide
  Sense strand starting at position 513 of SEQ ID NO: 1882727
ggauuagguaauuguagac

SEQ ID NO: 2143083 - RNA, 19 nt, Artificial Sequence
  Description of Artificial Sequence: Synthetic oligonucleotide
  Antisense strand to SEQ ID NO: 2143082
gucuacaauuaccuaaucc

SEQ ID NO: 2143084 - RNA, 19 nt, Artificial Sequence
  Description of Artificial Sequence: Synthetic oligonucleotide
  Sense strand starting at position 517 of SEQ ID NO: 1882727
uagguaauuguagacaguu

SEQ ID NO: 2143085 - RNA, 19 nt, Artificial Sequence
  Description of Artificial Sequence: Synthetic oligonucleotide
  Antisense strand to SEQ ID NO: 2143084
aacugucuacaauuaccua

SEQ ID NO: 2143086 - RNA, 19 nt, Artificial Sequence
  Description of Artificial Sequence: Synthetic oligonucleotide
  Sense strand starting at position 539 of SEQ ID NO: 1882727
ggccuauaugaauauucca

SEQ ID NO: 2143087 - RNA, 19 nt, Artificial Sequence
  Description of Artificial Sequence: Synthetic oligonucleotide
  Antisense strand to SEQ ID NO: 2143086
uggaauauucauauaggcc

SEQ ID NO: 2143088 - RNA, 19 nt, Artificial Sequence
  Description of Artificial Sequence: Synthetic oligonucleotide
  Sense strand starting at position 566 of SEQ ID NO: 1882727
uuaauugucaugugggaug

SEQ ID NO: 2143089 - RNA, 19 nt, Artificial Sequence
  Description of Artificial Sequence: Synthetic oligonucleotide
  Antisense strand to SEQ ID NO: 2143088
caucccacaugacaauuaa

SEQ ID NO: 2143090 - RNA, 19 nt, Artificial Sequence
  Description of Artificial Sequence: Synthetic oligonucleotide
  Sense strand starting at position 674 of SEQ ID NO: 1882727
gucacugggacgugaaaga

SEQ ID NO: 2143091 - RNA, 19 nt, Artificial Sequence
  Description of Artificial Sequence: Synthetic oligonucleotide
  Antisense strand to SEQ ID NO: 2143090
ucuuucacgucccagugac

SEQ ID NO: 2143092 - RNA, 19 nt, Artificial Sequence
  Description of Artificial Sequence: Synthetic oligonucleotide
  Sense strand starting at position 683 of SEQ ID NO: 1882727
acgugaaagagucaaguga

SEQ ID NO: 2143093 - RNA, 19 nt, Artificial Sequence
  Description of Artificial Sequence: Synthetic oligonucleotide
  Antisense strand to SEQ ID NO: 2143092
ucacuugacucuuucacgu

SEQ ID NO: 2143094 - RNA, 19 nt, Artificial Sequence
  Description of Artificial Sequence: Synthetic oligonucleotide
  Sense strand starting at position 834 of SEQ ID NO: 1882727
agguauguucuaggacuaa

SEQ ID NO: 2143095 - RNA, 19 nt, Artificial Sequence
  Description of Artificial Sequence: Synthetic oligonucleotide
  Antisense strand to SEQ ID NO: 2143094
uuaguccuagaacauaccu

SEQ ID NO: 2143096 - RNA, 19 nt, Artificial Sequence
  Description of Artificial Sequence: Synthetic oligonucleotide
  Sense strand starting at position 962 of SEQ ID NO: 1882727
uaggaaagguuguccuuau

SEQ ID NO: 2143097 - RNA, 19 nt, Artificial Sequence
  Description of Artificial Sequence: Synthetic oligonucleotide
  Antisense strand to SEQ ID NO: 2143096
auaaggacaaccuuuccua

SEQ ID NO: 2143098 - RNA, 19 nt, Artificial Sequence
  Description of Artificial Sequence: Synthetic oligonucleotide
  Sense strand starting at position 1519 of SEQ ID NO: 1882727
gagaaugcuugggcacaca

SEQ ID NO: 2143099 - RNA, 19 nt, Artificial Sequence
  Description of Artificial Sequence: Synthetic oligonucleotide
  Antisense strand to SEQ ID NO: 2143098
ugugugcccaagcauucuc

SEQ ID NO: 2143100 - RNA, 19 nt, Artificial Sequence
  Description of Artificial Sequence: Synthetic oligonucleotide
  Sense strand starting at position 1844 of SEQ ID NO: 1882727
ucucauuagcaaugagaga

SEQ ID NO: 2143101 - RNA, 19 nt, Artificial Sequence
  Description of Artificial Sequence: Synthetic oligonucleotide
  Antisense strand to SEQ ID NO: 2143100
ucucucauugcuaaugaga

SEQ ID NO: 2143102 - RNA, 19 nt, Artificial Sequence
  Description of Artificial Sequence: Synthetic oligonucleotide
  Sense strand starting at position 1864 of SEQ ID NO: 1882727
gccaguagacaguguauuu

SEQ ID NO: 2143103 - RNA, 19 nt, Artificial Sequence
  Description of Artificial Sequence: Synthetic oligonucleotide
  Antisense strand to SEQ ID NO: 2143102
aaauacacugucuacuggc

SEQ ID NO: 2143104 - RNA, 19 nt, Artificial Sequence
  Description of Artificial Sequence: Synthetic oligonucleotide
  Sense strand starting at position 1884 of SEQ ID NO: 1882727
auguguugaaauuggugga

SEQ ID NO: 2143105 - RNA, 19 nt, Artificial Sequence
  Description of Artificial Sequence: Synthetic oligonucleotide
  Antisense strand to SEQ ID NO: 2143104
uccaccaauuucaacacau

SEQ ID NO: 2143106 - RNA, 19 nt, Artificial Sequence
  Description of Artificial Sequence: Synthetic oligonucleotide
  Sense strand starting at position 1959 of SEQ ID NO: 1882727
aggugaaauaaagguacuu

SEQ ID NO: 2143107 - RNA, 19 nt, Artificial Sequence
  Description of Artificial Sequence: Synthetic oligonucleotide
  Antisense strand to SEQ ID NO: 2143106
aaguaccuuuauuucaccu

SEQ ID NO: 2143108 - RNA, 19 nt, Artificial Sequence
  Description of Artificial Sequence: Synthetic oligonucleotide
  Sense strand starting at position 2581 of SEQ ID NO: 1882727
uuguauuugugacuccauu

SEQ ID NO: 2143109 - RNA, 19 nt, Artificial Sequence
  Description of Artificial Sequence: Synthetic oligonucleotide
  Antisense strand to SEQ ID NO: 2143108
aauggagucacaaauacaa

SEQ ID NO: 2143110 - RNA, 19 nt, Artificial Sequence
  Description of Artificial Sequence: Synthetic oligonucleotide
  Sense strand starting at position 2781 of SEQ ID NO: 1882727
uauggaaucugacuguaau

SEQ ID NO: 2143111 - RNA, 19 nt, Artificial Sequence
  Description of Artificial Sequence: Synthetic oligonucleotide
  Antisense strand to SEQ ID NO: 2143110
auuacagucagauuccaua

SEQ ID NO: 2143112 - RNA, 19 nt, Artificial Sequence
  Description of Artificial Sequence: Synthetic oligonucleotide
  Sense strand starting at position 2782 of SEQ ID NO: 1882727
auggaaucugacuguaaua

SEQ ID NO: 2143113 - RNA, 19 nt, Artificial Sequence
  Description of Artificial Sequence: Synthetic oligonucleotide
  Antisense strand to SEQ ID NO: 2143112
uauuacagucagauuccau

SEQ ID NO: 2143114 - RNA, 19 nt, Artificial Sequence
  Description of Artificial Sequence: Synthetic oligonucleotide
  Sense strand starting at position 3030 of SEQ ID NO: 1882727
cuucuuaccguggauucua

SEQ ID NO: 2143115 - RNA, 19 nt, Artificial Sequence
  Description of Artificial Sequence: Synthetic oligonucleotide
  Antisense strand to SEQ ID NO: 2143114
uagaauccacgguaagaag

SEQ ID NO: 2143116 - RNA, 19 nt, Artificial Sequence
  Description of Artificial Sequence: Synthetic oligonucleotide
  Sense strand starting at position 3038 of SEQ ID NO: 1882727
cguggauucuacucacaga

SEQ ID NO: 2143117 - RNA, 19 nt, Artificial Sequence
  Description of Artificial Sequence: Synthetic oligonucleotide
  Antisense strand to SEQ ID NO: 2143116
ucugugaguagaauccacg

SEQ ID NO: 2143118 - RNA, 19 nt, Artificial Sequence
  Description of Artificial Sequence: Synthetic oligonucleotide
  Sense strand starting at position 3110 of SEQ ID NO: 1882727
uagagaaguccugggacuc

SEQ ID NO: 2143119 - RNA, 19 nt, Artificial Sequence
  Description of Artificial Sequence: Synthetic oligonucleotide
  Antisense strand to SEQ ID NO: 2143118
gagucccaggacuucucua

SEQ ID NO: 2143120 - RNA, 19 nt, Artificial Sequence
  Description of Artificial Sequence: Synthetic oligonucleotide
  Sense strand starting at position 3236 of SEQ ID NO: 1882727
cuaguagaaauuugugugu

SEQ ID NO: 2143121 - RNA, 19 nt, Artificial Sequence
  Description of Artificial Sequence: Synthetic oligonucleotide
  Antisense strand to SEQ ID NO: 2143120
acacacaaauuucuacuag

SEQ ID NO: 2143122 - RNA, 19 nt, Artificial Sequence
  Description of Artificial Sequence: Synthetic oligonucleotide
  Sense strand starting at position 3272 of SEQ ID NO: 1882727
ucugguuuacaaggacauu

SEQ ID NO: 2143123 - RNA, 19 nt, Artificial Sequence
  Description of Artificial Sequence: Synthetic oligonucleotide
  Antisense strand to SEQ ID NO: 2143122
aauguccuuguaaaccaga

SEQ ID NO: 2143124 - RNA, 19 nt, Artificial Sequence
  Description of Artificial Sequence: Synthetic oligonucleotide
  Sense strand starting at position 3411 of SEQ ID NO: 1882727
cguauuauuguagauauug

SEQ ID NO: 2143125 - RNA, 19 nt, Artificial Sequence
  Description of Artificial Sequence: Synthetic oligonucleotide
  Antisense strand to SEQ ID NO: 2143124
caauaucuacaauaauacg

SEQ ID NO: 2143126 - RNA, 19 nt, Artificial Sequence
  Description of Artificial Sequence: Synthetic oligonucleotide
  Sense strand starting at position 3419 of SEQ ID NO: 1882727
uguagauauugucuauagg

SEQ ID NO: 2143127 - RNA, 19 nt, Artificial Sequence
  Description of Artificial Sequence: Synthetic oligonucleotide
  Antisense strand to SEQ ID NO: 2143126
ccuauagacaauaucuaca

SEQ ID NO: 2143128 - RNA, 19 nt, Artificial Sequence
  Description of Artificial Sequence: Synthetic oligonucleotide
  Sense strand starting at position 3422 of SEQ ID NO: 1882727
agauauugucuauaggcca

SEQ ID NO: 2143129 - RNA, 19 nt, Artificial Sequence
  Description of Artificial Sequence: Synthetic oligonucleotide
  Antisense strand to SEQ ID NO: 2143128
uggccuauagacaauaucu

SEQ ID NO: 2143130 - RNA, 19 nt, Artificial Sequence
  Description of Artificial Sequence: Synthetic oligonucleotide
  Sense strand starting at position 3446 of SEQ ID NO: 1882727
ucugauguccuguagauag

SEQ ID NO: 2143131 - RNA, 19 nt, Artificial Sequence
  Description of Artificial Sequence: Synthetic oligonucleotide
  Antisense strand to SEQ ID NO: 2143130
cuaucuacaggacaucaga

SEQ ID NO: 2143132 - RNA, 19 nt, Artificial Sequence
  Description of Artificial Sequence: Synthetic oligonucleotide
  Sense strand starting at position 3450 of SEQ ID NO: 1882727
auguccuguagauagugaa

SEQ ID NO: 2143133 - RNA, 19 nt, Artificial Sequence
  Description of Artificial Sequence: Synthetic oligonucleotide
  Antisense strand to SEQ ID NO: 2143132
uucacuaucuacaggacau

SEQ ID NO: 2143134 - RNA, 19 nt, Artificial Sequence
  Description of Artificial Sequence: Synthetic oligonucleotide
  Sense strand starting at position 3666 of SEQ ID NO: 1882727
uugugucauuauuucuagu

SEQ ID NO: 2143135 - RNA, 19 nt, Artificial Sequence
  Description of Artificial Sequence: Synthetic oligonucleotide
  Antisense strand to SEQ ID NO: 2143134
acuagaaauaaugacacaa

SEQ ID NO: 2143136 - RNA, 19 nt, Artificial Sequence
  Description of Artificial Sequence: Synthetic oligonucleotide
  Sense strand starting at position 3668 of SEQ ID NO: 1882727
gugucauuauuucuagugu

SEQ ID NO: 2143137 - RNA, 19 nt, Artificial Sequence
  Description of Artificial Sequence: Synthetic oligonucleotide
  Antisense strand to SEQ ID NO: 2143136
acacuagaaauaaugacac

SEQ ID NO: 2143138 - RNA, 19 nt, Artificial Sequence
  Description of Artificial Sequence: Synthetic oligonucleotide
  Sense strand starting at position 3681 of SEQ ID NO: 1882727
uagugugauuucuccuggu

SEQ ID NO: 2143139 - RNA, 19 nt, Artificial Sequence
  Description of Artificial Sequence: Synthetic oligonucleotide
  Antisense strand to SEQ ID NO: 2143138
accaggagaaaucacacua

SEQ ID NO: 2143140 - RNA, 19 nt, Artificial Sequence
  Description of Artificial Sequence: Synthetic oligonucleotide
  Sense strand starting at position 3687 of SEQ ID NO: 1882727
gauuucuccugguuugguu

SEQ ID NO: 2143141 - RNA, 19 nt, Artificial Sequence
  Description of Artificial Sequence: Synthetic oligonucleotide
  Antisense strand to SEQ ID NO: 2143140
aaccaaaccaggagaaauc

SEQ ID NO: 2143142 - RNA, 19 nt, Artificial Sequence
  Description of Artificial Sequence: Synthetic oligonucleotide
  Sense strand starting at position 3912 of SEQ ID NO: 1882727
ugagguuccagauguuaug

SEQ ID NO: 2143143 - RNA, 19 nt, Artificial Sequence
  Description of Artificial Sequence: Synthetic oligonucleotide
  Antisense strand to SEQ ID NO: 2143142
cauaacaucuggaaccuca

SEQ ID NO: 2143144 - RNA, 19 nt, Artificial Sequence
  Description of Artificial Sequence: Synthetic oligonucleotide
  Sense strand starting at position 3921 of SEQ ID NO: 1882727
agauguuaugauggcauca

SEQ ID NO: 2143145 - RNA, 19 nt, Artificial Sequence
  Description of Artificial Sequence: Synthetic oligonucleotide
  Antisense strand to SEQ ID NO: 2143144
ugaugccaucauaacaucu

SEQ ID NO: 2143146 - RNA, 19 nt, Artificial Sequence
  Description of Artificial Sequence: Synthetic oligonucleotide
  Sense strand starting at position 67 of SEQ ID NO: 1882728
uuuccuucucaggaagcaa

SEQ ID NO: 2143147 - RNA, 19 nt, Artificial Sequence
  Description of Artificial Sequence: Synthetic oligonucleotide
  Antisense strand to SEQ ID NO: 2143146
uugcuuccugagaaggaaa

SEQ ID NO: 2143148 - RNA, 19 nt, Artificial Sequence
  Description of Artificial Sequence: Synthetic oligonucleotide
  Sense strand starting at position 118 of SEQ ID NO: 1882728
gccuuaugacucugaggag

SEQ ID NO: 2143149 - RNA, 19 nt, Artificial Sequence
  Description of Artificial Sequence: Synthetic oligonucleotide
  Antisense strand to SEQ ID NO: 2143148
cuccucagagucauaaggc

SEQ ID NO: 2143150 - RNA, 19 nt, Artificial Sequence
  Description of Artificial Sequence: Synthetic oligonucleotide
  Sense strand starting at position 269 of SEQ ID NO: 1882728
gcaacugagagcuggguaa

SEQ ID NO: 2143151 - RNA, 19 nt, Artificial Sequence
  Description of Artificial Sequence: Synthetic oligonucleotide
  Antisense strand to SEQ ID NO: 2143150
uuacccagcucucaguugc

SEQ ID NO: 2143152 - RNA, 19 nt, Artificial Sequence
  Description of Artificial Sequence: Synthetic oligonucleotide
  Sense strand starting at position 271 of SEQ ID NO: 1882728
aacugagagcuggguaaga

SEQ ID NO: 2143153 - RNA, 19 nt, Artificial Sequence
  Description of Artificial Sequence: Synthetic oligonucleotide
  Antisense strand to SEQ ID NO: 2143152
ucuuacccagcucucaguu

SEQ ID NO: 2143154 - RNA, 19 nt, Artificial Sequence
  Description of Artificial Sequence: Synthetic oligonucleotide
  Sense strand starting at position 689 of SEQ ID NO: 1882728
gagagauggccuuaucagc

SEQ ID NO: 2143155 - RNA, 19 nt, Artificial Sequence
  Description of Artificial Sequence: Synthetic oligonucleotide
  Antisense strand to SEQ ID NO: 2143154
gcugauaaggccaucucuc

SEQ ID NO: 2143156 - RNA, 19 nt, Artificial Sequence
  Description of Artificial Sequence: Synthetic oligonucleotide
  Sense strand starting at position 2085 of SEQ ID NO: 1882728
uggguaucucagcaauccu

SEQ ID NO: 2143157 - RNA, 19 nt, Artificial Sequence
  Description of Artificial Sequence: Synthetic oligonucleotide
  Antisense strand to SEQ ID NO: 2143156
aggauugcugagauaccca

SEQ ID NO: 2143158 - RNA, 19 nt, Artificial Sequence
  Description of Artificial Sequence: Synthetic oligonucleotide
  Sense strand starting at position 2230 of SEQ ID NO: 1882728
gcaucagagauguacuuug

SEQ ID NO: 2143159 - RNA, 19 nt, Artificial Sequence
  Description of Artificial Sequence: Synthetic oligonucleotide
  Antisense strand to SEQ ID NO: 2143158
caaaguacaucucugaugc

SEQ ID NO: 2143160 - RNA, 19 nt, Artificial Sequence
  Description of Artificial Sequence: Synthetic oligonucleotide
  Sense strand starting at position 2238 of SEQ ID NO: 1882728
gauguacuuugcucugaca

SEQ ID NO: 2143161 - RNA, 19 nt, Artificial Sequence
  Description of Artificial Sequence: Synthetic oligonucleotide
  Antisense strand to SEQ ID NO: 2143160
ugucagagcaaaguacauc

SEQ ID NO: 2143162 - RNA, 19 nt, Artificial Sequence
  Description of Artificial Sequence: Synthetic oligonucleotide
  Sense strand starting at position 2240 of SEQ ID NO: 1882728
uguacuuugcucugacaug

SEQ ID NO: 2143163 - RNA, 19 nt, Artificial Sequence
  Description of Artificial Sequence: Synthetic oligonucleotide
  Antisense strand to SEQ ID NO: 2143162
caugucagagcaaaguaca

SEQ ID NO: 2143164 - RNA, 19 nt, Artificial Sequence
  Description of Artificial Sequence: Synthetic oligonucleotide
  Sense strand starting at position 2299 of SEQ ID NO: 1882728
auggguuguuuguuaaaua

SEQ ID NO: 2143165 - RNA, 19 nt, Artificial Sequence
  Description of Artificial Sequence: Synthetic oligonucleotide
  Antisense strand to SEQ ID NO: 2143164
uauuuaacaaacaacccau

SEQ ID NO: 2143166 - RNA, 19 nt, Artificial Sequence
  Description of Artificial Sequence: Synthetic oligonucleotide
  Sense strand starting at position 2397 of SEQ ID NO: 1882728
uuuagaacaucugaauaag

SEQ ID NO: 2143167 - RNA, 19 nt, Artificial Sequence
  Description of Artificial Sequence: Synthetic oligonucleotide
  Antisense strand to SEQ ID NO: 2143166
cuuauucagauguucuaaa

SEQ ID NO: 2143168 - RNA, 19 nt, Artificial Sequence
  Description of Artificial Sequence: Synthetic oligonucleotide
  Sense strand starting at position 2406 of SEQ ID NO: 1882728
ucugaauaagcugguaucu

SEQ ID NO: 2143169 - RNA, 19 nt, Artificial Sequence
  Description of Artificial Sequence: Synthetic oligonucleotide
  Antisense strand to SEQ ID NO: 2143168
agauaccagcuuauucaga

SEQ ID NO: 2143170 - RNA, 19 nt, Artificial Sequence
  Description of Artificial Sequence: Synthetic oligonucleotide
  Sense strand starting at position 2513 of SEQ ID NO: 1882728
ggagcaugauuugauaaga

SEQ ID NO: 2143171 - RNA, 19 nt, Artificial Sequence
  Description of Artificial Sequence: Synthetic oligonucleotide
  Antisense strand to SEQ ID NO: 2143170
ucuuaucaaaucaugcucc

SEQ ID NO: 2143172 - RNA, 19 nt, Artificial Sequence
  Description of Artificial Sequence: Synthetic oligonucleotide
  Sense strand starting at position 2529 of SEQ ID NO: 1882728
agaagacugccaugaguca

SEQ ID NO: 2143173 - RNA, 19 nt, Artificial Sequence
  Description of Artificial Sequence: Synthetic oligonucleotide
  Antisense strand to SEQ ID NO: 2143172
ugacucauggcagucuucu

SEQ ID NO: 2143174 - RNA, 19 nt, Artificial Sequence
  Description of Artificial Sequence: Synthetic oligonucleotide
  Sense strand starting at position 2538 of SEQ ID NO: 1882728
ccaugagucaggugaugca

SEQ ID NO: 2143175 - RNA, 19 nt, Artificial Sequence
  Description of Artificial Sequence: Synthetic oligonucleotide
  Antisense strand to SEQ ID NO: 2143174
ugcaucaccugacucaugg

SEQ ID NO: 2143176 - RNA, 19 nt, Artificial Sequence
  Description of Artificial Sequence: Synthetic oligonucleotide
  Sense strand starting at position 2548 of SEQ ID NO: 1882728
ggugaugcagguuagcauu

SEQ ID NO: 2143177 - RNA, 19 nt, Artificial Sequence
  Description of Artificial Sequence: Synthetic oligonucleotide
  Antisense strand to SEQ ID NO: 2143176
aaugcuaaccugcaucacc

SEQ ID NO: 2143178 - RNA, 19 nt, Artificial Sequence
  Description of Artificial Sequence: Synthetic oligonucleotide
  Sense strand starting at position 2623 of SEQ ID NO: 1882728
ugguaucaccuagguuacu

SEQ ID NO: 2143179 - RNA, 19 nt, Artificial Sequence
  Description of Artificial Sequence: Synthetic oligonucleotide
  Antisense strand to SEQ ID NO: 2143178
aguaaccuaggugauacca

SEQ ID NO: 2143180 - RNA, 19 nt, Artificial Sequence
  Description of Artificial Sequence: Synthetic oligonucleotide
  Sense strand starting at position 2679 of SEQ ID NO: 1882728
gaagauguugacugcacua

SEQ ID NO: 2143181 - RNA, 19 nt, Artificial Sequence
  Description of Artificial Sequence: Synthetic oligonucleotide
  Antisense strand to SEQ ID NO: 2143180
uagugcagucaacaucuuc

SEQ ID NO: 2143182 - RNA, 19 nt, Artificial Sequence
  Description of Artificial Sequence: Synthetic oligonucleotide
  Sense strand starting at position 2708 of SEQ ID NO: 1882728
cugcauuuguuaucugcuu

SEQ ID NO: 2143183 - RNA, 19 nt, Artificial Sequence
  Description of Artificial Sequence: Synthetic oligonucleotide
  Antisense strand to SEQ ID NO: 2143182
aagcagauaacaaaugcag

SEQ ID NO: 2143184 - RNA, 19 nt, Artificial Sequence
  Description of Artificial Sequence: Synthetic oligonucleotide
  Sense strand starting at position 2865 of SEQ ID NO: 1882728
ucccuagcucucuaugaga

SEQ ID NO: 2143185 - RNA, 19 nt, Artificial Sequence
  Description of Artificial Sequence: Synthetic oligonucleotide
  Antisense strand to SEQ ID NO: 2143184
ucucauagagagcuaggga

SEQ ID NO: 2143186 - RNA, 19 nt, Artificial Sequence
  Description of Artificial Sequence: Synthetic oligonucleotide
  Sense strand starting at position 3048 of SEQ ID NO: 1882728
acauuuagguuagaccaga

SEQ ID NO: 2143187 - RNA, 19 nt, Artificial Sequence
  Description of Artificial Sequence: Synthetic oligonucleotide
  Antisense strand to SEQ ID NO: 2143186
ucuggucuaaccuaaaugu

SEQ ID NO: 2143188 - RNA, 19 nt, Artificial Sequence
  Description of Artificial Sequence: Synthetic oligonucleotide
  Sense strand starting at position 3133 of SEQ ID NO: 1882728
gagugcauacuauggguuu

SEQ ID NO: 2143189 - RNA, 19 nt, Artificial Sequence
  Description of Artificial Sequence: Synthetic oligonucleotide
  Antisense strand to SEQ ID NO: 2143188
aaacccauaguaugcacuc

SEQ ID NO: 2143190 - RNA, 19 nt, Artificial Sequence
  Description of Artificial Sequence: Synthetic oligonucleotide
  Sense strand starting at position 3159 of SEQ ID NO: 1882728
gagguaagcgaaugauaga

SEQ ID NO: 2143191 - RNA, 19 nt, Artificial Sequence
  Description of Artificial Sequence: Synthetic oligonucleotide
  Antisense strand to SEQ ID NO: 2143190
ucuaucauucgcuuaccuc

SEQ ID NO: 2143192 - RNA, 19 nt, Artificial Sequence
  Description of Artificial Sequence: Synthetic oligonucleotide
  Sense strand starting at position 3168 of SEQ ID NO: 1882728
gaaugauagagauguuguc

SEQ ID NO: 2143193 - RNA, 19 nt, Artificial Sequence
  Description of Artificial Sequence: Synthetic oligonucleotide
  Antisense strand to SEQ ID NO: 2143192
gacaacaucucuaucauuc

SEQ ID NO: 2143194 - RNA, 19 nt, Artificial Sequence
  Description of Artificial Sequence: Synthetic oligonucleotide
  Sense strand starting at position 3181 of SEQ ID NO: 1882728
guugucuuugcccaugaag

SEQ ID NO: 2143195 - RNA, 19 nt, Artificial Sequence
  Description of Artificial Sequence: Synthetic oligonucleotide
  Antisense strand to SEQ ID NO: 2143194
cuucaugggcaaagacaac

SEQ ID NO: 2143196 - RNA, 19 nt, Artificial Sequence
  Description of Artificial Sequence: Synthetic oligonucleotide
  Sense strand starting at position 3183 of SEQ ID NO: 1882728
ugucuuugcccaugaagag

SEQ ID NO: 2143197 - RNA, 19 nt, Artificial Sequence
  Description of Artificial Sequence: Synthetic oligonucleotide
  Antisense strand to SEQ ID NO: 2143196
cucuucaugggcaaagaca

SEQ ID NO: 2143198 - RNA, 19 nt, Artificial Sequence
  Description of Artificial Sequence: Synthetic oligonucleotide
  Sense strand starting at position 3184 of SEQ ID NO: 1882728
gucuuugcccaugaagagu

SEQ ID NO: 2143199 - RNA, 19 nt, Artificial Sequence
  Description of Artificial Sequence: Synthetic oligonucleotide
  Antisense strand to SEQ ID NO: 2143198
acucuucaugggcaaagac

SEQ ID NO: 2143200 - RNA, 19 nt, Artificial Sequence
  Description of Artificial Sequence: Synthetic oligonucleotide
  Sense strand starting at position 3192 of SEQ ID NO: 1882728
ccaugaagaguguggucua

SEQ ID NO: 2143201 - RNA, 19 nt, Artificial Sequence
  Description of Artificial Sequence: Synthetic oligonucleotide
  Antisense strand to SEQ ID NO: 2143200
uagaccacacucuucaugg

SEQ ID NO: 2143202 - RNA, 19 nt, Artificial Sequence
  Description of Artificial Sequence: Synthetic oligonucleotide
  Sense strand starting at position 3250 of SEQ ID NO: 1882728
uuucuagagucaguagcua

SEQ ID NO: 2143203 - RNA, 19 nt, Artificial Sequence
  Description of Artificial Sequence: Synthetic oligonucleotide
  Antisense strand to SEQ ID NO: 2143202
uagcuacugacucuagaaa

SEQ ID NO: 2143204 - RNA, 19 nt, Artificial Sequence
  Description of Artificial Sequence: Synthetic oligonucleotide
  Sense strand starting at position 3399 of SEQ ID NO: 1882728
cagcauuucucagcgaagg

SEQ ID NO: 2143205 - RNA, 19 nt, Artificial Sequence
  Description of Artificial Sequence: Synthetic oligonucleotide
  Antisense strand to SEQ ID NO: 2143204
ccuucgcugagaaaugcug

SEQ ID NO: 2143206 - RNA, 19 nt, Artificial Sequence
  Description of Artificial Sequence: Synthetic oligonucleotide
  Sense strand starting at position 3401 of SEQ ID NO: 1882728
gcauuucucagcgaagggu

SEQ ID NO: 2143207 - RNA, 19 nt, Artificial Sequence
  Description of Artificial Sequence: Synthetic oligonucleotide
  Antisense strand to SEQ ID NO: 2143206
acccuucgcugagaaaugc

SEQ ID NO: 2143208 - RNA, 19 nt, Artificial Sequence
  Description of Artificial Sequence: Synthetic oligonucleotide
  Sense strand starting at position 3405 of SEQ ID NO: 1882728
uucucagcgaaggguaaua

SEQ ID NO: 2143209 - RNA, 19 nt, Artificial Sequence
  Description of Artificial Sequence: Synthetic oligonucleotide
  Antisense strand to SEQ ID NO: 2143208
uauuacccuucgcugagaa

SEQ ID NO: 2143210 - RNA, 19 nt, Artificial Sequence
  Description of Artificial Sequence: Synthetic oligonucleotide
  Sense strand starting at position 3442 of SEQ ID NO: 1882728
uugggcugucuggagacau

SEQ ID NO: 2143211 - RNA, 19 nt, Artificial Sequence
  Description of Artificial Sequence: Synthetic oligonucleotide
  Antisense strand to SEQ ID NO: 2143210
augucuccagacagcccaa

SEQ ID NO: 2143212 - RNA, 19 nt, Artificial Sequence
  Description of Artificial Sequence: Synthetic oligonucleotide
  Sense strand starting at position 3462 of SEQ ID NO: 1882728
uuggaugauuaagaauuga

SEQ ID NO: 2143213 - RNA, 19 nt, Artificial Sequence
  Description of Artificial Sequence: Synthetic oligonucleotide
  Antisense strand to SEQ ID NO: 2143212
ucaauucuuaaucauccaa

SEQ ID NO: 2143214 - RNA, 19 nt, Artificial Sequence
  Description of Artificial Sequence: Synthetic oligonucleotide
  Sense strand starting at position 3797 of SEQ ID NO: 1882728
guuaauggcauguaguaua

SEQ ID NO: 2143215 - RNA, 19 nt, Artificial Sequence
  Description of Artificial Sequence: Synthetic oligonucleotide
  Antisense strand to SEQ ID NO: 2143214
uauacuacaugccauuaac

SEQ ID NO: 2143216 - RNA, 19 nt, Artificial Sequence
  Description of Artificial Sequence: Synthetic oligonucleotide
  Sense strand starting at position 3804 of SEQ ID NO: 1882728
gcauguaguauagagaggu

SEQ ID NO: 2143217 - RNA, 19 nt, Artificial Sequence
  Description of Artificial Sequence: Synthetic oligonucleotide
  Antisense strand to SEQ ID NO: 2143216
accucucuauacuacaugc

SEQ ID NO: 2143218 - RNA, 19 nt, Artificial Sequence
  Description of Artificial Sequence: Synthetic oligonucleotide
  Sense strand starting at position 3808 of SEQ ID NO: 1882728
guaguauagagaggucaga

SEQ ID NO: 2143219 - RNA, 19 nt, Artificial Sequence
  Description of Artificial Sequence: Synthetic oligonucleotide
  Antisense strand to SEQ ID NO: 2143218
ucugaccucucuauacuac

SEQ ID NO: 2143220 - RNA, 19 nt, Artificial Sequence
  Description of Artificial Sequence: Synthetic oligonucleotide
  Sense strand starting at position 3910 of SEQ ID NO: 1882728
ggguaacucugaucuauua

SEQ ID NO: 2143221 - RNA, 19 nt, Artificial Sequence
  Description of Artificial Sequence: Synthetic oligonucleotide
  Antisense strand to SEQ ID NO: 2143220
uaauagaucagaguuaccc

SEQ ID NO: 2143222 - RNA, 19 nt, Artificial Sequence
  Description of Artificial Sequence: Synthetic oligonucleotide
  Sense strand starting at position 3923 of SEQ ID NO: 1882728
cuauuagauuucuaagcug

SEQ ID NO: 2143223 - RNA, 19 nt, Artificial Sequence
  Description of Artificial Sequence: Synthetic oligonucleotide
  Antisense strand to SEQ ID NO: 2143222
cagcuuagaaaucuaauag

SEQ ID NO: 2143224 - RNA, 19 nt, Artificial Sequence
  Description of Artificial Sequence: Synthetic oligonucleotide
  Sense strand starting at position 3948 of SEQ ID NO: 1882728
gagugcugauggguaagaa

SEQ ID NO: 2143225 - RNA, 19 nt, Artificial Sequence
  Description of Artificial Sequence: Synthetic oligonucleotide
  Antisense strand to SEQ ID NO: 2143224
uucuuacccaucagcacuc

SEQ ID NO: 2143226 - RNA, 19 nt, Artificial Sequence
  Description of Artificial Sequence: Synthetic oligonucleotide
  Sense strand starting at position 287 of SEQ ID NO: 1882729
cucauucuaugaguaggaa

SEQ ID NO: 2143227 - RNA, 19 nt, Artificial Sequence
  Description of Artificial Sequence: Synthetic oligonucleotide
  Antisense strand to SEQ ID NO: 2143226
uuccuacucauagaaugag

SEQ ID NO: 2143228 - RNA, 19 nt, Artificial Sequence
  Description of Artificial Sequence: Synthetic oligonucleotide
  Sense strand starting at position 305 of SEQ ID NO: 1882729
agagcaacucuggauugua

SEQ ID NO: 2143229 - RNA, 19 nt, Artificial Sequence
  Description of Artificial Sequence: Synthetic oligonucleotide
  Antisense strand to SEQ ID NO: 2143228
uacaauccagaguugcucu

SEQ ID NO: 2143230 - RNA, 19 nt, Artificial Sequence
  Description of Artificial Sequence: Synthetic oligonucleotide
  Sense strand starting at position 327 of SEQ ID NO: 1882729
augcgcaugaguuugugua

SEQ ID NO: 2143231 - RNA, 19 nt, Artificial Sequence
  Description of Artificial Sequence: Synthetic oligonucleotide
  Antisense strand to SEQ ID NO: 2143230
uacacaaacucaugcgcau

SEQ ID NO: 2143232 - RNA, 19 nt, Artificial Sequence
  Description of Artificial Sequence: Synthetic oligonucleotide
  Sense strand starting at position 331 of SEQ ID NO: 1882729
gcaugaguuuguguauuug

SEQ ID NO: 2143233 - RNA, 19 nt, Artificial Sequence
  Description of Artificial Sequence: Synthetic oligonucleotide
  Antisense strand to SEQ ID NO: 2143232
caaauacacaaacucaugc

SEQ ID NO: 2143234 - RNA, 19 nt, Artificial Sequence
  Description of Artificial Sequence: Synthetic oligonucleotide
  Sense strand starting at position 341 of SEQ ID NO: 1882729
guguauuuguguguuugga

SEQ ID NO: 2143235 - RNA, 19 nt, Artificial Sequence
  Description of Artificial Sequence: Synthetic oligonucleotide
  Antisense strand to SEQ ID NO: 2143234
uccaaacacacaaauacac

SEQ ID NO: 2143236 - RNA, 19 nt, Artificial Sequence
  Description of Artificial Sequence: Synthetic oligonucleotide
  Sense strand starting at position 752 of SEQ ID NO: 1882729
ccaagacuucuguguuaga

SEQ ID NO: 2143237 - RNA, 19 nt, Artificial Sequence
  Description of Artificial Sequence: Synthetic oligonucleotide
  Antisense strand to SEQ ID NO: 2143236
ucuaacacagaagucuugg

SEQ ID NO: 2143238 - RNA, 19 nt, Artificial Sequence
  Description of Artificial Sequence: Synthetic oligonucleotide
  Sense strand starting at position 753 of SEQ ID NO: 1882729
caagacuucuguguuagaa

SEQ ID NO: 2143239 - RNA, 19 nt, Artificial Sequence
  Description of Artificial Sequence: Synthetic oligonucleotide
  Antisense strand to SEQ ID NO: 2143238
uucuaacacagaagucuug

SEQ ID NO: 2143240 - RNA, 19 nt, Artificial Sequence
  Description of Artificial Sequence: Synthetic oligonucleotide
  Sense strand starting at position 814 of SEQ ID NO: 1882729
cagggaaaguguuuauuag

SEQ ID NO: 2143241 - RNA, 19 nt, Artificial Sequence
  Description of Artificial Sequence: Synthetic oligonucleotide
  Antisense strand to SEQ ID NO: 2143240
cuaauaaacacuuucccug

SEQ ID NO: 2143242 - RNA, 19 nt, Artificial Sequence
  Description of Artificial Sequence: Synthetic oligonucleotide
  Sense strand starting at position 815 of SEQ ID NO: 1882729
agggaaaguguuuauuagu

SEQ ID NO: 2143243 - RNA, 19 nt, Artificial Sequence
  Description of Artificial Sequence: Synthetic oligonucleotide
  Antisense strand to SEQ ID NO: 2143242
acuaauaaacacuuucccu

SEQ ID NO: 2143244 - RNA, 19 nt, Artificial Sequence
  Description of Artificial Sequence: Synthetic oligonucleotide
  Sense strand starting at position 894 of SEQ ID NO: 1882729
cgauguuagcucuaaauaa

SEQ ID NO: 2143245 - RNA, 19 nt, Artificial Sequence
  Description of Artificial Sequence: Synthetic oligonucleotide
  Antisense strand to SEQ ID NO: 2143244
uuauuuagagcuaacaucg

SEQ ID NO: 2143246 - RNA, 19 nt, Artificial Sequence
  Description of Artificial Sequence: Synthetic oligonucleotide
  Sense strand starting at position 944 of SEQ ID NO: 1882729
uuugaaauucguugaagaa

SEQ ID NO: 2143247 - RNA, 19 nt, Artificial Sequence
  Description of Artificial Sequence: Synthetic oligonucleotide
  Antisense strand to SEQ ID NO: 2143246
uucuucaacgaauuucaaa

SEQ ID NO: 2143248 - RNA, 19 nt, Artificial Sequence
  Description of Artificial Sequence: Synthetic oligonucleotide
  Sense strand starting at position 1007 of SEQ ID NO: 1882729
ugaucuuuccagugacaau

SEQ ID NO: 2143249 - RNA, 19 nt, Artificial Sequence
  Description of Artificial Sequence: Synthetic oligonucleotide
  Antisense strand to SEQ ID NO: 2143248
auugucacuggaaagauca

SEQ ID NO: 2143250 - RNA, 19 nt, Artificial Sequence
  Description of Artificial Sequence: Synthetic oligonucleotide
  Sense strand starting at position 1016 of SEQ ID NO: 1882729
cagugacaaucugcagagu

SEQ ID NO: 2143251 - RNA, 19 nt, Artificial Sequence
  Description of Artificial Sequence: Synthetic oligonucleotide
  Antisense strand to SEQ ID NO: 2143250
acucugcagauugucacug

SEQ ID NO: 2143252 - RNA, 19 nt, Artificial Sequence
  Description of Artificial Sequence: Synthetic oligonucleotide
  Sense strand starting at position 1105 of SEQ ID NO: 1882729
gcuugucacaaaggaugaa

SEQ ID NO: 2143253 - RNA, 19 nt, Artificial Sequence
  Description of Artificial Sequence: Synthetic oligonucleotide
  Antisense strand to SEQ ID NO: 2143252
uucauccuuugugacaagc

SEQ ID NO: 2143254 - RNA, 19 nt, Artificial Sequence
  Description of Artificial Sequence: Synthetic oligonucleotide
  Sense strand starting at position 1126 of SEQ ID NO: 1882729
uaagcuuaucagggcugau

SEQ ID NO: 2143255 - RNA, 19 nt, Artificial Sequence
  Description of Artificial Sequence: Synthetic oligonucleotide
  Antisense strand to SEQ ID NO: 2143254
aucagcccugauaagcuua

SEQ ID NO: 2143256 - RNA, 19 nt, Artificial Sequence
  Description of Artificial Sequence: Synthetic oligonucleotide
  Sense strand starting at position 1275 of SEQ ID NO: 1882729
caucaacuucucgguggaa

SEQ ID NO: 2143257 - RNA, 19 nt, Artificial Sequence
  Description of Artificial Sequence: Synthetic oligonucleotide
  Antisense strand to SEQ ID NO: 2143256
uuccaccgagaaguugaug

SEQ ID NO: 2143258 - RNA, 19 nt, Artificial Sequence
  Description of Artificial Sequence: Synthetic oligonucleotide
  Sense strand starting at position 1276 of SEQ ID NO: 1882729
aucaacuucucgguggaaa

SEQ ID NO: 2143259 - RNA, 19 nt, Artificial Sequence
  Description of Artificial Sequence: Synthetic oligonucleotide
  Antisense strand to SEQ ID NO: 2143258
uuuccaccgagaaguugau

SEQ ID NO: 2143260 - RNA, 19 nt, Artificial Sequence
  Description of Artificial Sequence: Synthetic oligonucleotide
  Sense strand starting at position 1310 of SEQ ID NO: 1882729
uugguaucacacuggaaag

SEQ ID NO: 2143261 - RNA, 19 nt, Artificial Sequence
  Description of Artificial Sequence: Synthetic oligonucleotide
  Antisense strand to SEQ ID NO: 2143260
cuuuccagugugauaccaa

SEQ ID NO: 2143262 - RNA, 19 nt, Artificial Sequence
  Description of Artificial Sequence: Synthetic oligonucleotide
  Sense strand starting at position 1311 of SEQ ID NO: 1882729
ugguaucacacuggaaagu

SEQ ID NO: 2143263 - RNA, 19 nt, Artificial Sequence
  Description of Artificial Sequence: Synthetic oligonucleotide
  Antisense strand to SEQ ID NO: 2143262
acuuuccagugugauacca

SEQ ID NO: 2143264 - RNA, 19 nt, Artificial Sequence
  Description of Artificial Sequence: Synthetic oligonucleotide
  Sense strand starting at position 1524 of SEQ ID NO: 1882729
gggccuugaagguauguca

SEQ ID NO: 2143265 - RNA, 19 nt, Artificial Sequence
  Description of Artificial Sequence: Synthetic oligonucleotide
  Antisense strand to SEQ ID NO: 2143264
ugacauaccuucaaggccc

SEQ ID NO: 2143266 - RNA, 19 nt, Artificial Sequence
  Description of Artificial Sequence: Synthetic oligonucleotide
  Sense strand starting at position 1527 of SEQ ID NO: 1882729
ccuugaagguaugucaaug

SEQ ID NO: 2143267 - RNA, 19 nt, Artificial Sequence
  Description of Artificial Sequence: Synthetic oligonucleotide
  Antisense strand to SEQ ID NO: 2143266
cauugacauaccuucaagg

SEQ ID NO: 2143268 - RNA, 19 nt, Artificial Sequence
  Description of Artificial Sequence: Synthetic oligonucleotide
  Sense strand starting at position 1537 of SEQ ID NO: 1882729
augucaaugccugauaaag

SEQ ID NO: 2143269 - RNA, 19 nt, Artificial Sequence
  Description of Artificial Sequence: Synthetic oligonucleotide
  Antisense strand to SEQ ID NO: 2143268
cuuuaucaggcauugacau

SEQ ID NO: 2143270 - RNA, 19 nt, Artificial Sequence
  Description of Artificial Sequence: Synthetic oligonucleotide
  Sense strand starting at position 1549 of SEQ ID NO: 1882729
gauaaagccgucuauggga

SEQ ID NO: 2143271 - RNA, 19 nt, Artificial Sequence
  Description of Artificial Sequence: Synthetic oligonucleotide
  Antisense strand to SEQ ID NO: 2143270
ucccauagacggcuuuauc

SEQ ID NO: 2143272 - RNA, 19 nt, Artificial Sequence
  Description of Artificial Sequence: Synthetic oligonucleotide
  Sense strand starting at position 1594 of SEQ ID NO: 1882729
cgugaucggaaucaaguuu

SEQ ID NO: 2143273 - RNA, 19 nt, Artificial Sequence
  Description of Artificial Sequence: Synthetic oligonucleotide
  Antisense strand to SEQ ID NO: 2143272
aaacuugauuccgaucacg

SEQ ID NO: 2143274 - RNA, 19 nt, Artificial Sequence
  Description of Artificial Sequence: Synthetic oligonucleotide
  Sense strand starting at position 1612 of SEQ ID NO: 1882729
ucagaaacgucccuugaaa

SEQ ID NO: 2143275 - RNA, 19 nt, Artificial Sequence
  Description of Artificial Sequence: Synthetic oligonucleotide
  Antisense strand to SEQ ID NO: 2143274
uuucaagggacguuucuga

SEQ ID NO: 2143276 - RNA, 19 nt, Artificial Sequence
  Description of Artificial Sequence: Synthetic oligonucleotide
  Sense strand starting at position 1920 of SEQ ID NO: 1882729
ggccucuguggguaacaga

SEQ ID NO: 2143277 - RNA, 19 nt, Artificial Sequence
  Description of Artificial Sequence: Synthetic oligonucleotide
  Antisense strand to SEQ ID NO: 2143276
ucuguuacccacagaggcc

SEQ ID NO: 2143278 - RNA, 19 nt, Artificial Sequence
  Description of Artificial Sequence: Synthetic oligonucleotide
  Sense strand starting at position 2014 of SEQ ID NO: 1882729
cgacucuuaccaggguuau

SEQ ID NO: 2143279 - RNA, 19 nt, Artificial Sequence
  Description of Artificial Sequence: Synthetic oligonucleotide
  Antisense strand to SEQ ID NO: 2143278
auaacccugguaagagucg

SEQ ID NO: 2143280 - RNA, 19 nt, Artificial Sequence
  Description of Artificial Sequence: Synthetic oligonucleotide
  Sense strand starting at position 2015 of SEQ ID NO: 1882729
gacucuuaccaggguuauc

SEQ ID NO: 2143281 - RNA, 19 nt, Artificial Sequence
  Description of Artificial Sequence: Synthetic oligonucleotide
  Antisense strand to SEQ ID NO: 2143280
gauaacccugguaagaguc

SEQ ID NO: 2143282 - RNA, 19 nt, Artificial Sequence
  Description of Artificial Sequence: Synthetic oligonucleotide
  Sense strand starting at position 2166 of SEQ ID NO: 1882729
cggguaauggugggaucua

SEQ ID NO: 2143283 - RNA, 19 nt, Artificial Sequence
  Description of Artificial Sequence: Synthetic oligonucleotide
  Antisense strand to SEQ ID NO: 2143282
uagaucccaccauuacccg

SEQ ID NO: 2143284 - RNA, 19 nt, Artificial Sequence
  Description of Artificial Sequence: Synthetic oligonucleotide
  Sense strand starting at position 2404 of SEQ ID NO: 1882729
ugaagcaucuugguggauu

SEQ ID NO: 2143285 - RNA, 19 nt, Artificial Sequence
  Description of Artificial Sequence: Synthetic oligonucleotide
  Antisense strand to SEQ ID NO: 2143284
aauccaccaagaugcuuca

SEQ ID NO: 2143286 - RNA, 19 nt, Artificial Sequence
  Description of Artificial Sequence: Synthetic oligonucleotide
  Sense strand starting at position 2406 of SEQ ID NO: 1882729
aagcaucuugguggauuaa

SEQ ID NO: 2143287 - RNA, 19 nt, Artificial Sequence
  Description of Artificial Sequence: Synthetic oligonucleotide
  Antisense strand to SEQ ID NO: 2143286
uuaauccaccaagaugcuu

SEQ ID NO: 2143288 - RNA, 19 nt, Artificial Sequence
  Description of Artificial Sequence: Synthetic oligonucleotide
  Sense strand starting at position 2482 of SEQ ID NO: 1882729
ugguaaagucgggaagcuu

SEQ ID NO: 2143289 - RNA, 19 nt, Artificial Sequence
  Description of Artificial Sequence: Synthetic oligonucleotide
  Antisense strand to SEQ ID NO: 2143288
aagcuucccgacuuuacca

SEQ ID NO: 2143290 - RNA, 19 nt, Artificial Sequence
  Description of Artificial Sequence: Synthetic oligonucleotide
  Sense strand starting at position 2504 of SEQ ID NO: 1882729
gaacacugacguuaaguga

SEQ ID NO: 2143291 - RNA, 19 nt, Artificial Sequence
  Description of Artificial Sequence: Synthetic oligonucleotide
  Antisense strand to SEQ ID NO: 2143290
ucacuuaacgucaguguuc

SEQ ID NO: 2143292 - RNA, 19 nt, Artificial Sequence
  Description of Artificial Sequence: Synthetic oligonucleotide
  Sense strand starting at position 2507 of SEQ ID NO: 1882729
cacugacguuaagugauaa

SEQ ID NO: 2143293 - RNA, 19 nt, Artificial Sequence
  Description of Artificial Sequence: Synthetic oligonucleotide
  Antisense strand to SEQ ID NO: 2143292
uuaucacuuaacgucagug

SEQ ID NO: 2143294 - RNA, 19 nt, Artificial Sequence
  Description of Artificial Sequence: Synthetic oligonucleotide
  Sense strand starting at position 2508 of SEQ ID NO: 1882729
acugacguuaagugauaau

SEQ ID NO: 2143295 - RNA, 19 nt, Artificial Sequence
  Description of Artificial Sequence: Synthetic oligonucleotide
  Antisense strand to SEQ ID NO: 2143294
auuaucacuuaacgucagu

SEQ ID NO: 2143296 - RNA, 19 nt, Artificial Sequence
  Description of Artificial Sequence: Synthetic oligonucleotide
  Sense strand starting at position 2519 of SEQ ID NO: 1882729
gugauaauucugcaguuug

SEQ ID NO: 2143297 - RNA, 19 nt, Artificial Sequence
  Description of Artificial Sequence: Synthetic oligonucleotide
  Antisense strand to SEQ ID NO: 2143296
caaacugcagaauuaucac

SEQ ID NO: 2143298 - RNA, 19 nt, Artificial Sequence
  Description of Artificial Sequence: Synthetic oligonucleotide
  Sense strand starting at position 2543 of SEQ ID NO: 1882729
agacgaacuuuauuacauc

SEQ ID NO: 2143299 - RNA, 19 nt, Artificial Sequence
  Description of Artificial Sequence: Synthetic oligonucleotide
  Antisense strand to SEQ ID NO: 2143298
gauguaauaaaguucgucu

SEQ ID NO: 2143300 - RNA, 19 nt, Artificial Sequence
  Description of Artificial Sequence: Synthetic oligonucleotide
  Sense strand starting at position 2668 of SEQ ID NO: 1882729
gacuaaagauuaucugugu

SEQ ID NO: 2143301 - RNA, 19 nt, Artificial Sequence
  Description of Artificial Sequence: Synthetic oligonucleotide
  Antisense strand to SEQ ID NO: 2143300
acacagauaaucuuuaguc

SEQ ID NO: 2143302 - RNA, 19 nt, Artificial Sequence
  Description of Artificial Sequence: Synthetic oligonucleotide
  Sense strand starting at position 2669 of SEQ ID NO: 1882729
acuaaagauuaucuguguu

SEQ ID NO: 2143303 - RNA, 19 nt, Artificial Sequence
  Description of Artificial Sequence: Synthetic oligonucleotide
  Antisense strand to SEQ ID NO: 2143302
aacacagauaaucuuuagu

SEQ ID NO: 2143304 - RNA, 19 nt, Artificial Sequence
  Description of Artificial Sequence: Synthetic oligonucleotide
  Sense strand starting at position 2720 of SEQ ID NO: 1882729
agacuagaaccuugucuuu

SEQ ID NO: 2143305 - RNA, 19 nt, Artificial Sequence
  Description of Artificial Sequence: Synthetic oligonucleotide
  Antisense strand to SEQ ID NO: 2143304
aaagacaagguucuagucu

SEQ ID NO: 2143306 - RNA, 19 nt, Artificial Sequence
  Description of Artificial Sequence: Synthetic oligonucleotide
  Sense strand starting at position 73 of SEQ ID NO: 1882730
uggguuagugcccaugaga

SEQ ID NO: 2143307 - RNA, 19 nt, Artificial Sequence
  Description of Artificial Sequence: Synthetic oligonucleotide
  Antisense strand to SEQ ID NO: 2143306
ucucaugggcacuaaccca

SEQ ID NO: 2143308 - RNA, 19 nt, Artificial Sequence
  Description of Artificial Sequence: Synthetic oligonucleotide
  Sense strand starting at position 171 of SEQ ID NO: 1882730
ugaguaauccugcaaagau

SEQ ID NO: 2143309 - RNA, 19 nt, Artificial Sequence
  Description of Artificial Sequence: Synthetic oligonucleotide
  Antisense strand to SEQ ID NO: 2143308
aucuuugcaggauuacuca

SEQ ID NO: 2143310 - RNA, 19 nt, Artificial Sequence
  Description of Artificial Sequence: Synthetic oligonucleotide
  Sense strand starting at position 274 of SEQ ID NO: 1882730
aaaccuaaguggucuaagu

SEQ ID NO: 2143311 - RNA, 19 nt, Artificial Sequence
  Description of Artificial Sequence: Synthetic oligonucleotide
  Antisense strand to SEQ ID NO: 2143310
acuuagaccacuuagguuu

SEQ ID NO: 2143312 - RNA, 19 nt, Artificial Sequence
  Description of Artificial Sequence: Synthetic oligonucleotide
  Sense strand starting at position 276 of SEQ ID NO: 1882730
accuaaguggucuaaguga

SEQ ID NO: 2143313 - RNA, 19 nt, Artificial Sequence
  Description of Artificial Sequence: Synthetic oligonucleotide
  Antisense strand to SEQ ID NO: 2143312
ucacuuagaccacuuaggu

SEQ ID NO: 2143314 - RNA, 19 nt, Artificial Sequence
  Description of Artificial Sequence: Synthetic oligonucleotide
  Sense strand starting at position 296 of SEQ ID NO: 1882730
cuguguauuguccauacaa

SEQ ID NO: 2143315 - RNA, 19 nt, Artificial Sequence
  Description of Artificial Sequence: Synthetic oligonucleotide
  Antisense strand to SEQ ID NO: 2143314
uuguauggacaauacacag

SEQ ID NO: 2143316 - RNA, 19 nt, Artificial Sequence
  Description of Artificial Sequence: Synthetic oligonucleotide
  Sense strand starting at position 298 of SEQ ID NO: 1882730
guguauuguccauacaaca

SEQ ID NO: 2143317 - RNA, 19 nt, Artificial Sequence
  Description of Artificial Sequence: Synthetic oligonucleotide
  Antisense strand to SEQ ID NO: 2143316
uguuguauggacaauacac

SEQ ID NO: 2143318 - RNA, 19 nt, Artificial Sequence
  Description of Artificial Sequence: Synthetic oligonucleotide
  Sense strand starting at position 332 of SEQ ID NO: 1882730
uggguacuggcauaaagua

SEQ ID NO: 2143319 - RNA, 19 nt, Artificial Sequence
  Description of Artificial Sequence: Synthetic oligonucleotide
  Antisense strand to SEQ ID NO: 2143318
uacuuuaugccaguaccca

SEQ ID NO: 2143320 - RNA, 19 nt, Artificial Sequence
  Description of Artificial Sequence: Synthetic oligonucleotide
  Sense strand starting at position 354 of SEQ ID NO: 1882730
uuggcucucagguauagau

SEQ ID NO: 2143321 - RNA, 19 nt, Artificial Sequence
  Description of Artificial Sequence: Synthetic oligonucleotide
  Antisense strand to SEQ ID NO: 2143320
aucuauaccugagagccaa

SEQ ID NO: 2143322 - RNA, 19 nt, Artificial Sequence
  Description of Artificial Sequence: Synthetic oligonucleotide
  Sense strand starting at position 426 of SEQ ID NO: 1882730
aagaauguccuaugugaca

SEQ ID NO: 2143323 - RNA, 19 nt, Artificial Sequence
  Description of Artificial Sequence: Synthetic oligonucleotide
  Antisense strand to SEQ ID NO: 2143322
ugucacauaggacauucuu

SEQ ID NO: 2143324 - RNA, 19 nt, Artificial Sequence
  Description of Artificial Sequence: Synthetic oligonucleotide
  Sense strand starting at position 439 of SEQ ID NO: 1882730
gugacaaucuaguuaaagu

SEQ ID NO: 2143325 - RNA, 19 nt, Artificial Sequence
  Description of Artificial Sequence: Synthetic oligonucleotide
  Antisense strand to SEQ ID NO: 2143324
acuuuaacuagauugucac

SEQ ID NO: 2143326 - RNA, 19 nt, Artificial Sequence
  Description of Artificial Sequence: Synthetic oligonucleotide
  Sense strand starting at position 695 of SEQ ID NO: 1882730
ugagaaauguaguugguua

SEQ ID NO: 2143327 - RNA, 19 nt, Artificial Sequence
  Description of Artificial Sequence: Synthetic oligonucleotide
  Antisense strand to SEQ ID NO: 2143326
uaaccaacuacauuucuca

SEQ ID NO: 2143328 - RNA, 19 nt, Artificial Sequence
  Description of Artificial Sequence: Synthetic oligonucleotide
  Sense strand starting at position 696 of SEQ ID NO: 1882730
gagaaauguaguugguuaa

SEQ ID NO: 2143329 - RNA, 19 nt, Artificial Sequence
  Description of Artificial Sequence: Synthetic oligonucleotide
  Antisense strand to SEQ ID NO: 2143328
uuaaccaacuacauuucuc

SEQ ID NO: 2143330 - RNA, 19 nt, Artificial Sequence
  Description of Artificial Sequence: Synthetic oligonucleotide
  Sense strand starting at position 697 of SEQ ID NO: 1882730
agaaauguaguugguuaau

SEQ ID NO: 2143331 - RNA, 19 nt, Artificial Sequence
  Description of Artificial Sequence: Synthetic oligonucleotide
  Antisense strand to SEQ ID NO: 2143330
auuaaccaacuacauuucu

SEQ ID NO: 2143332 - RNA, 19 nt, Artificial Sequence
  Description of Artificial Sequence: Synthetic oligonucleotide
  Sense strand starting at position 849 of SEQ ID NO: 1882730
aaccucuguucuguaggaa

SEQ ID NO: 2143333 - RNA, 19 nt, Artificial Sequence
  Description of Artificial Sequence: Synthetic oligonucleotide
  Antisense strand to SEQ ID NO: 2143332
uuccuacagaacagagguu

SEQ ID NO: 2143334 - RNA, 19 nt, Artificial Sequence
  Description of Artificial Sequence: Synthetic oligonucleotide
  Sense strand starting at position 850 of SEQ ID NO: 1882730
accucuguucuguaggaaa

SEQ ID NO: 2143335 - RNA, 19 nt, Artificial Sequence
  Description of Artificial Sequence: Synthetic oligonucleotide
  Antisense strand to SEQ ID NO: 2143334
uuuccuacagaacagaggu

SEQ ID NO: 2143336 - RNA, 19 nt, Artificial Sequence
  Description of Artificial Sequence: Synthetic oligonucleotide
  Sense strand starting at position 876 of SEQ ID NO: 1882730
gaaugcuaagcugguaaga

SEQ ID NO: 2143337 - RNA, 19 nt, Artificial Sequence
  Description of Artificial Sequence: Synthetic oligonucleotide
  Antisense strand to SEQ ID NO: 2143336
ucuuaccagcuuagcauuc

SEQ ID NO: 2143338 - RNA, 19 nt, Artificial Sequence
  Description of Artificial Sequence: Synthetic oligonucleotide
  Sense strand starting at position 887 of SEQ ID NO: 1882730
ugguaagaaucauuaucca

SEQ ID NO: 2143339 - RNA, 19 nt, Artificial Sequence
  Description of Artificial Sequence: Synthetic oligonucleotide
  Antisense strand to SEQ ID NO: 2143338
uggauaaugauucuuacca

SEQ ID NO: 2143340 - RNA, 19 nt, Artificial Sequence
  Description of Artificial Sequence: Synthetic oligonucleotide
  Sense strand starting at position 907 of SEQ ID NO: 1882730
aaguguuaaguguacaucu

SEQ ID NO: 2143341 - RNA, 19 nt, Artificial Sequence
  Description of Artificial Sequence: Synthetic oligonucleotide
  Antisense strand to SEQ ID NO: 2143340
agauguacacuuaacacuu

SEQ ID NO: 2143342 - RNA, 19 nt, Artificial Sequence
  Description of Artificial Sequence: Synthetic oligonucleotide
  Sense strand starting at position 909 of SEQ ID NO: 1882730
guguuaaguguacaucuaa

SEQ ID NO: 2143343 - RNA, 19 nt, Artificial Sequence
  Description of Artificial Sequence: Synthetic oligonucleotide
  Antisense strand to SEQ ID NO: 2143342
uuagauguacacuuaacac

SEQ ID NO: 2143344 - RNA, 19 nt, Artificial Sequence
  Description of Artificial Sequence: Synthetic oligonucleotide
  Sense strand starting at position 1035 of SEQ ID NO: 1882730
auguauaggcuuuauauag

SEQ ID NO: 2143345 - RNA, 19 nt, Artificial Sequence
  Description of Artificial Sequence: Synthetic oligonucleotide
  Antisense strand to SEQ ID NO: 2143344
cuauauaaagccuauacau

SEQ ID NO: 2143346 - RNA, 19 nt, Artificial Sequence
  Description of Artificial Sequence: Synthetic oligonucleotide
  Sense strand starting at position 1100 of SEQ ID NO: 1882730
uuuccuuaccugugacaga

SEQ ID NO: 2143347 - RNA, 19 nt, Artificial Sequence
  Description of Artificial Sequence: Synthetic oligonucleotide
  Antisense strand to SEQ ID NO: 2143346
ucugucacagguaaggaaa

SEQ ID NO: 2143348 - RNA, 19 nt, Artificial Sequence
  Description of Artificial Sequence: Synthetic oligonucleotide
  Sense strand starting at position 2066 of SEQ ID NO: 1882730
ggagucaaaugucucuuaa

SEQ ID NO: 2143349 - RNA, 19 nt, Artificial Sequence
  Description of Artificial Sequence: Synthetic oligonucleotide
  Antisense strand to SEQ ID NO: 2143348
uuaagagacauuugacucc

SEQ ID NO: 2143350 - RNA, 19 nt, Artificial Sequence
  Description of Artificial Sequence: Synthetic oligonucleotide
  Sense strand starting at position 2089 of SEQ ID NO: 1882730
ugugguauacaaugaauag

SEQ ID NO: 2143351 - RNA, 19 nt, Artificial Sequence
  Description of Artificial Sequence: Synthetic oligonucleotide
  Antisense strand to SEQ ID NO: 2143350
cuauucauuguauaccaca

SEQ ID NO: 2143352 - RNA, 19 nt, Artificial Sequence
  Description of Artificial Sequence: Synthetic oligonucleotide
  Sense strand starting at position 2125 of SEQ ID NO: 1882730
aucuuugaggcuuauuaau

SEQ ID NO: 2143353 - RNA, 19 nt, Artificial Sequence
  Description of Artificial Sequence: Synthetic oligonucleotide
  Antisense strand to SEQ ID NO: 2143352
auuaauaagccucaaagau

SEQ ID NO: 2143354 - RNA, 19 nt, Artificial Sequence
  Description of Artificial Sequence: Synthetic oligonucleotide
  Sense strand starting at position 2127 of SEQ ID NO: 1882730
cuuugaggcuuauuaauau

SEQ ID NO: 2143355 - RNA, 19 nt, Artificial Sequence
  Description of Artificial Sequence: Synthetic oligonucleotide
  Antisense strand to SEQ ID NO: 2143354
auauuaauaagccucaaag

SEQ ID NO: 2143356 - RNA, 19 nt, Artificial Sequence
  Description of Artificial Sequence: Synthetic oligonucleotide
  Sense strand starting at position 2213 of SEQ ID NO: 1882730
auuugucagcuaugcaaac

SEQ ID NO: 2143357 - RNA, 19 nt, Artificial Sequence
  Description of Artificial Sequence: Synthetic oligonucleotide
  Antisense strand to SEQ ID NO: 2143356
guuugcauagcugacaaau

SEQ ID NO: 2143358 - RNA, 19 nt, Artificial Sequence
  Description of Artificial Sequence: Synthetic oligonucleotide
  Sense strand starting at position 2341 of SEQ ID NO: 1882730
gucugaauggauugucaua

SEQ ID NO: 2143359 - RNA, 19 nt, Artificial Sequence
  Description of Artificial Sequence: Synthetic oligonucleotide
  Antisense strand to SEQ ID NO: 2143358
uaugacaauccauucagac

SEQ ID NO: 2143360 - RNA, 19 nt, Artificial Sequence
  Description of Artificial Sequence: Synthetic oligonucleotide
  Sense strand starting at position 2343 of SEQ ID NO: 1882730
cugaauggauugucauauc

SEQ ID NO: 2143361 - RNA, 19 nt, Artificial Sequence
  Description of Artificial Sequence: Synthetic oligonucleotide
  Antisense strand to SEQ ID NO: 2143360
gauaugacaauccauucag

SEQ ID NO: 2143362 - RNA, 19 nt, Artificial Sequence
  Description of Artificial Sequence: Synthetic oligonucleotide
  Sense strand starting at position 2353 of SEQ ID NO: 1882730
ugucauaucuccuuauuga

SEQ ID NO: 2143363 - RNA, 19 nt, Artificial Sequence
  Description of Artificial Sequence: Synthetic oligonucleotide
  Antisense strand to SEQ ID NO: 2143362
ucaauaaggagauaugaca

SEQ ID NO: 2143364 - RNA, 19 nt, Artificial Sequence
  Description of Artificial Sequence: Synthetic oligonucleotide
  Sense strand starting at position 2354 of SEQ ID NO: 1882730
gucauaucuccuuauugau

SEQ ID NO: 2143365 - RNA, 19 nt, Artificial Sequence
  Description of Artificial Sequence: Synthetic oligonucleotide
  Antisense strand to SEQ ID NO: 2143364
aucaauaaggagauaugac

SEQ ID NO: 2143366 - RNA, 19 nt, Artificial Sequence
  Description of Artificial Sequence: Synthetic oligonucleotide
  Sense strand starting at position 2467 of SEQ ID NO: 1882730
cuguacuaacaguaaguaa

SEQ ID NO: 2143367 - RNA, 19 nt, Artificial Sequence
  Description of Artificial Sequence: Synthetic oligonucleotide
  Antisense strand to SEQ ID NO: 2143366
uuacuuacuguuaguacag

SEQ ID NO: 2143368 - RNA, 19 nt, Artificial Sequence
  Description of Artificial Sequence: Synthetic oligonucleotide
  Sense strand starting at position 2558 of SEQ ID NO: 1882730
acuagcauaggcugaaaua

SEQ ID NO: 2143369 - RNA, 19 nt, Artificial Sequence
  Description of Artificial Sequence: Synthetic oligonucleotide
  Antisense strand to SEQ ID NO: 2143368
uauuucagccuaugcuagu

SEQ ID NO: 2143370 - RNA, 19 nt, Artificial Sequence
  Description of Artificial Sequence: Synthetic oligonucleotide
  Sense strand starting at position 2559 of SEQ ID NO: 1882730
cuagcauaggcugaaauaa

SEQ ID NO: 2143371 - RNA, 19 nt, Artificial Sequence
  Description of Artificial Sequence: Synthetic oligonucleotide
  Antisense strand to SEQ ID NO: 2143370
uuauuucagccuaugcuag

SEQ ID NO: 2143372 - RNA, 19 nt, Artificial Sequence
  Description of Artificial Sequence: Synthetic oligonucleotide
  Sense strand starting at position 2601 of SEQ ID NO: 1882730
cccuguguugauuauggau

SEQ ID NO: 2143373 - RNA, 19 nt, Artificial Sequence
  Description of Artificial Sequence: Synthetic oligonucleotide
  Antisense strand to SEQ ID NO: 2143372
auccauaaucaacacaggg

SEQ ID NO: 2143374 - RNA, 19 nt, Artificial Sequence
  Description of Artificial Sequence: Synthetic oligonucleotide
  Sense strand starting at position 2786 of SEQ ID NO: 1882730
gccaaagaaucuucccaga

SEQ ID NO: 2143375 - RNA, 19 nt, Artificial Sequence
  Description of Artificial Sequence: Synthetic oligonucleotide
  Antisense strand to SEQ ID NO: 2143374
ucugggaagauucuuuggc

SEQ ID NO: 2143376 - RNA, 19 nt, Artificial Sequence
  Description of Artificial Sequence: Synthetic oligonucleotide
  Sense strand starting at position 2853 of SEQ ID NO: 1882730
uccugaaagcaauaugguu

SEQ ID NO: 2143377 - RNA, 19 nt, Artificial Sequence
  Description of Artificial Sequence: Synthetic oligonucleotide
  Antisense strand to SEQ ID NO: 2143376
aaccauauugcuuucagga

SEQ ID NO: 2143378 - RNA, 19 nt, Artificial Sequence
  Description of Artificial Sequence: Synthetic oligonucleotide
  Sense strand starting at position 3005 of SEQ ID NO: 1882730
uggugucuuuauuuaacgu

SEQ ID NO: 2143379 - RNA, 19 nt, Artificial Sequence
  Description of Artificial Sequence: Synthetic oligonucleotide
  Antisense strand to SEQ ID NO: 2143378
acguuaaauaaagacacca

SEQ ID NO: 2143380 - RNA, 19 nt, Artificial Sequence
  Description of Artificial Sequence: Synthetic oligonucleotide
  Sense strand starting at position 3218 of SEQ ID NO: 1882730
guauuauagcaccagauga

SEQ ID NO: 2143381 - RNA, 19 nt, Artificial Sequence
  Description of Artificial Sequence: Synthetic oligonucleotide
  Antisense strand to SEQ ID NO: 2143380
ucaucuggugcuauaauac

SEQ ID NO: 2143382 - RNA, 19 nt, Artificial Sequence
  Description of Artificial Sequence: Synthetic oligonucleotide
  Sense strand starting at position 3229 of SEQ ID NO: 1882730
ccagaugaaucucuaagcu

SEQ ID NO: 2143383 - RNA, 19 nt, Artificial Sequence
  Description of Artificial Sequence: Synthetic oligonucleotide
  Antisense strand to SEQ ID NO: 2143382
agcuuagagauucaucugg

SEQ ID NO: 2143384 - RNA, 19 nt, Artificial Sequence
  Description of Artificial Sequence: Synthetic oligonucleotide
  Sense strand starting at position 3276 of SEQ ID NO: 1882730
uucucuaaucaugggaucu

SEQ ID NO: 2143385 - RNA, 19 nt, Artificial Sequence
  Description of Artificial Sequence: Synthetic oligonucleotide
  Antisense strand to SEQ ID NO: 2143384
agaucccaugauuagagaa

SEQ ID NO: 2143386 - RNA, 19 nt, Artificial Sequence
  Description of Artificial Sequence: Synthetic oligonucleotide
  Sense strand starting at position 524 of SEQ ID NO: 1882731
uuaauacaugaucacgagu

SEQ ID NO: 2143387 - RNA, 19 nt, Artificial Sequence
  Description of Artificial Sequence: Synthetic oligonucleotide
  Antisense strand to SEQ ID NO: 2143386
acucgugaucauguauuaa

SEQ ID NO: 2143388 - RNA, 19 nt, Artificial Sequence
  Description of Artificial Sequence: Synthetic oligonucleotide
  Sense strand starting at position 670 of SEQ ID NO: 1882731
auaccugauggcuaauagu

SEQ ID NO: 2143389 - RNA, 19 nt, Artificial Sequence
  Description of Artificial Sequence: Synthetic oligonucleotide
  Antisense strand to SEQ ID NO: 2143388
acuauuagccaucagguau

SEQ ID NO: 2143390 - RNA, 19 nt, Artificial Sequence
  Description of Artificial Sequence: Synthetic oligonucleotide
  Sense strand starting at position 684 of SEQ ID NO: 1882731
auaguuccagugugauaac

SEQ ID NO: 2143391 - RNA, 19 nt, Artificial Sequence
  Description of Artificial Sequence: Synthetic oligonucleotide
  Antisense strand to SEQ ID NO: 2143390
guuaucacacuggaacuau

SEQ ID NO: 2143392 - RNA, 19 nt, Artificial Sequence
  Description of Artificial Sequence: Synthetic oligonucleotide
  Sense strand starting at position 693 of SEQ ID NO: 1882731
gugugauaacgucggagaa

SEQ ID NO: 2143393 - RNA, 19 nt, Artificial Sequence
  Description of Artificial Sequence: Synthetic oligonucleotide
  Antisense strand to SEQ ID NO: 2143392
uucuccgacguuaucacac

SEQ ID NO: 2143394 - RNA, 19 nt, Artificial Sequence
  Description of Artificial Sequence: Synthetic oligonucleotide
  Sense strand starting at position 694 of SEQ ID NO: 1882731
ugugauaacgucggagaau

SEQ ID NO: 2143395 - RNA, 19 nt, Artificial Sequence
  Description of Artificial Sequence: Synthetic oligonucleotide
  Antisense strand to SEQ ID NO: 2143394
auucuccgacguuaucaca

SEQ ID NO: 2143396 - RNA, 19 nt, Artificial Sequence
  Description of Artificial Sequence: Synthetic oligonucleotide
  Sense strand starting at position 697 of SEQ ID NO: 1882731
gauaacgucggagaauacu

SEQ ID NO: 2143397 - RNA, 19 nt, Artificial Sequence
  Description of Artificial Sequence: Synthetic oligonucleotide
  Antisense strand to SEQ ID NO: 2143396
aguauucuccgacguuauc

SEQ ID NO: 2143398 - RNA, 19 nt, Artificial Sequence
  Description of Artificial Sequence: Synthetic oligonucleotide
  Sense strand starting at position 703 of SEQ ID NO: 1882731
gucggagaauacuccaaua

SEQ ID NO: 2143399 - RNA, 19 nt, Artificial Sequence
  Description of Artificial Sequence: Synthetic oligonucleotide
  Antisense strand to SEQ ID NO: 2143398
uauuggaguauucuccgac

SEQ ID NO: 2143400 - RNA, 19 nt, Artificial Sequence
  Description of Artificial Sequence: Synthetic oligonucleotide
  Sense strand starting at position 759 of SEQ ID NO: 1882731
cagguuauuuaauacucga

SEQ ID NO: 2143401 - RNA, 19 nt, Artificial Sequence
  Description of Artificial Sequence: Synthetic oligonucleotide
  Antisense strand to SEQ ID NO: 2143400
ucgaguauuaaauaaccug

SEQ ID NO: 2143402 - RNA, 19 nt, Artificial Sequence
  Description of Artificial Sequence: Synthetic oligonucleotide
  Sense strand starting at position 769 of SEQ ID NO: 1882731
aauacucgauuugaguuua

SEQ ID NO: 2143403 - RNA, 19 nt, Artificial Sequence
  Description of Artificial Sequence: Synthetic oligonucleotide
  Antisense strand to SEQ ID NO: 2143402
uaaacucaaaucgaguauu

SEQ ID NO: 2143404 - RNA, 19 nt, Artificial Sequence
  Description of Artificial Sequence: Synthetic oligonucleotide
  Sense strand starting at position 1392 of SEQ ID NO: 1882731
gcgagaucgccgccgagaa

SEQ ID NO: 2143405 - RNA, 19 nt, Artificial Sequence
  Description of Artificial Sequence: Synthetic oligonucleotide
  Antisense strand to SEQ ID NO: 2143404
uucucggcggcgaucucgc

SEQ ID NO: 2143406 - RNA, 19 nt, Artificial Sequence
  Description of Artificial Sequence: Synthetic oligonucleotide
  Sense strand starting at position 1618 of SEQ ID NO: 1882731
ugcaaauguguacaucaga

SEQ ID NO: 2143407 - RNA, 19 nt, Artificial Sequence
  Description of Artificial Sequence: Synthetic oligonucleotide
  Antisense strand to SEQ ID NO: 2143406
ucugauguacacauuugca

SEQ ID NO: 2143408 - RNA, 19 nt, Artificial Sequence
  Description of Artificial Sequence: Synthetic oligonucleotide
  Sense strand starting at position 2177 of SEQ ID NO: 1882731
cgcggauccuaccuacaaa

SEQ ID NO: 2143409 - RNA, 19 nt, Artificial Sequence
  Description of Artificial Sequence: Synthetic oligonucleotide
  Antisense strand to SEQ ID NO: 2143408
uuuguagguaggauccgcg

SEQ ID NO: 2143410 - RNA, 19 nt, Artificial Sequence
  Description of Artificial Sequence: Synthetic oligonucleotide
  Sense strand starting at position 2248 of SEQ ID NO: 1882731
cacugaauucugggaaacg

SEQ ID NO: 2143411 - RNA, 19 nt, Artificial Sequence
  Description of Artificial Sequence: Synthetic oligonucleotide
  Antisense strand to SEQ ID NO: 2143410
cguuucccagaauucagug

SEQ ID NO: 2143412 - RNA, 19 nt, Artificial Sequence
  Description of Artificial Sequence: Synthetic oligonucleotide
  Sense strand starting at position 2493 of SEQ ID NO: 1882731
ugguguucuccuuaaccuu

SEQ ID NO: 2143413 - RNA, 19 nt, Artificial Sequence
  Description of Artificial Sequence: Synthetic oligonucleotide
  Antisense strand to SEQ ID NO: 2143412
aagguuaaggagaacacca

SEQ ID NO: 2143414 - RNA, 19 nt, Artificial Sequence
  Description of Artificial Sequence: Synthetic oligonucleotide
  Sense strand starting at position 2550 of SEQ ID NO: 1882731
uuaccucuccuggguaaca

SEQ ID NO: 2143415 - RNA, 19 nt, Artificial Sequence
  Description of Artificial Sequence: Synthetic oligonucleotide
  Antisense strand to SEQ ID NO: 2143414
uguuacccaggagagguaa

SEQ ID NO: 2143416 - RNA, 19 nt, Artificial Sequence
  Description of Artificial Sequence: Synthetic oligonucleotide
  Sense strand starting at position 2552 of SEQ ID NO: 1882731
accucuccuggguaacauu

SEQ ID NO: 2143417 - RNA, 19 nt, Artificial Sequence
  Description of Artificial Sequence: Synthetic oligonucleotide
  Antisense strand to SEQ ID NO: 2143416
aauguuacccaggagaggu

SEQ ID NO: 2143418 - RNA, 19 nt, Artificial Sequence
  Description of Artificial Sequence: Synthetic oligonucleotide
  Sense strand starting at position 2561 of SEQ ID NO: 1882731
ggguaacauuuccaugguu

SEQ ID NO: 2143419 - RNA, 19 nt, Artificial Sequence
  Description of Artificial Sequence: Synthetic oligonucleotide
  Antisense strand to SEQ ID NO: 2143418
aaccauggaaauguuaccc

SEQ ID NO: 2143420 - RNA, 19 nt, Artificial Sequence
  Description of Artificial Sequence: Synthetic oligonucleotide
  Sense strand starting at position 2610 of SEQ ID NO: 1882731
agccaucaucaguacugua

SEQ ID NO: 2143421 - RNA, 19 nt, Artificial Sequence
  Description of Artificial Sequence: Synthetic oligonucleotide
  Antisense strand to SEQ ID NO: 2143420
uacaguacugaugauggcu

SEQ ID NO: 2143422 - RNA, 19 nt, Artificial Sequence
  Description of Artificial Sequence: Synthetic oligonucleotide
  Sense strand starting at position 2618 of SEQ ID NO: 1882731
ucaguacuguaccuguaau

SEQ ID NO: 2143423 - RNA, 19 nt, Artificial Sequence
  Description of Artificial Sequence: Synthetic oligonucleotide
  Antisense strand to SEQ ID NO: 2143422
auuacagguacaguacuga

SEQ ID NO: 2143424 - RNA, 19 nt, Artificial Sequence
  Description of Artificial Sequence: Synthetic oligonucleotide
  Sense strand starting at position 2632 of SEQ ID NO: 1882731
guaauuggaccgugguuca

SEQ ID NO: 2143425 - RNA, 19 nt, Artificial Sequence
  Description of Artificial Sequence: Synthetic oligonucleotide
  Antisense strand to SEQ ID NO: 2143424
ugaaccacgguccaauuac

SEQ ID NO: 2143426 - RNA, 19 nt, Artificial Sequence
  Description of Artificial Sequence: Synthetic oligonucleotide
  Sense strand starting at position 2692 of SEQ ID NO: 1882731
gaugcuuucgucuacuuag

SEQ ID NO: 2143427 - RNA, 19 nt, Artificial Sequence
  Description of Artificial Sequence: Synthetic oligonucleotide
  Antisense strand to SEQ ID NO: 2143426
cuaaguagacgaaagcauc

SEQ ID NO: 2143428 - RNA, 19 nt, Artificial Sequence
  Description of Artificial Sequence: Synthetic oligonucleotide
  Sense strand starting at position 2694 of SEQ ID NO: 1882731
ugcuuucgucuacuuaguu

SEQ ID NO: 2143429 - RNA, 19 nt, Artificial Sequence
  Description of Artificial Sequence: Synthetic oligonucleotide
  Antisense strand to SEQ ID NO: 2143428
aacuaaguagacgaaagca

SEQ ID NO: 2143430 - RNA, 19 nt, Artificial Sequence
  Description of Artificial Sequence: Synthetic oligonucleotide
  Sense strand starting at position 2715 of SEQ ID NO: 1882731
ggaguucguguauaucuca

SEQ ID NO: 2143431 - RNA, 19 nt, Artificial Sequence
  Description of Artificial Sequence: Synthetic oligonucleotide
  Antisense strand to SEQ ID NO: 2143430
ugagauauacacgaacucc

SEQ ID NO: 2143432 - RNA, 19 nt, Artificial Sequence
  Description of Artificial Sequence: Synthetic oligonucleotide
  Sense strand starting at position 2735 of SEQ ID NO: 1882731
auucuagacuaggaauaua

SEQ ID NO: 2143433 - RNA, 19 nt, Artificial Sequence
  Description of Artificial Sequence: Synthetic oligonucleotide
  Antisense strand to SEQ ID NO: 2143432
uauauuccuagucuagaau

SEQ ID NO: 2143434 - RNA, 19 nt, Artificial Sequence
  Description of Artificial Sequence: Synthetic oligonucleotide
  Sense strand starting at position 2762 of SEQ ID NO: 1882731
cagcguuguggguuucuau

SEQ ID NO: 2143435 - RNA, 19 nt, Artificial Sequence
  Description of Artificial Sequence: Synthetic oligonucleotide
  Antisense strand to SEQ ID NO: 2143434
auagaaacccacaacgcug

SEQ ID NO: 2143436 - RNA, 19 nt, Artificial Sequence
  Description of Artificial Sequence: Synthetic oligonucleotide
  Sense strand starting at position 2781 of SEQ ID NO: 1882731
acaagaaugugucccuuga

SEQ ID NO: 2143437 - RNA, 19 nt, Artificial Sequence
  Description of Artificial Sequence: Synthetic oligonucleotide
  Antisense strand to SEQ ID NO: 2143436
ucaagggacacauucuugu

SEQ ID NO: 2143438 - RNA, 19 nt, Artificial Sequence
  Description of Artificial Sequence: Synthetic oligonucleotide
  Sense strand starting at position 2783 of SEQ ID NO: 1882731
aagaaugugucccuugaca

SEQ ID NO: 2143439 - RNA, 19 nt, Artificial Sequence
  Description of Artificial Sequence: Synthetic oligonucleotide
  Antisense strand to SEQ ID NO: 2143438
ugucaagggacacauucuu

SEQ ID NO: 2143440 - RNA, 19 nt, Artificial Sequence
  Description of Artificial Sequence: Synthetic oligonucleotide
  Sense strand starting at position 2785 of SEQ ID NO: 1882731
gaaugugucccuugacaau

SEQ ID NO: 2143441 - RNA, 19 nt, Artificial Sequence
  Description of Artificial Sequence: Synthetic oligonucleotide
  Antisense strand to SEQ ID NO: 2143440
auugucaagggacacauuc

SEQ ID NO: 2143442 - RNA, 19 nt, Artificial Sequence
  Description of Artificial Sequence: Synthetic oligonucleotide
  Sense strand starting at position 2924 of SEQ ID NO: 1882731
acauuugucuaguauuuag

SEQ ID NO: 2143443 - RNA, 19 nt, Artificial Sequence
  Description of Artificial Sequence: Synthetic oligonucleotide
  Antisense strand to SEQ ID NO: 2143442
cuaaauacuagacaaaugu

SEQ ID NO: 2143444 - RNA, 19 nt, Artificial Sequence
  Description of Artificial Sequence: Synthetic oligonucleotide
  Sense strand starting at position 2935 of SEQ ID NO: 1882731
guauuuagagccuguuauu

SEQ ID NO: 2143445 - RNA, 19 nt, Artificial Sequence
  Description of Artificial Sequence: Synthetic oligonucleotide
  Antisense strand to SEQ ID NO: 2143444
aauaacaggcucuaaauac

SEQ ID NO: 2143446 - RNA, 19 nt, Artificial Sequence
  Description of Artificial Sequence: Synthetic oligonucleotide
  Sense strand starting at position 2998 of SEQ ID NO: 1882731
ccucaauguaggugaguca

SEQ ID NO: 2143447 - RNA, 19 nt, Artificial Sequence
  Description of Artificial Sequence: Synthetic oligonucleotide
  Antisense strand to SEQ ID NO: 2143446
ugacucaccuacauugagg

SEQ ID NO: 2143448 - RNA, 19 nt, Artificial Sequence
  Description of Artificial Sequence: Synthetic oligonucleotide
  Sense strand starting at position 3033 of SEQ ID NO: 1882731
ucagcugagcucuauucua

SEQ ID NO: 2143449 - RNA, 19 nt, Artificial Sequence
  Description of Artificial Sequence: Synthetic oligonucleotide
  Antisense strand to SEQ ID NO: 2143448
uagaauagagcucagcuga

SEQ ID NO: 2143450 - RNA, 19 nt, Artificial Sequence
  Description of Artificial Sequence: Synthetic oligonucleotide
  Sense strand starting at position 3065 of SEQ ID NO: 1882731
guagcaaauuuccaccaga

SEQ ID NO: 2143451 - RNA, 19 nt, Artificial Sequence
  Description of Artificial Sequence: Synthetic oligonucleotide
  Antisense strand to SEQ ID NO: 2143450
ucugguggaaauuugcuac

SEQ ID NO: 2143452 - RNA, 19 nt, Artificial Sequence
  Description of Artificial Sequence: Synthetic oligonucleotide
  Sense strand starting at position 3287 of SEQ ID NO: 1882731
cuguccuauucugugauca

SEQ ID NO: 2143453 - RNA, 19 nt, Artificial Sequence
  Description of Artificial Sequence: Synthetic oligonucleotide
  Antisense strand to SEQ ID NO: 2143452
ugaucacagaauaggacag

SEQ ID NO: 2143454 - RNA, 19 nt, Artificial Sequence
  Description of Artificial Sequence: Synthetic oligonucleotide
  Sense strand starting at position 3288 of SEQ ID NO: 1882731
uguccuauucugugaucac

SEQ ID NO: 2143455 - RNA, 19 nt, Artificial Sequence
  Description of Artificial Sequence: Synthetic oligonucleotide
  Antisense strand to SEQ ID NO: 2143454
gugaucacagaauaggaca

SEQ ID NO: 2143456 - RNA, 19 nt, Artificial Sequence
  Description of Artificial Sequence: Synthetic oligonucleotide
  Sense strand starting at position 3291 of SEQ ID NO: 1882731
ccuauucugugaucacaug

SEQ ID NO: 2143457 - RNA, 19 nt, Artificial Sequence
  Description of Artificial Sequence: Synthetic oligonucleotide
  Antisense strand to SEQ ID NO: 2143456
caugugaucacagaauagg

SEQ ID NO: 2143458 - RNA, 19 nt, Artificial Sequence
  Description of Artificial Sequence: Synthetic oligonucleotide
  Sense strand starting at position 3292 of SEQ ID NO: 1882731
cuauucugugaucacaugu

SEQ ID NO: 2143459 - RNA, 19 nt, Artificial Sequence
  Description of Artificial Sequence: Synthetic oligonucleotide
  Antisense strand to SEQ ID NO: 2143458
acaugugaucacagaauag

SEQ ID NO: 2143460 - RNA, 19 nt, Artificial Sequence
  Description of Artificial Sequence: Synthetic oligonucleotide
  Sense strand starting at position 3386 of SEQ ID NO: 1882731
cagauuuauuuguguguuc

SEQ ID NO: 2143461 - RNA, 19 nt, Artificial Sequence
  Description of Artificial Sequence: Synthetic oligonucleotide
  Antisense strand to SEQ ID NO: 2143460
gaacacacaaauaaaucug

SEQ ID NO: 2143462 - RNA, 19 nt, Artificial Sequence
  Description of Artificial Sequence: Synthetic oligonucleotide
  Sense strand starting at position 3391 of SEQ ID NO: 1882731
uuauuuguguguucccuau

SEQ ID NO: 2143463 - RNA, 19 nt, Artificial Sequence
  Description of Artificial Sequence: Synthetic oligonucleotide
  Antisense strand to SEQ ID NO: 2143462
auagggaacacacaaauaa

SEQ ID NO: 2143464 - RNA, 19 nt, Artificial Sequence
  Description of Artificial Sequence: Synthetic oligonucleotide
  Sense strand starting at position 3856 of SEQ ID NO: 1882731
uuguuuaauccugaagcag

SEQ ID NO: 2143465 - RNA, 19 nt, Artificial Sequence
  Description of Artificial Sequence: Synthetic oligonucleotide
  Antisense strand to SEQ ID NO: 2143464
cugcuucaggauuaaacaa

SEQ ID NO: 2143466 - RNA, 19 nt, Artificial Sequence
  Description of Artificial Sequence: Synthetic oligonucleotide
  Sense strand starting at position 95 of SEQ ID NO: 1882732
acugguuccuaaguccaaa

SEQ ID NO: 2143467 - RNA, 19 nt, Artificial Sequence
  Description of Artificial Sequence: Synthetic oligonucleotide
  Antisense strand to SEQ ID NO: 2143466
uuuggacuuaggaaccagu

SEQ ID NO: 2143468 - RNA, 19 nt, Artificial Sequence
  Description of Artificial Sequence: Synthetic oligonucleotide
  Sense strand starting at position 368 of SEQ ID NO: 1882732
auaguucuacugcaggaaa

SEQ ID NO: 2143469 - RNA, 19 nt, Artificial Sequence
  Description of Artificial Sequence: Synthetic oligonucleotide
  Antisense strand to SEQ ID NO: 2143468
uuuccugcaguagaacuau

SEQ ID NO: 2143470 - RNA, 19 nt, Artificial Sequence
  Description of Artificial Sequence: Synthetic oligonucleotide
  Sense strand starting at position 370 of SEQ ID NO: 1882732
aguucuacugcaggaaaga

SEQ ID NO: 2143471 - RNA, 19 nt, Artificial Sequence
  Description of Artificial Sequence: Synthetic oligonucleotide
  Antisense strand to SEQ ID NO: 2143470
ucuuuccugcaguagaacu

SEQ ID NO: 2143472 - RNA, 19 nt, Artificial Sequence
  Description of Artificial Sequence: Synthetic oligonucleotide
  Sense strand starting at position 371 of SEQ ID NO: 1882732
guucuacugcaggaaagau

SEQ ID NO: 2143473 - RNA, 19 nt, Artificial Sequence
  Description of Artificial Sequence: Synthetic oligonucleotide
  Antisense strand to SEQ ID NO: 2143472
aucuuuccugcaguagaac

SEQ ID NO: 2143474 - RNA, 19 nt, Artificial Sequence
  Description of Artificial Sequence: Synthetic oligonucleotide
  Sense strand starting at position 488 of SEQ ID NO: 1882732
gagaaugcacccuguaaau

SEQ ID NO: 2143475 - RNA, 19 nt, Artificial Sequence
  Description of Artificial Sequence: Synthetic oligonucleotide
  Antisense strand to SEQ ID NO: 2143474
auuuacagggugcauucuc

SEQ ID NO: 2143476 - RNA, 19 nt, Artificial Sequence
  Description of Artificial Sequence: Synthetic oligonucleotide
  Sense strand starting at position 625 of SEQ ID NO: 1882732
aucccaugguaaguuuaaa

SEQ ID NO: 2143477 - RNA, 19 nt, Artificial Sequence
  Description of Artificial Sequence: Synthetic oligonucleotide
  Antisense strand to SEQ ID NO: 2143476
uuuaaacuuaccaugggau

SEQ ID NO: 2143478 - RNA, 19 nt, Artificial Sequence
  Description of Artificial Sequence: Synthetic oligonucleotide
  Sense strand starting at position 815 of SEQ ID NO: 1882732
aucugagaugcuggacuuu

SEQ ID NO: 2143479 - RNA, 19 nt, Artificial Sequence
  Description of Artificial Sequence: Synthetic oligonucleotide
  Antisense strand to SEQ ID NO: 2143478
aaaguccagcaucucagau

SEQ ID NO: 2143480 - RNA, 19 nt, Artificial Sequence
  Description of Artificial Sequence: Synthetic oligonucleotide
  Sense strand starting at position 1051 of SEQ ID NO: 1882732
agagguauucccugugagg

SEQ ID NO: 2143481 - RNA, 19 nt, Artificial Sequence
  Description of Artificial Sequence: Synthetic oligonucleotide
  Antisense strand to SEQ ID NO: 2143480
ccucacagggaauaccucu

SEQ ID NO: 2143482 - RNA, 19 nt, Artificial Sequence
  Description of Artificial Sequence: Synthetic oligonucleotide
  Sense strand starting at position 1186 of SEQ ID NO: 1882732
gggacuuucuuagugaauu

SEQ ID NO: 2143483 - RNA, 19 nt, Artificial Sequence
  Description of Artificial Sequence: Synthetic oligonucleotide
  Antisense strand to SEQ ID NO: 2143482
aauucacuaagaaaguccc

SEQ ID NO: 2143484 - RNA, 19 nt, Artificial Sequence
  Description of Artificial Sequence: Synthetic oligonucleotide
  Sense strand starting at position 1300 of SEQ ID NO: 1882732
uaaugaaagguucgcaaag

SEQ ID NO: 2143485 - RNA, 19 nt, Artificial Sequence
  Description of Artificial Sequence: Synthetic oligonucleotide
  Antisense strand to SEQ ID NO: 2143484
cuuugcgaaccuuucauua

SEQ ID NO: 2143486 - RNA, 19 nt, Artificial Sequence
  Description of Artificial Sequence: Synthetic oligonucleotide
  Sense strand starting at position 1344 of SEQ ID NO: 1882732
guaauagugcaggaaccua

SEQ ID NO: 2143487 - RNA, 19 nt, Artificial Sequence
  Description of Artificial Sequence: Synthetic oligonucleotide
  Antisense strand to SEQ ID NO: 2143486
uagguuccugcacuauuac

SEQ ID NO: 2143488 - RNA, 19 nt, Artificial Sequence
  Description of Artificial Sequence: Synthetic oligonucleotide
  Sense strand starting at position 1429 of SEQ ID NO: 1882732
gaguuuacagcaugagaua

SEQ ID NO: 2143489 - RNA, 19 nt, Artificial Sequence
  Description of Artificial Sequence: Synthetic oligonucleotide
  Antisense strand to SEQ ID NO: 2143488
uaucucaugcuguaaacuc

SEQ ID NO: 2143490 - RNA, 19 nt, Artificial Sequence
  Description of Artificial Sequence: Synthetic oligonucleotide
  Sense strand starting at position 1430 of SEQ ID NO: 1882732
aguuuacagcaugagauau

SEQ ID NO: 2143491 - RNA, 19 nt, Artificial Sequence
  Description of Artificial Sequence: Synthetic oligonucleotide
  Antisense strand to SEQ ID NO: 2143490
auaucucaugcuguaaacu

SEQ ID NO: 2143492 - RNA, 19 nt, Artificial Sequence
  Description of Artificial Sequence: Synthetic oligonucleotide
  Sense strand starting at position 1520 of SEQ ID NO: 1882732
aauuguuaugcauggagau

SEQ ID NO: 2143493 - RNA, 19 nt, Artificial Sequence
  Description of Artificial Sequence: Synthetic oligonucleotide
  Antisense strand to SEQ ID NO: 2143492
aucuccaugcauaacaauu

SEQ ID NO: 2143494 - RNA, 19 nt, Artificial Sequence
  Description of Artificial Sequence: Synthetic oligonucleotide
  Sense strand starting at position 1522 of SEQ ID NO: 1882732
uuguuaugcauggagauug

SEQ ID NO: 2143495 - RNA, 19 nt, Artificial Sequence
  Description of Artificial Sequence: Synthetic oligonucleotide
  Antisense strand to SEQ ID NO: 2143494
caaucuccaugcauaacaa

SEQ ID NO: 2143496 - RNA, 19 nt, Artificial Sequence
  Description of Artificial Sequence: Synthetic oligonucleotide
  Sense strand starting at position 1654 of SEQ ID NO: 1882732
aggacauuccgaggcuuaa

SEQ ID NO: 2143497 - RNA, 19 nt, Artificial Sequence
  Description of Artificial Sequence: Synthetic oligonucleotide
  Antisense strand to SEQ ID NO: 2143496
uuaagccucggaauguccu

SEQ ID NO: 2143498 - RNA, 19 nt, Artificial Sequence
  Description of Artificial Sequence: Synthetic oligonucleotide
  Sense strand starting at position 1776 of SEQ ID NO: 1882732
agaaauaugcacugcuuaa

SEQ ID NO: 2143499 - RNA, 19 nt, Artificial Sequence
  Description of Artificial Sequence: Synthetic oligonucleotide
  Antisense strand to SEQ ID NO: 2143498
uuaagcagugcauauuucu

SEQ ID NO: 2143500 - RNA, 19 nt, Artificial Sequence
  Description of Artificial Sequence: Synthetic oligonucleotide
  Sense strand starting at position 1786 of SEQ ID NO: 1882732
acugcuuaauaagucagaa

SEQ ID NO: 2143501 - RNA, 19 nt, Artificial Sequence
  Description of Artificial Sequence: Synthetic oligonucleotide
  Antisense strand to SEQ ID NO: 2143500
uucugacuuauuaagcagu

SEQ ID NO: 2143502 - RNA, 19 nt, Artificial Sequence
  Description of Artificial Sequence: Synthetic oligonucleotide
  Sense strand starting at position 2175 of SEQ ID NO: 1882732
aguuaauuaucagccaaga

SEQ ID NO: 2143503 - RNA, 19 nt, Artificial Sequence
  Description of Artificial Sequence: Synthetic oligonucleotide
  Antisense strand to SEQ ID NO: 2143502
ucuuggcugauaauuaacu

SEQ ID NO: 2143504 - RNA, 19 nt, Artificial Sequence
  Description of Artificial Sequence: Synthetic oligonucleotide
  Sense strand starting at position 2282 of SEQ ID NO: 1882732
guacaauccucucucagga

SEQ ID NO: 2143505 - RNA, 19 nt, Artificial Sequence
  Description of Artificial Sequence: Synthetic oligonucleotide
  Antisense strand to SEQ ID NO: 2143504
uccugagagaggauuguac

SEQ ID NO: 2143506 - RNA, 19 nt, Artificial Sequence
  Description of Artificial Sequence: Synthetic oligonucleotide
  Sense strand starting at position 2513 of SEQ ID NO: 1882732
accuaaacaucuguaguca

SEQ ID NO: 2143507 - RNA, 19 nt, Artificial Sequence
  Description of Artificial Sequence: Synthetic oligonucleotide
  Antisense strand to SEQ ID NO: 2143506
ugacuacagauguuuaggu

SEQ ID NO: 2143508 - RNA, 19 nt, Artificial Sequence
  Description of Artificial Sequence: Synthetic oligonucleotide
  Sense strand starting at position 2611 of SEQ ID NO: 1882732
gcagguguggaugagagua

SEQ ID NO: 2143509 - RNA, 19 nt, Artificial Sequence
  Description of Artificial Sequence: Synthetic oligonucleotide
  Antisense strand to SEQ ID NO: 2143508
uacucucauccacaccugc

SEQ ID NO: 2143510 - RNA, 19 nt, Artificial Sequence
  Description of Artificial Sequence: Synthetic oligonucleotide
  Sense strand starting at position 2820 of SEQ ID NO: 1882732
gaagcuguccugcauagag

SEQ ID NO: 2143511 - RNA, 19 nt, Artificial Sequence
  Description of Artificial Sequence: Synthetic oligonucleotide
  Antisense strand to SEQ ID NO: 2143510
cucuaugcaggacagcuuc

SEQ ID NO: 2143512 - RNA, 19 nt, Artificial Sequence
  Description of Artificial Sequence: Synthetic oligonucleotide
  Sense strand starting at position 3036 of SEQ ID NO: 1882732
uuaagcucugcuuauggga

SEQ ID NO: 2143513 - RNA, 19 nt, Artificial Sequence
  Description of Artificial Sequence: Synthetic oligonucleotide
  Antisense strand to SEQ ID NO: 2143512
ucccauaagcagagcuuaa

SEQ ID NO: 2143514 - RNA, 19 nt, Artificial Sequence
  Description of Artificial Sequence: Synthetic oligonucleotide
  Sense strand starting at position 3049 of SEQ ID NO: 1882732
augggaaucuucuucucuu

SEQ ID NO: 2143515 - RNA, 19 nt, Artificial Sequence
  Description of Artificial Sequence: Synthetic oligonucleotide
  Antisense strand to SEQ ID NO: 2143514
aagagaagaagauucccau

SEQ ID NO: 2143516 - RNA, 19 nt, Artificial Sequence
  Description of Artificial Sequence: Synthetic oligonucleotide
  Sense strand starting at position 3320 of SEQ ID NO: 1882732
gccagcauccucguaaguu

SEQ ID NO: 2143517 - RNA, 19 nt, Artificial Sequence
  Description of Artificial Sequence: Synthetic oligonucleotide
  Antisense strand to SEQ ID NO: 2143516
aacuuacgaggaugcuggc

SEQ ID NO: 2143518 - RNA, 19 nt, Artificial Sequence
  Description of Artificial Sequence: Synthetic oligonucleotide
  Sense strand starting at position 3503 of SEQ ID NO: 1882732
acuugaaacugugccuaaa

SEQ ID NO: 2143519 - RNA, 19 nt, Artificial Sequence
  Description of Artificial Sequence: Synthetic oligonucleotide
  Antisense strand to SEQ ID NO: 2143518
uuuaggcacaguuucaagu

SEQ ID NO: 2143520 - RNA, 19 nt, Artificial Sequence
  Description of Artificial Sequence: Synthetic oligonucleotide
  Sense strand starting at position 3523 of SEQ ID NO: 1882732
uuuauaguaccguaaacau

SEQ ID NO: 2143521 - RNA, 19 nt, Artificial Sequence
  Description of Artificial Sequence: Synthetic oligonucleotide
  Antisense strand to SEQ ID NO: 2143520
auguuuacgguacuauaaa

SEQ ID NO: 2143522 - RNA, 19 nt, Artificial Sequence
  Description of Artificial Sequence: Synthetic oligonucleotide
  Sense strand starting at position 3556 of SEQ ID NO: 1882732
ugauaaguauggcuggauu

SEQ ID NO: 2143523 - RNA, 19 nt, Artificial Sequence
  Description of Artificial Sequence: Synthetic oligonucleotide
  Antisense strand to SEQ ID NO: 2143522
aauccagccauacuuauca

SEQ ID NO: 2143524 - RNA, 19 nt, Artificial Sequence
  Description of Artificial Sequence: Synthetic oligonucleotide
  Sense strand starting at position 3574 of SEQ ID NO: 1882732
uuccguuaacuauagaaau

SEQ ID NO: 2143525 - RNA, 19 nt, Artificial Sequence
  Description of Artificial Sequence: Synthetic oligonucleotide
  Antisense strand to SEQ ID NO: 2143524
auuucuauaguuaacggaa

SEQ ID NO: 2143526 - RNA, 19 nt, Artificial Sequence
  Description of Artificial Sequence: Synthetic oligonucleotide
  Sense strand starting at position 3602 of SEQ ID NO: 1882732
gagauccucccagggaguu

SEQ ID NO: 2143527 - RNA, 19 nt, Artificial Sequence
  Description of Artificial Sequence: Synthetic oligonucleotide
  Antisense strand to SEQ ID NO: 2143526
aacucccugggaggaucuc

SEQ ID NO: 2143528 - RNA, 19 nt, Artificial Sequence
  Description of Artificial Sequence: Synthetic oligonucleotide
  Sense strand starting at position 3641 of SEQ ID NO: 1882732
cuugaagauuguucccaga

SEQ ID NO: 2143529 - RNA, 19 nt, Artificial Sequence
  Description of Artificial Sequence: Synthetic oligonucleotide
  Antisense strand to SEQ ID NO: 2143528
ucugggaacaaucuucaag

SEQ ID NO: 2143530 - RNA, 19 nt, Artificial Sequence
  Description of Artificial Sequence: Synthetic oligonucleotide
  Sense strand starting at position 3643 of SEQ ID NO: 1882732
ugaagauuguucccagauu

SEQ ID NO: 2143531 - RNA, 19 nt, Artificial Sequence
  Description of Artificial Sequence: Synthetic oligonucleotide
  Antisense strand to SEQ ID NO: 2143530
aaucugggaacaaucuuca

SEQ ID NO: 2143532 - RNA, 19 nt, Artificial Sequence
  Description of Artificial Sequence: Synthetic oligonucleotide
  Sense strand starting at position 3719 of SEQ ID NO: 1882732
gaggauauguuucuauaug

SEQ ID NO: 2143533 - RNA, 19 nt, Artificial Sequence
  Description of Artificial Sequence: Synthetic oligonucleotide
  Antisense strand to SEQ ID NO: 2143532
cauauagaaacauauccuc

SEQ ID NO: 2143534 - RNA, 19 nt, Artificial Sequence
  Description of Artificial Sequence: Synthetic oligonucleotide
  Sense strand starting at position 3816 of SEQ ID NO: 1882732
guaauuguugcugugucau

SEQ ID NO: 2143535 - RNA, 19 nt, Artificial Sequence
  Description of Artificial Sequence: Synthetic oligonucleotide
  Antisense strand to SEQ ID NO: 2143534
augacacagcaacaauuac

SEQ ID NO: 2143536 - RNA, 19 nt, Artificial Sequence
  Description of Artificial Sequence: Synthetic oligonucleotide
  Sense strand starting at position 3838 of SEQ ID NO: 1882732
acauacaguugcuuaggaa

SEQ ID NO: 2143537 - RNA, 19 nt, Artificial Sequence
  Description of Artificial Sequence: Synthetic oligonucleotide
  Antisense strand to SEQ ID NO: 2143536
uuccuaagcaacuguaugu

SEQ ID NO: 2143538 - RNA, 19 nt, Artificial Sequence
  Description of Artificial Sequence: Synthetic oligonucleotide
  Sense strand starting at position 3839 of SEQ ID NO: 1882732
cauacaguugcuuaggaaa

SEQ ID NO: 2143539 - RNA, 19 nt, Artificial Sequence
  Description of Artificial Sequence: Synthetic oligonucleotide
  Antisense strand to SEQ ID NO: 2143538
uuuccuaagcaacuguaug

SEQ ID NO: 2143540 - RNA, 19 nt, Artificial Sequence
  Description of Artificial Sequence: Synthetic oligonucleotide
  Sense strand starting at position 3864 of SEQ ID NO: 1882732
ggaaauaggugacuuucua

SEQ ID NO: 2143541 - RNA, 19 nt, Artificial Sequence
  Description of Artificial Sequence: Synthetic oligonucleotide
  Antisense strand to SEQ ID NO: 2143540
uagaaagucaccuauuucc

SEQ ID NO: 2143542 - RNA, 19 nt, Artificial Sequence
  Description of Artificial Sequence: Synthetic oligonucleotide
  Sense strand starting at position 3960 of SEQ ID NO: 1882732
agcgauugcuauuugacau

SEQ ID NO: 2143543 - RNA, 19 nt, Artificial Sequence
  Description of Artificial Sequence: Synthetic oligonucleotide
  Antisense strand to SEQ ID NO: 2143542
augucaaauagcaaucgcu

SEQ ID NO: 2143544 - RNA, 19 nt, Artificial Sequence
  Description of Artificial Sequence: Synthetic oligonucleotide
  Sense strand starting at position 3961 of SEQ ID NO: 1882732
gcgauugcuauuugacaua

SEQ ID NO: 2143545 - RNA, 19 nt, Artificial Sequence
  Description of Artificial Sequence: Synthetic oligonucleotide
  Antisense strand to SEQ ID NO: 2143544
uaugucaaauagcaaucgc

SEQ ID NO: 2143546 - RNA, 19 nt, Artificial Sequence
  Description of Artificial Sequence: Synthetic oligonucleotide
  Sense strand starting at position 127 of SEQ ID NO: 1882733
acugguuccuaaguccaaa

SEQ ID NO: 2143547 - RNA, 19 nt, Artificial Sequence
  Description of Artificial Sequence: Synthetic oligonucleotide
  Antisense strand to SEQ ID NO: 2143546
uuuggacuuaggaaccagu

SEQ ID NO: 2143548 - RNA, 19 nt, Artificial Sequence
  Description of Artificial Sequence: Synthetic oligonucleotide
  Sense strand starting at position 400 of SEQ ID NO: 1882733
auaguucuacugcaggaaa

SEQ ID NO: 2143549 - RNA, 19 nt, Artificial Sequence
  Description of Artificial Sequence: Synthetic oligonucleotide
  Antisense strand to SEQ ID NO: 2143548
uuuccugcaguagaacuau

SEQ ID NO: 2143550 - RNA, 19 nt, Artificial Sequence
  Description of Artificial Sequence: Synthetic oligonucleotide
  Sense strand starting at position 402 of SEQ ID NO: 1882733
aguucuacugcaggaaaga

SEQ ID NO: 2143551 - RNA, 19 nt, Artificial Sequence
  Description of Artificial Sequence: Synthetic oligonucleotide
  Antisense strand to SEQ ID NO: 2143550
ucuuuccugcaguagaacu

SEQ ID NO: 2143552 - RNA, 19 nt, Artificial Sequence
  Description of Artificial Sequence: Synthetic oligonucleotide
  Sense strand starting at position 403 of SEQ ID NO: 1882733
guucuacugcaggaaagau

SEQ ID NO: 2143553 - RNA, 19 nt, Artificial Sequence
  Description of Artificial Sequence: Synthetic oligonucleotide
  Antisense strand to SEQ ID NO: 2143552
aucuuuccugcaguagaac

SEQ ID NO: 2143554 - RNA, 19 nt, Artificial Sequence
  Description of Artificial Sequence: Synthetic oligonucleotide
  Sense strand starting at position 520 of SEQ ID NO: 1882733
gagaaugcacccuguaaau

SEQ ID NO: 2143555 - RNA, 19 nt, Artificial Sequence
  Description of Artificial Sequence: Synthetic oligonucleotide
  Antisense strand to SEQ ID NO: 2143554
auuuacagggugcauucuc

SEQ ID NO: 2143556 - RNA, 19 nt, Artificial Sequence
  Description of Artificial Sequence: Synthetic oligonucleotide
  Sense strand starting at position 657 of SEQ ID NO: 1882733
aucccaugguaaguuuaaa

SEQ ID NO: 2143557 - RNA, 19 nt, Artificial Sequence
  Description of Artificial Sequence: Synthetic oligonucleotide
  Antisense strand to SEQ ID NO: 2143556
uuuaaacuuaccaugggau

SEQ ID NO: 2143558 - RNA, 19 nt, Artificial Sequence
  Description of Artificial Sequence: Synthetic oligonucleotide
  Sense strand starting at position 847 of SEQ ID NO: 1882733
aucugagaugcuggacuuu

SEQ ID NO: 2143559 - RNA, 19 nt, Artificial Sequence
  Description of Artificial Sequence: Synthetic oligonucleotide
  Antisense strand to SEQ ID NO: 2143558
aaaguccagcaucucagau

SEQ ID NO: 2143560 - RNA, 19 nt, Artificial Sequence
  Description of Artificial Sequence: Synthetic oligonucleotide
  Sense strand starting at position 1083 of SEQ ID NO: 1882733
agagguauucccugugagg

SEQ ID NO: 2143561 - RNA, 19 nt, Artificial Sequence
  Description of Artificial Sequence: Synthetic oligonucleotide
  Antisense strand to SEQ ID NO: 2143560
ccucacagggaauaccucu

SEQ ID NO: 2143562 - RNA, 19 nt, Artificial Sequence
  Description of Artificial Sequence: Synthetic oligonucleotide
  Sense strand starting at position 1218 of SEQ ID NO: 1882733
gggacuuucuuagugaauu

SEQ ID NO: 2143563 - RNA, 19 nt, Artificial Sequence
  Description of Artificial Sequence: Synthetic oligonucleotide
  Antisense strand to SEQ ID NO: 2143562
aauucacuaagaaaguccc

SEQ ID NO: 2143564 - RNA, 19 nt, Artificial Sequence
  Description of Artificial Sequence: Synthetic oligonucleotide
  Sense strand starting at position 1332 of SEQ ID NO: 1882733
uaaugaaagguucgcaaag

SEQ ID NO: 2143565 - RNA, 19 nt, Artificial Sequence
  Description of Artificial Sequence: Synthetic oligonucleotide
  Antisense strand to SEQ ID NO: 2143564
cuuugcgaaccuuucauua

SEQ ID NO: 2143566 - RNA, 19 nt, Artificial Sequence
  Description of Artificial Sequence: Synthetic oligonucleotide
  Sense strand starting at position 1376 of SEQ ID NO: 1882733
guaauagugcaggaaccua

SEQ ID NO: 2143567 - RNA, 19 nt, Artificial Sequence
  Description of Artificial Sequence: Synthetic oligonucleotide
  Antisense strand to SEQ ID NO: 2143566
uagguuccugcacuauuac

SEQ ID NO: 2143568 - RNA, 19 nt, Artificial Sequence
  Description of Artificial Sequence: Synthetic oligonucleotide
  Sense strand starting at position 1461 of SEQ ID NO: 1882733
gaguuuacagcaugagaua

SEQ ID NO: 2143569 - RNA, 19 nt, Artificial Sequence
  Description of Artificial Sequence: Synthetic oligonucleotide
  Antisense strand to SEQ ID NO: 2143568
uaucucaugcuguaaacuc

SEQ ID NO: 2143570 - RNA, 19 nt, Artificial Sequence
  Description of Artificial Sequence: Synthetic oligonucleotide
  Sense strand starting at position 1462 of SEQ ID NO: 1882733
aguuuacagcaugagauau

SEQ ID NO: 2143571 - RNA, 19 nt, Artificial Sequence
  Description of Artificial Sequence: Synthetic oligonucleotide
  Antisense strand to SEQ ID NO: 2143570
auaucucaugcuguaaacu

SEQ ID NO: 2143572 - RNA, 19 nt, Artificial Sequence
  Description of Artificial Sequence: Synthetic oligonucleotide
  Sense strand starting at position 1549 of SEQ ID NO: 1882733
ucaaauuguuaugcaugga

SEQ ID NO: 2143573 - RNA, 19 nt, Artificial Sequence
  Description of Artificial Sequence: Synthetic oligonucleotide
  Antisense strand to SEQ ID NO: 2143572
uccaugcauaacaauuuga

SEQ ID NO: 2143574 - RNA, 19 nt, Artificial Sequence
  Description of Artificial Sequence: Synthetic oligonucleotide
  Sense strand starting at position 1552 of SEQ ID NO: 1882733
aauuguuaugcauggagau

SEQ ID NO: 2143575 - RNA, 19 nt, Artificial Sequence
  Description of Artificial Sequence: Synthetic oligonucleotide
  Antisense strand to SEQ ID NO: 2143574
aucuccaugcauaacaauu

SEQ ID NO: 2143576 - RNA, 19 nt, Artificial Sequence
  Description of Artificial Sequence: Synthetic oligonucleotide
  Sense strand starting at position 1554 of SEQ ID NO: 1882733
uuguuaugcauggagauug

SEQ ID NO: 2143577 - RNA, 19 nt, Artificial Sequence
  Description of Artificial Sequence: Synthetic oligonucleotide
  Antisense strand to SEQ ID NO: 2143576
caaucuccaugcauaacaa

SEQ ID NO: 2143578 - RNA, 19 nt, Artificial Sequence
  Description of Artificial Sequence: Synthetic oligonucleotide
  Sense strand starting at position 1686 of SEQ ID NO: 1882733
aggacauuccgaggcuuaa

SEQ ID NO: 2143579 - RNA, 19 nt, Artificial Sequence
  Description of Artificial Sequence: Synthetic oligonucleotide
  Antisense strand to SEQ ID NO: 2143578
uuaagccucggaauguccu

SEQ ID NO: 2143580 - RNA, 19 nt, Artificial Sequence
  Description of Artificial Sequence: Synthetic oligonucleotide
  Sense strand starting at position 1808 of SEQ ID NO: 1882733
agaaauaugcacugcuuaa

SEQ ID NO: 2143581 - RNA, 19 nt, Artificial Sequence
  Description of Artificial Sequence: Synthetic oligonucleotide
  Antisense strand to SEQ ID NO: 2143580
uuaagcagugcauauuucu

SEQ ID NO: 2143582 - RNA, 19 nt, Artificial Sequence
  Description of Artificial Sequence: Synthetic oligonucleotide
  Sense strand starting at position 1818 of SEQ ID NO: 1882733
acugcuuaauaagucagaa

SEQ ID NO: 2143583 - RNA, 19 nt, Artificial Sequence
  Description of Artificial Sequence: Synthetic oligonucleotide
  Antisense strand to SEQ ID NO: 2143582
uucugacuuauuaagcagu

SEQ ID NO: 2143584 - RNA, 19 nt, Artificial Sequence
  Description of Artificial Sequence: Synthetic oligonucleotide
  Sense strand starting at position 2207 of SEQ ID NO: 1882733
aguuaauuaucagccaaga

SEQ ID NO: 2143585 - RNA, 19 nt, Artificial Sequence
  Description of Artificial Sequence: Synthetic oligonucleotide
  Antisense strand to SEQ ID NO: 2143584
ucuuggcugauaauuaacu

SEQ ID NO: 2143586 - RNA, 19 nt, Artificial Sequence
  Description of Artificial Sequence: Synthetic oligonucleotide
  Sense strand starting at position 2314 of SEQ ID NO: 1882733
guacaauccucucucagga

SEQ ID NO: 2143587 - RNA, 19 nt, Artificial Sequence
  Description of Artificial Sequence: Synthetic oligonucleotide
  Antisense strand to SEQ ID NO: 2143586
uccugagagaggauuguac

SEQ ID NO: 2143588 - RNA, 19 nt, Artificial Sequence
  Description of Artificial Sequence: Synthetic oligonucleotide
  Sense strand starting at position 2545 of SEQ ID NO: 1882733
accuaaacaucuguaguca

SEQ ID NO: 2143589 - RNA, 19 nt, Artificial Sequence
  Description of Artificial Sequence: Synthetic oligonucleotide
  Antisense strand to SEQ ID NO: 2143588
ugacuacagauguuuaggu

SEQ ID NO: 2143590 - RNA, 19 nt, Artificial Sequence
  Description of Artificial Sequence: Synthetic oligonucleotide
  Sense strand starting at position 2643 of SEQ ID NO: 1882733
gcagguguggaugagagua

SEQ ID NO: 2143591 - RNA, 19 nt, Artificial Sequence
  Description of Artificial Sequence: Synthetic oligonucleotide
  Antisense strand to SEQ ID NO: 2143590
uacucucauccacaccugc

SEQ ID NO: 2143592 - RNA, 19 nt, Artificial Sequence
  Description of Artificial Sequence: Synthetic oligonucleotide
  Sense strand starting at position 2852 of SEQ ID NO: 1882733
gaagcuguccugcauagag

SEQ ID NO: 2143593 - RNA, 19 nt, Artificial Sequence
  Description of Artificial Sequence: Synthetic oligonucleotide
  Antisense strand to SEQ ID NO: 2143592
cucuaugcaggacagcuuc

SEQ ID NO: 2143594 - RNA, 19 nt, Artificial Sequence
  Description of Artificial Sequence: Synthetic oligonucleotide
  Sense strand starting at position 3068 of SEQ ID NO: 1882733
uuaagcucugcuuauggga

SEQ ID NO: 2143595 - RNA, 19 nt, Artificial Sequence
  Description of Artificial Sequence: Synthetic oligonucleotide
  Antisense strand to SEQ ID NO: 2143594
ucccauaagcagagcuuaa

SEQ ID NO: 2143596 - RNA, 19 nt, Artificial Sequence
  Description of Artificial Sequence: Synthetic oligonucleotide
  Sense strand starting at position 3081 of SEQ ID NO: 1882733
augggaaucuucuucucuu

SEQ ID NO: 2143597 - RNA, 19 nt, Artificial Sequence
  Description of Artificial Sequence: Synthetic oligonucleotide
  Antisense strand to SEQ ID NO: 2143596
aagagaagaagauucccau

SEQ ID NO: 2143598 - RNA, 19 nt, Artificial Sequence
  Description of Artificial Sequence: Synthetic oligonucleotide
  Sense strand starting at position 3082 of SEQ ID NO: 1882733
ugggaaucuucuucucuuu

SEQ ID NO: 2143599 - RNA, 19 nt, Artificial Sequence
  Description of Artificial Sequence: Synthetic oligonucleotide
  Antisense strand to SEQ ID NO: 2143598
aaagagaagaagauuccca

SEQ ID NO: 2143600 - RNA, 19 nt, Artificial Sequence
  Description of Artificial Sequence: Synthetic oligonucleotide
  Sense strand starting at position 3352 of SEQ ID NO: 1882733
gccagcauccucguaaguu

SEQ ID NO: 2143601 - RNA, 19 nt, Artificial Sequence
  Description of Artificial Sequence: Synthetic oligonucleotide
  Antisense strand to SEQ ID NO: 2143600
aacuuacgaggaugcuggc

SEQ ID NO: 2143602 - RNA, 19 nt, Artificial Sequence
  Description of Artificial Sequence: Synthetic oligonucleotide
  Sense strand starting at position 3535 of SEQ ID NO: 1882733
acuugaaacugugccuaaa

SEQ ID NO: 2143603 - RNA, 19 nt, Artificial Sequence
  Description of Artificial Sequence: Synthetic oligonucleotide
  Antisense strand to SEQ ID NO: 2143602
uuuaggcacaguuucaagu

SEQ ID NO: 2143604 - RNA, 19 nt, Artificial Sequence
  Description of Artificial Sequence: Synthetic oligonucleotide
  Sense strand starting at position 3555 of SEQ ID NO: 1882733
uuuauaguaccguaaacau

SEQ ID NO: 2143605 - RNA, 19 nt, Artificial Sequence
  Description of Artificial Sequence: Synthetic oligonucleotide
  Antisense strand to SEQ ID NO: 2143604
auguuuacgguacuauaaa

SEQ ID NO: 2143606 - RNA, 19 nt, Artificial Sequence
  Description of Artificial Sequence: Synthetic oligonucleotide
  Sense strand starting at position 3588 of SEQ ID NO: 1882733
ugauaaguauggcuggauu

SEQ ID NO: 2143607 - RNA, 19 nt, Artificial Sequence
  Description of Artificial Sequence: Synthetic oligonucleotide
  Antisense strand to SEQ ID NO: 2143606
aauccagccauacuuauca

SEQ ID NO: 2143608 - RNA, 19 nt, Artificial Sequence
  Description of Artificial Sequence: Synthetic oligonucleotide
  Sense strand starting at position 3606 of SEQ ID NO: 1882733
uuccguuaacuauagaaau

SEQ ID NO: 2143609 - RNA, 19 nt, Artificial Sequence
  Description of Artificial Sequence: Synthetic oligonucleotide
  Antisense strand to SEQ ID NO: 2143608
auuucuauaguuaacggaa

SEQ ID NO: 2143610 - RNA, 19 nt, Artificial Sequence
  Description of Artificial Sequence: Synthetic oligonucleotide
  Sense strand starting at position 3634 of SEQ ID NO: 1882733
gagauccucccagggaguu

SEQ ID NO: 2143611 - RNA, 19 nt, Artificial Sequence
  Description of Artificial Sequence: Synthetic oligonucleotide
  Antisense strand to SEQ ID NO: 2143610
aacucccugggaggaucuc

SEQ ID NO: 2143612 - RNA, 19 nt, Artificial Sequence
  Description of Artificial Sequence: Synthetic oligonucleotide
  Sense strand starting at position 3673 of SEQ ID NO: 1882733
cuugaagauuguucccaga

SEQ ID NO: 2143613 - RNA, 19 nt, Artificial Sequence
  Description of Artificial Sequence: Synthetic oligonucleotide
  Antisense strand to SEQ ID NO: 2143612
ucugggaacaaucuucaag

SEQ ID NO: 2143614 - RNA, 19 nt, Artificial Sequence
  Description of Artificial Sequence: Synthetic oligonucleotide
  Sense strand starting at position 3675 of SEQ ID NO: 1882733
ugaagauuguucccagauu

SEQ ID NO: 2143615 - RNA, 19 nt, Artificial Sequence
  Description of Artificial Sequence: Synthetic oligonucleotide
  Antisense strand to SEQ ID NO: 2143614
aaucugggaacaaucuuca

SEQ ID NO: 2143616 - RNA, 19 nt, Artificial Sequence
  Description of Artificial Sequence: Synthetic oligonucleotide
  Sense strand starting at position 3751 of SEQ ID NO: 1882733
gaggauauguuucuauaug

SEQ ID NO: 2143617 - RNA, 19 nt, Artificial Sequence
  Description of Artificial Sequence: Synthetic oligonucleotide
  Antisense strand to SEQ ID NO: 2143616
cauauagaaacauauccuc

SEQ ID NO: 2143618 - RNA, 19 nt, Artificial Sequence
  Description of Artificial Sequence: Synthetic oligonucleotide
  Sense strand starting at position 3848 of SEQ ID NO: 1882733
guaauuguugcugugucau

SEQ ID NO: 2143619 - RNA, 19 nt, Artificial Sequence
  Description of Artificial Sequence: Synthetic oligonucleotide
  Antisense strand to SEQ ID NO: 2143618
augacacagcaacaauuac

SEQ ID NO: 2143620 - RNA, 19 nt, Artificial Sequence
  Description of Artificial Sequence: Synthetic oligonucleotide
  Sense strand starting at position 3870 of SEQ ID NO: 1882733
acauacaguugcuuaggaa

SEQ ID NO: 2143621 - RNA, 19 nt, Artificial Sequence
  Description of Artificial Sequence: Synthetic oligonucleotide
  Antisense strand to SEQ ID NO: 2143620
uuccuaagcaacuguaugu

SEQ ID NO: 2143622 - RNA, 19 nt, Artificial Sequence
  Description of Artificial Sequence: Synthetic oligonucleotide
  Sense strand starting at position 3871 of SEQ ID NO: 1882733
cauacaguugcuuaggaaa

SEQ ID NO: 2143623 - RNA, 19 nt, Artificial Sequence
  Description of Artificial Sequence: Synthetic oligonucleotide
  Antisense strand to SEQ ID NO: 2143622
uuuccuaagcaacuguaug

SEQ ID NO: 2143624 - RNA, 19 nt, Artificial Sequence
  Description of Artificial Sequence: Synthetic oligonucleotide
  Sense strand starting at position 3896 of SEQ ID NO: 1882733
ggaaauaggugacuuucua

SEQ ID NO: 2143625 - RNA, 19 nt, Artificial Sequence
  Description of Artificial Sequence: Synthetic oligonucleotide
  Antisense strand to SEQ ID NO: 2143624
uagaaagucaccuauuucc

SEQ ID NO: 2143626 - RNA, 19 nt, Artificial Sequence
  Description of Artificial Sequence: Synthetic oligonucleotide
  Sense strand starting at position 25 of SEQ ID NO: 1882734
ugcuguaauccugaaacuu

SEQ ID NO: 2143627 - RNA, 19 nt, Artificial Sequence
  Description of Artificial Sequence: Synthetic oligonucleotide
  Antisense strand to SEQ ID NO: 2143626
aaguuucaggauuacagca

SEQ ID NO: 2143628 - RNA, 19 nt, Artificial Sequence
  Description of Artificial Sequence: Synthetic oligonucleotide
  Sense strand starting at position 71 of SEQ ID NO: 1882734
caggacaucugguccuaua

SEQ ID NO: 2143629 - RNA, 19 nt, Artificial Sequence
  Description of Artificial Sequence: Synthetic oligonucleotide
  Antisense strand to SEQ ID NO: 2143628
uauaggaccagauguccug

SEQ ID NO: 2143630 - RNA, 19 nt, Artificial Sequence
  Description of Artificial Sequence: Synthetic oligonucleotide
  Sense strand starting at position 95 of SEQ ID NO: 1882734
agguccuacuguccugaaa

SEQ ID NO: 2143631 - RNA, 19 nt, Artificial Sequence
  Description of Artificial Sequence: Synthetic oligonucleotide
  Antisense strand to SEQ ID NO: 2143630
uuucaggacaguaggaccu

SEQ ID NO: 2143632 - RNA, 19 nt, Artificial Sequence
  Description of Artificial Sequence: Synthetic oligonucleotide
  Sense strand starting at position 136 of SEQ ID NO: 1882734
cagggagacuucugagaaa

SEQ ID NO: 2143633 - RNA, 19 nt, Artificial Sequence
  Description of Artificial Sequence: Synthetic oligonucleotide
  Antisense strand to SEQ ID NO: 2143632
uuucucagaagucucccug

SEQ ID NO: 2143634 - RNA, 19 nt, Artificial Sequence
  Description of Artificial Sequence: Synthetic oligonucleotide
  Sense strand starting at position 139 of SEQ ID NO: 1882734
ggagacuucugagaaagaa

SEQ ID NO: 2143635 - RNA, 19 nt, Artificial Sequence
  Description of Artificial Sequence: Synthetic oligonucleotide
  Antisense strand to SEQ ID NO: 2143634
uucuuucucagaagucucc

SEQ ID NO: 2143636 - RNA, 19 nt, Artificial Sequence
  Description of Artificial Sequence: Synthetic oligonucleotide
  Sense strand starting at position 421 of SEQ ID NO: 1882734
acugguaauggauggguaa

SEQ ID NO: 2143637 - RNA, 19 nt, Artificial Sequence
  Description of Artificial Sequence: Synthetic oligonucleotide
  Antisense strand to SEQ ID NO: 2143636
uuacccauccauuaccagu

SEQ ID NO: 2143638 - RNA, 19 nt, Artificial Sequence
  Description of Artificial Sequence: Synthetic oligonucleotide
  Sense strand starting at position 422 of SEQ ID NO: 1882734
cugguaauggauggguaaa

SEQ ID NO: 2143639 - RNA, 19 nt, Artificial Sequence
  Description of Artificial Sequence: Synthetic oligonucleotide
  Antisense strand to SEQ ID NO: 2143638
uuuacccauccauuaccag

SEQ ID NO: 2143640 - RNA, 19 nt, Artificial Sequence
  Description of Artificial Sequence: Synthetic oligonucleotide
  Sense strand starting at position 572 of SEQ ID NO: 1882734
uguguuaauuuccauuuac

SEQ ID NO: 2143641 - RNA, 19 nt, Artificial Sequence
  Description of Artificial Sequence: Synthetic oligonucleotide
  Antisense strand to SEQ ID NO: 2143640
guaaauggaaauuaacaca

SEQ ID NO: 2143642 - RNA, 19 nt, Artificial Sequence
  Description of Artificial Sequence: Synthetic oligonucleotide
  Sense strand starting at position 713 of SEQ ID NO: 1882734
guauaauauuucugggaca

SEQ ID NO: 2143643 - RNA, 19 nt, Artificial Sequence
  Description of Artificial Sequence: Synthetic oligonucleotide
  Antisense strand to SEQ ID NO: 2143642
ugucccagaaauauuauac

SEQ ID NO: 2143644 - RNA, 19 nt, Artificial Sequence
  Description of Artificial Sequence: Synthetic oligonucleotide
  Sense strand starting at position 716 of SEQ ID NO: 1882734
uaauauuucugggacagag

SEQ ID NO: 2143645 - RNA, 19 nt, Artificial Sequence
  Description of Artificial Sequence: Synthetic oligonucleotide
  Antisense strand to SEQ ID NO: 2143644
cucugucccagaaauauua

SEQ ID NO: 2143646 - RNA, 19 nt, Artificial Sequence
  Description of Artificial Sequence: Synthetic oligonucleotide
  Sense strand starting at position 761 of SEQ ID NO: 1882734
gaagauucgggcuggagag

SEQ ID NO: 2143647 - RNA, 19 nt, Artificial Sequence
  Description of Artificial Sequence: Synthetic oligonucleotide
  Antisense strand to SEQ ID NO: 2143646
cucuccagcccgaaucuuc

SEQ ID NO: 2143648 - RNA, 19 nt, Artificial Sequence
  Description of Artificial Sequence: Synthetic oligonucleotide
  Sense strand starting at position 875 of SEQ ID NO: 1882734
uuucuuguuccuuggagga

SEQ ID NO: 2143649 - RNA, 19 nt, Artificial Sequence
  Description of Artificial Sequence: Synthetic oligonucleotide
  Antisense strand to SEQ ID NO: 2143648
uccuccaaggaacaagaaa

SEQ ID NO: 2143650 - RNA, 19 nt, Artificial Sequence
  Description of Artificial Sequence: Synthetic oligonucleotide
  Sense strand starting at position 934 of SEQ ID NO: 1882734
aggagaugaucugggaaga

SEQ ID NO: 2143651 - RNA, 19 nt, Artificial Sequence
  Description of Artificial Sequence: Synthetic oligonucleotide
  Antisense strand to SEQ ID NO: 2143650
ucuucccagaucaucuccu

SEQ ID NO: 2143652 - RNA, 19 nt, Artificial Sequence
  Description of Artificial Sequence: Synthetic oligonucleotide
  Sense strand starting at position 1072 of SEQ ID NO: 1882734
uccggcuguucucugauuu

SEQ ID NO: 2143653 - RNA, 19 nt, Artificial Sequence
  Description of Artificial Sequence: Synthetic oligonucleotide
  Antisense strand to SEQ ID NO: 2143652
aaaucagagaacagccgga

SEQ ID NO: 2143654 - RNA, 19 nt, Artificial Sequence
  Description of Artificial Sequence: Synthetic oligonucleotide
  Sense strand starting at position 1212 of SEQ ID NO: 1882734
gcugcuugaguuuagaaga

SEQ ID NO: 2143655 - RNA, 19 nt, Artificial Sequence
  Description of Artificial Sequence: Synthetic oligonucleotide
  Antisense strand to SEQ ID NO: 2143654
ucuucuaaacucaagcagc

SEQ ID NO: 2143656 - RNA, 19 nt, Artificial Sequence
  Description of Artificial Sequence: Synthetic oligonucleotide
  Sense strand starting at position 1262 of SEQ ID NO: 1882734
ggcagugaucaucgggaga

SEQ ID NO: 2143657 - RNA, 19 nt, Artificial Sequence
  Description of Artificial Sequence: Synthetic oligonucleotide
  Antisense strand to SEQ ID NO: 2143656
ucucccgaugaucacugcc

SEQ ID NO: 2143658 - RNA, 19 nt, Artificial Sequence
  Description of Artificial Sequence: Synthetic oligonucleotide
  Sense strand starting at position 1283 of SEQ ID NO: 1882734
ggcagaagucaccauccau

SEQ ID NO: 2143659 - RNA, 19 nt, Artificial Sequence
  Description of Artificial Sequence: Synthetic oligonucleotide
  Antisense strand to SEQ ID NO: 2143658
auggauggugacuucugcc

SEQ ID NO: 2143660 - RNA, 19 nt, Artificial Sequence
  Description of Artificial Sequence: Synthetic oligonucleotide
  Sense strand starting at position 1780 of SEQ ID NO: 1882734
cauccagguuccuuggaga

SEQ ID NO: 2143661 - RNA, 19 nt, Artificial Sequence
  Description of Artificial Sequence: Synthetic oligonucleotide
  Antisense strand to SEQ ID NO: 2143660
ucuccaaggaaccuggaug

SEQ ID NO: 2143662 - RNA, 19 nt, Artificial Sequence
  Description of Artificial Sequence: Synthetic oligonucleotide
  Sense strand starting at position 2330 of SEQ ID NO: 1882734
ccuccaaguaggugucaga

SEQ ID NO: 2143663 - RNA, 19 nt, Artificial Sequence
  Description of Artificial Sequence: Synthetic oligonucleotide
  Antisense strand to SEQ ID NO: 2143662
ucugacaccuacuuggagg

SEQ ID NO: 2143664 - RNA, 19 nt, Artificial Sequence
  Description of Artificial Sequence: Synthetic oligonucleotide
  Sense strand starting at position 2339 of SEQ ID NO: 1882734
aggugucagaccuauguuu

SEQ ID NO: 2143665 - RNA, 19 nt, Artificial Sequence
  Description of Artificial Sequence: Synthetic oligonucleotide
  Antisense strand to SEQ ID NO: 2143664
aaacauaggucugacaccu

SEQ ID NO: 2143666 - RNA, 19 nt, Artificial Sequence
  Description of Artificial Sequence: Synthetic oligonucleotide
  Sense strand starting at position 2614 of SEQ ID NO: 1882734
cagaaauugucgucaaucu

SEQ ID NO: 2143667 - RNA, 19 nt, Artificial Sequence
  Description of Artificial Sequence: Synthetic oligonucleotide
  Antisense strand to SEQ ID NO: 2143666
agauugacgacaauuucug

SEQ ID NO: 2143668 - RNA, 19 nt, Artificial Sequence
  Description of Artificial Sequence: Synthetic oligonucleotide
  Sense strand starting at position 2615 of SEQ ID NO: 1882734
agaaauugucgucaaucuc

SEQ ID NO: 2143669 - RNA, 19 nt, Artificial Sequence
  Description of Artificial Sequence: Synthetic oligonucleotide
  Antisense strand to SEQ ID NO: 2143668
gagauugacgacaauuucu

SEQ ID NO: 2143670 - RNA, 19 nt, Artificial Sequence
  Description of Artificial Sequence: Synthetic oligonucleotide
  Sense strand starting at position 2621 of SEQ ID NO: 1882734
ugucgucaaucuccaugaa

SEQ ID NO: 2143671 - RNA, 19 nt, Artificial Sequence
  Description of Artificial Sequence: Synthetic oligonucleotide
  Antisense strand to SEQ ID NO: 2143670
uucauggagauugacgaca

SEQ ID NO: 2143672 - RNA, 19 nt, Artificial Sequence
  Description of Artificial Sequence: Synthetic oligonucleotide
  Sense strand starting at position 2622 of SEQ ID NO: 1882734
gucgucaaucuccaugaau

SEQ ID NO: 2143673 - RNA, 19 nt, Artificial Sequence
  Description of Artificial Sequence: Synthetic oligonucleotide
  Antisense strand to SEQ ID NO: 2143672
auucauggagauugacgac

SEQ ID NO: 2143674 - RNA, 19 nt, Artificial Sequence
  Description of Artificial Sequence: Synthetic oligonucleotide
  Sense strand starting at position 2624 of SEQ ID NO: 1882734
cgucaaucuccaugaauga

SEQ ID NO: 2143675 - RNA, 19 nt, Artificial Sequence
  Description of Artificial Sequence: Synthetic oligonucleotide
  Antisense strand to SEQ ID NO: 2143674
ucauucauggagauugacg

SEQ ID NO: 2143676 - RNA, 19 nt, Artificial Sequence
  Description of Artificial Sequence: Synthetic oligonucleotide
  Sense strand starting at position 2711 of SEQ ID NO: 1882734
cuggcuacuccggguaaga

SEQ ID NO: 2143677 - RNA, 19 nt, Artificial Sequence
  Description of Artificial Sequence: Synthetic oligonucleotide
  Antisense strand to SEQ ID NO: 2143676
ucuuacccggaguagccag

SEQ ID NO: 2143678 - RNA, 19 nt, Artificial Sequence
  Description of Artificial Sequence: Synthetic oligonucleotide
  Sense strand starting at position 2713 of SEQ ID NO: 1882734
ggcuacuccggguaagaca

SEQ ID NO: 2143679 - RNA, 19 nt, Artificial Sequence
  Description of Artificial Sequence: Synthetic oligonucleotide
  Antisense strand to SEQ ID NO: 2143678
ugucuuacccggaguagcc

SEQ ID NO: 2143680 - RNA, 19 nt, Artificial Sequence
  Description of Artificial Sequence: Synthetic oligonucleotide
  Sense strand starting at position 2738 of SEQ ID NO: 1882734
gccucagucuucucuuuga

SEQ ID NO: 2143681 - RNA, 19 nt, Artificial Sequence
  Description of Artificial Sequence: Synthetic oligonucleotide
  Antisense strand to SEQ ID NO: 2143680
ucaaagagaagacugaggc

SEQ ID NO: 2143682 - RNA, 19 nt, Artificial Sequence
  Description of Artificial Sequence: Synthetic oligonucleotide
  Sense strand starting at position 2820 of SEQ ID NO: 1882734
aggaaauggcucugacuug

SEQ ID NO: 2143683 - RNA, 19 nt, Artificial Sequence
  Description of Artificial Sequence: Synthetic oligonucleotide
  Antisense strand to SEQ ID NO: 2143682
caagucagagccauuuccu

SEQ ID NO: 2143684 - RNA, 19 nt, Artificial Sequence
  Description of Artificial Sequence: Synthetic oligonucleotide
  Sense strand starting at position 2919 of SEQ ID NO: 1882734
uuguucuggcuuuaaguaa

SEQ ID NO: 2143685 - RNA, 19 nt, Artificial Sequence
  Description of Artificial Sequence: Synthetic oligonucleotide
  Antisense strand to SEQ ID NO: 2143684
uuacuuaaagccagaacaa

SEQ ID NO: 2143686 - RNA, 19 nt, Artificial Sequence
  Description of Artificial Sequence: Synthetic oligonucleotide
  Sense strand starting at position 3118 of SEQ ID NO: 1882734
gcauuacaugauuggagga

SEQ ID NO: 2143687 - RNA, 19 nt, Artificial Sequence
  Description of Artificial Sequence: Synthetic oligonucleotide
  Antisense strand to SEQ ID NO: 2143686
uccuccaaucauguaaugc

SEQ ID NO: 2143688 - RNA, 19 nt, Artificial Sequence
  Description of Artificial Sequence: Synthetic oligonucleotide
  Sense strand starting at position 3131 of SEQ ID NO: 1882734
ggaggagugugcaauaaag

SEQ ID NO: 2143689 - RNA, 19 nt, Artificial Sequence
  Description of Artificial Sequence: Synthetic oligonucleotide
  Antisense strand to SEQ ID NO: 2143688
cuuuauugcacacuccucc

SEQ ID NO: 2143690 - RNA, 19 nt, Artificial Sequence
  Description of Artificial Sequence: Synthetic oligonucleotide
  Sense strand starting at position 3237 of SEQ ID NO: 1882734
gcuuguguacacugagaga

SEQ ID NO: 2143691 - RNA, 19 nt, Artificial Sequence
  Description of Artificial Sequence: Synthetic oligonucleotide
  Antisense strand to SEQ ID NO: 2143690
ucucucaguguacacaagc

SEQ ID NO: 2143692 - RNA, 19 nt, Artificial Sequence
  Description of Artificial Sequence: Synthetic oligonucleotide
  Sense strand starting at position 3248 of SEQ ID NO: 1882734
cugagagaaucagaucuau

SEQ ID NO: 2143693 - RNA, 19 nt, Artificial Sequence
  Description of Artificial Sequence: Synthetic oligonucleotide
  Antisense strand to SEQ ID NO: 2143692
auagaucugauucucucag

SEQ ID NO: 2143694 - RNA, 19 nt, Artificial Sequence
  Description of Artificial Sequence: Synthetic oligonucleotide
  Sense strand starting at position 3268 of SEQ ID NO: 1882734
uuaaguaauuggcuuguau

SEQ ID NO: 2143695 - RNA, 19 nt, Artificial Sequence
  Description of Artificial Sequence: Synthetic oligonucleotide
  Antisense strand to SEQ ID NO: 2143694
auacaagccaauuacuuaa

SEQ ID NO: 2143696 - RNA, 19 nt, Artificial Sequence
  Description of Artificial Sequence: Synthetic oligonucleotide
  Sense strand starting at position 3270 of SEQ ID NO: 1882734
aaguaauuggcuuguauaa

SEQ ID NO: 2143697 - RNA, 19 nt, Artificial Sequence
  Description of Artificial Sequence: Synthetic oligonucleotide
  Antisense strand to SEQ ID NO: 2143696
uuauacaagccaauuacuu

SEQ ID NO: 2143698 - RNA, 19 nt, Artificial Sequence
  Description of Artificial Sequence: Synthetic oligonucleotide
  Sense strand starting at position 3437 of SEQ ID NO: 1882734
augagucccgcccacauua

SEQ ID NO: 2143699 - RNA, 19 nt, Artificial Sequence
  Description of Artificial Sequence: Synthetic oligonucleotide
  Antisense strand to SEQ ID NO: 2143698
uaaugugggcgggacucau

SEQ ID NO: 2143700 - RNA, 19 nt, Artificial Sequence
  Description of Artificial Sequence: Synthetic oligonucleotide
  Sense strand starting at position 3461 of SEQ ID NO: 1882734
ggcgaucuucuuuacucaa

SEQ ID NO: 2143701 - RNA, 19 nt, Artificial Sequence
  Description of Artificial Sequence: Synthetic oligonucleotide
  Antisense strand to SEQ ID NO: 2143700
uugaguaaagaagaucgcc

SEQ ID NO: 2143702 - RNA, 19 nt, Artificial Sequence
  Description of Artificial Sequence: Synthetic oligonucleotide
  Sense strand starting at position 3567 of SEQ ID NO: 1882734
caaguugacucauagaaag

SEQ ID NO: 2143703 - RNA, 19 nt, Artificial Sequence
  Description of Artificial Sequence: Synthetic oligonucleotide
  Antisense strand to SEQ ID NO: 2143702
cuuucuaugagucaacuug

SEQ ID NO: 2143704 - RNA, 19 nt, Artificial Sequence
  Description of Artificial Sequence: Synthetic oligonucleotide
  Sense strand starting at position 3624 of SEQ ID NO: 1882734
ccaucaucccagugagacu

SEQ ID NO: 2143705 - RNA, 19 nt, Artificial Sequence
  Description of Artificial Sequence: Synthetic oligonucleotide
  Antisense strand to SEQ ID NO: 2143704
agucucacugggaugaugg

SEQ ID NO: 2143706 - RNA, 19 nt, Artificial Sequence
  Description of Artificial Sequence: Synthetic oligonucleotide
  Sense strand starting at position 45 of SEQ ID NO: 1882735
uuacaacuauccugagguu

SEQ ID NO: 2143707 - RNA, 19 nt, Artificial Sequence
  Description of Artificial Sequence: Synthetic oligonucleotide
  Antisense strand to SEQ ID NO: 2143706
aaccucaggauaguuguaa

SEQ ID NO: 2143708 - RNA, 19 nt, Artificial Sequence
  Description of Artificial Sequence: Synthetic oligonucleotide
  Sense strand starting at position 48 of SEQ ID NO: 1882735
caacuauccugagguuaga

SEQ ID NO: 2143709 - RNA, 19 nt, Artificial Sequence
  Description of Artificial Sequence: Synthetic oligonucleotide
  Antisense strand to SEQ ID NO: 2143708
ucuaaccucaggauaguug

SEQ ID NO: 2143710 - RNA, 19 nt, Artificial Sequence
  Description of Artificial Sequence: Synthetic oligonucleotide
  Sense strand starting at position 3365 of SEQ ID NO: 1882735
ggccaaauguaucauguga

SEQ ID NO: 2143711 - RNA, 19 nt, Artificial Sequence
  Description of Artificial Sequence: Synthetic oligonucleotide
  Antisense strand to SEQ ID NO: 2143710
ucacaugauacauuuggcc

SEQ ID NO: 2143712 - RNA, 19 nt, Artificial Sequence
  Description of Artificial Sequence: Synthetic oligonucleotide
  Sense strand starting at position 41 of SEQ ID NO: 1882736
uuacaaugacucugaggua

SEQ ID NO: 2143713 - RNA, 19 nt, Artificial Sequence
  Description of Artificial Sequence: Synthetic oligonucleotide
  Antisense strand to SEQ ID NO: 2143712
uaccucagagucauuguaa

SEQ ID NO: 2143714 - RNA, 19 nt, Artificial Sequence
  Description of Artificial Sequence: Synthetic oligonucleotide
  Sense strand starting at position 97 of SEQ ID NO: 1882736
ucaagaaacuugcuuaaga

SEQ ID NO: 2143715 - RNA, 19 nt, Artificial Sequence
  Description of Artificial Sequence: Synthetic oligonucleotide
  Antisense strand to SEQ ID NO: 2143714
ucuuaagcaaguuucuuga

SEQ ID NO: 2143716 - RNA, 19 nt, Artificial Sequence
  Description of Artificial Sequence: Synthetic oligonucleotide
  Sense strand starting at position 134 of SEQ ID NO: 1882736
ucggauccauaaucaaauu

SEQ ID NO: 2143717 - RNA, 19 nt, Artificial Sequence
  Description of Artificial Sequence: Synthetic oligonucleotide
  Antisense strand to SEQ ID NO: 2143716
aauuugauuauggauccga

SEQ ID NO: 2143718 - RNA, 19 nt, Artificial Sequence
  Description of Artificial Sequence: Synthetic oligonucleotide
  Sense strand starting at position 283 of SEQ ID NO: 1882736
aacugugguucuccagaua

SEQ ID NO: 2143719 - RNA, 19 nt, Artificial Sequence
  Description of Artificial Sequence: Synthetic oligonucleotide
  Antisense strand to SEQ ID NO: 2143718
uaucuggagaaccacaguu

SEQ ID NO: 2143720 - RNA, 19 nt, Artificial Sequence
  Description of Artificial Sequence: Synthetic oligonucleotide
  Sense strand starting at position 294 of SEQ ID NO: 1882736
uccagauaacaaugugucu

SEQ ID NO: 2143721 - RNA, 19 nt, Artificial Sequence
  Description of Artificial Sequence: Synthetic oligonucleotide
  Antisense strand to SEQ ID NO: 2143720
agacacauuguuaucugga

SEQ ID NO: 2143722 - RNA, 19 nt, Artificial Sequence
  Description of Artificial Sequence: Synthetic oligonucleotide
  Sense strand starting at position 313 of SEQ ID NO: 1882736
ccgugaggaccauauagua

SEQ ID NO: 2143723 - RNA, 19 nt, Artificial Sequence
  Description of Artificial Sequence: Synthetic oligonucleotide
  Antisense strand to SEQ ID NO: 2143722
uacuauaugguccucacgg

SEQ ID NO: 2143724 - RNA, 19 nt, Artificial Sequence
  Description of Artificial Sequence: Synthetic oligonucleotide
  Sense strand starting at position 485 of SEQ ID NO: 1882736
aaacauaaugcuggguauu

SEQ ID NO: 2143725 - RNA, 19 nt, Artificial Sequence
  Description of Artificial Sequence: Synthetic oligonucleotide
  Antisense strand to SEQ ID NO: 2143724
aauacccagcauuauguuu

SEQ ID NO: 2143726 - RNA, 19 nt, Artificial Sequence
  Description of Artificial Sequence: Synthetic oligonucleotide
  Sense strand starting at position 495 of SEQ ID NO: 1882736
cuggguauuuaguuauguu

SEQ ID NO: 2143727 - RNA, 19 nt, Artificial Sequence
  Description of Artificial Sequence: Synthetic oligonucleotide
  Antisense strand to SEQ ID NO: 2143726
aacauaacuaaauacccag

SEQ ID NO: 2143728 - RNA, 19 nt, Artificial Sequence
  Description of Artificial Sequence: Synthetic oligonucleotide
  Sense strand starting at position 505 of SEQ ID NO: 1882736
aguuauguugaaugcuaaa

SEQ ID NO: 2143729 - RNA, 19 nt, Artificial Sequence
  Description of Artificial Sequence: Synthetic oligonucleotide
  Antisense strand to SEQ ID NO: 2143728
uuuagcauucaacauaacu

SEQ ID NO: 2143730 - RNA, 19 nt, Artificial Sequence
  Description of Artificial Sequence: Synthetic oligonucleotide
  Sense strand starting at position 538 of SEQ ID NO: 1882736
aacuaaaggucuccgucaa

SEQ ID NO: 2143731 - RNA, 19 nt, Artificial Sequence
  Description of Artificial Sequence: Synthetic oligonucleotide
  Antisense strand to SEQ ID NO: 2143730
uugacggagaccuuuaguu

SEQ ID NO: 2143732 - RNA, 19 nt, Artificial Sequence
  Description of Artificial Sequence: Synthetic oligonucleotide
  Sense strand starting at position 539 of SEQ ID NO: 1882736
acuaaaggucuccgucaaa

SEQ ID NO: 2143733 - RNA, 19 nt, Artificial Sequence
  Description of Artificial Sequence: Synthetic oligonucleotide
  Antisense strand to SEQ ID NO: 2143732
uuugacggagaccuuuagu

SEQ ID NO: 2143734 - RNA, 19 nt, Artificial Sequence
  Description of Artificial Sequence: Synthetic oligonucleotide
  Sense strand starting at position 542 of SEQ ID NO: 1882736
aaaggucuccgucaaauga

SEQ ID NO: 2143735 - RNA, 19 nt, Artificial Sequence
  Description of Artificial Sequence: Synthetic oligonucleotide
  Antisense strand to SEQ ID NO: 2143734
ucauuugacggagaccuuu

SEQ ID NO: 2143736 - RNA, 19 nt, Artificial Sequence
  Description of Artificial Sequence: Synthetic oligonucleotide
  Sense strand starting at position 855 of SEQ ID NO: 1882736
ucagaugcccaagacuuau

SEQ ID NO: 2143737 - RNA, 19 nt, Artificial Sequence
  Description of Artificial Sequence: Synthetic oligonucleotide
  Antisense strand to SEQ ID NO: 2143736
auaagucuugggcaucuga

SEQ ID NO: 2143738 - RNA, 19 nt, Artificial Sequence
  Description of Artificial Sequence: Synthetic oligonucleotide
  Sense strand starting at position 1106 of SEQ ID NO: 1882736
uccgauggcgcaguuaauu

SEQ ID NO: 2143739 - RNA, 19 nt, Artificial Sequence
  Description of Artificial Sequence: Synthetic oligonucleotide
  Antisense strand to SEQ ID NO: 2143738
aauuaacugcgccaucgga

SEQ ID NO: 2143740 - RNA, 19 nt, Artificial Sequence
  Description of Artificial Sequence: Synthetic oligonucleotide
  Sense strand starting at position 1154 of SEQ ID NO: 1882736
agguuaaucaaguagcaga

SEQ ID NO: 2143741 - RNA, 19 nt, Artificial Sequence
  Description of Artificial Sequence: Synthetic oligonucleotide
  Antisense strand to SEQ ID NO: 2143740
ucugcuacuugauuaaccu

SEQ ID NO: 2143742 - RNA, 19 nt, Artificial Sequence
  Description of Artificial Sequence: Synthetic oligonucleotide
  Sense strand starting at position 1218 of SEQ ID NO: 1882736
gaguuacaaaggugaguaa

SEQ ID NO: 2143743 - RNA, 19 nt, Artificial Sequence
  Description of Artificial Sequence: Synthetic oligonucleotide
  Antisense strand to SEQ ID NO: 2143742
uuacucaccuuuguaacuc

SEQ ID NO: 2143744 - RNA, 19 nt, Artificial Sequence
  Description of Artificial Sequence: Synthetic oligonucleotide
  Sense strand starting at position 1221 of SEQ ID NO: 1882736
uuacaaaggugaguaaacu

SEQ ID NO: 2143745 - RNA, 19 nt, Artificial Sequence
  Description of Artificial Sequence: Synthetic oligonucleotide
  Antisense strand to SEQ ID NO: 2143744
aguuuacucaccuuuguaa

SEQ ID NO: 2143746 - RNA, 19 nt, Artificial Sequence
  Description of Artificial Sequence: Synthetic oligonucleotide
  Sense strand starting at position 1349 of SEQ ID NO: 1882736
auauuaggcgucuaccuua

SEQ ID NO: 2143747 - RNA, 19 nt, Artificial Sequence
  Description of Artificial Sequence: Synthetic oligonucleotide
  Antisense strand to SEQ ID NO: 2143746
uaagguagacgccuaauau

SEQ ID NO: 2143748 - RNA, 19 nt, Artificial Sequence
  Description of Artificial Sequence: Synthetic oligonucleotide
  Sense strand starting at position 1395 of SEQ ID NO: 1882736
aaaggaaagcuuugucuuc

SEQ ID NO: 2143749 - RNA, 19 nt, Artificial Sequence
  Description of Artificial Sequence: Synthetic oligonucleotide
  Antisense strand to SEQ ID NO: 2143748
gaagacaaagcuuuccuuu

SEQ ID NO: 2143750 - RNA, 19 nt, Artificial Sequence
  Description of Artificial Sequence: Synthetic oligonucleotide
  Sense strand starting at position 1517 of SEQ ID NO: 1882736
ucaggauaguuaucuccau

SEQ ID NO: 2143751 - RNA, 19 nt, Artificial Sequence
  Description of Artificial Sequence: Synthetic oligonucleotide
  Antisense strand to SEQ ID NO: 2143750
auggagauaacuauccuga

SEQ ID NO: 2143752 - RNA, 19 nt, Artificial Sequence
  Description of Artificial Sequence: Synthetic oligonucleotide
  Sense strand starting at position 1557 of SEQ ID NO: 1882736
acuauauucgaguaauucu

SEQ ID NO: 2143753 - RNA, 19 nt, Artificial Sequence
  Description of Artificial Sequence: Synthetic oligonucleotide
  Antisense strand to SEQ ID NO: 2143752
agaauuacucgaauauagu

SEQ ID NO: 2143754 - RNA, 19 nt, Artificial Sequence
  Description of Artificial Sequence: Synthetic oligonucleotide
  Sense strand starting at position 1565 of SEQ ID NO: 1882736
cgaguaauucuugggacca

SEQ ID NO: 2143755 - RNA, 19 nt, Artificial Sequence
  Description of Artificial Sequence: Synthetic oligonucleotide
  Antisense strand to SEQ ID NO: 2143754
uggucccaagaauuacucg

SEQ ID NO: 2143756 - RNA, 19 nt, Artificial Sequence
  Description of Artificial Sequence: Synthetic oligonucleotide
  Sense strand starting at position 1594 of SEQ ID NO: 1882736
uacacagaccuuuggguaa

SEQ ID NO: 2143757 - RNA, 19 nt, Artificial Sequence
  Description of Artificial Sequence: Synthetic oligonucleotide
  Antisense strand to SEQ ID NO: 2143756
uuacccaaaggucugugua

SEQ ID NO: 2143758 - RNA, 19 nt, Artificial Sequence
  Description of Artificial Sequence: Synthetic oligonucleotide
  Sense strand starting at position 2346 of SEQ ID NO: 1882736
ggacaagucaaagggcaua

SEQ ID NO: 2143759 - RNA, 19 nt, Artificial Sequence
  Description of Artificial Sequence: Synthetic oligonucleotide
  Antisense strand to SEQ ID NO: 2143758
uaugcccuuugacuugucc

SEQ ID NO: 2143760 - RNA, 19 nt, Artificial Sequence
  Description of Artificial Sequence: Synthetic oligonucleotide
  Sense strand starting at position 2488 of SEQ ID NO: 1882736
uuguguguugcccuuauau

SEQ ID NO: 2143761 - RNA, 19 nt, Artificial Sequence
  Description of Artificial Sequence: Synthetic oligonucleotide
  Antisense strand to SEQ ID NO: 2143760
auauaagggcaacacacaa

SEQ ID NO: 2143762 - RNA, 19 nt, Artificial Sequence
  Description of Artificial Sequence: Synthetic oligonucleotide
  Sense strand starting at position 2490 of SEQ ID NO: 1882736
guguguugcccuuauauuu

SEQ ID NO: 2143763 - RNA, 19 nt, Artificial Sequence
  Description of Artificial Sequence: Synthetic oligonucleotide
  Antisense strand to SEQ ID NO: 2143762
aaauauaagggcaacacac

SEQ ID NO: 2143764 - RNA, 19 nt, Artificial Sequence
  Description of Artificial Sequence: Synthetic oligonucleotide
  Sense strand starting at position 2554 of SEQ ID NO: 1882736
uuagauuguuagguaguga

SEQ ID NO: 2143765 - RNA, 19 nt, Artificial Sequence
  Description of Artificial Sequence: Synthetic oligonucleotide
  Antisense strand to SEQ ID NO: 2143764
ucacuaccuaacaaucuaa

SEQ ID NO: 2143766 - RNA, 19 nt, Artificial Sequence
  Description of Artificial Sequence: Synthetic oligonucleotide
  Sense strand starting at position 2592 of SEQ ID NO: 1882736
uuaugagaguuuccaaauu

SEQ ID NO: 2143767 - RNA, 19 nt, Artificial Sequence
  Description of Artificial Sequence: Synthetic oligonucleotide
  Antisense strand to SEQ ID NO: 2143766
aauuuggaaacucucauaa

SEQ ID NO: 2143768 - RNA, 19 nt, Artificial Sequence
  Description of Artificial Sequence: Synthetic oligonucleotide
  Sense strand starting at position 2612 of SEQ ID NO: 1882736
ccugacaugcuucgaaaca

SEQ ID NO: 2143769 - RNA, 19 nt, Artificial Sequence
  Description of Artificial Sequence: Synthetic oligonucleotide
  Antisense strand to SEQ ID NO: 2143768
uguuucgaagcaugucagg

SEQ ID NO: 2143770 - RNA, 19 nt, Artificial Sequence
  Description of Artificial Sequence: Synthetic oligonucleotide
  Sense strand starting at position 2747 of SEQ ID NO: 1882736
acagaagaguaugcacaau

SEQ ID NO: 2143771 - RNA, 19 nt, Artificial Sequence
  Description of Artificial Sequence: Synthetic oligonucleotide
  Antisense strand to SEQ ID NO: 2143770
auugugcauacucuucugu

SEQ ID NO: 2143772 - RNA, 19 nt, Artificial Sequence
  Description of Artificial Sequence: Synthetic oligonucleotide
  Sense strand starting at position 2753 of SEQ ID NO: 1882736
gaguaugcacaauguuaca

SEQ ID NO: 2143773 - RNA, 19 nt, Artificial Sequence
  Description of Artificial Sequence: Synthetic oligonucleotide
  Antisense strand to SEQ ID NO: 2143772
uguaacauugugcauacuc

SEQ ID NO: 2143774 - RNA, 19 nt, Artificial Sequence
  Description of Artificial Sequence: Synthetic oligonucleotide
  Sense strand starting at position 2780 of SEQ ID NO: 1882736
uacauauuugcguaugucu

SEQ ID NO: 2143775 - RNA, 19 nt, Artificial Sequence
  Description of Artificial Sequence: Synthetic oligonucleotide
  Antisense strand to SEQ ID NO: 2143774
agacauacgcaaauaugua

SEQ ID NO: 2143776 - RNA, 19 nt, Artificial Sequence
  Description of Artificial Sequence: Synthetic oligonucleotide
  Sense strand starting at position 2782 of SEQ ID NO: 1882736
cauauuugcguaugucuaa

SEQ ID NO: 2143777 - RNA, 19 nt, Artificial Sequence
  Description of Artificial Sequence: Synthetic oligonucleotide
  Antisense strand to SEQ ID NO: 2143776
uuagacauacgcaaauaug

SEQ ID NO: 2143778 - RNA, 19 nt, Artificial Sequence
  Description of Artificial Sequence: Synthetic oligonucleotide
  Sense strand starting at position 2783 of SEQ ID NO: 1882736
auauuugcguaugucuaaa

SEQ ID NO: 2143779 - RNA, 19 nt, Artificial Sequence
  Description of Artificial Sequence: Synthetic oligonucleotide
  Antisense strand to SEQ ID NO: 2143778
uuuagacauacgcaaauau

SEQ ID NO: 2143780 - RNA, 19 nt, Artificial Sequence
  Description of Artificial Sequence: Synthetic oligonucleotide
  Sense strand starting at position 3043 of SEQ ID NO: 1882736
gaggcagggauccaguauu

SEQ ID NO: 2143781 - RNA, 19 nt, Artificial Sequence
  Description of Artificial Sequence: Synthetic oligonucleotide
  Antisense strand to SEQ ID NO: 2143780
aauacuggaucccugccuc

SEQ ID NO: 2143782 - RNA, 19 nt, Artificial Sequence
  Description of Artificial Sequence: Synthetic oligonucleotide
  Sense strand starting at position 3070 of SEQ ID NO: 1882736
ccaaauagaucuguugaau

SEQ ID NO: 2143783 - RNA, 19 nt, Artificial Sequence
  Description of Artificial Sequence: Synthetic oligonucleotide
  Antisense strand to SEQ ID NO: 2143782
auucaacagaucuauuugg

SEQ ID NO: 2143784 - RNA, 19 nt, Artificial Sequence
  Description of Artificial Sequence: Synthetic oligonucleotide
  Sense strand starting at position 3245 of SEQ ID NO: 1882736
augcaauuaccgugacaag

SEQ ID NO: 2143785 - RNA, 19 nt, Artificial Sequence
  Description of Artificial Sequence: Synthetic oligonucleotide
  Antisense strand to SEQ ID NO: 2143784
cuugucacgguaauugcau

SEQ ID NO: 2143786 - RNA, 19 nt, Artificial Sequence
  Description of Artificial Sequence: Synthetic oligonucleotide
  Sense strand starting at position 3381 of SEQ ID NO: 1882736
uaaaguaaagucggaacau

SEQ ID NO: 2143787 - RNA, 19 nt, Artificial Sequence
  Description of Artificial Sequence: Synthetic oligonucleotide
  Antisense strand to SEQ ID NO: 2143786
auguuccgacuuuacuuua

SEQ ID NO: 2143788 - RNA, 19 nt, Artificial Sequence
  Description of Artificial Sequence: Synthetic oligonucleotide
  Sense strand starting at position 3484 of SEQ ID NO: 1882736
ggcucuaggcuggaucuaa

SEQ ID NO: 2143789 - RNA, 19 nt, Artificial Sequence
  Description of Artificial Sequence: Synthetic oligonucleotide
  Antisense strand to SEQ ID NO: 2143788
uuagauccagccuagagcc

SEQ ID NO: 2143790 - RNA, 19 nt, Artificial Sequence
  Description of Artificial Sequence: Synthetic oligonucleotide
  Sense strand starting at position 3537 of SEQ ID NO: 1882736
cuccuaccuguguacgaaa

SEQ ID NO: 2143791 - RNA, 19 nt, Artificial Sequence
  Description of Artificial Sequence: Synthetic oligonucleotide
  Antisense strand to SEQ ID NO: 2143790
uuucguacacagguaggag

SEQ ID NO: 2143792 - RNA, 19 nt, Artificial Sequence
  Description of Artificial Sequence: Synthetic oligonucleotide
  Sense strand starting at position 582 of SEQ ID NO: 1882737
cuguauauauguguaagua

SEQ ID NO: 2143793 - RNA, 19 nt, Artificial Sequence
  Description of Artificial Sequence: Synthetic oligonucleotide
  Antisense strand to SEQ ID NO: 2143792
uacuuacacauauauacag

SEQ ID NO: 2143794 - RNA, 19 nt, Artificial Sequence
  Description of Artificial Sequence: Synthetic oligonucleotide
  Sense strand starting at position 630 of SEQ ID NO: 1882737
ggacaagucaaagggcaua

SEQ ID NO: 2143795 - RNA, 19 nt, Artificial Sequence
  Description of Artificial Sequence: Synthetic oligonucleotide
  Antisense strand to SEQ ID NO: 2143794
uaugcccuuugacuugucc

SEQ ID NO: 2143796 - RNA, 19 nt, Artificial Sequence
  Description of Artificial Sequence: Synthetic oligonucleotide
  Sense strand starting at position 709 of SEQ ID NO: 1882737
ccuugacuguuuccuuaca

SEQ ID NO: 2143797 - RNA, 19 nt, Artificial Sequence
  Description of Artificial Sequence: Synthetic oligonucleotide
  Antisense strand to SEQ ID NO: 2143796
uguaaggaaacagucaagg

SEQ ID NO: 2143798 - RNA, 19 nt, Artificial Sequence
  Description of Artificial Sequence: Synthetic oligonucleotide
  Sense strand starting at position 710 of SEQ ID NO: 1882737
cuugacuguuuccuuacau

SEQ ID NO: 2143799 - RNA, 19 nt, Artificial Sequence
  Description of Artificial Sequence: Synthetic oligonucleotide
  Antisense strand to SEQ ID NO: 2143798
auguaaggaaacagucaag

SEQ ID NO: 2143800 - RNA, 19 nt, Artificial Sequence
  Description of Artificial Sequence: Synthetic oligonucleotide
  Sense strand starting at position 711 of SEQ ID NO: 1882737
uugacuguuuccuuacauc

SEQ ID NO: 2143801 - RNA, 19 nt, Artificial Sequence
  Description of Artificial Sequence: Synthetic oligonucleotide
  Antisense strand to SEQ ID NO: 2143800
gauguaaggaaacagucaa

SEQ ID NO: 2143802 - RNA, 19 nt, Artificial Sequence
  Description of Artificial Sequence: Synthetic oligonucleotide
  Sense strand starting at position 772 of SEQ ID NO: 1882737
uuguguguugcccuuauau

SEQ ID NO: 2143803 - RNA, 19 nt, Artificial Sequence
  Description of Artificial Sequence: Synthetic oligonucleotide
  Antisense strand to SEQ ID NO: 2143802
auauaagggcaacacacaa

SEQ ID NO: 2143804 - RNA, 19 nt, Artificial Sequence
  Description of Artificial Sequence: Synthetic oligonucleotide
  Sense strand starting at position 774 of SEQ ID NO: 1882737
guguguugcccuuauauuu

SEQ ID NO: 2143805 - RNA, 19 nt, Artificial Sequence
  Description of Artificial Sequence: Synthetic oligonucleotide
  Antisense strand to SEQ ID NO: 2143804
aaauauaagggcaacacac

SEQ ID NO: 2143806 - RNA, 19 nt, Artificial Sequence
  Description of Artificial Sequence: Synthetic oligonucleotide
  Sense strand starting at position 791 of SEQ ID NO: 1882737
uucccauuguauguuugau

SEQ ID NO: 2143807 - RNA, 19 nt, Artificial Sequence
  Description of Artificial Sequence: Synthetic oligonucleotide
  Antisense strand to SEQ ID NO: 2143806
aucaaacauacaaugggaa

SEQ ID NO: 2143808 - RNA, 19 nt, Artificial Sequence
  Description of Artificial Sequence: Synthetic oligonucleotide
  Sense strand starting at position 838 of SEQ ID NO: 1882737
uuagauuguuagguaguga

SEQ ID NO: 2143809 - RNA, 19 nt, Artificial Sequence
  Description of Artificial Sequence: Synthetic oligonucleotide
  Antisense strand to SEQ ID NO: 2143808
ucacuaccuaacaaucuaa

SEQ ID NO: 2143810 - RNA, 19 nt, Artificial Sequence
  Description of Artificial Sequence: Synthetic oligonucleotide
  Sense strand starting at position 876 of SEQ ID NO: 1882737
uuaugagaguuuccaaauu

SEQ ID NO: 2143811 - RNA, 19 nt, Artificial Sequence
  Description of Artificial Sequence: Synthetic oligonucleotide
  Antisense strand to SEQ ID NO: 2143810
aauuuggaaacucucauaa

SEQ ID NO: 2143812 - RNA, 19 nt, Artificial Sequence
  Description of Artificial Sequence: Synthetic oligonucleotide
  Sense strand starting at position 896 of SEQ ID NO: 1882737
ccugacaugcuucgaaaca

SEQ ID NO: 2143813 - RNA, 19 nt, Artificial Sequence
  Description of Artificial Sequence: Synthetic oligonucleotide
  Antisense strand to SEQ ID NO: 2143812
uguuucgaagcaugucagg

SEQ ID NO: 2143814 - RNA, 19 nt, Artificial Sequence
  Description of Artificial Sequence: Synthetic oligonucleotide
  Sense strand starting at position 1031 of SEQ ID NO: 1882737
acagaagaguaugcacaau

SEQ ID NO: 2143815 - RNA, 19 nt, Artificial Sequence
  Description of Artificial Sequence: Synthetic oligonucleotide
  Antisense strand to SEQ ID NO: 2143814
auugugcauacucuucugu

SEQ ID NO: 2143816 - RNA, 19 nt, Artificial Sequence
  Description of Artificial Sequence: Synthetic oligonucleotide
  Sense strand starting at position 1037 of SEQ ID NO: 1882737
gaguaugcacaauguuaca

SEQ ID NO: 2143817 - RNA, 19 nt, Artificial Sequence
  Description of Artificial Sequence: Synthetic oligonucleotide
  Antisense strand to SEQ ID NO: 2143816
uguaacauugugcauacuc

SEQ ID NO: 2143818 - RNA, 19 nt, Artificial Sequence
  Description of Artificial Sequence: Synthetic oligonucleotide
  Sense strand starting at position 1064 of SEQ ID NO: 1882737
uacauauuugcguaugucu

SEQ ID NO: 2143819 - RNA, 19 nt, Artificial Sequence
  Description of Artificial Sequence: Synthetic oligonucleotide
  Antisense strand to SEQ ID NO: 2143818
agacauacgcaaauaugua

SEQ ID NO: 2143820 - RNA, 19 nt, Artificial Sequence
  Description of Artificial Sequence: Synthetic oligonucleotide
  Sense strand starting at position 1066 of SEQ ID NO: 1882737
cauauuugcguaugucuaa

SEQ ID NO: 2143821 - RNA, 19 nt, Artificial Sequence
  Description of Artificial Sequence: Synthetic oligonucleotide
  Antisense strand to SEQ ID NO: 2143820
uuagacauacgcaaauaug

SEQ ID NO: 2143822 - RNA, 19 nt, Artificial Sequence
  Description of Artificial Sequence: Synthetic oligonucleotide
  Sense strand starting at position 1067 of SEQ ID NO: 1882737
auauuugcguaugucuaaa

SEQ ID NO: 2143823 - RNA, 19 nt, Artificial Sequence
  Description of Artificial Sequence: Synthetic oligonucleotide
  Antisense strand to SEQ ID NO: 2143822
uuuagacauacgcaaauau

SEQ ID NO: 2143824 - RNA, 19 nt, Artificial Sequence
  Description of Artificial Sequence: Synthetic oligonucleotide
  Sense strand starting at position 1229 of SEQ ID NO: 1882737
ccucuaucauguuugcaua

SEQ ID NO: 2143825 - RNA, 19 nt, Artificial Sequence
  Description of Artificial Sequence: Synthetic oligonucleotide
  Antisense strand to SEQ ID NO: 2143824
uaugcaaacaugauagagg

SEQ ID NO: 2143826 - RNA, 19 nt, Artificial Sequence
  Description of Artificial Sequence: Synthetic oligonucleotide
  Sense strand starting at position 1231 of SEQ ID NO: 1882737
ucuaucauguuugcauaca

SEQ ID NO: 2143827 - RNA, 19 nt, Artificial Sequence
  Description of Artificial Sequence: Synthetic oligonucleotide
  Antisense strand to SEQ ID NO: 2143826
uguaugcaaacaugauaga

SEQ ID NO: 2143828 - RNA, 19 nt, Artificial Sequence
  Description of Artificial Sequence: Synthetic oligonucleotide
  Sense strand starting at position 1327 of SEQ ID NO: 1882737
gaggcagggauccaguauu

SEQ ID NO: 2143829 - RNA, 19 nt, Artificial Sequence
  Description of Artificial Sequence: Synthetic oligonucleotide
  Antisense strand to SEQ ID NO: 2143828
aauacuggaucccugccuc

SEQ ID NO: 2143830 - RNA, 19 nt, Artificial Sequence
  Description of Artificial Sequence: Synthetic oligonucleotide
  Sense strand starting at position 1354 of SEQ ID NO: 1882737
ccaaauagaucuguugaau

SEQ ID NO: 2143831 - RNA, 19 nt, Artificial Sequence
  Description of Artificial Sequence: Synthetic oligonucleotide
  Antisense strand to SEQ ID NO: 2143830
auucaacagaucuauuugg

SEQ ID NO: 2143832 - RNA, 19 nt, Artificial Sequence
  Description of Artificial Sequence: Synthetic oligonucleotide
  Sense strand starting at position 1529 of SEQ ID NO: 1882737
augcaauuaccgugacaag

SEQ ID NO: 2143833 - RNA, 19 nt, Artificial Sequence
  Description of Artificial Sequence: Synthetic oligonucleotide
  Antisense strand to SEQ ID NO: 2143832
cuugucacgguaauugcau

SEQ ID NO: 2143834 - RNA, 19 nt, Artificial Sequence
  Description of Artificial Sequence: Synthetic oligonucleotide
  Sense strand starting at position 1665 of SEQ ID NO: 1882737
uaaaguaaagucggaacau

SEQ ID NO: 2143835 - RNA, 19 nt, Artificial Sequence
  Description of Artificial Sequence: Synthetic oligonucleotide
  Antisense strand to SEQ ID NO: 2143834
auguuccgacuuuacuuua

SEQ ID NO: 2143836 - RNA, 19 nt, Artificial Sequence
  Description of Artificial Sequence: Synthetic oligonucleotide
  Sense strand starting at position 1768 of SEQ ID NO: 1882737
ggcucuaggcuggaucuaa

SEQ ID NO: 2143837 - RNA, 19 nt, Artificial Sequence
  Description of Artificial Sequence: Synthetic oligonucleotide
  Antisense strand to SEQ ID NO: 2143836
uuagauccagccuagagcc

SEQ ID NO: 2143838 - RNA, 19 nt, Artificial Sequence
  Description of Artificial Sequence: Synthetic oligonucleotide
  Sense strand starting at position 1821 of SEQ ID NO: 1882737
cuccuaccuguguacgaaa

SEQ ID NO: 2143839 - RNA, 19 nt, Artificial Sequence
  Description of Artificial Sequence: Synthetic oligonucleotide
  Antisense strand to SEQ ID NO: 2143838
uuucguacacagguaggag

SEQ ID NO: 2143840 - RNA, 19 nt, Artificial Sequence
  Description of Artificial Sequence: Synthetic oligonucleotide
  Sense strand starting at position 1842 of SEQ ID NO: 1882737
aaacuauucucgucgaagu

SEQ ID NO: 2143841 - RNA, 19 nt, Artificial Sequence
  Description of Artificial Sequence: Synthetic oligonucleotide
  Antisense strand to SEQ ID NO: 2143840
acuucgacgagaauaguuu

SEQ ID NO: 2143842 - RNA, 19 nt, Artificial Sequence
  Description of Artificial Sequence: Synthetic oligonucleotide
  Sense strand starting at position 2654 of SEQ ID NO: 1882737
ggcacagcucucuaaacca

SEQ ID NO: 2143843 - RNA, 19 nt, Artificial Sequence
  Description of Artificial Sequence: Synthetic oligonucleotide
  Antisense strand to SEQ ID NO: 2143842
ugguuuagagagcugugcc

SEQ ID NO: 2143844 - RNA, 19 nt, Artificial Sequence
  Description of Artificial Sequence: Synthetic oligonucleotide
  Sense strand starting at position 2724 of SEQ ID NO: 1882737
aaaucaucacgaugaaguc

SEQ ID NO: 2143845 - RNA, 19 nt, Artificial Sequence
  Description of Artificial Sequence: Synthetic oligonucleotide
  Antisense strand to SEQ ID NO: 2143844
gacuucaucgugaugauuu

SEQ ID NO: 2143846 - RNA, 19 nt, Artificial Sequence
  Description of Artificial Sequence: Synthetic oligonucleotide
  Sense strand starting at position 2736 of SEQ ID NO: 1882737
ugaagucagaggcgagaaa

SEQ ID NO: 2143847 - RNA, 19 nt, Artificial Sequence
  Description of Artificial Sequence: Synthetic oligonucleotide
  Antisense strand to SEQ ID NO: 2143846
uuucucgccucugacuuca

SEQ ID NO: 2143848 - RNA, 19 nt, Artificial Sequence
  Description of Artificial Sequence: Synthetic oligonucleotide
  Sense strand starting at position 2826 of SEQ ID NO: 1882737
gggagauaguagcuaucaa

SEQ ID NO: 2143849 - RNA, 19 nt, Artificial Sequence
  Description of Artificial Sequence: Synthetic oligonucleotide
  Antisense strand to SEQ ID NO: 2143848
uugauagcuacuaucuccc

SEQ ID NO: 2143850 - RNA, 19 nt, Artificial Sequence
  Description of Artificial Sequence: Synthetic oligonucleotide
  Sense strand starting at position 3210 of SEQ ID NO: 1882737
ccggccuaucaaugaauaa

SEQ ID NO: 2143851 - RNA, 19 nt, Artificial Sequence
  Description of Artificial Sequence: Synthetic oligonucleotide
  Antisense strand to SEQ ID NO: 2143850
uuauucauugauaggccgg

SEQ ID NO: 2143852 - RNA, 19 nt, Artificial Sequence
  Description of Artificial Sequence: Synthetic oligonucleotide
  Sense strand starting at position 3251 of SEQ ID NO: 1882737
gauaguauuggaggucaag

SEQ ID NO: 2143853 - RNA, 19 nt, Artificial Sequence
  Description of Artificial Sequence: Synthetic oligonucleotide
  Antisense strand to SEQ ID NO: 2143852
cuugaccuccaauacuauc

SEQ ID NO: 2143854 - RNA, 19 nt, Artificial Sequence
  Description of Artificial Sequence: Synthetic oligonucleotide
  Sense strand starting at position 3263 of SEQ ID NO: 1882737
ggucaagucaaguauguuc

SEQ ID NO: 2143855 - RNA, 19 nt, Artificial Sequence
  Description of Artificial Sequence: Synthetic oligonucleotide
  Antisense strand to SEQ ID NO: 2143854
gaacauacuugacuugacc

SEQ ID NO: 2143856 - RNA, 19 nt, Artificial Sequence
  Description of Artificial Sequence: Synthetic oligonucleotide
  Sense strand starting at position 3271 of SEQ ID NO: 1882737
caaguauguuccucuugga

SEQ ID NO: 2143857 - RNA, 19 nt, Artificial Sequence
  Description of Artificial Sequence: Synthetic oligonucleotide
  Antisense strand to SEQ ID NO: 2143856
uccaagaggaacauacuug

SEQ ID NO: 2143858 - RNA, 19 nt, Artificial Sequence
  Description of Artificial Sequence: Synthetic oligonucleotide
  Sense strand starting at position 3276 of SEQ ID NO: 1882737
auguuccucuuggaaauuu

SEQ ID NO: 2143859 - RNA, 19 nt, Artificial Sequence
  Description of Artificial Sequence: Synthetic oligonucleotide
  Antisense strand to SEQ ID NO: 2143858
aaauuuccaagaggaacau

SEQ ID NO: 2143860 - RNA, 19 nt, Artificial Sequence
  Description of Artificial Sequence: Synthetic oligonucleotide
  Sense strand starting at position 3330 of SEQ ID NO: 1882737
gcuaacauuuaugaaguau

SEQ ID NO: 2143861 - RNA, 19 nt, Artificial Sequence
  Description of Artificial Sequence: Synthetic oligonucleotide
  Antisense strand to SEQ ID NO: 2143860
auacuucauaaauguuagc

SEQ ID NO: 2143862 - RNA, 19 nt, Artificial Sequence
  Description of Artificial Sequence: Synthetic oligonucleotide
  Sense strand starting at position 3628 of SEQ ID NO: 1882737
uuauacuguucugcugaaa

SEQ ID NO: 2143863 - RNA, 19 nt, Artificial Sequence
  Description of Artificial Sequence: Synthetic oligonucleotide
  Antisense strand to SEQ ID NO: 2143862
uuucagcagaacaguauaa

SEQ ID NO: 2143864 - RNA, 19 nt, Artificial Sequence
  Description of Artificial Sequence: Synthetic oligonucleotide
  Sense strand starting at position 3631 of SEQ ID NO: 1882737
uacuguucugcugaaauug

SEQ ID NO: 2143865 - RNA, 19 nt, Artificial Sequence
  Description of Artificial Sequence: Synthetic oligonucleotide
  Antisense strand to SEQ ID NO: 2143864
caauuucagcagaacagua

SEQ ID NO: 2143866 - RNA, 19 nt, Artificial Sequence
  Description of Artificial Sequence: Synthetic oligonucleotide
  Sense strand starting at position 3860 of SEQ ID NO: 1882737
gaauuaggcuuucuuggau

SEQ ID NO: 2143867 - RNA, 19 nt, Artificial Sequence
  Description of Artificial Sequence: Synthetic oligonucleotide
  Antisense strand to SEQ ID NO: 2143866
auccaagaaagccuaauuc

SEQ ID NO: 2143868 - RNA, 19 nt, Artificial Sequence
  Description of Artificial Sequence: Synthetic oligonucleotide
  Sense strand starting at position 3867 of SEQ ID NO: 1882737
gcuuucuuggauggguaga

SEQ ID NO: 2143869 - RNA, 19 nt, Artificial Sequence
  Description of Artificial Sequence: Synthetic oligonucleotide
  Antisense strand to SEQ ID NO: 2143868
ucuacccauccaagaaagc

SEQ ID NO: 2143870 - RNA, 19 nt, Artificial Sequence
  Description of Artificial Sequence: Synthetic oligonucleotide
  Sense strand starting at position 3891 of SEQ ID NO: 1882737
uguggaggugugcagauaa

SEQ ID NO: 2143871 - RNA, 19 nt, Artificial Sequence
  Description of Artificial Sequence: Synthetic oligonucleotide
  Antisense strand to SEQ ID NO: 2143870
uuaucugcacaccuccaca

SEQ ID NO: 2143872 - RNA, 19 nt, Artificial Sequence
  Description of Artificial Sequence: Synthetic oligonucleotide
  Sense strand starting at position 278 of SEQ ID NO: 1882738
cggagaagccaugggauaa

SEQ ID NO: 2143873 - RNA, 19 nt, Artificial Sequence
  Description of Artificial Sequence: Synthetic oligonucleotide
  Antisense strand to SEQ ID NO: 2143872
uuaucccauggcuucuccg

SEQ ID NO: 2143874 - RNA, 19 nt, Artificial Sequence
  Description of Artificial Sequence: Synthetic oligonucleotide
  Sense strand starting at position 565 of SEQ ID NO: 1882738
accauauugcucuacucga

SEQ ID NO: 2143875 - RNA, 19 nt, Artificial Sequence
  Description of Artificial Sequence: Synthetic oligonucleotide
  Antisense strand to SEQ ID NO: 2143874
ucgaguagagcaauauggu

SEQ ID NO: 2143876 - RNA, 19 nt, Artificial Sequence
  Description of Artificial Sequence: Synthetic oligonucleotide
  Sense strand starting at position 581 of SEQ ID NO: 1882738
cgaugacguaaguacaauu

SEQ ID NO: 2143877 - RNA, 19 nt, Artificial Sequence
  Description of Artificial Sequence: Synthetic oligonucleotide
  Antisense strand to SEQ ID NO: 2143876
aauuguacuuacgucaucg

SEQ ID NO: 2143878 - RNA, 19 nt, Artificial Sequence
  Description of Artificial Sequence: Synthetic oligonucleotide
  Sense strand starting at position 682 of SEQ ID NO: 1882738
uuguaauuaccuuagguca

SEQ ID NO: 2143879 - RNA, 19 nt, Artificial Sequence
  Description of Artificial Sequence: Synthetic oligonucleotide
  Antisense strand to SEQ ID NO: 2143878
ugaccuaagguaauuacaa

SEQ ID NO: 2143880 - RNA, 19 nt, Artificial Sequence
  Description of Artificial Sequence: Synthetic oligonucleotide
  Sense strand starting at position 789 of SEQ ID NO: 1882738
ucucaaagguccgcauuua

SEQ ID NO: 2143881 - RNA, 19 nt, Artificial Sequence
  Description of Artificial Sequence: Synthetic oligonucleotide
  Antisense strand to SEQ ID NO: 2143880
uaaaugcggaccuuugaga

SEQ ID NO: 2143882 - RNA, 19 nt, Artificial Sequence
  Description of Artificial Sequence: Synthetic oligonucleotide
  Sense strand starting at position 808 of SEQ ID NO: 1882738
cucuguguccacuagauag

SEQ ID NO: 2143883 - RNA, 19 nt, Artificial Sequence
  Description of Artificial Sequence: Synthetic oligonucleotide
  Antisense strand to SEQ ID NO: 2143882
cuaucuaguggacacagag

SEQ ID NO: 2143884 - RNA, 19 nt, Artificial Sequence
  Description of Artificial Sequence: Synthetic oligonucleotide
  Sense strand starting at position 826 of SEQ ID NO: 1882738
gaggaaucauccuuuaagu

SEQ ID NO: 2143885 - RNA, 19 nt, Artificial Sequence
  Description of Artificial Sequence: Synthetic oligonucleotide
  Antisense strand to SEQ ID NO: 2143884
acuuaaaggaugauuccuc

SEQ ID NO: 2143886 - RNA, 19 nt, Artificial Sequence
  Description of Artificial Sequence: Synthetic oligonucleotide
  Sense strand starting at position 839 of SEQ ID NO: 1882738
uuaaguaugcaugauccuu

SEQ ID NO: 2143887 - RNA, 19 nt, Artificial Sequence
  Description of Artificial Sequence: Synthetic oligonucleotide
  Antisense strand to SEQ ID NO: 2143886
aaggaucaugcauacuuaa

SEQ ID NO: 2143888 - RNA, 19 nt, Artificial Sequence
  Description of Artificial Sequence: Synthetic oligonucleotide
  Sense strand starting at position 859 of SEQ ID NO: 1882738
ggagaacaaauggguguau

SEQ ID NO: 2143889 - RNA, 19 nt, Artificial Sequence
  Description of Artificial Sequence: Synthetic oligonucleotide
  Antisense strand to SEQ ID NO: 2143888
auacacccauuuguucucc

SEQ ID NO: 2143890 - RNA, 19 nt, Artificial Sequence
  Description of Artificial Sequence: Synthetic oligonucleotide
  Sense strand starting at position 870 of SEQ ID NO: 1882738
ggguguaugcugucgguua

SEQ ID NO: 2143891 - RNA, 19 nt, Artificial Sequence
  Description of Artificial Sequence: Synthetic oligonucleotide
  Antisense strand to SEQ ID NO: 2143890
uaaccgacagcauacaccc

SEQ ID NO: 2143892 - RNA, 19 nt, Artificial Sequence
  Description of Artificial Sequence: Synthetic oligonucleotide
  Sense strand starting at position 912 of SEQ ID NO: 1882738
guaaucaugggugagguua

SEQ ID NO: 2143893 - RNA, 19 nt, Artificial Sequence
  Description of Artificial Sequence: Synthetic oligonucleotide
  Antisense strand to SEQ ID NO: 2143892
uaaccucacccaugauuac

SEQ ID NO: 2143894 - RNA, 19 nt, Artificial Sequence
  Description of Artificial Sequence: Synthetic oligonucleotide
  Sense strand starting at position 1176 of SEQ ID NO: 1882738
cuuagucauucuuugggaa

SEQ ID NO: 2143895 - RNA, 19 nt, Artificial Sequence
  Description of Artificial Sequence: Synthetic oligonucleotide
  Antisense strand to SEQ ID NO: 2143894
uucccaaagaaugacuaag

SEQ ID NO: 2143896 - RNA, 19 nt, Artificial Sequence
  Description of Artificial Sequence: Synthetic oligonucleotide
  Sense strand starting at position 1177 of SEQ ID NO: 1882738
uuagucauucuuugggaaa

SEQ ID NO: 2143897 - RNA, 19 nt, Artificial Sequence
  Description of Artificial Sequence: Synthetic oligonucleotide
  Antisense strand to SEQ ID NO: 2143896
uuucccaaagaaugacuaa

SEQ ID NO: 2143898 - RNA, 19 nt, Artificial Sequence
  Description of Artificial Sequence: Synthetic oligonucleotide
  Sense strand starting at position 1268 of SEQ ID NO: 1882738
gcuuacuuggcagacucau

SEQ ID NO: 2143899 - RNA, 19 nt, Artificial Sequence
  Description of Artificial Sequence: Synthetic oligonucleotide
  Antisense strand to SEQ ID NO: 2143898
augagucugccaaguaagc

SEQ ID NO: 2143900 - RNA, 19 nt, Artificial Sequence
  Description of Artificial Sequence: Synthetic oligonucleotide
  Sense strand starting at position 1274 of SEQ ID NO: 1882738
uuggcagacucauuagaga

SEQ ID NO: 2143901 - RNA, 19 nt, Artificial Sequence
  Description of Artificial Sequence: Synthetic oligonucleotide
  Antisense strand to SEQ ID NO: 2143900
ucucuaaugagucugccaa

SEQ ID NO: 2143902 - RNA, 19 nt, Artificial Sequence
  Description of Artificial Sequence: Synthetic oligonucleotide
  Sense strand starting at position 1288 of SEQ ID NO: 1882738
agagaauggcgguaagcuu

SEQ ID NO: 2143903 - RNA, 19 nt, Artificial Sequence
  Description of Artificial Sequence: Synthetic oligonucleotide
  Antisense strand to SEQ ID NO: 2143902
aagcuuaccgccauucucu

SEQ ID NO: 2143904 - RNA, 19 nt, Artificial Sequence
  Description of Artificial Sequence: Synthetic oligonucleotide
  Sense strand starting at position 1573 of SEQ ID NO: 1882738
uguauugaacaguagguuu

SEQ ID NO: 2143905 - RNA, 19 nt, Artificial Sequence
  Description of Artificial Sequence: Synthetic oligonucleotide
  Antisense strand to SEQ ID NO: 2143904
aaaccuacuguucaauaca

SEQ ID NO: 2143906 - RNA, 19 nt, Artificial Sequence
  Description of Artificial Sequence: Synthetic oligonucleotide
  Sense strand starting at position 1596 of SEQ ID NO: 1882738
ucuaucugacaguauguuu

SEQ ID NO: 2143907 - RNA, 19 nt, Artificial Sequence
  Description of Artificial Sequence: Synthetic oligonucleotide
  Antisense strand to SEQ ID NO: 2143906
aaacauacugucagauaga

SEQ ID NO: 2143908 - RNA, 19 nt, Artificial Sequence
  Description of Artificial Sequence: Synthetic oligonucleotide
  Sense strand starting at position 1663 of SEQ ID NO: 1882738
ucuguauguaaaugaagag

SEQ ID NO: 2143909 - RNA, 19 nt, Artificial Sequence
  Description of Artificial Sequence: Synthetic oligonucleotide
  Antisense strand to SEQ ID NO: 2143908
cucuucauuuacauacaga

SEQ ID NO: 2143910 - RNA, 19 nt, Artificial Sequence
  Description of Artificial Sequence: Synthetic oligonucleotide
  Sense strand starting at position 1678 of SEQ ID NO: 1882738
agagaagcauccucuaacu

SEQ ID NO: 2143911 - RNA, 19 nt, Artificial Sequence
  Description of Artificial Sequence: Synthetic oligonucleotide
  Antisense strand to SEQ ID NO: 2143910
aguuagaggaugcuucucu

SEQ ID NO: 2143912 - RNA, 19 nt, Artificial Sequence
  Description of Artificial Sequence: Synthetic oligonucleotide
  Sense strand starting at position 1702 of SEQ ID NO: 1882738
aggguacugccauggaaau

SEQ ID NO: 2143913 - RNA, 19 nt, Artificial Sequence
  Description of Artificial Sequence: Synthetic oligonucleotide
  Antisense strand to SEQ ID NO: 2143912
auuuccauggcaguacccu

SEQ ID NO: 2143914 - RNA, 19 nt, Artificial Sequence
  Description of Artificial Sequence: Synthetic oligonucleotide
  Sense strand starting at position 1703 of SEQ ID NO: 1882738
ggguacugccauggaaauu

SEQ ID NO: 2143915 - RNA, 19 nt, Artificial Sequence
  Description of Artificial Sequence: Synthetic oligonucleotide
  Antisense strand to SEQ ID NO: 2143914
aauuuccauggcaguaccc

SEQ ID NO: 2143916 - RNA, 19 nt, Artificial Sequence
  Description of Artificial Sequence: Synthetic oligonucleotide
  Sense strand starting at position 1747 of SEQ ID NO: 1882738
gugcauuuguuagcuauua

SEQ ID NO: 2143917 - RNA, 19 nt, Artificial Sequence
  Description of Artificial Sequence: Synthetic oligonucleotide
  Antisense strand to SEQ ID NO: 2143916
uaauagcuaacaaaugcac

SEQ ID NO: 2143918 - RNA, 19 nt, Artificial Sequence
  Description of Artificial Sequence: Synthetic oligonucleotide
  Sense strand starting at position 2203 of SEQ ID NO: 1882738
gauauuguaggcuaaguau

SEQ ID NO: 2143919 - RNA, 19 nt, Artificial Sequence
  Description of Artificial Sequence: Synthetic oligonucleotide
  Antisense strand to SEQ ID NO: 2143918
auacuuagccuacaauauc

SEQ ID NO: 2143920 - RNA, 19 nt, Artificial Sequence
  Description of Artificial Sequence: Synthetic oligonucleotide
  Sense strand starting at position 2212 of SEQ ID NO: 1882738
ggcuaaguauuucuugcua

SEQ ID NO: 2143921 - RNA, 19 nt, Artificial Sequence
  Description of Artificial Sequence: Synthetic oligonucleotide
  Antisense strand to SEQ ID NO: 2143920
uagcaagaaauacuuagcc

SEQ ID NO: 2143922 - RNA, 19 nt, Artificial Sequence
  Description of Artificial Sequence: Synthetic oligonucleotide
  Sense strand starting at position 2272 of SEQ ID NO: 1882738
gcuagacauguuuaaauau

SEQ ID NO: 2143923 - RNA, 19 nt, Artificial Sequence
  Description of Artificial Sequence: Synthetic oligonucleotide
  Antisense strand to SEQ ID NO: 2143922
auauuuaaacaugucuagc

SEQ ID NO: 2143924 - RNA, 19 nt, Artificial Sequence
  Description of Artificial Sequence: Synthetic oligonucleotide
  Sense strand starting at position 2449 of SEQ ID NO: 1882738
gagcuugauuuggaucaga

SEQ ID NO: 2143925 - RNA, 19 nt, Artificial Sequence
  Description of Artificial Sequence: Synthetic oligonucleotide
  Antisense strand to SEQ ID NO: 2143924
ucugauccaaaucaagcuc

SEQ ID NO: 2143926 - RNA, 19 nt, Artificial Sequence
  Description of Artificial Sequence: Synthetic oligonucleotide
  Sense strand starting at position 2522 of SEQ ID NO: 1882738
agggaaauugcauguaagu

SEQ ID NO: 2143927 - RNA, 19 nt, Artificial Sequence
  Description of Artificial Sequence: Synthetic oligonucleotide
  Antisense strand to SEQ ID NO: 2143926
acuuacaugcaauuucccu

SEQ ID NO: 2143928 - RNA, 19 nt, Artificial Sequence
  Description of Artificial Sequence: Synthetic oligonucleotide
  Sense strand starting at position 2524 of SEQ ID NO: 1882738
ggaaauugcauguaaguga

SEQ ID NO: 2143929 - RNA, 19 nt, Artificial Sequence
  Description of Artificial Sequence: Synthetic oligonucleotide
  Antisense strand to SEQ ID NO: 2143928
ucacuuacaugcaauuucc

SEQ ID NO: 2143930 - RNA, 19 nt, Artificial Sequence
  Description of Artificial Sequence: Synthetic oligonucleotide
  Sense strand starting at position 2556 of SEQ ID NO: 1882738
guaauauugaaaugggcau

SEQ ID NO: 2143931 - RNA, 19 nt, Artificial Sequence
  Description of Artificial Sequence: Synthetic oligonucleotide
  Antisense strand to SEQ ID NO: 2143930
augcccauuucaauauuac

SEQ ID NO: 2143932 - RNA, 19 nt, Artificial Sequence
  Description of Artificial Sequence: Synthetic oligonucleotide
  Sense strand starting at position 2642 of SEQ ID NO: 1882738
gucuuucuguauuugauua

SEQ ID NO: 2143933 - RNA, 19 nt, Artificial Sequence
  Description of Artificial Sequence: Synthetic oligonucleotide
  Antisense strand to SEQ ID NO: 2143932
uaaucaaauacagaaagac

SEQ ID NO: 2143934 - RNA, 19 nt, Artificial Sequence
  Description of Artificial Sequence: Synthetic oligonucleotide
  Sense strand starting at position 2729 of SEQ ID NO: 1882738
uuuaguagcguguucuuau

SEQ ID NO: 2143935 - RNA, 19 nt, Artificial Sequence
  Description of Artificial Sequence: Synthetic oligonucleotide
  Antisense strand to SEQ ID NO: 2143934
auaagaacacgcuacuaaa

SEQ ID NO: 2143936 - RNA, 19 nt, Artificial Sequence
  Description of Artificial Sequence: Synthetic oligonucleotide
  Sense strand starting at position 2769 of SEQ ID NO: 1882738
uucuguagugguuguauuu

SEQ ID NO: 2143937 - RNA, 19 nt, Artificial Sequence
  Description of Artificial Sequence: Synthetic oligonucleotide
  Antisense strand to SEQ ID NO: 2143936
aaauacaaccacuacagaa

SEQ ID NO: 2143938 - RNA, 19 nt, Artificial Sequence
  Description of Artificial Sequence: Synthetic oligonucleotide
  Sense strand starting at position 3111 of SEQ ID NO: 1882738
ucacuugaaucccugggaa

SEQ ID NO: 2143939 - RNA, 19 nt, Artificial Sequence
  Description of Artificial Sequence: Synthetic oligonucleotide
  Antisense strand to SEQ ID NO: 2143938
uucccagggauucaaguga

SEQ ID NO: 2143940 - RNA, 19 nt, Artificial Sequence
  Description of Artificial Sequence: Synthetic oligonucleotide
  Sense strand starting at position 3113 of SEQ ID NO: 1882738
acuugaaucccugggaagu

SEQ ID NO: 2143941 - RNA, 19 nt, Artificial Sequence
  Description of Artificial Sequence: Synthetic oligonucleotide
  Antisense strand to SEQ ID NO: 2143940
acuucccagggauucaagu

SEQ ID NO: 2143942 - RNA, 19 nt, Artificial Sequence
  Description of Artificial Sequence: Synthetic oligonucleotide
  Sense strand starting at position 3114 of SEQ ID NO: 1882738
cuugaaucccugggaagua

SEQ ID NO: 2143943 - RNA, 19 nt, Artificial Sequence
  Description of Artificial Sequence: Synthetic oligonucleotide
  Antisense strand to SEQ ID NO: 2143942
uacuucccagggauucaag

SEQ ID NO: 2143944 - RNA, 19 nt, Artificial Sequence
  Description of Artificial Sequence: Synthetic oligonucleotide
  Sense strand starting at position 3374 of SEQ ID NO: 1882738
ggauaauuggcuuagucug

SEQ ID NO: 2143945 - RNA, 19 nt, Artificial Sequence
  Description of Artificial Sequence: Synthetic oligonucleotide
  Antisense strand to SEQ ID NO: 2143944
cagacuaagccaauuaucc

SEQ ID NO: 2143946 - RNA, 19 nt, Artificial Sequence
  Description of Artificial Sequence: Synthetic oligonucleotide
  Sense strand starting at position 3553 of SEQ ID NO: 1882738
augcuauuggcauggaaag

SEQ ID NO: 2143947 - RNA, 19 nt, Artificial Sequence
  Description of Artificial Sequence: Synthetic oligonucleotide
  Antisense strand to SEQ ID NO: 2143946
cuuuccaugccaauagcau

SEQ ID NO: 2143948 - RNA, 19 nt, Artificial Sequence
  Description of Artificial Sequence: Synthetic oligonucleotide
  Sense strand starting at position 3554 of SEQ ID NO: 1882738
ugcuauuggcauggaaaga

SEQ ID NO: 2143949 - RNA, 19 nt, Artificial Sequence
  Description of Artificial Sequence: Synthetic oligonucleotide
  Antisense strand to SEQ ID NO: 2143948
ucuuuccaugccaauagca

SEQ ID NO: 2143950 - RNA, 19 nt, Artificial Sequence
  Description of Artificial Sequence: Synthetic oligonucleotide
  Sense strand starting at position 3833 of SEQ ID NO: 1882738
cuuugauaagggugggaca

SEQ ID NO: 2143951 - RNA, 19 nt, Artificial Sequence
  Description of Artificial Sequence: Synthetic oligonucleotide
  Antisense strand to SEQ ID NO: 2143950
ugucccacccuuaucaaag

SEQ ID NO: 2143952 - RNA, 19 nt, Artificial Sequence
  Description of Artificial Sequence: Synthetic oligonucleotide
  Sense strand starting at position 31 of SEQ ID NO: 1882739
auugcauuuccaugucauu

SEQ ID NO: 2143953 - RNA, 19 nt, Artificial Sequence
  Description of Artificial Sequence: Synthetic oligonucleotide
  Antisense strand to SEQ ID NO: 2143952
aaugacauggaaaugcaau

SEQ ID NO: 2143954 - RNA, 19 nt, Artificial Sequence
  Description of Artificial Sequence: Synthetic oligonucleotide
  Sense strand starting at position 55 of SEQ ID NO: 1882739
uggugugugccugccagau

SEQ ID NO: 2143955 - RNA, 19 nt, Artificial Sequence
  Description of Artificial Sequence: Synthetic oligonucleotide
  Antisense strand to SEQ ID NO: 2143954
aucuggcaggcacacacca

SEQ ID NO: 2143956 - RNA, 19 nt, Artificial Sequence
  Description of Artificial Sequence: Synthetic oligonucleotide
  Sense strand starting at position 263 of SEQ ID NO: 1882739
ccucauugggcccaugaaa

SEQ ID NO: 2143957 - RNA, 19 nt, Artificial Sequence
  Description of Artificial Sequence: Synthetic oligonucleotide
  Antisense strand to SEQ ID NO: 2143956
uuucaugggcccaaugagg

SEQ ID NO: 2143958 - RNA, 19 nt, Artificial Sequence
  Description of Artificial Sequence: Synthetic oligonucleotide
  Sense strand starting at position 364 of SEQ ID NO: 1882739
ccuugugagcugcaagaca

SEQ ID NO: 2143959 - RNA, 19 nt, Artificial Sequence
  Description of Artificial Sequence: Synthetic oligonucleotide
  Antisense strand to SEQ ID NO: 2143958
ugucuugcagcucacaagg

SEQ ID NO: 2143960 - RNA, 19 nt, Artificial Sequence
  Description of Artificial Sequence: Synthetic oligonucleotide
  Sense strand starting at position 649 of SEQ ID NO: 1882739
auguacuguugggucauaa

SEQ ID NO: 2143961 - RNA, 19 nt, Artificial Sequence
  Description of Artificial Sequence: Synthetic oligonucleotide
  Antisense strand to SEQ ID NO: 2143960
uuaugacccaacaguacau

SEQ ID NO: 2143962 - RNA, 19 nt, Artificial Sequence
  Description of Artificial Sequence: Synthetic oligonucleotide
  Sense strand starting at position 670 of SEQ ID NO: 1882739
ugcugauaauguguaauau

SEQ ID NO: 2143963 - RNA, 19 nt, Artificial Sequence
  Description of Artificial Sequence: Synthetic oligonucleotide
  Antisense strand to SEQ ID NO: 2143962
auauuacacauuaucagca

SEQ ID NO: 2143964 - RNA, 19 nt, Artificial Sequence
  Description of Artificial Sequence: Synthetic oligonucleotide
  Sense strand starting at position 671 of SEQ ID NO: 1882739
gcugauaauguguaauauu

SEQ ID NO: 2143965 - RNA, 19 nt, Artificial Sequence
  Description of Artificial Sequence: Synthetic oligonucleotide
  Antisense strand to SEQ ID NO: 2143964
aauauuacacauuaucagc

SEQ ID NO: 2143966 - RNA, 19 nt, Artificial Sequence
  Description of Artificial Sequence: Synthetic oligonucleotide
  Sense strand starting at position 775 of SEQ ID NO: 1882739
gaaaguaauugauucucag

SEQ ID NO: 2143967 - RNA, 19 nt, Artificial Sequence
  Description of Artificial Sequence: Synthetic oligonucleotide
  Antisense strand to SEQ ID NO: 2143966
cugagaaucaauuacuuuc

SEQ ID NO: 2143968 - RNA, 19 nt, Artificial Sequence
  Description of Artificial Sequence: Synthetic oligonucleotide
  Sense strand starting at position 778 of SEQ ID NO: 1882739
aguaauugauucucagcaa

SEQ ID NO: 2143969 - RNA, 19 nt, Artificial Sequence
  Description of Artificial Sequence: Synthetic oligonucleotide
  Antisense strand to SEQ ID NO: 2143968
uugcugagaaucaauuacu

SEQ ID NO: 2143970 - RNA, 19 nt, Artificial Sequence
  Description of Artificial Sequence: Synthetic oligonucleotide
  Sense strand starting at position 835 of SEQ ID NO: 1882739
gugguuaccuggucaacau

SEQ ID NO: 2143971 - RNA, 19 nt, Artificial Sequence
  Description of Artificial Sequence: Synthetic oligonucleotide
  Antisense strand to SEQ ID NO: 2143970
auguugaccagguaaccac

SEQ ID NO: 2143972 - RNA, 19 nt, Artificial Sequence
  Description of Artificial Sequence: Synthetic oligonucleotide
  Sense strand starting at position 836 of SEQ ID NO: 1882739
ugguuaccuggucaacauu

SEQ ID NO: 2143973 - RNA, 19 nt, Artificial Sequence
  Description of Artificial Sequence: Synthetic oligonucleotide
  Antisense strand to SEQ ID NO: 2143972
aauguugaccagguaacca

SEQ ID NO: 2143974 - RNA, 19 nt, Artificial Sequence
  Description of Artificial Sequence: Synthetic oligonucleotide
  Sense strand starting at position 845 of SEQ ID NO: 1882739
ggucaacauuaugcuuuaa

SEQ ID NO: 2143975 - RNA, 19 nt, Artificial Sequence
  Description of Artificial Sequence: Synthetic oligonucleotide
  Antisense strand to SEQ ID NO: 2143974
uuaaagcauaauguugacc

SEQ ID NO: 2143976 - RNA, 19 nt, Artificial Sequence
  Description of Artificial Sequence: Synthetic oligonucleotide
  Sense strand starting at position 857 of SEQ ID NO: 1882739
gcuuuaaaugcucacagga

SEQ ID NO: 2143977 - RNA, 19 nt, Artificial Sequence
  Description of Artificial Sequence: Synthetic oligonucleotide
  Antisense strand to SEQ ID NO: 2143976
uccugugagcauuuaaagc

SEQ ID NO: 2143978 - RNA, 19 nt, Artificial Sequence
  Description of Artificial Sequence: Synthetic oligonucleotide
  Sense strand starting at position 976 of SEQ ID NO: 1882739
aaacgaggauggguuaauu

SEQ ID NO: 2143979 - RNA, 19 nt, Artificial Sequence
  Description of Artificial Sequence: Synthetic oligonucleotide
  Antisense strand to SEQ ID NO: 2143978
aauuaacccauccucguuu

SEQ ID NO: 2143980 - RNA, 19 nt, Artificial Sequence
  Description of Artificial Sequence: Synthetic oligonucleotide
  Sense strand starting at position 1221 of SEQ ID NO: 1882739
aguacaaaccuccggagaa

SEQ ID NO: 2143981 - RNA, 19 nt, Artificial Sequence
  Description of Artificial Sequence: Synthetic oligonucleotide
  Antisense strand to SEQ ID NO: 2143980
uucuccggagguuuguacu

SEQ ID NO: 2143982 - RNA, 19 nt, Artificial Sequence
  Description of Artificial Sequence: Synthetic oligonucleotide
  Sense strand starting at position 1363 of SEQ ID NO: 1882739
caggguaacucccugaguu

SEQ ID NO: 2143983 - RNA, 19 nt, Artificial Sequence
  Description of Artificial Sequence: Synthetic oligonucleotide
  Antisense strand to SEQ ID NO: 2143982
aacucagggaguuacccug

SEQ ID NO: 2143984 - RNA, 19 nt, Artificial Sequence
  Description of Artificial Sequence: Synthetic oligonucleotide
  Sense strand starting at position 1364 of SEQ ID NO: 1882739
aggguaacucccugaguuc

SEQ ID NO: 2143985 - RNA, 19 nt, Artificial Sequence
  Description of Artificial Sequence: Synthetic oligonucleotide
  Antisense strand to SEQ ID NO: 2143984
gaacucagggaguuacccu

SEQ ID NO: 2143986 - RNA, 19 nt, Artificial Sequence
  Description of Artificial Sequence: Synthetic oligonucleotide
  Sense strand starting at position 1365 of SEQ ID NO: 1882739
ggguaacucccugaguucu

SEQ ID NO: 2143987 - RNA, 19 nt, Artificial Sequence
  Description of Artificial Sequence: Synthetic oligonucleotide
  Antisense strand to SEQ ID NO: 2143986
agaacucagggaguuaccc

SEQ ID NO: 2143988 - RNA, 19 nt, Artificial Sequence
  Description of Artificial Sequence: Synthetic oligonucleotide
  Sense strand starting at position 1389 of SEQ ID NO: 1882739
cagggagguagguguaauu

SEQ ID NO: 2143989 - RNA, 19 nt, Artificial Sequence
  Description of Artificial Sequence: Synthetic oligonucleotide
  Antisense strand to SEQ ID NO: 2143988
aauuacaccuaccucccug

SEQ ID NO: 2143990 - RNA, 19 nt, Artificial Sequence
  Description of Artificial Sequence: Synthetic oligonucleotide
  Sense strand starting at position 1398 of SEQ ID NO: 1882739
agguguaauuaaucgaugu

SEQ ID NO: 2143991 - RNA, 19 nt, Artificial Sequence
  Description of Artificial Sequence: Synthetic oligonucleotide
  Antisense strand to SEQ ID NO: 2143990
acaucgauuaauuacaccu

SEQ ID NO: 2143992 - RNA, 19 nt, Artificial Sequence
  Description of Artificial Sequence: Synthetic oligonucleotide
  Sense strand starting at position 1419 of SEQ ID NO: 1882739
guguauuaagaacgucaua

SEQ ID NO: 2143993 - RNA, 19 nt, Artificial Sequence
  Description of Artificial Sequence: Synthetic oligonucleotide
  Antisense strand to SEQ ID NO: 2143992
uaugacguucuuaauacac

SEQ ID NO: 2143994 - RNA, 19 nt, Artificial Sequence
  Description of Artificial Sequence: Synthetic oligonucleotide
  Sense strand starting at position 1493 of SEQ ID NO: 1882739
ggccuagcgagauaaaguu

SEQ ID NO: 2143995 - RNA, 19 nt, Artificial Sequence
  Description of Artificial Sequence: Synthetic oligonucleotide
  Antisense strand to SEQ ID NO: 2143994
aacuuuaucucgcuaggcc

SEQ ID NO: 2143996 - RNA, 19 nt, Artificial Sequence
  Description of Artificial Sequence: Synthetic oligonucleotide
  Sense strand starting at position 3278 of SEQ ID NO: 1882739
ggcugucuaauccagagaa

SEQ ID NO: 2143997 - RNA, 19 nt, Artificial Sequence
  Description of Artificial Sequence: Synthetic oligonucleotide
  Antisense strand to SEQ ID NO: 2143996
uucucuggauuagacagcc

SEQ ID NO: 2143998 - RNA, 19 nt, Artificial Sequence
  Description of Artificial Sequence: Synthetic oligonucleotide
  Sense strand starting at position 3334 of SEQ ID NO: 1882739
uggauucagccauguggau

SEQ ID NO: 2143999 - RNA, 19 nt, Artificial Sequence
  Description of Artificial Sequence: Synthetic oligonucleotide
  Antisense strand to SEQ ID NO: 2143998
auccacauggcugaaucca

SEQ ID NO: 2144000 - RNA, 19 nt, Artificial Sequence
  Description of Artificial Sequence: Synthetic oligonucleotide
  Sense strand starting at position 3387 of SEQ ID NO: 1882739
ucacgacugcuguguauuu

SEQ ID NO: 2144001 - RNA, 19 nt, Artificial Sequence
  Description of Artificial Sequence: Synthetic oligonucleotide
  Antisense strand to SEQ ID NO: 2144000
aaauacacagcagucguga

SEQ ID NO: 2144002 - RNA, 19 nt, Artificial Sequence
  Description of Artificial Sequence: Synthetic oligonucleotide
  Sense strand starting at position 3388 of SEQ ID NO: 1882739
cacgacugcuguguauuua

SEQ ID NO: 2144003 - RNA, 19 nt, Artificial Sequence
  Description of Artificial Sequence: Synthetic oligonucleotide
  Antisense strand to SEQ ID NO: 2144002
uaaauacacagcagucgug

SEQ ID NO: 2144004 - RNA, 19 nt, Artificial Sequence
  Description of Artificial Sequence: Synthetic oligonucleotide
  Sense strand starting at position 3389 of SEQ ID NO: 1882739
acgacugcuguguauuuau

SEQ ID NO: 2144005 - RNA, 19 nt, Artificial Sequence
  Description of Artificial Sequence: Synthetic oligonucleotide
  Antisense strand to SEQ ID NO: 2144004
auaaauacacagcagucgu

SEQ ID NO: 2144006 - RNA, 19 nt, Artificial Sequence
  Description of Artificial Sequence: Synthetic oligonucleotide
  Sense strand starting at position 3490 of SEQ ID NO: 1882739
uugaaugccuguuuagaau

SEQ ID NO: 2144007 - RNA, 19 nt, Artificial Sequence
  Description of Artificial Sequence: Synthetic oligonucleotide
  Antisense strand to SEQ ID NO: 2144006
auucuaaacaggcauucaa

SEQ ID NO: 2144008 - RNA, 19 nt, Artificial Sequence
  Description of Artificial Sequence: Synthetic oligonucleotide
  Sense strand starting at position 3499 of SEQ ID NO: 1882739
uguuuagaaugugauuuga

SEQ ID NO: 2144009 - RNA, 19 nt, Artificial Sequence
  Description of Artificial Sequence: Synthetic oligonucleotide
  Antisense strand to SEQ ID NO: 2144008
ucaaaucacauucuaaaca

SEQ ID NO: 2144010 - RNA, 19 nt, Artificial Sequence
  Description of Artificial Sequence: Synthetic oligonucleotide
  Sense strand starting at position 3578 of SEQ ID NO: 1882739
aaugcuguugaguaauugu

SEQ ID NO: 2144011 - RNA, 19 nt, Artificial Sequence
  Description of Artificial Sequence: Synthetic oligonucleotide
  Antisense strand to SEQ ID NO: 2144010
acaauuacucaacagcauu

SEQ ID NO: 2144012 - RNA, 19 nt, Artificial Sequence
  Description of Artificial Sequence: Synthetic oligonucleotide
  Sense strand starting at position 3585 of SEQ ID NO: 1882739
uugaguaauuguccagguu

SEQ ID NO: 2144013 - RNA, 19 nt, Artificial Sequence
  Description of Artificial Sequence: Synthetic oligonucleotide
  Antisense strand to SEQ ID NO: 2144012
aaccuggacaauuacucaa

SEQ ID NO: 2144014 - RNA, 19 nt, Artificial Sequence
  Description of Artificial Sequence: Synthetic oligonucleotide
  Sense strand starting at position 3586 of SEQ ID NO: 1882739
ugaguaauuguccagguuu

SEQ ID NO: 2144015 - RNA, 19 nt, Artificial Sequence
  Description of Artificial Sequence: Synthetic oligonucleotide
  Antisense strand to SEQ ID NO: 2144014
aaaccuggacaauuacuca

SEQ ID NO: 2144016 - RNA, 19 nt, Artificial Sequence
  Description of Artificial Sequence: Synthetic oligonucleotide
  Sense strand starting at position 3656 of SEQ ID NO: 1882739
cugcuaaagguaugacaga

SEQ ID NO: 2144017 - RNA, 19 nt, Artificial Sequence
  Description of Artificial Sequence: Synthetic oligonucleotide
  Antisense strand to SEQ ID NO: 2144016
ucugucauaccuuuagcag

SEQ ID NO: 2144018 - RNA, 19 nt, Artificial Sequence
  Description of Artificial Sequence: Synthetic oligonucleotide
  Sense strand starting at position 3672 of SEQ ID NO: 1882739
agaagagcugggcaaguuu

SEQ ID NO: 2144019 - RNA, 19 nt, Artificial Sequence
  Description of Artificial Sequence: Synthetic oligonucleotide
  Antisense strand to SEQ ID NO: 2144018
aaacuugcccagcucuucu

SEQ ID NO: 2144020 - RNA, 19 nt, Artificial Sequence
  Description of Artificial Sequence: Synthetic oligonucleotide
  Sense strand starting at position 3758 of SEQ ID NO: 1882739
aacugaaagugcuugaaag

SEQ ID NO: 2144021 - RNA, 19 nt, Artificial Sequence
  Description of Artificial Sequence: Synthetic oligonucleotide
  Antisense strand to SEQ ID NO: 2144020
cuuucaagcacuuucaguu

SEQ ID NO: 2144022 - RNA, 19 nt, Artificial Sequence
  Description of Artificial Sequence: Synthetic oligonucleotide
  Sense strand starting at position 3759 of SEQ ID NO: 1882739
acugaaagugcuugaaagu

SEQ ID NO: 2144023 - RNA, 19 nt, Artificial Sequence
  Description of Artificial Sequence: Synthetic oligonucleotide
  Antisense strand to SEQ ID NO: 2144022
acuuucaagcacuuucagu

SEQ ID NO: 2144024 - RNA, 19 nt, Artificial Sequence
  Description of Artificial Sequence: Synthetic oligonucleotide
  Sense strand starting at position 3760 of SEQ ID NO: 1882739
cugaaagugcuugaaagua

SEQ ID NO: 2144025 - RNA, 19 nt, Artificial Sequence
  Description of Artificial Sequence: Synthetic oligonucleotide
  Antisense strand to SEQ ID NO: 2144024
uacuuucaagcacuuucag

SEQ ID NO: 2144026 - RNA, 19 nt, Artificial Sequence
  Description of Artificial Sequence: Synthetic oligonucleotide
  Sense strand starting at position 3836 of SEQ ID NO: 1882739
gaaguucugguagaaaugu

SEQ ID NO: 2144027 - RNA, 19 nt, Artificial Sequence
  Description of Artificial Sequence: Synthetic oligonucleotide
  Antisense strand to SEQ ID NO: 2144026
acauuucuaccagaacuuc

SEQ ID NO: 2144028 - RNA, 19 nt, Artificial Sequence
  Description of Artificial Sequence: Synthetic oligonucleotide
  Sense strand starting at position 3845 of SEQ ID NO: 1882739
guagaaauguuacuaguuc

SEQ ID NO: 2144029 - RNA, 19 nt, Artificial Sequence
  Description of Artificial Sequence: Synthetic oligonucleotide
  Antisense strand to SEQ ID NO: 2144028
gaacuaguaacauuucuac

SEQ ID NO: 2144030 - RNA, 19 nt, Artificial Sequence
  Description of Artificial Sequence: Synthetic oligonucleotide
  Sense strand starting at position 3967 of SEQ ID NO: 1882739
cuuacagaaggcugucauu

SEQ ID NO: 2144031 - RNA, 19 nt, Artificial Sequence
  Description of Artificial Sequence: Synthetic oligonucleotide
  Antisense strand to SEQ ID NO: 2144030
aaugacagccuucuguaag

SEQ ID NO: 2144032 - RNA, 19 nt, Artificial Sequence
  Description of Artificial Sequence: Synthetic oligonucleotide
  Sense strand starting at position 2486 of SEQ ID NO: 1882740
gugcgauaucugcaaggac

SEQ ID NO: 2144033 - RNA, 19 nt, Artificial Sequence
  Description of Artificial Sequence: Synthetic oligonucleotide
  Antisense strand to SEQ ID NO: 2144032
guccuugcagauaucgcac

SEQ ID NO: 2144034 - RNA, 19 nt, Artificial Sequence
  Description of Artificial Sequence: Synthetic oligonucleotide
  Sense strand starting at position 3599 of SEQ ID NO: 1882740
aucaaagugugaggcuaau

SEQ ID NO: 2144035 - RNA, 19 nt, Artificial Sequence
  Description of Artificial Sequence: Synthetic oligonucleotide
  Antisense strand to SEQ ID NO: 2144034
auuagccucacacuuugau

SEQ ID NO: 2144036 - RNA, 19 nt, Artificial Sequence
  Description of Artificial Sequence: Synthetic oligonucleotide
  Sense strand starting at position 3735 of SEQ ID NO: 1882740
ugcggucaccuuuaguuga

SEQ ID NO: 2144037 - RNA, 19 nt, Artificial Sequence
  Description of Artificial Sequence: Synthetic oligonucleotide
  Antisense strand to SEQ ID NO: 2144036
ucaacuaaaggugaccgca

SEQ ID NO: 2144038 - RNA, 19 nt, Artificial Sequence
  Description of Artificial Sequence: Synthetic oligonucleotide
  Sense strand starting at position 3794 of SEQ ID NO: 1882740
agagcacgcucacgaguaa

SEQ ID NO: 2144039 - RNA, 19 nt, Artificial Sequence
  Description of Artificial Sequence: Synthetic oligonucleotide
  Antisense strand to SEQ ID NO: 2144038
uuacucgugagcgugcucu

SEQ ID NO: 2144040 - RNA, 19 nt, Artificial Sequence
  Description of Artificial Sequence: Synthetic oligonucleotide
  Sense strand starting at position 3795 of SEQ ID NO: 1882740
gagcacgcucacgaguaau

SEQ ID NO: 2144041 - RNA, 19 nt, Artificial Sequence
  Description of Artificial Sequence: Synthetic oligonucleotide
  Antisense strand to SEQ ID NO: 2144040
auuacucgugagcgugcuc

SEQ ID NO: 2144042 - RNA, 19 nt, Artificial Sequence
  Description of Artificial Sequence: Synthetic oligonucleotide
  Sense strand starting at position 3801 of SEQ ID NO: 1882740
gcucacgaguaauagcaga

SEQ ID NO: 2144043 - RNA, 19 nt, Artificial Sequence
  Description of Artificial Sequence: Synthetic oligonucleotide
  Antisense strand to SEQ ID NO: 2144042
ucugcuauuacucgugagc

SEQ ID NO: 2144044 - RNA, 19 nt, Artificial Sequence
  Description of Artificial Sequence: Synthetic oligonucleotide
  Sense strand starting at position 3816 of SEQ ID NO: 1882740
cagauauggugacugugau

SEQ ID NO: 2144045 - RNA, 19 nt, Artificial Sequence
  Description of Artificial Sequence: Synthetic oligonucleotide
  Antisense strand to SEQ ID NO: 2144044
aucacagucaccauaucug

SEQ ID NO: 2144046 - RNA, 19 nt, Artificial Sequence
  Description of Artificial Sequence: Synthetic oligonucleotide
  Sense strand starting at position 3817 of SEQ ID NO: 1882740
agauauggugacugugauu

SEQ ID NO: 2144047 - RNA, 19 nt, Artificial Sequence
  Description of Artificial Sequence: Synthetic oligonucleotide
  Antisense strand to SEQ ID NO: 2144046
aaucacagucaccauaucu

SEQ ID NO: 2144048 - RNA, 19 nt, Artificial Sequence
  Description of Artificial Sequence: Synthetic oligonucleotide
  Sense strand starting at position 3820 of SEQ ID NO: 1882740
uauggugacugugauugua

SEQ ID NO: 2144049 - RNA, 19 nt, Artificial Sequence
  Description of Artificial Sequence: Synthetic oligonucleotide
  Antisense strand to SEQ ID NO: 2144048
uacaaucacagucaccaua

SEQ ID NO: 2144050 - RNA, 19 nt, Artificial Sequence
  Description of Artificial Sequence: Synthetic oligonucleotide
  Sense strand starting at position 3823 of SEQ ID NO: 1882740
ggugacugugauuguagga

SEQ ID NO: 2144051 - RNA, 19 nt, Artificial Sequence
  Description of Artificial Sequence: Synthetic oligonucleotide
  Antisense strand to SEQ ID NO: 2144050
uccuacaaucacagucacc

SEQ ID NO: 2144052 - RNA, 19 nt, Artificial Sequence
  Description of Artificial Sequence: Synthetic oligonucleotide
  Sense strand starting at position 3828 of SEQ ID NO: 1882740
cugugauuguaggaagugu

SEQ ID NO: 2144053 - RNA, 19 nt, Artificial Sequence
  Description of Artificial Sequence: Synthetic oligonucleotide
  Antisense strand to SEQ ID NO: 2144052
acacuuccuacaaucacag

SEQ ID NO: 2144054 - RNA, 19 nt, Artificial Sequence
  Description of Artificial Sequence: Synthetic oligonucleotide
  Sense strand starting at position 3832 of SEQ ID NO: 1882740
gauuguaggaagugucuuu

SEQ ID NO: 2144055 - RNA, 19 nt, Artificial Sequence
  Description of Artificial Sequence: Synthetic oligonucleotide
  Antisense strand to SEQ ID NO: 2144054
aaagacacuuccuacaauc

SEQ ID NO: 2144056 - RNA, 19 nt, Artificial Sequence
  Description of Artificial Sequence: Synthetic oligonucleotide
  Sense strand starting at position 3931 of SEQ ID NO: 1882740
augucuuagucucccucua

SEQ ID NO: 2144057 - RNA, 19 nt, Artificial Sequence
  Description of Artificial Sequence: Synthetic oligonucleotide
  Antisense strand to SEQ ID NO: 2144056
uagagggagacuaagacau

SEQ ID NO: 2144058 - RNA, 19 nt, Artificial Sequence
  Description of Artificial Sequence: Synthetic oligonucleotide
  Sense strand starting at position 3933 of SEQ ID NO: 1882740
gucuuagucucccucuacu

SEQ ID NO: 2144059 - RNA, 19 nt, Artificial Sequence
  Description of Artificial Sequence: Synthetic oligonucleotide
  Antisense strand to SEQ ID NO: 2144058
aguagagggagacuaagac

SEQ ID NO: 2144060 - RNA, 19 nt, Artificial Sequence
  Description of Artificial Sequence: Synthetic oligonucleotide
  Sense strand starting at position 3969 of SEQ ID NO: 1882740
ccauguaaaucacaauguu

SEQ ID NO: 2144061 - RNA, 19 nt, Artificial Sequence
  Description of Artificial Sequence: Synthetic oligonucleotide
  Antisense strand to SEQ ID NO: 2144060
aacauugugauuuacaugg

SEQ ID NO: 2144062 - RNA, 19 nt, Artificial Sequence
  Description of Artificial Sequence: Synthetic oligonucleotide
  Sense strand starting at position 3972 of SEQ ID NO: 1882740
uguaaaucacaauguucuu

SEQ ID NO: 2144063 - RNA, 19 nt, Artificial Sequence
  Description of Artificial Sequence: Synthetic oligonucleotide
  Antisense strand to SEQ ID NO: 2144062
aagaacauugugauuuaca

SEQ ID NO: 2144064 - RNA, 19 nt, Artificial Sequence
  Description of Artificial Sequence: Synthetic oligonucleotide
  Sense strand starting at position 3978 of SEQ ID NO: 1882740
ucacaauguucuuugcagu

SEQ ID NO: 2144065 - RNA, 19 nt, Artificial Sequence
  Description of Artificial Sequence: Synthetic oligonucleotide
  Antisense strand to SEQ ID NO: 2144064
acugcaaagaacauuguga

SEQ ID NO: 2144066 - RNA, 19 nt, Artificial Sequence
  Description of Artificial Sequence: Synthetic oligonucleotide
  Sense strand starting at position 3981 of SEQ ID NO: 1882740
caauguucuuugcaguguu

SEQ ID NO: 2144067 - RNA, 19 nt, Artificial Sequence
  Description of Artificial Sequence: Synthetic oligonucleotide
  Antisense strand to SEQ ID NO: 2144066
aacacugcaaagaacauug

SEQ ID NO: 2144068 - RNA, 19 nt, Artificial Sequence
  Description of Artificial Sequence: Synthetic oligonucleotide
  Sense strand starting at position 36 of SEQ ID NO: 1882741
cagggauguggccaaauuc

SEQ ID NO: 2144069 - RNA, 19 nt, Artificial Sequence
  Description of Artificial Sequence: Synthetic oligonucleotide
  Antisense strand to SEQ ID NO: 2144068
gaauuuggccacaucccug

SEQ ID NO: 2144070 - RNA, 19 nt, Artificial Sequence
  Description of Artificial Sequence: Synthetic oligonucleotide
  Sense strand starting at position 421 of SEQ ID NO: 1882741
guggaaagagguugaaacu

SEQ ID NO: 2144071 - RNA, 19 nt, Artificial Sequence
  Description of Artificial Sequence: Synthetic oligonucleotide
  Antisense strand to SEQ ID NO: 2144070
aguuucaaccucuuuccac

SEQ ID NO: 2144072 - RNA, 19 nt, Artificial Sequence
  Description of Artificial Sequence: Synthetic oligonucleotide
  Sense strand starting at position 453 of SEQ ID NO: 1882741
uuggaagaugguugcagua

SEQ ID NO: 2144073 - RNA, 19 nt, Artificial Sequence
  Description of Artificial Sequence: Synthetic oligonucleotide
  Antisense strand to SEQ ID NO: 2144072
uacugcaaccaucuuccaa

SEQ ID NO: 2144074 - RNA, 19 nt, Artificial Sequence
  Description of Artificial Sequence: Synthetic oligonucleotide
  Sense strand starting at position 562 of SEQ ID NO: 1882741
aaggauaggugggauauuu

SEQ ID NO: 2144075 - RNA, 19 nt, Artificial Sequence
  Description of Artificial Sequence: Synthetic oligonucleotide
  Antisense strand to SEQ ID NO: 2144074
aaauaucccaccuauccuu

SEQ ID NO: 2144076 - RNA, 19 nt, Artificial Sequence
  Description of Artificial Sequence: Synthetic oligonucleotide
  Sense strand starting at position 653 of SEQ ID NO: 1882741
ccagacaaucccugagguu

SEQ ID NO: 2144077 - RNA, 19 nt, Artificial Sequence
  Description of Artificial Sequence: Synthetic oligonucleotide
  Antisense strand to SEQ ID NO: 2144076
aaccucagggauugucugg

SEQ ID NO: 2144078 - RNA, 19 nt, Artificial Sequence
  Description of Artificial Sequence: Synthetic oligonucleotide
  Sense strand starting at position 760 of SEQ ID NO: 1882741
uugaguuacucaccuucua

SEQ ID NO: 2144079 - RNA, 19 nt, Artificial Sequence
  Description of Artificial Sequence: Synthetic oligonucleotide
  Antisense strand to SEQ ID NO: 2144078
uagaaggugaguaacucaa

SEQ ID NO: 2144080 - RNA, 19 nt, Artificial Sequence
  Description of Artificial Sequence: Synthetic oligonucleotide
  Sense strand starting at position 789 of SEQ ID NO: 1882741
uuuccaccucugugaaaug

SEQ ID NO: 2144081 - RNA, 19 nt, Artificial Sequence
  Description of Artificial Sequence: Synthetic oligonucleotide
  Antisense strand to SEQ ID NO: 2144080
cauuucacagagguggaaa

SEQ ID NO: 2144082 - RNA, 19 nt, Artificial Sequence
  Description of Artificial Sequence: Synthetic oligonucleotide
  Sense strand starting at position 822 of SEQ ID NO: 1882741
gccucaaagggucauuaag

SEQ ID NO: 2144083 - RNA, 19 nt, Artificial Sequence
  Description of Artificial Sequence: Synthetic oligonucleotide
  Antisense strand to SEQ ID NO: 2144082
cuuaaugacccuuugaggc

SEQ ID NO: 2144084 - RNA, 19 nt, Artificial Sequence
  Description of Artificial Sequence: Synthetic oligonucleotide
  Sense strand starting at position 920 of SEQ ID NO: 1882741
aggcuuugaaggugaguga

SEQ ID NO: 2144085 - RNA, 19 nt, Artificial Sequence
  Description of Artificial Sequence: Synthetic oligonucleotide
  Antisense strand to SEQ ID NO: 2144084
ucacucaccuucaaagccu

SEQ ID NO: 2144086 - RNA, 19 nt, Artificial Sequence
  Description of Artificial Sequence: Synthetic oligonucleotide
  Sense strand starting at position 931 of SEQ ID NO: 1882741
gugagugagggaugauaac

SEQ ID NO: 2144087 - RNA, 19 nt, Artificial Sequence
  Description of Artificial Sequence: Synthetic oligonucleotide
  Antisense strand to SEQ ID NO: 2144086
guuaucaucccucacucac

SEQ ID NO: 2144088 - RNA, 19 nt, Artificial Sequence
  Description of Artificial Sequence: Synthetic oligonucleotide
  Sense strand starting at position 960 of SEQ ID NO: 1882741
agaaguucaggcugggaga

SEQ ID NO: 2144089 - RNA, 19 nt, Artificial Sequence
  Description of Artificial Sequence: Synthetic oligonucleotide
  Antisense strand to SEQ ID NO: 2144088
ucucccagccugaacuucu

SEQ ID NO: 2144090 - RNA, 19 nt, Artificial Sequence
  Description of Artificial Sequence: Synthetic oligonucleotide
  Sense strand starting at position 1039 of SEQ ID NO: 1882741
uggaguaaccgucaggaca

SEQ ID NO: 2144091 - RNA, 19 nt, Artificial Sequence
  Description of Artificial Sequence: Synthetic oligonucleotide
  Antisense strand to SEQ ID NO: 2144090
uguccugacgguuacucca

SEQ ID NO: 2144092 - RNA, 19 nt, Artificial Sequence
  Description of Artificial Sequence: Synthetic oligonucleotide
  Sense strand starting at position 1186 of SEQ ID NO: 1882741
gguuuacaaccuugacagu

SEQ ID NO: 2144093 - RNA, 19 nt, Artificial Sequence
  Description of Artificial Sequence: Synthetic oligonucleotide
  Antisense strand to SEQ ID NO: 2144092
acugucaagguuguaaacc

SEQ ID NO: 2144094 - RNA, 19 nt, Artificial Sequence
  Description of Artificial Sequence: Synthetic oligonucleotide
  Sense strand starting at position 1187 of SEQ ID NO: 1882741
guuuacaaccuugacaguu

SEQ ID NO: 2144095 - RNA, 19 nt, Artificial Sequence
  Description of Artificial Sequence: Synthetic oligonucleotide
  Antisense strand to SEQ ID NO: 2144094
aacugucaagguuguaaac

SEQ ID NO: 2144096 - RNA, 19 nt, Artificial Sequence
  Description of Artificial Sequence: Synthetic oligonucleotide
  Sense strand starting at position 1279 of SEQ ID NO: 1882741
acuggauaaagucggcuua

SEQ ID NO: 2144097 - RNA, 19 nt, Artificial Sequence
  Description of Artificial Sequence: Synthetic oligonucleotide
  Antisense strand to SEQ ID NO: 2144096
uaagccgacuuuauccagu

SEQ ID NO: 2144098 - RNA, 19 nt, Artificial Sequence
  Description of Artificial Sequence: Synthetic oligonucleotide
  Sense strand starting at position 1280 of SEQ ID NO: 1882741
cuggauaaagucggcuuaa

SEQ ID NO: 2144099 - RNA, 19 nt, Artificial Sequence
  Description of Artificial Sequence: Synthetic oligonucleotide
  Antisense strand to SEQ ID NO: 2144098
uuaagccgacuuuauccag

SEQ ID NO: 2144100 - RNA, 19 nt, Artificial Sequence
  Description of Artificial Sequence: Synthetic oligonucleotide
  Sense strand starting at position 1281 of SEQ ID NO: 1882741
uggauaaagucggcuuaau

SEQ ID NO: 2144101 - RNA, 19 nt, Artificial Sequence
  Description of Artificial Sequence: Synthetic oligonucleotide
  Antisense strand to SEQ ID NO: 2144100
auuaagccgacuuuaucca

SEQ ID NO: 2144102 - RNA, 19 nt, Artificial Sequence
  Description of Artificial Sequence: Synthetic oligonucleotide
  Sense strand starting at position 1684 of SEQ ID NO: 1882741
ggauuucgcaccugagcaa

SEQ ID NO: 2144103 - RNA, 19 nt, Artificial Sequence
  Description of Artificial Sequence: Synthetic oligonucleotide
  Antisense strand to SEQ ID NO: 2144102
uugcucaggugcgaaaucc

SEQ ID NO: 2144104 - RNA, 19 nt, Artificial Sequence
  Description of Artificial Sequence: Synthetic oligonucleotide
  Sense strand starting at position 1789 of SEQ ID NO: 1882741
uugcauaaucauggucaaa

SEQ ID NO: 2144105 - RNA, 19 nt, Artificial Sequence
  Description of Artificial Sequence: Synthetic oligonucleotide
  Antisense strand to SEQ ID NO: 2144104
uuugaccaugauuaugcaa

SEQ ID NO: 2144106 - RNA, 19 nt, Artificial Sequence
  Description of Artificial Sequence: Synthetic oligonucleotide
  Sense strand starting at position 1791 of SEQ ID NO: 1882741
gcauaaucauggucaaaua

SEQ ID NO: 2144107 - RNA, 19 nt, Artificial Sequence
  Description of Artificial Sequence: Synthetic oligonucleotide
  Antisense strand to SEQ ID NO: 2144106
uauuugaccaugauuaugc

SEQ ID NO: 2144108 - RNA, 19 nt, Artificial Sequence
  Description of Artificial Sequence: Synthetic oligonucleotide
  Sense strand starting at position 1823 of SEQ ID NO: 1882741
aggauuugcuucuauagga

SEQ ID NO: 2144109 - RNA, 19 nt, Artificial Sequence
  Description of Artificial Sequence: Synthetic oligonucleotide
  Antisense strand to SEQ ID NO: 2144108
uccuauagaagcaaauccu

SEQ ID NO: 2144110 - RNA, 19 nt, Artificial Sequence
  Description of Artificial Sequence: Synthetic oligonucleotide
  Sense strand starting at position 2217 of SEQ ID NO: 1882741
aagaaugagacguggagua

SEQ ID NO: 2144111 - RNA, 19 nt, Artificial Sequence
  Description of Artificial Sequence: Synthetic oligonucleotide
  Antisense strand to SEQ ID NO: 2144110
uacuccacgucucauucuu

SEQ ID NO: 2144112 - RNA, 19 nt, Artificial Sequence
  Description of Artificial Sequence: Synthetic oligonucleotide
  Sense strand starting at position 2219 of SEQ ID NO: 1882741
gaaugagacguggaguacu

SEQ ID NO: 2144113 - RNA, 19 nt, Artificial Sequence
  Description of Artificial Sequence: Synthetic oligonucleotide
  Antisense strand to SEQ ID NO: 2144112
aguacuccacgucucauuc

SEQ ID NO: 2144114 - RNA, 19 nt, Artificial Sequence
  Description of Artificial Sequence: Synthetic oligonucleotide
  Sense strand starting at position 2845 of SEQ ID NO: 1882741
cccggaggucaguacauua

SEQ ID NO: 2144115 - RNA, 19 nt, Artificial Sequence
  Description of Artificial Sequence: Synthetic oligonucleotide
  Antisense strand to SEQ ID NO: 2144114
uaauguacugaccuccggg

SEQ ID NO: 2144116 - RNA, 19 nt, Artificial Sequence
  Description of Artificial Sequence: Synthetic oligonucleotide
  Sense strand starting at position 2870 of SEQ ID NO: 1882741
cagugaacugugggcauau

SEQ ID NO: 2144117 - RNA, 19 nt, Artificial Sequence
  Description of Artificial Sequence: Synthetic oligonucleotide
  Antisense strand to SEQ ID NO: 2144116
auaugcccacaguucacug

SEQ ID NO: 2144118 - RNA, 19 nt, Artificial Sequence
  Description of Artificial Sequence: Synthetic oligonucleotide
  Sense strand starting at position 2981 of SEQ ID NO: 1882741
ggagaagauuucuauccca

SEQ ID NO: 2144119 - RNA, 19 nt, Artificial Sequence
  Description of Artificial Sequence: Synthetic oligonucleotide
  Antisense strand to SEQ ID NO: 2144118
ugggauagaaaucuucucc

SEQ ID NO: 2144120 - RNA, 19 nt, Artificial Sequence
  Description of Artificial Sequence: Synthetic oligonucleotide
  Sense strand starting at position 3191 of SEQ ID NO: 1882741
agagaggugggacguuauu

SEQ ID NO: 2144121 - RNA, 19 nt, Artificial Sequence
  Description of Artificial Sequence: Synthetic oligonucleotide
  Antisense strand to SEQ ID NO: 2144120
aauaacgucccaccucucu

SEQ ID NO: 2144122 - RNA, 19 nt, Artificial Sequence
  Description of Artificial Sequence: Synthetic oligonucleotide
  Sense strand starting at position 3299 of SEQ ID NO: 1882741
acuugaauaugguuuguaa

SEQ ID NO: 2144123 - RNA, 19 nt, Artificial Sequence
  Description of Artificial Sequence: Synthetic oligonucleotide
  Antisense strand to SEQ ID NO: 2144122
uuacaaaccauauucaagu

SEQ ID NO: 2144124 - RNA, 19 nt, Artificial Sequence
  Description of Artificial Sequence: Synthetic oligonucleotide
  Sense strand starting at position 3301 of SEQ ID NO: 1882741
uugaauaugguuuguaauc

SEQ ID NO: 2144125 - RNA, 19 nt, Artificial Sequence
  Description of Artificial Sequence: Synthetic oligonucleotide
  Antisense strand to SEQ ID NO: 2144124
gauuacaaaccauauucaa

SEQ ID NO: 2144126 - RNA, 19 nt, Artificial Sequence
  Description of Artificial Sequence: Synthetic oligonucleotide
  Sense strand starting at position 3302 of SEQ ID NO: 1882741
ugaauaugguuuguaaucu

SEQ ID NO: 2144127 - RNA, 19 nt, Artificial Sequence
  Description of Artificial Sequence: Synthetic oligonucleotide
  Antisense strand to SEQ ID NO: 2144126
agauuacaaaccauauuca

SEQ ID NO: 2144128 - RNA, 19 nt, Artificial Sequence
  Description of Artificial Sequence: Synthetic oligonucleotide
  Sense strand starting at position 3311 of SEQ ID NO: 1882741
uuuguaaucuaggcaccaa

SEQ ID NO: 2144129 - RNA, 19 nt, Artificial Sequence
  Description of Artificial Sequence: Synthetic oligonucleotide
  Antisense strand to SEQ ID NO: 2144128
uuggugccuagauuacaaa

SEQ ID NO: 2144130 - RNA, 19 nt, Artificial Sequence
  Description of Artificial Sequence: Synthetic oligonucleotide
  Sense strand starting at position 3399 of SEQ ID NO: 1882741
ggcaaucccuaguuaaccu

SEQ ID NO: 2144131 - RNA, 19 nt, Artificial Sequence
  Description of Artificial Sequence: Synthetic oligonucleotide
  Antisense strand to SEQ ID NO: 2144130
agguuaacuagggauugcc

SEQ ID NO: 2144132 - RNA, 19 nt, Artificial Sequence
  Description of Artificial Sequence: Synthetic oligonucleotide
  Sense strand starting at position 3591 of SEQ ID NO: 1882741
gucauuaaguaucugaagu

SEQ ID NO: 2144133 - RNA, 19 nt, Artificial Sequence
  Description of Artificial Sequence: Synthetic oligonucleotide
  Antisense strand to SEQ ID NO: 2144132
acuucagauacuuaaugac

SEQ ID NO: 2144134 - RNA, 19 nt, Artificial Sequence
  Description of Artificial Sequence: Synthetic oligonucleotide
  Sense strand starting at position 3598 of SEQ ID NO: 1882741
aguaucugaaguuauugua

SEQ ID NO: 2144135 - RNA, 19 nt, Artificial Sequence
  Description of Artificial Sequence: Synthetic oligonucleotide
  Antisense strand to SEQ ID NO: 2144134
uacaauaacuucagauacu

SEQ ID NO: 2144136 - RNA, 19 nt, Artificial Sequence
  Description of Artificial Sequence: Synthetic oligonucleotide
  Sense strand starting at position 3709 of SEQ ID NO: 1882741
cauuaaagacauuguugga

SEQ ID NO: 2144137 - RNA, 19 nt, Artificial Sequence
  Description of Artificial Sequence: Synthetic oligonucleotide
  Antisense strand to SEQ ID NO: 2144136
uccaacaaugucuuuaaug

SEQ ID NO: 2144138 - RNA, 19 nt, Artificial Sequence
  Description of Artificial Sequence: Synthetic oligonucleotide
  Sense strand starting at position 3713 of SEQ ID NO: 1882741
aaagacauuguuggagcaa

SEQ ID NO: 2144139 - RNA, 19 nt, Artificial Sequence
  Description of Artificial Sequence: Synthetic oligonucleotide
  Antisense strand to SEQ ID NO: 2144138
uugcuccaacaaugucuuu

SEQ ID NO: 2144140 - RNA, 19 nt, Artificial Sequence
  Description of Artificial Sequence: Synthetic oligonucleotide
  Sense strand starting at position 3797 of SEQ ID NO: 1882741
auacauccguuucuaugau

SEQ ID NO: 2144141 - RNA, 19 nt, Artificial Sequence
  Description of Artificial Sequence: Synthetic oligonucleotide
  Antisense strand to SEQ ID NO: 2144140
aucauagaaacggauguau

SEQ ID NO: 2144142 - RNA, 19 nt, Artificial Sequence
  Description of Artificial Sequence: Synthetic oligonucleotide
  Sense strand starting at position 3821 of SEQ ID NO: 1882741
ugugcaauugguuagaauu

SEQ ID NO: 2144143 - RNA, 19 nt, Artificial Sequence
  Description of Artificial Sequence: Synthetic oligonucleotide
  Antisense strand to SEQ ID NO: 2144142
aauucuaaccaauugcaca

SEQ ID NO: 2144144 - RNA, 19 nt, Artificial Sequence
  Description of Artificial Sequence: Synthetic oligonucleotide
  Sense strand starting at position 3857 of SEQ ID NO: 1882741
agggaaacuugguuucagu

SEQ ID NO: 2144145 - RNA, 19 nt, Artificial Sequence
  Description of Artificial Sequence: Synthetic oligonucleotide
  Antisense strand to SEQ ID NO: 2144144
acugaaaccaaguuucccu

SEQ ID NO: 2144146 - RNA, 19 nt, Artificial Sequence
  Description of Artificial Sequence: Synthetic oligonucleotide
  Sense strand starting at position 3895 of SEQ ID NO: 1882741
augugcuaucuaugauaaa

SEQ ID NO: 2144147 - RNA, 19 nt, Artificial Sequence
  Description of Artificial Sequence: Synthetic oligonucleotide
  Antisense strand to SEQ ID NO: 2144146
uuuaucauagauagcacau

SEQ ID NO: 2144148 - RNA, 19 nt, Artificial Sequence
  Description of Artificial Sequence: Synthetic oligonucleotide
  Sense strand starting at position 83 of SEQ ID NO: 1882742
cgguaaauaagugauguua

SEQ ID NO: 2144149 - RNA, 19 nt, Artificial Sequence
  Description of Artificial Sequence: Synthetic oligonucleotide
  Antisense strand to SEQ ID NO: 2144148
uaacaucacuuauuuaccg

SEQ ID NO: 2144150 - RNA, 19 nt, Artificial Sequence
  Description of Artificial Sequence: Synthetic oligonucleotide
  Sense strand starting at position 113 of SEQ ID NO: 1882742
agcuaagaaaugugaguca

SEQ ID NO: 2144151 - RNA, 19 nt, Artificial Sequence
  Description of Artificial Sequence: Synthetic oligonucleotide
  Antisense strand to SEQ ID NO: 2144150
ugacucacauuucuuagcu

SEQ ID NO: 2144152 - RNA, 19 nt, Artificial Sequence
  Description of Artificial Sequence: Synthetic oligonucleotide
  Sense strand starting at position 116 of SEQ ID NO: 1882742
uaagaaaugugagucacuu

SEQ ID NO: 2144153 - RNA, 19 nt, Artificial Sequence
  Description of Artificial Sequence: Synthetic oligonucleotide
  Antisense strand to SEQ ID NO: 2144152
aagugacucacauuucuua

SEQ ID NO: 2144154 - RNA, 19 nt, Artificial Sequence
  Description of Artificial Sequence: Synthetic oligonucleotide
  Sense strand starting at position 227 of SEQ ID NO: 1882742
ggauuaaggcaaugcuuua

SEQ ID NO: 2144155 - RNA, 19 nt, Artificial Sequence
  Description of Artificial Sequence: Synthetic oligonucleotide
  Antisense strand to SEQ ID NO: 2144154
uaaagcauugccuuaaucc

SEQ ID NO: 2144156 - RNA, 19 nt, Artificial Sequence
  Description of Artificial Sequence: Synthetic oligonucleotide
  Sense strand starting at position 249 of SEQ ID NO: 1882742
ugcuaugauccacgaauga

SEQ ID NO: 2144157 - RNA, 19 nt, Artificial Sequence
  Description of Artificial Sequence: Synthetic oligonucleotide
  Antisense strand to SEQ ID NO: 2144156
ucauucguggaucauagca

SEQ ID NO: 2144158 - RNA, 19 nt, Artificial Sequence
  Description of Artificial Sequence: Synthetic oligonucleotide
  Sense strand starting at position 270 of SEQ ID NO: 1882742
acauauauucgagggagug

SEQ ID NO: 2144159 - RNA, 19 nt, Artificial Sequence
  Description of Artificial Sequence: Synthetic oligonucleotide
  Antisense strand to SEQ ID NO: 2144158
cacucccucgaauauaugu

SEQ ID NO: 2144160 - RNA, 19 nt, Artificial Sequence
  Description of Artificial Sequence: Synthetic oligonucleotide
  Sense strand starting at position 381 of SEQ ID NO: 1882742
auuugaagucugugguauu

SEQ ID NO: 2144161 - RNA, 19 nt, Artificial Sequence
  Description of Artificial Sequence: Synthetic oligonucleotide
  Antisense strand to SEQ ID NO: 2144160
aauaccacagacuucaaau

SEQ ID NO: 2144162 - RNA, 19 nt, Artificial Sequence
  Description of Artificial Sequence: Synthetic oligonucleotide
  Sense strand starting at position 391 of SEQ ID NO: 1882742
ugugguauuguagauacaa

SEQ ID NO: 2144163 - RNA, 19 nt, Artificial Sequence
  Description of Artificial Sequence: Synthetic oligonucleotide
  Antisense strand to SEQ ID NO: 2144162
uuguaucuacaauaccaca

SEQ ID NO: 2144164 - RNA, 19 nt, Artificial Sequence
  Description of Artificial Sequence: Synthetic oligonucleotide
  Sense strand starting at position 449 of SEQ ID NO: 1882742
acaugaaagucaguuacau

SEQ ID NO: 2144165 - RNA, 19 nt, Artificial Sequence
  Description of Artificial Sequence: Synthetic oligonucleotide
  Antisense strand to SEQ ID NO: 2144164
auguaacugacuuucaugu

SEQ ID NO: 2144166 - RNA, 19 nt, Artificial Sequence
  Description of Artificial Sequence: Synthetic oligonucleotide
  Sense strand starting at position 593 of SEQ ID NO: 1882742
agcagucagcguuugcuua

SEQ ID NO: 2144167 - RNA, 19 nt, Artificial Sequence
  Description of Artificial Sequence: Synthetic oligonucleotide
  Antisense strand to SEQ ID NO: 2144166
uaagcaaacgcugacugcu

SEQ ID NO: 2144168 - RNA, 19 nt, Artificial Sequence
  Description of Artificial Sequence: Synthetic oligonucleotide
  Sense strand starting at position 788 of SEQ ID NO: 1882742
cuacuuagauguguauuau

SEQ ID NO: 2144169 - RNA, 19 nt, Artificial Sequence
  Description of Artificial Sequence: Synthetic oligonucleotide
  Antisense strand to SEQ ID NO: 2144168
auaauacacaucuaaguag

SEQ ID NO: 2144170 - RNA, 19 nt, Artificial Sequence
  Description of Artificial Sequence: Synthetic oligonucleotide
  Sense strand starting at position 899 of SEQ ID NO: 1882742
ucaccuucgccagcguuaa

SEQ ID NO: 2144171 - RNA, 19 nt, Artificial Sequence
  Description of Artificial Sequence: Synthetic oligonucleotide
  Antisense strand to SEQ ID NO: 2144170
uuaacgcuggcgaagguga

SEQ ID NO: 2144172 - RNA, 19 nt, Artificial Sequence
  Description of Artificial Sequence: Synthetic oligonucleotide
  Sense strand starting at position 2216 of SEQ ID NO: 1882742
ugauaauuggguuguggaa

SEQ ID NO: 2144173 - RNA, 19 nt, Artificial Sequence
  Description of Artificial Sequence: Synthetic oligonucleotide
  Antisense strand to SEQ ID NO: 2144172
uuccacaacccaauuauca

SEQ ID NO: 2144174 - RNA, 19 nt, Artificial Sequence
  Description of Artificial Sequence: Synthetic oligonucleotide
  Sense strand starting at position 2256 of SEQ ID NO: 1882742
aguguaaggcuucauggga

SEQ ID NO: 2144175 - RNA, 19 nt, Artificial Sequence
  Description of Artificial Sequence: Synthetic oligonucleotide
  Antisense strand to SEQ ID NO: 2144174
ucccaugaagccuuacacu

SEQ ID NO: 2144176 - RNA, 19 nt, Artificial Sequence
  Description of Artificial Sequence: Synthetic oligonucleotide
  Sense strand starting at position 2345 of SEQ ID NO: 1882742
aggauauuacugcaaguua

SEQ ID NO: 2144177 - RNA, 19 nt, Artificial Sequence
  Description of Artificial Sequence: Synthetic oligonucleotide
  Antisense strand to SEQ ID NO: 2144176
uaacuugcaguaauauccu

SEQ ID NO: 2144178 - RNA, 19 nt, Artificial Sequence
  Description of Artificial Sequence: Synthetic oligonucleotide
  Sense strand starting at position 2367 of SEQ ID NO: 1882742
ucauguuacacggagcaca

SEQ ID NO: 2144179 - RNA, 19 nt, Artificial Sequence
  Description of Artificial Sequence: Synthetic oligonucleotide
  Antisense strand to SEQ ID NO: 2144178
ugugcuccguguaacauga

SEQ ID NO: 2144180 - RNA, 19 nt, Artificial Sequence
  Description of Artificial Sequence: Synthetic oligonucleotide
  Sense strand starting at position 2452 of SEQ ID NO: 1882742
augaaugucugccuaacua

SEQ ID NO: 2144181 - RNA, 19 nt, Artificial Sequence
  Description of Artificial Sequence: Synthetic oligonucleotide
  Antisense strand to SEQ ID NO: 2144180
uaguuaggcagacauucau

SEQ ID NO: 2144182 - RNA, 19 nt, Artificial Sequence
  Description of Artificial Sequence: Synthetic oligonucleotide
  Sense strand starting at position 2494 of SEQ ID NO: 1882742
acugaaaucaguugucagu

SEQ ID NO: 2144183 - RNA, 19 nt, Artificial Sequence
  Description of Artificial Sequence: Synthetic oligonucleotide
  Antisense strand to SEQ ID NO: 2144182
acugacaacugauuucagu

SEQ ID NO: 2144184 - RNA, 19 nt, Artificial Sequence
  Description of Artificial Sequence: Synthetic oligonucleotide
  Sense strand starting at position 2607 of SEQ ID NO: 1882742
uucuuucuacuguauagua

SEQ ID NO: 2144185 - RNA, 19 nt, Artificial Sequence
  Description of Artificial Sequence: Synthetic oligonucleotide
  Antisense strand to SEQ ID NO: 2144184
uacuauacaguagaaagaa

SEQ ID NO: 2144186 - RNA, 19 nt, Artificial Sequence
  Description of Artificial Sequence: Synthetic oligonucleotide
  Sense strand starting at position 2609 of SEQ ID NO: 1882742
cuuucuacuguauaguaau

SEQ ID NO: 2144187 - RNA, 19 nt, Artificial Sequence
  Description of Artificial Sequence: Synthetic oligonucleotide
  Antisense strand to SEQ ID NO: 2144186
auuacuauacaguagaaag

SEQ ID NO: 2144188 - RNA, 19 nt, Artificial Sequence
  Description of Artificial Sequence: Synthetic oligonucleotide
  Sense strand starting at position 2630 of SEQ ID NO: 1882742
acaggauuauuugaaauug

SEQ ID NO: 2144189 - RNA, 19 nt, Artificial Sequence
  Description of Artificial Sequence: Synthetic oligonucleotide
  Antisense strand to SEQ ID NO: 2144188
caauuucaaauaauccugu

SEQ ID NO: 2144190 - RNA, 19 nt, Artificial Sequence
  Description of Artificial Sequence: Synthetic oligonucleotide
  Sense strand starting at position 3182 of SEQ ID NO: 1882742
agaguaagauacuuauguc

SEQ ID NO: 2144191 - RNA, 19 nt, Artificial Sequence
  Description of Artificial Sequence: Synthetic oligonucleotide
  Antisense strand to SEQ ID NO: 2144190
gacauaaguaucuuacucu

SEQ ID NO: 2144192 - RNA, 19 nt, Artificial Sequence
  Description of Artificial Sequence: Synthetic oligonucleotide
  Sense strand starting at position 3188 of SEQ ID NO: 1882742
agauacuuaugucucugua

SEQ ID NO: 2144193 - RNA, 19 nt, Artificial Sequence
  Description of Artificial Sequence: Synthetic oligonucleotide
  Antisense strand to SEQ ID NO: 2144192
uacagagacauaaguaucu

SEQ ID NO: 2144194 - RNA, 19 nt, Artificial Sequence
  Description of Artificial Sequence: Synthetic oligonucleotide
  Sense strand starting at position 3221 of SEQ ID NO: 1882742
ucuauuaaucuagagguuc

SEQ ID NO: 2144195 - RNA, 19 nt, Artificial Sequence
  Description of Artificial Sequence: Synthetic oligonucleotide
  Antisense strand to SEQ ID NO: 2144194
gaaccucuagauuaauaga

SEQ ID NO: 2144196 - RNA, 19 nt, Artificial Sequence
  Description of Artificial Sequence: Synthetic oligonucleotide
  Sense strand starting at position 3279 of SEQ ID NO: 1882742
ucaggugaacccuggcaau

SEQ ID NO: 2144197 - RNA, 19 nt, Artificial Sequence
  Description of Artificial Sequence: Synthetic oligonucleotide
  Antisense strand to SEQ ID NO: 2144196
auugccaggguucaccuga

SEQ ID NO: 2144198 - RNA, 19 nt, Artificial Sequence
  Description of Artificial Sequence: Synthetic oligonucleotide
  Sense strand starting at position 3420 of SEQ ID NO: 1882742
guagaaaucugucuucuaa

SEQ ID NO: 2144199 - RNA, 19 nt, Artificial Sequence
  Description of Artificial Sequence: Synthetic oligonucleotide
  Antisense strand to SEQ ID NO: 2144198
uuagaagacagauuucuac

SEQ ID NO: 2144200 - RNA, 19 nt, Artificial Sequence
  Description of Artificial Sequence: Synthetic oligonucleotide
  Sense strand starting at position 3438 of SEQ ID NO: 1882742
acucuaaggccuugggaga

SEQ ID NO: 2144201 - RNA, 19 nt, Artificial Sequence
  Description of Artificial Sequence: Synthetic oligonucleotide
  Antisense strand to SEQ ID NO: 2144200
ucucccaaggccuuagagu

SEQ ID NO: 2144202 - RNA, 19 nt, Artificial Sequence
  Description of Artificial Sequence: Synthetic oligonucleotide
  Sense strand starting at position 3439 of SEQ ID NO: 1882742
cucuaaggccuugggagau

SEQ ID NO: 2144203 - RNA, 19 nt, Artificial Sequence
  Description of Artificial Sequence: Synthetic oligonucleotide
  Antisense strand to SEQ ID NO: 2144202
aucucccaaggccuuagag

SEQ ID NO: 2144204 - RNA, 19 nt, Artificial Sequence
  Description of Artificial Sequence: Synthetic oligonucleotide
  Sense strand starting at position 3454 of SEQ ID NO: 1882742
agaugaaggauccgugauu

SEQ ID NO: 2144205 - RNA, 19 nt, Artificial Sequence
  Description of Artificial Sequence: Synthetic oligonucleotide
  Antisense strand to SEQ ID NO: 2144204
aaucacggauccuucaucu

SEQ ID NO: 2144206 - RNA, 19 nt, Artificial Sequence
  Description of Artificial Sequence: Synthetic oligonucleotide
  Sense strand starting at position 3455 of SEQ ID NO: 1882742
gaugaaggauccgugauuc

SEQ ID NO: 2144207 - RNA, 19 nt, Artificial Sequence
  Description of Artificial Sequence: Synthetic oligonucleotide
  Antisense strand to SEQ ID NO: 2144206
gaaucacggauccuucauc

SEQ ID NO: 2144208 - RNA, 19 nt, Artificial Sequence
  Description of Artificial Sequence: Synthetic oligonucleotide
  Sense strand starting at position 3478 of SEQ ID NO: 1882742
gcagaaauguaagugauga

SEQ ID NO: 2144209 - RNA, 19 nt, Artificial Sequence
  Description of Artificial Sequence: Synthetic oligonucleotide
  Antisense strand to SEQ ID NO: 2144208
ucaucacuuacauuucugc

SEQ ID NO: 2144210 - RNA, 19 nt, Artificial Sequence
  Description of Artificial Sequence: Synthetic oligonucleotide
  Sense strand starting at position 3498 of SEQ ID NO: 1882742
aaagaaugcuguccuguaa

SEQ ID NO: 2144211 - RNA, 19 nt, Artificial Sequence
  Description of Artificial Sequence: Synthetic oligonucleotide
  Antisense strand to SEQ ID NO: 2144210
uuacaggacagcauucuuu

SEQ ID NO: 2144212 - RNA, 19 nt, Artificial Sequence
  Description of Artificial Sequence: Synthetic oligonucleotide
  Sense strand starting at position 3502 of SEQ ID NO: 1882742
aaugcuguccuguaauaag

SEQ ID NO: 2144213 - RNA, 19 nt, Artificial Sequence
  Description of Artificial Sequence: Synthetic oligonucleotide
  Antisense strand to SEQ ID NO: 2144212
cuuauuacaggacagcauu

SEQ ID NO: 2144214 - RNA, 19 nt, Artificial Sequence
  Description of Artificial Sequence: Synthetic oligonucleotide
  Sense strand starting at position 3545 of SEQ ID NO: 1882742
uccuuaguccuugauguua

SEQ ID NO: 2144215 - RNA, 19 nt, Artificial Sequence
  Description of Artificial Sequence: Synthetic oligonucleotide
  Antisense strand to SEQ ID NO: 2144214
uaacaucaaggacuaagga

SEQ ID NO: 2144216 - RNA, 19 nt, Artificial Sequence
  Description of Artificial Sequence: Synthetic oligonucleotide
  Sense strand starting at position 3671 of SEQ ID NO: 1882742
gcaugagacuuugccugga

SEQ ID NO: 2144217 - RNA, 19 nt, Artificial Sequence
  Description of Artificial Sequence: Synthetic oligonucleotide
  Antisense strand to SEQ ID NO: 2144216
uccaggcaaagucucaugc

SEQ ID NO: 2144218 - RNA, 19 nt, Artificial Sequence
  Description of Artificial Sequence: Synthetic oligonucleotide
  Sense strand starting at position 3673 of SEQ ID NO: 1882742
augagacuuugccuggaug

SEQ ID NO: 2144219 - RNA, 19 nt, Artificial Sequence
  Description of Artificial Sequence: Synthetic oligonucleotide
  Antisense strand to SEQ ID NO: 2144218
cauccaggcaaagucucau

SEQ ID NO: 2144220 - RNA, 19 nt, Artificial Sequence
  Description of Artificial Sequence: Synthetic oligonucleotide
  Sense strand starting at position 3676 of SEQ ID NO: 1882742
agacuuugccuggaugcaa

SEQ ID NO: 2144221 - RNA, 19 nt, Artificial Sequence
  Description of Artificial Sequence: Synthetic oligonucleotide
  Antisense strand to SEQ ID NO: 2144220
uugcauccaggcaaagucu

SEQ ID NO: 2144222 - RNA, 19 nt, Artificial Sequence
  Description of Artificial Sequence: Synthetic oligonucleotide
  Sense strand starting at position 3761 of SEQ ID NO: 1882742
gucuccuuaucugugaaag

SEQ ID NO: 2144223 - RNA, 19 nt, Artificial Sequence
  Description of Artificial Sequence: Synthetic oligonucleotide
  Antisense strand to SEQ ID NO: 2144222
cuuucacagauaaggagac

SEQ ID NO: 2144224 - RNA, 19 nt, Artificial Sequence
  Description of Artificial Sequence: Synthetic oligonucleotide
  Sense strand starting at position 3927 of SEQ ID NO: 1882742
uaaauaucgcaguaaagug

SEQ ID NO: 2144225 - RNA, 19 nt, Artificial Sequence
  Description of Artificial Sequence: Synthetic oligonucleotide
  Antisense strand to SEQ ID NO: 2144224
cacuuuacugcgauauuua

SEQ ID NO: 2144226 - RNA, 19 nt, Artificial Sequence
  Description of Artificial Sequence: Synthetic oligonucleotide
  Sense strand starting at position 3980 of SEQ ID NO: 1882742
gcaaguuauguuuacacua

SEQ ID NO: 2144227 - RNA, 19 nt, Artificial Sequence
  Description of Artificial Sequence: Synthetic oligonucleotide
  Antisense strand to SEQ ID NO: 2144226
uaguguaaacauaacuugc

SEQ ID NO: 2144228 - RNA, 19 nt, Artificial Sequence
  Description of Artificial Sequence: Synthetic oligonucleotide
  Sense strand starting at position 94 of SEQ ID NO: 1882743
cugcgauauuuacuuuaug

SEQ ID NO: 2144229 - RNA, 19 nt, Artificial Sequence
  Description of Artificial Sequence: Synthetic oligonucleotide
  Antisense strand to SEQ ID NO: 2144228
cauaaaguaaauaucgcag

SEQ ID NO: 2144230 - RNA, 19 nt, Artificial Sequence
  Description of Artificial Sequence: Synthetic oligonucleotide
  Sense strand starting at position 95 of SEQ ID NO: 1882743
ugcgauauuuacuuuaugu

SEQ ID NO: 2144231 - RNA, 19 nt, Artificial Sequence
  Description of Artificial Sequence: Synthetic oligonucleotide
  Antisense strand to SEQ ID NO: 2144230
acauaaaguaaauaucgca

SEQ ID NO: 2144232 - RNA, 19 nt, Artificial Sequence
  Description of Artificial Sequence: Synthetic oligonucleotide
  Sense strand starting at position 145 of SEQ ID NO: 1882743
gaaguauguguguauuauu

SEQ ID NO: 2144233 - RNA, 19 nt, Artificial Sequence
  Description of Artificial Sequence: Synthetic oligonucleotide
  Antisense strand to SEQ ID NO: 2144232
aauaauacacacauacuuc

SEQ ID NO: 2144234 - RNA, 19 nt, Artificial Sequence
  Description of Artificial Sequence: Synthetic oligonucleotide
  Sense strand starting at position 321 of SEQ ID NO: 1882743
aguugagauguuugacuuu

SEQ ID NO: 2144235 - RNA, 19 nt, Artificial Sequence
  Description of Artificial Sequence: Synthetic oligonucleotide
  Antisense strand to SEQ ID NO: 2144234
aaagucaaacaucucaacu

SEQ ID NO: 2144236 - RNA, 19 nt, Artificial Sequence
  Description of Artificial Sequence: Synthetic oligonucleotide
  Sense strand starting at position 324 of SEQ ID NO: 1882743
ugagauguuugacuuugca

SEQ ID NO: 2144237 - RNA, 19 nt, Artificial Sequence
  Description of Artificial Sequence: Synthetic oligonucleotide
  Antisense strand to SEQ ID NO: 2144236
ugcaaagucaaacaucuca

SEQ ID NO: 2144238 - RNA, 19 nt, Artificial Sequence
  Description of Artificial Sequence: Synthetic oligonucleotide
  Sense strand starting at position 412 of SEQ ID NO: 1882743
auggcucuuccaugaacuu

SEQ ID NO: 2144239 - RNA, 19 nt, Artificial Sequence
  Description of Artificial Sequence: Synthetic oligonucleotide
  Antisense strand to SEQ ID NO: 2144238
aaguucauggaagagccau

SEQ ID NO: 2144240 - RNA, 19 nt, Artificial Sequence
  Description of Artificial Sequence: Synthetic oligonucleotide
  Sense strand starting at position 413 of SEQ ID NO: 1882743
uggcucuuccaugaacuuu

SEQ ID NO: 2144241 - RNA, 19 nt, Artificial Sequence
  Description of Artificial Sequence: Synthetic oligonucleotide
  Antisense strand to SEQ ID NO: 2144240
aaaguucauggaagagcca

SEQ ID NO: 2144242 - RNA, 19 nt, Artificial Sequence
  Description of Artificial Sequence: Synthetic oligonucleotide
  Sense strand starting at position 577 of SEQ ID NO: 1882743
cucccaaggccuuagaguu

SEQ ID NO: 2144243 - RNA, 19 nt, Artificial Sequence
  Description of Artificial Sequence: Synthetic oligonucleotide
  Antisense strand to SEQ ID NO: 2144242
aacucuaaggccuugggag

SEQ ID NO: 2144244 - RNA, 19 nt, Artificial Sequence
  Description of Artificial Sequence: Synthetic oligonucleotide
  Sense strand starting at position 892 of SEQ ID NO: 1882743
uggauuaugcuauaugguu

SEQ ID NO: 2144245 - RNA, 19 nt, Artificial Sequence
  Description of Artificial Sequence: Synthetic oligonucleotide
  Antisense strand to SEQ ID NO: 2144244
aaccauauagcauaaucca

SEQ ID NO: 2144246 - RNA, 19 nt, Artificial Sequence
  Description of Artificial Sequence: Synthetic oligonucleotide
  Sense strand starting at position 905 of SEQ ID NO: 1882743
augguuuguccucaacaag

SEQ ID NO: 2144247 - RNA, 19 nt, Artificial Sequence
  Description of Artificial Sequence: Synthetic oligonucleotide
  Antisense strand to SEQ ID NO: 2144246
cuuguugaggacaaaccau

SEQ ID NO: 2144248 - RNA, 19 nt, Artificial Sequence
  Description of Artificial Sequence: Synthetic oligonucleotide
  Sense strand starting at position 908 of SEQ ID NO: 1882743
guuuguccucaacaagaaa

SEQ ID NO: 2144249 - RNA, 19 nt, Artificial Sequence
  Description of Artificial Sequence: Synthetic oligonucleotide
  Antisense strand to SEQ ID NO: 2144248
uuucuuguugaggacaaac

SEQ ID NO: 2144250 - RNA, 19 nt, Artificial Sequence
  Description of Artificial Sequence: Synthetic oligonucleotide
  Sense strand starting at position 1277 of SEQ ID NO: 1882743
gccucaaugguguaaauua

SEQ ID NO: 2144251 - RNA, 19 nt, Artificial Sequence
  Description of Artificial Sequence: Synthetic oligonucleotide
  Antisense strand to SEQ ID NO: 2144250
uaauuuacaccauugaggc

SEQ ID NO: 2144252 - RNA, 19 nt, Artificial Sequence
  Description of Artificial Sequence: Synthetic oligonucleotide
  Sense strand starting at position 1314 of SEQ ID NO: 1882743
uguauaguccuauauagac

SEQ ID NO: 2144253 - RNA, 19 nt, Artificial Sequence
  Description of Artificial Sequence: Synthetic oligonucleotide
  Antisense strand to SEQ ID NO: 2144252
gucuauauaggacuauaca

SEQ ID NO: 2144254 - RNA, 19 nt, Artificial Sequence
  Description of Artificial Sequence: Synthetic oligonucleotide
  Sense strand starting at position 1446 of SEQ ID NO: 1882743
ccaugagggcugugauuga

SEQ ID NO: 2144255 - RNA, 19 nt, Artificial Sequence
  Description of Artificial Sequence: Synthetic oligonucleotide
  Antisense strand to SEQ ID NO: 2144254
ucaaucacagcccucaugg

SEQ ID NO: 2144256 - RNA, 19 nt, Artificial Sequence
  Description of Artificial Sequence: Synthetic oligonucleotide
  Sense strand starting at position 1455 of SEQ ID NO: 1882743
cugugauugaguuccgugu

SEQ ID NO: 2144257 - RNA, 19 nt, Artificial Sequence
  Description of Artificial Sequence: Synthetic oligonucleotide
  Antisense strand to SEQ ID NO: 2144256
acacggaacucaaucacag

SEQ ID NO: 2144258 - RNA, 19 nt, Artificial Sequence
  Description of Artificial Sequence: Synthetic oligonucleotide
  Sense strand starting at position 1456 of SEQ ID NO: 1882743
ugugauugaguuccguguu

SEQ ID NO: 2144259 - RNA, 19 nt, Artificial Sequence
  Description of Artificial Sequence: Synthetic oligonucleotide
  Antisense strand to SEQ ID NO: 2144258
aacacggaacucaaucaca

SEQ ID NO: 2144260 - RNA, 19 nt, Artificial Sequence
  Description of Artificial Sequence: Synthetic oligonucleotide
  Sense strand starting at position 1558 of SEQ ID NO: 1882743
agccuaguuaggcagacau

SEQ ID NO: 2144261 - RNA, 19 nt, Artificial Sequence
  Description of Artificial Sequence: Synthetic oligonucleotide
  Antisense strand to SEQ ID NO: 2144260
augucugccuaacuaggcu

SEQ ID NO: 2144262 - RNA, 19 nt, Artificial Sequence
  Description of Artificial Sequence: Synthetic oligonucleotide
  Sense strand starting at position 1605 of SEQ ID NO: 1882743
gacugugugcucuugcguu

SEQ ID NO: 2144263 - RNA, 19 nt, Artificial Sequence
  Description of Artificial Sequence: Synthetic oligonucleotide
  Antisense strand to SEQ ID NO: 2144262
aacgcaagagcacacaguc

SEQ ID NO: 2144264 - RNA, 19 nt, Artificial Sequence
  Description of Artificial Sequence: Synthetic oligonucleotide
  Sense strand starting at position 1610 of SEQ ID NO: 1882743
ugugcucuugcguuaugaa

SEQ ID NO: 2144265 - RNA, 19 nt, Artificial Sequence
  Description of Artificial Sequence: Synthetic oligonucleotide
  Antisense strand to SEQ ID NO: 2144264
uucauaacgcaagagcaca

SEQ ID NO: 2144266 - RNA, 19 nt, Artificial Sequence
  Description of Artificial Sequence: Synthetic oligonucleotide
  Sense strand starting at position 1641 of SEQ ID NO: 1882743
aaaucuugugcuccgugua

SEQ ID NO: 2144267 - RNA, 19 nt, Artificial Sequence
  Description of Artificial Sequence: Synthetic oligonucleotide
  Antisense strand to SEQ ID NO: 2144266
uacacggagcacaagauuu

SEQ ID NO: 2144268 - RNA, 19 nt, Artificial Sequence
  Description of Artificial Sequence: Synthetic oligonucleotide
  Sense strand starting at position 1780 of SEQ ID NO: 1882743
gggagacaccuuugcaugu

SEQ ID NO: 2144269 - RNA, 19 nt, Artificial Sequence
  Description of Artificial Sequence: Synthetic oligonucleotide
  Antisense strand to SEQ ID NO: 2144268
acaugcaaaggugucuccc

SEQ ID NO: 2144270 - RNA, 19 nt, Artificial Sequence
  Description of Artificial Sequence: Synthetic oligonucleotide
  Sense strand starting at position 1781 of SEQ ID NO: 1882743
ggagacaccuuugcauguu

SEQ ID NO: 2144271 - RNA, 19 nt, Artificial Sequence
  Description of Artificial Sequence: Synthetic oligonucleotide
  Antisense strand to SEQ ID NO: 2144270
aacaugcaaaggugucucc

SEQ ID NO: 2144272 - RNA, 19 nt, Artificial Sequence
  Description of Artificial Sequence: Synthetic oligonucleotide
  Sense strand starting at position 1845 of SEQ ID NO: 1882743
guaaccgaaaccuggaaau

SEQ ID NO: 2144273 - RNA, 19 nt, Artificial Sequence
  Description of Artificial Sequence: Synthetic oligonucleotide
  Antisense strand to SEQ ID NO: 2144272
auuuccagguuucgguuac

SEQ ID NO: 2144274 - RNA, 19 nt, Artificial Sequence
  Description of Artificial Sequence: Synthetic oligonucleotide
  Sense strand starting at position 2584 of SEQ ID NO: 1882743
agcgauuccgcaguuggua

SEQ ID NO: 2144275 - RNA, 19 nt, Artificial Sequence
  Description of Artificial Sequence: Synthetic oligonucleotide
  Antisense strand to SEQ ID NO: 2144274
uaccaacugcggaaucgcu

SEQ ID NO: 2144276 - RNA, 19 nt, Artificial Sequence
  Description of Artificial Sequence: Synthetic oligonucleotide
  Sense strand starting at position 3295 of SEQ ID NO: 1882743
caaagcaggaugugaguua

SEQ ID NO: 2144277 - RNA, 19 nt, Artificial Sequence
  Description of Artificial Sequence: Synthetic oligonucleotide
  Antisense strand to SEQ ID NO: 2144276
uaacucacauccugcuuug

SEQ ID NO: 2144278 - RNA, 19 nt, Artificial Sequence
  Description of Artificial Sequence: Synthetic oligonucleotide
  Sense strand starting at position 3300 of SEQ ID NO: 1882743
caggaugugaguuaugugu

SEQ ID NO: 2144279 - RNA, 19 nt, Artificial Sequence
  Description of Artificial Sequence: Synthetic oligonucleotide
  Antisense strand to SEQ ID NO: 2144278
acacauaacucacauccug

SEQ ID NO: 2144280 - RNA, 19 nt, Artificial Sequence
  Description of Artificial Sequence: Synthetic oligonucleotide
  Sense strand starting at position 3537 of SEQ ID NO: 1882743
uacugugaaugccugaauu

SEQ ID NO: 2144281 - RNA, 19 nt, Artificial Sequence
  Description of Artificial Sequence: Synthetic oligonucleotide
  Antisense strand to SEQ ID NO: 2144280
aauucaggcauucacagua

SEQ ID NO: 2144282 - RNA, 19 nt, Artificial Sequence
  Description of Artificial Sequence: Synthetic oligonucleotide
  Sense strand starting at position 3664 of SEQ ID NO: 1882743
uagcuauugccugccugua

SEQ ID NO: 2144283 - RNA, 19 nt, Artificial Sequence
  Description of Artificial Sequence: Synthetic oligonucleotide
  Antisense strand to SEQ ID NO: 2144282
uacaggcaggcaauagcua

SEQ ID NO: 2144284 - RNA, 19 nt, Artificial Sequence
  Description of Artificial Sequence: Synthetic oligonucleotide
  Sense strand starting at position 3678 of SEQ ID NO: 1882743
cuguaaugguaguugaaca

SEQ ID NO: 2144285 - RNA, 19 nt, Artificial Sequence
  Description of Artificial Sequence: Synthetic oligonucleotide
  Antisense strand to SEQ ID NO: 2144284
uguucaacuaccauuacag

SEQ ID NO: 2144286 - RNA, 19 nt, Artificial Sequence
  Description of Artificial Sequence: Synthetic oligonucleotide
  Sense strand starting at position 3679 of SEQ ID NO: 1882743
uguaaugguaguugaacau

SEQ ID NO: 2144287 - RNA, 19 nt, Artificial Sequence
  Description of Artificial Sequence: Synthetic oligonucleotide
  Antisense strand to SEQ ID NO: 2144286
auguucaacuaccauuaca

SEQ ID NO: 2144288 - RNA, 19 nt, Artificial Sequence
  Description of Artificial Sequence: Synthetic oligonucleotide
  Sense strand starting at position 3685 of SEQ ID NO: 1882743
gguaguugaacauaguuaa

SEQ ID NO: 2144289 - RNA, 19 nt, Artificial Sequence
  Description of Artificial Sequence: Synthetic oligonucleotide
  Antisense strand to SEQ ID NO: 2144288
uuaacuauguucaacuacc

SEQ ID NO: 2144290 - RNA, 19 nt, Artificial Sequence
  Description of Artificial Sequence: Synthetic oligonucleotide
  Sense strand starting at position 3695 of SEQ ID NO: 1882743
cauaguuaaccagggcuua

SEQ ID NO: 2144291 - RNA, 19 nt, Artificial Sequence
  Description of Artificial Sequence: Synthetic oligonucleotide
  Antisense strand to SEQ ID NO: 2144290
uaagcccugguuaacuaug

SEQ ID NO: 2144292 - RNA, 19 nt, Artificial Sequence
  Description of Artificial Sequence: Synthetic oligonucleotide
  Sense strand starting at position 3696 of SEQ ID NO: 1882743
auaguuaaccagggcuuaa

SEQ ID NO: 2144293 - RNA, 19 nt, Artificial Sequence
  Description of Artificial Sequence: Synthetic oligonucleotide
  Antisense strand to SEQ ID NO: 2144292
uuaagcccugguuaacuau

SEQ ID NO: 2144294 - RNA, 19 nt, Artificial Sequence
  Description of Artificial Sequence: Synthetic oligonucleotide
  Sense strand starting at position 3708 of SEQ ID NO: 1882743
ggcuuaaacucguugaaga

SEQ ID NO: 2144295 - RNA, 19 nt, Artificial Sequence
  Description of Artificial Sequence: Synthetic oligonucleotide
  Antisense strand to SEQ ID NO: 2144294
ucuucaacgaguuuaagcc

SEQ ID NO: 2144296 - RNA, 19 nt, Artificial Sequence
  Description of Artificial Sequence: Synthetic oligonucleotide
  Sense strand starting at position 3710 of SEQ ID NO: 1882743
cuuaaacucguugaagacu

SEQ ID NO: 2144297 - RNA, 19 nt, Artificial Sequence
  Description of Artificial Sequence: Synthetic oligonucleotide
  Antisense strand to SEQ ID NO: 2144296
agucuucaacgaguuuaag

SEQ ID NO: 2144298 - RNA, 19 nt, Artificial Sequence
  Description of Artificial Sequence: Synthetic oligonucleotide
  Sense strand starting at position 3719 of SEQ ID NO: 1882743
guugaagacucauuagguu

SEQ ID NO: 2144299 - RNA, 19 nt, Artificial Sequence
  Description of Artificial Sequence: Synthetic oligonucleotide
  Antisense strand to SEQ ID NO: 2144298
aaccuaaugagucuucaac

SEQ ID NO: 2144300 - RNA, 19 nt, Artificial Sequence
  Description of Artificial Sequence: Synthetic oligonucleotide
  Sense strand starting at position 3773 of SEQ ID NO: 1882743
ggaucauagcauuguaaag

SEQ ID NO: 2144301 - RNA, 19 nt, Artificial Sequence
  Description of Artificial Sequence: Synthetic oligonucleotide
  Antisense strand to SEQ ID NO: 2144300
cuuuacaaugcuaugaucc

SEQ ID NO: 2144302 - RNA, 19 nt, Artificial Sequence
  Description of Artificial Sequence: Synthetic oligonucleotide
  Sense strand starting at position 3804 of SEQ ID NO: 1882743
cccuaaauagggugaaacu

SEQ ID NO: 2144303 - RNA, 19 nt, Artificial Sequence
  Description of Artificial Sequence: Synthetic oligonucleotide
  Antisense strand to SEQ ID NO: 2144302
aguuucacccuauuuaggg

SEQ ID NO: 2144304 - RNA, 19 nt, Artificial Sequence
  Description of Artificial Sequence: Synthetic oligonucleotide
  Sense strand starting at position 3876 of SEQ ID NO: 1882743
cguuuagcucuuuggauuu

SEQ ID NO: 2144305 - RNA, 19 nt, Artificial Sequence
  Description of Artificial Sequence: Synthetic oligonucleotide
  Antisense strand to SEQ ID NO: 2144304
aaauccaaagagcuaaacg

SEQ ID NO: 2144306 - RNA, 19 nt, Artificial Sequence
  Description of Artificial Sequence: Synthetic oligonucleotide
  Sense strand starting at position 3914 of SEQ ID NO: 1882743
uuagcuuuggaguauauua

SEQ ID NO: 2144307 - RNA, 19 nt, Artificial Sequence
  Description of Artificial Sequence: Synthetic oligonucleotide
  Antisense strand to SEQ ID NO: 2144306
uaauauacuccaaagcuaa

SEQ ID NO: 2144308 - RNA, 19 nt, Artificial Sequence
  Description of Artificial Sequence: Synthetic oligonucleotide
  Sense strand starting at position 138 of SEQ ID NO: 1882744
uaaaguguuccuggguguu

SEQ ID NO: 2144309 - RNA, 19 nt, Artificial Sequence
  Description of Artificial Sequence: Synthetic oligonucleotide
  Antisense strand to SEQ ID NO: 2144308
aacacccaggaacacuuua

SEQ ID NO: 2144310 - RNA, 19 nt, Artificial Sequence
  Description of Artificial Sequence: Synthetic oligonucleotide
  Sense strand starting at position 140 of SEQ ID NO: 1882744
aaguguuccuggguguuau

SEQ ID NO: 2144311 - RNA, 19 nt, Artificial Sequence
  Description of Artificial Sequence: Synthetic oligonucleotide
  Antisense strand to SEQ ID NO: 2144310
auaacacccaggaacacuu

SEQ ID NO: 2144312 - RNA, 19 nt, Artificial Sequence
  Description of Artificial Sequence: Synthetic oligonucleotide
  Sense strand starting at position 150 of SEQ ID NO: 1882744
ggguguuauuuacaccuuu

SEQ ID NO: 2144313 - RNA, 19 nt, Artificial Sequence
  Description of Artificial Sequence: Synthetic oligonucleotide
  Antisense strand to SEQ ID NO: 2144312
aaagguguaaauaacaccc

SEQ ID NO: 2144314 - RNA, 19 nt, Artificial Sequence
  Description of Artificial Sequence: Synthetic oligonucleotide
  Sense strand starting at position 210 of SEQ ID NO: 1882744
cugagaaacuguuuccuca

SEQ ID NO: 2144315 - RNA, 19 nt, Artificial Sequence
  Description of Artificial Sequence: Synthetic oligonucleotide
  Antisense strand to SEQ ID NO: 2144314
ugaggaaacaguuucucag

SEQ ID NO: 2144316 - RNA, 19 nt, Artificial Sequence
  Description of Artificial Sequence: Synthetic oligonucleotide
  Sense strand starting at position 212 of SEQ ID NO: 1882744
gagaaacuguuuccucaga

SEQ ID NO: 2144317 - RNA, 19 nt, Artificial Sequence
  Description of Artificial Sequence: Synthetic oligonucleotide
  Antisense strand to SEQ ID NO: 2144316
ucugaggaaacaguuucuc

SEQ ID NO: 2144318 - RNA, 19 nt, Artificial Sequence
  Description of Artificial Sequence: Synthetic oligonucleotide
  Sense strand starting at position 213 of SEQ ID NO: 1882744
agaaacuguuuccucagaa

SEQ ID NO: 2144319 - RNA, 19 nt, Artificial Sequence
  Description of Artificial Sequence: Synthetic oligonucleotide
  Antisense strand to SEQ ID NO: 2144318
uucugaggaaacaguuucu

SEQ ID NO: 2144320 - RNA, 19 nt, Artificial Sequence
  Description of Artificial Sequence: Synthetic oligonucleotide
  Sense strand starting at position 232 of SEQ ID NO: 1882744
aguaaucgauccuccuuga

SEQ ID NO: 2144321 - RNA, 19 nt, Artificial Sequence
  Description of Artificial Sequence: Synthetic oligonucleotide
  Antisense strand to SEQ ID NO: 2144320
ucaaggaggaucgauuacu

SEQ ID NO: 2144322 - RNA, 19 nt, Artificial Sequence
  Description of Artificial Sequence: Synthetic oligonucleotide
  Sense strand starting at position 818 of SEQ ID NO: 1882744
agggaagagccuugcgauu

SEQ ID NO: 2144323 - RNA, 19 nt, Artificial Sequence
  Description of Artificial Sequence: Synthetic oligonucleotide
  Antisense strand to SEQ ID NO: 2144322
aaucgcaaggcucuucccu

SEQ ID NO: 2144324 - RNA, 19 nt, Artificial Sequence
  Description of Artificial Sequence: Synthetic oligonucleotide
  Sense strand starting at position 959 of SEQ ID NO: 1882744
ugaggucaucgccagccaa

SEQ ID NO: 2144325 - RNA, 19 nt, Artificial Sequence
  Description of Artificial Sequence: Synthetic oligonucleotide
  Antisense strand to SEQ ID NO: 2144324
uuggcuggcgaugaccuca

SEQ ID NO: 2144326 - RNA, 19 nt, Artificial Sequence
  Description of Artificial Sequence: Synthetic oligonucleotide
  Sense strand starting at position 1007 of SEQ ID NO: 1882744
cgcugauuggcugccgaga

SEQ ID NO: 2144327 - RNA, 19 nt, Artificial Sequence
  Description of Artificial Sequence: Synthetic oligonucleotide
  Antisense strand to SEQ ID NO: 2144326
ucucggcagccaaucagcg

SEQ ID NO: 2144328 - RNA, 19 nt, Artificial Sequence
  Description of Artificial Sequence: Synthetic oligonucleotide
  Sense strand starting at position 1127 of SEQ ID NO: 1882744
gccggaaucgccgugucau

SEQ ID NO: 2144329 - RNA, 19 nt, Artificial Sequence
  Description of Artificial Sequence: Synthetic oligonucleotide
  Antisense strand to SEQ ID NO: 2144328
augacacggcgauuccggc

SEQ ID NO: 2144330 - RNA, 19 nt, Artificial Sequence
  Description of Artificial Sequence: Synthetic oligonucleotide
  Sense strand starting at position 1192 of SEQ ID NO: 1882744
cuucgagaucacugucugu

SEQ ID NO: 2144331 - RNA, 19 nt, Artificial Sequence
  Description of Artificial Sequence: Synthetic oligonucleotide
  Antisense strand to SEQ ID NO: 2144330
acagacagugaucucgaag

SEQ ID NO: 2144332 - RNA, 19 nt, Artificial Sequence
  Description of Artificial Sequence: Synthetic oligonucleotide
  Sense strand starting at position 1809 of SEQ ID NO: 1882744
cucaaaccuucgguggauu

SEQ ID NO: 2144333 - RNA, 19 nt, Artificial Sequence
  Description of Artificial Sequence: Synthetic oligonucleotide
  Antisense strand to SEQ ID NO: 2144332
aauccaccgaagguuugag

SEQ ID NO: 2144334 - RNA, 19 nt, Artificial Sequence
  Description of Artificial Sequence: Synthetic oligonucleotide
  Sense strand starting at position 1833 of SEQ ID NO: 1882744
augcaucuguugucagaaa

SEQ ID NO: 2144335 - RNA, 19 nt, Artificial Sequence
  Description of Artificial Sequence: Synthetic oligonucleotide
  Antisense strand to SEQ ID NO: 2144334
uuucugacaacagaugcau

SEQ ID NO: 2144336 - RNA, 19 nt, Artificial Sequence
  Description of Artificial Sequence: Synthetic oligonucleotide
  Sense strand starting at position 2382 of SEQ ID NO: 1882744
gugaacaucacagguuagu

SEQ ID NO: 2144337 - RNA, 19 nt, Artificial Sequence
  Description of Artificial Sequence: Synthetic oligonucleotide
  Antisense strand to SEQ ID NO: 2144336
acuaaccugugauguucac

SEQ ID NO: 2144338 - RNA, 19 nt, Artificial Sequence
  Description of Artificial Sequence: Synthetic oligonucleotide
  Sense strand starting at position 2401 of SEQ ID NO: 1882744
gccugucgucuccauggga

SEQ ID NO: 2144339 - RNA, 19 nt, Artificial Sequence
  Description of Artificial Sequence: Synthetic oligonucleotide
  Antisense strand to SEQ ID NO: 2144338
ucccauggagacgacaggc

SEQ ID NO: 2144340 - RNA, 19 nt, Artificial Sequence
  Description of Artificial Sequence: Synthetic oligonucleotide
  Sense strand starting at position 2466 of SEQ ID NO: 1882744
ggaggucucucaucuuuau

SEQ ID NO: 2144341 - RNA, 19 nt, Artificial Sequence
  Description of Artificial Sequence: Synthetic oligonucleotide
  Antisense strand to SEQ ID NO: 2144340
auaaagaugagagaccucc

SEQ ID NO: 2144342 - RNA, 19 nt, Artificial Sequence
  Description of Artificial Sequence: Synthetic oligonucleotide
  Sense strand starting at position 2533 of SEQ ID NO: 1882744
caagacguugcuugcuuaa

SEQ ID NO: 2144343 - RNA, 19 nt, Artificial Sequence
  Description of Artificial Sequence: Synthetic oligonucleotide
  Antisense strand to SEQ ID NO: 2144342
uuaagcaagcaacgucuug

SEQ ID NO: 2144344 - RNA, 19 nt, Artificial Sequence
  Description of Artificial Sequence: Synthetic oligonucleotide
  Sense strand starting at position 2535 of SEQ ID NO: 1882744
agacguugcuugcuuaaau

SEQ ID NO: 2144345 - RNA, 19 nt, Artificial Sequence
  Description of Artificial Sequence: Synthetic oligonucleotide
  Antisense strand to SEQ ID NO: 2144344
auuuaagcaagcaacgucu

SEQ ID NO: 2144346 - RNA, 19 nt, Artificial Sequence
  Description of Artificial Sequence: Synthetic oligonucleotide
  Sense strand starting at position 2717 of SEQ ID NO: 1882744
gaggcuugugacuguuagu

SEQ ID NO: 2144347 - RNA, 19 nt, Artificial Sequence
  Description of Artificial Sequence: Synthetic oligonucleotide
  Antisense strand to SEQ ID NO: 2144346
acuaacagucacaagccuc

SEQ ID NO: 2144348 - RNA, 19 nt, Artificial Sequence
  Description of Artificial Sequence: Synthetic oligonucleotide
  Sense strand starting at position 2859 of SEQ ID NO: 1882744
ugguauaaugugcacauga

SEQ ID NO: 2144349 - RNA, 19 nt, Artificial Sequence
  Description of Artificial Sequence: Synthetic oligonucleotide
  Antisense strand to SEQ ID NO: 2144348
ucaugugcacauuauacca

SEQ ID NO: 2144350 - RNA, 19 nt, Artificial Sequence
  Description of Artificial Sequence: Synthetic oligonucleotide
  Sense strand starting at position 2861 of SEQ ID NO: 1882744
guauaaugugcacaugaau

SEQ ID NO: 2144351 - RNA, 19 nt, Artificial Sequence
  Description of Artificial Sequence: Synthetic oligonucleotide
  Antisense strand to SEQ ID NO: 2144350
auucaugugcacauuauac

SEQ ID NO: 2144352 - RNA, 19 nt, Artificial Sequence
  Description of Artificial Sequence: Synthetic oligonucleotide
  Sense strand starting at position 3029 of SEQ ID NO: 1882744
gcauuaccgccguccuuua

SEQ ID NO: 2144353 - RNA, 19 nt, Artificial Sequence
  Description of Artificial Sequence: Synthetic oligonucleotide
  Antisense strand to SEQ ID NO: 2144352
uaaaggacggcgguaaugc

SEQ ID NO: 2144354 - RNA, 19 nt, Artificial Sequence
  Description of Artificial Sequence: Synthetic oligonucleotide
  Sense strand starting at position 3217 of SEQ ID NO: 1882744
ggccuuaguuccguauaga

SEQ ID NO: 2144355 - RNA, 19 nt, Artificial Sequence
  Description of Artificial Sequence: Synthetic oligonucleotide
  Antisense strand to SEQ ID NO: 2144354
ucuauacggaacuaaggcc

SEQ ID NO: 2144356 - RNA, 19 nt, Artificial Sequence
  Description of Artificial Sequence: Synthetic oligonucleotide
  Sense strand starting at position 3218 of SEQ ID NO: 1882744
gccuuaguuccguauagau

SEQ ID NO: 2144357 - RNA, 19 nt, Artificial Sequence
  Description of Artificial Sequence: Synthetic oligonucleotide
  Antisense strand to SEQ ID NO: 2144356
aucuauacggaacuaaggc

SEQ ID NO: 2144358 - RNA, 19 nt, Artificial Sequence
  Description of Artificial Sequence: Synthetic oligonucleotide
  Sense strand starting at position 3253 of SEQ ID NO: 1882744
cugucuuaagaacgauaca

SEQ ID NO: 2144359 - RNA, 19 nt, Artificial Sequence
  Description of Artificial Sequence: Synthetic oligonucleotide
  Antisense strand to SEQ ID NO: 2144358
uguaucguucuuaagacag

SEQ ID NO: 2144360 - RNA, 19 nt, Artificial Sequence
  Description of Artificial Sequence: Synthetic oligonucleotide
  Sense strand starting at position 3285 of SEQ ID NO: 1882744
gaggaaucgcuagaguuag

SEQ ID NO: 2144361 - RNA, 19 nt, Artificial Sequence
  Description of Artificial Sequence: Synthetic oligonucleotide
  Antisense strand to SEQ ID NO: 2144360
cuaacucuagcgauuccuc

SEQ ID NO: 2144362 - RNA, 19 nt, Artificial Sequence
  Description of Artificial Sequence: Synthetic oligonucleotide
  Sense strand starting at position 3295 of SEQ ID NO: 1882744
uagaguuagcucuagagua

SEQ ID NO: 2144363 - RNA, 19 nt, Artificial Sequence
  Description of Artificial Sequence: Synthetic oligonucleotide
  Antisense strand to SEQ ID NO: 2144362
uacucuagagcuaacucua

SEQ ID NO: 2144364 - RNA, 19 nt, Artificial Sequence
  Description of Artificial Sequence: Synthetic oligonucleotide
  Sense strand starting at position 3297 of SEQ ID NO: 1882744
gaguuagcucuagaguaaa

SEQ ID NO: 2144365 - RNA, 19 nt, Artificial Sequence
  Description of Artificial Sequence: Synthetic oligonucleotide
  Antisense strand to SEQ ID NO: 2144364
uuuacucuagagcuaacuc

SEQ ID NO: 2144366 - RNA, 19 nt, Artificial Sequence
  Description of Artificial Sequence: Synthetic oligonucleotide
  Sense strand starting at position 3357 of SEQ ID NO: 1882744
aagguaagguguuuggagu

SEQ ID NO: 2144367 - RNA, 19 nt, Artificial Sequence
  Description of Artificial Sequence: Synthetic oligonucleotide
  Antisense strand to SEQ ID NO: 2144366
acuccaaacaccuuaccuu

SEQ ID NO: 2144368 - RNA, 19 nt, Artificial Sequence
  Description of Artificial Sequence: Synthetic oligonucleotide
  Sense strand starting at position 3358 of SEQ ID NO: 1882744
agguaagguguuuggaguu

SEQ ID NO: 2144369 - RNA, 19 nt, Artificial Sequence
  Description of Artificial Sequence: Synthetic oligonucleotide
  Antisense strand to SEQ ID NO: 2144368
aacuccaaacaccuuaccu

SEQ ID NO: 2144370 - RNA, 19 nt, Artificial Sequence
  Description of Artificial Sequence: Synthetic oligonucleotide
  Sense strand starting at position 3553 of SEQ ID NO: 1882744
gugguaaucuaaucagcuc

SEQ ID NO: 2144371 - RNA, 19 nt, Artificial Sequence
  Description of Artificial Sequence: Synthetic oligonucleotide
  Antisense strand to SEQ ID NO: 2144370
gagcugauuagauuaccac

SEQ ID NO: 2144372 - RNA, 19 nt, Artificial Sequence
  Description of Artificial Sequence: Synthetic oligonucleotide
  Sense strand starting at position 3597 of SEQ ID NO: 1882744
guuugucugcagcauauua

SEQ ID NO: 2144373 - RNA, 19 nt, Artificial Sequence
  Description of Artificial Sequence: Synthetic oligonucleotide
  Antisense strand to SEQ ID NO: 2144372
uaauaugcugcagacaaac

SEQ ID NO: 2144374 - RNA, 19 nt, Artificial Sequence
  Description of Artificial Sequence: Synthetic oligonucleotide
  Sense strand starting at position 3610 of SEQ ID NO: 1882744
auauuacaggcuuauuaug

SEQ ID NO: 2144375 - RNA, 19 nt, Artificial Sequence
  Description of Artificial Sequence: Synthetic oligonucleotide
  Antisense strand to SEQ ID NO: 2144374
cauaauaagccuguaauau

SEQ ID NO: 2144376 - RNA, 19 nt, Artificial Sequence
  Description of Artificial Sequence: Synthetic oligonucleotide
  Sense strand starting at position 3618 of SEQ ID NO: 1882744
ggcuuauuauguuuacaug

SEQ ID NO: 2144377 - RNA, 19 nt, Artificial Sequence
  Description of Artificial Sequence: Synthetic oligonucleotide
  Antisense strand to SEQ ID NO: 2144376
cauguaaacauaauaagcc

SEQ ID NO: 2144378 - RNA, 19 nt, Artificial Sequence
  Description of Artificial Sequence: Synthetic oligonucleotide
  Sense strand starting at position 3619 of SEQ ID NO: 1882744
gcuuauuauguuuacauga

SEQ ID NO: 2144379 - RNA, 19 nt, Artificial Sequence
  Description of Artificial Sequence: Synthetic oligonucleotide
  Antisense strand to SEQ ID NO: 2144378
ucauguaaacauaauaagc

SEQ ID NO: 2144380 - RNA, 19 nt, Artificial Sequence
  Description of Artificial Sequence: Synthetic oligonucleotide
  Sense strand starting at position 3808 of SEQ ID NO: 1882744
gaugaugggugcgcuucaa

SEQ ID NO: 2144381 - RNA, 19 nt, Artificial Sequence
  Description of Artificial Sequence: Synthetic oligonucleotide
  Antisense strand to SEQ ID NO: 2144380
uugaagcgcacccaucauc

SEQ ID NO: 2144382 - RNA, 19 nt, Artificial Sequence
  Description of Artificial Sequence: Synthetic oligonucleotide
  Sense strand starting at position 3812 of SEQ ID NO: 1882744
augggugcgcuucaacauu

SEQ ID NO: 2144383 - RNA, 19 nt, Artificial Sequence
  Description of Artificial Sequence: Synthetic oligonucleotide
  Antisense strand to SEQ ID NO: 2144382
aauguugaagcgcacccau

SEQ ID NO: 2144384 - RNA, 19 nt, Artificial Sequence
  Description of Artificial Sequence: Synthetic oligonucleotide
  Sense strand starting at position 3840 of SEQ ID NO: 1882744
uuauuuggguaccaauaau

SEQ ID NO: 2144385 - RNA, 19 nt, Artificial Sequence
  Description of Artificial Sequence: Synthetic oligonucleotide
  Antisense strand to SEQ ID NO: 2144384
auuauugguacccaaauaa

SEQ ID NO: 2144386 - RNA, 19 nt, Artificial Sequence
  Description of Artificial Sequence: Synthetic oligonucleotide
  Sense strand starting at position 3923 of SEQ ID NO: 1882744
guaacuguauaaguaucau

SEQ ID NO: 2144387 - RNA, 19 nt, Artificial Sequence
  Description of Artificial Sequence: Synthetic oligonucleotide
  Antisense strand to SEQ ID NO: 2144386
augauacuuauacaguuac

SEQ ID NO: 2144388 - RNA, 19 nt, Artificial Sequence
  Description of Artificial Sequence: Synthetic oligonucleotide
  Sense strand starting at position 60 of SEQ ID NO: 1882745
ugauuaaaccaugagugcu

SEQ ID NO: 2144389 - RNA, 19 nt, Artificial Sequence
  Description of Artificial Sequence: Synthetic oligonucleotide
  Antisense strand to SEQ ID NO: 2144388
agcacucaugguuuaauca

SEQ ID NO: 2144390 - RNA, 19 nt, Artificial Sequence
  Description of Artificial Sequence: Synthetic oligonucleotide
  Sense strand starting at position 589 of SEQ ID NO: 1882745
aggcuaagauauucuggua

SEQ ID NO: 2144391 - RNA, 19 nt, Artificial Sequence
  Description of Artificial Sequence: Synthetic oligonucleotide
  Antisense strand to SEQ ID NO: 2144390
uaccagaauaucuuagccu

SEQ ID NO: 2144392 - RNA, 19 nt, Artificial Sequence
  Description of Artificial Sequence: Synthetic oligonucleotide
  Sense strand starting at position 727 of SEQ ID NO: 1882745
ucacacuggucaucucuua

SEQ ID NO: 2144393 - RNA, 19 nt, Artificial Sequence
  Description of Artificial Sequence: Synthetic oligonucleotide
  Antisense strand to SEQ ID NO: 2144392
uaagagaugaccaguguga

SEQ ID NO: 2144394 - RNA, 19 nt, Artificial Sequence
  Description of Artificial Sequence: Synthetic oligonucleotide
  Sense strand starting at position 738 of SEQ ID NO: 1882745
aucucuuaccuggagguua

SEQ ID NO: 2144395 - RNA, 19 nt, Artificial Sequence
  Description of Artificial Sequence: Synthetic oligonucleotide
  Antisense strand to SEQ ID NO: 2144394
uaaccuccagguaagagau

SEQ ID NO: 2144396 - RNA, 19 nt, Artificial Sequence
  Description of Artificial Sequence: Synthetic oligonucleotide
  Sense strand starting at position 740 of SEQ ID NO: 1882745
cucuuaccuggagguuaua

SEQ ID NO: 2144397 - RNA, 19 nt, Artificial Sequence
  Description of Artificial Sequence: Synthetic oligonucleotide
  Antisense strand to SEQ ID NO: 2144396
uauaaccuccagguaagag

SEQ ID NO: 2144398 - RNA, 19 nt, Artificial Sequence
  Description of Artificial Sequence: Synthetic oligonucleotide
  Sense strand starting at position 896 of SEQ ID NO: 1882745
uccaaagcuugucccagaa

SEQ ID NO: 2144399 - RNA, 19 nt, Artificial Sequence
  Description of Artificial Sequence: Synthetic oligonucleotide
  Antisense strand to SEQ ID NO: 2144398
uucugggacaagcuuugga

SEQ ID NO: 2144400 - RNA, 19 nt, Artificial Sequence
  Description of Artificial Sequence: Synthetic oligonucleotide
  Sense strand starting at position 1129 of SEQ ID NO: 1882745
agucaaauuugucaagaac

SEQ ID NO: 2144401 - RNA, 19 nt, Artificial Sequence
  Description of Artificial Sequence: Synthetic oligonucleotide
  Antisense strand to SEQ ID NO: 2144400
guucuugacaaauuugacu

SEQ ID NO: 2144402 - RNA, 19 nt, Artificial Sequence
  Description of Artificial Sequence: Synthetic oligonucleotide
  Sense strand starting at position 1309 of SEQ ID NO: 1882745
guuauuagccuuuacgaca

SEQ ID NO: 2144403 - RNA, 19 nt, Artificial Sequence
  Description of Artificial Sequence: Synthetic oligonucleotide
  Antisense strand to SEQ ID NO: 2144402
ugucguaaaggcuaauaac

SEQ ID NO: 2144404 - RNA, 19 nt, Artificial Sequence
  Description of Artificial Sequence: Synthetic oligonucleotide
  Sense strand starting at position 1500 of SEQ ID NO: 1882745
ucacucucuccugggauga

SEQ ID NO: 2144405 - RNA, 19 nt, Artificial Sequence
  Description of Artificial Sequence: Synthetic oligonucleotide
  Antisense strand to SEQ ID NO: 2144404
ucaucccaggagagaguga

SEQ ID NO: 2144406 - RNA, 19 nt, Artificial Sequence
  Description of Artificial Sequence: Synthetic oligonucleotide
  Sense strand starting at position 1534 of SEQ ID NO: 1882745
agggcaaauguuuggcaaa

SEQ ID NO: 2144407 - RNA, 19 nt, Artificial Sequence
  Description of Artificial Sequence: Synthetic oligonucleotide
  Antisense strand to SEQ ID NO: 2144406
uuugccaaacauuugcccu

SEQ ID NO: 2144408 - RNA, 19 nt, Artificial Sequence
  Description of Artificial Sequence: Synthetic oligonucleotide
  Sense strand starting at position 1536 of SEQ ID NO: 1882745
ggcaaauguuuggcaaaua

SEQ ID NO: 2144409 - RNA, 19 nt, Artificial Sequence
  Description of Artificial Sequence: Synthetic oligonucleotide
  Antisense strand to SEQ ID NO: 2144408
uauuugccaaacauuugcc

SEQ ID NO: 2144410 - RNA, 19 nt, Artificial Sequence
  Description of Artificial Sequence: Synthetic oligonucleotide
  Sense strand starting at position 1595 of SEQ ID NO: 1882745
gguacauuugugcagugca

SEQ ID NO: 2144411 - RNA, 19 nt, Artificial Sequence
  Description of Artificial Sequence: Synthetic oligonucleotide
  Antisense strand to SEQ ID NO: 2144410
ugcacugcacaaauguacc

SEQ ID NO: 2144412 - RNA, 19 nt, Artificial Sequence
  Description of Artificial Sequence: Synthetic oligonucleotide
  Sense strand starting at position 1598 of SEQ ID NO: 1882745
acauuugugcagugcacaa

SEQ ID NO: 2144413 - RNA, 19 nt, Artificial Sequence
  Description of Artificial Sequence: Synthetic oligonucleotide
  Antisense strand to SEQ ID NO: 2144412
uugugcacugcacaaaugu

SEQ ID NO: 2144414 - RNA, 19 nt, Artificial Sequence
  Description of Artificial Sequence: Synthetic oligonucleotide
  Sense strand starting at position 1688 of SEQ ID NO: 1882745
ugaacuugucuagggaaua

SEQ ID NO: 2144415 - RNA, 19 nt, Artificial Sequence
  Description of Artificial Sequence: Synthetic oligonucleotide
  Antisense strand to SEQ ID NO: 2144414
uauucccuagacaaguuca

SEQ ID NO: 2144416 - RNA, 19 nt, Artificial Sequence
  Description of Artificial Sequence: Synthetic oligonucleotide
  Sense strand starting at position 1699 of SEQ ID NO: 1882745
agggaauauucccuaccuu

SEQ ID NO: 2144417 - RNA, 19 nt, Artificial Sequence
  Description of Artificial Sequence: Synthetic oligonucleotide
  Antisense strand to SEQ ID NO: 2144416
aagguagggaauauucccu

SEQ ID NO: 2144418 - RNA, 19 nt, Artificial Sequence
  Description of Artificial Sequence: Synthetic oligonucleotide
  Sense strand starting at position 1739 of SEQ ID NO: 1882745
accagaugugccuauuauu

SEQ ID NO: 2144419 - RNA, 19 nt, Artificial Sequence
  Description of Artificial Sequence: Synthetic oligonucleotide
  Antisense strand to SEQ ID NO: 2144418
aauaauaggcacaucuggu

SEQ ID NO: 2144420 - RNA, 19 nt, Artificial Sequence
  Description of Artificial Sequence: Synthetic oligonucleotide
  Sense strand starting at position 1769 of SEQ ID NO: 1882745
gguauugcacuauauccaa

SEQ ID NO: 2144421 - RNA, 19 nt, Artificial Sequence
  Description of Artificial Sequence: Synthetic oligonucleotide
  Antisense strand to SEQ ID NO: 2144420
uuggauauagugcaauacc

SEQ ID NO: 2144422 - RNA, 19 nt, Artificial Sequence
  Description of Artificial Sequence: Synthetic oligonucleotide
  Sense strand starting at position 1802 of SEQ ID NO: 1882745
ucagcaugccuugauaaau

SEQ ID NO: 2144423 - RNA, 19 nt, Artificial Sequence
  Description of Artificial Sequence: Synthetic oligonucleotide
  Antisense strand to SEQ ID NO: 2144422
auuuaucaaggcaugcuga

SEQ ID NO: 2144424 - RNA, 19 nt, Artificial Sequence
  Description of Artificial Sequence: Synthetic oligonucleotide
  Sense strand starting at position 2032 of SEQ ID NO: 1882745
gagcauaucuuuccaggau

SEQ ID NO: 2144425 - RNA, 19 nt, Artificial Sequence
  Description of Artificial Sequence: Synthetic oligonucleotide
  Antisense strand to SEQ ID NO: 2144424
auccuggaaagauaugcuc

SEQ ID NO: 2144426 - RNA, 19 nt, Artificial Sequence
  Description of Artificial Sequence: Synthetic oligonucleotide
  Sense strand starting at position 2128 of SEQ ID NO: 1882745
agacaugugauaugcugau

SEQ ID NO: 2144427 - RNA, 19 nt, Artificial Sequence
  Description of Artificial Sequence: Synthetic oligonucleotide
  Antisense strand to SEQ ID NO: 2144426
aucagcauaucacaugucu

SEQ ID NO: 2144428 - RNA, 19 nt, Artificial Sequence
  Description of Artificial Sequence: Synthetic oligonucleotide
  Sense strand starting at position 2397 of SEQ ID NO: 1882745
ugggcaagacuuuguaaca

SEQ ID NO: 2144429 - RNA, 19 nt, Artificial Sequence
  Description of Artificial Sequence: Synthetic oligonucleotide
  Antisense strand to SEQ ID NO: 2144428
uguuacaaagucuugccca

SEQ ID NO: 2144430 - RNA, 19 nt, Artificial Sequence
  Description of Artificial Sequence: Synthetic oligonucleotide
  Sense strand starting at position 2398 of SEQ ID NO: 1882745
gggcaagacuuuguaacau

SEQ ID NO: 2144431 - RNA, 19 nt, Artificial Sequence
  Description of Artificial Sequence: Synthetic oligonucleotide
  Antisense strand to SEQ ID NO: 2144430
auguuacaaagucuugccc

SEQ ID NO: 2144432 - RNA, 19 nt, Artificial Sequence
  Description of Artificial Sequence: Synthetic oligonucleotide
  Sense strand starting at position 2452 of SEQ ID NO: 1882745
augucacuuccacgauuaa

SEQ ID NO: 2144433 - RNA, 19 nt, Artificial Sequence
  Description of Artificial Sequence: Synthetic oligonucleotide
  Antisense strand to SEQ ID NO: 2144432
uuaaucguggaagugacau

SEQ ID NO: 2144434 - RNA, 19 nt, Artificial Sequence
  Description of Artificial Sequence: Synthetic oligonucleotide
  Sense strand starting at position 2453 of SEQ ID NO: 1882745
ugucacuuccacgauuaag

SEQ ID NO: 2144435 - RNA, 19 nt, Artificial Sequence
  Description of Artificial Sequence: Synthetic oligonucleotide
  Antisense strand to SEQ ID NO: 2144434
cuuaaucguggaagugaca

SEQ ID NO: 2144436 - RNA, 19 nt, Artificial Sequence
  Description of Artificial Sequence: Synthetic oligonucleotide
  Sense strand starting at position 2471 of SEQ ID NO: 1882745
guuacauaagauugugauu

SEQ ID NO: 2144437 - RNA, 19 nt, Artificial Sequence
  Description of Artificial Sequence: Synthetic oligonucleotide
  Antisense strand to SEQ ID NO: 2144436
aaucacaaucuuauguaac

SEQ ID NO: 2144438 - RNA, 19 nt, Artificial Sequence
  Description of Artificial Sequence: Synthetic oligonucleotide
  Sense strand starting at position 2607 of SEQ ID NO: 1882745
aacugagguccucaaugca

SEQ ID NO: 2144439 - RNA, 19 nt, Artificial Sequence
  Description of Artificial Sequence: Synthetic oligonucleotide
  Antisense strand to SEQ ID NO: 2144438
ugcauugaggaccucaguu

SEQ ID NO: 2144440 - RNA, 19 nt, Artificial Sequence
  Description of Artificial Sequence: Synthetic oligonucleotide
  Sense strand starting at position 2699 of SEQ ID NO: 1882745
agaaaucagcccugaccaa

SEQ ID NO: 2144441 - RNA, 19 nt, Artificial Sequence
  Description of Artificial Sequence: Synthetic oligonucleotide
  Antisense strand to SEQ ID NO: 2144440
uuggucagggcugauuucu

SEQ ID NO: 2144442 - RNA, 19 nt, Artificial Sequence
  Description of Artificial Sequence: Synthetic oligonucleotide
  Sense strand starting at position 2738 of SEQ ID NO: 1882745
gagagauauugagacaaug

SEQ ID NO: 2144443 - RNA, 19 nt, Artificial Sequence
  Description of Artificial Sequence: Synthetic oligonucleotide
  Antisense strand to SEQ ID NO: 2144442
cauugucucaauaucucuc

SEQ ID NO: 2144444 - RNA, 19 nt, Artificial Sequence
  Description of Artificial Sequence: Synthetic oligonucleotide
  Sense strand starting at position 3037 of SEQ ID NO: 1882745
ucacuucuccgugugcuga

SEQ ID NO: 2144445 - RNA, 19 nt, Artificial Sequence
  Description of Artificial Sequence: Synthetic oligonucleotide
  Antisense strand to SEQ ID NO: 2144444
ucagcacacggagaaguga

SEQ ID NO: 2144446 - RNA, 19 nt, Artificial Sequence
  Description of Artificial Sequence: Synthetic oligonucleotide
  Sense strand starting at position 3045 of SEQ ID NO: 1882745
ccgugugcugacuuccauu

SEQ ID NO: 2144447 - RNA, 19 nt, Artificial Sequence
  Description of Artificial Sequence: Synthetic oligonucleotide
  Antisense strand to SEQ ID NO: 2144446
aauggaagucagcacacgg

SEQ ID NO: 2144448 - RNA, 19 nt, Artificial Sequence
  Description of Artificial Sequence: Synthetic oligonucleotide
  Sense strand starting at position 3081 of SEQ ID NO: 1882745
aucugacugggcuaaguau

SEQ ID NO: 2144449 - RNA, 19 nt, Artificial Sequence
  Description of Artificial Sequence: Synthetic oligonucleotide
  Antisense strand to SEQ ID NO: 2144448
auacuuagcccagucagau

SEQ ID NO: 2144450 - RNA, 19 nt, Artificial Sequence
  Description of Artificial Sequence: Synthetic oligonucleotide
  Sense strand starting at position 3211 of SEQ ID NO: 1882745
auaauaugaaggugcagaa

SEQ ID NO: 2144451 - RNA, 19 nt, Artificial Sequence
  Description of Artificial Sequence: Synthetic oligonucleotide
  Antisense strand to SEQ ID NO: 2144450
uucugcaccuucauauuau

SEQ ID NO: 2144452 - RNA, 19 nt, Artificial Sequence
  Description of Artificial Sequence: Synthetic oligonucleotide
  Sense strand starting at position 3223 of SEQ ID NO: 1882745
ugcagaacuaaaggguaua

SEQ ID NO: 2144453 - RNA, 19 nt, Artificial Sequence
  Description of Artificial Sequence: Synthetic oligonucleotide
  Antisense strand to SEQ ID NO: 2144452
uauacccuuuaguucugca

SEQ ID NO: 2144454 - RNA, 19 nt, Artificial Sequence
  Description of Artificial Sequence: Synthetic oligonucleotide
  Sense strand starting at position 3306 of SEQ ID NO: 1882745
ccuuguuaauggccaauga

SEQ ID NO: 2144455 - RNA, 19 nt, Artificial Sequence
  Description of Artificial Sequence: Synthetic oligonucleotide
  Antisense strand to SEQ ID NO: 2144454
ucauuggccauuaacaagg

SEQ ID NO: 2144456 - RNA, 19 nt, Artificial Sequence
  Description of Artificial Sequence: Synthetic oligonucleotide
  Sense strand starting at position 3322 of SEQ ID NO: 1882745
ugacaacuaucuguagcaa

SEQ ID NO: 2144457 - RNA, 19 nt, Artificial Sequence
  Description of Artificial Sequence: Synthetic oligonucleotide
  Antisense strand to SEQ ID NO: 2144456
uugcuacagauaguuguca

SEQ ID NO: 2144458 - RNA, 19 nt, Artificial Sequence
  Description of Artificial Sequence: Synthetic oligonucleotide
  Sense strand starting at position 3396 of SEQ ID NO: 1882745
cgugaauggccagaguuga

SEQ ID NO: 2144459 - RNA, 19 nt, Artificial Sequence
  Description of Artificial Sequence: Synthetic oligonucleotide
  Antisense strand to SEQ ID NO: 2144458
ucaacucuggccauucacg

SEQ ID NO: 2144460 - RNA, 19 nt, Artificial Sequence
  Description of Artificial Sequence: Synthetic oligonucleotide
  Sense strand starting at position 3641 of SEQ ID NO: 1882745
acaugacagucagauuuau

SEQ ID NO: 2144461 - RNA, 19 nt, Artificial Sequence
  Description of Artificial Sequence: Synthetic oligonucleotide
  Antisense strand to SEQ ID NO: 2144460
auaaaucugacugucaugu

SEQ ID NO: 2144462 - RNA, 19 nt, Artificial Sequence
  Description of Artificial Sequence: Synthetic oligonucleotide
  Sense strand starting at position 3821 of SEQ ID NO: 1882745
uggauucugugauuccaca

SEQ ID NO: 2144463 - RNA, 19 nt, Artificial Sequence
  Description of Artificial Sequence: Synthetic oligonucleotide
  Antisense strand to SEQ ID NO: 2144462
uguggaaucacagaaucca

SEQ ID NO: 2144464 - RNA, 19 nt, Artificial Sequence
  Description of Artificial Sequence: Synthetic oligonucleotide
  Sense strand starting at position 3834 of SEQ ID NO: 1882745
uccacagcucaguauagua

SEQ ID NO: 2144465 - RNA, 19 nt, Artificial Sequence
  Description of Artificial Sequence: Synthetic oligonucleotide
  Antisense strand to SEQ ID NO: 2144464
uacuauacugagcugugga

SEQ ID NO: 2144466 - RNA, 19 nt, Artificial Sequence
  Description of Artificial Sequence: Synthetic oligonucleotide
  Sense strand starting at position 3868 of SEQ ID NO: 1882745
acuguaaaccaugauacgu

SEQ ID NO: 2144467 - RNA, 19 nt, Artificial Sequence
  Description of Artificial Sequence: Synthetic oligonucleotide
  Antisense strand to SEQ ID NO: 2144466
acguaucaugguuuacagu

SEQ ID NO: 2144468 - RNA, 19 nt, Artificial Sequence
  Description of Artificial Sequence: Synthetic oligonucleotide
  Sense strand starting at position 555 of SEQ ID NO: 1882746
ggaauaucuuacgcuguaa

SEQ ID NO: 2144469 - RNA, 19 nt, Artificial Sequence
  Description of Artificial Sequence: Synthetic oligonucleotide
  Antisense strand to SEQ ID NO: 2144468
uuacagcguaagauauucc

SEQ ID NO: 2144470 - RNA, 19 nt, Artificial Sequence
  Description of Artificial Sequence: Synthetic oligonucleotide
  Sense strand starting at position 631 of SEQ ID NO: 1882746
ugcagaucuuaaucucaga

SEQ ID NO: 2144471 - RNA, 19 nt, Artificial Sequence
  Description of Artificial Sequence: Synthetic oligonucleotide
  Antisense strand to SEQ ID NO: 2144470
ucugagauuaagaucugca

SEQ ID NO: 2144472 - RNA, 19 nt, Artificial Sequence
  Description of Artificial Sequence: Synthetic oligonucleotide
  Sense strand starting at position 663 of SEQ ID NO: 1882746
agcuuuguggauugaggua

SEQ ID NO: 2144473 - RNA, 19 nt, Artificial Sequence
  Description of Artificial Sequence: Synthetic oligonucleotide
  Antisense strand to SEQ ID NO: 2144472
uaccucaauccacaaagcu

SEQ ID NO: 2144474 - RNA, 19 nt, Artificial Sequence
  Description of Artificial Sequence: Synthetic oligonucleotide
  Sense strand starting at position 668 of SEQ ID NO: 1882746
uguggauugagguauaauc

SEQ ID NO: 2144475 - RNA, 19 nt, Artificial Sequence
  Description of Artificial Sequence: Synthetic oligonucleotide
  Antisense strand to SEQ ID NO: 2144474
gauuauaccucaauccaca

SEQ ID NO: 2144476 - RNA, 19 nt, Artificial Sequence
  Description of Artificial Sequence: Synthetic oligonucleotide
  Sense strand starting at position 729 of SEQ ID NO: 1882746
gcuaauaagguaugaggua

SEQ ID NO: 2144477 - RNA, 19 nt, Artificial Sequence
  Description of Artificial Sequence: Synthetic oligonucleotide
  Antisense strand to SEQ ID NO: 2144476
uaccucauaccuuauuagc

SEQ ID NO: 2144478 - RNA, 19 nt, Artificial Sequence
  Description of Artificial Sequence: Synthetic oligonucleotide
  Sense strand starting at position 741 of SEQ ID NO: 1882746
ugagguaugccucacagag

SEQ ID NO: 2144479 - RNA, 19 nt, Artificial Sequence
  Description of Artificial Sequence: Synthetic oligonucleotide
  Antisense strand to SEQ ID NO: 2144478
cucugugaggcauaccuca

SEQ ID NO: 2144480 - RNA, 19 nt, Artificial Sequence
  Description of Artificial Sequence: Synthetic oligonucleotide
  Sense strand starting at position 807 of SEQ ID NO: 1882746
cacacagagugccugauau

SEQ ID NO: 2144481 - RNA, 19 nt, Artificial Sequence
  Description of Artificial Sequence: Synthetic oligonucleotide
  Antisense strand to SEQ ID NO: 2144480
auaucaggcacucugugug

SEQ ID NO: 2144482 - RNA, 19 nt, Artificial Sequence
  Description of Artificial Sequence: Synthetic oligonucleotide
  Sense strand starting at position 809 of SEQ ID NO: 1882746
cacagagugccugauauag

SEQ ID NO: 2144483 - RNA, 19 nt, Artificial Sequence
  Description of Artificial Sequence: Synthetic oligonucleotide
  Antisense strand to SEQ ID NO: 2144482
cuauaucaggcacucugug

SEQ ID NO: 2144484 - RNA, 19 nt, Artificial Sequence
  Description of Artificial Sequence: Synthetic oligonucleotide
  Sense strand starting at position 1153 of SEQ ID NO: 1882746
auaauacguguggguauuu

SEQ ID NO: 2144485 - RNA, 19 nt, Artificial Sequence
  Description of Artificial Sequence: Synthetic oligonucleotide
  Antisense strand to SEQ ID NO: 2144484
aaauacccacacguauuau

SEQ ID NO: 2144486 - RNA, 19 nt, Artificial Sequence
  Description of Artificial Sequence: Synthetic oligonucleotide
  Sense strand starting at position 1158 of SEQ ID NO: 1882746
acguguggguauuuguuua

SEQ ID NO: 2144487 - RNA, 19 nt, Artificial Sequence
  Description of Artificial Sequence: Synthetic oligonucleotide
  Antisense strand to SEQ ID NO: 2144486
uaaacaaauacccacacgu

SEQ ID NO: 2144488 - RNA, 19 nt, Artificial Sequence
  Description of Artificial Sequence: Synthetic oligonucleotide
  Sense strand starting at position 1226 of SEQ ID NO: 1882746
guggaaugugcugggagau

SEQ ID NO: 2144489 - RNA, 19 nt, Artificial Sequence
  Description of Artificial Sequence: Synthetic oligonucleotide
  Antisense strand to SEQ ID NO: 2144488
aucucccagcacauuccac

SEQ ID NO: 2144490 - RNA, 19 nt, Artificial Sequence
  Description of Artificial Sequence: Synthetic oligonucleotide
  Sense strand starting at position 1227 of SEQ ID NO: 1882746
uggaaugugcugggagaua
